United States Patent Application Publication US 2018/0305689 A1 - sequence listing, part 139

SEQ ID NO: 1910332 - RNA, 19 nt, Artificial Sequence
  Description of Artificial Sequence: Synthetic oligonucleotide
  Sense strand starting at position 3916 of SEQ ID NO: 1879481
agaaucaaauuuggaauga

SEQ ID NO: 1910333 - RNA, 19 nt, Artificial Sequence
  Description of Artificial Sequence: Synthetic oligonucleotide
  Antisense strand to SEQ ID NO: 1910332
ucauuccaaauuugauucu

SEQ ID NO: 1910334 - RNA, 19 nt, Artificial Sequence
  Description of Artificial Sequence: Synthetic oligonucleotide
  Sense strand starting at position 187 of SEQ ID NO: 1879482
gugggcuugagccauagau

SEQ ID NO: 1910335 - RNA, 19 nt, Artificial Sequence
  Description of Artificial Sequence: Synthetic oligonucleotide
  Antisense strand to SEQ ID NO: 1910334
aucuauggcucaagcccac

SEQ ID NO: 1910336 - RNA, 19 nt, Artificial Sequence
  Description of Artificial Sequence: Synthetic oligonucleotide
  Sense strand starting at position 189 of SEQ ID NO: 1879482
gggcuugagccauagauaa

SEQ ID NO: 1910337 - RNA, 19 nt, Artificial Sequence
  Description of Artificial Sequence: Synthetic oligonucleotide
  Antisense strand to SEQ ID NO: 1910336
uuaucuauggcucaagccc

SEQ ID NO: 1910338 - RNA, 19 nt, Artificial Sequence
  Description of Artificial Sequence: Synthetic oligonucleotide
  Sense strand starting at position 277 of SEQ ID NO: 1879482
ugccacuuggcauaaucau

SEQ ID NO: 1910339 - RNA, 19 nt, Artificial Sequence
  Description of Artificial Sequence: Synthetic oligonucleotide
  Antisense strand to SEQ ID NO: 1910338
augauuaugccaaguggca

SEQ ID NO: 1910340 - RNA, 19 nt, Artificial Sequence
  Description of Artificial Sequence: Synthetic oligonucleotide
  Sense strand starting at position 316 of SEQ ID NO: 1879482
ucacaagugugaucucauu

SEQ ID NO: 1910341 - RNA, 19 nt, Artificial Sequence
  Description of Artificial Sequence: Synthetic oligonucleotide
  Antisense strand to SEQ ID NO: 1910340
aaugagaucacacuuguga

SEQ ID NO: 1910342 - RNA, 19 nt, Artificial Sequence
  Description of Artificial Sequence: Synthetic oligonucleotide
  Sense strand starting at position 409 of SEQ ID NO: 1879482
ccaucuugcgaauaguaag

SEQ ID NO: 1910343 - RNA, 19 nt, Artificial Sequence
  Description of Artificial Sequence: Synthetic oligonucleotide
  Antisense strand to SEQ ID NO: 1910342
cuuacuauucgcaagaugg

SEQ ID NO: 1910344 - RNA, 19 nt, Artificial Sequence
  Description of Artificial Sequence: Synthetic oligonucleotide
  Sense strand starting at position 665 of SEQ ID NO: 1879482
gcaccaugcuccuuaaaga

SEQ ID NO: 1910345 - RNA, 19 nt, Artificial Sequence
  Description of Artificial Sequence: Synthetic oligonucleotide
  Antisense strand to SEQ ID NO: 1910344
ucuuuaaggagcauggugc

SEQ ID NO: 1910346 - RNA, 19 nt, Artificial Sequence
  Description of Artificial Sequence: Synthetic oligonucleotide
  Sense strand starting at position 696 of SEQ ID NO: 1879482
gucucaagucuuugaugag

SEQ ID NO: 1910347 - RNA, 19 nt, Artificial Sequence
  Description of Artificial Sequence: Synthetic oligonucleotide
  Antisense strand to SEQ ID NO: 1910346
cucaucaaagacuugagac

SEQ ID NO: 1910348 - RNA, 19 nt, Artificial Sequence
  Description of Artificial Sequence: Synthetic oligonucleotide
  Sense strand starting at position 715 of SEQ ID NO: 1879482
aaaguagaauuacaggauu

SEQ ID NO: 1910349 - RNA, 19 nt, Artificial Sequence
  Description of Artificial Sequence: Synthetic oligonucleotide
  Antisense strand to SEQ ID NO: 1910348
aauccuguaauucuacuuu

SEQ ID NO: 1910350 - RNA, 19 nt, Artificial Sequence
  Description of Artificial Sequence: Synthetic oligonucleotide
  Sense strand starting at position 1291 of SEQ ID NO: 1879482
cuuaguucuuagcugagga

SEQ ID NO: 1910351 - RNA, 19 nt, Artificial Sequence
  Description of Artificial Sequence: Synthetic oligonucleotide
  Antisense strand to SEQ ID NO: 1910350
uccucagcuaagaacuaag

SEQ ID NO: 1910352 - RNA, 19 nt, Artificial Sequence
  Description of Artificial Sequence: Synthetic oligonucleotide
  Sense strand starting at position 1292 of SEQ ID NO: 1879482
uuaguucuuagcugaggag

SEQ ID NO: 1910353 - RNA, 19 nt, Artificial Sequence
  Description of Artificial Sequence: Synthetic oligonucleotide
  Antisense strand to SEQ ID NO: 1910352
cuccucagcuaagaacuaa

SEQ ID NO: 1910354 - RNA, 19 nt, Artificial Sequence
  Description of Artificial Sequence: Synthetic oligonucleotide
  Sense strand starting at position 1293 of SEQ ID NO: 1879482
uaguucuuagcugaggaga

SEQ ID NO: 1910355 - RNA, 19 nt, Artificial Sequence
  Description of Artificial Sequence: Synthetic oligonucleotide
  Antisense strand to SEQ ID NO: 1910354
ucuccucagcuaagaacua

SEQ ID NO: 1910356 - RNA, 19 nt, Artificial Sequence
  Description of Artificial Sequence: Synthetic oligonucleotide
  Sense strand starting at position 1360 of SEQ ID NO: 1879482
ugcaaucacuuucuggaaa

SEQ ID NO: 1910357 - RNA, 19 nt, Artificial Sequence
  Description of Artificial Sequence: Synthetic oligonucleotide
  Antisense strand to SEQ ID NO: 1910356
uuuccagaaagugauugca

SEQ ID NO: 1910358 - RNA, 19 nt, Artificial Sequence
  Description of Artificial Sequence: Synthetic oligonucleotide
  Sense strand starting at position 1436 of SEQ ID NO: 1879482
cuauaagacuuugugcuca

SEQ ID NO: 1910359 - RNA, 19 nt, Artificial Sequence
  Description of Artificial Sequence: Synthetic oligonucleotide
  Antisense strand to SEQ ID NO: 1910358
ugagcacaaagucuuauag

SEQ ID NO: 1910360 - RNA, 19 nt, Artificial Sequence
  Description of Artificial Sequence: Synthetic oligonucleotide
  Sense strand starting at position 1441 of SEQ ID NO: 1879482
agacuuugugcucaccuuu

SEQ ID NO: 1910361 - RNA, 19 nt, Artificial Sequence
  Description of Artificial Sequence: Synthetic oligonucleotide
  Antisense strand to SEQ ID NO: 1910360
aaaggugagcacaaagucu

SEQ ID NO: 1910362 - RNA, 19 nt, Artificial Sequence
  Description of Artificial Sequence: Synthetic oligonucleotide
  Sense strand starting at position 1581 of SEQ ID NO: 1879482
cugggauacagcuggaauc

SEQ ID NO: 1910363 - RNA, 19 nt, Artificial Sequence
  Description of Artificial Sequence: Synthetic oligonucleotide
  Antisense strand to SEQ ID NO: 1910362
gauuccagcuguaucccag

SEQ ID NO: 1910364 - RNA, 19 nt, Artificial Sequence
  Description of Artificial Sequence: Synthetic oligonucleotide
  Sense strand starting at position 1638 of SEQ ID NO: 1879482
cggcaagaguucuugacac

SEQ ID NO: 1910365 - RNA, 19 nt, Artificial Sequence
  Description of Artificial Sequence: Synthetic oligonucleotide
  Antisense strand to SEQ ID NO: 1910364
gugucaagaacucuugccg

SEQ ID NO: 1910366 - RNA, 19 nt, Artificial Sequence
  Description of Artificial Sequence: Synthetic oligonucleotide
  Sense strand starting at position 1640 of SEQ ID NO: 1879482
gcaagaguucuugacacuu

SEQ ID NO: 1910367 - RNA, 19 nt, Artificial Sequence
  Description of Artificial Sequence: Synthetic oligonucleotide
  Antisense strand to SEQ ID NO: 1910366
aagugucaagaacucuugc

SEQ ID NO: 1910368 - RNA, 19 nt, Artificial Sequence
  Description of Artificial Sequence: Synthetic oligonucleotide
  Sense strand starting at position 1692 of SEQ ID NO: 1879482
cguucugugguugucugaa

SEQ ID NO: 1910369 - RNA, 19 nt, Artificial Sequence
  Description of Artificial Sequence: Synthetic oligonucleotide
  Antisense strand to SEQ ID NO: 1910368
uucagacaaccacagaacg

SEQ ID NO: 1910370 - RNA, 19 nt, Artificial Sequence
  Description of Artificial Sequence: Synthetic oligonucleotide
  Sense strand starting at position 1745 of SEQ ID NO: 1879482
agcgccgugcuccuuuaaa

SEQ ID NO: 1910371 - RNA, 19 nt, Artificial Sequence
  Description of Artificial Sequence: Synthetic oligonucleotide
  Antisense strand to SEQ ID NO: 1910370
uuuaaaggagcacggcgcu

SEQ ID NO: 1910372 - RNA, 19 nt, Artificial Sequence
  Description of Artificial Sequence: Synthetic oligonucleotide
  Sense strand starting at position 1747 of SEQ ID NO: 1879482
cgccgugcuccuuuaaaga

SEQ ID NO: 1910373 - RNA, 19 nt, Artificial Sequence
  Description of Artificial Sequence: Synthetic oligonucleotide
  Antisense strand to SEQ ID NO: 1910372
ucuuuaaaggagcacggcg

SEQ ID NO: 1910374 - RNA, 19 nt, Artificial Sequence
  Description of Artificial Sequence: Synthetic oligonucleotide
  Sense strand starting at position 1859 of SEQ ID NO: 1879482
gcuggacuucucuacugga

SEQ ID NO: 1910375 - RNA, 19 nt, Artificial Sequence
  Description of Artificial Sequence: Synthetic oligonucleotide
  Antisense strand to SEQ ID NO: 1910374
uccaguagagaaguccagc

SEQ ID NO: 1910376 - RNA, 19 nt, Artificial Sequence
  Description of Artificial Sequence: Synthetic oligonucleotide
  Sense strand starting at position 2293 of SEQ ID NO: 1879482
cccacaucuguuggaggaa

SEQ ID NO: 1910377 - RNA, 19 nt, Artificial Sequence
  Description of Artificial Sequence: Synthetic oligonucleotide
  Antisense strand to SEQ ID NO: 1910376
uuccuccaacagauguggg

SEQ ID NO: 1910378 - RNA, 19 nt, Artificial Sequence
  Description of Artificial Sequence: Synthetic oligonucleotide
  Sense strand starting at position 2439 of SEQ ID NO: 1879482
cgaggcucgcuggaagaaa

SEQ ID NO: 1910379 - RNA, 19 nt, Artificial Sequence
  Description of Artificial Sequence: Synthetic oligonucleotide
  Antisense strand to SEQ ID NO: 1910378
uuucuuccagcgagccucg

SEQ ID NO: 1910380 - RNA, 19 nt, Artificial Sequence
  Description of Artificial Sequence: Synthetic oligonucleotide
  Sense strand starting at position 2541 of SEQ ID NO: 1879482
ccuugaugggucugcccua

SEQ ID NO: 1910381 - RNA, 19 nt, Artificial Sequence
  Description of Artificial Sequence: Synthetic oligonucleotide
  Antisense strand to SEQ ID NO: 1910380
uagggcagacccaucaagg

SEQ ID NO: 1910382 - RNA, 19 nt, Artificial Sequence
  Description of Artificial Sequence: Synthetic oligonucleotide
  Sense strand starting at position 2573 of SEQ ID NO: 1879482
ccggaagaucugcgauuca

SEQ ID NO: 1910383 - RNA, 19 nt, Artificial Sequence
  Description of Artificial Sequence: Synthetic oligonucleotide
  Antisense strand to SEQ ID NO: 1910382
ugaaucgcagaucuuccgg

SEQ ID NO: 1910384 - RNA, 19 nt, Artificial Sequence
  Description of Artificial Sequence: Synthetic oligonucleotide
  Sense strand starting at position 2584 of SEQ ID NO: 1879482
gcgauucagcgagaugaaa

SEQ ID NO: 1910385 - RNA, 19 nt, Artificial Sequence
  Description of Artificial Sequence: Synthetic oligonucleotide
  Antisense strand to SEQ ID NO: 1910384
uuucaucucgcugaaucgc

SEQ ID NO: 1910386 - RNA, 19 nt, Artificial Sequence
  Description of Artificial Sequence: Synthetic oligonucleotide
  Sense strand starting at position 2739 of SEQ ID NO: 1879482
aggagauggcugugucaaa

SEQ ID NO: 1910387 - RNA, 19 nt, Artificial Sequence
  Description of Artificial Sequence: Synthetic oligonucleotide
  Antisense strand to SEQ ID NO: 1910386
uuugacacagccaucuccu

SEQ ID NO: 1910388 - RNA, 19 nt, Artificial Sequence
  Description of Artificial Sequence: Synthetic oligonucleotide
  Sense strand starting at position 2740 of SEQ ID NO: 1879482
ggagauggcugugucaaau

SEQ ID NO: 1910389 - RNA, 19 nt, Artificial Sequence
  Description of Artificial Sequence: Synthetic oligonucleotide
  Antisense strand to SEQ ID NO: 1910388
auuugacacagccaucucc

SEQ ID NO: 1910390 - RNA, 19 nt, Artificial Sequence
  Description of Artificial Sequence: Synthetic oligonucleotide
  Sense strand starting at position 2746 of SEQ ID NO: 1879482
ggcugugucaaauaugaag

SEQ ID NO: 1910391 - RNA, 19 nt, Artificial Sequence
  Description of Artificial Sequence: Synthetic oligonucleotide
  Antisense strand to SEQ ID NO: 1910390
cuucauauuugacacagcc

SEQ ID NO: 1910392 - RNA, 19 nt, Artificial Sequence
  Description of Artificial Sequence: Synthetic oligonucleotide
  Sense strand starting at position 2787 of SEQ ID NO: 1879482
agcccuugagucugggaga

SEQ ID NO: 1910393 - RNA, 19 nt, Artificial Sequence
  Description of Artificial Sequence: Synthetic oligonucleotide
  Antisense strand to SEQ ID NO: 1910392
ucucccagacucaagggcu

SEQ ID NO: 1910394 - RNA, 19 nt, Artificial Sequence
  Description of Artificial Sequence: Synthetic oligonucleotide
  Sense strand starting at position 2962 of SEQ ID NO: 1879482
ugaugugcuccuuaaauga

SEQ ID NO: 1910395 - RNA, 19 nt, Artificial Sequence
  Description of Artificial Sequence: Synthetic oligonucleotide
  Antisense strand to SEQ ID NO: 1910394
ucauuuaaggagcacauca

SEQ ID NO: 1910396 - RNA, 19 nt, Artificial Sequence
  Description of Artificial Sequence: Synthetic oligonucleotide
  Sense strand starting at position 3012 of SEQ ID NO: 1879482
cucauaaaguguuuaauac

SEQ ID NO: 1910397 - RNA, 19 nt, Artificial Sequence
  Description of Artificial Sequence: Synthetic oligonucleotide
  Antisense strand to SEQ ID NO: 1910396
guauuaaacacuuuaugag

SEQ ID NO: 1910398 - RNA, 19 nt, Artificial Sequence
  Description of Artificial Sequence: Synthetic oligonucleotide
  Sense strand starting at position 3067 of SEQ ID NO: 1879482
cuauuaaugucugcuagca

SEQ ID NO: 1910399 - RNA, 19 nt, Artificial Sequence
  Description of Artificial Sequence: Synthetic oligonucleotide
  Antisense strand to SEQ ID NO: 1910398
ugcuagcagacauuaauag

SEQ ID NO: 1910400 - RNA, 19 nt, Artificial Sequence
  Description of Artificial Sequence: Synthetic oligonucleotide
  Sense strand starting at position 3238 of SEQ ID NO: 1879482
acagauggcugguucuaag

SEQ ID NO: 1910401 - RNA, 19 nt, Artificial Sequence
  Description of Artificial Sequence: Synthetic oligonucleotide
  Antisense strand to SEQ ID NO: 1910400
cuuagaaccagccaucugu

SEQ ID NO: 1910402 - RNA, 19 nt, Artificial Sequence
  Description of Artificial Sequence: Synthetic oligonucleotide
  Sense strand starting at position 3248 of SEQ ID NO: 1879482
gguucuaagagguggguau

SEQ ID NO: 1910403 - RNA, 19 nt, Artificial Sequence
  Description of Artificial Sequence: Synthetic oligonucleotide
  Antisense strand to SEQ ID NO: 1910402
auacccaccucuuagaacc

SEQ ID NO: 1910404 - RNA, 19 nt, Artificial Sequence
  Description of Artificial Sequence: Synthetic oligonucleotide
  Sense strand starting at position 3277 of SEQ ID NO: 1879482
gacaguggucuagguggau

SEQ ID NO: 1910405 - RNA, 19 nt, Artificial Sequence
  Description of Artificial Sequence: Synthetic oligonucleotide
  Antisense strand to SEQ ID NO: 1910404
auccaccuagaccacuguc

SEQ ID NO: 1910406 - RNA, 19 nt, Artificial Sequence
  Description of Artificial Sequence: Synthetic oligonucleotide
  Sense strand starting at position 3587 of SEQ ID NO: 1879482
uuacucauguccucuaagu

SEQ ID NO: 1910407 - RNA, 19 nt, Artificial Sequence
  Description of Artificial Sequence: Synthetic oligonucleotide
  Antisense strand to SEQ ID NO: 1910406
acuuagaggacaugaguaa

SEQ ID NO: 1910408 - RNA, 19 nt, Artificial Sequence
  Description of Artificial Sequence: Synthetic oligonucleotide
  Sense strand starting at position 3647 of SEQ ID NO: 1879482
ccaugaaugccugguggga

SEQ ID NO: 1910409 - RNA, 19 nt, Artificial Sequence
  Description of Artificial Sequence: Synthetic oligonucleotide
  Antisense strand to SEQ ID NO: 1910408
ucccaccaggcauucaugg

SEQ ID NO: 1910410 - RNA, 19 nt, Artificial Sequence
  Description of Artificial Sequence: Synthetic oligonucleotide
  Sense strand starting at position 3877 of SEQ ID NO: 1879482
uguagugguuuccuaucaa

SEQ ID NO: 1910411 - RNA, 19 nt, Artificial Sequence
  Description of Artificial Sequence: Synthetic oligonucleotide
  Antisense strand to SEQ ID NO: 1910410
uugauaggaaaccacuaca

SEQ ID NO: 1910412 - RNA, 19 nt, Artificial Sequence
  Description of Artificial Sequence: Synthetic oligonucleotide
  Sense strand starting at position 3974 of SEQ ID NO: 1879482
agcuguguccuugagguag

SEQ ID NO: 1910413 - RNA, 19 nt, Artificial Sequence
  Description of Artificial Sequence: Synthetic oligonucleotide
  Antisense strand to SEQ ID NO: 1910412
cuaccucaaggacacagcu

SEQ ID NO: 1910414 - RNA, 19 nt, Artificial Sequence
  Description of Artificial Sequence: Synthetic oligonucleotide
  Sense strand starting at position 365 of SEQ ID NO: 1879483
gcaauuuaguuuccgagac

SEQ ID NO: 1910415 - RNA, 19 nt, Artificial Sequence
  Description of Artificial Sequence: Synthetic oligonucleotide
  Antisense strand to SEQ ID NO: 1910414
gucucggaaacuaaauugc

SEQ ID NO: 1910416 - RNA, 19 nt, Artificial Sequence
  Description of Artificial Sequence: Synthetic oligonucleotide
  Sense strand starting at position 367 of SEQ ID NO: 1879483
aauuuaguuuccgagacau

SEQ ID NO: 1910417 - RNA, 19 nt, Artificial Sequence
  Description of Artificial Sequence: Synthetic oligonucleotide
  Antisense strand to SEQ ID NO: 1910416
augucucggaaacuaaauu

SEQ ID NO: 1910418 - RNA, 19 nt, Artificial Sequence
  Description of Artificial Sequence: Synthetic oligonucleotide
  Sense strand starting at position 369 of SEQ ID NO: 1879483
uuuaguuuccgagacauug

SEQ ID NO: 1910419 - RNA, 19 nt, Artificial Sequence
  Description of Artificial Sequence: Synthetic oligonucleotide
  Antisense strand to SEQ ID NO: 1910418
caaugucucggaaacuaaa

SEQ ID NO: 1910420 - RNA, 19 nt, Artificial Sequence
  Description of Artificial Sequence: Synthetic oligonucleotide
  Sense strand starting at position 377 of SEQ ID NO: 1879483
ccgagacauuguuucuuac

SEQ ID NO: 1910421 - RNA, 19 nt, Artificial Sequence
  Description of Artificial Sequence: Synthetic oligonucleotide
  Antisense strand to SEQ ID NO: 1910420
guaagaaacaaugucucgg

SEQ ID NO: 1910422 - RNA, 19 nt, Artificial Sequence
  Description of Artificial Sequence: Synthetic oligonucleotide
  Sense strand starting at position 401 of SEQ ID NO: 1879483
uucugcuagguguacauua

SEQ ID NO: 1910423 - RNA, 19 nt, Artificial Sequence
  Description of Artificial Sequence: Synthetic oligonucleotide
  Antisense strand to SEQ ID NO: 1910422
uaauguacaccuagcagaa

SEQ ID NO: 1910424 - RNA, 19 nt, Artificial Sequence
  Description of Artificial Sequence: Synthetic oligonucleotide
  Sense strand starting at position 403 of SEQ ID NO: 1879483
cugcuagguguacauuauu

SEQ ID NO: 1910425 - RNA, 19 nt, Artificial Sequence
  Description of Artificial Sequence: Synthetic oligonucleotide
  Antisense strand to SEQ ID NO: 1910424
aauaauguacaccuagcag

SEQ ID NO: 1910426 - RNA, 19 nt, Artificial Sequence
  Description of Artificial Sequence: Synthetic oligonucleotide
  Sense strand starting at position 480 of SEQ ID NO: 1879483
guuacaaugagucauuguu

SEQ ID NO: 1910427 - RNA, 19 nt, Artificial Sequence
  Description of Artificial Sequence: Synthetic oligonucleotide
  Antisense strand to SEQ ID NO: 1910426
aacaaugacucauuguaac

SEQ ID NO: 1910428 - RNA, 19 nt, Artificial Sequence
  Description of Artificial Sequence: Synthetic oligonucleotide
  Sense strand starting at position 490 of SEQ ID NO: 1879483
gucauuguuacacagggau

SEQ ID NO: 1910429 - RNA, 19 nt, Artificial Sequence
  Description of Artificial Sequence: Synthetic oligonucleotide
  Antisense strand to SEQ ID NO: 1910428
aucccuguguaacaaugac

SEQ ID NO: 1910430 - RNA, 19 nt, Artificial Sequence
  Description of Artificial Sequence: Synthetic oligonucleotide
  Sense strand starting at position 493 of SEQ ID NO: 1879483
auuguuacacagggauuau

SEQ ID NO: 1910431 - RNA, 19 nt, Artificial Sequence
  Description of Artificial Sequence: Synthetic oligonucleotide
  Antisense strand to SEQ ID NO: 1910430
auaaucccuguguaacaau

SEQ ID NO: 1910432 - RNA, 19 nt, Artificial Sequence
  Description of Artificial Sequence: Synthetic oligonucleotide
  Sense strand starting at position 852 of SEQ ID NO: 1879483
uagggagacuuugccucua

SEQ ID NO: 1910433 - RNA, 19 nt, Artificial Sequence
  Description of Artificial Sequence: Synthetic oligonucleotide
  Antisense strand to SEQ ID NO: 1910432
uagaggcaaagucucccua

SEQ ID NO: 1910434 - RNA, 19 nt, Artificial Sequence
  Description of Artificial Sequence: Synthetic oligonucleotide
  Sense strand starting at position 854 of SEQ ID NO: 1879483
gggagacuuugccucuaca

SEQ ID NO: 1910435 - RNA, 19 nt, Artificial Sequence
  Description of Artificial Sequence: Synthetic oligonucleotide
  Antisense strand to SEQ ID NO: 1910434
uguagaggcaaagucuccc

SEQ ID NO: 1910436 - RNA, 19 nt, Artificial Sequence
  Description of Artificial Sequence: Synthetic oligonucleotide
  Sense strand starting at position 1010 of SEQ ID NO: 1879483
uacagaaucguauacaguu

SEQ ID NO: 1910437 - RNA, 19 nt, Artificial Sequence
  Description of Artificial Sequence: Synthetic oligonucleotide
  Antisense strand to SEQ ID NO: 1910436
aacuguauacgauucugua

SEQ ID NO: 1910438 - RNA, 19 nt, Artificial Sequence
  Description of Artificial Sequence: Synthetic oligonucleotide
  Sense strand starting at position 1087 of SEQ ID NO: 1879483
cuuucuaagccuggaacuu

SEQ ID NO: 1910439 - RNA, 19 nt, Artificial Sequence
  Description of Artificial Sequence: Synthetic oligonucleotide
  Antisense strand to SEQ ID NO: 1910438
aaguuccaggcuuagaaag

SEQ ID NO: 1910440 - RNA, 19 nt, Artificial Sequence
  Description of Artificial Sequence: Synthetic oligonucleotide
  Sense strand starting at position 1240 of SEQ ID NO: 1879483
gucagugguccucaacucu

SEQ ID NO: 1910441 - RNA, 19 nt, Artificial Sequence
  Description of Artificial Sequence: Synthetic oligonucleotide
  Antisense strand to SEQ ID NO: 1910440
agaguugaggaccacugac

SEQ ID NO: 1910442 - RNA, 19 nt, Artificial Sequence
  Description of Artificial Sequence: Synthetic oligonucleotide
  Sense strand starting at position 2231 of SEQ ID NO: 1879483
guuugaguuucgaccggac

SEQ ID NO: 1910443 - RNA, 19 nt, Artificial Sequence
  Description of Artificial Sequence: Synthetic oligonucleotide
  Antisense strand to SEQ ID NO: 1910442
guccggucgaaacucaaac

SEQ ID NO: 1910444 - RNA, 19 nt, Artificial Sequence
  Description of Artificial Sequence: Synthetic oligonucleotide
  Sense strand starting at position 2463 of SEQ ID NO: 1879483
cuguuccacucuuugggaa

SEQ ID NO: 1910445 - RNA, 19 nt, Artificial Sequence
  Description of Artificial Sequence: Synthetic oligonucleotide
  Antisense strand to SEQ ID NO: 1910444
uucccaaagaguggaacag

SEQ ID NO: 1910446 - RNA, 19 nt, Artificial Sequence
  Description of Artificial Sequence: Synthetic oligonucleotide
  Sense strand starting at position 2464 of SEQ ID NO: 1879483
uguuccacucuuugggaau

SEQ ID NO: 1910447 - RNA, 19 nt, Artificial Sequence
  Description of Artificial Sequence: Synthetic oligonucleotide
  Antisense strand to SEQ ID NO: 1910446
auucccaaagaguggaaca

SEQ ID NO: 1910448 - RNA, 19 nt, Artificial Sequence
  Description of Artificial Sequence: Synthetic oligonucleotide
  Sense strand starting at position 2570 of SEQ ID NO: 1879483
gauagcagugaguggucaa

SEQ ID NO: 1910449 - RNA, 19 nt, Artificial Sequence
  Description of Artificial Sequence: Synthetic oligonucleotide
  Antisense strand to SEQ ID NO: 1910448
uugaccacucacugcuauc

SEQ ID NO: 1910450 - RNA, 19 nt, Artificial Sequence
  Description of Artificial Sequence: Synthetic oligonucleotide
  Sense strand starting at position 2571 of SEQ ID NO: 1879483
auagcagugaguggucaaa

SEQ ID NO: 1910451 - RNA, 19 nt, Artificial Sequence
  Description of Artificial Sequence: Synthetic oligonucleotide
  Antisense strand to SEQ ID NO: 1910450
uuugaccacucacugcuau

SEQ ID NO: 1910452 - RNA, 19 nt, Artificial Sequence
  Description of Artificial Sequence: Synthetic oligonucleotide
  Sense strand starting at position 2600 of SEQ ID NO: 1879483
guagaauaauugcuggaug

SEQ ID NO: 1910453 - RNA, 19 nt, Artificial Sequence
  Description of Artificial Sequence: Synthetic oligonucleotide
  Antisense strand to SEQ ID NO: 1910452
cauccagcaauuauucuac

SEQ ID NO: 1910454 - RNA, 19 nt, Artificial Sequence
  Description of Artificial Sequence: Synthetic oligonucleotide
  Sense strand starting at position 2626 of SEQ ID NO: 1879483
uuuagauagguuggccauu

SEQ ID NO: 1910455 - RNA, 19 nt, Artificial Sequence
  Description of Artificial Sequence: Synthetic oligonucleotide
  Antisense strand to SEQ ID NO: 1910454
aauggccaaccuaucuaaa

SEQ ID NO: 1910456 - RNA, 19 nt, Artificial Sequence
  Description of Artificial Sequence: Synthetic oligonucleotide
  Sense strand starting at position 2627 of SEQ ID NO: 1879483
uuagauagguuggccauua

SEQ ID NO: 1910457 - RNA, 19 nt, Artificial Sequence
  Description of Artificial Sequence: Synthetic oligonucleotide
  Antisense strand to SEQ ID NO: 1910456
uaauggccaaccuaucuaa

SEQ ID NO: 1910458 - RNA, 19 nt, Artificial Sequence
  Description of Artificial Sequence: Synthetic oligonucleotide
  Sense strand starting at position 2644 of SEQ ID NO: 1879483
uagagagcucucuguaaag

SEQ ID NO: 1910459 - RNA, 19 nt, Artificial Sequence
  Description of Artificial Sequence: Synthetic oligonucleotide
  Antisense strand to SEQ ID NO: 1910458
cuuuacagagagcucucua

SEQ ID NO: 1910460 - RNA, 19 nt, Artificial Sequence
  Description of Artificial Sequence: Synthetic oligonucleotide
  Sense strand starting at position 2795 of SEQ ID NO: 1879483
uggucagugugguugaaga

SEQ ID NO: 1910461 - RNA, 19 nt, Artificial Sequence
  Description of Artificial Sequence: Synthetic oligonucleotide
  Antisense strand to SEQ ID NO: 1910460
ucuucaaccacacugacca

SEQ ID NO: 1910462 - RNA, 19 nt, Artificial Sequence
  Description of Artificial Sequence: Synthetic oligonucleotide
  Sense strand starting at position 2797 of SEQ ID NO: 1879483
gucagugugguugaagagu

SEQ ID NO: 1910463 - RNA, 19 nt, Artificial Sequence
  Description of Artificial Sequence: Synthetic oligonucleotide
  Antisense strand to SEQ ID NO: 1910462
acucuucaaccacacugac

SEQ ID NO: 1910464 - RNA, 19 nt, Artificial Sequence
  Description of Artificial Sequence: Synthetic oligonucleotide
  Sense strand starting at position 2838 of SEQ ID NO: 1879483
gaugaugucggauagguag

SEQ ID NO: 1910465 - RNA, 19 nt, Artificial Sequence
  Description of Artificial Sequence: Synthetic oligonucleotide
  Antisense strand to SEQ ID NO: 1910464
cuaccuauccgacaucauc

SEQ ID NO: 1910466 - RNA, 19 nt, Artificial Sequence
  Description of Artificial Sequence: Synthetic oligonucleotide
  Sense strand starting at position 2869 of SEQ ID NO: 1879483
ccucuuaggucuuuauaga

SEQ ID NO: 1910467 - RNA, 19 nt, Artificial Sequence
  Description of Artificial Sequence: Synthetic oligonucleotide
  Antisense strand to SEQ ID NO: 1910466
ucuauaaagaccuaagagg

SEQ ID NO: 1910468 - RNA, 19 nt, Artificial Sequence
  Description of Artificial Sequence: Synthetic oligonucleotide
  Sense strand starting at position 2870 of SEQ ID NO: 1879483
cucuuaggucuuuauagac

SEQ ID NO: 1910469 - RNA, 19 nt, Artificial Sequence
  Description of Artificial Sequence: Synthetic oligonucleotide
  Antisense strand to SEQ ID NO: 1910468
gucuauaaagaccuaagag

SEQ ID NO: 1910470 - RNA, 19 nt, Artificial Sequence
  Description of Artificial Sequence: Synthetic oligonucleotide
  Sense strand starting at position 2877 of SEQ ID NO: 1879483
gucuuuauagaccacggua

SEQ ID NO: 1910471 - RNA, 19 nt, Artificial Sequence
  Description of Artificial Sequence: Synthetic oligonucleotide
  Antisense strand to SEQ ID NO: 1910470
uaccguggucuauaaagac

SEQ ID NO: 1910472 - RNA, 19 nt, Artificial Sequence
  Description of Artificial Sequence: Synthetic oligonucleotide
  Sense strand starting at position 2879 of SEQ ID NO: 1879483
cuuuauagaccacgguaaa

SEQ ID NO: 1910473 - RNA, 19 nt, Artificial Sequence
  Description of Artificial Sequence: Synthetic oligonucleotide
  Antisense strand to SEQ ID NO: 1910472
uuuaccguggucuauaaag

SEQ ID NO: 1910474 - RNA, 19 nt, Artificial Sequence
  Description of Artificial Sequence: Synthetic oligonucleotide
  Sense strand starting at position 3242 of SEQ ID NO: 1879483
gaagaaaugugaucucuuc

SEQ ID NO: 1910475 - RNA, 19 nt, Artificial Sequence
  Description of Artificial Sequence: Synthetic oligonucleotide
  Antisense strand to SEQ ID NO: 1910474
gaagagaucacauuucuuc

SEQ ID NO: 1910476 - RNA, 19 nt, Artificial Sequence
  Description of Artificial Sequence: Synthetic oligonucleotide
  Sense strand starting at position 3333 of SEQ ID NO: 1879483
ugcaguugucaagacacga

SEQ ID NO: 1910477 - RNA, 19 nt, Artificial Sequence
  Description of Artificial Sequence: Synthetic oligonucleotide
  Antisense strand to SEQ ID NO: 1910476
ucgugucuugacaacugca

SEQ ID NO: 1910478 - RNA, 19 nt, Artificial Sequence
  Description of Artificial Sequence: Synthetic oligonucleotide
  Sense strand starting at position 3698 of SEQ ID NO: 1879483
gagaaagauuuaggaaacu

SEQ ID NO: 1910479 - RNA, 19 nt, Artificial Sequence
  Description of Artificial Sequence: Synthetic oligonucleotide
  Antisense strand to SEQ ID NO: 1910478
aguuuccuaaaucuuucuc

SEQ ID NO: 1910480 - RNA, 19 nt, Artificial Sequence
  Description of Artificial Sequence: Synthetic oligonucleotide
  Sense strand starting at position 3711 of SEQ ID NO: 1879483
gaaacuguuggaggcagaa

SEQ ID NO: 1910481 - RNA, 19 nt, Artificial Sequence
  Description of Artificial Sequence: Synthetic oligonucleotide
  Antisense strand to SEQ ID NO: 1910480
uucugccuccaacaguuuc

SEQ ID NO: 1910482 - RNA, 19 nt, Artificial Sequence
  Description of Artificial Sequence: Synthetic oligonucleotide
  Sense strand starting at position 3733 of SEQ ID NO: 1879483
acuggacuuugaucguuga

SEQ ID NO: 1910483 - RNA, 19 nt, Artificial Sequence
  Description of Artificial Sequence: Synthetic oligonucleotide
  Antisense strand to SEQ ID NO: 1910482
ucaacgaucaaaguccagu

SEQ ID NO: 1910484 - RNA, 19 nt, Artificial Sequence
  Description of Artificial Sequence: Synthetic oligonucleotide
  Sense strand starting at position 3734 of SEQ ID NO: 1879483
cuggacuuugaucguugau

SEQ ID NO: 1910485 - RNA, 19 nt, Artificial Sequence
  Description of Artificial Sequence: Synthetic oligonucleotide
  Antisense strand to SEQ ID NO: 1910484
aucaacgaucaaaguccag

SEQ ID NO: 1910486 - RNA, 19 nt, Artificial Sequence
  Description of Artificial Sequence: Synthetic oligonucleotide
  Sense strand starting at position 3736 of SEQ ID NO: 1879483
ggacuuugaucguugauag

SEQ ID NO: 1910487 - RNA, 19 nt, Artificial Sequence
  Description of Artificial Sequence: Synthetic oligonucleotide
  Antisense strand to SEQ ID NO: 1910486
cuaucaacgaucaaagucc

SEQ ID NO: 1910488 - RNA, 19 nt, Artificial Sequence
  Description of Artificial Sequence: Synthetic oligonucleotide
  Sense strand starting at position 3737 of SEQ ID NO: 1879483
gacuuugaucguugauagg

SEQ ID NO: 1910489 - RNA, 19 nt, Artificial Sequence
  Description of Artificial Sequence: Synthetic oligonucleotide
  Antisense strand to SEQ ID NO: 1910488
ccuaucaacgaucaaaguc

SEQ ID NO: 1910490 - RNA, 19 nt, Artificial Sequence
  Description of Artificial Sequence: Synthetic oligonucleotide
  Sense strand starting at position 3863 of SEQ ID NO: 1879483
gagauagauuuguaagcag

SEQ ID NO: 1910491 - RNA, 19 nt, Artificial Sequence
  Description of Artificial Sequence: Synthetic oligonucleotide
  Antisense strand to SEQ ID NO: 1910490
cugcuuacaaaucuaucuc

SEQ ID NO: 1910492 - RNA, 19 nt, Artificial Sequence
  Description of Artificial Sequence: Synthetic oligonucleotide
  Sense strand starting at position 3970 of SEQ ID NO: 1879483
agaggaggcuuccuacaua

SEQ ID NO: 1910493 - RNA, 19 nt, Artificial Sequence
  Description of Artificial Sequence: Synthetic oligonucleotide
  Antisense strand to SEQ ID NO: 1910492
uauguaggaagccuccucu

SEQ ID NO: 1910494 - RNA, 19 nt, Artificial Sequence
  Description of Artificial Sequence: Synthetic oligonucleotide
  Sense strand starting at position 2824 of SEQ ID NO: 1879484
auaggagaggcgugugaaa

SEQ ID NO: 1910495 - RNA, 19 nt, Artificial Sequence
  Description of Artificial Sequence: Synthetic oligonucleotide
  Antisense strand to SEQ ID NO: 1910494
uuucacacgccucuccuau

SEQ ID NO: 1910496 - RNA, 19 nt, Artificial Sequence
  Description of Artificial Sequence: Synthetic oligonucleotide
  Sense strand starting at position 2831 of SEQ ID NO: 1879484
aggcgugugaaagggaauu

SEQ ID NO: 1910497 - RNA, 19 nt, Artificial Sequence
  Description of Artificial Sequence: Synthetic oligonucleotide
  Antisense strand to SEQ ID NO: 1910496
aauucccuuucacacgccu

SEQ ID NO: 1910498 - RNA, 19 nt, Artificial Sequence
  Description of Artificial Sequence: Synthetic oligonucleotide
  Sense strand starting at position 2937 of SEQ ID NO: 1879484
agggcuaucauccgagaug

SEQ ID NO: 1910499 - RNA, 19 nt, Artificial Sequence
  Description of Artificial Sequence: Synthetic oligonucleotide
  Antisense strand to SEQ ID NO: 1910498
caucucggaugauagcccu

SEQ ID NO: 1910500 - RNA, 19 nt, Artificial Sequence
  Description of Artificial Sequence: Synthetic oligonucleotide
  Sense strand starting at position 2940 of SEQ ID NO: 1879484
gcuaucauccgagauggga

SEQ ID NO: 1910501 - RNA, 19 nt, Artificial Sequence
  Description of Artificial Sequence: Synthetic oligonucleotide
  Antisense strand to SEQ ID NO: 1910500
ucccaucucggaugauagc

SEQ ID NO: 1910502 - RNA, 19 nt, Artificial Sequence
  Description of Artificial Sequence: Synthetic oligonucleotide
  Sense strand starting at position 2961 of SEQ ID NO: 1879484
acagacacuugagcauaua

SEQ ID NO: 1910503 - RNA, 19 nt, Artificial Sequence
  Description of Artificial Sequence: Synthetic oligonucleotide
  Antisense strand to SEQ ID NO: 1910502
uauaugcucaagugucugu

SEQ ID NO: 1910504 - RNA, 19 nt, Artificial Sequence
  Description of Artificial Sequence: Synthetic oligonucleotide
  Sense strand starting at position 2972 of SEQ ID NO: 1879484
agcauauagugggaaggau

SEQ ID NO: 1910505 - RNA, 19 nt, Artificial Sequence
  Description of Artificial Sequence: Synthetic oligonucleotide
  Antisense strand to SEQ ID NO: 1910504
auccuucccacuauaugcu

SEQ ID NO: 1910506 - RNA, 19 nt, Artificial Sequence
  Description of Artificial Sequence: Synthetic oligonucleotide
  Sense strand starting at position 2982 of SEQ ID NO: 1879484
gggaaggaugcgugcagua

SEQ ID NO: 1910507 - RNA, 19 nt, Artificial Sequence
  Description of Artificial Sequence: Synthetic oligonucleotide
  Antisense strand to SEQ ID NO: 1910506
uacugcacgcauccuuccc

SEQ ID NO: 1910508 - RNA, 19 nt, Artificial Sequence
  Description of Artificial Sequence: Synthetic oligonucleotide
  Sense strand starting at position 3017 of SEQ ID NO: 1879484
guacuagugcacuaggcua

SEQ ID NO: 1910509 - RNA, 19 nt, Artificial Sequence
  Description of Artificial Sequence: Synthetic oligonucleotide
  Antisense strand to SEQ ID NO: 1910508
uagccuagugcacuaguac

SEQ ID NO: 1910510 - RNA, 19 nt, Artificial Sequence
  Description of Artificial Sequence: Synthetic oligonucleotide
  Sense strand starting at position 3028 of SEQ ID NO: 1879484
cuaggcuaggucggagauu

SEQ ID NO: 1910511 - RNA, 19 nt, Artificial Sequence
  Description of Artificial Sequence: Synthetic oligonucleotide
  Antisense strand to SEQ ID NO: 1910510
aaucuccgaccuagccuag

SEQ ID NO: 1910512 - RNA, 19 nt, Artificial Sequence
  Description of Artificial Sequence: Synthetic oligonucleotide
  Sense strand starting at position 3029 of SEQ ID NO: 1879484
uaggcuaggucggagauuu

SEQ ID NO: 1910513 - RNA, 19 nt, Artificial Sequence
  Description of Artificial Sequence: Synthetic oligonucleotide
  Antisense strand to SEQ ID NO: 1910512
aaaucuccgaccuagccua

SEQ ID NO: 1910514 - RNA, 19 nt, Artificial Sequence
  Description of Artificial Sequence: Synthetic oligonucleotide
  Sense strand starting at position 3055 of SEQ ID NO: 1879484
cgagguuucagugaaggau

SEQ ID NO: 1910515 - RNA, 19 nt, Artificial Sequence
  Description of Artificial Sequence: Synthetic oligonucleotide
  Antisense strand to SEQ ID NO: 1910514
auccuucacugaaaccucg

SEQ ID NO: 1910516 - RNA, 19 nt, Artificial Sequence
  Description of Artificial Sequence: Synthetic oligonucleotide
  Sense strand starting at position 3207 of SEQ ID NO: 1879484
ggcauugaguaggauuuaa

SEQ ID NO: 1910517 - RNA, 19 nt, Artificial Sequence
  Description of Artificial Sequence: Synthetic oligonucleotide
  Antisense strand to SEQ ID NO: 1910516
uuaaauccuacucaaugcc

SEQ ID NO: 1910518 - RNA, 19 nt, Artificial Sequence
  Description of Artificial Sequence: Synthetic oligonucleotide
  Sense strand starting at position 3410 of SEQ ID NO: 1879484
gggaguacuggucaucgau

SEQ ID NO: 1910519 - RNA, 19 nt, Artificial Sequence
  Description of Artificial Sequence: Synthetic oligonucleotide
  Antisense strand to SEQ ID NO: 1910518
aucgaugaccaguacuccc

SEQ ID NO: 1910520 - RNA, 19 nt, Artificial Sequence
  Description of Artificial Sequence: Synthetic oligonucleotide
  Sense strand starting at position 3412 of SEQ ID NO: 1879484
gaguacuggucaucgauaa

SEQ ID NO: 1910521 - RNA, 19 nt, Artificial Sequence
  Description of Artificial Sequence: Synthetic oligonucleotide
  Antisense strand to SEQ ID NO: 1910520
uuaucgaugaccaguacuc

SEQ ID NO: 1910522 - RNA, 19 nt, Artificial Sequence
  Description of Artificial Sequence: Synthetic oligonucleotide
  Sense strand starting at position 3413 of SEQ ID NO: 1879484
aguacuggucaucgauaag

SEQ ID NO: 1910523 - RNA, 19 nt, Artificial Sequence
  Description of Artificial Sequence: Synthetic oligonucleotide
  Antisense strand to SEQ ID NO: 1910522
cuuaucgaugaccaguacu

SEQ ID NO: 1910524 - RNA, 19 nt, Artificial Sequence
  Description of Artificial Sequence: Synthetic oligonucleotide
  Sense strand starting at position 3424 of SEQ ID NO: 1879484
ucgauaaggucagaaauga

SEQ ID NO: 1910525 - RNA, 19 nt, Artificial Sequence
  Description of Artificial Sequence: Synthetic oligonucleotide
  Antisense strand to SEQ ID NO: 1910524
ucauuucugaccuuaucga

SEQ ID NO: 1910526 - RNA, 19 nt, Artificial Sequence
  Description of Artificial Sequence: Synthetic oligonucleotide
  Sense strand starting at position 3462 of SEQ ID NO: 1879484
aagagaugguagucauacu

SEQ ID NO: 1910527 - RNA, 19 nt, Artificial Sequence
  Description of Artificial Sequence: Synthetic oligonucleotide
  Antisense strand to SEQ ID NO: 1910526
aguaugacuaccaucucuu

SEQ ID NO: 1910528 - RNA, 19 nt, Artificial Sequence
  Description of Artificial Sequence: Synthetic oligonucleotide
  Sense strand starting at position 3534 of SEQ ID NO: 1879484
ggaggagucuugaggcuaa

SEQ ID NO: 1910529 - RNA, 19 nt, Artificial Sequence
  Description of Artificial Sequence: Synthetic oligonucleotide
  Antisense strand to SEQ ID NO: 1910528
uuagccucaagacuccucc

SEQ ID NO: 1910530 - RNA, 19 nt, Artificial Sequence
  Description of Artificial Sequence: Synthetic oligonucleotide
  Sense strand starting at position 3547 of SEQ ID NO: 1879484
ggcuaauggcuuugaucag

SEQ ID NO: 1910531 - RNA, 19 nt, Artificial Sequence
  Description of Artificial Sequence: Synthetic oligonucleotide
  Antisense strand to SEQ ID NO: 1910530
cugaucaaagccauuagcc

SEQ ID NO: 1910532 - RNA, 19 nt, Artificial Sequence
  Description of Artificial Sequence: Synthetic oligonucleotide
  Sense strand starting at position 3553 of SEQ ID NO: 1879484
uggcuuugaucagagaccu

SEQ ID NO: 1910533 - RNA, 19 nt, Artificial Sequence
  Description of Artificial Sequence: Synthetic oligonucleotide
  Antisense strand to SEQ ID NO: 1910532
aggucucugaucaaagcca

SEQ ID NO: 1910534 - RNA, 19 nt, Artificial Sequence
  Description of Artificial Sequence: Synthetic oligonucleotide
  Sense strand starting at position 3583 of SEQ ID NO: 1879484
ggagaagacuaugccuguu

SEQ ID NO: 1910535 - RNA, 19 nt, Artificial Sequence
  Description of Artificial Sequence: Synthetic oligonucleotide
  Antisense strand to SEQ ID NO: 1910534
aacaggcauagucuucucc

SEQ ID NO: 1910536 - RNA, 19 nt, Artificial Sequence
  Description of Artificial Sequence: Synthetic oligonucleotide
  Sense strand starting at position 3585 of SEQ ID NO: 1879484
agaagacuaugccuguuua

SEQ ID NO: 1910537 - RNA, 19 nt, Artificial Sequence
  Description of Artificial Sequence: Synthetic oligonucleotide
  Antisense strand to SEQ ID NO: 1910536
uaaacaggcauagucuucu

SEQ ID NO: 1910538 - RNA, 19 nt, Artificial Sequence
  Description of Artificial Sequence: Synthetic oligonucleotide
  Sense strand starting at position 3586 of SEQ ID NO: 1879484
gaagacuaugccuguuuag

SEQ ID NO: 1910539 - RNA, 19 nt, Artificial Sequence
  Description of Artificial Sequence: Synthetic oligonucleotide
  Antisense strand to SEQ ID NO: 1910538
cuaaacaggcauagucuuc

SEQ ID NO: 1910540 - RNA, 19 nt, Artificial Sequence
  Description of Artificial Sequence: Synthetic oligonucleotide
  Sense strand starting at position 3589 of SEQ ID NO: 1879484
gacuaugccuguuuaguuu

SEQ ID NO: 1910541 - RNA, 19 nt, Artificial Sequence
  Description of Artificial Sequence: Synthetic oligonucleotide
  Antisense strand to SEQ ID NO: 1910540
aaacuaaacaggcauaguc

SEQ ID NO: 1910542 - RNA, 19 nt, Artificial Sequence
  Description of Artificial Sequence: Synthetic oligonucleotide
  Sense strand starting at position 3736 of SEQ ID NO: 1879484
uggucagauucguugggua

SEQ ID NO: 1910543 - RNA, 19 nt, Artificial Sequence
  Description of Artificial Sequence: Synthetic oligonucleotide
  Antisense strand to SEQ ID NO: 1910542
uacccaacgaaucugacca

SEQ ID NO: 1910544 - RNA, 19 nt, Artificial Sequence
  Description of Artificial Sequence: Synthetic oligonucleotide
  Sense strand starting at position 3737 of SEQ ID NO: 1879484
ggucagauucguuggguag

SEQ ID NO: 1910545 - RNA, 19 nt, Artificial Sequence
  Description of Artificial Sequence: Synthetic oligonucleotide
  Antisense strand to SEQ ID NO: 1910544
cuacccaacgaaucugacc

SEQ ID NO: 1910546 - RNA, 19 nt, Artificial Sequence
  Description of Artificial Sequence: Synthetic oligonucleotide
  Sense strand starting at position 3738 of SEQ ID NO: 1879484
gucagauucguuggguagu

SEQ ID NO: 1910547 - RNA, 19 nt, Artificial Sequence
  Description of Artificial Sequence: Synthetic oligonucleotide
  Antisense strand to SEQ ID NO: 1910546
acuacccaacgaaucugac

SEQ ID NO: 1910548 - RNA, 19 nt, Artificial Sequence
  Description of Artificial Sequence: Synthetic oligonucleotide
  Sense strand starting at position 3807 of SEQ ID NO: 1879484
aucucaaauuauugggauu

SEQ ID NO: 1910549 - RNA, 19 nt, Artificial Sequence
  Description of Artificial Sequence: Synthetic oligonucleotide
  Antisense strand to SEQ ID NO: 1910548
aaucccaauaauuugagau

SEQ ID NO: 1910550 - RNA, 19 nt, Artificial Sequence
  Description of Artificial Sequence: Synthetic oligonucleotide
  Sense strand starting at position 3813 of SEQ ID NO: 1879484
aauuauugggauugcguua

SEQ ID NO: 1910551 - RNA, 19 nt, Artificial Sequence
  Description of Artificial Sequence: Synthetic oligonucleotide
  Antisense strand to SEQ ID NO: 1910550
uaacgcaaucccaauaauu

SEQ ID NO: 1910552 - RNA, 19 nt, Artificial Sequence
  Description of Artificial Sequence: Synthetic oligonucleotide
  Sense strand starting at position 3818 of SEQ ID NO: 1879484
uugggauugcguuauuagg

SEQ ID NO: 1910553 - RNA, 19 nt, Artificial Sequence
  Description of Artificial Sequence: Synthetic oligonucleotide
  Antisense strand to SEQ ID NO: 1910552
ccuaauaacgcaaucccaa

SEQ ID NO: 1910554 - RNA, 19 nt, Artificial Sequence
  Description of Artificial Sequence: Synthetic oligonucleotide
  Sense strand starting at position 3820 of SEQ ID NO: 1879484
gggauugcguuauuaggua

SEQ ID NO: 1910555 - RNA, 19 nt, Artificial Sequence
  Description of Artificial Sequence: Synthetic oligonucleotide
  Antisense strand to SEQ ID NO: 1910554
uaccuaauaacgcaauccc

SEQ ID NO: 1910556 - RNA, 19 nt, Artificial Sequence
  Description of Artificial Sequence: Synthetic oligonucleotide
  Sense strand starting at position 3824 of SEQ ID NO: 1879484
uugcguuauuagguagaga

SEQ ID NO: 1910557 - RNA, 19 nt, Artificial Sequence
  Description of Artificial Sequence: Synthetic oligonucleotide
  Antisense strand to SEQ ID NO: 1910556
ucucuaccuaauaacgcaa

SEQ ID NO: 1910558 - RNA, 19 nt, Artificial Sequence
  Description of Artificial Sequence: Synthetic oligonucleotide
  Sense strand starting at position 3825 of SEQ ID NO: 1879484
ugcguuauuagguagagau

SEQ ID NO: 1910559 - RNA, 19 nt, Artificial Sequence
  Description of Artificial Sequence: Synthetic oligonucleotide
  Antisense strand to SEQ ID NO: 1910558
aucucuaccuaauaacgca

SEQ ID NO: 1910560 - RNA, 19 nt, Artificial Sequence
  Description of Artificial Sequence: Synthetic oligonucleotide
  Sense strand starting at position 3827 of SEQ ID NO: 1879484
cguuauuagguagagauac

SEQ ID NO: 1910561 - RNA, 19 nt, Artificial Sequence
  Description of Artificial Sequence: Synthetic oligonucleotide
  Antisense strand to SEQ ID NO: 1910560
guaucucuaccuaauaacg

SEQ ID NO: 1910562 - RNA, 19 nt, Artificial Sequence
  Description of Artificial Sequence: Synthetic oligonucleotide
  Sense strand starting at position 3844 of SEQ ID NO: 1879484
acgaauuugguucguucuu

SEQ ID NO: 1910563 - RNA, 19 nt, Artificial Sequence
  Description of Artificial Sequence: Synthetic oligonucleotide
  Antisense strand to SEQ ID NO: 1910562
aagaacgaaccaaauucgu

SEQ ID NO: 1910564 - RNA, 19 nt, Artificial Sequence
  Description of Artificial Sequence: Synthetic oligonucleotide
  Sense strand starting at position 3845 of SEQ ID NO: 1879484
cgaauuugguucguucuua

SEQ ID NO: 1910565 - RNA, 19 nt, Artificial Sequence
  Description of Artificial Sequence: Synthetic oligonucleotide
  Antisense strand to SEQ ID NO: 1910564
uaagaacgaaccaaauucg

SEQ ID NO: 1910566 - RNA, 19 nt, Artificial Sequence
  Description of Artificial Sequence: Synthetic oligonucleotide
  Sense strand starting at position 3846 of SEQ ID NO: 1879484
gaauuugguucguucuuaa

SEQ ID NO: 1910567 - RNA, 19 nt, Artificial Sequence
  Description of Artificial Sequence: Synthetic oligonucleotide
  Antisense strand to SEQ ID NO: 1910566
uuaagaacgaaccaaauuc

SEQ ID NO: 1910568 - RNA, 19 nt, Artificial Sequence
  Description of Artificial Sequence: Synthetic oligonucleotide
  Sense strand starting at position 3849 of SEQ ID NO: 1879484
uuugguucguucuuaauga

SEQ ID NO: 1910569 - RNA, 19 nt, Artificial Sequence
  Description of Artificial Sequence: Synthetic oligonucleotide
  Antisense strand to SEQ ID NO: 1910568
ucauuaagaacgaaccaaa

SEQ ID NO: 1910570 - RNA, 19 nt, Artificial Sequence
  Description of Artificial Sequence: Synthetic oligonucleotide
  Sense strand starting at position 3907 of SEQ ID NO: 1879484
uuuccugagcaguguuaua

SEQ ID NO: 1910571 - RNA, 19 nt, Artificial Sequence
  Description of Artificial Sequence: Synthetic oligonucleotide
  Antisense strand to SEQ ID NO: 1910570
uauaacacugcucaggaaa

SEQ ID NO: 1910572 - RNA, 19 nt, Artificial Sequence
  Description of Artificial Sequence: Synthetic oligonucleotide
  Sense strand starting at position 3962 of SEQ ID NO: 1879484
gcugaaguagcuugaacaa

SEQ ID NO: 1910573 - RNA, 19 nt, Artificial Sequence
  Description of Artificial Sequence: Synthetic oligonucleotide
  Antisense strand to SEQ ID NO: 1910572
uuguucaagcuacuucagc

SEQ ID NO: 1910574 - RNA, 19 nt, Artificial Sequence
  Description of Artificial Sequence: Synthetic oligonucleotide
  Sense strand starting at position 390 of SEQ ID NO: 1879485
guguauuuguggccaguca

SEQ ID NO: 1910575 - RNA, 19 nt, Artificial Sequence
  Description of Artificial Sequence: Synthetic oligonucleotide
  Antisense strand to SEQ ID NO: 1910574
ugacuggccacaaauacac

SEQ ID NO: 1910576 - RNA, 19 nt, Artificial Sequence
  Description of Artificial Sequence: Synthetic oligonucleotide
  Sense strand starting at position 629 of SEQ ID NO: 1879485
ccacuuacugcggaggaua

SEQ ID NO: 1910577 - RNA, 19 nt, Artificial Sequence
  Description of Artificial Sequence: Synthetic oligonucleotide
  Antisense strand to SEQ ID NO: 1910576
uauccuccgcaguaagugg

SEQ ID NO: 1910578 - RNA, 19 nt, Artificial Sequence
  Description of Artificial Sequence: Synthetic oligonucleotide
  Sense strand starting at position 695 of SEQ ID NO: 1879485
auaggaaagcucugaaacu

SEQ ID NO: 1910579 - RNA, 19 nt, Artificial Sequence
  Description of Artificial Sequence: Synthetic oligonucleotide
  Antisense strand to SEQ ID NO: 1910578
aguuucagagcuuuccuau

SEQ ID NO: 1910580 - RNA, 19 nt, Artificial Sequence
  Description of Artificial Sequence: Synthetic oligonucleotide
  Sense strand starting at position 820 of SEQ ID NO: 1879485
gaaggcuaagaguaaguuu

SEQ ID NO: 1910581 - RNA, 19 nt, Artificial Sequence
  Description of Artificial Sequence: Synthetic oligonucleotide
  Antisense strand to SEQ ID NO: 1910580
aaacuuacucuuagccuuc

SEQ ID NO: 1910582 - RNA, 19 nt, Artificial Sequence
  Description of Artificial Sequence: Synthetic oligonucleotide
  Sense strand starting at position 866 of SEQ ID NO: 1879485
ugguuuggacuguagcauu

SEQ ID NO: 1910583 - RNA, 19 nt, Artificial Sequence
  Description of Artificial Sequence: Synthetic oligonucleotide
  Antisense strand to SEQ ID NO: 1910582
aaugcuacaguccaaacca

SEQ ID NO: 1910584 - RNA, 19 nt, Artificial Sequence
  Description of Artificial Sequence: Synthetic oligonucleotide
  Sense strand starting at position 996 of SEQ ID NO: 1879485
aguuacuuucuaugagaac

SEQ ID NO: 1910585 - RNA, 19 nt, Artificial Sequence
  Description of Artificial Sequence: Synthetic oligonucleotide
  Antisense strand to SEQ ID NO: 1910584
guucucauagaaaguaacu

SEQ ID NO: 1910586 - RNA, 19 nt, Artificial Sequence
  Description of Artificial Sequence: Synthetic oligonucleotide
  Sense strand starting at position 1106 of SEQ ID NO: 1879485
aagaguaacuugguuuaac

SEQ ID NO: 1910587 - RNA, 19 nt, Artificial Sequence
  Description of Artificial Sequence: Synthetic oligonucleotide
  Antisense strand to SEQ ID NO: 1910586
guuaaaccaaguuacucuu

SEQ ID NO: 1910588 - RNA, 19 nt, Artificial Sequence
  Description of Artificial Sequence: Synthetic oligonucleotide
  Sense strand starting at position 1294 of SEQ ID NO: 1879485
gcauaagauggccagacuu

SEQ ID NO: 1910589 - RNA, 19 nt, Artificial Sequence
  Description of Artificial Sequence: Synthetic oligonucleotide
  Antisense strand to SEQ ID NO: 1910588
aagucuggccaucuuaugc

SEQ ID NO: 1910590 - RNA, 19 nt, Artificial Sequence
  Description of Artificial Sequence: Synthetic oligonucleotide
  Sense strand starting at position 1336 of SEQ ID NO: 1879485
uagccucugcuuuaggaga

SEQ ID NO: 1910591 - RNA, 19 nt, Artificial Sequence
  Description of Artificial Sequence: Synthetic oligonucleotide
  Antisense strand to SEQ ID NO: 1910590
ucuccuaaagcagaggcua

SEQ ID NO: 1910592 - RNA, 19 nt, Artificial Sequence
  Description of Artificial Sequence: Synthetic oligonucleotide
  Sense strand starting at position 1595 of SEQ ID NO: 1879485
gagugauauugaucuuaug

SEQ ID NO: 1910593 - RNA, 19 nt, Artificial Sequence
  Description of Artificial Sequence: Synthetic oligonucleotide
  Antisense strand to SEQ ID NO: 1910592
cauaagaucaauaucacuc

SEQ ID NO: 1910594 - RNA, 19 nt, Artificial Sequence
  Description of Artificial Sequence: Synthetic oligonucleotide
  Sense strand starting at position 1743 of SEQ ID NO: 1879485
ucgugugugcgacuuggaa

SEQ ID NO: 1910595 - RNA, 19 nt, Artificial Sequence
  Description of Artificial Sequence: Synthetic oligonucleotide
  Antisense strand to SEQ ID NO: 1910594
uuccaagucgcacacacga

SEQ ID NO: 1910596 - RNA, 19 nt, Artificial Sequence
  Description of Artificial Sequence: Synthetic oligonucleotide
  Sense strand starting at position 1826 of SEQ ID NO: 1879485
aguagauauaccuguaguc

SEQ ID NO: 1910597 - RNA, 19 nt, Artificial Sequence
  Description of Artificial Sequence: Synthetic oligonucleotide
  Antisense strand to SEQ ID NO: 1910596
gacuacagguauaucuacu

SEQ ID NO: 1910598 - RNA, 19 nt, Artificial Sequence
  Description of Artificial Sequence: Synthetic oligonucleotide
  Sense strand starting at position 1828 of SEQ ID NO: 1879485
uagauauaccuguagucag

SEQ ID NO: 1910599 - RNA, 19 nt, Artificial Sequence
  Description of Artificial Sequence: Synthetic oligonucleotide
  Antisense strand to SEQ ID NO: 1910598
cugacuacagguauaucua

SEQ ID NO: 1910600 - RNA, 19 nt, Artificial Sequence
  Description of Artificial Sequence: Synthetic oligonucleotide
  Sense strand starting at position 1860 of SEQ ID NO: 1879485
cagcuauucgccgcaccau

SEQ ID NO: 1910601 - RNA, 19 nt, Artificial Sequence
  Description of Artificial Sequence: Synthetic oligonucleotide
  Antisense strand to SEQ ID NO: 1910600
auggugcggcgaauagcug

SEQ ID NO: 1910602 - RNA, 19 nt, Artificial Sequence
  Description of Artificial Sequence: Synthetic oligonucleotide
  Sense strand starting at position 1949 of SEQ ID NO: 1879485
cccugaacgcuuuaaaguc

SEQ ID NO: 1910603 - RNA, 19 nt, Artificial Sequence
  Description of Artificial Sequence: Synthetic oligonucleotide
  Antisense strand to SEQ ID NO: 1910602
gacuuuaaagcguucaggg

SEQ ID NO: 1910604 - RNA, 19 nt, Artificial Sequence
  Description of Artificial Sequence: Synthetic oligonucleotide
  Sense strand starting at position 2645 of SEQ ID NO: 1879485
gagccuaagcucugaagga

SEQ ID NO: 1910605 - RNA, 19 nt, Artificial Sequence
  Description of Artificial Sequence: Synthetic oligonucleotide
  Antisense strand to SEQ ID NO: 1910604
uccuucagagcuuaggcuc

SEQ ID NO: 1910606 - RNA, 19 nt, Artificial Sequence
  Description of Artificial Sequence: Synthetic oligonucleotide
  Sense strand starting at position 2661 of SEQ ID NO: 1879485
ggaaacugccgucaggauu

SEQ ID NO: 1910607 - RNA, 19 nt, Artificial Sequence
  Description of Artificial Sequence: Synthetic oligonucleotide
  Antisense strand to SEQ ID NO: 1910606
aauccugacggcaguuucc

SEQ ID NO: 1910608 - RNA, 19 nt, Artificial Sequence
  Description of Artificial Sequence: Synthetic oligonucleotide
  Sense strand starting at position 2721 of SEQ ID NO: 1879485
guguuaagguuucuggaga

SEQ ID NO: 1910609 - RNA, 19 nt, Artificial Sequence
  Description of Artificial Sequence: Synthetic oligonucleotide
  Antisense strand to SEQ ID NO: 1910608
ucuccagaaaccuuaacac

SEQ ID NO: 1910610 - RNA, 19 nt, Artificial Sequence
  Description of Artificial Sequence: Synthetic oligonucleotide
  Sense strand starting at position 2726 of SEQ ID NO: 1879485
aagguuucuggagaauugu

SEQ ID NO: 1910611 - RNA, 19 nt, Artificial Sequence
  Description of Artificial Sequence: Synthetic oligonucleotide
  Antisense strand to SEQ ID NO: 1910610
acaauucuccagaaaccuu

SEQ ID NO: 1910612 - RNA, 19 nt, Artificial Sequence
  Description of Artificial Sequence: Synthetic oligonucleotide
  Sense strand starting at position 2743 of SEQ ID NO: 1879485
guaugaagacgaggguuaa

SEQ ID NO: 1910613 - RNA, 19 nt, Artificial Sequence
  Description of Artificial Sequence: Synthetic oligonucleotide
  Antisense strand to SEQ ID NO: 1910612
uuaacccucgucuucauac

SEQ ID NO: 1910614 - RNA, 19 nt, Artificial Sequence
  Description of Artificial Sequence: Synthetic oligonucleotide
  Sense strand starting at position 2780 of SEQ ID NO: 1879485
gucugugauuuccucaacu

SEQ ID NO: 1910615 - RNA, 19 nt, Artificial Sequence
  Description of Artificial Sequence: Synthetic oligonucleotide
  Antisense strand to SEQ ID NO: 1910614
aguugaggaaaucacagac

SEQ ID NO: 1910616 - RNA, 19 nt, Artificial Sequence
  Description of Artificial Sequence: Synthetic oligonucleotide
  Sense strand starting at position 2919 of SEQ ID NO: 1879485
uaucuugagcugcaugauu

SEQ ID NO: 1910617 - RNA, 19 nt, Artificial Sequence
  Description of Artificial Sequence: Synthetic oligonucleotide
  Antisense strand to SEQ ID NO: 1910616
aaucaugcagcucaagaua

SEQ ID NO: 1910618 - RNA, 19 nt, Artificial Sequence
  Description of Artificial Sequence: Synthetic oligonucleotide
  Sense strand starting at position 2928 of SEQ ID NO: 1879485
cugcaugauuuggugugua

SEQ ID NO: 1910619 - RNA, 19 nt, Artificial Sequence
  Description of Artificial Sequence: Synthetic oligonucleotide
  Antisense strand to SEQ ID NO: 1910618
uacacaccaaaucaugcag

SEQ ID NO: 1910620 - RNA, 19 nt, Artificial Sequence
  Description of Artificial Sequence: Synthetic oligonucleotide
  Sense strand starting at position 2931 of SEQ ID NO: 1879485
caugauuugguguguaccu

SEQ ID NO: 1910621 - RNA, 19 nt, Artificial Sequence
  Description of Artificial Sequence: Synthetic oligonucleotide
  Antisense strand to SEQ ID NO: 1910620
agguacacaccaaaucaug

SEQ ID NO: 1910622 - RNA, 19 nt, Artificial Sequence
  Description of Artificial Sequence: Synthetic oligonucleotide
  Sense strand starting at position 2938 of SEQ ID NO: 1879485
ugguguguaccucagacuu

SEQ ID NO: 1910623 - RNA, 19 nt, Artificial Sequence
  Description of Artificial Sequence: Synthetic oligonucleotide
  Antisense strand to SEQ ID NO: 1910622
aagucugagguacacacca

SEQ ID NO: 1910624 - RNA, 19 nt, Artificial Sequence
  Description of Artificial Sequence: Synthetic oligonucleotide
  Sense strand starting at position 2993 of SEQ ID NO: 1879485
gccaaagaccuaugaacug

SEQ ID NO: 1910625 - RNA, 19 nt, Artificial Sequence
  Description of Artificial Sequence: Synthetic oligonucleotide
  Antisense strand to SEQ ID NO: 1910624
caguucauaggucuuuggc

SEQ ID NO: 1910626 - RNA, 19 nt, Artificial Sequence
  Description of Artificial Sequence: Synthetic oligonucleotide
  Sense strand starting at position 3128 of SEQ ID NO: 1879485
aguagcauucuugaucuaa

SEQ ID NO: 1910627 - RNA, 19 nt, Artificial Sequence
  Description of Artificial Sequence: Synthetic oligonucleotide
  Antisense strand to SEQ ID NO: 1910626
uuagaucaagaaugcuacu

SEQ ID NO: 1910628 - RNA, 19 nt, Artificial Sequence
  Description of Artificial Sequence: Synthetic oligonucleotide
  Sense strand starting at position 3209 of SEQ ID NO: 1879485
gcgcaucuucuuguggcaa

SEQ ID NO: 1910629 - RNA, 19 nt, Artificial Sequence
  Description of Artificial Sequence: Synthetic oligonucleotide
  Antisense strand to SEQ ID NO: 1910628
uugccacaagaagaugcgc

SEQ ID NO: 1910630 - RNA, 19 nt, Artificial Sequence
  Description of Artificial Sequence: Synthetic oligonucleotide
  Sense strand starting at position 3242 of SEQ ID NO: 1879485
aguucugcuuauuuaugua

SEQ ID NO: 1910631 - RNA, 19 nt, Artificial Sequence
  Description of Artificial Sequence: Synthetic oligonucleotide
  Antisense strand to SEQ ID NO: 1910630
uacauaaauaagcagaacu

SEQ ID NO: 1910632 - RNA, 19 nt, Artificial Sequence
  Description of Artificial Sequence: Synthetic oligonucleotide
  Sense strand starting at position 3246 of SEQ ID NO: 1879485
cugcuuauuuauguaggua

SEQ ID NO: 1910633 - RNA, 19 nt, Artificial Sequence
  Description of Artificial Sequence: Synthetic oligonucleotide
  Antisense strand to SEQ ID NO: 1910632
uaccuacauaaauaagcag

SEQ ID NO: 1910634 - RNA, 19 nt, Artificial Sequence
  Description of Artificial Sequence: Synthetic oligonucleotide
  Sense strand starting at position 3270 of SEQ ID NO: 1879485
gguacaacgguugaaugaa

SEQ ID NO: 1910635 - RNA, 19 nt, Artificial Sequence
  Description of Artificial Sequence: Synthetic oligonucleotide
  Antisense strand to SEQ ID NO: 1910634
uucauucaaccguuguacc

SEQ ID NO: 1910636 - RNA, 19 nt, Artificial Sequence
  Description of Artificial Sequence: Synthetic oligonucleotide
  Sense strand starting at position 3292 of SEQ ID NO: 1879485
uggaguuuccacuguugag

SEQ ID NO: 1910637 - RNA, 19 nt, Artificial Sequence
  Description of Artificial Sequence: Synthetic oligonucleotide
  Antisense strand to SEQ ID NO: 1910636
cucaacaguggaaacucca

SEQ ID NO: 1910638 - RNA, 19 nt, Artificial Sequence
  Description of Artificial Sequence: Synthetic oligonucleotide
  Sense strand starting at position 3318 of SEQ ID NO: 1879485
uuugacaggucuuuauuag

SEQ ID NO: 1910639 - RNA, 19 nt, Artificial Sequence
  Description of Artificial Sequence: Synthetic oligonucleotide
  Antisense strand to SEQ ID NO: 1910638
cuaauaaagaccugucaaa

SEQ ID NO: 1910640 - RNA, 19 nt, Artificial Sequence
  Description of Artificial Sequence: Synthetic oligonucleotide
  Sense strand starting at position 3326 of SEQ ID NO: 1879485
gucuuuauuagacagugga

SEQ ID NO: 1910641 - RNA, 19 nt, Artificial Sequence
  Description of Artificial Sequence: Synthetic oligonucleotide
  Antisense strand to SEQ ID NO: 1910640
uccacugucuaauaaagac

SEQ ID NO: 1910642 - RNA, 19 nt, Artificial Sequence
  Description of Artificial Sequence: Synthetic oligonucleotide
  Sense strand starting at position 3329 of SEQ ID NO: 1879485
uuuauuagacaguggaacu

SEQ ID NO: 1910643 - RNA, 19 nt, Artificial Sequence
  Description of Artificial Sequence: Synthetic oligonucleotide
  Antisense strand to SEQ ID NO: 1910642
aguuccacugucuaauaaa

SEQ ID NO: 1910644 - RNA, 19 nt, Artificial Sequence
  Description of Artificial Sequence: Synthetic oligonucleotide
  Sense strand starting at position 3443 of SEQ ID NO: 1879485
aguuauuucucgucacuaa

SEQ ID NO: 1910645 - RNA, 19 nt, Artificial Sequence
  Description of Artificial Sequence: Synthetic oligonucleotide
  Antisense strand to SEQ ID NO: 1910644
uuagugacgagaaauaacu

SEQ ID NO: 1910646 - RNA, 19 nt, Artificial Sequence
  Description of Artificial Sequence: Synthetic oligonucleotide
  Sense strand starting at position 3482 of SEQ ID NO: 1879485
cugacagauuucugaugga

SEQ ID NO: 1910647 - RNA, 19 nt, Artificial Sequence
  Description of Artificial Sequence: Synthetic oligonucleotide
  Antisense strand to SEQ ID NO: 1910646
uccaucagaaaucugucag

SEQ ID NO: 1910648 - RNA, 19 nt, Artificial Sequence
  Description of Artificial Sequence: Synthetic oligonucleotide
  Sense strand starting at position 3491 of SEQ ID NO: 1879485
uucugauggagucguuaag

SEQ ID NO: 1910649 - RNA, 19 nt, Artificial Sequence
  Description of Artificial Sequence: Synthetic oligonucleotide
  Antisense strand to SEQ ID NO: 1910648
cuuaacgacuccaucagaa

SEQ ID NO: 1910650 - RNA, 19 nt, Artificial Sequence
  Description of Artificial Sequence: Synthetic oligonucleotide
  Sense strand starting at position 3501 of SEQ ID NO: 1879485
gucguuaagaaagagucau

SEQ ID NO: 1910651 - RNA, 19 nt, Artificial Sequence
  Description of Artificial Sequence: Synthetic oligonucleotide
  Antisense strand to SEQ ID NO: 1910650
augacucuuucuuaacgac

SEQ ID NO: 1910652 - RNA, 19 nt, Artificial Sequence
  Description of Artificial Sequence: Synthetic oligonucleotide
  Sense strand starting at position 3511 of SEQ ID NO: 1879485
aagagucaucaaugggcca

SEQ ID NO: 1910653 - RNA, 19 nt, Artificial Sequence
  Description of Artificial Sequence: Synthetic oligonucleotide
  Antisense strand to SEQ ID NO: 1910652
uggcccauugaugacucuu

SEQ ID NO: 1910654 - RNA, 19 nt, Artificial Sequence
  Description of Artificial Sequence: Synthetic oligonucleotide
  Sense strand starting at position 68 of SEQ ID NO: 1879486
ucuuauaggucauuaggac

SEQ ID NO: 1910655 - RNA, 19 nt, Artificial Sequence
  Description of Artificial Sequence: Synthetic oligonucleotide
  Antisense strand to SEQ ID NO: 1910654
guccuaaugaccuauaaga

SEQ ID NO: 1910656 - RNA, 19 nt, Artificial Sequence
  Description of Artificial Sequence: Synthetic oligonucleotide
  Sense strand starting at position 96 of SEQ ID NO: 1879486
ccuacaaaugagcgaaaga

SEQ ID NO: 1910657 - RNA, 19 nt, Artificial Sequence
  Description of Artificial Sequence: Synthetic oligonucleotide
  Antisense strand to SEQ ID NO: 1910656
ucuuucgcucauuuguagg

SEQ ID NO: 1910658 - RNA, 19 nt, Artificial Sequence
  Description of Artificial Sequence: Synthetic oligonucleotide
  Sense strand starting at position 105 of SEQ ID NO: 1879486
gagcgaaagacuugaacag

SEQ ID NO: 1910659 - RNA, 19 nt, Artificial Sequence
  Description of Artificial Sequence: Synthetic oligonucleotide
  Antisense strand to SEQ ID NO: 1910658
cuguucaagucuuucgcuc

SEQ ID NO: 1910660 - RNA, 19 nt, Artificial Sequence
  Description of Artificial Sequence: Synthetic oligonucleotide
  Sense strand starting at position 269 of SEQ ID NO: 1879486
cuggcaaagaugugaaaca

SEQ ID NO: 1910661 - RNA, 19 nt, Artificial Sequence
  Description of Artificial Sequence: Synthetic oligonucleotide
  Antisense strand to SEQ ID NO: 1910660
uguuucacaucuuugccag

SEQ ID NO: 1910662 - RNA, 19 nt, Artificial Sequence
  Description of Artificial Sequence: Synthetic oligonucleotide
  Sense strand starting at position 278 of SEQ ID NO: 1879486
augugaaacaaccggaaau

SEQ ID NO: 1910663 - RNA, 19 nt, Artificial Sequence
  Description of Artificial Sequence: Synthetic oligonucleotide
  Antisense strand to SEQ ID NO: 1910662
auuuccgguuguuucacau

SEQ ID NO: 1910664 - RNA, 19 nt, Artificial Sequence
  Description of Artificial Sequence: Synthetic oligonucleotide
  Sense strand starting at position 298 of SEQ ID NO: 1879486
ucauaucacugguuggaac

SEQ ID NO: 1910665 - RNA, 19 nt, Artificial Sequence
  Description of Artificial Sequence: Synthetic oligonucleotide
  Antisense strand to SEQ ID NO: 1910664
guuccaaccagugauauga

SEQ ID NO: 1910666 - RNA, 19 nt, Artificial Sequence
  Description of Artificial Sequence: Synthetic oligonucleotide
  Sense strand starting at position 342 of SEQ ID NO: 1879486
cuggcaguguauuuaaagu

SEQ ID NO: 1910667 - RNA, 19 nt, Artificial Sequence
  Description of Artificial Sequence: Synthetic oligonucleotide
  Antisense strand to SEQ ID NO: 1910666
acuuuaaauacacugccag

SEQ ID NO: 1910668 - RNA, 19 nt, Artificial Sequence
  Description of Artificial Sequence: Synthetic oligonucleotide
  Sense strand starting at position 368 of SEQ ID NO: 1879486
gugaacacucuaugaacca

SEQ ID NO: 1910669 - RNA, 19 nt, Artificial Sequence
  Description of Artificial Sequence: Synthetic oligonucleotide
  Antisense strand to SEQ ID NO: 1910668
ugguucauagaguguucac

SEQ ID NO: 1910670 - RNA, 19 nt, Artificial Sequence
  Description of Artificial Sequence: Synthetic oligonucleotide
  Sense strand starting at position 528 of SEQ ID NO: 1879486
guacacaaaucguugaaua

SEQ ID NO: 1910671 - RNA, 19 nt, Artificial Sequence
  Description of Artificial Sequence: Synthetic oligonucleotide
  Antisense strand to SEQ ID NO: 1910670
uauucaacgauuuguguac

SEQ ID NO: 1910672 - RNA, 19 nt, Artificial Sequence
  Description of Artificial Sequence: Synthetic oligonucleotide
  Sense strand starting at position 714 of SEQ ID NO: 1879486
uauggugauagagguuaaa

SEQ ID NO: 1910673 - RNA, 19 nt, Artificial Sequence
  Description of Artificial Sequence: Synthetic oligonucleotide
  Antisense strand to SEQ ID NO: 1910672
uuuaaccucuaucaccaua

SEQ ID NO: 1910674 - RNA, 19 nt, Artificial Sequence
  Description of Artificial Sequence: Synthetic oligonucleotide
  Sense strand starting at position 742 of SEQ ID NO: 1879486
auccuugucggauacugaa

SEQ ID NO: 1910675 - RNA, 19 nt, Artificial Sequence
  Description of Artificial Sequence: Synthetic oligonucleotide
  Antisense strand to SEQ ID NO: 1910674
uucaguauccgacaaggau

SEQ ID NO: 1910676 - RNA, 19 nt, Artificial Sequence
  Description of Artificial Sequence: Synthetic oligonucleotide
  Sense strand starting at position 770 of SEQ ID NO: 1879486
gcaugaaugagcuggaaag

SEQ ID NO: 1910677 - RNA, 19 nt, Artificial Sequence
  Description of Artificial Sequence: Synthetic oligonucleotide
  Antisense strand to SEQ ID NO: 1910676
cuuuccagcucauucaugc

SEQ ID NO: 1910678 - RNA, 19 nt, Artificial Sequence
  Description of Artificial Sequence: Synthetic oligonucleotide
  Sense strand starting at position 812 of SEQ ID NO: 1879486
caguuacauggguaugcau

SEQ ID NO: 1910679 - RNA, 19 nt, Artificial Sequence
  Description of Artificial Sequence: Synthetic oligonucleotide
  Antisense strand to SEQ ID NO: 1910678
augcauacccauguaacug

SEQ ID NO: 1910680 - RNA, 19 nt, Artificial Sequence
  Description of Artificial Sequence: Synthetic oligonucleotide
  Sense strand starting at position 915 of SEQ ID NO: 1879486
aucagaucauaugucuuga

SEQ ID NO: 1910681 - RNA, 19 nt, Artificial Sequence
  Description of Artificial Sequence: Synthetic oligonucleotide
  Antisense strand to SEQ ID NO: 1910680
ucaagacauaugaucugau

SEQ ID NO: 1910682 - RNA, 19 nt, Artificial Sequence
  Description of Artificial Sequence: Synthetic oligonucleotide
  Sense strand starting at position 931 of SEQ ID NO: 1879486
ugauuucgcgucuaacaau

SEQ ID NO: 1910683 - RNA, 19 nt, Artificial Sequence
  Description of Artificial Sequence: Synthetic oligonucleotide
  Antisense strand to SEQ ID NO: 1910682
auuguuagacgcgaaauca

SEQ ID NO: 1910684 - RNA, 19 nt, Artificial Sequence
  Description of Artificial Sequence: Synthetic oligonucleotide
  Sense strand starting at position 995 of SEQ ID NO: 1879486
gcauuaaaguuccuggaua

SEQ ID NO: 1910685 - RNA, 19 nt, Artificial Sequence
  Description of Artificial Sequence: Synthetic oligonucleotide
  Antisense strand to SEQ ID NO: 1910684
uauccaggaacuuuaaugc

SEQ ID NO: 1910686 - RNA, 19 nt, Artificial Sequence
  Description of Artificial Sequence: Synthetic oligonucleotide
  Sense strand starting at position 997 of SEQ ID NO: 1879486
auuaaaguuccuggauacu

SEQ ID NO: 1910687 - RNA, 19 nt, Artificial Sequence
  Description of Artificial Sequence: Synthetic oligonucleotide
  Antisense strand to SEQ ID NO: 1910686
aguauccaggaacuuuaau

SEQ ID NO: 1910688 - RNA, 19 nt, Artificial Sequence
  Description of Artificial Sequence: Synthetic oligonucleotide
  Sense strand starting at position 1040 of SEQ ID NO: 1879486
agacauauuugagaacucu

SEQ ID NO: 1910689 - RNA, 19 nt, Artificial Sequence
  Description of Artificial Sequence: Synthetic oligonucleotide
  Antisense strand to SEQ ID NO: 1910688
agaguucucaaauaugucu

SEQ ID NO: 1910690 - RNA, 19 nt, Artificial Sequence
  Description of Artificial Sequence: Synthetic oligonucleotide
  Sense strand starting at position 1136 of SEQ ID NO: 1879486
gcaucugggaaguaaucuu

SEQ ID NO: 1910691 - RNA, 19 nt, Artificial Sequence
  Description of Artificial Sequence: Synthetic oligonucleotide
  Antisense strand to SEQ ID NO: 1910690
aagauuacuucccagaugc

SEQ ID NO: 1910692 - RNA, 19 nt, Artificial Sequence
  Description of Artificial Sequence: Synthetic oligonucleotide
  Sense strand starting at position 1170 of SEQ ID NO: 1879486
guaaacgaucaauacaagu

SEQ ID NO: 1910693 - RNA, 19 nt, Artificial Sequence
  Description of Artificial Sequence: Synthetic oligonucleotide
  Antisense strand to SEQ ID NO: 1910692
acuuguauugaucguuuac

SEQ ID NO: 1910694 - RNA, 19 nt, Artificial Sequence
  Description of Artificial Sequence: Synthetic oligonucleotide
  Sense strand starting at position 1187 of SEQ ID NO: 1879486
guacaauaaugucuauuga

SEQ ID NO: 1910695 - RNA, 19 nt, Artificial Sequence
  Description of Artificial Sequence: Synthetic oligonucleotide
  Antisense strand to SEQ ID NO: 1910694
ucaauagacauuauuguac

SEQ ID NO: 1910696 - RNA, 19 nt, Artificial Sequence
  Description of Artificial Sequence: Synthetic oligonucleotide
  Sense strand starting at position 1349 of SEQ ID NO: 1879486
agucuuguccuacagauag

SEQ ID NO: 1910697 - RNA, 19 nt, Artificial Sequence
  Description of Artificial Sequence: Synthetic oligonucleotide
  Antisense strand to SEQ ID NO: 1910696
cuaucuguaggacaagacu

SEQ ID NO: 1910698 - RNA, 19 nt, Artificial Sequence
  Description of Artificial Sequence: Synthetic oligonucleotide
  Sense strand starting at position 1403 of SEQ ID NO: 1879486
ugccuaaggccuuacagaa

SEQ ID NO: 1910699 - RNA, 19 nt, Artificial Sequence
  Description of Artificial Sequence: Synthetic oligonucleotide
  Antisense strand to SEQ ID NO: 1910698
uucuguaaggccuuaggca

SEQ ID NO: 1910700 - RNA, 19 nt, Artificial Sequence
  Description of Artificial Sequence: Synthetic oligonucleotide
  Sense strand starting at position 1449 of SEQ ID NO: 1879486
cucagauuagucugaauuc

SEQ ID NO: 1910701 - RNA, 19 nt, Artificial Sequence
  Description of Artificial Sequence: Synthetic oligonucleotide
  Antisense strand to SEQ ID NO: 1910700
gaauucagacuaaucugag

SEQ ID NO: 1910702 - RNA, 19 nt, Artificial Sequence
  Description of Artificial Sequence: Synthetic oligonucleotide
  Sense strand starting at position 1919 of SEQ ID NO: 1879486
agaguuaugcggcaggaau

SEQ ID NO: 1910703 - RNA, 19 nt, Artificial Sequence
  Description of Artificial Sequence: Synthetic oligonucleotide
  Antisense strand to SEQ ID NO: 1910702
auuccugccgcauaacucu

SEQ ID NO: 1910704 - RNA, 19 nt, Artificial Sequence
  Description of Artificial Sequence: Synthetic oligonucleotide
  Sense strand starting at position 1960 of SEQ ID NO: 1879486
aaagaaaggugucccacua

SEQ ID NO: 1910705 - RNA, 19 nt, Artificial Sequence
  Description of Artificial Sequence: Synthetic oligonucleotide
  Antisense strand to SEQ ID NO: 1910704
uagugggacaccuuucuuu

SEQ ID NO: 1910706 - RNA, 19 nt, Artificial Sequence
  Description of Artificial Sequence: Synthetic oligonucleotide
  Sense strand starting at position 2369 of SEQ ID NO: 1879486
ucuucuauugcccagguga

SEQ ID NO: 1910707 - RNA, 19 nt, Artificial Sequence
  Description of Artificial Sequence: Synthetic oligonucleotide
  Antisense strand to SEQ ID NO: 1910706
ucaccugggcaauagaaga

SEQ ID NO: 1910708 - RNA, 19 nt, Artificial Sequence
  Description of Artificial Sequence: Synthetic oligonucleotide
  Sense strand starting at position 2640 of SEQ ID NO: 1879486
agcuacaacuuuccagaga

SEQ ID NO: 1910709 - RNA, 19 nt, Artificial Sequence
  Description of Artificial Sequence: Synthetic oligonucleotide
  Antisense strand to SEQ ID NO: 1910708
ucucuggaaaguuguagcu

SEQ ID NO: 1910710 - RNA, 19 nt, Artificial Sequence
  Description of Artificial Sequence: Synthetic oligonucleotide
  Sense strand starting at position 2764 of SEQ ID NO: 1879486
cgcuccuaccuggaucaga

SEQ ID NO: 1910711 - RNA, 19 nt, Artificial Sequence
  Description of Artificial Sequence: Synthetic oligonucleotide
  Antisense strand to SEQ ID NO: 1910710
ucugauccagguaggagcg

SEQ ID NO: 1910712 - RNA, 19 nt, Artificial Sequence
  Description of Artificial Sequence: Synthetic oligonucleotide
  Sense strand starting at position 2875 of SEQ ID NO: 1879486
cgccgagugugaauucgaa

SEQ ID NO: 1910713 - RNA, 19 nt, Artificial Sequence
  Description of Artificial Sequence: Synthetic oligonucleotide
  Antisense strand to SEQ ID NO: 1910712
uucgaauucacacucggcg

SEQ ID NO: 1910714 - RNA, 19 nt, Artificial Sequence
  Description of Artificial Sequence: Synthetic oligonucleotide
  Sense strand starting at position 3551 of SEQ ID NO: 1879486
aguucccuggcuuaauuaa

SEQ ID NO: 1910715 - RNA, 19 nt, Artificial Sequence
  Description of Artificial Sequence: Synthetic oligonucleotide
  Antisense strand to SEQ ID NO: 1910714
uuaauuaagccagggaacu

SEQ ID NO: 1910716 - RNA, 19 nt, Artificial Sequence
  Description of Artificial Sequence: Synthetic oligonucleotide
  Sense strand starting at position 3599 of SEQ ID NO: 1879486
ugcuuucuuacggagauau

SEQ ID NO: 1910717 - RNA, 19 nt, Artificial Sequence
  Description of Artificial Sequence: Synthetic oligonucleotide
  Antisense strand to SEQ ID NO: 1910716
auaucuccguaagaaagca

SEQ ID NO: 1910718 - RNA, 19 nt, Artificial Sequence
  Description of Artificial Sequence: Synthetic oligonucleotide
  Sense strand starting at position 3610 of SEQ ID NO: 1879486
ggagauauaaagugcauac

SEQ ID NO: 1910719 - RNA, 19 nt, Artificial Sequence
  Description of Artificial Sequence: Synthetic oligonucleotide
  Antisense strand to SEQ ID NO: 1910718
guaugcacuuuauaucucc

SEQ ID NO: 1910720 - RNA, 19 nt, Artificial Sequence
  Description of Artificial Sequence: Synthetic oligonucleotide
  Sense strand starting at position 3764 of SEQ ID NO: 1879486
aaguuagggugauuagauc

SEQ ID NO: 1910721 - RNA, 19 nt, Artificial Sequence
  Description of Artificial Sequence: Synthetic oligonucleotide
  Antisense strand to SEQ ID NO: 1910720
gaucuaaucacccuaacuu

SEQ ID NO: 1910722 - RNA, 19 nt, Artificial Sequence
  Description of Artificial Sequence: Synthetic oligonucleotide
  Sense strand starting at position 3772 of SEQ ID NO: 1879486
gugauuagauccucccaaa

SEQ ID NO: 1910723 - RNA, 19 nt, Artificial Sequence
  Description of Artificial Sequence: Synthetic oligonucleotide
  Antisense strand to SEQ ID NO: 1910722
uuugggaggaucuaaucac

SEQ ID NO: 1910724 - RNA, 19 nt, Artificial Sequence
  Description of Artificial Sequence: Synthetic oligonucleotide
  Sense strand starting at position 3869 of SEQ ID NO: 1879486
gugaguaaauuggcaagga

SEQ ID NO: 1910725 - RNA, 19 nt, Artificial Sequence
  Description of Artificial Sequence: Synthetic oligonucleotide
  Antisense strand to SEQ ID NO: 1910724
uccuugccaauuuacucac

SEQ ID NO: 1910726 - RNA, 19 nt, Artificial Sequence
  Description of Artificial Sequence: Synthetic oligonucleotide
  Sense strand starting at position 3873 of SEQ ID NO: 1879486
guaaauuggcaaggaaaug

SEQ ID NO: 1910727 - RNA, 19 nt, Artificial Sequence
  Description of Artificial Sequence: Synthetic oligonucleotide
  Antisense strand to SEQ ID NO: 1910726
cauuuccuugccaauuuac

SEQ ID NO: 1910728 - RNA, 19 nt, Artificial Sequence
  Description of Artificial Sequence: Synthetic oligonucleotide
  Sense strand starting at position 3928 of SEQ ID NO: 1879486
aggagagcuuacccagaau

SEQ ID NO: 1910729 - RNA, 19 nt, Artificial Sequence
  Description of Artificial Sequence: Synthetic oligonucleotide
  Antisense strand to SEQ ID NO: 1910728
auucuggguaagcucuccu

SEQ ID NO: 1910730 - RNA, 19 nt, Artificial Sequence
  Description of Artificial Sequence: Synthetic oligonucleotide
  Sense strand starting at position 3969 of SEQ ID NO: 1879486
gguauuauugaggguguga

SEQ ID NO: 1910731 - RNA, 19 nt, Artificial Sequence
  Description of Artificial Sequence: Synthetic oligonucleotide
  Antisense strand to SEQ ID NO: 1910730
ucacacccucaauaauacc

SEQ ID NO: 1910732 - RNA, 19 nt, Artificial Sequence
  Description of Artificial Sequence: Synthetic oligonucleotide
  Sense strand starting at position 3971 of SEQ ID NO: 1879486
uauuauugagggugugaga

SEQ ID NO: 1910733 - RNA, 19 nt, Artificial Sequence
  Description of Artificial Sequence: Synthetic oligonucleotide
  Antisense strand to SEQ ID NO: 1910732
ucucacacccucaauaaua

SEQ ID NO: 1910734 - RNA, 19 nt, Artificial Sequence
  Description of Artificial Sequence: Synthetic oligonucleotide
  Sense strand starting at position 146 of SEQ ID NO: 1879487
gagguuucccagcaggcaa

SEQ ID NO: 1910735 - RNA, 19 nt, Artificial Sequence
  Description of Artificial Sequence: Synthetic oligonucleotide
  Antisense strand to SEQ ID NO: 1910734
uugccugcugggaaaccuc

SEQ ID NO: 1910736 - RNA, 19 nt, Artificial Sequence
  Description of Artificial Sequence: Synthetic oligonucleotide
  Sense strand starting at position 1238 of SEQ ID NO: 1879487
ucagcuguugcagagugau

SEQ ID NO: 1910737 - RNA, 19 nt, Artificial Sequence
  Description of Artificial Sequence: Synthetic oligonucleotide
  Antisense strand to SEQ ID NO: 1910736
aucacucugcaacagcuga

SEQ ID NO: 1910738 - RNA, 19 nt, Artificial Sequence
  Description of Artificial Sequence: Synthetic oligonucleotide
  Sense strand starting at position 1527 of SEQ ID NO: 1879487
gcaguuauaggcgccugua

SEQ ID NO: 1910739 - RNA, 19 nt, Artificial Sequence
  Description of Artificial Sequence: Synthetic oligonucleotide
  Antisense strand to SEQ ID NO: 1910738
uacaggcgccuauaacugc

SEQ ID NO: 1910740 - RNA, 19 nt, Artificial Sequence
  Description of Artificial Sequence: Synthetic oligonucleotide
  Sense strand starting at position 2148 of SEQ ID NO: 1879487
aggagugagugcuguacuu

SEQ ID NO: 1910741 - RNA, 19 nt, Artificial Sequence
  Description of Artificial Sequence: Synthetic oligonucleotide
  Antisense strand to SEQ ID NO: 1910740
aaguacagcacucacuccu

SEQ ID NO: 1910742 - RNA, 19 nt, Artificial Sequence
  Description of Artificial Sequence: Synthetic oligonucleotide
  Sense strand starting at position 2150 of SEQ ID NO: 1879487
gagugagugcuguacuuag

SEQ ID NO: 1910743 - RNA, 19 nt, Artificial Sequence
  Description of Artificial Sequence: Synthetic oligonucleotide
  Antisense strand to SEQ ID NO: 1910742
cuaaguacagcacucacuc

SEQ ID NO: 1910744 - RNA, 19 nt, Artificial Sequence
  Description of Artificial Sequence: Synthetic oligonucleotide
  Sense strand starting at position 2246 of SEQ ID NO: 1879487
gagucugcauuccaggaga

SEQ ID NO: 1910745 - RNA, 19 nt, Artificial Sequence
  Description of Artificial Sequence: Synthetic oligonucleotide
  Antisense strand to SEQ ID NO: 1910744
ucuccuggaaugcagacuc

SEQ ID NO: 1910746 - RNA, 19 nt, Artificial Sequence
  Description of Artificial Sequence: Synthetic oligonucleotide
  Sense strand starting at position 2341 of SEQ ID NO: 1879487
agggcuuacucagcaauca

SEQ ID NO: 1910747 - RNA, 19 nt, Artificial Sequence
  Description of Artificial Sequence: Synthetic oligonucleotide
  Antisense strand to SEQ ID NO: 1910746
ugauugcugaguaagcccu

SEQ ID NO: 1910748 - RNA, 19 nt, Artificial Sequence
  Description of Artificial Sequence: Synthetic oligonucleotide
  Sense strand starting at position 2421 of SEQ ID NO: 1879487
auggguuagugcccuuaaa

SEQ ID NO: 1910749 - RNA, 19 nt, Artificial Sequence
  Description of Artificial Sequence: Synthetic oligonucleotide
  Antisense strand to SEQ ID NO: 1910748
uuuaagggcacuaacccau

SEQ ID NO: 1910750 - RNA, 19 nt, Artificial Sequence
  Description of Artificial Sequence: Synthetic oligonucleotide
  Sense strand starting at position 2889 of SEQ ID NO: 1879487
ccgaauuucuguucuuguu

SEQ ID NO: 1910751 - RNA, 19 nt, Artificial Sequence
  Description of Artificial Sequence: Synthetic oligonucleotide
  Antisense strand to SEQ ID NO: 1910750
aacaagaacagaaauucgg

SEQ ID NO: 1910752 - RNA, 19 nt, Artificial Sequence
  Description of Artificial Sequence: Synthetic oligonucleotide
  Sense strand starting at position 2895 of SEQ ID NO: 1879487
uucuguucuuguuaagcca

SEQ ID NO: 1910753 - RNA, 19 nt, Artificial Sequence
  Description of Artificial Sequence: Synthetic oligonucleotide
  Antisense strand to SEQ ID NO: 1910752
uggcuuaacaagaacagaa

SEQ ID NO: 1910754 - RNA, 19 nt, Artificial Sequence
  Description of Artificial Sequence: Synthetic oligonucleotide
  Sense strand starting at position 15 of SEQ ID NO: 1879488
cccaguacuguggaaggau

SEQ ID NO: 1910755 - RNA, 19 nt, Artificial Sequence
  Description of Artificial Sequence: Synthetic oligonucleotide
  Antisense strand to SEQ ID NO: 1910754
auccuuccacaguacuggg

SEQ ID NO: 1910756 - RNA, 19 nt, Artificial Sequence
  Description of Artificial Sequence: Synthetic oligonucleotide
  Sense strand starting at position 24 of SEQ ID NO: 1879488
guggaaggaucauaaggaa

SEQ ID NO: 1910757 - RNA, 19 nt, Artificial Sequence
  Description of Artificial Sequence: Synthetic oligonucleotide
  Antisense strand to SEQ ID NO: 1910756
uuccuuaugauccuuccac

SEQ ID NO: 1910758 - RNA, 19 nt, Artificial Sequence
  Description of Artificial Sequence: Synthetic oligonucleotide
  Sense strand starting at position 382 of SEQ ID NO: 1879488
cgugaagaucaagacuagu

SEQ ID NO: 1910759 - RNA, 19 nt, Artificial Sequence
  Description of Artificial Sequence: Synthetic oligonucleotide
  Antisense strand to SEQ ID NO: 1910758
acuagucuugaucuucacg

SEQ ID NO: 1910760 - RNA, 19 nt, Artificial Sequence
  Description of Artificial Sequence: Synthetic oligonucleotide
  Sense strand starting at position 591 of SEQ ID NO: 1879488
gguaguuuaccggauugca

SEQ ID NO: 1910761 - RNA, 19 nt, Artificial Sequence
  Description of Artificial Sequence: Synthetic oligonucleotide
  Antisense strand to SEQ ID NO: 1910760
ugcaauccgguaaacuacc

SEQ ID NO: 1910762 - RNA, 19 nt, Artificial Sequence
  Description of Artificial Sequence: Synthetic oligonucleotide
  Sense strand starting at position 849 of SEQ ID NO: 1879488
gauggacccuggcuagaau

SEQ ID NO: 1910763 - RNA, 19 nt, Artificial Sequence
  Description of Artificial Sequence: Synthetic oligonucleotide
  Antisense strand to SEQ ID NO: 1910762
auucuagccaggguccauc

SEQ ID NO: 1910764 - RNA, 19 nt, Artificial Sequence
  Description of Artificial Sequence: Synthetic oligonucleotide
  Sense strand starting at position 881 of SEQ ID NO: 1879488
gaugcuauuccugagugac

SEQ ID NO: 1910765 - RNA, 19 nt, Artificial Sequence
  Description of Artificial Sequence: Synthetic oligonucleotide
  Antisense strand to SEQ ID NO: 1910764
gucacucaggaauagcauc

SEQ ID NO: 1910766 - RNA, 19 nt, Artificial Sequence
  Description of Artificial Sequence: Synthetic oligonucleotide
  Sense strand starting at position 887 of SEQ ID NO: 1879488
auuccugagugaccuuuau

SEQ ID NO: 1910767 - RNA, 19 nt, Artificial Sequence
  Description of Artificial Sequence: Synthetic oligonucleotide
  Antisense strand to SEQ ID NO: 1910766
auaaaggucacucaggaau

SEQ ID NO: 1910768 - RNA, 19 nt, Artificial Sequence
  Description of Artificial Sequence: Synthetic oligonucleotide
  Sense strand starting at position 1136 of SEQ ID NO: 1879488
acaggugauccauguaagc

SEQ ID NO: 1910769 - RNA, 19 nt, Artificial Sequence
  Description of Artificial Sequence: Synthetic oligonucleotide
  Antisense strand to SEQ ID NO: 1910768
gcuuacauggaucaccugu

SEQ ID NO: 1910770 - RNA, 19 nt, Artificial Sequence
  Description of Artificial Sequence: Synthetic oligonucleotide
  Sense strand starting at position 1138 of SEQ ID NO: 1879488
aggugauccauguaagcag

SEQ ID NO: 1910771 - RNA, 19 nt, Artificial Sequence
  Description of Artificial Sequence: Synthetic oligonucleotide
  Antisense strand to SEQ ID NO: 1910770
cugcuuacauggaucaccu

SEQ ID NO: 1910772 - RNA, 19 nt, Artificial Sequence
  Description of Artificial Sequence: Synthetic oligonucleotide
  Sense strand starting at position 1236 of SEQ ID NO: 1879488
agcuaauaauuggucauua

SEQ ID NO: 1910773 - RNA, 19 nt, Artificial Sequence
  Description of Artificial Sequence: Synthetic oligonucleotide
  Antisense strand to SEQ ID NO: 1910772
uaaugaccaauuauuagcu

SEQ ID NO: 1910774 - RNA, 19 nt, Artificial Sequence
  Description of Artificial Sequence: Synthetic oligonucleotide
  Sense strand starting at position 1237 of SEQ ID NO: 1879488
gcuaauaauuggucauuaa

SEQ ID NO: 1910775 - RNA, 19 nt, Artificial Sequence
  Description of Artificial Sequence: Synthetic oligonucleotide
  Antisense strand to SEQ ID NO: 1910774
uuaaugaccaauuauuagc

SEQ ID NO: 1910776 - RNA, 19 nt, Artificial Sequence
  Description of Artificial Sequence: Synthetic oligonucleotide
  Sense strand starting at position 1301 of SEQ ID NO: 1879488
aggagcauauguuccacaa

SEQ ID NO: 1910777 - RNA, 19 nt, Artificial Sequence
  Description of Artificial Sequence: Synthetic oligonucleotide
  Antisense strand to SEQ ID NO: 1910776
uuguggaacauaugcuccu

SEQ ID NO: 1910778 - RNA, 19 nt, Artificial Sequence
  Description of Artificial Sequence: Synthetic oligonucleotide
  Sense strand starting at position 1632 of SEQ ID NO: 1879488
cagacaagccucuagguau

SEQ ID NO: 1910779 - RNA, 19 nt, Artificial Sequence
  Description of Artificial Sequence: Synthetic oligonucleotide
  Antisense strand to SEQ ID NO: 1910778
auaccuagaggcuugucug

SEQ ID NO: 1910780 - RNA, 19 nt, Artificial Sequence
  Description of Artificial Sequence: Synthetic oligonucleotide
  Sense strand starting at position 2000 of SEQ ID NO: 1879488
uugugagaaccacgggaau

SEQ ID NO: 1910781 - RNA, 19 nt, Artificial Sequence
  Description of Artificial Sequence: Synthetic oligonucleotide
  Antisense strand to SEQ ID NO: 1910780
auucccgugguucucacaa

SEQ ID NO: 1910782 - RNA, 19 nt, Artificial Sequence
  Description of Artificial Sequence: Synthetic oligonucleotide
  Sense strand starting at position 2178 of SEQ ID NO: 1879488
acuguauggaugcagauua

SEQ ID NO: 1910783 - RNA, 19 nt, Artificial Sequence
  Description of Artificial Sequence: Synthetic oligonucleotide
  Antisense strand to SEQ ID NO: 1910782
uaaucugcauccauacagu

SEQ ID NO: 1910784 - RNA, 19 nt, Artificial Sequence
  Description of Artificial Sequence: Synthetic oligonucleotide
  Sense strand starting at position 2188 of SEQ ID NO: 1879488
ugcagauuauaucugaucu

SEQ ID NO: 1910785 - RNA, 19 nt, Artificial Sequence
  Description of Artificial Sequence: Synthetic oligonucleotide
  Antisense strand to SEQ ID NO: 1910784
agaucagauauaaucugca

SEQ ID NO: 1910786 - RNA, 19 nt, Artificial Sequence
  Description of Artificial Sequence: Synthetic oligonucleotide
  Sense strand starting at position 2220 of SEQ ID NO: 1879488
aguagcagaucagcauuau

SEQ ID NO: 1910787 - RNA, 19 nt, Artificial Sequence
  Description of Artificial Sequence: Synthetic oligonucleotide
  Antisense strand to SEQ ID NO: 1910786
auaaugcugaucugcuacu

SEQ ID NO: 1910788 - RNA, 19 nt, Artificial Sequence
  Description of Artificial Sequence: Synthetic oligonucleotide
  Sense strand starting at position 2221 of SEQ ID NO: 1879488
guagcagaucagcauuaua

SEQ ID NO: 1910789 - RNA, 19 nt, Artificial Sequence
  Description of Artificial Sequence: Synthetic oligonucleotide
  Antisense strand to SEQ ID NO: 1910788
uauaaugcugaucugcuac

SEQ ID NO: 1910790 - RNA, 19 nt, Artificial Sequence
  Description of Artificial Sequence: Synthetic oligonucleotide
  Sense strand starting at position 2351 of SEQ ID NO: 1879488
ggauaagauaagugcccuu

SEQ ID NO: 1910791 - RNA, 19 nt, Artificial Sequence
  Description of Artificial Sequence: Synthetic oligonucleotide
  Antisense strand to SEQ ID NO: 1910790
aagggcacuuaucuuaucc

SEQ ID NO: 1910792 - RNA, 19 nt, Artificial Sequence
  Description of Artificial Sequence: Synthetic oligonucleotide
  Sense strand starting at position 2391 of SEQ ID NO: 1879488
gucuccuuuggucaaugga

SEQ ID NO: 1910793 - RNA, 19 nt, Artificial Sequence
  Description of Artificial Sequence: Synthetic oligonucleotide
  Antisense strand to SEQ ID NO: 1910792
uccauugaccaaaggagac

SEQ ID NO: 1910794 - RNA, 19 nt, Artificial Sequence
  Description of Artificial Sequence: Synthetic oligonucleotide
  Sense strand starting at position 2573 of SEQ ID NO: 1879488
guuucuuucccagacuauu

SEQ ID NO: 1910795 - RNA, 19 nt, Artificial Sequence
  Description of Artificial Sequence: Synthetic oligonucleotide
  Antisense strand to SEQ ID NO: 1910794
aauagucugggaaagaaac

SEQ ID NO: 1910796 - RNA, 19 nt, Artificial Sequence
  Description of Artificial Sequence: Synthetic oligonucleotide
  Sense strand starting at position 2781 of SEQ ID NO: 1879488
gcagcagucagcuaaugac

SEQ ID NO: 1910797 - RNA, 19 nt, Artificial Sequence
  Description of Artificial Sequence: Synthetic oligonucleotide
  Antisense strand to SEQ ID NO: 1910796
gucauuagcugacugcugc

SEQ ID NO: 1910798 - RNA, 19 nt, Artificial Sequence
  Description of Artificial Sequence: Synthetic oligonucleotide
  Sense strand starting at position 2854 of SEQ ID NO: 1879488
ggaggagucccagguaaug

SEQ ID NO: 1910799 - RNA, 19 nt, Artificial Sequence
  Description of Artificial Sequence: Synthetic oligonucleotide
  Antisense strand to SEQ ID NO: 1910798
cauuaccugggacuccucc

SEQ ID NO: 1910800 - RNA, 19 nt, Artificial Sequence
  Description of Artificial Sequence: Synthetic oligonucleotide
  Sense strand starting at position 2889 of SEQ ID NO: 1879488
gcagaagggaugugaaagu

SEQ ID NO: 1910801 - RNA, 19 nt, Artificial Sequence
  Description of Artificial Sequence: Synthetic oligonucleotide
  Antisense strand to SEQ ID NO: 1910800
acuuucacaucccuucugc

SEQ ID NO: 1910802 - RNA, 19 nt, Artificial Sequence
  Description of Artificial Sequence: Synthetic oligonucleotide
  Sense strand starting at position 2899 of SEQ ID NO: 1879488
ugugaaaguggcugaagaa

SEQ ID NO: 1910803 - RNA, 19 nt, Artificial Sequence
  Description of Artificial Sequence: Synthetic oligonucleotide
  Antisense strand to SEQ ID NO: 1910802
uucuucagccacuuucaca

SEQ ID NO: 1910804 - RNA, 19 nt, Artificial Sequence
  Description of Artificial Sequence: Synthetic oligonucleotide
  Sense strand starting at position 2918 of SEQ ID NO: 1879488
gguucuuccaggcaggaaa

SEQ ID NO: 1910805 - RNA, 19 nt, Artificial Sequence
  Description of Artificial Sequence: Synthetic oligonucleotide
  Antisense strand to SEQ ID NO: 1910804
uuuccugccuggaagaacc

SEQ ID NO: 1910806 - RNA, 19 nt, Artificial Sequence
  Description of Artificial Sequence: Synthetic oligonucleotide
  Sense strand starting at position 2968 of SEQ ID NO: 1879488
gcccuagagcucuauaaac

SEQ ID NO: 1910807 - RNA, 19 nt, Artificial Sequence
  Description of Artificial Sequence: Synthetic oligonucleotide
  Antisense strand to SEQ ID NO: 1910806
guuuauagagcucuagggc

SEQ ID NO: 1910808 - RNA, 19 nt, Artificial Sequence
  Description of Artificial Sequence: Synthetic oligonucleotide
  Sense strand starting at position 3081 of SEQ ID NO: 1879488
cuguauagugguuaaauua

SEQ ID NO: 1910809 - RNA, 19 nt, Artificial Sequence
  Description of Artificial Sequence: Synthetic oligonucleotide
  Antisense strand to SEQ ID NO: 1910808
uaauuuaaccacuauacag

SEQ ID NO: 1910810 - RNA, 19 nt, Artificial Sequence
  Description of Artificial Sequence: Synthetic oligonucleotide
  Sense strand starting at position 3090 of SEQ ID NO: 1879488
gguuaaauuaugggugguu

SEQ ID NO: 1910811 - RNA, 19 nt, Artificial Sequence
  Description of Artificial Sequence: Synthetic oligonucleotide
  Antisense strand to SEQ ID NO: 1910810
aaccacccauaauuuaacc

SEQ ID NO: 1910812 - RNA, 19 nt, Artificial Sequence
  Description of Artificial Sequence: Synthetic oligonucleotide
  Sense strand starting at position 3168 of SEQ ID NO: 1879488
auguuaagauuuggaacaa

SEQ ID NO: 1910813 - RNA, 19 nt, Artificial Sequence
  Description of Artificial Sequence: Synthetic oligonucleotide
  Antisense strand to SEQ ID NO: 1910812
uuguuccaaaucuuaacau

SEQ ID NO: 1910814 - RNA, 19 nt, Artificial Sequence
  Description of Artificial Sequence: Synthetic oligonucleotide
  Sense strand starting at position 3169 of SEQ ID NO: 1879488
uguuaagauuuggaacaaa

SEQ ID NO: 1910815 - RNA, 19 nt, Artificial Sequence
  Description of Artificial Sequence: Synthetic oligonucleotide
  Antisense strand to SEQ ID NO: 1910814
uuuguuccaaaucuuaaca

SEQ ID NO: 1910816 - RNA, 19 nt, Artificial Sequence
  Description of Artificial Sequence: Synthetic oligonucleotide
  Sense strand starting at position 3551 of SEQ ID NO: 1879488
gucagcuggaggcaugaua

SEQ ID NO: 1910817 - RNA, 19 nt, Artificial Sequence
  Description of Artificial Sequence: Synthetic oligonucleotide
  Antisense strand to SEQ ID NO: 1910816
uaucaugccuccagcugac

SEQ ID NO: 1910818 - RNA, 19 nt, Artificial Sequence
  Description of Artificial Sequence: Synthetic oligonucleotide
  Sense strand starting at position 3564 of SEQ ID NO: 1879488
augauaguguucccuaaug

SEQ ID NO: 1910819 - RNA, 19 nt, Artificial Sequence
  Description of Artificial Sequence: Synthetic oligonucleotide
  Antisense strand to SEQ ID NO: 1910818
cauuagggaacacuaucau

SEQ ID NO: 1910820 - RNA, 19 nt, Artificial Sequence
  Description of Artificial Sequence: Synthetic oligonucleotide
  Sense strand starting at position 3566 of SEQ ID NO: 1879488
gauaguguucccuaaugug

SEQ ID NO: 1910821 - RNA, 19 nt, Artificial Sequence
  Description of Artificial Sequence: Synthetic oligonucleotide
  Antisense strand to SEQ ID NO: 1910820
cacauuagggaacacuauc

SEQ ID NO: 1910822 - RNA, 19 nt, Artificial Sequence
  Description of Artificial Sequence: Synthetic oligonucleotide
  Sense strand starting at position 3576 of SEQ ID NO: 1879488
ccuaaugugaaagaacgua

SEQ ID NO: 1910823 - RNA, 19 nt, Artificial Sequence
  Description of Artificial Sequence: Synthetic oligonucleotide
  Antisense strand to SEQ ID NO: 1910822
uacguucuuucacauuagg

SEQ ID NO: 1910824 - RNA, 19 nt, Artificial Sequence
  Description of Artificial Sequence: Synthetic oligonucleotide
  Sense strand starting at position 3603 of SEQ ID NO: 1879488
cuugaaauguggucacuaa

SEQ ID NO: 1910825 - RNA, 19 nt, Artificial Sequence
  Description of Artificial Sequence: Synthetic oligonucleotide
  Antisense strand to SEQ ID NO: 1910824
uuagugaccacauuucaag

SEQ ID NO: 1910826 - RNA, 19 nt, Artificial Sequence
  Description of Artificial Sequence: Synthetic oligonucleotide
  Sense strand starting at position 3604 of SEQ ID NO: 1879488
uugaaauguggucacuaac

SEQ ID NO: 1910827 - RNA, 19 nt, Artificial Sequence
  Description of Artificial Sequence: Synthetic oligonucleotide
  Antisense strand to SEQ ID NO: 1910826
guuagugaccacauuucaa

SEQ ID NO: 1910828 - RNA, 19 nt, Artificial Sequence
  Description of Artificial Sequence: Synthetic oligonucleotide
  Sense strand starting at position 3816 of SEQ ID NO: 1879488
guacuacacucauuacaug

SEQ ID NO: 1910829 - RNA, 19 nt, Artificial Sequence
  Description of Artificial Sequence: Synthetic oligonucleotide
  Antisense strand to SEQ ID NO: 1910828
cauguaaugaguguaguac

SEQ ID NO: 1910830 - RNA, 19 nt, Artificial Sequence
  Description of Artificial Sequence: Synthetic oligonucleotide
  Sense strand starting at position 3824 of SEQ ID NO: 1879488
cucauuacaugagugauua

SEQ ID NO: 1910831 - RNA, 19 nt, Artificial Sequence
  Description of Artificial Sequence: Synthetic oligonucleotide
  Antisense strand to SEQ ID NO: 1910830
uaaucacucauguaaugag

SEQ ID NO: 1910832 - RNA, 19 nt, Artificial Sequence
  Description of Artificial Sequence: Synthetic oligonucleotide
  Sense strand starting at position 3825 of SEQ ID NO: 1879488
ucauuacaugagugauuaa

SEQ ID NO: 1910833 - RNA, 19 nt, Artificial Sequence
  Description of Artificial Sequence: Synthetic oligonucleotide
  Antisense strand to SEQ ID NO: 1910832
uuaaucacucauguaauga

SEQ ID NO: 1910834 - RNA, 19 nt, Artificial Sequence
  Description of Artificial Sequence: Synthetic oligonucleotide
  Sense strand starting at position 460 of SEQ ID NO: 1879489
agaugaagacgucgaaugu

SEQ ID NO: 1910835 - RNA, 19 nt, Artificial Sequence
  Description of Artificial Sequence: Synthetic oligonucleotide
  Antisense strand to SEQ ID NO: 1910834
acauucgacgucuucaucu

SEQ ID NO: 1910836 - RNA, 19 nt, Artificial Sequence
  Description of Artificial Sequence: Synthetic oligonucleotide
  Sense strand starting at position 469 of SEQ ID NO: 1879489
cgucgaauguggucucacu

SEQ ID NO: 1910837 - RNA, 19 nt, Artificial Sequence
  Description of Artificial Sequence: Synthetic oligonucleotide
  Antisense strand to SEQ ID NO: 1910836
agugagaccacauucgacg

SEQ ID NO: 1910838 - RNA, 19 nt, Artificial Sequence
  Description of Artificial Sequence: Synthetic oligonucleotide
  Sense strand starting at position 2016 of SEQ ID NO: 1879490
gccagaguguaguggugau

SEQ ID NO: 1910839 - RNA, 19 nt, Artificial Sequence
  Description of Artificial Sequence: Synthetic oligonucleotide
  Antisense strand to SEQ ID NO: 1910838
aucaccacuacacucuggc

SEQ ID NO: 1910840 - RNA, 19 nt, Artificial Sequence
  Description of Artificial Sequence: Synthetic oligonucleotide
  Sense strand starting at position 2087 of SEQ ID NO: 1879490
aaauucuucccgggaagac

SEQ ID NO: 1910841 - RNA, 19 nt, Artificial Sequence
  Description of Artificial Sequence: Synthetic oligonucleotide
  Antisense strand to SEQ ID NO: 1910840
gucuucccgggaagaauuu

SEQ ID NO: 1910842 - RNA, 19 nt, Artificial Sequence
  Description of Artificial Sequence: Synthetic oligonucleotide
  Sense strand starting at position 2203 of SEQ ID NO: 1879490
gaaagagcauuugaagugu

SEQ ID NO: 1910843 - RNA, 19 nt, Artificial Sequence
  Description of Artificial Sequence: Synthetic oligonucleotide
  Antisense strand to SEQ ID NO: 1910842
acacuucaaaugcucuuuc

SEQ ID NO: 1910844 - RNA, 19 nt, Artificial Sequence
  Description of Artificial Sequence: Synthetic oligonucleotide
  Sense strand starting at position 2289 of SEQ ID NO: 1879490
cuuuaagggcccuacauua

SEQ ID NO: 1910845 - RNA, 19 nt, Artificial Sequence
  Description of Artificial Sequence: Synthetic oligonucleotide
  Antisense strand to SEQ ID NO: 1910844
uaauguagggcccuuaaag

SEQ ID NO: 1910846 - RNA, 19 nt, Artificial Sequence
  Description of Artificial Sequence: Synthetic oligonucleotide
  Sense strand starting at position 2358 of SEQ ID NO: 1879490
cuccuagaacagugucaga

SEQ ID NO: 1910847 - RNA, 19 nt, Artificial Sequence
  Description of Artificial Sequence: Synthetic oligonucleotide
  Antisense strand to SEQ ID NO: 1910846
ucugacacuguucuaggag

SEQ ID NO: 1910848 - RNA, 19 nt, Artificial Sequence
  Description of Artificial Sequence: Synthetic oligonucleotide
  Sense strand starting at position 2361 of SEQ ID NO: 1879490
cuagaacagugucagaacu

SEQ ID NO: 1910849 - RNA, 19 nt, Artificial Sequence
  Description of Artificial Sequence: Synthetic oligonucleotide
  Antisense strand to SEQ ID NO: 1910848
aguucugacacuguucuag

SEQ ID NO: 1910850 - RNA, 19 nt, Artificial Sequence
  Description of Artificial Sequence: Synthetic oligonucleotide
  Sense strand starting at position 2363 of SEQ ID NO: 1879490
agaacagugucagaacuca

SEQ ID NO: 1910851 - RNA, 19 nt, Artificial Sequence
  Description of Artificial Sequence: Synthetic oligonucleotide
  Antisense strand to SEQ ID NO: 1910850
ugaguucugacacuguucu

SEQ ID NO: 1910852 - RNA, 19 nt, Artificial Sequence
  Description of Artificial Sequence: Synthetic oligonucleotide
  Sense strand starting at position 2381 of SEQ ID NO: 1879490
agggaagccuucuaggaug

SEQ ID NO: 1910853 - RNA, 19 nt, Artificial Sequence
  Description of Artificial Sequence: Synthetic oligonucleotide
  Antisense strand to SEQ ID NO: 1910852
cauccuagaaggcuucccu

SEQ ID NO: 1910854 - RNA, 19 nt, Artificial Sequence
  Description of Artificial Sequence: Synthetic oligonucleotide
  Sense strand starting at position 2686 of SEQ ID NO: 1879490
ggauacauagcucaguguu

SEQ ID NO: 1910855 - RNA, 19 nt, Artificial Sequence
  Description of Artificial Sequence: Synthetic oligonucleotide
  Antisense strand to SEQ ID NO: 1910854
aacacugagcuauguaucc

SEQ ID NO: 1910856 - RNA, 19 nt, Artificial Sequence
  Description of Artificial Sequence: Synthetic oligonucleotide
  Sense strand starting at position 2688 of SEQ ID NO: 1879490
auacauagcucaguguuga

SEQ ID NO: 1910857 - RNA, 19 nt, Artificial Sequence
  Description of Artificial Sequence: Synthetic oligonucleotide
  Antisense strand to SEQ ID NO: 1910856
ucaacacugagcuauguau

SEQ ID NO: 1910858 - RNA, 19 nt, Artificial Sequence
  Description of Artificial Sequence: Synthetic oligonucleotide
  Sense strand starting at position 2689 of SEQ ID NO: 1879490
uacauagcucaguguugaa

SEQ ID NO: 1910859 - RNA, 19 nt, Artificial Sequence
  Description of Artificial Sequence: Synthetic oligonucleotide
  Antisense strand to SEQ ID NO: 1910858
uucaacacugagcuaugua

SEQ ID NO: 1910860 - RNA, 19 nt, Artificial Sequence
  Description of Artificial Sequence: Synthetic oligonucleotide
  Sense strand starting at position 2949 of SEQ ID NO: 1879490
cauggugaggucuaguaac

SEQ ID NO: 1910861 - RNA, 19 nt, Artificial Sequence
  Description of Artificial Sequence: Synthetic oligonucleotide
  Antisense strand to SEQ ID NO: 1910860
guuacuagaccucaccaug

SEQ ID NO: 1910862 - RNA, 19 nt, Artificial Sequence
  Description of Artificial Sequence: Synthetic oligonucleotide
  Sense strand starting at position 2955 of SEQ ID NO: 1879490
gaggucuaguaacagacua

SEQ ID NO: 1910863 - RNA, 19 nt, Artificial Sequence
  Description of Artificial Sequence: Synthetic oligonucleotide
  Antisense strand to SEQ ID NO: 1910862
uagucuguuacuagaccuc

SEQ ID NO: 1910864 - RNA, 19 nt, Artificial Sequence
  Description of Artificial Sequence: Synthetic oligonucleotide
  Sense strand starting at position 3044 of SEQ ID NO: 1879490
ggcccagcuucucagacuu

SEQ ID NO: 1910865 - RNA, 19 nt, Artificial Sequence
  Description of Artificial Sequence: Synthetic oligonucleotide
  Antisense strand to SEQ ID NO: 1910864
aagucugagaagcugggcc

SEQ ID NO: 1910866 - RNA, 19 nt, Artificial Sequence
  Description of Artificial Sequence: Synthetic oligonucleotide
  Sense strand starting at position 3112 of SEQ ID NO: 1879490
ugcuuucugccgcuggaga

SEQ ID NO: 1910867 - RNA, 19 nt, Artificial Sequence
  Description of Artificial Sequence: Synthetic oligonucleotide
  Antisense strand to SEQ ID NO: 1910866
ucuccagcggcagaaagca

SEQ ID NO: 1910868 - RNA, 19 nt, Artificial Sequence
  Description of Artificial Sequence: Synthetic oligonucleotide
  Sense strand starting at position 3113 of SEQ ID NO: 1879490
gcuuucugccgcuggagaa

SEQ ID NO: 1910869 - RNA, 19 nt, Artificial Sequence
  Description of Artificial Sequence: Synthetic oligonucleotide
  Antisense strand to SEQ ID NO: 1910868
uucuccagcggcagaaagc

SEQ ID NO: 1910870 - RNA, 19 nt, Artificial Sequence
  Description of Artificial Sequence: Synthetic oligonucleotide
  Sense strand starting at position 3214 of SEQ ID NO: 1879490
ggaucacuccucuggccau

SEQ ID NO: 1910871 - RNA, 19 nt, Artificial Sequence
  Description of Artificial Sequence: Synthetic oligonucleotide
  Antisense strand to SEQ ID NO: 1910870
auggccagaggagugaucc

SEQ ID NO: 1910872 - RNA, 19 nt, Artificial Sequence
  Description of Artificial Sequence: Synthetic oligonucleotide
  Sense strand starting at position 3322 of SEQ ID NO: 1879490
cccagaggcagugaucuuu

SEQ ID NO: 1910873 - RNA, 19 nt, Artificial Sequence
  Description of Artificial Sequence: Synthetic oligonucleotide
  Antisense strand to SEQ ID NO: 1910872
aaagaucacugccucuggg

SEQ ID NO: 1910874 - RNA, 19 nt, Artificial Sequence
  Description of Artificial Sequence: Synthetic oligonucleotide
  Sense strand starting at position 3349 of SEQ ID NO: 1879490
ugacuaugcuccugucacu

SEQ ID NO: 1910875 - RNA, 19 nt, Artificial Sequence
  Description of Artificial Sequence: Synthetic oligonucleotide
  Antisense strand to SEQ ID NO: 1910874
agugacaggagcauaguca

SEQ ID NO: 1910876 - RNA, 19 nt, Artificial Sequence
  Description of Artificial Sequence: Synthetic oligonucleotide
  Sense strand starting at position 3361 of SEQ ID NO: 1879490
ugucacuucccugaugaaa

SEQ ID NO: 1910877 - RNA, 19 nt, Artificial Sequence
  Description of Artificial Sequence: Synthetic oligonucleotide
  Antisense strand to SEQ ID NO: 1910876
uuucaucagggaagugaca

SEQ ID NO: 1910878 - RNA, 19 nt, Artificial Sequence
  Description of Artificial Sequence: Synthetic oligonucleotide
  Sense strand starting at position 19 of SEQ ID NO: 1879491
auauuuguccauuguaguc

SEQ ID NO: 1910879 - RNA, 19 nt, Artificial Sequence
  Description of Artificial Sequence: Synthetic oligonucleotide
  Antisense strand to SEQ ID NO: 1910878
gacuacaauggacaaauau

SEQ ID NO: 1910880 - RNA, 19 nt, Artificial Sequence
  Description of Artificial Sequence: Synthetic oligonucleotide
  Sense strand starting at position 144 of SEQ ID NO: 1879491
ucucacuuacaacgagaua

SEQ ID NO: 1910881 - RNA, 19 nt, Artificial Sequence
  Description of Artificial Sequence: Synthetic oligonucleotide
  Antisense strand to SEQ ID NO: 1910880
uaucucguuguaagugaga

SEQ ID NO: 1910882 - RNA, 19 nt, Artificial Sequence
  Description of Artificial Sequence: Synthetic oligonucleotide
  Sense strand starting at position 559 of SEQ ID NO: 1879491
cuugguauauauccuauga

SEQ ID NO: 1910883 - RNA, 19 nt, Artificial Sequence
  Description of Artificial Sequence: Synthetic oligonucleotide
  Antisense strand to SEQ ID NO: 1910882
ucauaggauauauaccaag

SEQ ID NO: 1910884 - RNA, 19 nt, Artificial Sequence
  Description of Artificial Sequence: Synthetic oligonucleotide
  Sense strand starting at position 657 of SEQ ID NO: 1879491
uuaaguauacuguaccuua

SEQ ID NO: 1910885 - RNA, 19 nt, Artificial Sequence
  Description of Artificial Sequence: Synthetic oligonucleotide
  Antisense strand to SEQ ID NO: 1910884
uaagguacaguauacuuaa

SEQ ID NO: 1910886 - RNA, 19 nt, Artificial Sequence
  Description of Artificial Sequence: Synthetic oligonucleotide
  Sense strand starting at position 910 of SEQ ID NO: 1879491
gucuucugucuggagauaa

SEQ ID NO: 1910887 - RNA, 19 nt, Artificial Sequence
  Description of Artificial Sequence: Synthetic oligonucleotide
  Antisense strand to SEQ ID NO: 1910886
uuaucuccagacagaagac

SEQ ID NO: 1910888 - RNA, 19 nt, Artificial Sequence
  Description of Artificial Sequence: Synthetic oligonucleotide
  Sense strand starting at position 1006 of SEQ ID NO: 1879491
acauuuauuugggaguugu

SEQ ID NO: 1910889 - RNA, 19 nt, Artificial Sequence
  Description of Artificial Sequence: Synthetic oligonucleotide
  Antisense strand to SEQ ID NO: 1910888
acaacucccaaauaaaugu

SEQ ID NO: 1910890 - RNA, 19 nt, Artificial Sequence
  Description of Artificial Sequence: Synthetic oligonucleotide
  Sense strand starting at position 1443 of SEQ ID NO: 1879491
uugugucuggaguauaaag

SEQ ID NO: 1910891 - RNA, 19 nt, Artificial Sequence
  Description of Artificial Sequence: Synthetic oligonucleotide
  Antisense strand to SEQ ID NO: 1910890
cuuuauacuccagacacaa

SEQ ID NO: 1910892 - RNA, 19 nt, Artificial Sequence
  Description of Artificial Sequence: Synthetic oligonucleotide
  Sense strand starting at position 1729 of SEQ ID NO: 1879491
acuuauaggaggugguuua

SEQ ID NO: 1910893 - RNA, 19 nt, Artificial Sequence
  Description of Artificial Sequence: Synthetic oligonucleotide
  Antisense strand to SEQ ID NO: 1910892
uaaaccaccuccuauaagu

SEQ ID NO: 1910894 - RNA, 19 nt, Artificial Sequence
  Description of Artificial Sequence: Synthetic oligonucleotide
  Sense strand starting at position 1730 of SEQ ID NO: 1879491
cuuauaggaggugguuuaa

SEQ ID NO: 1910895 - RNA, 19 nt, Artificial Sequence
  Description of Artificial Sequence: Synthetic oligonucleotide
  Antisense strand to SEQ ID NO: 1910894
uuaaaccaccuccuauaag

SEQ ID NO: 1910896 - RNA, 19 nt, Artificial Sequence
  Description of Artificial Sequence: Synthetic oligonucleotide
  Sense strand starting at position 2051 of SEQ ID NO: 1879491
cugaucauuuccguuuguu

SEQ ID NO: 1910897 - RNA, 19 nt, Artificial Sequence
  Description of Artificial Sequence: Synthetic oligonucleotide
  Antisense strand to SEQ ID NO: 1910896
aacaaacggaaaugaucag

SEQ ID NO: 1910898 - RNA, 19 nt, Artificial Sequence
  Description of Artificial Sequence: Synthetic oligonucleotide
  Sense strand starting at position 2054 of SEQ ID NO: 1879491
aucauuuccguuuguuaug

SEQ ID NO: 1910899 - RNA, 19 nt, Artificial Sequence
  Description of Artificial Sequence: Synthetic oligonucleotide
  Antisense strand to SEQ ID NO: 1910898
cauaacaaacggaaaugau

SEQ ID NO: 1910900 - RNA, 19 nt, Artificial Sequence
  Description of Artificial Sequence: Synthetic oligonucleotide
  Sense strand starting at position 2055 of SEQ ID NO: 1879491
ucauuuccguuuguuauga

SEQ ID NO: 1910901 - RNA, 19 nt, Artificial Sequence
  Description of Artificial Sequence: Synthetic oligonucleotide
  Antisense strand to SEQ ID NO: 1910900
ucauaacaaacggaaauga

SEQ ID NO: 1910902 - RNA, 19 nt, Artificial Sequence
  Description of Artificial Sequence: Synthetic oligonucleotide
  Sense strand starting at position 2056 of SEQ ID NO: 1879491
cauuuccguuuguuaugaa

SEQ ID NO: 1910903 - RNA, 19 nt, Artificial Sequence
  Description of Artificial Sequence: Synthetic oligonucleotide
  Antisense strand to SEQ ID NO: 1910902
uucauaacaaacggaaaug

SEQ ID NO: 1910904 - RNA, 19 nt, Artificial Sequence
  Description of Artificial Sequence: Synthetic oligonucleotide
  Sense strand starting at position 2190 of SEQ ID NO: 1879491
uagaguugugauuauagua

SEQ ID NO: 1910905 - RNA, 19 nt, Artificial Sequence
  Description of Artificial Sequence: Synthetic oligonucleotide
  Antisense strand to SEQ ID NO: 1910904
uacuauaaucacaacucua

SEQ ID NO: 1910906 - RNA, 19 nt, Artificial Sequence
  Description of Artificial Sequence: Synthetic oligonucleotide
  Sense strand starting at position 2197 of SEQ ID NO: 1879491
gugauuauaguaugagaaa

SEQ ID NO: 1910907 - RNA, 19 nt, Artificial Sequence
  Description of Artificial Sequence: Synthetic oligonucleotide
  Antisense strand to SEQ ID NO: 1910906
uuucucauacuauaaucac

SEQ ID NO: 1910908 - RNA, 19 nt, Artificial Sequence
  Description of Artificial Sequence: Synthetic oligonucleotide
  Sense strand starting at position 2224 of SEQ ID NO: 1879491
uuuaaacacugaguuaagu

SEQ ID NO: 1910909 - RNA, 19 nt, Artificial Sequence
  Description of Artificial Sequence: Synthetic oligonucleotide
  Antisense strand to SEQ ID NO: 1910908
acuuaacucaguguuuaaa

SEQ ID NO: 1910910 - RNA, 19 nt, Artificial Sequence
  Description of Artificial Sequence: Synthetic oligonucleotide
  Sense strand starting at position 2300 of SEQ ID NO: 1879491
agaguaacacauuguuauc

SEQ ID NO: 1910911 - RNA, 19 nt, Artificial Sequence
  Description of Artificial Sequence: Synthetic oligonucleotide
  Antisense strand to SEQ ID NO: 1910910
gauaacaauguguuacucu

SEQ ID NO: 1910912 - RNA, 19 nt, Artificial Sequence
  Description of Artificial Sequence: Synthetic oligonucleotide
  Sense strand starting at position 2467 of SEQ ID NO: 1879491
aggugaaaucaaggccaaa

SEQ ID NO: 1910913 - RNA, 19 nt, Artificial Sequence
  Description of Artificial Sequence: Synthetic oligonucleotide
  Antisense strand to SEQ ID NO: 1910912
uuuggccuugauuucaccu

SEQ ID NO: 1910914 - RNA, 19 nt, Artificial Sequence
  Description of Artificial Sequence: Synthetic oligonucleotide
  Sense strand starting at position 2485 of SEQ ID NO: 1879491
auacguguuccugauauaa

SEQ ID NO: 1910915 - RNA, 19 nt, Artificial Sequence
  Description of Artificial Sequence: Synthetic oligonucleotide
  Antisense strand to SEQ ID NO: 1910914
uuauaucaggaacacguau

SEQ ID NO: 1910916 - RNA, 19 nt, Artificial Sequence
  Description of Artificial Sequence: Synthetic oligonucleotide
  Sense strand starting at position 2507 of SEQ ID NO: 1879491
gcaggaagucgaugaaaug

SEQ ID NO: 1910917 - RNA, 19 nt, Artificial Sequence
  Description of Artificial Sequence: Synthetic oligonucleotide
  Antisense strand to SEQ ID NO: 1910916
cauuucaucgacuuccugc

SEQ ID NO: 1910918 - RNA, 19 nt, Artificial Sequence
  Description of Artificial Sequence: Synthetic oligonucleotide
  Sense strand starting at position 2508 of SEQ ID NO: 1879491
caggaagucgaugaaaugu

SEQ ID NO: 1910919 - RNA, 19 nt, Artificial Sequence
  Description of Artificial Sequence: Synthetic oligonucleotide
  Antisense strand to SEQ ID NO: 1910918
acauuucaucgacuuccug

SEQ ID NO: 1910920 - RNA, 19 nt, Artificial Sequence
  Description of Artificial Sequence: Synthetic oligonucleotide
  Sense strand starting at position 2516 of SEQ ID NO: 1879491
cgaugaaauguuuauugua

SEQ ID NO: 1910921 - RNA, 19 nt, Artificial Sequence
  Description of Artificial Sequence: Synthetic oligonucleotide
  Antisense strand to SEQ ID NO: 1910920
uacaauaaacauuucaucg

SEQ ID NO: 1910922 - RNA, 19 nt, Artificial Sequence
  Description of Artificial Sequence: Synthetic oligonucleotide
  Sense strand starting at position 2546 of SEQ ID NO: 1879491
auugaaacauaugcuugaa

SEQ ID NO: 1910923 - RNA, 19 nt, Artificial Sequence
  Description of Artificial Sequence: Synthetic oligonucleotide
  Antisense strand to SEQ ID NO: 1910922
uucaagcauauguuucaau

SEQ ID NO: 1910924 - RNA, 19 nt, Artificial Sequence
  Description of Artificial Sequence: Synthetic oligonucleotide
  Sense strand starting at position 2548 of SEQ ID NO: 1879491
ugaaacauaugcuugaaua

SEQ ID NO: 1910925 - RNA, 19 nt, Artificial Sequence
  Description of Artificial Sequence: Synthetic oligonucleotide
  Antisense strand to SEQ ID NO: 1910924
uauucaagcauauguuuca

SEQ ID NO: 1910926 - RNA, 19 nt, Artificial Sequence
  Description of Artificial Sequence: Synthetic oligonucleotide
  Sense strand starting at position 2854 of SEQ ID NO: 1879491
ucuauacaagguugaaauu

SEQ ID NO: 1910927 - RNA, 19 nt, Artificial Sequence
  Description of Artificial Sequence: Synthetic oligonucleotide
  Antisense strand to SEQ ID NO: 1910926
aauuucaaccuuguauaga

SEQ ID NO: 1910928 - RNA, 19 nt, Artificial Sequence
  Description of Artificial Sequence: Synthetic oligonucleotide
  Sense strand starting at position 2956 of SEQ ID NO: 1879491
ccuuuaguauuugcuugau

SEQ ID NO: 1910929 - RNA, 19 nt, Artificial Sequence
  Description of Artificial Sequence: Synthetic oligonucleotide
  Antisense strand to SEQ ID NO: 1910928
aucaagcaaauacuaaagg

SEQ ID NO: 1910930 - RNA, 19 nt, Artificial Sequence
  Description of Artificial Sequence: Synthetic oligonucleotide
  Sense strand starting at position 2958 of SEQ ID NO: 1879491
uuuaguauuugcuugaucu

SEQ ID NO: 1910931 - RNA, 19 nt, Artificial Sequence
  Description of Artificial Sequence: Synthetic oligonucleotide
  Antisense strand to SEQ ID NO: 1910930
agaucaagcaaauacuaaa

SEQ ID NO: 1910932 - RNA, 19 nt, Artificial Sequence
  Description of Artificial Sequence: Synthetic oligonucleotide
  Sense strand starting at position 2959 of SEQ ID NO: 1879491
uuaguauuugcuugaucuu

SEQ ID NO: 1910933 - RNA, 19 nt, Artificial Sequence
  Description of Artificial Sequence: Synthetic oligonucleotide
  Antisense strand to SEQ ID NO: 1910932
aagaucaagcaaauacuaa

SEQ ID NO: 1910934 - RNA, 19 nt, Artificial Sequence
  Description of Artificial Sequence: Synthetic oligonucleotide
  Sense strand starting at position 3029 of SEQ ID NO: 1879491
guugucuguguuguaugua

SEQ ID NO: 1910935 - RNA, 19 nt, Artificial Sequence
  Description of Artificial Sequence: Synthetic oligonucleotide
  Antisense strand to SEQ ID NO: 1910934
uacauacaacacagacaac

SEQ ID NO: 1910936 - RNA, 19 nt, Artificial Sequence
  Description of Artificial Sequence: Synthetic oligonucleotide
  Sense strand starting at position 3115 of SEQ ID NO: 1879491
uauacauuacuagggaguu

SEQ ID NO: 1910937 - RNA, 19 nt, Artificial Sequence
  Description of Artificial Sequence: Synthetic oligonucleotide
  Antisense strand to SEQ ID NO: 1910936
aacucccuaguaauguaua

SEQ ID NO: 1910938 - RNA, 19 nt, Artificial Sequence
  Description of Artificial Sequence: Synthetic oligonucleotide
  Sense strand starting at position 3210 of SEQ ID NO: 1879491
caaagaaaugcaugauugu

SEQ ID NO: 1910939 - RNA, 19 nt, Artificial Sequence
  Description of Artificial Sequence: Synthetic oligonucleotide
  Antisense strand to SEQ ID NO: 1910938
acaaucaugcauuucuuug

SEQ ID NO: 1910940 - RNA, 19 nt, Artificial Sequence
  Description of Artificial Sequence: Synthetic oligonucleotide
  Sense strand starting at position 3213 of SEQ ID NO: 1879491
agaaaugcaugauuguauu

SEQ ID NO: 1910941 - RNA, 19 nt, Artificial Sequence
  Description of Artificial Sequence: Synthetic oligonucleotide
  Antisense strand to SEQ ID NO: 1910940
aauacaaucaugcauuucu

SEQ ID NO: 1910942 - RNA, 19 nt, Artificial Sequence
  Description of Artificial Sequence: Synthetic oligonucleotide
  Sense strand starting at position 3277 of SEQ ID NO: 1879491
cuugcuaucccguuaguuu

SEQ ID NO: 1910943 - RNA, 19 nt, Artificial Sequence
  Description of Artificial Sequence: Synthetic oligonucleotide
  Antisense strand to SEQ ID NO: 1910942
aaacuaacgggauagcaag

SEQ ID NO: 1910944 - RNA, 19 nt, Artificial Sequence
  Description of Artificial Sequence: Synthetic oligonucleotide
  Sense strand starting at position 3301 of SEQ ID NO: 1879491
auggucuggagcuacaauu

SEQ ID NO: 1910945 - RNA, 19 nt, Artificial Sequence
  Description of Artificial Sequence: Synthetic oligonucleotide
  Antisense strand to SEQ ID NO: 1910944
aauuguagcuccagaccau

SEQ ID NO: 1910946 - RNA, 19 nt, Artificial Sequence
  Description of Artificial Sequence: Synthetic oligonucleotide
  Sense strand starting at position 3659 of SEQ ID NO: 1879491
ugucuaaaggaguaagucu

SEQ ID NO: 1910947 - RNA, 19 nt, Artificial Sequence
  Description of Artificial Sequence: Synthetic oligonucleotide
  Antisense strand to SEQ ID NO: 1910946
agacuuacuccuuuagaca

SEQ ID NO: 1910948 - RNA, 19 nt, Artificial Sequence
  Description of Artificial Sequence: Synthetic oligonucleotide
  Sense strand starting at position 3667 of SEQ ID NO: 1879491
ggaguaagucugggaaaug

SEQ ID NO: 1910949 - RNA, 19 nt, Artificial Sequence
  Description of Artificial Sequence: Synthetic oligonucleotide
  Antisense strand to SEQ ID NO: 1910948
cauuucccagacuuacucc

SEQ ID NO: 1910950 - RNA, 19 nt, Artificial Sequence
  Description of Artificial Sequence: Synthetic oligonucleotide
  Sense strand starting at position 3677 of SEQ ID NO: 1879491
ugggaaaugcuucacaggu

SEQ ID NO: 1910951 - RNA, 19 nt, Artificial Sequence
  Description of Artificial Sequence: Synthetic oligonucleotide
  Antisense strand to SEQ ID NO: 1910950
accugugaagcauuuccca

SEQ ID NO: 1910952 - RNA, 19 nt, Artificial Sequence
  Description of Artificial Sequence: Synthetic oligonucleotide
  Sense strand starting at position 3720 of SEQ ID NO: 1879491
ugcacaugaguauauuaca

SEQ ID NO: 1910953 - RNA, 19 nt, Artificial Sequence
  Description of Artificial Sequence: Synthetic oligonucleotide
  Antisense strand to SEQ ID NO: 1910952
uguaauauacucaugugca

SEQ ID NO: 1910954 - RNA, 19 nt, Artificial Sequence
  Description of Artificial Sequence: Synthetic oligonucleotide
  Sense strand starting at position 3744 of SEQ ID NO: 1879491
aguauaagauauucuguag

SEQ ID NO: 1910955 - RNA, 19 nt, Artificial Sequence
  Description of Artificial Sequence: Synthetic oligonucleotide
  Antisense strand to SEQ ID NO: 1910954
cuacagaauaucuuauacu

SEQ ID NO: 1910956 - RNA, 19 nt, Artificial Sequence
  Description of Artificial Sequence: Synthetic oligonucleotide
  Sense strand starting at position 3937 of SEQ ID NO: 1879491
cggagaaggcaucaugagu

SEQ ID NO: 1910957 - RNA, 19 nt, Artificial Sequence
  Description of Artificial Sequence: Synthetic oligonucleotide
  Antisense strand to SEQ ID NO: 1910956
acucaugaugccuucuccg

SEQ ID NO: 1910958 - RNA, 19 nt, Artificial Sequence
  Description of Artificial Sequence: Synthetic oligonucleotide
  Sense strand starting at position 181 of SEQ ID NO: 1879492
cuaguacuacuguaaauac

SEQ ID NO: 1910959 - RNA, 19 nt, Artificial Sequence
  Description of Artificial Sequence: Synthetic oligonucleotide
  Antisense strand to SEQ ID NO: 1910958
guauuuacaguaguacuag

SEQ ID NO: 1910960 - RNA, 19 nt, Artificial Sequence
  Description of Artificial Sequence: Synthetic oligonucleotide
  Sense strand starting at position 218 of SEQ ID NO: 1879492
gugaaucuguucucuagaa

SEQ ID NO: 1910961 - RNA, 19 nt, Artificial Sequence
  Description of Artificial Sequence: Synthetic oligonucleotide
  Antisense strand to SEQ ID NO: 1910960
uucuagagaacagauucac

SEQ ID NO: 1910962 - RNA, 19 nt, Artificial Sequence
  Description of Artificial Sequence: Synthetic oligonucleotide
  Sense strand starting at position 219 of SEQ ID NO: 1879492
ugaaucuguucucuagaau

SEQ ID NO: 1910963 - RNA, 19 nt, Artificial Sequence
  Description of Artificial Sequence: Synthetic oligonucleotide
  Antisense strand to SEQ ID NO: 1910962
auucuagagaacagauuca

SEQ ID NO: 1910964 - RNA, 19 nt, Artificial Sequence
  Description of Artificial Sequence: Synthetic oligonucleotide
  Sense strand starting at position 225 of SEQ ID NO: 1879492
uguucucuagaaugucaaa

SEQ ID NO: 1910965 - RNA, 19 nt, Artificial Sequence
  Description of Artificial Sequence: Synthetic oligonucleotide
  Antisense strand to SEQ ID NO: 1910964
uuugacauucuagagaaca

SEQ ID NO: 1910966 - RNA, 19 nt, Artificial Sequence
  Description of Artificial Sequence: Synthetic oligonucleotide
  Sense strand starting at position 276 of SEQ ID NO: 1879492
aaaguuggaucuccaguaa

SEQ ID NO: 1910967 - RNA, 19 nt, Artificial Sequence
  Description of Artificial Sequence: Synthetic oligonucleotide
  Antisense strand to SEQ ID NO: 1910966
uuacuggagauccaacuuu

SEQ ID NO: 1910968 - RNA, 19 nt, Artificial Sequence
  Description of Artificial Sequence: Synthetic oligonucleotide
  Sense strand starting at position 320 of SEQ ID NO: 1879492
gguguugacauagaucagu

SEQ ID NO: 1910969 - RNA, 19 nt, Artificial Sequence
  Description of Artificial Sequence: Synthetic oligonucleotide
  Antisense strand to SEQ ID NO: 1910968
acugaucuaugucaacacc

SEQ ID NO: 1910970 - RNA, 19 nt, Artificial Sequence
  Description of Artificial Sequence: Synthetic oligonucleotide
  Sense strand starting at position 323 of SEQ ID NO: 1879492
guugacauagaucaguauu

SEQ ID NO: 1910971 - RNA, 19 nt, Artificial Sequence
  Description of Artificial Sequence: Synthetic oligonucleotide
  Antisense strand to SEQ ID NO: 1910970
aauacugaucuaugucaac

SEQ ID NO: 1910972 - RNA, 19 nt, Artificial Sequence
  Description of Artificial Sequence: Synthetic oligonucleotide
  Sense strand starting at position 325 of SEQ ID NO: 1879492
ugacauagaucaguauuga

SEQ ID NO: 1910973 - RNA, 19 nt, Artificial Sequence
  Description of Artificial Sequence: Synthetic oligonucleotide
  Antisense strand to SEQ ID NO: 1910972
ucaauacugaucuauguca

SEQ ID NO: 1910974 - RNA, 19 nt, Artificial Sequence
  Description of Artificial Sequence: Synthetic oligonucleotide
  Sense strand starting at position 491 of SEQ ID NO: 1879492
gagcacuaggacuggauua

SEQ ID NO: 1910975 - RNA, 19 nt, Artificial Sequence
  Description of Artificial Sequence: Synthetic oligonucleotide
  Antisense strand to SEQ ID NO: 1910974
uaauccaguccuagugcuc

SEQ ID NO: 1910976 - RNA, 19 nt, Artificial Sequence
  Description of Artificial Sequence: Synthetic oligonucleotide
  Sense strand starting at position 502 of SEQ ID NO: 1879492
cuggauuaccuagguuuga

SEQ ID NO: 1910977 - RNA, 19 nt, Artificial Sequence
  Description of Artificial Sequence: Synthetic oligonucleotide
  Antisense strand to SEQ ID NO: 1910976
ucaaaccuagguaauccag

SEQ ID NO: 1910978 - RNA, 19 nt, Artificial Sequence
  Description of Artificial Sequence: Synthetic oligonucleotide
  Sense strand starting at position 612 of SEQ ID NO: 1879492
aaaguaggauccuuagugu

SEQ ID NO: 1910979 - RNA, 19 nt, Artificial Sequence
  Description of Artificial Sequence: Synthetic oligonucleotide
  Antisense strand to SEQ ID NO: 1910978
acacuaaggauccuacuuu

SEQ ID NO: 1910980 - RNA, 19 nt, Artificial Sequence
  Description of Artificial Sequence: Synthetic oligonucleotide
  Sense strand starting at position 635 of SEQ ID NO: 1879492
guaaguaaguuauuaccuu

SEQ ID NO: 1910981 - RNA, 19 nt, Artificial Sequence
  Description of Artificial Sequence: Synthetic oligonucleotide
  Antisense strand to SEQ ID NO: 1910980
aagguaauaacuuacuuac

SEQ ID NO: 1910982 - RNA, 19 nt, Artificial Sequence
  Description of Artificial Sequence: Synthetic oligonucleotide
  Sense strand starting at position 675 of SEQ ID NO: 1879492
ggcacauagugaguacuca

SEQ ID NO: 1910983 - RNA, 19 nt, Artificial Sequence
  Description of Artificial Sequence: Synthetic oligonucleotide
  Antisense strand to SEQ ID NO: 1910982
ugaguacucacuaugugcc

SEQ ID NO: 1910984 - RNA, 19 nt, Artificial Sequence
  Description of Artificial Sequence: Synthetic oligonucleotide
  Sense strand starting at position 1013 of SEQ ID NO: 1879492
ccauuauuauugguacugu

SEQ ID NO: 1910985 - RNA, 19 nt, Artificial Sequence
  Description of Artificial Sequence: Synthetic oligonucleotide
  Antisense strand to SEQ ID NO: 1910984
acaguaccaauaauaaugg

SEQ ID NO: 1910986 - RNA, 19 nt, Artificial Sequence
  Description of Artificial Sequence: Synthetic oligonucleotide
  Sense strand starting at position 1224 of SEQ ID NO: 1879492
auguauggccaucaugcaa

SEQ ID NO: 1910987 - RNA, 19 nt, Artificial Sequence
  Description of Artificial Sequence: Synthetic oligonucleotide
  Antisense strand to SEQ ID NO: 1910986
uugcaugauggccauacau

SEQ ID NO: 1910988 - RNA, 19 nt, Artificial Sequence
  Description of Artificial Sequence: Synthetic oligonucleotide
  Sense strand starting at position 1558 of SEQ ID NO: 1879492
gaaauccuuguggguguaa

SEQ ID NO: 1910989 - RNA, 19 nt, Artificial Sequence
  Description of Artificial Sequence: Synthetic oligonucleotide
  Antisense strand to SEQ ID NO: 1910988
uuacacccacaaggauuuc

SEQ ID NO: 1910990 - RNA, 19 nt, Artificial Sequence
  Description of Artificial Sequence: Synthetic oligonucleotide
  Sense strand starting at position 1559 of SEQ ID NO: 1879492
aaauccuuguggguguaau

SEQ ID NO: 1910991 - RNA, 19 nt, Artificial Sequence
  Description of Artificial Sequence: Synthetic oligonucleotide
  Antisense strand to SEQ ID NO: 1910990
auuacacccacaaggauuu

SEQ ID NO: 1910992 - RNA, 19 nt, Artificial Sequence
  Description of Artificial Sequence: Synthetic oligonucleotide
  Sense strand starting at position 1569 of SEQ ID NO: 1879492
ggguguaauuagcuagaga

SEQ ID NO: 1910993 - RNA, 19 nt, Artificial Sequence
  Description of Artificial Sequence: Synthetic oligonucleotide
  Antisense strand to SEQ ID NO: 1910992
ucucuagcuaauuacaccc

SEQ ID NO: 1910994 - RNA, 19 nt, Artificial Sequence
  Description of Artificial Sequence: Synthetic oligonucleotide
  Sense strand starting at position 1570 of SEQ ID NO: 1879492
gguguaauuagcuagagaa

SEQ ID NO: 1910995 - RNA, 19 nt, Artificial Sequence
  Description of Artificial Sequence: Synthetic oligonucleotide
  Antisense strand to SEQ ID NO: 1910994
uucucuagcuaauuacacc

SEQ ID NO: 1910996 - RNA, 19 nt, Artificial Sequence
  Description of Artificial Sequence: Synthetic oligonucleotide
  Sense strand starting at position 1728 of SEQ ID NO: 1879492
gaacuaagaggguguucua

SEQ ID NO: 1910997 - RNA, 19 nt, Artificial Sequence
  Description of Artificial Sequence: Synthetic oligonucleotide
  Antisense strand to SEQ ID NO: 1910996
uagaacacccucuuaguuc

SEQ ID NO: 1910998 - RNA, 19 nt, Artificial Sequence
  Description of Artificial Sequence: Synthetic oligonucleotide
  Sense strand starting at position 1916 of SEQ ID NO: 1879492
ccugauuucugggaucuuc

SEQ ID NO: 1910999 - RNA, 19 nt, Artificial Sequence
  Description of Artificial Sequence: Synthetic oligonucleotide
  Antisense strand to SEQ ID NO: 1910998
gaagaucccagaaaucagg

SEQ ID NO: 1911000 - RNA, 19 nt, Artificial Sequence
  Description of Artificial Sequence: Synthetic oligonucleotide
  Sense strand starting at position 2329 of SEQ ID NO: 1879492
uuugaauaauugcugcaaa

SEQ ID NO: 1911001 - RNA, 19 nt, Artificial Sequence
  Description of Artificial Sequence: Synthetic oligonucleotide
  Antisense strand to SEQ ID NO: 1911000
uuugcagcaauuauucaaa

SEQ ID NO: 1911002 - RNA, 19 nt, Artificial Sequence
  Description of Artificial Sequence: Synthetic oligonucleotide
  Sense strand starting at position 2461 of SEQ ID NO: 1879492
ugauaauaggcaugcaaua

SEQ ID NO: 1911003 - RNA, 19 nt, Artificial Sequence
  Description of Artificial Sequence: Synthetic oligonucleotide
  Antisense strand to SEQ ID NO: 1911002
uauugcaugccuauuauca

SEQ ID NO: 1911004 - RNA, 19 nt, Artificial Sequence
  Description of Artificial Sequence: Synthetic oligonucleotide
  Sense strand starting at position 2521 of SEQ ID NO: 1879492
aagcguuuacccuuugugu

SEQ ID NO: 1911005 - RNA, 19 nt, Artificial Sequence
  Description of Artificial Sequence: Synthetic oligonucleotide
  Antisense strand to SEQ ID NO: 1911004
acacaaaggguaaacgcuu

SEQ ID NO: 1911006 - RNA, 19 nt, Artificial Sequence
  Description of Artificial Sequence: Synthetic oligonucleotide
  Sense strand starting at position 2522 of SEQ ID NO: 1879492
agcguuuacccuuuguguu

SEQ ID NO: 1911007 - RNA, 19 nt, Artificial Sequence
  Description of Artificial Sequence: Synthetic oligonucleotide
  Antisense strand to SEQ ID NO: 1911006
aacacaaaggguaaacgcu

SEQ ID NO: 1911008 - RNA, 19 nt, Artificial Sequence
  Description of Artificial Sequence: Synthetic oligonucleotide
  Sense strand starting at position 3063 of SEQ ID NO: 1879492
uauuccuagcagugagauu

SEQ ID NO: 1911009 - RNA, 19 nt, Artificial Sequence
  Description of Artificial Sequence: Synthetic oligonucleotide
  Antisense strand to SEQ ID NO: 1911008
aaucucacugcuaggaaua

SEQ ID NO: 1911010 - RNA, 19 nt, Artificial Sequence
  Description of Artificial Sequence: Synthetic oligonucleotide
  Sense strand starting at position 3136 of SEQ ID NO: 1879492
cuuuauagugcuuauagua

SEQ ID NO: 1911011 - RNA, 19 nt, Artificial Sequence
  Description of Artificial Sequence: Synthetic oligonucleotide
  Antisense strand to SEQ ID NO: 1911010
uacuauaagcacuauaaag

SEQ ID NO: 1911012 - RNA, 19 nt, Artificial Sequence
  Description of Artificial Sequence: Synthetic oligonucleotide
  Sense strand starting at position 3372 of SEQ ID NO: 1879492
uugcuuauucuagauggcu

SEQ ID NO: 1911013 - RNA, 19 nt, Artificial Sequence
  Description of Artificial Sequence: Synthetic oligonucleotide
  Antisense strand to SEQ ID NO: 1911012
agccaucuagaauaagcaa

SEQ ID NO: 1911014 - RNA, 19 nt, Artificial Sequence
  Description of Artificial Sequence: Synthetic oligonucleotide
  Sense strand starting at position 3575 of SEQ ID NO: 1879492
uaacuaggagcaggauuau

SEQ ID NO: 1911015 - RNA, 19 nt, Artificial Sequence
  Description of Artificial Sequence: Synthetic oligonucleotide
  Antisense strand to SEQ ID NO: 1911014
auaauccugcuccuaguua

SEQ ID NO: 1911016 - RNA, 19 nt, Artificial Sequence
  Description of Artificial Sequence: Synthetic oligonucleotide
  Sense strand starting at position 3581 of SEQ ID NO: 1879492
ggagcaggauuauugguuu

SEQ ID NO: 1911017 - RNA, 19 nt, Artificial Sequence
  Description of Artificial Sequence: Synthetic oligonucleotide
  Antisense strand to SEQ ID NO: 1911016
aaaccaauaauccugcucc

SEQ ID NO: 1911018 - RNA, 19 nt, Artificial Sequence
  Description of Artificial Sequence: Synthetic oligonucleotide
  Sense strand starting at position 3584 of SEQ ID NO: 1879492
gcaggauuauugguuuaua

SEQ ID NO: 1911019 - RNA, 19 nt, Artificial Sequence
  Description of Artificial Sequence: Synthetic oligonucleotide
  Antisense strand to SEQ ID NO: 1911018
uauaaaccaauaauccugc

SEQ ID NO: 1911020 - RNA, 19 nt, Artificial Sequence
  Description of Artificial Sequence: Synthetic oligonucleotide
  Sense strand starting at position 3585 of SEQ ID NO: 1879492
caggauuauugguuuauau

SEQ ID NO: 1911021 - RNA, 19 nt, Artificial Sequence
  Description of Artificial Sequence: Synthetic oligonucleotide
  Antisense strand to SEQ ID NO: 1911020
auauaaaccaauaauccug

SEQ ID NO: 1911022 - RNA, 19 nt, Artificial Sequence
  Description of Artificial Sequence: Synthetic oligonucleotide
  Sense strand starting at position 3593 of SEQ ID NO: 1879492
uugguuuauaugggaauuc

SEQ ID NO: 1911023 - RNA, 19 nt, Artificial Sequence
  Description of Artificial Sequence: Synthetic oligonucleotide
  Antisense strand to SEQ ID NO: 1911022
gaauucccauauaaaccaa

SEQ ID NO: 1911024 - RNA, 19 nt, Artificial Sequence
  Description of Artificial Sequence: Synthetic oligonucleotide
  Sense strand starting at position 3602 of SEQ ID NO: 1879492
augggaauucuaugguuaa

SEQ ID NO: 1911025 - RNA, 19 nt, Artificial Sequence
  Description of Artificial Sequence: Synthetic oligonucleotide
  Antisense strand to SEQ ID NO: 1911024
uuaaccauagaauucccau

SEQ ID NO: 1911026 - RNA, 19 nt, Artificial Sequence
  Description of Artificial Sequence: Synthetic oligonucleotide
  Sense strand starting at position 3605 of SEQ ID NO: 1879492
ggaauucuaugguuaacuu

SEQ ID NO: 1911027 - RNA, 19 nt, Artificial Sequence
  Description of Artificial Sequence: Synthetic oligonucleotide
  Antisense strand to SEQ ID NO: 1911026
aaguuaaccauagaauucc

SEQ ID NO: 1911028 - RNA, 19 nt, Artificial Sequence
  Description of Artificial Sequence: Synthetic oligonucleotide
  Sense strand starting at position 3613 of SEQ ID NO: 1879492
augguuaacuuacugagga

SEQ ID NO: 1911029 - RNA, 19 nt, Artificial Sequence
  Description of Artificial Sequence: Synthetic oligonucleotide
  Antisense strand to SEQ ID NO: 1911028
uccucaguaaguuaaccau

SEQ ID NO: 1911030 - RNA, 19 nt, Artificial Sequence
  Description of Artificial Sequence: Synthetic oligonucleotide
  Sense strand starting at position 3685 of SEQ ID NO: 1879492
ggaugaagguuccaauuuc

SEQ ID NO: 1911031 - RNA, 19 nt, Artificial Sequence
  Description of Artificial Sequence: Synthetic oligonucleotide
  Antisense strand to SEQ ID NO: 1911030
gaaauuggaaccuucaucc

SEQ ID NO: 1911032 - RNA, 19 nt, Artificial Sequence
  Description of Artificial Sequence: Synthetic oligonucleotide
  Sense strand starting at position 3848 of SEQ ID NO: 1879492
gcucauggccauugagaua

SEQ ID NO: 1911033 - RNA, 19 nt, Artificial Sequence
  Description of Artificial Sequence: Synthetic oligonucleotide
  Antisense strand to SEQ ID NO: 1911032
uaucucaauggccaugagc

SEQ ID NO: 1911034 - RNA, 19 nt, Artificial Sequence
  Description of Artificial Sequence: Synthetic oligonucleotide
  Sense strand starting at position 3860 of SEQ ID NO: 1879492
ugagauaucuccuuuggag

SEQ ID NO: 1911035 - RNA, 19 nt, Artificial Sequence
  Description of Artificial Sequence: Synthetic oligonucleotide
  Antisense strand to SEQ ID NO: 1911034
cuccaaaggagauaucuca

SEQ ID NO: 1911036 - RNA, 19 nt, Artificial Sequence
  Description of Artificial Sequence: Synthetic oligonucleotide
  Sense strand starting at position 3906 of SEQ ID NO: 1879492
uuucuuaacugggacauuu

SEQ ID NO: 1911037 - RNA, 19 nt, Artificial Sequence
  Description of Artificial Sequence: Synthetic oligonucleotide
  Antisense strand to SEQ ID NO: 1911036
aaaugucccaguuaagaaa

SEQ ID NO: 1911038 - RNA, 19 nt, Artificial Sequence
  Description of Artificial Sequence: Synthetic oligonucleotide
  Sense strand starting at position 68 of SEQ ID NO: 1879493
uugggaggcuacuugagau

SEQ ID NO: 1911039 - RNA, 19 nt, Artificial Sequence
  Description of Artificial Sequence: Synthetic oligonucleotide
  Antisense strand to SEQ ID NO: 1911038
aucucaaguagccucccaa

SEQ ID NO: 1911040 - RNA, 19 nt, Artificial Sequence
  Description of Artificial Sequence: Synthetic oligonucleotide
  Sense strand starting at position 139 of SEQ ID NO: 1879493
auaucaguaagugagugau

SEQ ID NO: 1911041 - RNA, 19 nt, Artificial Sequence
  Description of Artificial Sequence: Synthetic oligonucleotide
  Antisense strand to SEQ ID NO: 1911040
aucacucacuuacugauau

SEQ ID NO: 1911042 - RNA, 19 nt, Artificial Sequence
  Description of Artificial Sequence: Synthetic oligonucleotide
  Sense strand starting at position 142 of SEQ ID NO: 1879493
ucaguaagugagugaugga

SEQ ID NO: 1911043 - RNA, 19 nt, Artificial Sequence
  Description of Artificial Sequence: Synthetic oligonucleotide
  Antisense strand to SEQ ID NO: 1911042
uccaucacucacuuacuga

SEQ ID NO: 1911044 - RNA, 19 nt, Artificial Sequence
  Description of Artificial Sequence: Synthetic oligonucleotide
  Sense strand starting at position 143 of SEQ ID NO: 1879493
caguaagugagugauggau

SEQ ID NO: 1911045 - RNA, 19 nt, Artificial Sequence
  Description of Artificial Sequence: Synthetic oligonucleotide
  Antisense strand to SEQ ID NO: 1911044
auccaucacucacuuacug

SEQ ID NO: 1911046 - RNA, 19 nt, Artificial Sequence
  Description of Artificial Sequence: Synthetic oligonucleotide
  Sense strand starting at position 411 of SEQ ID NO: 1879493
gagauuaggcucuacucua

SEQ ID NO: 1911047 - RNA, 19 nt, Artificial Sequence
  Description of Artificial Sequence: Synthetic oligonucleotide
  Antisense strand to SEQ ID NO: 1911046
uagaguagagccuaaucuc

SEQ ID NO: 1911048 - RNA, 19 nt, Artificial Sequence
  Description of Artificial Sequence: Synthetic oligonucleotide
  Sense strand starting at position 593 of SEQ ID NO: 1879493
gucaguuacccucauggau

SEQ ID NO: 1911049 - RNA, 19 nt, Artificial Sequence
  Description of Artificial Sequence: Synthetic oligonucleotide
  Antisense strand to SEQ ID NO: 1911048
auccaugaggguaacugac

SEQ ID NO: 1911050 - RNA, 19 nt, Artificial Sequence
  Description of Artificial Sequence: Synthetic oligonucleotide
  Sense strand starting at position 770 of SEQ ID NO: 1879493
ugaagagaguaucuaagua

SEQ ID NO: 1911051 - RNA, 19 nt, Artificial Sequence
  Description of Artificial Sequence: Synthetic oligonucleotide
  Antisense strand to SEQ ID NO: 1911050
uacuuagauacucucuuca

SEQ ID NO: 1911052 - RNA, 19 nt, Artificial Sequence
  Description of Artificial Sequence: Synthetic oligonucleotide
  Sense strand starting at position 1201 of SEQ ID NO: 1879493
acacaacugcuaggaauua

SEQ ID NO: 1911053 - RNA, 19 nt, Artificial Sequence
  Description of Artificial Sequence: Synthetic oligonucleotide
  Antisense strand to SEQ ID NO: 1911052
uaauuccuagcaguugugu

SEQ ID NO: 1911054 - RNA, 19 nt, Artificial Sequence
  Description of Artificial Sequence: Synthetic oligonucleotide
  Sense strand starting at position 1539 of SEQ ID NO: 1879493
cugcuuaaaugaucuauug

SEQ ID NO: 1911055 - RNA, 19 nt, Artificial Sequence
  Description of Artificial Sequence: Synthetic oligonucleotide
  Antisense strand to SEQ ID NO: 1911054
caauagaucauuuaagcag

SEQ ID NO: 1911056 - RNA, 19 nt, Artificial Sequence
  Description of Artificial Sequence: Synthetic oligonucleotide
  Sense strand starting at position 1598 of SEQ ID NO: 1879493
uguuguaaccaugacauua

SEQ ID NO: 1911057 - RNA, 19 nt, Artificial Sequence
  Description of Artificial Sequence: Synthetic oligonucleotide
  Antisense strand to SEQ ID NO: 1911056
uaaugucaugguuacaaca

SEQ ID NO: 1911058 - RNA, 19 nt, Artificial Sequence
  Description of Artificial Sequence: Synthetic oligonucleotide
  Sense strand starting at position 1633 of SEQ ID NO: 1879493
gaaauagaauuugggacau

SEQ ID NO: 1911059 - RNA, 19 nt, Artificial Sequence
  Description of Artificial Sequence: Synthetic oligonucleotide
  Antisense strand to SEQ ID NO: 1911058
augucccaaauucuauuuc

SEQ ID NO: 1911060 - RNA, 19 nt, Artificial Sequence
  Description of Artificial Sequence: Synthetic oligonucleotide
  Sense strand starting at position 1676 of SEQ ID NO: 1879493
uggcucaacuuugugagaa

SEQ ID NO: 1911061 - RNA, 19 nt, Artificial Sequence
  Description of Artificial Sequence: Synthetic oligonucleotide
  Antisense strand to SEQ ID NO: 1911060
uucucacaaaguugagcca

SEQ ID NO: 1911062 - RNA, 19 nt, Artificial Sequence
  Description of Artificial Sequence: Synthetic oligonucleotide
  Sense strand starting at position 1715 of SEQ ID NO: 1879493
uauaauggacaguguugau

SEQ ID NO: 1911063 - RNA, 19 nt, Artificial Sequence
  Description of Artificial Sequence: Synthetic oligonucleotide
  Antisense strand to SEQ ID NO: 1911062
aucaacacuguccauuaua

SEQ ID NO: 1911064 - RNA, 19 nt, Artificial Sequence
  Description of Artificial Sequence: Synthetic oligonucleotide
  Sense strand starting at position 1838 of SEQ ID NO: 1879493
ccguauagacuuugggaag

SEQ ID NO: 1911065 - RNA, 19 nt, Artificial Sequence
  Description of Artificial Sequence: Synthetic oligonucleotide
  Antisense strand to SEQ ID NO: 1911064
cuucccaaagucuauacgg

SEQ ID NO: 1911066 - RNA, 19 nt, Artificial Sequence
  Description of Artificial Sequence: Synthetic oligonucleotide
  Sense strand starting at position 1853 of SEQ ID NO: 1879493
gaagaauguuaaucuugua

SEQ ID NO: 1911067 - RNA, 19 nt, Artificial Sequence
  Description of Artificial Sequence: Synthetic oligonucleotide
  Antisense strand to SEQ ID NO: 1911066
uacaagauuaacauucuuc

SEQ ID NO: 1911068 - RNA, 19 nt, Artificial Sequence
  Description of Artificial Sequence: Synthetic oligonucleotide
  Sense strand starting at position 1896 of SEQ ID NO: 1879493
aagcaaugccuccagaugu

SEQ ID NO: 1911069 - RNA, 19 nt, Artificial Sequence
  Description of Artificial Sequence: Synthetic oligonucleotide
  Antisense strand to SEQ ID NO: 1911068
acaucuggaggcauugcuu

SEQ ID NO: 1911070 - RNA, 19 nt, Artificial Sequence
  Description of Artificial Sequence: Synthetic oligonucleotide
  Sense strand starting at position 1909 of SEQ ID NO: 1879493
agauguacagcauacuuaa

SEQ ID NO: 1911071 - RNA, 19 nt, Artificial Sequence
  Description of Artificial Sequence: Synthetic oligonucleotide
  Antisense strand to SEQ ID NO: 1911070
uuaaguaugcuguacaucu

SEQ ID NO: 1911072 - RNA, 19 nt, Artificial Sequence
  Description of Artificial Sequence: Synthetic oligonucleotide
  Sense strand starting at position 2050 of SEQ ID NO: 1879493
uuagaacaucgagguauug

SEQ ID NO: 1911073 - RNA, 19 nt, Artificial Sequence
  Description of Artificial Sequence: Synthetic oligonucleotide
  Antisense strand to SEQ ID NO: 1911072
caauaccucgauguucuaa

SEQ ID NO: 1911074 - RNA, 19 nt, Artificial Sequence
  Description of Artificial Sequence: Synthetic oligonucleotide
  Sense strand starting at position 2065 of SEQ ID NO: 1879493
auuggagauccgugaagga

SEQ ID NO: 1911075 - RNA, 19 nt, Artificial Sequence
  Description of Artificial Sequence: Synthetic oligonucleotide
  Antisense strand to SEQ ID NO: 1911074
uccuucacggaucuccaau

SEQ ID NO: 1911076 - RNA, 19 nt, Artificial Sequence
  Description of Artificial Sequence: Synthetic oligonucleotide
  Sense strand starting at position 2082 of SEQ ID NO: 1879493
gagcaucaucguuacuaua

SEQ ID NO: 1911077 - RNA, 19 nt, Artificial Sequence
  Description of Artificial Sequence: Synthetic oligonucleotide
  Antisense strand to SEQ ID NO: 1911076
uauaguaacgaugaugcuc

SEQ ID NO: 1911078 - RNA, 19 nt, Artificial Sequence
  Description of Artificial Sequence: Synthetic oligonucleotide
  Sense strand starting at position 2179 of SEQ ID NO: 1879493
ggugccaugaaaugagaau

SEQ ID NO: 1911079 - RNA, 19 nt, Artificial Sequence
  Description of Artificial Sequence: Synthetic oligonucleotide
  Antisense strand to SEQ ID NO: 1911078
auucucauuucauggcacc

SEQ ID NO: 1911080 - RNA, 19 nt, Artificial Sequence
  Description of Artificial Sequence: Synthetic oligonucleotide
  Sense strand starting at position 2415 of SEQ ID NO: 1879493
ucucuuauggcacauguau

SEQ ID NO: 1911081 - RNA, 19 nt, Artificial Sequence
  Description of Artificial Sequence: Synthetic oligonucleotide
  Antisense strand to SEQ ID NO: 1911080
auacaugugccauaagaga

SEQ ID NO: 1911082 - RNA, 19 nt, Artificial Sequence
  Description of Artificial Sequence: Synthetic oligonucleotide
  Sense strand starting at position 2540 of SEQ ID NO: 1879493
aguauugaagauugugaua

SEQ ID NO: 1911083 - RNA, 19 nt, Artificial Sequence
  Description of Artificial Sequence: Synthetic oligonucleotide
  Antisense strand to SEQ ID NO: 1911082
uaucacaaucuucaauacu

SEQ ID NO: 1911084 - RNA, 19 nt, Artificial Sequence
  Description of Artificial Sequence: Synthetic oligonucleotide
  Sense strand starting at position 2580 of SEQ ID NO: 1879493
guauuagaaucugugacaa

SEQ ID NO: 1911085 - RNA, 19 nt, Artificial Sequence
  Description of Artificial Sequence: Synthetic oligonucleotide
  Antisense strand to SEQ ID NO: 1911084
uugucacagauucuaauac

SEQ ID NO: 1911086 - RNA, 19 nt, Artificial Sequence
  Description of Artificial Sequence: Synthetic oligonucleotide
  Sense strand starting at position 2642 of SEQ ID NO: 1879493
caugauuauugggucagua

SEQ ID NO: 1911087 - RNA, 19 nt, Artificial Sequence
  Description of Artificial Sequence: Synthetic oligonucleotide
  Antisense strand to SEQ ID NO: 1911086
uacugacccaauaaucaug

SEQ ID NO: 1911088 - RNA, 19 nt, Artificial Sequence
  Description of Artificial Sequence: Synthetic oligonucleotide
  Sense strand starting at position 2644 of SEQ ID NO: 1879493
ugauuauugggucaguaua

SEQ ID NO: 1911089 - RNA, 19 nt, Artificial Sequence
  Description of Artificial Sequence: Synthetic oligonucleotide
  Antisense strand to SEQ ID NO: 1911088
uauacugacccaauaauca

SEQ ID NO: 1911090 - RNA, 19 nt, Artificial Sequence
  Description of Artificial Sequence: Synthetic oligonucleotide
  Sense strand starting at position 2686 of SEQ ID NO: 1879493
gcuccauggagugaacauu

SEQ ID NO: 1911091 - RNA, 19 nt, Artificial Sequence
  Description of Artificial Sequence: Synthetic oligonucleotide
  Antisense strand to SEQ ID NO: 1911090
aauguucacuccauggagc

SEQ ID NO: 1911092 - RNA, 19 nt, Artificial Sequence
  Description of Artificial Sequence: Synthetic oligonucleotide
  Sense strand starting at position 2835 of SEQ ID NO: 1879493
auguuugaagacugugaac

SEQ ID NO: 1911093 - RNA, 19 nt, Artificial Sequence
  Description of Artificial Sequence: Synthetic oligonucleotide
  Antisense strand to SEQ ID NO: 1911092
guucacagucuucaaacau

SEQ ID NO: 1911094 - RNA, 19 nt, Artificial Sequence
  Description of Artificial Sequence: Synthetic oligonucleotide
  Sense strand starting at position 2837 of SEQ ID NO: 1879493
guuugaagacugugaacag

SEQ ID NO: 1911095 - RNA, 19 nt, Artificial Sequence
  Description of Artificial Sequence: Synthetic oligonucleotide
  Antisense strand to SEQ ID NO: 1911094
cuguucacagucuucaaac

SEQ ID NO: 1911096 - RNA, 19 nt, Artificial Sequence
  Description of Artificial Sequence: Synthetic oligonucleotide
  Sense strand starting at position 2962 of SEQ ID NO: 1879493
cucaaauaggguugauauu

SEQ ID NO: 1911097 - RNA, 19 nt, Artificial Sequence
  Description of Artificial Sequence: Synthetic oligonucleotide
  Antisense strand to SEQ ID NO: 1911096
aauaucaacccuauuugag

SEQ ID NO: 1911098 - RNA, 19 nt, Artificial Sequence
  Description of Artificial Sequence: Synthetic oligonucleotide
  Sense strand starting at position 2989 of SEQ ID NO: 1879493
auuugcugauuuggauaaa

SEQ ID NO: 1911099 - RNA, 19 nt, Artificial Sequence
  Description of Artificial Sequence: Synthetic oligonucleotide
  Antisense strand to SEQ ID NO: 1911098
uuuauccaaaucagcaaau

SEQ ID NO: 1911100 - RNA, 19 nt, Artificial Sequence
  Description of Artificial Sequence: Synthetic oligonucleotide
  Sense strand starting at position 3074 of SEQ ID NO: 1879493
ucuggaaauguuuacuuau

SEQ ID NO: 1911101 - RNA, 19 nt, Artificial Sequence
  Description of Artificial Sequence: Synthetic oligonucleotide
  Antisense strand to SEQ ID NO: 1911100
auaaguaaacauuuccaga

SEQ ID NO: 1911102 - RNA, 19 nt, Artificial Sequence
  Description of Artificial Sequence: Synthetic oligonucleotide
  Sense strand starting at position 3076 of SEQ ID NO: 1879493
uggaaauguuuacuuauag

SEQ ID NO: 1911103 - RNA, 19 nt, Artificial Sequence
  Description of Artificial Sequence: Synthetic oligonucleotide
  Antisense strand to SEQ ID NO: 1911102
cuauaaguaaacauuucca

SEQ ID NO: 1911104 - RNA, 19 nt, Artificial Sequence
  Description of Artificial Sequence: Synthetic oligonucleotide
  Sense strand starting at position 3077 of SEQ ID NO: 1879493
ggaaauguuuacuuauaga

SEQ ID NO: 1911105 - RNA, 19 nt, Artificial Sequence
  Description of Artificial Sequence: Synthetic oligonucleotide
  Antisense strand to SEQ ID NO: 1911104
ucuauaaguaaacauuucc

SEQ ID NO: 1911106 - RNA, 19 nt, Artificial Sequence
  Description of Artificial Sequence: Synthetic oligonucleotide
  Sense strand starting at position 3416 of SEQ ID NO: 1879493
cagucugauuucuagagaa

SEQ ID NO: 1911107 - RNA, 19 nt, Artificial Sequence
  Description of Artificial Sequence: Synthetic oligonucleotide
  Antisense strand to SEQ ID NO: 1911106
uucucuagaaaucagacug

SEQ ID NO: 1911108 - RNA, 19 nt, Artificial Sequence
  Description of Artificial Sequence: Synthetic oligonucleotide
  Sense strand starting at position 3554 of SEQ ID NO: 1879493
ucagauuaccuguacuauc

SEQ ID NO: 1911109 - RNA, 19 nt, Artificial Sequence
  Description of Artificial Sequence: Synthetic oligonucleotide
  Antisense strand to SEQ ID NO: 1911108
gauaguacagguaaucuga

SEQ ID NO: 1911110 - RNA, 19 nt, Artificial Sequence
  Description of Artificial Sequence: Synthetic oligonucleotide
  Sense strand starting at position 3634 of SEQ ID NO: 1879493
ugcagaaucuuagugacua

SEQ ID NO: 1911111 - RNA, 19 nt, Artificial Sequence
  Description of Artificial Sequence: Synthetic oligonucleotide
  Antisense strand to SEQ ID NO: 1911110
uagucacuaagauucugca

SEQ ID NO: 1911112 - RNA, 19 nt, Artificial Sequence
  Description of Artificial Sequence: Synthetic oligonucleotide
  Sense strand starting at position 3930 of SEQ ID NO: 1879493
uucccagaacugugaaauc

SEQ ID NO: 1911113 - RNA, 19 nt, Artificial Sequence
  Description of Artificial Sequence: Synthetic oligonucleotide
  Antisense strand to SEQ ID NO: 1911112
gauuucacaguucugggaa

SEQ ID NO: 1911114 - RNA, 19 nt, Artificial Sequence
  Description of Artificial Sequence: Synthetic oligonucleotide
  Sense strand starting at position 3941 of SEQ ID NO: 1879493
gugaaauccuuuccgagaa

SEQ ID NO: 1911115 - RNA, 19 nt, Artificial Sequence
  Description of Artificial Sequence: Synthetic oligonucleotide
  Antisense strand to SEQ ID NO: 1911114
uucucggaaaggauuucac

SEQ ID NO: 1911116 - RNA, 19 nt, Artificial Sequence
  Description of Artificial Sequence: Synthetic oligonucleotide
  Sense strand starting at position 3959 of SEQ ID NO: 1879493
aaugauuaggagugugaug

SEQ ID NO: 1911117 - RNA, 19 nt, Artificial Sequence
  Description of Artificial Sequence: Synthetic oligonucleotide
  Antisense strand to SEQ ID NO: 1911116
caucacacuccuaaucauu

SEQ ID NO: 1911118 - RNA, 19 nt, Artificial Sequence
  Description of Artificial Sequence: Synthetic oligonucleotide
  Sense strand starting at position 15 of SEQ ID NO: 1879494
uuaggauggccuggaauga

SEQ ID NO: 1911119 - RNA, 19 nt, Artificial Sequence
  Description of Artificial Sequence: Synthetic oligonucleotide
  Antisense strand to SEQ ID NO: 1911118
ucauuccaggccauccuaa

SEQ ID NO: 1911120 - RNA, 19 nt, Artificial Sequence
  Description of Artificial Sequence: Synthetic oligonucleotide
  Sense strand starting at position 26 of SEQ ID NO: 1879494
uggaaugaacuuggcuuaa

SEQ ID NO: 1911121 - RNA, 19 nt, Artificial Sequence
  Description of Artificial Sequence: Synthetic oligonucleotide
  Antisense strand to SEQ ID NO: 1911120
uuaagccaaguucauucca

SEQ ID NO: 1911122 - RNA, 19 nt, Artificial Sequence
  Description of Artificial Sequence: Synthetic oligonucleotide
  Sense strand starting at position 125 of SEQ ID NO: 1879494
caguaauuccagcagagau

SEQ ID NO: 1911123 - RNA, 19 nt, Artificial Sequence
  Description of Artificial Sequence: Synthetic oligonucleotide
  Antisense strand to SEQ ID NO: 1911122
aucucugcuggaauuacug

SEQ ID NO: 1911124 - RNA, 19 nt, Artificial Sequence
  Description of Artificial Sequence: Synthetic oligonucleotide
  Sense strand starting at position 154 of SEQ ID NO: 1879494
cccggaauuugucccuuau

SEQ ID NO: 1911125 - RNA, 19 nt, Artificial Sequence
  Description of Artificial Sequence: Synthetic oligonucleotide
  Antisense strand to SEQ ID NO: 1911124
auaagggacaaauuccggg

SEQ ID NO: 1911126 - RNA, 19 nt, Artificial Sequence
  Description of Artificial Sequence: Synthetic oligonucleotide
  Sense strand starting at position 217 of SEQ ID NO: 1879494
uggcauuaccuccagacuu

SEQ ID NO: 1911127 - RNA, 19 nt, Artificial Sequence
  Description of Artificial Sequence: Synthetic oligonucleotide
  Antisense strand to SEQ ID NO: 1911126
aagucuggagguaaugcca

SEQ ID NO: 1911128 - RNA, 19 nt, Artificial Sequence
  Description of Artificial Sequence: Synthetic oligonucleotide
  Sense strand starting at position 255 of SEQ ID NO: 1879494
uccugugcugguuaaagaa

SEQ ID NO: 1911129 - RNA, 19 nt, Artificial Sequence
  Description of Artificial Sequence: Synthetic oligonucleotide
  Antisense strand to SEQ ID NO: 1911128
uucuuuaaccagcacagga

SEQ ID NO: 1911130 - RNA, 19 nt, Artificial Sequence
  Description of Artificial Sequence: Synthetic oligonucleotide
  Sense strand starting at position 467 of SEQ ID NO: 1879494
gcacaucuggacuguacau

SEQ ID NO: 1911131 - RNA, 19 nt, Artificial Sequence
  Description of Artificial Sequence: Synthetic oligonucleotide
  Antisense strand to SEQ ID NO: 1911130
auguacaguccagaugugc

SEQ ID NO: 1911132 - RNA, 19 nt, Artificial Sequence
  Description of Artificial Sequence: Synthetic oligonucleotide
  Sense strand starting at position 480 of SEQ ID NO: 1879494
guacauauuguugaaggua

SEQ ID NO: 1911133 - RNA, 19 nt, Artificial Sequence
  Description of Artificial Sequence: Synthetic oligonucleotide
  Antisense strand to SEQ ID NO: 1911132
uaccuucaacaauauguac

SEQ ID NO: 1911134 - RNA, 19 nt, Artificial Sequence
  Description of Artificial Sequence: Synthetic oligonucleotide
  Sense strand starting at position 483 of SEQ ID NO: 1879494
cauauuguugaagguaaau

SEQ ID NO: 1911135 - RNA, 19 nt, Artificial Sequence
  Description of Artificial Sequence: Synthetic oligonucleotide
  Antisense strand to SEQ ID NO: 1911134
auuuaccuucaacaauaug

SEQ ID NO: 1911136 - RNA, 19 nt, Artificial Sequence
  Description of Artificial Sequence: Synthetic oligonucleotide
  Sense strand starting at position 502 of SEQ ID NO: 1879494
ucauuugcucagugaguca

SEQ ID NO: 1911137 - RNA, 19 nt, Artificial Sequence
  Description of Artificial Sequence: Synthetic oligonucleotide
  Antisense strand to SEQ ID NO: 1911136
ugacucacugagcaaauga

SEQ ID NO: 1911138 - RNA, 19 nt, Artificial Sequence
  Description of Artificial Sequence: Synthetic oligonucleotide
  Sense strand starting at position 707 of SEQ ID NO: 1879494
agagaauguguauguacag

SEQ ID NO: 1911139 - RNA, 19 nt, Artificial Sequence
  Description of Artificial Sequence: Synthetic oligonucleotide
  Antisense strand to SEQ ID NO: 1911138
cuguacauacacauucucu

SEQ ID NO: 1911140 - RNA, 19 nt, Artificial Sequence
  Description of Artificial Sequence: Synthetic oligonucleotide
  Sense strand starting at position 1021 of SEQ ID NO: 1879494
aguguauguacagauuaaa

SEQ ID NO: 1911141 - RNA, 19 nt, Artificial Sequence
  Description of Artificial Sequence: Synthetic oligonucleotide
  Antisense strand to SEQ ID NO: 1911140
uuuaaucuguacauacacu

SEQ ID NO: 1911142 - RNA, 19 nt, Artificial Sequence
  Description of Artificial Sequence: Synthetic oligonucleotide
  Sense strand starting at position 1216 of SEQ ID NO: 1879494
aacauuguuuaguuuggaa

SEQ ID NO: 1911143 - RNA, 19 nt, Artificial Sequence
  Description of Artificial Sequence: Synthetic oligonucleotide
  Antisense strand to SEQ ID NO: 1911142
uuccaaacuaaacaauguu

SEQ ID NO: 1911144 - RNA, 19 nt, Artificial Sequence
  Description of Artificial Sequence: Synthetic oligonucleotide
  Sense strand starting at position 1350 of SEQ ID NO: 1879494
ccuugaguucuccagaguc

SEQ ID NO: 1911145 - RNA, 19 nt, Artificial Sequence
  Description of Artificial Sequence: Synthetic oligonucleotide
  Antisense strand to SEQ ID NO: 1911144
gacucuggagaacucaagg

SEQ ID NO: 1911146 - RNA, 19 nt, Artificial Sequence
  Description of Artificial Sequence: Synthetic oligonucleotide
  Sense strand starting at position 1352 of SEQ ID NO: 1879494
uugaguucuccagagucug

SEQ ID NO: 1911147 - RNA, 19 nt, Artificial Sequence
  Description of Artificial Sequence: Synthetic oligonucleotide
  Antisense strand to SEQ ID NO: 1911146
cagacucuggagaacucaa

SEQ ID NO: 1911148 - RNA, 19 nt, Artificial Sequence
  Description of Artificial Sequence: Synthetic oligonucleotide
  Sense strand starting at position 1791 of SEQ ID NO: 1879494
gggagcacaucaucugaua

SEQ ID NO: 1911149 - RNA, 19 nt, Artificial Sequence
  Description of Artificial Sequence: Synthetic oligonucleotide
  Antisense strand to SEQ ID NO: 1911148
uaucagaugaugugcuccc

SEQ ID NO: 1911150 - RNA, 19 nt, Artificial Sequence
  Description of Artificial Sequence: Synthetic oligonucleotide
  Sense strand starting at position 1802 of SEQ ID NO: 1879494
aucugauaguuuccugaga

SEQ ID NO: 1911151 - RNA, 19 nt, Artificial Sequence
  Description of Artificial Sequence: Synthetic oligonucleotide
  Antisense strand to SEQ ID NO: 1911150
ucucaggaaacuaucagau

SEQ ID NO: 1911152 - RNA, 19 nt, Artificial Sequence
  Description of Artificial Sequence: Synthetic oligonucleotide
  Sense strand starting at position 1803 of SEQ ID NO: 1879494
ucugauaguuuccugagaa

SEQ ID NO: 1911153 - RNA, 19 nt, Artificial Sequence
  Description of Artificial Sequence: Synthetic oligonucleotide
  Antisense strand to SEQ ID NO: 1911152
uucucaggaaacuaucaga

SEQ ID NO: 1911154 - RNA, 19 nt, Artificial Sequence
  Description of Artificial Sequence: Synthetic oligonucleotide
  Sense strand starting at position 1825 of SEQ ID NO: 1879494
gcgaaaggauguagauaga

SEQ ID NO: 1911155 - RNA, 19 nt, Artificial Sequence
  Description of Artificial Sequence: Synthetic oligonucleotide
  Antisense strand to SEQ ID NO: 1911154
ucuaucuacauccuuucgc

SEQ ID NO: 1911156 - RNA, 19 nt, Artificial Sequence
  Description of Artificial Sequence: Synthetic oligonucleotide
  Sense strand starting at position 2011 of SEQ ID NO: 1879494
aggaauugagucuguuauu

SEQ ID NO: 1911157 - RNA, 19 nt, Artificial Sequence
  Description of Artificial Sequence: Synthetic oligonucleotide
  Antisense strand to SEQ ID NO: 1911156
aauaacagacucaauuccu

SEQ ID NO: 1911158 - RNA, 19 nt, Artificial Sequence
  Description of Artificial Sequence: Synthetic oligonucleotide
  Sense strand starting at position 2012 of SEQ ID NO: 1879494
ggaauugagucuguuauua

SEQ ID NO: 1911159 - RNA, 19 nt, Artificial Sequence
  Description of Artificial Sequence: Synthetic oligonucleotide
  Antisense strand to SEQ ID NO: 1911158
uaauaacagacucaauucc

SEQ ID NO: 1911160 - RNA, 19 nt, Artificial Sequence
  Description of Artificial Sequence: Synthetic oligonucleotide
  Sense strand starting at position 2022 of SEQ ID NO: 1879494
cuguuauuagcugaucuca

SEQ ID NO: 1911161 - RNA, 19 nt, Artificial Sequence
  Description of Artificial Sequence: Synthetic oligonucleotide
  Antisense strand to SEQ ID NO: 1911160
ugagaucagcuaauaacag

SEQ ID NO: 1911162 - RNA, 19 nt, Artificial Sequence
  Description of Artificial Sequence: Synthetic oligonucleotide
  Sense strand starting at position 2032 of SEQ ID NO: 1879494
cugaucucaucuccgacaa

SEQ ID NO: 1911163 - RNA, 19 nt, Artificial Sequence
  Description of Artificial Sequence: Synthetic oligonucleotide
  Antisense strand to SEQ ID NO: 1911162
uugucggagaugagaucag

SEQ ID NO: 1911164 - RNA, 19 nt, Artificial Sequence
  Description of Artificial Sequence: Synthetic oligonucleotide
  Sense strand starting at position 2033 of SEQ ID NO: 1879494
ugaucucaucuccgacaaa

SEQ ID NO: 1911165 - RNA, 19 nt, Artificial Sequence
  Description of Artificial Sequence: Synthetic oligonucleotide
  Antisense strand to SEQ ID NO: 1911164
uuugucggagaugagauca

SEQ ID NO: 1911166 - RNA, 19 nt, Artificial Sequence
  Description of Artificial Sequence: Synthetic oligonucleotide
  Sense strand starting at position 2328 of SEQ ID NO: 1879494
agccuuauaaggcagugua

SEQ ID NO: 1911167 - RNA, 19 nt, Artificial Sequence
  Description of Artificial Sequence: Synthetic oligonucleotide
  Antisense strand to SEQ ID NO: 1911166
uacacugccuuauaaggcu

SEQ ID NO: 1911168 - RNA, 19 nt, Artificial Sequence
  Description of Artificial Sequence: Synthetic oligonucleotide
  Sense strand starting at position 2462 of SEQ ID NO: 1879494
gacugugucucccugagau

SEQ ID NO: 1911169 - RNA, 19 nt, Artificial Sequence
  Description of Artificial Sequence: Synthetic oligonucleotide
  Antisense strand to SEQ ID NO: 1911168
aucucagggagacacaguc

SEQ ID NO: 1911170 - RNA, 19 nt, Artificial Sequence
  Description of Artificial Sequence: Synthetic oligonucleotide
  Sense strand starting at position 2538 of SEQ ID NO: 1879494
ccauuugcugcugggagua

SEQ ID NO: 1911171 - RNA, 19 nt, Artificial Sequence
  Description of Artificial Sequence: Synthetic oligonucleotide
  Antisense strand to SEQ ID NO: 1911170
uacucccagcagcaaaugg

SEQ ID NO: 1911172 - RNA, 19 nt, Artificial Sequence
  Description of Artificial Sequence: Synthetic oligonucleotide
  Sense strand starting at position 2609 of SEQ ID NO: 1879494
cuggaaucugggugagacu

SEQ ID NO: 1911173 - RNA, 19 nt, Artificial Sequence
  Description of Artificial Sequence: Synthetic oligonucleotide
  Antisense strand to SEQ ID NO: 1911172
agucucacccagauuccag

SEQ ID NO: 1911174 - RNA, 19 nt, Artificial Sequence
  Description of Artificial Sequence: Synthetic oligonucleotide
  Sense strand starting at position 2629 of SEQ ID NO: 1879494
uguggucuuagucaaagca

SEQ ID NO: 1911175 - RNA, 19 nt, Artificial Sequence
  Description of Artificial Sequence: Synthetic oligonucleotide
  Antisense strand to SEQ ID NO: 1911174
ugcuuugacuaagaccaca

SEQ ID NO: 1911176 - RNA, 19 nt, Artificial Sequence
  Description of Artificial Sequence: Synthetic oligonucleotide
  Sense strand starting at position 2849 of SEQ ID NO: 1879494
cugauauaauuggccugua

SEQ ID NO: 1911177 - RNA, 19 nt, Artificial Sequence
  Description of Artificial Sequence: Synthetic oligonucleotide
  Antisense strand to SEQ ID NO: 1911176
uacaggccaauuauaucag

SEQ ID NO: 1911178 - RNA, 19 nt, Artificial Sequence
  Description of Artificial Sequence: Synthetic oligonucleotide
  Sense strand starting at position 2985 of SEQ ID NO: 1879494
uaagaaacuguagguaauu

SEQ ID NO: 1911179 - RNA, 19 nt, Artificial Sequence
  Description of Artificial Sequence: Synthetic oligonucleotide
  Antisense strand to SEQ ID NO: 1911178
aauuaccuacaguuucuua

SEQ ID NO: 1911180 - RNA, 19 nt, Artificial Sequence
  Description of Artificial Sequence: Synthetic oligonucleotide
  Sense strand starting at position 3117 of SEQ ID NO: 1879494
cacggaguagcugagauua

SEQ ID NO: 1911181 - RNA, 19 nt, Artificial Sequence
  Description of Artificial Sequence: Synthetic oligonucleotide
  Antisense strand to SEQ ID NO: 1911180
uaaucucagcuacuccgug

SEQ ID NO: 1911182 - RNA, 19 nt, Artificial Sequence
  Description of Artificial Sequence: Synthetic oligonucleotide
  Sense strand starting at position 3156 of SEQ ID NO: 1879494
uggcuaauguagguaauau

SEQ ID NO: 1911183 - RNA, 19 nt, Artificial Sequence
  Description of Artificial Sequence: Synthetic oligonucleotide
  Antisense strand to SEQ ID NO: 1911182
auauuaccuacauuagcca

SEQ ID NO: 1911184 - RNA, 19 nt, Artificial Sequence
  Description of Artificial Sequence: Synthetic oligonucleotide
  Sense strand starting at position 3157 of SEQ ID NO: 1879494
ggcuaauguagguaauauu

SEQ ID NO: 1911185 - RNA, 19 nt, Artificial Sequence
  Description of Artificial Sequence: Synthetic oligonucleotide
  Antisense strand to SEQ ID NO: 1911184
aauauuaccuacauuagcc

SEQ ID NO: 1911186 - RNA, 19 nt, Artificial Sequence
  Description of Artificial Sequence: Synthetic oligonucleotide
  Sense strand starting at position 3258 of SEQ ID NO: 1879494
auuguaugagcucaggauu

SEQ ID NO: 1911187 - RNA, 19 nt, Artificial Sequence
  Description of Artificial Sequence: Synthetic oligonucleotide
  Antisense strand to SEQ ID NO: 1911186
aauccugagcucauacaau

SEQ ID NO: 1911188 - RNA, 19 nt, Artificial Sequence
  Description of Artificial Sequence: Synthetic oligonucleotide
  Sense strand starting at position 3261 of SEQ ID NO: 1879494
guaugagcucaggauucga

SEQ ID NO: 1911189 - RNA, 19 nt, Artificial Sequence
  Description of Artificial Sequence: Synthetic oligonucleotide
  Antisense strand to SEQ ID NO: 1911188
ucgaauccugagcucauac

SEQ ID NO: 1911190 - RNA, 19 nt, Artificial Sequence
  Description of Artificial Sequence: Synthetic oligonucleotide
  Sense strand starting at position 3823 of SEQ ID NO: 1879494
cucagaucuccugacaggu

SEQ ID NO: 1911191 - RNA, 19 nt, Artificial Sequence
  Description of Artificial Sequence: Synthetic oligonucleotide
  Antisense strand to SEQ ID NO: 1911190
accugucaggagaucugag

SEQ ID NO: 1911192 - RNA, 19 nt, Artificial Sequence
  Description of Artificial Sequence: Synthetic oligonucleotide
  Sense strand starting at position 3853 of SEQ ID NO: 1879494
agaaauguccauuguuauc

SEQ ID NO: 1911193 - RNA, 19 nt, Artificial Sequence
  Description of Artificial Sequence: Synthetic oligonucleotide
  Antisense strand to SEQ ID NO: 1911192
gauaacaauggacauuucu

SEQ ID NO: 1911194 - RNA, 19 nt, Artificial Sequence
  Description of Artificial Sequence: Synthetic oligonucleotide
  Sense strand starting at position 3911 of SEQ ID NO: 1879494
uucuaauuaugccuaagga

SEQ ID NO: 1911195 - RNA, 19 nt, Artificial Sequence
  Description of Artificial Sequence: Synthetic oligonucleotide
  Antisense strand to SEQ ID NO: 1911194
uccuuaggcauaauuagaa

SEQ ID NO: 1911196 - RNA, 19 nt, Artificial Sequence
  Description of Artificial Sequence: Synthetic oligonucleotide
  Sense strand starting at position 3944 of SEQ ID NO: 1879494
cuuuaaugucccuagaguu

SEQ ID NO: 1911197 - RNA, 19 nt, Artificial Sequence
  Description of Artificial Sequence: Synthetic oligonucleotide
  Antisense strand to SEQ ID NO: 1911196
aacucuagggacauuaaag

SEQ ID NO: 1911198 - RNA, 19 nt, Artificial Sequence
  Description of Artificial Sequence: Synthetic oligonucleotide
  Sense strand starting at position 146 of SEQ ID NO: 1879495
augugaauagcucaacguu

SEQ ID NO: 1911199 - RNA, 19 nt, Artificial Sequence
  Description of Artificial Sequence: Synthetic oligonucleotide
  Antisense strand to SEQ ID NO: 1911198
aacguugagcuauucacau

SEQ ID NO: 1911200 - RNA, 19 nt, Artificial Sequence
  Description of Artificial Sequence: Synthetic oligonucleotide
  Sense strand starting at position 304 of SEQ ID NO: 1879495
cguaguacgacccagcaau

SEQ ID NO: 1911201 - RNA, 19 nt, Artificial Sequence
  Description of Artificial Sequence: Synthetic oligonucleotide
  Antisense strand to SEQ ID NO: 1911200
auugcugggucguacuacg

SEQ ID NO: 1911202 - RNA, 19 nt, Artificial Sequence
  Description of Artificial Sequence: Synthetic oligonucleotide
  Sense strand starting at position 377 of SEQ ID NO: 1879495
ccaguucuugugugauucu

SEQ ID NO: 1911203 - RNA, 19 nt, Artificial Sequence
  Description of Artificial Sequence: Synthetic oligonucleotide
  Antisense strand to SEQ ID NO: 1911202
agaaucacacaagaacugg

SEQ ID NO: 1911204 - RNA, 19 nt, Artificial Sequence
  Description of Artificial Sequence: Synthetic oligonucleotide
  Sense strand starting at position 380 of SEQ ID NO: 1879495
guucuugugugauucuacu

SEQ ID NO: 1911205 - RNA, 19 nt, Artificial Sequence
  Description of Artificial Sequence: Synthetic oligonucleotide
  Antisense strand to SEQ ID NO: 1911204
aguagaaucacacaagaac

SEQ ID NO: 1911206 - RNA, 19 nt, Artificial Sequence
  Description of Artificial Sequence: Synthetic oligonucleotide
  Sense strand starting at position 523 of SEQ ID NO: 1879495
ccuugauccgggugaugcu

SEQ ID NO: 1911207 - RNA, 19 nt, Artificial Sequence
  Description of Artificial Sequence: Synthetic oligonucleotide
  Antisense strand to SEQ ID NO: 1911206
agcaucacccggaucaagg

SEQ ID NO: 1911208 - RNA, 19 nt, Artificial Sequence
  Description of Artificial Sequence: Synthetic oligonucleotide
  Sense strand starting at position 538 of SEQ ID NO: 1879495
ugcuuacauggucauguuu

SEQ ID NO: 1911209 - RNA, 19 nt, Artificial Sequence
  Description of Artificial Sequence: Synthetic oligonucleotide
  Antisense strand to SEQ ID NO: 1911208
aaacaugaccauguaagca

SEQ ID NO: 1911210 - RNA, 19 nt, Artificial Sequence
  Description of Artificial Sequence: Synthetic oligonucleotide
  Sense strand starting at position 547 of SEQ ID NO: 1879495
ggucauguuuccuuuguga

SEQ ID NO: 1911211 - RNA, 19 nt, Artificial Sequence
  Description of Artificial Sequence: Synthetic oligonucleotide
  Antisense strand to SEQ ID NO: 1911210
ucacaaaggaaacaugacc

SEQ ID NO: 1911212 - RNA, 19 nt, Artificial Sequence
  Description of Artificial Sequence: Synthetic oligonucleotide
  Sense strand starting at position 549 of SEQ ID NO: 1879495
ucauguuuccuuugugaag

SEQ ID NO: 1911213 - RNA, 19 nt, Artificial Sequence
  Description of Artificial Sequence: Synthetic oligonucleotide
  Antisense strand to SEQ ID NO: 1911212
cuucacaaaggaaacauga

SEQ ID NO: 1911214 - RNA, 19 nt, Artificial Sequence
  Description of Artificial Sequence: Synthetic oligonucleotide
  Sense strand starting at position 550 of SEQ ID NO: 1879495
cauguuuccuuugugaaga

SEQ ID NO: 1911215 - RNA, 19 nt, Artificial Sequence
  Description of Artificial Sequence: Synthetic oligonucleotide
  Antisense strand to SEQ ID NO: 1911214
ucuucacaaaggaaacaug

SEQ ID NO: 1911216 - RNA, 19 nt, Artificial Sequence
  Description of Artificial Sequence: Synthetic oligonucleotide
  Sense strand starting at position 555 of SEQ ID NO: 1879495
uuccuuugugaagauccau

SEQ ID NO: 1911217 - RNA, 19 nt, Artificial Sequence
  Description of Artificial Sequence: Synthetic oligonucleotide
  Antisense strand to SEQ ID NO: 1911216
auggaucuucacaaaggaa

SEQ ID NO: 1911218 - RNA, 19 nt, Artificial Sequence
  Description of Artificial Sequence: Synthetic oligonucleotide
  Sense strand starting at position 602 of SEQ ID NO: 1879495
cugcaaguauguuuacuua

SEQ ID NO: 1911219 - RNA, 19 nt, Artificial Sequence
  Description of Artificial Sequence: Synthetic oligonucleotide
  Antisense strand to SEQ ID NO: 1911218
uaaguaaacauacuugcag

SEQ ID NO: 1911220 - RNA, 19 nt, Artificial Sequence
  Description of Artificial Sequence: Synthetic oligonucleotide
  Sense strand starting at position 1247 of SEQ ID NO: 1879495
cucuguccgccuuaggaaa

SEQ ID NO: 1911221 - RNA, 19 nt, Artificial Sequence
  Description of Artificial Sequence: Synthetic oligonucleotide
  Antisense strand to SEQ ID NO: 1911220
uuuccuaaggcggacagag

SEQ ID NO: 1911222 - RNA, 19 nt, Artificial Sequence
  Description of Artificial Sequence: Synthetic oligonucleotide
  Sense strand starting at position 1275 of SEQ ID NO: 1879495
acuguauaucaugauucuu

SEQ ID NO: 1911223 - RNA, 19 nt, Artificial Sequence
  Description of Artificial Sequence: Synthetic oligonucleotide
  Antisense strand to SEQ ID NO: 1911222
aagaaucaugauauacagu

SEQ ID NO: 1911224 - RNA, 19 nt, Artificial Sequence
  Description of Artificial Sequence: Synthetic oligonucleotide
  Sense strand starting at position 1293 of SEQ ID NO: 1879495
ucaucugauucugaagaag

SEQ ID NO: 1911225 - RNA, 19 nt, Artificial Sequence
  Description of Artificial Sequence: Synthetic oligonucleotide
  Antisense strand to SEQ ID NO: 1911224
cuucuucagaaucagauga

SEQ ID NO: 1911226 - RNA, 19 nt, Artificial Sequence
  Description of Artificial Sequence: Synthetic oligonucleotide
  Sense strand starting at position 1362 of SEQ ID NO: 1879495
gaauauguggguugcuuaa

SEQ ID NO: 1911227 - RNA, 19 nt, Artificial Sequence
  Description of Artificial Sequence: Synthetic oligonucleotide
  Antisense strand to SEQ ID NO: 1911226
uuaagcaacccacauauuc

SEQ ID NO: 1911228 - RNA, 19 nt, Artificial Sequence
  Description of Artificial Sequence: Synthetic oligonucleotide
  Sense strand starting at position 1401 of SEQ ID NO: 1879495
uuuaguaugccugguggau

SEQ ID NO: 1911229 - RNA, 19 nt, Artificial Sequence
  Description of Artificial Sequence: Synthetic oligonucleotide
  Antisense strand to SEQ ID NO: 1911228
auccaccaggcauacuaaa

SEQ ID NO: 1911230 - RNA, 19 nt, Artificial Sequence
  Description of Artificial Sequence: Synthetic oligonucleotide
  Sense strand starting at position 1407 of SEQ ID NO: 1879495
augccugguggauaaguua

SEQ ID NO: 1911231 - RNA, 19 nt, Artificial Sequence
  Description of Artificial Sequence: Synthetic oligonucleotide
  Antisense strand to SEQ ID NO: 1911230
uaacuuauccaccaggcau

SEQ ID NO: 1911232 - RNA, 19 nt, Artificial Sequence
  Description of Artificial Sequence: Synthetic oligonucleotide
  Sense strand starting at position 1459 of SEQ ID NO: 1879495
accagauacuuugcucaug

SEQ ID NO: 1911233 - RNA, 19 nt, Artificial Sequence
  Description of Artificial Sequence: Synthetic oligonucleotide
  Antisense strand to SEQ ID NO: 1911232
caugagcaaaguaucuggu

SEQ ID NO: 1911234 - RNA, 19 nt, Artificial Sequence
  Description of Artificial Sequence: Synthetic oligonucleotide
  Sense strand starting at position 1485 of SEQ ID NO: 1879495
gucuguuuacggugagaaa

SEQ ID NO: 1911235 - RNA, 19 nt, Artificial Sequence
  Description of Artificial Sequence: Synthetic oligonucleotide
  Antisense strand to SEQ ID NO: 1911234
uuucucaccguaaacagac

SEQ ID NO: 1911236 - RNA, 19 nt, Artificial Sequence
  Description of Artificial Sequence: Synthetic oligonucleotide
  Sense strand starting at position 1486 of SEQ ID NO: 1879495
ucuguuuacggugagaaac

SEQ ID NO: 1911237 - RNA, 19 nt, Artificial Sequence
  Description of Artificial Sequence: Synthetic oligonucleotide
  Antisense strand to SEQ ID NO: 1911236
guuucucaccguaaacaga

SEQ ID NO: 1911238 - RNA, 19 nt, Artificial Sequence
  Description of Artificial Sequence: Synthetic oligonucleotide
  Sense strand starting at position 1665 of SEQ ID NO: 1879495
gcauguugacacugugcaa

SEQ ID NO: 1911239 - RNA, 19 nt, Artificial Sequence
  Description of Artificial Sequence: Synthetic oligonucleotide
  Antisense strand to SEQ ID NO: 1911238
uugcacagugucaacaugc

SEQ ID NO: 1911240 - RNA, 19 nt, Artificial Sequence
  Description of Artificial Sequence: Synthetic oligonucleotide
  Sense strand starting at position 2331 of SEQ ID NO: 1879495
augucacuucucuguggaa

SEQ ID NO: 1911241 - RNA, 19 nt, Artificial Sequence
  Description of Artificial Sequence: Synthetic oligonucleotide
  Antisense strand to SEQ ID NO: 1911240
uuccacagagaagugacau

SEQ ID NO: 1911242 - RNA, 19 nt, Artificial Sequence
  Description of Artificial Sequence: Synthetic oligonucleotide
  Sense strand starting at position 2333 of SEQ ID NO: 1879495
gucacuucucuguggaaua

SEQ ID NO: 1911243 - RNA, 19 nt, Artificial Sequence
  Description of Artificial Sequence: Synthetic oligonucleotide
  Antisense strand to SEQ ID NO: 1911242
uauuccacagagaagugac

SEQ ID NO: 1911244 - RNA, 19 nt, Artificial Sequence
  Description of Artificial Sequence: Synthetic oligonucleotide
  Sense strand starting at position 2384 of SEQ ID NO: 1879495
acacauggacuuuguaauc

SEQ ID NO: 1911245 - RNA, 19 nt, Artificial Sequence
  Description of Artificial Sequence: Synthetic oligonucleotide
  Antisense strand to SEQ ID NO: 1911244
gauuacaaaguccaugugu

SEQ ID NO: 1911246 - RNA, 19 nt, Artificial Sequence
  Description of Artificial Sequence: Synthetic oligonucleotide
  Sense strand starting at position 2389 of SEQ ID NO: 1879495
uggacuuuguaaucugaca

SEQ ID NO: 1911247 - RNA, 19 nt, Artificial Sequence
  Description of Artificial Sequence: Synthetic oligonucleotide
  Antisense strand to SEQ ID NO: 1911246
ugucagauuacaaagucca

SEQ ID NO: 1911248 - RNA, 19 nt, Artificial Sequence
  Description of Artificial Sequence: Synthetic oligonucleotide
  Sense strand starting at position 2433 of SEQ ID NO: 1879495
uccucuuuccuugauugga

SEQ ID NO: 1911249 - RNA, 19 nt, Artificial Sequence
  Description of Artificial Sequence: Synthetic oligonucleotide
  Antisense strand to SEQ ID NO: 1911248
uccaaucaaggaaagagga

SEQ ID NO: 1911250 - RNA, 19 nt, Artificial Sequence
  Description of Artificial Sequence: Synthetic oligonucleotide
  Sense strand starting at position 2435 of SEQ ID NO: 1879495
cucuuuccuugauuggauu

SEQ ID NO: 1911251 - RNA, 19 nt, Artificial Sequence
  Description of Artificial Sequence: Synthetic oligonucleotide
  Antisense strand to SEQ ID NO: 1911250
aauccaaucaaggaaagag

SEQ ID NO: 1911252 - RNA, 19 nt, Artificial Sequence
  Description of Artificial Sequence: Synthetic oligonucleotide
  Sense strand starting at position 2461 of SEQ ID NO: 1879495
auuccauuccagugcuaug

SEQ ID NO: 1911253 - RNA, 19 nt, Artificial Sequence
  Description of Artificial Sequence: Synthetic oligonucleotide
  Antisense strand to SEQ ID NO: 1911252
cauagcacuggaauggaau

SEQ ID NO: 1911254 - RNA, 19 nt, Artificial Sequence
  Description of Artificial Sequence: Synthetic oligonucleotide
  Sense strand starting at position 2466 of SEQ ID NO: 1879495
auuccagugcuauguucua

SEQ ID NO: 1911255 - RNA, 19 nt, Artificial Sequence
  Description of Artificial Sequence: Synthetic oligonucleotide
  Antisense strand to SEQ ID NO: 1911254
uagaacauagcacuggaau

SEQ ID NO: 1911256 - RNA, 19 nt, Artificial Sequence
  Description of Artificial Sequence: Synthetic oligonucleotide
  Sense strand starting at position 2482 of SEQ ID NO: 1879495
cuaucacaccucugaguuu

SEQ ID NO: 1911257 - RNA, 19 nt, Artificial Sequence
  Description of Artificial Sequence: Synthetic oligonucleotide
  Antisense strand to SEQ ID NO: 1911256
aaacucagaggugugauag

SEQ ID NO: 1911258 - RNA, 19 nt, Artificial Sequence
  Description of Artificial Sequence: Synthetic oligonucleotide
  Sense strand starting at position 2493 of SEQ ID NO: 1879495
cugaguuugugcucaugau

SEQ ID NO: 1911259 - RNA, 19 nt, Artificial Sequence
  Description of Artificial Sequence: Synthetic oligonucleotide
  Antisense strand to SEQ ID NO: 1911258
aucaugagcacaaacucag

SEQ ID NO: 1911260 - RNA, 19 nt, Artificial Sequence
  Description of Artificial Sequence: Synthetic oligonucleotide
  Sense strand starting at position 2494 of SEQ ID NO: 1879495
ugaguuugugcucaugaug

SEQ ID NO: 1911261 - RNA, 19 nt, Artificial Sequence
  Description of Artificial Sequence: Synthetic oligonucleotide
  Antisense strand to SEQ ID NO: 1911260
caucaugagcacaaacuca

SEQ ID NO: 1911262 - RNA, 19 nt, Artificial Sequence
  Description of Artificial Sequence: Synthetic oligonucleotide
  Sense strand starting at position 2549 of SEQ ID NO: 1879495
uagggacugcuuugggauu

SEQ ID NO: 1911263 - RNA, 19 nt, Artificial Sequence
  Description of Artificial Sequence: Synthetic oligonucleotide
  Antisense strand to SEQ ID NO: 1911262
aaucccaaagcagucccua

SEQ ID NO: 1911264 - RNA, 19 nt, Artificial Sequence
  Description of Artificial Sequence: Synthetic oligonucleotide
  Sense strand starting at position 3120 of SEQ ID NO: 1879495
agugaagagaucugauguc

SEQ ID NO: 1911265 - RNA, 19 nt, Artificial Sequence
  Description of Artificial Sequence: Synthetic oligonucleotide
  Antisense strand to SEQ ID NO: 1911264
gacaucagaucucuucacu

SEQ ID NO: 1911266 - RNA, 19 nt, Artificial Sequence
  Description of Artificial Sequence: Synthetic oligonucleotide
  Sense strand starting at position 3160 of SEQ ID NO: 1879495
cauggcugucugcagacaa

SEQ ID NO: 1911267 - RNA, 19 nt, Artificial Sequence
  Description of Artificial Sequence: Synthetic oligonucleotide
  Antisense strand to SEQ ID NO: 1911266
uugucugcagacagccaug

SEQ ID NO: 1911268 - RNA, 19 nt, Artificial Sequence
  Description of Artificial Sequence: Synthetic oligonucleotide
  Sense strand starting at position 3179 of SEQ ID NO: 1879495
gccauaaggcuuuggaggu

SEQ ID NO: 1911269 - RNA, 19 nt, Artificial Sequence
  Description of Artificial Sequence: Synthetic oligonucleotide
  Antisense strand to SEQ ID NO: 1911268
accuccaaagccuuauggc

SEQ ID NO: 1911270 - RNA, 19 nt, Artificial Sequence
  Description of Artificial Sequence: Synthetic oligonucleotide
  Sense strand starting at position 3203 of SEQ ID NO: 1879495
uuccucugguauuuaguua

SEQ ID NO: 1911271 - RNA, 19 nt, Artificial Sequence
  Description of Artificial Sequence: Synthetic oligonucleotide
  Antisense strand to SEQ ID NO: 1911270
uaacuaaauaccagaggaa

SEQ ID NO: 1911272 - RNA, 19 nt, Artificial Sequence
  Description of Artificial Sequence: Synthetic oligonucleotide
  Sense strand starting at position 3215 of SEQ ID NO: 1879495
uuaguuacugcuggucaga

SEQ ID NO: 1911273 - RNA, 19 nt, Artificial Sequence
  Description of Artificial Sequence: Synthetic oligonucleotide
  Antisense strand to SEQ ID NO: 1911272
ucugaccagcaguaacuaa

SEQ ID NO: 1911274 - RNA, 19 nt, Artificial Sequence
  Description of Artificial Sequence: Synthetic oligonucleotide
  Sense strand starting at position 3217 of SEQ ID NO: 1879495
aguuacugcuggucagaag

SEQ ID NO: 1911275 - RNA, 19 nt, Artificial Sequence
  Description of Artificial Sequence: Synthetic oligonucleotide
  Antisense strand to SEQ ID NO: 1911274
cuucugaccagcaguaacu

SEQ ID NO: 1911276 - RNA, 19 nt, Artificial Sequence
  Description of Artificial Sequence: Synthetic oligonucleotide
  Sense strand starting at position 3594 of SEQ ID NO: 1879495
agcauaguccagggagcua

SEQ ID NO: 1911277 - RNA, 19 nt, Artificial Sequence
  Description of Artificial Sequence: Synthetic oligonucleotide
  Antisense strand to SEQ ID NO: 1911276
uagcucccuggacuaugcu

SEQ ID NO: 1911278 - RNA, 19 nt, Artificial Sequence
  Description of Artificial Sequence: Synthetic oligonucleotide
  Sense strand starting at position 48 of SEQ ID NO: 1879496
guaugauaaucugugggac

SEQ ID NO: 1911279 - RNA, 19 nt, Artificial Sequence
  Description of Artificial Sequence: Synthetic oligonucleotide
  Antisense strand to SEQ ID NO: 1911278
gucccacagauuaucauac

SEQ ID NO: 1911280 - RNA, 19 nt, Artificial Sequence
  Description of Artificial Sequence: Synthetic oligonucleotide
  Sense strand starting at position 49 of SEQ ID NO: 1879496
uaugauaaucugugggacu

SEQ ID NO: 1911281 - RNA, 19 nt, Artificial Sequence
  Description of Artificial Sequence: Synthetic oligonucleotide
  Antisense strand to SEQ ID NO: 1911280
agucccacagauuaucaua

SEQ ID NO: 1911282 - RNA, 19 nt, Artificial Sequence
  Description of Artificial Sequence: Synthetic oligonucleotide
  Sense strand starting at position 109 of SEQ ID NO: 1879496
uguagaucaugacuaucuu

SEQ ID NO: 1911283 - RNA, 19 nt, Artificial Sequence
  Description of Artificial Sequence: Synthetic oligonucleotide
  Antisense strand to SEQ ID NO: 1911282
aagauagucaugaucuaca

SEQ ID NO: 1911284 - RNA, 19 nt, Artificial Sequence
  Description of Artificial Sequence: Synthetic oligonucleotide
  Sense strand starting at position 420 of SEQ ID NO: 1879496
gccaauuuagauuguugua

SEQ ID NO: 1911285 - RNA, 19 nt, Artificial Sequence
  Description of Artificial Sequence: Synthetic oligonucleotide
  Antisense strand to SEQ ID NO: 1911284
uacaacaaucuaaauuggc

SEQ ID NO: 1911286 - RNA, 19 nt, Artificial Sequence
  Description of Artificial Sequence: Synthetic oligonucleotide
  Sense strand starting at position 517 of SEQ ID NO: 1879496
gcaacugguagaugaagua

SEQ ID NO: 1911287 - RNA, 19 nt, Artificial Sequence
  Description of Artificial Sequence: Synthetic oligonucleotide
  Antisense strand to SEQ ID NO: 1911286
uacuucaucuaccaguugc

SEQ ID NO: 1911288 - RNA, 19 nt, Artificial Sequence
  Description of Artificial Sequence: Synthetic oligonucleotide
  Sense strand starting at position 630 of SEQ ID NO: 1879496
gccuuugaacgauagacuu

SEQ ID NO: 1911289 - RNA, 19 nt, Artificial Sequence
  Description of Artificial Sequence: Synthetic oligonucleotide
  Antisense strand to SEQ ID NO: 1911288
aagucuaucguucaaaggc

SEQ ID NO: 1911290 - RNA, 19 nt, Artificial Sequence
  Description of Artificial Sequence: Synthetic oligonucleotide
  Sense strand starting at position 666 of SEQ ID NO: 1879496
auaacuauucucgaguuuc

SEQ ID NO: 1911291 - RNA, 19 nt, Artificial Sequence
  Description of Artificial Sequence: Synthetic oligonucleotide
  Antisense strand to SEQ ID NO: 1911290
gaaacucgagaauaguuau

SEQ ID NO: 1911292 - RNA, 19 nt, Artificial Sequence
  Description of Artificial Sequence: Synthetic oligonucleotide
  Sense strand starting at position 872 of SEQ ID NO: 1879496
ugugguuaucagcaagaug

SEQ ID NO: 1911293 - RNA, 19 nt, Artificial Sequence
  Description of Artificial Sequence: Synthetic oligonucleotide
  Antisense strand to SEQ ID NO: 1911292
caucuugcugauaaccaca

SEQ ID NO: 1911294 - RNA, 19 nt, Artificial Sequence
  Description of Artificial Sequence: Synthetic oligonucleotide
  Sense strand starting at position 875 of SEQ ID NO: 1879496
gguuaucagcaagauguau

SEQ ID NO: 1911295 - RNA, 19 nt, Artificial Sequence
  Description of Artificial Sequence: Synthetic oligonucleotide
  Antisense strand to SEQ ID NO: 1911294
auacaucuugcugauaacc

SEQ ID NO: 1911296 - RNA, 19 nt, Artificial Sequence
  Description of Artificial Sequence: Synthetic oligonucleotide
  Sense strand starting at position 972 of SEQ ID NO: 1879496
gaguaugaccagcauguca

SEQ ID NO: 1911297 - RNA, 19 nt, Artificial Sequence
  Description of Artificial Sequence: Synthetic oligonucleotide
  Antisense strand to SEQ ID NO: 1911296
ugacaugcuggucauacuc

SEQ ID NO: 1911298 - RNA, 19 nt, Artificial Sequence
  Description of Artificial Sequence: Synthetic oligonucleotide
  Sense strand starting at position 1228 of SEQ ID NO: 1879496
auaaacaaggucugcuaau

SEQ ID NO: 1911299 - RNA, 19 nt, Artificial Sequence
  Description of Artificial Sequence: Synthetic oligonucleotide
  Antisense strand to SEQ ID NO: 1911298
auuagcagaccuuguuuau

SEQ ID NO: 1911300 - RNA, 19 nt, Artificial Sequence
  Description of Artificial Sequence: Synthetic oligonucleotide
  Sense strand starting at position 1643 of SEQ ID NO: 1879496
ggcagaacgacaugacaaa

SEQ ID NO: 1911301 - RNA, 19 nt, Artificial Sequence
  Description of Artificial Sequence: Synthetic oligonucleotide
  Antisense strand to SEQ ID NO: 1911300
uuugucaugucguucugcc

SEQ ID NO: 1911302 - RNA, 19 nt, Artificial Sequence
  Description of Artificial Sequence: Synthetic oligonucleotide
  Sense strand starting at position 2223 of SEQ ID NO: 1879496
gggagaauaugccuucuuu

SEQ ID NO: 1911303 - RNA, 19 nt, Artificial Sequence
  Description of Artificial Sequence: Synthetic oligonucleotide
  Antisense strand to SEQ ID NO: 1911302
aaagaaggcauauucuccc

SEQ ID NO: 1911304 - RNA, 19 nt, Artificial Sequence
  Description of Artificial Sequence: Synthetic oligonucleotide
  Sense strand starting at position 2309 of SEQ ID NO: 1879496
uuauuaaccugagcauaga

SEQ ID NO: 1911305 - RNA, 19 nt, Artificial Sequence
  Description of Artificial Sequence: Synthetic oligonucleotide
  Antisense strand to SEQ ID NO: 1911304
ucuaugcucagguuaauaa

SEQ ID NO: 1911306 - RNA, 19 nt, Artificial Sequence
  Description of Artificial Sequence: Synthetic oligonucleotide
  Sense strand starting at position 2505 of SEQ ID NO: 1879496
auuugaaauuaaggagaga

SEQ ID NO: 1911307 - RNA, 19 nt, Artificial Sequence
  Description of Artificial Sequence: Synthetic oligonucleotide
  Antisense strand to SEQ ID NO: 1911306
ucucuccuuaauuucaaau

SEQ ID NO: 1911308 - RNA, 19 nt, Artificial Sequence
  Description of Artificial Sequence: Synthetic oligonucleotide
  Sense strand starting at position 2570 of SEQ ID NO: 1879496
auaguuauuuggcuuugca

SEQ ID NO: 1911309 - RNA, 19 nt, Artificial Sequence
  Description of Artificial Sequence: Synthetic oligonucleotide
  Antisense strand to SEQ ID NO: 1911308
ugcaaagccaaauaacuau

SEQ ID NO: 1911310 - RNA, 19 nt, Artificial Sequence
  Description of Artificial Sequence: Synthetic oligonucleotide
  Sense strand starting at position 2573 of SEQ ID NO: 1879496
guuauuuggcuuugcaaau

SEQ ID NO: 1911311 - RNA, 19 nt, Artificial Sequence
  Description of Artificial Sequence: Synthetic oligonucleotide
  Antisense strand to SEQ ID NO: 1911310
auuugcaaagccaaauaac

SEQ ID NO: 1911312 - RNA, 19 nt, Artificial Sequence
  Description of Artificial Sequence: Synthetic oligonucleotide
  Sense strand starting at position 2584 of SEQ ID NO: 1879496
uugcaaaugcacuagucaa

SEQ ID NO: 1911313 - RNA, 19 nt, Artificial Sequence
  Description of Artificial Sequence: Synthetic oligonucleotide
  Antisense strand to SEQ ID NO: 1911312
uugacuagugcauuugcaa

SEQ ID NO: 1911314 - RNA, 19 nt, Artificial Sequence
  Description of Artificial Sequence: Synthetic oligonucleotide
  Sense strand starting at position 2591 of SEQ ID NO: 1879496
ugcacuagucaagaauguu

SEQ ID NO: 1911315 - RNA, 19 nt, Artificial Sequence
  Description of Artificial Sequence: Synthetic oligonucleotide
  Antisense strand to SEQ ID NO: 1911314
aacauucuugacuagugca

SEQ ID NO: 1911316 - RNA, 19 nt, Artificial Sequence
  Description of Artificial Sequence: Synthetic oligonucleotide
  Sense strand starting at position 2684 of SEQ ID NO: 1879496
caaucauugccacaggguu

SEQ ID NO: 1911317 - RNA, 19 nt, Artificial Sequence
  Description of Artificial Sequence: Synthetic oligonucleotide
  Antisense strand to SEQ ID NO: 1911316
aacccuguggcaaugauug

SEQ ID NO: 1911318 - RNA, 19 nt, Artificial Sequence
  Description of Artificial Sequence: Synthetic oligonucleotide
  Sense strand starting at position 2880 of SEQ ID NO: 1879496
ggacucaguuuauuaugaa

SEQ ID NO: 1911319 - RNA, 19 nt, Artificial Sequence
  Description of Artificial Sequence: Synthetic oligonucleotide
  Antisense strand to SEQ ID NO: 1911318
uucauaauaaacugagucc

SEQ ID NO: 1911320 - RNA, 19 nt, Artificial Sequence
  Description of Artificial Sequence: Synthetic oligonucleotide
  Sense strand starting at position 2899 of SEQ ID NO: 1879496
cuguguuuccugucuuucu

SEQ ID NO: 1911321 - RNA, 19 nt, Artificial Sequence
  Description of Artificial Sequence: Synthetic oligonucleotide
  Antisense strand to SEQ ID NO: 1911320
agaaagacaggaaacacag

SEQ ID NO: 1911322 - RNA, 19 nt, Artificial Sequence
  Description of Artificial Sequence: Synthetic oligonucleotide
  Sense strand starting at position 2937 of SEQ ID NO: 1879496
cagaaucuugguggcaaua

SEQ ID NO: 1911323 - RNA, 19 nt, Artificial Sequence
  Description of Artificial Sequence: Synthetic oligonucleotide
  Antisense strand to SEQ ID NO: 1911322
uauugccaccaagauucug

SEQ ID NO: 1911324 - RNA, 19 nt, Artificial Sequence
  Description of Artificial Sequence: Synthetic oligonucleotide
  Sense strand starting at position 2948 of SEQ ID NO: 1879496
uggcaauauccauagcucu

SEQ ID NO: 1911325 - RNA, 19 nt, Artificial Sequence
  Description of Artificial Sequence: Synthetic oligonucleotide
  Antisense strand to SEQ ID NO: 1911324
agagcuauggauauugcca

SEQ ID NO: 1911326 - RNA, 19 nt, Artificial Sequence
  Description of Artificial Sequence: Synthetic oligonucleotide
  Sense strand starting at position 2956 of SEQ ID NO: 1879496
uccauagcucuugacagau

SEQ ID NO: 1911327 - RNA, 19 nt, Artificial Sequence
  Description of Artificial Sequence: Synthetic oligonucleotide
  Antisense strand to SEQ ID NO: 1911326
aucugucaagagcuaugga

SEQ ID NO: 1911328 - RNA, 19 nt, Artificial Sequence
  Description of Artificial Sequence: Synthetic oligonucleotide
  Sense strand starting at position 3225 of SEQ ID NO: 1879496
ccuacagugucaucaaaua

SEQ ID NO: 1911329 - RNA, 19 nt, Artificial Sequence
  Description of Artificial Sequence: Synthetic oligonucleotide
  Antisense strand to SEQ ID NO: 1911328
uauuugaugacacuguagg

SEQ ID NO: 1911330 - RNA, 19 nt, Artificial Sequence
  Description of Artificial Sequence: Synthetic oligonucleotide
  Sense strand starting at position 3246 of SEQ ID NO: 1879496
cgaacauuacagcaaagua

SEQ ID NO: 1911331 - RNA, 19 nt, Artificial Sequence
  Description of Artificial Sequence: Synthetic oligonucleotide
  Antisense strand to SEQ ID NO: 1911330
uacuuugcuguaauguucg

SEQ ID NO: 1911332 - RNA, 19 nt, Artificial Sequence
  Description of Artificial Sequence: Synthetic oligonucleotide
  Sense strand starting at position 3324 of SEQ ID NO: 1879496
guaguuuagaggugaagaa

SEQ ID NO: 1911333 - RNA, 19 nt, Artificial Sequence
  Description of Artificial Sequence: Synthetic oligonucleotide
  Antisense strand to SEQ ID NO: 1911332
uucuucaccucuaaacuac

SEQ ID NO: 1911334 - RNA, 19 nt, Artificial Sequence
  Description of Artificial Sequence: Synthetic oligonucleotide
  Sense strand starting at position 3394 of SEQ ID NO: 1879496
ugugaacuugggcaaggau

SEQ ID NO: 1911335 - RNA, 19 nt, Artificial Sequence
  Description of Artificial Sequence: Synthetic oligonucleotide
  Antisense strand to SEQ ID NO: 1911334
auccuugcccaaguucaca

SEQ ID NO: 1911336 - RNA, 19 nt, Artificial Sequence
  Description of Artificial Sequence: Synthetic oligonucleotide
  Sense strand starting at position 3530 of SEQ ID NO: 1879496
gugccugagacucauuaga

SEQ ID NO: 1911337 - RNA, 19 nt, Artificial Sequence
  Description of Artificial Sequence: Synthetic oligonucleotide
  Antisense strand to SEQ ID NO: 1911336
ucuaaugagucucaggcac

SEQ ID NO: 1911338 - RNA, 19 nt, Artificial Sequence
  Description of Artificial Sequence: Synthetic oligonucleotide
  Sense strand starting at position 3532 of SEQ ID NO: 1879496
gccugagacucauuagaug

SEQ ID NO: 1911339 - RNA, 19 nt, Artificial Sequence
  Description of Artificial Sequence: Synthetic oligonucleotide
  Antisense strand to SEQ ID NO: 1911338
caucuaaugagucucaggc

SEQ ID NO: 1911340 - RNA, 19 nt, Artificial Sequence
  Description of Artificial Sequence: Synthetic oligonucleotide
  Sense strand starting at position 3540 of SEQ ID NO: 1879496
cucauuagaugcuugacaa

SEQ ID NO: 1911341 - RNA, 19 nt, Artificial Sequence
  Description of Artificial Sequence: Synthetic oligonucleotide
  Antisense strand to SEQ ID NO: 1911340
uugucaagcaucuaaugag

SEQ ID NO: 1911342 - RNA, 19 nt, Artificial Sequence
  Description of Artificial Sequence: Synthetic oligonucleotide
  Sense strand starting at position 3541 of SEQ ID NO: 1879496
ucauuagaugcuugacaaa

SEQ ID NO: 1911343 - RNA, 19 nt, Artificial Sequence
  Description of Artificial Sequence: Synthetic oligonucleotide
  Antisense strand to SEQ ID NO: 1911342
uuugucaagcaucuaauga

SEQ ID NO: 1911344 - RNA, 19 nt, Artificial Sequence
  Description of Artificial Sequence: Synthetic oligonucleotide
  Sense strand starting at position 3729 of SEQ ID NO: 1879496
ugugcaauucuaggaagac

SEQ ID NO: 1911345 - RNA, 19 nt, Artificial Sequence
  Description of Artificial Sequence: Synthetic oligonucleotide
  Antisense strand to SEQ ID NO: 1911344
gucuuccuagaauugcaca

SEQ ID NO: 1911346 - RNA, 19 nt, Artificial Sequence
  Description of Artificial Sequence: Synthetic oligonucleotide
  Sense strand starting at position 3784 of SEQ ID NO: 1879496
agugguaguggguguauuu

SEQ ID NO: 1911347 - RNA, 19 nt, Artificial Sequence
  Description of Artificial Sequence: Synthetic oligonucleotide
  Antisense strand to SEQ ID NO: 1911346
aaauacacccacuaccacu

SEQ ID NO: 1911348 - RNA, 19 nt, Artificial Sequence
  Description of Artificial Sequence: Synthetic oligonucleotide
  Sense strand starting at position 3802 of SEQ ID NO: 1879496
uuuaaauugaguggugaga

SEQ ID NO: 1911349 - RNA, 19 nt, Artificial Sequence
  Description of Artificial Sequence: Synthetic oligonucleotide
  Antisense strand to SEQ ID NO: 1911348
ucucaccacucaauuuaaa

SEQ ID NO: 1911350 - RNA, 19 nt, Artificial Sequence
  Description of Artificial Sequence: Synthetic oligonucleotide
  Sense strand starting at position 3825 of SEQ ID NO: 1879496
cucuauucugaaggugaug

SEQ ID NO: 1911351 - RNA, 19 nt, Artificial Sequence
  Description of Artificial Sequence: Synthetic oligonucleotide
  Antisense strand to SEQ ID NO: 1911350
caucaccuucagaauagag

SEQ ID NO: 1911352 - RNA, 19 nt, Artificial Sequence
  Description of Artificial Sequence: Synthetic oligonucleotide
  Sense strand starting at position 3827 of SEQ ID NO: 1879496
cuauucugaaggugaugau

SEQ ID NO: 1911353 - RNA, 19 nt, Artificial Sequence
  Description of Artificial Sequence: Synthetic oligonucleotide
  Antisense strand to SEQ ID NO: 1911352
aucaucaccuucagaauag

SEQ ID NO: 1911354 - RNA, 19 nt, Artificial Sequence
  Description of Artificial Sequence: Synthetic oligonucleotide
  Sense strand starting at position 3924 of SEQ ID NO: 1879496
gcucccugaggucaagaau

SEQ ID NO: 1911355 - RNA, 19 nt, Artificial Sequence
  Description of Artificial Sequence: Synthetic oligonucleotide
  Antisense strand to SEQ ID NO: 1911354
auucuugaccucagggagc

SEQ ID NO: 1911356 - RNA, 19 nt, Artificial Sequence
  Description of Artificial Sequence: Synthetic oligonucleotide
  Sense strand starting at position 3965 of SEQ ID NO: 1879496
augauagugcuugacaugu

SEQ ID NO: 1911357 - RNA, 19 nt, Artificial Sequence
  Description of Artificial Sequence: Synthetic oligonucleotide
  Antisense strand to SEQ ID NO: 1911356
acaugucaagcacuaucau

SEQ ID NO: 1911358 - RNA, 19 nt, Artificial Sequence
  Description of Artificial Sequence: Synthetic oligonucleotide
  Sense strand starting at position 256 of SEQ ID NO: 1879497
cugacaaugugucucuaac

SEQ ID NO: 1911359 - RNA, 19 nt, Artificial Sequence
  Description of Artificial Sequence: Synthetic oligonucleotide
  Antisense strand to SEQ ID NO: 1911358
guuagagacacauugucag

SEQ ID NO: 1911360 - RNA, 19 nt, Artificial Sequence
  Description of Artificial Sequence: Synthetic oligonucleotide
  Sense strand starting at position 346 of SEQ ID NO: 1879497
gugccauucucauuugcau

SEQ ID NO: 1911361 - RNA, 19 nt, Artificial Sequence
  Description of Artificial Sequence: Synthetic oligonucleotide
  Antisense strand to SEQ ID NO: 1911360
augcaaaugagaauggcac

SEQ ID NO: 1911362 - RNA, 19 nt, Artificial Sequence
  Description of Artificial Sequence: Synthetic oligonucleotide
  Sense strand starting at position 528 of SEQ ID NO: 1879497
aauggugucagaugcauag

SEQ ID NO: 1911363 - RNA, 19 nt, Artificial Sequence
  Description of Artificial Sequence: Synthetic oligonucleotide
  Antisense strand to SEQ ID NO: 1911362
cuaugcaucugacaccauu

SEQ ID NO: 1911364 - RNA, 19 nt, Artificial Sequence
  Description of Artificial Sequence: Synthetic oligonucleotide
  Sense strand starting at position 532 of SEQ ID NO: 1879497
gugucagaugcauagcaga

SEQ ID NO: 1911365 - RNA, 19 nt, Artificial Sequence
  Description of Artificial Sequence: Synthetic oligonucleotide
  Antisense strand to SEQ ID NO: 1911364
ucugcuaugcaucugacac

SEQ ID NO: 1911366 - RNA, 19 nt, Artificial Sequence
  Description of Artificial Sequence: Synthetic oligonucleotide
  Sense strand starting at position 663 of SEQ ID NO: 1879497
guucuauaagacugaguaa

SEQ ID NO: 1911367 - RNA, 19 nt, Artificial Sequence
  Description of Artificial Sequence: Synthetic oligonucleotide
  Antisense strand to SEQ ID NO: 1911366
uuacucagucuuauagaac

SEQ ID NO: 1911368 - RNA, 19 nt, Artificial Sequence
  Description of Artificial Sequence: Synthetic oligonucleotide
  Sense strand starting at position 687 of SEQ ID NO: 1879497
agcagaacuucuuuggaaa

SEQ ID NO: 1911369 - RNA, 19 nt, Artificial Sequence
  Description of Artificial Sequence: Synthetic oligonucleotide
  Antisense strand to SEQ ID NO: 1911368
uuuccaaagaaguucugcu

SEQ ID NO: 1911370 - RNA, 19 nt, Artificial Sequence
  Description of Artificial Sequence: Synthetic oligonucleotide
  Sense strand starting at position 688 of SEQ ID NO: 1879497
gcagaacuucuuuggaaac

SEQ ID NO: 1911371 - RNA, 19 nt, Artificial Sequence
  Description of Artificial Sequence: Synthetic oligonucleotide
  Antisense strand to SEQ ID NO: 1911370
guuuccaaagaaguucugc

SEQ ID NO: 1911372 - RNA, 19 nt, Artificial Sequence
  Description of Artificial Sequence: Synthetic oligonucleotide
  Sense strand starting at position 909 of SEQ ID NO: 1879497
ggauaaaguuucucccuuu

SEQ ID NO: 1911373 - RNA, 19 nt, Artificial Sequence
  Description of Artificial Sequence: Synthetic oligonucleotide
  Antisense strand to SEQ ID NO: 1911372
aaagggagaaacuuuaucc

SEQ ID NO: 1911374 - RNA, 19 nt, Artificial Sequence
  Description of Artificial Sequence: Synthetic oligonucleotide
  Sense strand starting at position 949 of SEQ ID NO: 1879497
ugaguauacucccuggauu

SEQ ID NO: 1911375 - RNA, 19 nt, Artificial Sequence
  Description of Artificial Sequence: Synthetic oligonucleotide
  Antisense strand to SEQ ID NO: 1911374
aauccagggaguauacuca

SEQ ID NO: 1911376 - RNA, 19 nt, Artificial Sequence
  Description of Artificial Sequence: Synthetic oligonucleotide
  Sense strand starting at position 1078 of SEQ ID NO: 1879497
aaguguuggcauuggagau

SEQ ID NO: 1911377 - RNA, 19 nt, Artificial Sequence
  Description of Artificial Sequence: Synthetic oligonucleotide
  Antisense strand to SEQ ID NO: 1911376
aucuccaaugccaacacuu

SEQ ID NO: 1911378 - RNA, 19 nt, Artificial Sequence
  Description of Artificial Sequence: Synthetic oligonucleotide
  Sense strand starting at position 1102 of SEQ ID NO: 1879497
agcuuagguggagauuauu

SEQ ID NO: 1911379 - RNA, 19 nt, Artificial Sequence
  Description of Artificial Sequence: Synthetic oligonucleotide
  Antisense strand to SEQ ID NO: 1911378
aauaaucuccaccuaagcu

SEQ ID NO: 1911380 - RNA, 19 nt, Artificial Sequence
  Description of Artificial Sequence: Synthetic oligonucleotide
  Sense strand starting at position 1125 of SEQ ID NO: 1879497
caaccuauggaguaauguu

SEQ ID NO: 1911381 - RNA, 19 nt, Artificial Sequence
  Description of Artificial Sequence: Synthetic oligonucleotide
  Antisense strand to SEQ ID NO: 1911380
aacauuacuccauagguug

SEQ ID NO: 1911382 - RNA, 19 nt, Artificial Sequence
  Description of Artificial Sequence: Synthetic oligonucleotide
  Sense strand starting at position 1243 of SEQ ID NO: 1879497
aaagcugacuuguuagauc

SEQ ID NO: 1911383 - RNA, 19 nt, Artificial Sequence
  Description of Artificial Sequence: Synthetic oligonucleotide
  Antisense strand to SEQ ID NO: 1911382
gaucuaacaagucagcuuu

SEQ ID NO: 1911384 - RNA, 19 nt, Artificial Sequence
  Description of Artificial Sequence: Synthetic oligonucleotide
  Sense strand starting at position 1254 of SEQ ID NO: 1879497
guuagaucagaauggcuaa

SEQ ID NO: 1911385 - RNA, 19 nt, Artificial Sequence
  Description of Artificial Sequence: Synthetic oligonucleotide
  Antisense strand to SEQ ID NO: 1911384
uuagccauucugaucuaac

SEQ ID NO: 1911386 - RNA, 19 nt, Artificial Sequence
  Description of Artificial Sequence: Synthetic oligonucleotide
  Sense strand starting at position 1367 of SEQ ID NO: 1879497
ucuuuaucauuggucuaua

SEQ ID NO: 1911387 - RNA, 19 nt, Artificial Sequence
  Description of Artificial Sequence: Synthetic oligonucleotide
  Antisense strand to SEQ ID NO: 1911386
uauagaccaaugauaaaga

SEQ ID NO: 1911388 - RNA, 19 nt, Artificial Sequence
  Description of Artificial Sequence: Synthetic oligonucleotide
  Sense strand starting at position 1370 of SEQ ID NO: 1879497
uuaucauuggucuauaagu

SEQ ID NO: 1911389 - RNA, 19 nt, Artificial Sequence
  Description of Artificial Sequence: Synthetic oligonucleotide
  Antisense strand to SEQ ID NO: 1911388
acuuauagaccaaugauaa

SEQ ID NO: 1911390 - RNA, 19 nt, Artificial Sequence
  Description of Artificial Sequence: Synthetic oligonucleotide
  Sense strand starting at position 1372 of SEQ ID NO: 1879497
aucauuggucuauaagucu

SEQ ID NO: 1911391 - RNA, 19 nt, Artificial Sequence
  Description of Artificial Sequence: Synthetic oligonucleotide
  Antisense strand to SEQ ID NO: 1911390
agacuuauagaccaaugau

SEQ ID NO: 1911392 - RNA, 19 nt, Artificial Sequence
  Description of Artificial Sequence: Synthetic oligonucleotide
  Sense strand starting at position 1817 of SEQ ID NO: 1879497
ucuauagagcauuggugau

SEQ ID NO: 1911393 - RNA, 19 nt, Artificial Sequence
  Description of Artificial Sequence: Synthetic oligonucleotide
  Antisense strand to SEQ ID NO: 1911392
aucaccaaugcucuauaga

SEQ ID NO: 1911394 - RNA, 19 nt, Artificial Sequence
  Description of Artificial Sequence: Synthetic oligonucleotide
  Sense strand starting at position 1819 of SEQ ID NO: 1879497
uauagagcauuggugauua

SEQ ID NO: 1911395 - RNA, 19 nt, Artificial Sequence
  Description of Artificial Sequence: Synthetic oligonucleotide
  Antisense strand to SEQ ID NO: 1911394
uaaucaccaaugcucuaua

SEQ ID NO: 1911396 - RNA, 19 nt, Artificial Sequence
  Description of Artificial Sequence: Synthetic oligonucleotide
  Sense strand starting at position 1821 of SEQ ID NO: 1879497
uagagcauuggugauuaca

SEQ ID NO: 1911397 - RNA, 19 nt, Artificial Sequence
  Description of Artificial Sequence: Synthetic oligonucleotide
  Antisense strand to SEQ ID NO: 1911396
uguaaucaccaaugcucua

SEQ ID NO: 1911398 - RNA, 19 nt, Artificial Sequence
  Description of Artificial Sequence: Synthetic oligonucleotide
  Sense strand starting at position 1823 of SEQ ID NO: 1879497
gagcauuggugauuacaag

SEQ ID NO: 1911399 - RNA, 19 nt, Artificial Sequence
  Description of Artificial Sequence: Synthetic oligonucleotide
  Antisense strand to SEQ ID NO: 1911398
cuuguaaucaccaaugcuc

SEQ ID NO: 1911400 - RNA, 19 nt, Artificial Sequence
  Description of Artificial Sequence: Synthetic oligonucleotide
  Sense strand starting at position 1824 of SEQ ID NO: 1879497
agcauuggugauuacaagu

SEQ ID NO: 1911401 - RNA, 19 nt, Artificial Sequence
  Description of Artificial Sequence: Synthetic oligonucleotide
  Antisense strand to SEQ ID NO: 1911400
acuuguaaucaccaaugcu

SEQ ID NO: 1911402 - RNA, 19 nt, Artificial Sequence
  Description of Artificial Sequence: Synthetic oligonucleotide
  Sense strand starting at position 1830 of SEQ ID NO: 1879497
ggugauuacaagugauaaa

SEQ ID NO: 1911403 - RNA, 19 nt, Artificial Sequence
  Description of Artificial Sequence: Synthetic oligonucleotide
  Antisense strand to SEQ ID NO: 1911402
uuuaucacuuguaaucacc

SEQ ID NO: 1911404 - RNA, 19 nt, Artificial Sequence
  Description of Artificial Sequence: Synthetic oligonucleotide
  Sense strand starting at position 1914 of SEQ ID NO: 1879497
guuguaaucuuaccaccaa

SEQ ID NO: 1911405 - RNA, 19 nt, Artificial Sequence
  Description of Artificial Sequence: Synthetic oligonucleotide
  Antisense strand to SEQ ID NO: 1911404
uuggugguaagauuacaac

SEQ ID NO: 1911406 - RNA, 19 nt, Artificial Sequence
  Description of Artificial Sequence: Synthetic oligonucleotide
  Sense strand starting at position 1963 of SEQ ID NO: 1879497
caaagugcagucuaaggaa

SEQ ID NO: 1911407 - RNA, 19 nt, Artificial Sequence
  Description of Artificial Sequence: Synthetic oligonucleotide
  Antisense strand to SEQ ID NO: 1911406
uuccuuagacugcacuuug

SEQ ID NO: 1911408 - RNA, 19 nt, Artificial Sequence
  Description of Artificial Sequence: Synthetic oligonucleotide
  Sense strand starting at position 2014 of SEQ ID NO: 1879497
cugugaggucagcaucuaa

SEQ ID NO: 1911409 - RNA, 19 nt, Artificial Sequence
  Description of Artificial Sequence: Synthetic oligonucleotide
  Antisense strand to SEQ ID NO: 1911408
uuagaugcugaccucacag

SEQ ID NO: 1911410 - RNA, 19 nt, Artificial Sequence
  Description of Artificial Sequence: Synthetic oligonucleotide
  Sense strand starting at position 2259 of SEQ ID NO: 1879497
acagcugaguugguuacaa

SEQ ID NO: 1911411 - RNA, 19 nt, Artificial Sequence
  Description of Artificial Sequence: Synthetic oligonucleotide
  Antisense strand to SEQ ID NO: 1911410
uuguaaccaacucagcugu

SEQ ID NO: 1911412 - RNA, 19 nt, Artificial Sequence
  Description of Artificial Sequence: Synthetic oligonucleotide
  Sense strand starting at position 2497 of SEQ ID NO: 1879497
guuacaugauaugcuauau

SEQ ID NO: 1911413 - RNA, 19 nt, Artificial Sequence
  Description of Artificial Sequence: Synthetic oligonucleotide
  Antisense strand to SEQ ID NO: 1911412
auauagcauaucauguaac

SEQ ID NO: 1911414 - RNA, 19 nt, Artificial Sequence
  Description of Artificial Sequence: Synthetic oligonucleotide
  Sense strand starting at position 2793 of SEQ ID NO: 1879497
gaguauagucuuggaacca

SEQ ID NO: 1911415 - RNA, 19 nt, Artificial Sequence
  Description of Artificial Sequence: Synthetic oligonucleotide
  Antisense strand to SEQ ID NO: 1911414
ugguuccaagacuauacuc

SEQ ID NO: 1911416 - RNA, 19 nt, Artificial Sequence
  Description of Artificial Sequence: Synthetic oligonucleotide
  Sense strand starting at position 2835 of SEQ ID NO: 1879497
agauuauagccugaccagu

SEQ ID NO: 1911417 - RNA, 19 nt, Artificial Sequence
  Description of Artificial Sequence: Synthetic oligonucleotide
  Antisense strand to SEQ ID NO: 1911416
acuggucaggcuauaaucu

SEQ ID NO: 1911418 - RNA, 19 nt, Artificial Sequence
  Description of Artificial Sequence: Synthetic oligonucleotide
  Sense strand starting at position 2875 of SEQ ID NO: 1879497
guguaacuucuguaaagug

SEQ ID NO: 1911419 - RNA, 19 nt, Artificial Sequence
  Description of Artificial Sequence: Synthetic oligonucleotide
  Antisense strand to SEQ ID NO: 1911418
cacuuuacagaaguuacac

SEQ ID NO: 1911420 - RNA, 19 nt, Artificial Sequence
  Description of Artificial Sequence: Synthetic oligonucleotide
  Sense strand starting at position 2893 of SEQ ID NO: 1879497
gcauaccuucuaggagaau

SEQ ID NO: 1911421 - RNA, 19 nt, Artificial Sequence
  Description of Artificial Sequence: Synthetic oligonucleotide
  Antisense strand to SEQ ID NO: 1911420
auucuccuagaagguaugc

SEQ ID NO: 1911422 - RNA, 19 nt, Artificial Sequence
  Description of Artificial Sequence: Synthetic oligonucleotide
  Sense strand starting at position 3149 of SEQ ID NO: 1879497
uugguuucccaccauacua

SEQ ID NO: 1911423 - RNA, 19 nt, Artificial Sequence
  Description of Artificial Sequence: Synthetic oligonucleotide
  Antisense strand to SEQ ID NO: 1911422
uaguauggugggaaaccaa

SEQ ID NO: 1911424 - RNA, 19 nt, Artificial Sequence
  Description of Artificial Sequence: Synthetic oligonucleotide
  Sense strand starting at position 3300 of SEQ ID NO: 1879497
gugcuccuuccucagauau

SEQ ID NO: 1911425 - RNA, 19 nt, Artificial Sequence
  Description of Artificial Sequence: Synthetic oligonucleotide
  Antisense strand to SEQ ID NO: 1911424
auaucugaggaaggagcac

SEQ ID NO: 1911426 - RNA, 19 nt, Artificial Sequence
  Description of Artificial Sequence: Synthetic oligonucleotide
  Sense strand starting at position 3556 of SEQ ID NO: 1879497
gugcuugguacugaguaga

SEQ ID NO: 1911427 - RNA, 19 nt, Artificial Sequence
  Description of Artificial Sequence: Synthetic oligonucleotide
  Antisense strand to SEQ ID NO: 1911426
ucuacucaguaccaagcac

SEQ ID NO: 1911428 - RNA, 19 nt, Artificial Sequence
  Description of Artificial Sequence: Synthetic oligonucleotide
  Sense strand starting at position 3621 of SEQ ID NO: 1879497
cuuuguagucgugugcuaa

SEQ ID NO: 1911429 - RNA, 19 nt, Artificial Sequence
  Description of Artificial Sequence: Synthetic oligonucleotide
  Antisense strand to SEQ ID NO: 1911428
uuagcacacgacuacaaag

SEQ ID NO: 1911430 - RNA, 19 nt, Artificial Sequence
  Description of Artificial Sequence: Synthetic oligonucleotide
  Sense strand starting at position 3624 of SEQ ID NO: 1879497
uguagucgugugcuaacuu

SEQ ID NO: 1911431 - RNA, 19 nt, Artificial Sequence
  Description of Artificial Sequence: Synthetic oligonucleotide
  Antisense strand to SEQ ID NO: 1911430
aaguuagcacacgacuaca

SEQ ID NO: 1911432 - RNA, 19 nt, Artificial Sequence
  Description of Artificial Sequence: Synthetic oligonucleotide
  Sense strand starting at position 3858 of SEQ ID NO: 1879497
cacagaaagcuuugugaua

SEQ ID NO: 1911433 - RNA, 19 nt, Artificial Sequence
  Description of Artificial Sequence: Synthetic oligonucleotide
  Antisense strand to SEQ ID NO: 1911432
uaucacaaagcuuucugug

SEQ ID NO: 1911434 - RNA, 19 nt, Artificial Sequence
  Description of Artificial Sequence: Synthetic oligonucleotide
  Sense strand starting at position 3859 of SEQ ID NO: 1879497
acagaaagcuuugugauag

SEQ ID NO: 1911435 - RNA, 19 nt, Artificial Sequence
  Description of Artificial Sequence: Synthetic oligonucleotide
  Antisense strand to SEQ ID NO: 1911434
cuaucacaaagcuuucugu

SEQ ID NO: 1911436 - RNA, 19 nt, Artificial Sequence
  Description of Artificial Sequence: Synthetic oligonucleotide
  Sense strand starting at position 3867 of SEQ ID NO: 1879497
cuuugugauagagggaauu

SEQ ID NO: 1911437 - RNA, 19 nt, Artificial Sequence
  Description of Artificial Sequence: Synthetic oligonucleotide
  Antisense strand to SEQ ID NO: 1911436
aauucccucuaucacaaag

SEQ ID NO: 1911438 - RNA, 19 nt, Artificial Sequence
  Description of Artificial Sequence: Synthetic oligonucleotide
  Sense strand starting at position 6 of SEQ ID NO: 1879498
cuaauuaaagcguaacaga

SEQ ID NO: 1911439 - RNA, 19 nt, Artificial Sequence
  Description of Artificial Sequence: Synthetic oligonucleotide
  Antisense strand to SEQ ID NO: 1911438
ucuguuacgcuuuaauuag

SEQ ID NO: 1911440 - RNA, 19 nt, Artificial Sequence
  Description of Artificial Sequence: Synthetic oligonucleotide
  Sense strand starting at position 79 of SEQ ID NO: 1879498
ugcucaauaacuggaggua

SEQ ID NO: 1911441 - RNA, 19 nt, Artificial Sequence
  Description of Artificial Sequence: Synthetic oligonucleotide
  Antisense strand to SEQ ID NO: 1911440
uaccuccaguuauugagca

SEQ ID NO: 1911442 - RNA, 19 nt, Artificial Sequence
  Description of Artificial Sequence: Synthetic oligonucleotide
  Sense strand starting at position 157 of SEQ ID NO: 1879498
ucaaguuugcaaggacaaa

SEQ ID NO: 1911443 - RNA, 19 nt, Artificial Sequence
  Description of Artificial Sequence: Synthetic oligonucleotide
  Antisense strand to SEQ ID NO: 1911442
uuuguccuugcaaacuuga

SEQ ID NO: 1911444 - RNA, 19 nt, Artificial Sequence
  Description of Artificial Sequence: Synthetic oligonucleotide
  Sense strand starting at position 175 of SEQ ID NO: 1879498
aucugaagguuucucaaau

SEQ ID NO: 1911445 - RNA, 19 nt, Artificial Sequence
  Description of Artificial Sequence: Synthetic oligonucleotide
  Antisense strand to SEQ ID NO: 1911444
auuugagaaaccuucagau

SEQ ID NO: 1911446 - RNA, 19 nt, Artificial Sequence
  Description of Artificial Sequence: Synthetic oligonucleotide
  Sense strand starting at position 176 of SEQ ID NO: 1879498
ucugaagguuucucaaaua

SEQ ID NO: 1911447 - RNA, 19 nt, Artificial Sequence
  Description of Artificial Sequence: Synthetic oligonucleotide
  Antisense strand to SEQ ID NO: 1911446
uauuugagaaaccuucaga

SEQ ID NO: 1911448 - RNA, 19 nt, Artificial Sequence
  Description of Artificial Sequence: Synthetic oligonucleotide
  Sense strand starting at position 200 of SEQ ID NO: 1879498
ggguuaaucuuagcaggaa

SEQ ID NO: 1911449 - RNA, 19 nt, Artificial Sequence
  Description of Artificial Sequence: Synthetic oligonucleotide
  Antisense strand to SEQ ID NO: 1911448
uuccugcuaagauuaaccc

SEQ ID NO: 1911450 - RNA, 19 nt, Artificial Sequence
  Description of Artificial Sequence: Synthetic oligonucleotide
  Sense strand starting at position 203 of SEQ ID NO: 1879498
uuaaucuuagcaggaagaa

SEQ ID NO: 1911451 - RNA, 19 nt, Artificial Sequence
  Description of Artificial Sequence: Synthetic oligonucleotide
  Antisense strand to SEQ ID NO: 1911450
uucuuccugcuaagauuaa

SEQ ID NO: 1911452 - RNA, 19 nt, Artificial Sequence
  Description of Artificial Sequence: Synthetic oligonucleotide
  Sense strand starting at position 215 of SEQ ID NO: 1879498
ggaagaaauuaagaaacua

SEQ ID NO: 1911453 - RNA, 19 nt, Artificial Sequence
  Description of Artificial Sequence: Synthetic oligonucleotide
  Antisense strand to SEQ ID NO: 1911452
uaguuucuuaauuucuucc

SEQ ID NO: 1911454 - RNA, 19 nt, Artificial Sequence
  Description of Artificial Sequence: Synthetic oligonucleotide
  Sense strand starting at position 438 of SEQ ID NO: 1879498
acugcaugauagguaguaa

SEQ ID NO: 1911455 - RNA, 19 nt, Artificial Sequence
  Description of Artificial Sequence: Synthetic oligonucleotide
  Antisense strand to SEQ ID NO: 1911454
uuacuaccuaucaugcagu

SEQ ID NO: 1911456 - RNA, 19 nt, Artificial Sequence
  Description of Artificial Sequence: Synthetic oligonucleotide
  Sense strand starting at position 439 of SEQ ID NO: 1879498
cugcaugauagguaguaaa

SEQ ID NO: 1911457 - RNA, 19 nt, Artificial Sequence
  Description of Artificial Sequence: Synthetic oligonucleotide
  Antisense strand to SEQ ID NO: 1911456
uuuacuaccuaucaugcag

SEQ ID NO: 1911458 - RNA, 19 nt, Artificial Sequence
  Description of Artificial Sequence: Synthetic oligonucleotide
  Sense strand starting at position 569 of SEQ ID NO: 1879498
cuggguguuugacuaaaga

SEQ ID NO: 1911459 - RNA, 19 nt, Artificial Sequence
  Description of Artificial Sequence: Synthetic oligonucleotide
  Antisense strand to SEQ ID NO: 1911458
ucuuuagucaaacacccag

SEQ ID NO: 1911460 - RNA, 19 nt, Artificial Sequence
  Description of Artificial Sequence: Synthetic oligonucleotide
  Sense strand starting at position 787 of SEQ ID NO: 1879498
aaucuauuacguugaugau

SEQ ID NO: 1911461 - RNA, 19 nt, Artificial Sequence
  Description of Artificial Sequence: Synthetic oligonucleotide
  Antisense strand to SEQ ID NO: 1911460
aucaucaacguaauagauu

SEQ ID NO: 1911462 - RNA, 19 nt, Artificial Sequence
  Description of Artificial Sequence: Synthetic oligonucleotide
  Sense strand starting at position 788 of SEQ ID NO: 1879498
aucuauuacguugaugauu

SEQ ID NO: 1911463 - RNA, 19 nt, Artificial Sequence
  Description of Artificial Sequence: Synthetic oligonucleotide
  Antisense strand to SEQ ID NO: 1911462
aaucaucaacguaauagau

SEQ ID NO: 1911464 - RNA, 19 nt, Artificial Sequence
  Description of Artificial Sequence: Synthetic oligonucleotide
  Sense strand starting at position 856 of SEQ ID NO: 1879498
uguuguuugccugcauuau

SEQ ID NO: 1911465 - RNA, 19 nt, Artificial Sequence
  Description of Artificial Sequence: Synthetic oligonucleotide
  Antisense strand to SEQ ID NO: 1911464
auaaugcaggcaaacaaca

SEQ ID NO: 1911466 - RNA, 19 nt, Artificial Sequence
  Description of Artificial Sequence: Synthetic oligonucleotide
  Sense strand starting at position 860 of SEQ ID NO: 1879498
guuugccugcauuauuuga

SEQ ID NO: 1911467 - RNA, 19 nt, Artificial Sequence
  Description of Artificial Sequence: Synthetic oligonucleotide
  Antisense strand to SEQ ID NO: 1911466
ucaaauaaugcaggcaaac

SEQ ID NO: 1911468 - RNA, 19 nt, Artificial Sequence
  Description of Artificial Sequence: Synthetic oligonucleotide
  Sense strand starting at position 862 of SEQ ID NO: 1879498
uugccugcauuauuugaga

SEQ ID NO: 1911469 - RNA, 19 nt, Artificial Sequence
  Description of Artificial Sequence: Synthetic oligonucleotide
  Antisense strand to SEQ ID NO: 1911468
ucucaaauaaugcaggcaa

SEQ ID NO: 1911470 - RNA, 19 nt, Artificial Sequence
  Description of Artificial Sequence: Synthetic oligonucleotide
  Sense strand starting at position 958 of SEQ ID NO: 1879498
gugcaauuaagugaguuga

SEQ ID NO: 1911471 - RNA, 19 nt, Artificial Sequence
  Description of Artificial Sequence: Synthetic oligonucleotide
  Antisense strand to SEQ ID NO: 1911470
ucaacucacuuaauugcac

SEQ ID NO: 1911472 - RNA, 19 nt, Artificial Sequence
  Description of Artificial Sequence: Synthetic oligonucleotide
  Sense strand starting at position 960 of SEQ ID NO: 1879498
gcaauuaagugaguugaag

SEQ ID NO: 1911473 - RNA, 19 nt, Artificial Sequence
  Description of Artificial Sequence: Synthetic oligonucleotide
  Antisense strand to SEQ ID NO: 1911472
cuucaacucacuuaauugc

SEQ ID NO: 1911474 - RNA, 19 nt, Artificial Sequence
  Description of Artificial Sequence: Synthetic oligonucleotide
  Sense strand starting at position 962 of SEQ ID NO: 1879498
aauuaagugaguugaagug

SEQ ID NO: 1911475 - RNA, 19 nt, Artificial Sequence
  Description of Artificial Sequence: Synthetic oligonucleotide
  Antisense strand to SEQ ID NO: 1911474
cacuucaacucacuuaauu

SEQ ID NO: 1911476 - RNA, 19 nt, Artificial Sequence
  Description of Artificial Sequence: Synthetic oligonucleotide
  Sense strand starting at position 1063 of SEQ ID NO: 1879498
cuggccugguauuuguaaa

SEQ ID NO: 1911477 - RNA, 19 nt, Artificial Sequence
  Description of Artificial Sequence: Synthetic oligonucleotide
  Antisense strand to SEQ ID NO: 1911476
uuuacaaauaccaggccag

SEQ ID NO: 1911478 - RNA, 19 nt, Artificial Sequence
  Description of Artificial Sequence: Synthetic oligonucleotide
  Sense strand starting at position 1064 of SEQ ID NO: 1879498
uggccugguauuuguaaag

SEQ ID NO: 1911479 - RNA, 19 nt, Artificial Sequence
  Description of Artificial Sequence: Synthetic oligonucleotide
  Antisense strand to SEQ ID NO: 1911478
cuuuacaaauaccaggcca

SEQ ID NO: 1911480 - RNA, 19 nt, Artificial Sequence
  Description of Artificial Sequence: Synthetic oligonucleotide
  Sense strand starting at position 1184 of SEQ ID NO: 1879498
acacauuaugcugggaauu

SEQ ID NO: 1911481 - RNA, 19 nt, Artificial Sequence
  Description of Artificial Sequence: Synthetic oligonucleotide
  Antisense strand to SEQ ID NO: 1911480
aauucccagcauaaugugu

SEQ ID NO: 1911482 - RNA, 19 nt, Artificial Sequence
  Description of Artificial Sequence: Synthetic oligonucleotide
  Sense strand starting at position 1218 of SEQ ID NO: 1879498
aaggguccuguguaagaau

SEQ ID NO: 1911483 - RNA, 19 nt, Artificial Sequence
  Description of Artificial Sequence: Synthetic oligonucleotide
  Antisense strand to SEQ ID NO: 1911482
auucuuacacaggacccuu

SEQ ID NO: 1911484 - RNA, 19 nt, Artificial Sequence
  Description of Artificial Sequence: Synthetic oligonucleotide
  Sense strand starting at position 1335 of SEQ ID NO: 1879498
aggccuauaauaggaguau

SEQ ID NO: 1911485 - RNA, 19 nt, Artificial Sequence
  Description of Artificial Sequence: Synthetic oligonucleotide
  Antisense strand to SEQ ID NO: 1911484
auacuccuauuauaggccu

SEQ ID NO: 1911486 - RNA, 19 nt, Artificial Sequence
  Description of Artificial Sequence: Synthetic oligonucleotide
  Sense strand starting at position 1697 of SEQ ID NO: 1879498
cugaauaaaugauagagaa

SEQ ID NO: 1911487 - RNA, 19 nt, Artificial Sequence
  Description of Artificial Sequence: Synthetic oligonucleotide
  Antisense strand to SEQ ID NO: 1911486
uucucuaucauuuauucag

SEQ ID NO: 1911488 - RNA, 19 nt, Artificial Sequence
  Description of Artificial Sequence: Synthetic oligonucleotide
  Sense strand starting at position 2023 of SEQ ID NO: 1879498
acauuaugugucuaguuag

SEQ ID NO: 1911489 - RNA, 19 nt, Artificial Sequence
  Description of Artificial Sequence: Synthetic oligonucleotide
  Antisense strand to SEQ ID NO: 1911488
cuaacuagacacauaaugu

SEQ ID NO: 1911490 - RNA, 19 nt, Artificial Sequence
  Description of Artificial Sequence: Synthetic oligonucleotide
  Sense strand starting at position 2033 of SEQ ID NO: 1879498
ucuaguuaggagcacuuaa

SEQ ID NO: 1911491 - RNA, 19 nt, Artificial Sequence
  Description of Artificial Sequence: Synthetic oligonucleotide
  Antisense strand to SEQ ID NO: 1911490
uuaagugcuccuaacuaga

SEQ ID NO: 1911492 - RNA, 19 nt, Artificial Sequence
  Description of Artificial Sequence: Synthetic oligonucleotide
  Sense strand starting at position 2048 of SEQ ID NO: 1879498
uuaagacaucauuguugaa

SEQ ID NO: 1911493 - RNA, 19 nt, Artificial Sequence
  Description of Artificial Sequence: Synthetic oligonucleotide
  Antisense strand to SEQ ID NO: 1911492
uucaacaaugaugucuuaa

SEQ ID NO: 1911494 - RNA, 19 nt, Artificial Sequence
  Description of Artificial Sequence: Synthetic oligonucleotide
  Sense strand starting at position 2050 of SEQ ID NO: 1879498
aagacaucauuguugaagu

SEQ ID NO: 1911495 - RNA, 19 nt, Artificial Sequence
  Description of Artificial Sequence: Synthetic oligonucleotide
  Antisense strand to SEQ ID NO: 1911494
acuucaacaaugaugucuu

SEQ ID NO: 1911496 - RNA, 19 nt, Artificial Sequence
  Description of Artificial Sequence: Synthetic oligonucleotide
  Sense strand starting at position 2130 of SEQ ID NO: 1879498
cucccuuuccagcaggauu

SEQ ID NO: 1911497 - RNA, 19 nt, Artificial Sequence
  Description of Artificial Sequence: Synthetic oligonucleotide
  Antisense strand to SEQ ID NO: 1911496
aauccugcuggaaagggag

SEQ ID NO: 1911498 - RNA, 19 nt, Artificial Sequence
  Description of Artificial Sequence: Synthetic oligonucleotide
  Sense strand starting at position 2362 of SEQ ID NO: 1879498
ucaaguucuguauaggaug

SEQ ID NO: 1911499 - RNA, 19 nt, Artificial Sequence
  Description of Artificial Sequence: Synthetic oligonucleotide
  Antisense strand to SEQ ID NO: 1911498
cauccuauacagaacuuga

SEQ ID NO: 1911500 - RNA, 19 nt, Artificial Sequence
  Description of Artificial Sequence: Synthetic oligonucleotide
  Sense strand starting at position 2516 of SEQ ID NO: 1879498
gccucacaagaugaucauu

SEQ ID NO: 1911501 - RNA, 19 nt, Artificial Sequence
  Description of Artificial Sequence: Synthetic oligonucleotide
  Antisense strand to SEQ ID NO: 1911500
aaugaucaucuugugaggc

SEQ ID NO: 1911502 - RNA, 19 nt, Artificial Sequence
  Description of Artificial Sequence: Synthetic oligonucleotide
  Sense strand starting at position 2591 of SEQ ID NO: 1879498
agaucugacucuucuguga

SEQ ID NO: 1911503 - RNA, 19 nt, Artificial Sequence
  Description of Artificial Sequence: Synthetic oligonucleotide
  Antisense strand to SEQ ID NO: 1911502
ucacagaagagucagaucu

SEQ ID NO: 1911504 - RNA, 19 nt, Artificial Sequence
  Description of Artificial Sequence: Synthetic oligonucleotide
  Sense strand starting at position 2682 of SEQ ID NO: 1879498
uucugugucguguccaaca

SEQ ID NO: 1911505 - RNA, 19 nt, Artificial Sequence
  Description of Artificial Sequence: Synthetic oligonucleotide
  Antisense strand to SEQ ID NO: 1911504
uguuggacacgacacagaa

SEQ ID NO: 1911506 - RNA, 19 nt, Artificial Sequence
  Description of Artificial Sequence: Synthetic oligonucleotide
  Sense strand starting at position 2770 of SEQ ID NO: 1879498
aguucucagcuugaugaua

SEQ ID NO: 1911507 - RNA, 19 nt, Artificial Sequence
  Description of Artificial Sequence: Synthetic oligonucleotide
  Antisense strand to SEQ ID NO: 1911506
uaucaucaagcugagaacu

SEQ ID NO: 1911508 - RNA, 19 nt, Artificial Sequence
  Description of Artificial Sequence: Synthetic oligonucleotide
  Sense strand starting at position 2940 of SEQ ID NO: 1879498
gagaguuuaaucuaggugu

SEQ ID NO: 1911509 - RNA, 19 nt, Artificial Sequence
  Description of Artificial Sequence: Synthetic oligonucleotide
  Antisense strand to SEQ ID NO: 1911508
acaccuagauuaaacucuc

SEQ ID NO: 1911510 - RNA, 19 nt, Artificial Sequence
  Description of Artificial Sequence: Synthetic oligonucleotide
  Sense strand starting at position 3121 of SEQ ID NO: 1879498
ugaauaaagccguaacuga

SEQ ID NO: 1911511 - RNA, 19 nt, Artificial Sequence
  Description of Artificial Sequence: Synthetic oligonucleotide
  Antisense strand to SEQ ID NO: 1911510
ucaguuacggcuuuauuca

SEQ ID NO: 1911512 - RNA, 19 nt, Artificial Sequence
  Description of Artificial Sequence: Synthetic oligonucleotide
  Sense strand starting at position 3379 of SEQ ID NO: 1879498
uagggaguccuugggaaac

SEQ ID NO: 1911513 - RNA, 19 nt, Artificial Sequence
  Description of Artificial Sequence: Synthetic oligonucleotide
  Antisense strand to SEQ ID NO: 1911512
guuucccaaggacucccua

SEQ ID NO: 1911514 - RNA, 19 nt, Artificial Sequence
  Description of Artificial Sequence: Synthetic oligonucleotide
  Sense strand starting at position 3427 of SEQ ID NO: 1879498
aggagauagaucuggcuau

SEQ ID NO: 1911515 - RNA, 19 nt, Artificial Sequence
  Description of Artificial Sequence: Synthetic oligonucleotide
  Antisense strand to SEQ ID NO: 1911514
auagccagaucuaucuccu

SEQ ID NO: 1911516 - RNA, 19 nt, Artificial Sequence
  Description of Artificial Sequence: Synthetic oligonucleotide
  Sense strand starting at position 3463 of SEQ ID NO: 1879498
ugaauaauagcuggugaca

SEQ ID NO: 1911517 - RNA, 19 nt, Artificial Sequence
  Description of Artificial Sequence: Synthetic oligonucleotide
  Antisense strand to SEQ ID NO: 1911516
ugucaccagcuauuauuca

SEQ ID NO: 1911518 - RNA, 19 nt, Artificial Sequence
  Description of Artificial Sequence: Synthetic oligonucleotide
  Sense strand starting at position 14 of SEQ ID NO: 1879499
ucuugaaccucuuuggaaa

SEQ ID NO: 1911519 - RNA, 19 nt, Artificial Sequence
  Description of Artificial Sequence: Synthetic oligonucleotide
  Antisense strand to SEQ ID NO: 1911518
uuuccaaagagguucaaga

SEQ ID NO: 1911520 - RNA, 19 nt, Artificial Sequence
  Description of Artificial Sequence: Synthetic oligonucleotide
  Sense strand starting at position 56 of SEQ ID NO: 1879499
aguaguggaggagguauaa

SEQ ID NO: 1911521 - RNA, 19 nt, Artificial Sequence
  Description of Artificial Sequence: Synthetic oligonucleotide
  Antisense strand to SEQ ID NO: 1911520
uuauaccuccuccacuacu

SEQ ID NO: 1911522 - RNA, 19 nt, Artificial Sequence
  Description of Artificial Sequence: Synthetic oligonucleotide
  Sense strand starting at position 78 of SEQ ID NO: 1879499
agauauaccugacucaagu

SEQ ID NO: 1911523 - RNA, 19 nt, Artificial Sequence
  Description of Artificial Sequence: Synthetic oligonucleotide
  Antisense strand to SEQ ID NO: 1911522
acuugagucagguauaucu

SEQ ID NO: 1911524 - RNA, 19 nt, Artificial Sequence
  Description of Artificial Sequence: Synthetic oligonucleotide
  Sense strand starting at position 320 of SEQ ID NO: 1879499
cuaaguaguucuccagaaa

SEQ ID NO: 1911525 - RNA, 19 nt, Artificial Sequence
  Description of Artificial Sequence: Synthetic oligonucleotide
  Antisense strand to SEQ ID NO: 1911524
uuucuggagaacuacuuag

SEQ ID NO: 1911526 - RNA, 19 nt, Artificial Sequence
  Description of Artificial Sequence: Synthetic oligonucleotide
  Sense strand starting at position 622 of SEQ ID NO: 1879499
uggaauuucucugaagaau

SEQ ID NO: 1911527 - RNA, 19 nt, Artificial Sequence
  Description of Artificial Sequence: Synthetic oligonucleotide
  Antisense strand to SEQ ID NO: 1911526
auucuucagagaaauucca

SEQ ID NO: 1911528 - RNA, 19 nt, Artificial Sequence
  Description of Artificial Sequence: Synthetic oligonucleotide
  Sense strand starting at position 1010 of SEQ ID NO: 1879499
agagcaacccuaugagauu

SEQ ID NO: 1911529 - RNA, 19 nt, Artificial Sequence
  Description of Artificial Sequence: Synthetic oligonucleotide
  Antisense strand to SEQ ID NO: 1911528
aaucucauaggguugcucu

SEQ ID NO: 1911530 - RNA, 19 nt, Artificial Sequence
  Description of Artificial Sequence: Synthetic oligonucleotide
  Sense strand starting at position 1033 of SEQ ID NO: 1879499
aguggcaaccauuacaauu

SEQ ID NO: 1911531 - RNA, 19 nt, Artificial Sequence
  Description of Artificial Sequence: Synthetic oligonucleotide
  Antisense strand to SEQ ID NO: 1911530
aauuguaaugguugccacu

SEQ ID NO: 1911532 - RNA, 19 nt, Artificial Sequence
  Description of Artificial Sequence: Synthetic oligonucleotide
  Sense strand starting at position 1241 of SEQ ID NO: 1879499
guagaauaucacuauugcu

SEQ ID NO: 1911533 - RNA, 19 nt, Artificial Sequence
  Description of Artificial Sequence: Synthetic oligonucleotide
  Antisense strand to SEQ ID NO: 1911532
agcaauagugauauucuac

SEQ ID NO: 1911534 - RNA, 19 nt, Artificial Sequence
  Description of Artificial Sequence: Synthetic oligonucleotide
  Sense strand starting at position 1263 of SEQ ID NO: 1879499
uguuauuaggccuaauuaa

SEQ ID NO: 1911535 - RNA, 19 nt, Artificial Sequence
  Description of Artificial Sequence: Synthetic oligonucleotide
  Antisense strand to SEQ ID NO: 1911534
uuaauuaggccuaauaaca

SEQ ID NO: 1911536 - RNA, 19 nt, Artificial Sequence
  Description of Artificial Sequence: Synthetic oligonucleotide
  Sense strand starting at position 1296 of SEQ ID NO: 1879499
aucuaugagguuuauucuu

SEQ ID NO: 1911537 - RNA, 19 nt, Artificial Sequence
  Description of Artificial Sequence: Synthetic oligonucleotide
  Antisense strand to SEQ ID NO: 1911536
aagaauaaaccucauagau

SEQ ID NO: 1911538 - RNA, 19 nt, Artificial Sequence
  Description of Artificial Sequence: Synthetic oligonucleotide
  Sense strand starting at position 1579 of SEQ ID NO: 1879499
gguaguugucaacaaugaa

SEQ ID NO: 1911539 - RNA, 19 nt, Artificial Sequence
  Description of Artificial Sequence: Synthetic oligonucleotide
  Antisense strand to SEQ ID NO: 1911538
uucauuguugacaacuacc

SEQ ID NO: 1911540 - RNA, 19 nt, Artificial Sequence
  Description of Artificial Sequence: Synthetic oligonucleotide
  Sense strand starting at position 1582 of SEQ ID NO: 1879499
aguugucaacaaugaagaa

SEQ ID NO: 1911541 - RNA, 19 nt, Artificial Sequence
  Description of Artificial Sequence: Synthetic oligonucleotide
  Antisense strand to SEQ ID NO: 1911540
uucuucauuguugacaacu

SEQ ID NO: 1911542 - RNA, 19 nt, Artificial Sequence
  Description of Artificial Sequence: Synthetic oligonucleotide
  Sense strand starting at position 1779 of SEQ ID NO: 1879499
gauugaucuuuaguaaaga

SEQ ID NO: 1911543 - RNA, 19 nt, Artificial Sequence
  Description of Artificial Sequence: Synthetic oligonucleotide
  Antisense strand to SEQ ID NO: 1911542
ucuuuacuaaagaucaauc

SEQ ID NO: 1911544 - RNA, 19 nt, Artificial Sequence
  Description of Artificial Sequence: Synthetic oligonucleotide
  Sense strand starting at position 1812 of SEQ ID NO: 1879499
auuauuggcugcucauuua

SEQ ID NO: 1911545 - RNA, 19 nt, Artificial Sequence
  Description of Artificial Sequence: Synthetic oligonucleotide
  Antisense strand to SEQ ID NO: 1911544
uaaaugagcagccaauaau

SEQ ID NO: 1911546 - RNA, 19 nt, Artificial Sequence
  Description of Artificial Sequence: Synthetic oligonucleotide
  Sense strand starting at position 2108 of SEQ ID NO: 1879499
gcaguuacacuuuaaucag

SEQ ID NO: 1911547 - RNA, 19 nt, Artificial Sequence
  Description of Artificial Sequence: Synthetic oligonucleotide
  Antisense strand to SEQ ID NO: 1911546
cugauuaaaguguaacugc

SEQ ID NO: 1911548 - RNA, 19 nt, Artificial Sequence
  Description of Artificial Sequence: Synthetic oligonucleotide
  Sense strand starting at position 2155 of SEQ ID NO: 1879499
ucuuguuauuucguuauga

SEQ ID NO: 1911549 - RNA, 19 nt, Artificial Sequence
  Description of Artificial Sequence: Synthetic oligonucleotide
  Antisense strand to SEQ ID NO: 1911548
ucauaacgaaauaacaaga

SEQ ID NO: 1911550 - RNA, 19 nt, Artificial Sequence
  Description of Artificial Sequence: Synthetic oligonucleotide
  Sense strand starting at position 2156 of SEQ ID NO: 1879499
cuuguuauuucguuaugag

SEQ ID NO: 1911551 - RNA, 19 nt, Artificial Sequence
  Description of Artificial Sequence: Synthetic oligonucleotide
  Antisense strand to SEQ ID NO: 1911550
cucauaacgaaauaacaag

SEQ ID NO: 1911552 - RNA, 19 nt, Artificial Sequence
  Description of Artificial Sequence: Synthetic oligonucleotide
  Sense strand starting at position 2353 of SEQ ID NO: 1879499
agauaugaauucuuguuga

SEQ ID NO: 1911553 - RNA, 19 nt, Artificial Sequence
  Description of Artificial Sequence: Synthetic oligonucleotide
  Antisense strand to SEQ ID NO: 1911552
ucaacaagaauucauaucu

SEQ ID NO: 1911554 - RNA, 19 nt, Artificial Sequence
  Description of Artificial Sequence: Synthetic oligonucleotide
  Sense strand starting at position 2356 of SEQ ID NO: 1879499
uaugaauucuuguugagac

SEQ ID NO: 1911555 - RNA, 19 nt, Artificial Sequence
  Description of Artificial Sequence: Synthetic oligonucleotide
  Antisense strand to SEQ ID NO: 1911554
gucucaacaagaauucaua

SEQ ID NO: 1911556 - RNA, 19 nt, Artificial Sequence
  Description of Artificial Sequence: Synthetic oligonucleotide
  Sense strand starting at position 2358 of SEQ ID NO: 1879499
ugaauucuuguugagacuu

SEQ ID NO: 1911557 - RNA, 19 nt, Artificial Sequence
  Description of Artificial Sequence: Synthetic oligonucleotide
  Antisense strand to SEQ ID NO: 1911556
aagucucaacaagaauuca

SEQ ID NO: 1911558 - RNA, 19 nt, Artificial Sequence
  Description of Artificial Sequence: Synthetic oligonucleotide
  Sense strand starting at position 2546 of SEQ ID NO: 1879499
ugugauauuguagagauug

SEQ ID NO: 1911559 - RNA, 19 nt, Artificial Sequence
  Description of Artificial Sequence: Synthetic oligonucleotide
  Antisense strand to SEQ ID NO: 1911558
caaucucuacaauaucaca

SEQ ID NO: 1911560 - RNA, 19 nt, Artificial Sequence
  Description of Artificial Sequence: Synthetic oligonucleotide
  Sense strand starting at position 2548 of SEQ ID NO: 1879499
ugauauuguagagauuguu

SEQ ID NO: 1911561 - RNA, 19 nt, Artificial Sequence
  Description of Artificial Sequence: Synthetic oligonucleotide
  Antisense strand to SEQ ID NO: 1911560
aacaaucucuacaauauca

SEQ ID NO: 1911562 - RNA, 19 nt, Artificial Sequence
  Description of Artificial Sequence: Synthetic oligonucleotide
  Sense strand starting at position 2627 of SEQ ID NO: 1879499
cucugauaucaugaugcua

SEQ ID NO: 1911563 - RNA, 19 nt, Artificial Sequence
  Description of Artificial Sequence: Synthetic oligonucleotide
  Antisense strand to SEQ ID NO: 1911562
uagcaucaugauaucagag

SEQ ID NO: 1911564 - RNA, 19 nt, Artificial Sequence
  Description of Artificial Sequence: Synthetic oligonucleotide
  Sense strand starting at position 2718 of SEQ ID NO: 1879499
cuagaacuccuuggaauac

SEQ ID NO: 1911565 - RNA, 19 nt, Artificial Sequence
  Description of Artificial Sequence: Synthetic oligonucleotide
  Antisense strand to SEQ ID NO: 1911564
guauuccaaggaguucuag

SEQ ID NO: 1911566 - RNA, 19 nt, Artificial Sequence
  Description of Artificial Sequence: Synthetic oligonucleotide
  Sense strand starting at position 2962 of SEQ ID NO: 1879499
cacugauauccaggguuua

SEQ ID NO: 1911567 - RNA, 19 nt, Artificial Sequence
  Description of Artificial Sequence: Synthetic oligonucleotide
  Antisense strand to SEQ ID NO: 1911566
uaaacccuggauaucagug

SEQ ID NO: 1911568 - RNA, 19 nt, Artificial Sequence
  Description of Artificial Sequence: Synthetic oligonucleotide
  Sense strand starting at position 2963 of SEQ ID NO: 1879499
acugauauccaggguuuau

SEQ ID NO: 1911569 - RNA, 19 nt, Artificial Sequence
  Description of Artificial Sequence: Synthetic oligonucleotide
  Antisense strand to SEQ ID NO: 1911568
auaaacccuggauaucagu

SEQ ID NO: 1911570 - RNA, 19 nt, Artificial Sequence
  Description of Artificial Sequence: Synthetic oligonucleotide
  Sense strand starting at position 2973 of SEQ ID NO: 1879499
aggguuuauuuccuuguuu

SEQ ID NO: 1911571 - RNA, 19 nt, Artificial Sequence
  Description of Artificial Sequence: Synthetic oligonucleotide
  Antisense strand to SEQ ID NO: 1911570
aaacaaggaaauaaacccu

SEQ ID NO: 1911572 - RNA, 19 nt, Artificial Sequence
  Description of Artificial Sequence: Synthetic oligonucleotide
  Sense strand starting at position 3086 of SEQ ID NO: 1879499
ugaaaugguguguaaauag

SEQ ID NO: 1911573 - RNA, 19 nt, Artificial Sequence
  Description of Artificial Sequence: Synthetic oligonucleotide
  Antisense strand to SEQ ID NO: 1911572
cuauuuacacaccauuuca

SEQ ID NO: 1911574 - RNA, 19 nt, Artificial Sequence
  Description of Artificial Sequence: Synthetic oligonucleotide
  Sense strand starting at position 3095 of SEQ ID NO: 1879499
guguaaauagcugauccaa

SEQ ID NO: 1911575 - RNA, 19 nt, Artificial Sequence
  Description of Artificial Sequence: Synthetic oligonucleotide
  Antisense strand to SEQ ID NO: 1911574
uuggaucagcuauuuacac

SEQ ID NO: 1911576 - RNA, 19 nt, Artificial Sequence
  Description of Artificial Sequence: Synthetic oligonucleotide
  Sense strand starting at position 3097 of SEQ ID NO: 1879499
guaaauagcugauccaaau

SEQ ID NO: 1911577 - RNA, 19 nt, Artificial Sequence
  Description of Artificial Sequence: Synthetic oligonucleotide
  Antisense strand to SEQ ID NO: 1911576
auuuggaucagcuauuuac

SEQ ID NO: 1911578 - RNA, 19 nt, Artificial Sequence
  Description of Artificial Sequence: Synthetic oligonucleotide
  Sense strand starting at position 3255 of SEQ ID NO: 1879499
uguagaucucuagaacugu

SEQ ID NO: 1911579 - RNA, 19 nt, Artificial Sequence
  Description of Artificial Sequence: Synthetic oligonucleotide
  Antisense strand to SEQ ID NO: 1911578
acaguucuagagaucuaca

SEQ ID NO: 1911580 - RNA, 19 nt, Artificial Sequence
  Description of Artificial Sequence: Synthetic oligonucleotide
  Sense strand starting at position 3494 of SEQ ID NO: 1879499
auuguaagauccuuagaua

SEQ ID NO: 1911581 - RNA, 19 nt, Artificial Sequence
  Description of Artificial Sequence: Synthetic oligonucleotide
  Antisense strand to SEQ ID NO: 1911580
uaucuaaggaucuuacaau

SEQ ID NO: 1911582 - RNA, 19 nt, Artificial Sequence
  Description of Artificial Sequence: Synthetic oligonucleotide
  Sense strand starting at position 3548 of SEQ ID NO: 1879499
guagguauuuccuuuaccu

SEQ ID NO: 1911583 - RNA, 19 nt, Artificial Sequence
  Description of Artificial Sequence: Synthetic oligonucleotide
  Antisense strand to SEQ ID NO: 1911582
agguaaaggaaauaccuac

SEQ ID NO: 1911584 - RNA, 19 nt, Artificial Sequence
  Description of Artificial Sequence: Synthetic oligonucleotide
  Sense strand starting at position 3581 of SEQ ID NO: 1879499
cugcuauugccaccguuau

SEQ ID NO: 1911585 - RNA, 19 nt, Artificial Sequence
  Description of Artificial Sequence: Synthetic oligonucleotide
  Antisense strand to SEQ ID NO: 1911584
auaacgguggcaauagcag

SEQ ID NO: 1911586 - RNA, 19 nt, Artificial Sequence
  Description of Artificial Sequence: Synthetic oligonucleotide
  Sense strand starting at position 3651 of SEQ ID NO: 1879499
caagguuaaugugugggaa

SEQ ID NO: 1911587 - RNA, 19 nt, Artificial Sequence
  Description of Artificial Sequence: Synthetic oligonucleotide
  Antisense strand to SEQ ID NO: 1911586
uucccacacauuaaccuug

SEQ ID NO: 1911588 - RNA, 19 nt, Artificial Sequence
  Description of Artificial Sequence: Synthetic oligonucleotide
  Sense strand starting at position 3782 of SEQ ID NO: 1879499
uuuaguaaacaguagaguu

SEQ ID NO: 1911589 - RNA, 19 nt, Artificial Sequence
  Description of Artificial Sequence: Synthetic oligonucleotide
  Antisense strand to SEQ ID NO: 1911588
aacucuacuguuuacuaaa

SEQ ID NO: 1911590 - RNA, 19 nt, Artificial Sequence
  Description of Artificial Sequence: Synthetic oligonucleotide
  Sense strand starting at position 3820 of SEQ ID NO: 1879499
gucuuaagacgggaguuaa

SEQ ID NO: 1911591 - RNA, 19 nt, Artificial Sequence
  Description of Artificial Sequence: Synthetic oligonucleotide
  Antisense strand to SEQ ID NO: 1911590
uuaacucccgucuuaagac

SEQ ID NO: 1911592 - RNA, 19 nt, Artificial Sequence
  Description of Artificial Sequence: Synthetic oligonucleotide
  Sense strand starting at position 3923 of SEQ ID NO: 1879499
gauagacuauugucugaug

SEQ ID NO: 1911593 - RNA, 19 nt, Artificial Sequence
  Description of Artificial Sequence: Synthetic oligonucleotide
  Antisense strand to SEQ ID NO: 1911592
caucagacaauagucuauc

SEQ ID NO: 1911594 - RNA, 19 nt, Artificial Sequence
  Description of Artificial Sequence: Synthetic oligonucleotide
  Sense strand starting at position 3925 of SEQ ID NO: 1879499
uagacuauugucugaugga

SEQ ID NO: 1911595 - RNA, 19 nt, Artificial Sequence
  Description of Artificial Sequence: Synthetic oligonucleotide
  Antisense strand to SEQ ID NO: 1911594
uccaucagacaauagucua

SEQ ID NO: 1911596 - RNA, 19 nt, Artificial Sequence
  Description of Artificial Sequence: Synthetic oligonucleotide
  Sense strand starting at position 3935 of SEQ ID NO: 1879499
ucugauggauuugaauaga

SEQ ID NO: 1911597 - RNA, 19 nt, Artificial Sequence
  Description of Artificial Sequence: Synthetic oligonucleotide
  Antisense strand to SEQ ID NO: 1911596
ucuauucaaauccaucaga

SEQ ID NO: 1911598 - RNA, 19 nt, Artificial Sequence
  Description of Artificial Sequence: Synthetic oligonucleotide
  Sense strand starting at position 147 of SEQ ID NO: 1879500
ggaugaucagagcaagcuu

SEQ ID NO: 1911599 - RNA, 19 nt, Artificial Sequence
  Description of Artificial Sequence: Synthetic oligonucleotide
  Antisense strand to SEQ ID NO: 1911598
aagcuugcucugaucaucc

SEQ ID NO: 1911600 - RNA, 19 nt, Artificial Sequence
  Description of Artificial Sequence: Synthetic oligonucleotide
  Sense strand starting at position 865 of SEQ ID NO: 1879500
uaaagaaacuguguuguca

SEQ ID NO: 1911601 - RNA, 19 nt, Artificial Sequence
  Description of Artificial Sequence: Synthetic oligonucleotide
  Antisense strand to SEQ ID NO: 1911600
ugacaacacaguuucuuua

SEQ ID NO: 1911602 - RNA, 19 nt, Artificial Sequence
  Description of Artificial Sequence: Synthetic oligonucleotide
  Sense strand starting at position 891 of SEQ ID NO: 1879500
agucuaaacuuugcuaaag

SEQ ID NO: 1911603 - RNA, 19 nt, Artificial Sequence
  Description of Artificial Sequence: Synthetic oligonucleotide
  Antisense strand to SEQ ID NO: 1911602
cuuuagcaaaguuuagacu

SEQ ID NO: 1911604 - RNA, 19 nt, Artificial Sequence
  Description of Artificial Sequence: Synthetic oligonucleotide
  Sense strand starting at position 892 of SEQ ID NO: 1879500
gucuaaacuuugcuaaaga

SEQ ID NO: 1911605 - RNA, 19 nt, Artificial Sequence
  Description of Artificial Sequence: Synthetic oligonucleotide
  Antisense strand to SEQ ID NO: 1911604
ucuuuagcaaaguuuagac

SEQ ID NO: 1911606 - RNA, 19 nt, Artificial Sequence
  Description of Artificial Sequence: Synthetic oligonucleotide
  Sense strand starting at position 1350 of SEQ ID NO: 1879500
agaagagauguguggcaaa

SEQ ID NO: 1911607 - RNA, 19 nt, Artificial Sequence
  Description of Artificial Sequence: Synthetic oligonucleotide
  Antisense strand to SEQ ID NO: 1911606
uuugccacacaucucuucu

SEQ ID NO: 1911608 - RNA, 19 nt, Artificial Sequence
  Description of Artificial Sequence: Synthetic oligonucleotide
  Sense strand starting at position 1885 of SEQ ID NO: 1879500
agaaacuucuggcuacacu

SEQ ID NO: 1911609 - RNA, 19 nt, Artificial Sequence
  Description of Artificial Sequence: Synthetic oligonucleotide
  Antisense strand to SEQ ID NO: 1911608
aguguagccagaaguuucu

SEQ ID NO: 1911610 - RNA, 19 nt, Artificial Sequence
  Description of Artificial Sequence: Synthetic oligonucleotide
  Sense strand starting at position 1894 of SEQ ID NO: 1879500
uggcuacacugagcaauaa

SEQ ID NO: 1911611 - RNA, 19 nt, Artificial Sequence
  Description of Artificial Sequence: Synthetic oligonucleotide
  Antisense strand to SEQ ID NO: 1911610
uuauugcucaguguagcca

SEQ ID NO: 1911612 - RNA, 19 nt, Artificial Sequence
  Description of Artificial Sequence: Synthetic oligonucleotide
  Sense strand starting at position 1951 of SEQ ID NO: 1879500
uccugacucaccggagaag

SEQ ID NO: 1911613 - RNA, 19 nt, Artificial Sequence
  Description of Artificial Sequence: Synthetic oligonucleotide
  Antisense strand to SEQ ID NO: 1911612
cuucuccggugagucagga

SEQ ID NO: 1911614 - RNA, 19 nt, Artificial Sequence
  Description of Artificial Sequence: Synthetic oligonucleotide
  Sense strand starting at position 1952 of SEQ ID NO: 1879500
ccugacucaccggagaagu

SEQ ID NO: 1911615 - RNA, 19 nt, Artificial Sequence
  Description of Artificial Sequence: Synthetic oligonucleotide
  Antisense strand to SEQ ID NO: 1911614
acuucuccggugagucagg

SEQ ID NO: 1911616 - RNA, 19 nt, Artificial Sequence
  Description of Artificial Sequence: Synthetic oligonucleotide
  Sense strand starting at position 1975 of SEQ ID NO: 1879500
caugcaucgcaggauaacu

SEQ ID NO: 1911617 - RNA, 19 nt, Artificial Sequence
  Description of Artificial Sequence: Synthetic oligonucleotide
  Antisense strand to SEQ ID NO: 1911616
aguuauccugcgaugcaug

SEQ ID NO: 1911618 - RNA, 19 nt, Artificial Sequence
  Description of Artificial Sequence: Synthetic oligonucleotide
  Sense strand starting at position 2164 of SEQ ID NO: 1879500
uguuacuuucuguauaauc

SEQ ID NO: 1911619 - RNA, 19 nt, Artificial Sequence
  Description of Artificial Sequence: Synthetic oligonucleotide
  Antisense strand to SEQ ID NO: 1911618
gauuauacagaaaguaaca

SEQ ID NO: 1911620 - RNA, 19 nt, Artificial Sequence
  Description of Artificial Sequence: Synthetic oligonucleotide
  Sense strand starting at position 2192 of SEQ ID NO: 1879500
uugucacauucucugggaa

SEQ ID NO: 1911621 - RNA, 19 nt, Artificial Sequence
  Description of Artificial Sequence: Synthetic oligonucleotide
  Antisense strand to SEQ ID NO: 1911620
uucccagagaaugugacaa

SEQ ID NO: 1911622 - RNA, 19 nt, Artificial Sequence
  Description of Artificial Sequence: Synthetic oligonucleotide
  Sense strand starting at position 2195 of SEQ ID NO: 1879500
ucacauucucugggaaguc

SEQ ID NO: 1911623 - RNA, 19 nt, Artificial Sequence
  Description of Artificial Sequence: Synthetic oligonucleotide
  Antisense strand to SEQ ID NO: 1911622
gacuucccagagaauguga

SEQ ID NO: 1911624 - RNA, 19 nt, Artificial Sequence
  Description of Artificial Sequence: Synthetic oligonucleotide
  Sense strand starting at position 2207 of SEQ ID NO: 1879500
ggaaguccucccugaucac

SEQ ID NO: 1911625 - RNA, 19 nt, Artificial Sequence
  Description of Artificial Sequence: Synthetic oligonucleotide
  Antisense strand to SEQ ID NO: 1911624
gugaucagggaggacuucc

SEQ ID NO: 1911626 - RNA, 19 nt, Artificial Sequence
  Description of Artificial Sequence: Synthetic oligonucleotide
  Sense strand starting at position 2318 of SEQ ID NO: 1879500
cuggcuucucuauaacagu

SEQ ID NO: 1911627 - RNA, 19 nt, Artificial Sequence
  Description of Artificial Sequence: Synthetic oligonucleotide
  Antisense strand to SEQ ID NO: 1911626
acuguuauagagaagccag

SEQ ID NO: 1911628 - RNA, 19 nt, Artificial Sequence
  Description of Artificial Sequence: Synthetic oligonucleotide
  Sense strand starting at position 2324 of SEQ ID NO: 1879500
ucucuauaacagugagagu

SEQ ID NO: 1911629 - RNA, 19 nt, Artificial Sequence
  Description of Artificial Sequence: Synthetic oligonucleotide
  Antisense strand to SEQ ID NO: 1911628
acucucacuguuauagaga

SEQ ID NO: 1911630 - RNA, 19 nt, Artificial Sequence
  Description of Artificial Sequence: Synthetic oligonucleotide
  Sense strand starting at position 2335 of SEQ ID NO: 1879500
gugagaguuucagcaggga

SEQ ID NO: 1911631 - RNA, 19 nt, Artificial Sequence
  Description of Artificial Sequence: Synthetic oligonucleotide
  Antisense strand to SEQ ID NO: 1911630
ucccugcugaaacucucac

SEQ ID NO: 1911632 - RNA, 19 nt, Artificial Sequence
  Description of Artificial Sequence: Synthetic oligonucleotide
  Sense strand starting at position 2436 of SEQ ID NO: 1879500
aaugaacgaugucuuccau

SEQ ID NO: 1911633 - RNA, 19 nt, Artificial Sequence
  Description of Artificial Sequence: Synthetic oligonucleotide
  Antisense strand to SEQ ID NO: 1911632
auggaagacaucguucauu

SEQ ID NO: 1911634 - RNA, 19 nt, Artificial Sequence
  Description of Artificial Sequence: Synthetic oligonucleotide
  Sense strand starting at position 2512 of SEQ ID NO: 1879500
ucuggaagcguuuacaaua

SEQ ID NO: 1911635 - RNA, 19 nt, Artificial Sequence
  Description of Artificial Sequence: Synthetic oligonucleotide
  Antisense strand to SEQ ID NO: 1911634
uauuguaaacgcuuccaga

SEQ ID NO: 1911636 - RNA, 19 nt, Artificial Sequence
  Description of Artificial Sequence: Synthetic oligonucleotide
  Sense strand starting at position 2630 of SEQ ID NO: 1879500
gcugcaagaaaguaauagu

SEQ ID NO: 1911637 - RNA, 19 nt, Artificial Sequence
  Description of Artificial Sequence: Synthetic oligonucleotide
  Antisense strand to SEQ ID NO: 1911636
acuauuacuuucuugcagc

SEQ ID NO: 1911638 - RNA, 19 nt, Artificial Sequence
  Description of Artificial Sequence: Synthetic oligonucleotide
  Sense strand starting at position 2706 of SEQ ID NO: 1879500
ucauuugaaugucagaauc

SEQ ID NO: 1911639 - RNA, 19 nt, Artificial Sequence
  Description of Artificial Sequence: Synthetic oligonucleotide
  Antisense strand to SEQ ID NO: 1911638
gauucugacauucaaauga

SEQ ID NO: 1911640 - RNA, 19 nt, Artificial Sequence
  Description of Artificial Sequence: Synthetic oligonucleotide
  Sense strand starting at position 2762 of SEQ ID NO: 1879500
uuaucuguggcugaaaugu

SEQ ID NO: 1911641 - RNA, 19 nt, Artificial Sequence
  Description of Artificial Sequence: Synthetic oligonucleotide
  Antisense strand to SEQ ID NO: 1911640
acauuucagccacagauaa

SEQ ID NO: 1911642 - RNA, 19 nt, Artificial Sequence
  Description of Artificial Sequence: Synthetic oligonucleotide
  Sense strand starting at position 2814 of SEQ ID NO: 1879500
gccauauugcuacauggga

SEQ ID NO: 1911643 - RNA, 19 nt, Artificial Sequence
  Description of Artificial Sequence: Synthetic oligonucleotide
  Antisense strand to SEQ ID NO: 1911642
ucccauguagcaauauggc

SEQ ID NO: 1911644 - RNA, 19 nt, Artificial Sequence
  Description of Artificial Sequence: Synthetic oligonucleotide
  Sense strand starting at position 2964 of SEQ ID NO: 1879500
cuucuuaaaugaguguuua

SEQ ID NO: 1911645 - RNA, 19 nt, Artificial Sequence
  Description of Artificial Sequence: Synthetic oligonucleotide
  Antisense strand to SEQ ID NO: 1911644
uaaacacucauuuaagaag

SEQ ID NO: 1911646 - RNA, 19 nt, Artificial Sequence
  Description of Artificial Sequence: Synthetic oligonucleotide
  Sense strand starting at position 2976 of SEQ ID NO: 1879500
guguuuauacaauaaagug

SEQ ID NO: 1911647 - RNA, 19 nt, Artificial Sequence
  Description of Artificial Sequence: Synthetic oligonucleotide
  Antisense strand to SEQ ID NO: 1911646
cacuuuauuguauaaacac

SEQ ID NO: 1911648 - RNA, 19 nt, Artificial Sequence
  Description of Artificial Sequence: Synthetic oligonucleotide
  Sense strand starting at position 3166 of SEQ ID NO: 1879500
uggugucaugcaugcauuu

SEQ ID NO: 1911649 - RNA, 19 nt, Artificial Sequence
  Description of Artificial Sequence: Synthetic oligonucleotide
  Antisense strand to SEQ ID NO: 1911648
aaaugcaugcaugacacca

SEQ ID NO: 1911650 - RNA, 19 nt, Artificial Sequence
  Description of Artificial Sequence: Synthetic oligonucleotide
  Sense strand starting at position 3312 of SEQ ID NO: 1879500
gguugugugcuuucucuua

SEQ ID NO: 1911651 - RNA, 19 nt, Artificial Sequence
  Description of Artificial Sequence: Synthetic oligonucleotide
  Antisense strand to SEQ ID NO: 1911650
uaagagaaagcacacaacc

SEQ ID NO: 1911652 - RNA, 19 nt, Artificial Sequence
  Description of Artificial Sequence: Synthetic oligonucleotide
  Sense strand starting at position 3358 of SEQ ID NO: 1879500
ucugucauucuguaaggag

SEQ ID NO: 1911653 - RNA, 19 nt, Artificial Sequence
  Description of Artificial Sequence: Synthetic oligonucleotide
  Antisense strand to SEQ ID NO: 1911652
cuccuuacagaaugacaga

SEQ ID NO: 1911654 - RNA, 19 nt, Artificial Sequence
  Description of Artificial Sequence: Synthetic oligonucleotide
  Sense strand starting at position 3436 of SEQ ID NO: 1879500
agaaauuccugaguuugga

SEQ ID NO: 1911655 - RNA, 19 nt, Artificial Sequence
  Description of Artificial Sequence: Synthetic oligonucleotide
  Antisense strand to SEQ ID NO: 1911654
uccaaacucaggaauuucu

SEQ ID NO: 1911656 - RNA, 19 nt, Artificial Sequence
  Description of Artificial Sequence: Synthetic oligonucleotide
  Sense strand starting at position 3574 of SEQ ID NO: 1879500
augguauagguauacucua

SEQ ID NO: 1911657 - RNA, 19 nt, Artificial Sequence
  Description of Artificial Sequence: Synthetic oligonucleotide
  Antisense strand to SEQ ID NO: 1911656
uagaguauaccuauaccau

SEQ ID NO: 1911658 - RNA, 19 nt, Artificial Sequence
  Description of Artificial Sequence: Synthetic oligonucleotide
  Sense strand starting at position 3586 of SEQ ID NO: 1879500
uacucuaaucuuggugaga

SEQ ID NO: 1911659 - RNA, 19 nt, Artificial Sequence
  Description of Artificial Sequence: Synthetic oligonucleotide
  Antisense strand to SEQ ID NO: 1911658
ucucaccaagauuagagua

SEQ ID NO: 1911660 - RNA, 19 nt, Artificial Sequence
  Description of Artificial Sequence: Synthetic oligonucleotide
  Sense strand starting at position 3587 of SEQ ID NO: 1879500
acucuaaucuuggugagag

SEQ ID NO: 1911661 - RNA, 19 nt, Artificial Sequence
  Description of Artificial Sequence: Synthetic oligonucleotide
  Antisense strand to SEQ ID NO: 1911660
cucucaccaagauuagagu

SEQ ID NO: 1911662 - RNA, 19 nt, Artificial Sequence
  Description of Artificial Sequence: Synthetic oligonucleotide
  Sense strand starting at position 3618 of SEQ ID NO: 1879500
cuaaguagguaacugauua

SEQ ID NO: 1911663 - RNA, 19 nt, Artificial Sequence
  Description of Artificial Sequence: Synthetic oligonucleotide
  Antisense strand to SEQ ID NO: 1911662
uaaucaguuaccuacuuag

SEQ ID NO: 1911664 - RNA, 19 nt, Artificial Sequence
  Description of Artificial Sequence: Synthetic oligonucleotide
  Sense strand starting at position 3625 of SEQ ID NO: 1879500
gguaacugauuagugucaa

SEQ ID NO: 1911665 - RNA, 19 nt, Artificial Sequence
  Description of Artificial Sequence: Synthetic oligonucleotide
  Antisense strand to SEQ ID NO: 1911664
uugacacuaaucaguuacc

SEQ ID NO: 1911666 - RNA, 19 nt, Artificial Sequence
  Description of Artificial Sequence: Synthetic oligonucleotide
  Sense strand starting at position 3639 of SEQ ID NO: 1879500
gucaauugugauggauaua

SEQ ID NO: 1911667 - RNA, 19 nt, Artificial Sequence
  Description of Artificial Sequence: Synthetic oligonucleotide
  Antisense strand to SEQ ID NO: 1911666
uauauccaucacaauugac

SEQ ID NO: 1911668 - RNA, 19 nt, Artificial Sequence
  Description of Artificial Sequence: Synthetic oligonucleotide
  Sense strand starting at position 3671 of SEQ ID NO: 1879500
auugguaucauguacaguu

SEQ ID NO: 1911669 - RNA, 19 nt, Artificial Sequence
  Description of Artificial Sequence: Synthetic oligonucleotide
  Antisense strand to SEQ ID NO: 1911668
aacuguacaugauaccaau

SEQ ID NO: 1911670 - RNA, 19 nt, Artificial Sequence
  Description of Artificial Sequence: Synthetic oligonucleotide
  Sense strand starting at position 3859 of SEQ ID NO: 1879500
gcaggaauauucuccuaua

SEQ ID NO: 1911671 - RNA, 19 nt, Artificial Sequence
  Description of Artificial Sequence: Synthetic oligonucleotide
  Antisense strand to SEQ ID NO: 1911670
uauaggagaauauuccugc

SEQ ID NO: 1911672 - RNA, 19 nt, Artificial Sequence
  Description of Artificial Sequence: Synthetic oligonucleotide
  Sense strand starting at position 3932 of SEQ ID NO: 1879500
uaaguuuauguagaaaggu

SEQ ID NO: 1911673 - RNA, 19 nt, Artificial Sequence
  Description of Artificial Sequence: Synthetic oligonucleotide
  Antisense strand to SEQ ID NO: 1911672
accuuucuacauaaacuua

SEQ ID NO: 1911674 - RNA, 19 nt, Artificial Sequence
  Description of Artificial Sequence: Synthetic oligonucleotide
  Sense strand starting at position 3951 of SEQ ID NO: 1879500
uuuggaagagucugucaag

SEQ ID NO: 1911675 - RNA, 19 nt, Artificial Sequence
  Description of Artificial Sequence: Synthetic oligonucleotide
  Antisense strand to SEQ ID NO: 1911674
cuugacagacucuuccaaa

SEQ ID NO: 1911676 - RNA, 19 nt, Artificial Sequence
  Description of Artificial Sequence: Synthetic oligonucleotide
  Sense strand starting at position 3952 of SEQ ID NO: 1879500
uuggaagagucugucaaga

SEQ ID NO: 1911677 - RNA, 19 nt, Artificial Sequence
  Description of Artificial Sequence: Synthetic oligonucleotide
  Antisense strand to SEQ ID NO: 1911676
ucuugacagacucuuccaa

SEQ ID NO: 1911678 - RNA, 19 nt, Artificial Sequence
  Description of Artificial Sequence: Synthetic oligonucleotide
  Sense strand starting at position 175 of SEQ ID NO: 1879501
auucuauucuaguuagaug

SEQ ID NO: 1911679 - RNA, 19 nt, Artificial Sequence
  Description of Artificial Sequence: Synthetic oligonucleotide
  Antisense strand to SEQ ID NO: 1911678
caucuaacuagaauagaau

SEQ ID NO: 1911680 - RNA, 19 nt, Artificial Sequence
  Description of Artificial Sequence: Synthetic oligonucleotide
  Sense strand starting at position 183 of SEQ ID NO: 1879501
cuaguuagaugcuaggaua

SEQ ID NO: 1911681 - RNA, 19 nt, Artificial Sequence
  Description of Artificial Sequence: Synthetic oligonucleotide
  Antisense strand to SEQ ID NO: 1911680
uauccuagcaucuaacuag

SEQ ID NO: 1911682 - RNA, 19 nt, Artificial Sequence
  Description of Artificial Sequence: Synthetic oligonucleotide
  Sense strand starting at position 234 of SEQ ID NO: 1879501
gccauuucccuuugucuga

SEQ ID NO: 1911683 - RNA, 19 nt, Artificial Sequence
  Description of Artificial Sequence: Synthetic oligonucleotide
  Antisense strand to SEQ ID NO: 1911682
ucagacaaagggaaauggc

SEQ ID NO: 1911684 - RNA, 19 nt, Artificial Sequence
  Description of Artificial Sequence: Synthetic oligonucleotide
  Sense strand starting at position 238 of SEQ ID NO: 1879501
uuucccuuugucugauauc

SEQ ID NO: 1911685 - RNA, 19 nt, Artificial Sequence
  Description of Artificial Sequence: Synthetic oligonucleotide
  Antisense strand to SEQ ID NO: 1911684
gauaucagacaaagggaaa

SEQ ID NO: 1911686 - RNA, 19 nt, Artificial Sequence
  Description of Artificial Sequence: Synthetic oligonucleotide
  Sense strand starting at position 244 of SEQ ID NO: 1879501
uuugucugauauccauguu

SEQ ID NO: 1911687 - RNA, 19 nt, Artificial Sequence
  Description of Artificial Sequence: Synthetic oligonucleotide
  Antisense strand to SEQ ID NO: 1911686
aacauggauaucagacaaa

SEQ ID NO: 1911688 - RNA, 19 nt, Artificial Sequence
  Description of Artificial Sequence: Synthetic oligonucleotide
  Sense strand starting at position 282 of SEQ ID NO: 1879501
uuacaauaagccugguaca

SEQ ID NO: 1911689 - RNA, 19 nt, Artificial Sequence
  Description of Artificial Sequence: Synthetic oligonucleotide
  Antisense strand to SEQ ID NO: 1911688
uguaccaggcuuauuguaa

SEQ ID NO: 1911690 - RNA, 19 nt, Artificial Sequence
  Description of Artificial Sequence: Synthetic oligonucleotide
  Sense strand starting at position 285 of SEQ ID NO: 1879501
caauaagccugguacagau

SEQ ID NO: 1911691 - RNA, 19 nt, Artificial Sequence
  Description of Artificial Sequence: Synthetic oligonucleotide
  Antisense strand to SEQ ID NO: 1911690
aucuguaccaggcuuauug

SEQ ID NO: 1911692 - RNA, 19 nt, Artificial Sequence
  Description of Artificial Sequence: Synthetic oligonucleotide
  Sense strand starting at position 418 of SEQ ID NO: 1879501
uagauaaaccugugccaug

SEQ ID NO: 1911693 - RNA, 19 nt, Artificial Sequence
  Description of Artificial Sequence: Synthetic oligonucleotide
  Antisense strand to SEQ ID NO: 1911692
cauggcacagguuuaucua

SEQ ID NO: 1911694 - RNA, 19 nt, Artificial Sequence
  Description of Artificial Sequence: Synthetic oligonucleotide
  Sense strand starting at position 567 of SEQ ID NO: 1879501
acucuaucuguccauguau

SEQ ID NO: 1911695 - RNA, 19 nt, Artificial Sequence
  Description of Artificial Sequence: Synthetic oligonucleotide
  Antisense strand to SEQ ID NO: 1911694
auacauggacagauagagu

SEQ ID NO: 1911696 - RNA, 19 nt, Artificial Sequence
  Description of Artificial Sequence: Synthetic oligonucleotide
  Sense strand starting at position 681 of SEQ ID NO: 1879501
cagucuaguucuucuguga

SEQ ID NO: 1911697 - RNA, 19 nt, Artificial Sequence
  Description of Artificial Sequence: Synthetic oligonucleotide
  Antisense strand to SEQ ID NO: 1911696
ucacagaagaacuagacug

SEQ ID NO: 1911698 - RNA, 19 nt, Artificial Sequence
  Description of Artificial Sequence: Synthetic oligonucleotide
  Sense strand starting at position 684 of SEQ ID NO: 1879501
ucuaguucuucugugagau

SEQ ID NO: 1911699 - RNA, 19 nt, Artificial Sequence
  Description of Artificial Sequence: Synthetic oligonucleotide
  Antisense strand to SEQ ID NO: 1911698
aucucacagaagaacuaga

SEQ ID NO: 1911700 - RNA, 19 nt, Artificial Sequence
  Description of Artificial Sequence: Synthetic oligonucleotide
  Sense strand starting at position 685 of SEQ ID NO: 1879501
cuaguucuucugugagauc

SEQ ID NO: 1911701 - RNA, 19 nt, Artificial Sequence
  Description of Artificial Sequence: Synthetic oligonucleotide
  Antisense strand to SEQ ID NO: 1911700
gaucucacagaagaacuag

SEQ ID NO: 1911702 - RNA, 19 nt, Artificial Sequence
  Description of Artificial Sequence: Synthetic oligonucleotide
  Sense strand starting at position 1558 of SEQ ID NO: 1879501
cgcucuaaucgcuccgauu

SEQ ID NO: 1911703 - RNA, 19 nt, Artificial Sequence
  Description of Artificial Sequence: Synthetic oligonucleotide
  Antisense strand to SEQ ID NO: 1911702
aaucggagcgauuagagcg

SEQ ID NO: 1911704 - RNA, 19 nt, Artificial Sequence
  Description of Artificial Sequence: Synthetic oligonucleotide
  Sense strand starting at position 1703 of SEQ ID NO: 1879501
cggucagagcguucggcua

SEQ ID NO: 1911705 - RNA, 19 nt, Artificial Sequence
  Description of Artificial Sequence: Synthetic oligonucleotide
  Antisense strand to SEQ ID NO: 1911704
uagccgaacgcucugaccg

SEQ ID NO: 1911706 - RNA, 19 nt, Artificial Sequence
  Description of Artificial Sequence: Synthetic oligonucleotide
  Sense strand starting at position 1729 of SEQ ID NO: 1879501
aacggugaguaguucaaga

SEQ ID NO: 1911707 - RNA, 19 nt, Artificial Sequence
  Description of Artificial Sequence: Synthetic oligonucleotide
  Antisense strand to SEQ ID NO: 1911706
ucuugaacuacucaccguu

SEQ ID NO: 1911708 - RNA, 19 nt, Artificial Sequence
  Description of Artificial Sequence: Synthetic oligonucleotide
  Sense strand starting at position 1787 of SEQ ID NO: 1879501
guauuaucaucacuagaga

SEQ ID NO: 1911709 - RNA, 19 nt, Artificial Sequence
  Description of Artificial Sequence: Synthetic oligonucleotide
  Antisense strand to SEQ ID NO: 1911708
ucucuagugaugauaauac

SEQ ID NO: 1911710 - RNA, 19 nt, Artificial Sequence
  Description of Artificial Sequence: Synthetic oligonucleotide
  Sense strand starting at position 1897 of SEQ ID NO: 1879501
ucaggauucuagucacagu

SEQ ID NO: 1911711 - RNA, 19 nt, Artificial Sequence
  Description of Artificial Sequence: Synthetic oligonucleotide
  Antisense strand to SEQ ID NO: 1911710
acugugacuagaauccuga

SEQ ID NO: 1911712 - RNA, 19 nt, Artificial Sequence
  Description of Artificial Sequence: Synthetic oligonucleotide
  Sense strand starting at position 1900 of SEQ ID NO: 1879501
ggauucuagucacaguuaa

SEQ ID NO: 1911713 - RNA, 19 nt, Artificial Sequence
  Description of Artificial Sequence: Synthetic oligonucleotide
  Antisense strand to SEQ ID NO: 1911712
uuaacugugacuagaaucc

SEQ ID NO: 1911714 - RNA, 19 nt, Artificial Sequence
  Description of Artificial Sequence: Synthetic oligonucleotide
  Sense strand starting at position 1987 of SEQ ID NO: 1879501
gguugucuugugccugagu

SEQ ID NO: 1911715 - RNA, 19 nt, Artificial Sequence
  Description of Artificial Sequence: Synthetic oligonucleotide
  Antisense strand to SEQ ID NO: 1911714
acucaggcacaagacaacc

SEQ ID NO: 1911716 - RNA, 19 nt, Artificial Sequence
  Description of Artificial Sequence: Synthetic oligonucleotide
  Sense strand starting at position 1990 of SEQ ID NO: 1879501
ugucuugugccugagugca

SEQ ID NO: 1911717 - RNA, 19 nt, Artificial Sequence
  Description of Artificial Sequence: Synthetic oligonucleotide
  Antisense strand to SEQ ID NO: 1911716
ugcacucaggcacaagaca

SEQ ID NO: 1911718 - RNA, 19 nt, Artificial Sequence
  Description of Artificial Sequence: Synthetic oligonucleotide
  Sense strand starting at position 1995 of SEQ ID NO: 1879501
ugugccugagugcaagaau

SEQ ID NO: 1911719 - RNA, 19 nt, Artificial Sequence
  Description of Artificial Sequence: Synthetic oligonucleotide
  Antisense strand to SEQ ID NO: 1911718
auucuugcacucaggcaca

SEQ ID NO: 1911720 - RNA, 19 nt, Artificial Sequence
  Description of Artificial Sequence: Synthetic oligonucleotide
  Sense strand starting at position 2029 of SEQ ID NO: 1879501
ucacuucuggugcgauaaa

SEQ ID NO: 1911721 - RNA, 19 nt, Artificial Sequence
  Description of Artificial Sequence: Synthetic oligonucleotide
  Antisense strand to SEQ ID NO: 1911720
uuuaucgcaccagaaguga

SEQ ID NO: 1911722 - RNA, 19 nt, Artificial Sequence
  Description of Artificial Sequence: Synthetic oligonucleotide
  Sense strand starting at position 2064 of SEQ ID NO: 1879501
cuuauaggcuuggauggau

SEQ ID NO: 1911723 - RNA, 19 nt, Artificial Sequence
  Description of Artificial Sequence: Synthetic oligonucleotide
  Antisense strand to SEQ ID NO: 1911722
auccauccaagccuauaag

SEQ ID NO: 1911724 - RNA, 19 nt, Artificial Sequence
  Description of Artificial Sequence: Synthetic oligonucleotide
  Sense strand starting at position 2120 of SEQ ID NO: 1879501
ggccuagagagguguccua

SEQ ID NO: 1911725 - RNA, 19 nt, Artificial Sequence
  Description of Artificial Sequence: Synthetic oligonucleotide
  Antisense strand to SEQ ID NO: 1911724
uaggacaccucucuaggcc

SEQ ID NO: 1911726 - RNA, 19 nt, Artificial Sequence
  Description of Artificial Sequence: Synthetic oligonucleotide
  Sense strand starting at position 2158 of SEQ ID NO: 1879501
uuuagugauugcucaauca

SEQ ID NO: 1911727 - RNA, 19 nt, Artificial Sequence
  Description of Artificial Sequence: Synthetic oligonucleotide
  Antisense strand to SEQ ID NO: 1911726
ugauugagcaaucacuaaa

SEQ ID NO: 1911728 - RNA, 19 nt, Artificial Sequence
  Description of Artificial Sequence: Synthetic oligonucleotide
  Sense strand starting at position 2349 of SEQ ID NO: 1879501
guacauauaucuuugacca

SEQ ID NO: 1911729 - RNA, 19 nt, Artificial Sequence
  Description of Artificial Sequence: Synthetic oligonucleotide
  Antisense strand to SEQ ID NO: 1911728
uggucaaagauauauguac

SEQ ID NO: 1911730 - RNA, 19 nt, Artificial Sequence
  Description of Artificial Sequence: Synthetic oligonucleotide
  Sense strand starting at position 2371 of SEQ ID NO: 1879501
auauuucuauaguguagag

SEQ ID NO: 1911731 - RNA, 19 nt, Artificial Sequence
  Description of Artificial Sequence: Synthetic oligonucleotide
  Antisense strand to SEQ ID NO: 1911730
cucuacacuauagaaauau

SEQ ID NO: 1911732 - RNA, 19 nt, Artificial Sequence
  Description of Artificial Sequence: Synthetic oligonucleotide
  Sense strand starting at position 2375 of SEQ ID NO: 1879501
uucuauaguguagagaacu

SEQ ID NO: 1911733 - RNA, 19 nt, Artificial Sequence
  Description of Artificial Sequence: Synthetic oligonucleotide
  Antisense strand to SEQ ID NO: 1911732
aguucucuacacuauagaa

SEQ ID NO: 1911734 - RNA, 19 nt, Artificial Sequence
  Description of Artificial Sequence: Synthetic oligonucleotide
  Sense strand starting at position 2599 of SEQ ID NO: 1879501
uuguauguucuguagagaa

SEQ ID NO: 1911735 - RNA, 19 nt, Artificial Sequence
  Description of Artificial Sequence: Synthetic oligonucleotide
  Antisense strand to SEQ ID NO: 1911734
uucucuacagaacauacaa

SEQ ID NO: 1911736 - RNA, 19 nt, Artificial Sequence
  Description of Artificial Sequence: Synthetic oligonucleotide
  Sense strand starting at position 2601 of SEQ ID NO: 1879501
guauguucuguagagaagg

SEQ ID NO: 1911737 - RNA, 19 nt, Artificial Sequence
  Description of Artificial Sequence: Synthetic oligonucleotide
  Antisense strand to SEQ ID NO: 1911736
ccuucucuacagaacauac

SEQ ID NO: 1911738 - RNA, 19 nt, Artificial Sequence
  Description of Artificial Sequence: Synthetic oligonucleotide
  Sense strand starting at position 2636 of SEQ ID NO: 1879501
gcaggcuggucuccaaacu

SEQ ID NO: 1911739 - RNA, 19 nt, Artificial Sequence
  Description of Artificial Sequence: Synthetic oligonucleotide
  Antisense strand to SEQ ID NO: 1911738
aguuuggagaccagccugc

SEQ ID NO: 1911740 - RNA, 19 nt, Artificial Sequence
  Description of Artificial Sequence: Synthetic oligonucleotide
  Sense strand starting at position 2759 of SEQ ID NO: 1879501
cauuuauccucugcacgag

SEQ ID NO: 1911741 - RNA, 19 nt, Artificial Sequence
  Description of Artificial Sequence: Synthetic oligonucleotide
  Antisense strand to SEQ ID NO: 1911740
cucgugcagaggauaaaug

SEQ ID NO: 1911742 - RNA, 19 nt, Artificial Sequence
  Description of Artificial Sequence: Synthetic oligonucleotide
  Sense strand starting at position 3166 of SEQ ID NO: 1879501
uugccaugugcccaugaua

SEQ ID NO: 1911743 - RNA, 19 nt, Artificial Sequence
  Description of Artificial Sequence: Synthetic oligonucleotide
  Antisense strand to SEQ ID NO: 1911742
uaucaugggcacauggcaa

SEQ ID NO: 1911744 - RNA, 19 nt, Artificial Sequence
  Description of Artificial Sequence: Synthetic oligonucleotide
  Sense strand starting at position 3169 of SEQ ID NO: 1879501
ccaugugcccaugauauuc

SEQ ID NO: 1911745 - RNA, 19 nt, Artificial Sequence
  Description of Artificial Sequence: Synthetic oligonucleotide
  Antisense strand to SEQ ID NO: 1911744
gaauaucaugggcacaugg

SEQ ID NO: 1911746 - RNA, 19 nt, Artificial Sequence
  Description of Artificial Sequence: Synthetic oligonucleotide
  Sense strand starting at position 3459 of SEQ ID NO: 1879501
auggguaugcaccaucaua

SEQ ID NO: 1911747 - RNA, 19 nt, Artificial Sequence
  Description of Artificial Sequence: Synthetic oligonucleotide
  Antisense strand to SEQ ID NO: 1911746
uaugauggugcauacccau

SEQ ID NO: 1911748 - RNA, 19 nt, Artificial Sequence
  Description of Artificial Sequence: Synthetic oligonucleotide
  Sense strand starting at position 3471 of SEQ ID NO: 1879501
caucauagguggcuauuaa

SEQ ID NO: 1911749 - RNA, 19 nt, Artificial Sequence
  Description of Artificial Sequence: Synthetic oligonucleotide
  Antisense strand to SEQ ID NO: 1911748
uuaauagccaccuaugaug

SEQ ID NO: 1911750 - RNA, 19 nt, Artificial Sequence
  Description of Artificial Sequence: Synthetic oligonucleotide
  Sense strand starting at position 3472 of SEQ ID NO: 1879501
aucauagguggcuauuaaa

SEQ ID NO: 1911751 - RNA, 19 nt, Artificial Sequence
  Description of Artificial Sequence: Synthetic oligonucleotide
  Antisense strand to SEQ ID NO: 1911750
uuuaauagccaccuaugau

SEQ ID NO: 1911752 - RNA, 19 nt, Artificial Sequence
  Description of Artificial Sequence: Synthetic oligonucleotide
  Sense strand starting at position 3494 of SEQ ID NO: 1879501
ugauaauaauucuguagag

SEQ ID NO: 1911753 - RNA, 19 nt, Artificial Sequence
  Description of Artificial Sequence: Synthetic oligonucleotide
  Antisense strand to SEQ ID NO: 1911752
cucuacagaauuauuauca

SEQ ID NO: 1911754 - RNA, 19 nt, Artificial Sequence
  Description of Artificial Sequence: Synthetic oligonucleotide
  Sense strand starting at position 3907 of SEQ ID NO: 1879501
ugguauuacagucgugagu

SEQ ID NO: 1911755 - RNA, 19 nt, Artificial Sequence
  Description of Artificial Sequence: Synthetic oligonucleotide
  Antisense strand to SEQ ID NO: 1911754
acucacgacuguaauacca

SEQ ID NO: 1911756 - RNA, 19 nt, Artificial Sequence
  Description of Artificial Sequence: Synthetic oligonucleotide
  Sense strand starting at position 3943 of SEQ ID NO: 1879501
cauuguuuccuguggugac

SEQ ID NO: 1911757 - RNA, 19 nt, Artificial Sequence
  Description of Artificial Sequence: Synthetic oligonucleotide
  Antisense strand to SEQ ID NO: 1911756
gucaccacaggaaacaaug

SEQ ID NO: 1911758 - RNA, 19 nt, Artificial Sequence
  Description of Artificial Sequence: Synthetic oligonucleotide
  Sense strand starting at position 139 of SEQ ID NO: 1879502
aguuauaagccuuagcaau

SEQ ID NO: 1911759 - RNA, 19 nt, Artificial Sequence
  Description of Artificial Sequence: Synthetic oligonucleotide
  Antisense strand to SEQ ID NO: 1911758
auugcuaaggcuuauaacu

SEQ ID NO: 1911760 - RNA, 19 nt, Artificial Sequence
  Description of Artificial Sequence: Synthetic oligonucleotide
  Sense strand starting at position 175 of SEQ ID NO: 1879502
caugguagguacucacuaa

SEQ ID NO: 1911761 - RNA, 19 nt, Artificial Sequence
  Description of Artificial Sequence: Synthetic oligonucleotide
  Antisense strand to SEQ ID NO: 1911760
uuagugaguaccuaccaug

SEQ ID NO: 1911762 - RNA, 19 nt, Artificial Sequence
  Description of Artificial Sequence: Synthetic oligonucleotide
  Sense strand starting at position 477 of SEQ ID NO: 1879502
ggcucucagagcuauaaga

SEQ ID NO: 1911763 - RNA, 19 nt, Artificial Sequence
  Description of Artificial Sequence: Synthetic oligonucleotide
  Antisense strand to SEQ ID NO: 1911762
ucuuauagcucugagagcc

SEQ ID NO: 1911764 - RNA, 19 nt, Artificial Sequence
  Description of Artificial Sequence: Synthetic oligonucleotide
  Sense strand starting at position 479 of SEQ ID NO: 1879502
cucucagagcuauaagacu

SEQ ID NO: 1911765 - RNA, 19 nt, Artificial Sequence
  Description of Artificial Sequence: Synthetic oligonucleotide
  Antisense strand to SEQ ID NO: 1911764
agucuuauagcucugagag

SEQ ID NO: 1911766 - RNA, 19 nt, Artificial Sequence
  Description of Artificial Sequence: Synthetic oligonucleotide
  Sense strand starting at position 557 of SEQ ID NO: 1879502
uauguaaccuuggcaagau

SEQ ID NO: 1911767 - RNA, 19 nt, Artificial Sequence
  Description of Artificial Sequence: Synthetic oligonucleotide
  Antisense strand to SEQ ID NO: 1911766
aucuugccaagguuacaua

SEQ ID NO: 1911768 - RNA, 19 nt, Artificial Sequence
  Description of Artificial Sequence: Synthetic oligonucleotide
  Sense strand starting at position 570 of SEQ ID NO: 1879502
caagaugacugcucagaug

SEQ ID NO: 1911769 - RNA, 19 nt, Artificial Sequence
  Description of Artificial Sequence: Synthetic oligonucleotide
  Antisense strand to SEQ ID NO: 1911768
caucugagcagucaucuug

SEQ ID NO: 1911770 - RNA, 19 nt, Artificial Sequence
  Description of Artificial Sequence: Synthetic oligonucleotide
  Sense strand starting at position 705 of SEQ ID NO: 1879502
acacacguugaaugaaagu

SEQ ID NO: 1911771 - RNA, 19 nt, Artificial Sequence
  Description of Artificial Sequence: Synthetic oligonucleotide
  Antisense strand to SEQ ID NO: 1911770
acuuucauucaacgugugu

SEQ ID NO: 1911772 - RNA, 19 nt, Artificial Sequence
  Description of Artificial Sequence: Synthetic oligonucleotide
  Sense strand starting at position 932 of SEQ ID NO: 1879502
uaacuugaugcggaaggua

SEQ ID NO: 1911773 - RNA, 19 nt, Artificial Sequence
  Description of Artificial Sequence: Synthetic oligonucleotide
  Antisense strand to SEQ ID NO: 1911772
uaccuuccgcaucaaguua

SEQ ID NO: 1911774 - RNA, 19 nt, Artificial Sequence
  Description of Artificial Sequence: Synthetic oligonucleotide
  Sense strand starting at position 1216 of SEQ ID NO: 1879502
uguguuggcagugagaaga

SEQ ID NO: 1911775 - RNA, 19 nt, Artificial Sequence
  Description of Artificial Sequence: Synthetic oligonucleotide
  Antisense strand to SEQ ID NO: 1911774
ucuucucacugccaacaca

SEQ ID NO: 1911776 - RNA, 19 nt, Artificial Sequence
  Description of Artificial Sequence: Synthetic oligonucleotide
  Sense strand starting at position 1411 of SEQ ID NO: 1879502
ugaucuuaggguggaggua

SEQ ID NO: 1911777 - RNA, 19 nt, Artificial Sequence
  Description of Artificial Sequence: Synthetic oligonucleotide
  Antisense strand to SEQ ID NO: 1911776
uaccuccacccuaagauca

SEQ ID NO: 1911778 - RNA, 19 nt, Artificial Sequence
  Description of Artificial Sequence: Synthetic oligonucleotide
  Sense strand starting at position 1693 of SEQ ID NO: 1879502
cgcaaaguugaaugggaaa

SEQ ID NO: 1911779 - RNA, 19 nt, Artificial Sequence
  Description of Artificial Sequence: Synthetic oligonucleotide
  Antisense strand to SEQ ID NO: 1911778
uuucccauucaacuuugcg

SEQ ID NO: 1911780 - RNA, 19 nt, Artificial Sequence
  Description of Artificial Sequence: Synthetic oligonucleotide
  Sense strand starting at position 1745 of SEQ ID NO: 1879502
gcgauaccagugucagcuu

SEQ ID NO: 1911781 - RNA, 19 nt, Artificial Sequence
  Description of Artificial Sequence: Synthetic oligonucleotide
  Antisense strand to SEQ ID NO: 1911780
aagcugacacugguaucgc

SEQ ID NO: 1911782 - RNA, 19 nt, Artificial Sequence
  Description of Artificial Sequence: Synthetic oligonucleotide
  Sense strand starting at position 2055 of SEQ ID NO: 1879502
gagccauugcguuugacgu

SEQ ID NO: 1911783 - RNA, 19 nt, Artificial Sequence
  Description of Artificial Sequence: Synthetic oligonucleotide
  Antisense strand to SEQ ID NO: 1911782
acgucaaacgcaauggcuc

SEQ ID NO: 1911784 - RNA, 19 nt, Artificial Sequence
  Description of Artificial Sequence: Synthetic oligonucleotide
  Sense strand starting at position 2061 of SEQ ID NO: 1879502
uugcguuugacgucaucau

SEQ ID NO: 1911785 - RNA, 19 nt, Artificial Sequence
  Description of Artificial Sequence: Synthetic oligonucleotide
  Antisense strand to SEQ ID NO: 1911784
augaugacgucaaacgcaa

SEQ ID NO: 1911786 - RNA, 19 nt, Artificial Sequence
  Description of Artificial Sequence: Synthetic oligonucleotide
  Sense strand starting at position 2531 of SEQ ID NO: 1879502
ugauuaucaguugaucagu

SEQ ID NO: 1911787 - RNA, 19 nt, Artificial Sequence
  Description of Artificial Sequence: Synthetic oligonucleotide
  Antisense strand to SEQ ID NO: 1911786
acugaucaacugauaauca

SEQ ID NO: 1911788 - RNA, 19 nt, Artificial Sequence
  Description of Artificial Sequence: Synthetic oligonucleotide
  Sense strand starting at position 2576 of SEQ ID NO: 1879502
gauaccuuugugcagaagu

SEQ ID NO: 1911789 - RNA, 19 nt, Artificial Sequence
  Description of Artificial Sequence: Synthetic oligonucleotide
  Antisense strand to SEQ ID NO: 1911788
acuucugcacaaagguauc

SEQ ID NO: 1911790 - RNA, 19 nt, Artificial Sequence
  Description of Artificial Sequence: Synthetic oligonucleotide
  Sense strand starting at position 2578 of SEQ ID NO: 1879502
uaccuuugugcagaaguga

SEQ ID NO: 1911791 - RNA, 19 nt, Artificial Sequence
  Description of Artificial Sequence: Synthetic oligonucleotide
  Antisense strand to SEQ ID NO: 1911790
ucacuucugcacaaaggua

SEQ ID NO: 1911792 - RNA, 19 nt, Artificial Sequence
  Description of Artificial Sequence: Synthetic oligonucleotide
  Sense strand starting at position 2686 of SEQ ID NO: 1879502
gugaaauggcgauaauaua

SEQ ID NO: 1911793 - RNA, 19 nt, Artificial Sequence
  Description of Artificial Sequence: Synthetic oligonucleotide
  Antisense strand to SEQ ID NO: 1911792
uauauuaucgccauuucac

SEQ ID NO: 1911794 - RNA, 19 nt, Artificial Sequence
  Description of Artificial Sequence: Synthetic oligonucleotide
  Sense strand starting at position 2709 of SEQ ID NO: 1879502
accugagccagaggaguua

SEQ ID NO: 1911795 - RNA, 19 nt, Artificial Sequence
  Description of Artificial Sequence: Synthetic oligonucleotide
  Antisense strand to SEQ ID NO: 1911794
uaacuccucuggcucaggu

SEQ ID NO: 1911796 - RNA, 19 nt, Artificial Sequence
  Description of Artificial Sequence: Synthetic oligonucleotide
  Sense strand starting at position 2749 of SEQ ID NO: 1879502
auguaaggugauggugaua

SEQ ID NO: 1911797 - RNA, 19 nt, Artificial Sequence
  Description of Artificial Sequence: Synthetic oligonucleotide
  Antisense strand to SEQ ID NO: 1911796
uaucaccaucaccuuacau

SEQ ID NO: 1911798 - RNA, 19 nt, Artificial Sequence
  Description of Artificial Sequence: Synthetic oligonucleotide
  Sense strand starting at position 2783 of SEQ ID NO: 1879502
ccugaaagaucauuguuua

SEQ ID NO: 1911799 - RNA, 19 nt, Artificial Sequence
  Description of Artificial Sequence: Synthetic oligonucleotide
  Antisense strand to SEQ ID NO: 1911798
uaaacaaugaucuuucagg

SEQ ID NO: 1911800 - RNA, 19 nt, Artificial Sequence
  Description of Artificial Sequence: Synthetic oligonucleotide
  Sense strand starting at position 2784 of SEQ ID NO: 1879502
cugaaagaucauuguuuaa

SEQ ID NO: 1911801 - RNA, 19 nt, Artificial Sequence
  Description of Artificial Sequence: Synthetic oligonucleotide
  Antisense strand to SEQ ID NO: 1911800
uuaaacaaugaucuuucag

SEQ ID NO: 1911802 - RNA, 19 nt, Artificial Sequence
  Description of Artificial Sequence: Synthetic oligonucleotide
  Sense strand starting at position 2786 of SEQ ID NO: 1879502
gaaagaucauuguuuaaug

SEQ ID NO: 1911803 - RNA, 19 nt, Artificial Sequence
  Description of Artificial Sequence: Synthetic oligonucleotide
  Antisense strand to SEQ ID NO: 1911802
cauuaaacaaugaucuuuc

SEQ ID NO: 1911804 - RNA, 19 nt, Artificial Sequence
  Description of Artificial Sequence: Synthetic oligonucleotide
  Sense strand starting at position 2826 of SEQ ID NO: 1879502
aauaucugaugauugguaa

SEQ ID NO: 1911805 - RNA, 19 nt, Artificial Sequence
  Description of Artificial Sequence: Synthetic oligonucleotide
  Antisense strand to SEQ ID NO: 1911804
uuaccaaucaucagauauu

SEQ ID NO: 1911806 - RNA, 19 nt, Artificial Sequence
  Description of Artificial Sequence: Synthetic oligonucleotide
  Sense strand starting at position 2827 of SEQ ID NO: 1879502
auaucugaugauugguaau

SEQ ID NO: 1911807 - RNA, 19 nt, Artificial Sequence
  Description of Artificial Sequence: Synthetic oligonucleotide
  Antisense strand to SEQ ID NO: 1911806
auuaccaaucaucagauau

SEQ ID NO: 1911808 - RNA, 19 nt, Artificial Sequence
  Description of Artificial Sequence: Synthetic oligonucleotide
  Sense strand starting at position 2829 of SEQ ID NO: 1879502
aucugaugauugguaauua

SEQ ID NO: 1911809 - RNA, 19 nt, Artificial Sequence
  Description of Artificial Sequence: Synthetic oligonucleotide
  Antisense strand to SEQ ID NO: 1911808
uaauuaccaaucaucagau

SEQ ID NO: 1911810 - RNA, 19 nt, Artificial Sequence
  Description of Artificial Sequence: Synthetic oligonucleotide
  Sense strand starting at position 2844 of SEQ ID NO: 1879502
auuaaaggguuucuagcua

SEQ ID NO: 1911811 - RNA, 19 nt, Artificial Sequence
  Description of Artificial Sequence: Synthetic oligonucleotide
  Antisense strand to SEQ ID NO: 1911810
uagcuagaaacccuuuaau

SEQ ID NO: 1911812 - RNA, 19 nt, Artificial Sequence
  Description of Artificial Sequence: Synthetic oligonucleotide
  Sense strand starting at position 2849 of SEQ ID NO: 1879502
aggguuucuagcuacggaa

SEQ ID NO: 1911813 - RNA, 19 nt, Artificial Sequence
  Description of Artificial Sequence: Synthetic oligonucleotide
  Antisense strand to SEQ ID NO: 1911812
uuccguagcuagaaacccu

SEQ ID NO: 1911814 - RNA, 19 nt, Artificial Sequence
  Description of Artificial Sequence: Synthetic oligonucleotide
  Sense strand starting at position 2902 of SEQ ID NO: 1879502
uuacauaagugagcuaaga

SEQ ID NO: 1911815 - RNA, 19 nt, Artificial Sequence
  Description of Artificial Sequence: Synthetic oligonucleotide
  Antisense strand to SEQ ID NO: 1911814
ucuuagcucacuuauguaa

SEQ ID NO: 1911816 - RNA, 19 nt, Artificial Sequence
  Description of Artificial Sequence: Synthetic oligonucleotide
  Sense strand starting at position 2904 of SEQ ID NO: 1879502
acauaagugagcuaagagu

SEQ ID NO: 1911817 - RNA, 19 nt, Artificial Sequence
  Description of Artificial Sequence: Synthetic oligonucleotide
  Antisense strand to SEQ ID NO: 1911816
acucuuagcucacuuaugu

SEQ ID NO: 1911818 - RNA, 19 nt, Artificial Sequence
  Description of Artificial Sequence: Synthetic oligonucleotide
  Sense strand starting at position 3332 of SEQ ID NO: 1879502
uugugaucauuugaagaaa

SEQ ID NO: 1911819 - RNA, 19 nt, Artificial Sequence
  Description of Artificial Sequence: Synthetic oligonucleotide
  Antisense strand to SEQ ID NO: 1911818
uuucuucaaaugaucacaa

SEQ ID NO: 1911820 - RNA, 19 nt, Artificial Sequence
  Description of Artificial Sequence: Synthetic oligonucleotide
  Sense strand starting at position 3398 of SEQ ID NO: 1879502
augugcaucuucucauuua

SEQ ID NO: 1911821 - RNA, 19 nt, Artificial Sequence
  Description of Artificial Sequence: Synthetic oligonucleotide
  Antisense strand to SEQ ID NO: 1911820
uaaaugagaagaugcacau

SEQ ID NO: 1911822 - RNA, 19 nt, Artificial Sequence
  Description of Artificial Sequence: Synthetic oligonucleotide
  Sense strand starting at position 3413 of SEQ ID NO: 1879502
uuuaauucucgugauaaga

SEQ ID NO: 1911823 - RNA, 19 nt, Artificial Sequence
  Description of Artificial Sequence: Synthetic oligonucleotide
  Antisense strand to SEQ ID NO: 1911822
ucuuaucacgagaauuaaa

SEQ ID NO: 1911824 - RNA, 19 nt, Artificial Sequence
  Description of Artificial Sequence: Synthetic oligonucleotide
  Sense strand starting at position 3445 of SEQ ID NO: 1879502
uuauucuggugacuuuaca

SEQ ID NO: 1911825 - RNA, 19 nt, Artificial Sequence
  Description of Artificial Sequence: Synthetic oligonucleotide
  Antisense strand to SEQ ID NO: 1911824
uguaaagucaccagaauaa

SEQ ID NO: 1911826 - RNA, 19 nt, Artificial Sequence
  Description of Artificial Sequence: Synthetic oligonucleotide
  Sense strand starting at position 3518 of SEQ ID NO: 1879502
gcuguugaggaccauguaa

SEQ ID NO: 1911827 - RNA, 19 nt, Artificial Sequence
  Description of Artificial Sequence: Synthetic oligonucleotide
  Antisense strand to SEQ ID NO: 1911826
uuacaugguccucaacagc

SEQ ID NO: 1911828 - RNA, 19 nt, Artificial Sequence
  Description of Artificial Sequence: Synthetic oligonucleotide
  Sense strand starting at position 3520 of SEQ ID NO: 1879502
uguugaggaccauguaaca

SEQ ID NO: 1911829 - RNA, 19 nt, Artificial Sequence
  Description of Artificial Sequence: Synthetic oligonucleotide
  Antisense strand to SEQ ID NO: 1911828
uguuacaugguccucaaca

SEQ ID NO: 1911830 - RNA, 19 nt, Artificial Sequence
  Description of Artificial Sequence: Synthetic oligonucleotide
  Sense strand starting at position 3545 of SEQ ID NO: 1879502
gcucguaaccuguucgauu

SEQ ID NO: 1911831 - RNA, 19 nt, Artificial Sequence
  Description of Artificial Sequence: Synthetic oligonucleotide
  Antisense strand to SEQ ID NO: 1911830
aaucgaacagguuacgagc

SEQ ID NO: 1911832 - RNA, 19 nt, Artificial Sequence
  Description of Artificial Sequence: Synthetic oligonucleotide
  Sense strand starting at position 3560 of SEQ ID NO: 1879502
gauuucuugcuugguugua

SEQ ID NO: 1911833 - RNA, 19 nt, Artificial Sequence
  Description of Artificial Sequence: Synthetic oligonucleotide
  Antisense strand to SEQ ID NO: 1911832
uacaaccaagcaagaaauc

SEQ ID NO: 1911834 - RNA, 19 nt, Artificial Sequence
  Description of Artificial Sequence: Synthetic oligonucleotide
  Sense strand starting at position 3569 of SEQ ID NO: 1879502
cuugguuguacagaucuga

SEQ ID NO: 1911835 - RNA, 19 nt, Artificial Sequence
  Description of Artificial Sequence: Synthetic oligonucleotide
  Antisense strand to SEQ ID NO: 1911834
ucagaucuguacaaccaag

SEQ ID NO: 1911836 - RNA, 19 nt, Artificial Sequence
  Description of Artificial Sequence: Synthetic oligonucleotide
  Sense strand starting at position 3834 of SEQ ID NO: 1879502
gcuagaugagcuuaaaucu

SEQ ID NO: 1911837 - RNA, 19 nt, Artificial Sequence
  Description of Artificial Sequence: Synthetic oligonucleotide
  Antisense strand to SEQ ID NO: 1911836
agauuuaagcucaucuagc

SEQ ID NO: 1911838 - RNA, 19 nt, Artificial Sequence
  Description of Artificial Sequence: Synthetic oligonucleotide
  Sense strand starting at position 256 of SEQ ID NO: 1879503
augugaacagcauggaaau

SEQ ID NO: 1911839 - RNA, 19 nt, Artificial Sequence
  Description of Artificial Sequence: Synthetic oligonucleotide
  Antisense strand to SEQ ID NO: 1911838
auuuccaugcuguucacau

SEQ ID NO: 1911840 - RNA, 19 nt, Artificial Sequence
  Description of Artificial Sequence: Synthetic oligonucleotide
  Sense strand starting at position 257 of SEQ ID NO: 1879503
ugugaacagcauggaaaua

SEQ ID NO: 1911841 - RNA, 19 nt, Artificial Sequence
  Description of Artificial Sequence: Synthetic oligonucleotide
  Antisense strand to SEQ ID NO: 1911840
uauuuccaugcuguucaca

SEQ ID NO: 1911842 - RNA, 19 nt, Artificial Sequence
  Description of Artificial Sequence: Synthetic oligonucleotide
  Sense strand starting at position 268 of SEQ ID NO: 1879503
uggaaauaaacucguaaug

SEQ ID NO: 1911843 - RNA, 19 nt, Artificial Sequence
  Description of Artificial Sequence: Synthetic oligonucleotide
  Antisense strand to SEQ ID NO: 1911842
cauuacgaguuuauuucca

SEQ ID NO: 1911844 - RNA, 19 nt, Artificial Sequence
  Description of Artificial Sequence: Synthetic oligonucleotide
  Sense strand starting at position 280 of SEQ ID NO: 1879503
cguaaugcacggucuggua

SEQ ID NO: 1911845 - RNA, 19 nt, Artificial Sequence
  Description of Artificial Sequence: Synthetic oligonucleotide
  Antisense strand to SEQ ID NO: 1911844
uaccagaccgugcauuacg

SEQ ID NO: 1911846 - RNA, 19 nt, Artificial Sequence
  Description of Artificial Sequence: Synthetic oligonucleotide
  Sense strand starting at position 360 of SEQ ID NO: 1879503
ugacuauuacuccaguucu

SEQ ID NO: 1911847 - RNA, 19 nt, Artificial Sequence
  Description of Artificial Sequence: Synthetic oligonucleotide
  Antisense strand to SEQ ID NO: 1911846
agaacuggaguaauaguca

SEQ ID NO: 1911848 - RNA, 19 nt, Artificial Sequence
  Description of Artificial Sequence: Synthetic oligonucleotide
  Sense strand starting at position 420 of SEQ ID NO: 1879503
ggugacuauucuguugaag

SEQ ID NO: 1911849 - RNA, 19 nt, Artificial Sequence
  Description of Artificial Sequence: Synthetic oligonucleotide
  Antisense strand to SEQ ID NO: 1911848
cuucaacagaauagucacc

SEQ ID NO: 1911850 - RNA, 19 nt, Artificial Sequence
  Description of Artificial Sequence: Synthetic oligonucleotide
  Sense strand starting at position 486 of SEQ ID NO: 1879503
agacuaauugagcgauagu

SEQ ID NO: 1911851 - RNA, 19 nt, Artificial Sequence
  Description of Artificial Sequence: Synthetic oligonucleotide
  Antisense strand to SEQ ID NO: 1911850
acuaucgcucaauuagucu

SEQ ID NO: 1911852 - RNA, 19 nt, Artificial Sequence
  Description of Artificial Sequence: Synthetic oligonucleotide
  Sense strand starting at position 694 of SEQ ID NO: 1879503
cagcaaguguuauuuguuu

SEQ ID NO: 1911853 - RNA, 19 nt, Artificial Sequence
  Description of Artificial Sequence: Synthetic oligonucleotide
  Antisense strand to SEQ ID NO: 1911852
aaacaaauaacacuugcug

SEQ ID NO: 1911854 - RNA, 19 nt, Artificial Sequence
  Description of Artificial Sequence: Synthetic oligonucleotide
  Sense strand starting at position 696 of SEQ ID NO: 1879503
gcaaguguuauuuguuuac

SEQ ID NO: 1911855 - RNA, 19 nt, Artificial Sequence
  Description of Artificial Sequence: Synthetic oligonucleotide
  Antisense strand to SEQ ID NO: 1911854
guaaacaaauaacacuugc

SEQ ID NO: 1911856 - RNA, 19 nt, Artificial Sequence
  Description of Artificial Sequence: Synthetic oligonucleotide
  Sense strand starting at position 699 of SEQ ID NO: 1879503
aguguuauuuguuuacaca

SEQ ID NO: 1911857 - RNA, 19 nt, Artificial Sequence
  Description of Artificial Sequence: Synthetic oligonucleotide
  Antisense strand to SEQ ID NO: 1911856
uguguaaacaaauaacacu

SEQ ID NO: 1911858 - RNA, 19 nt, Artificial Sequence
  Description of Artificial Sequence: Synthetic oligonucleotide
  Sense strand starting at position 752 of SEQ ID NO: 1879503
gauguaggauuguuuccaa

SEQ ID NO: 1911859 - RNA, 19 nt, Artificial Sequence
  Description of Artificial Sequence: Synthetic oligonucleotide
  Antisense strand to SEQ ID NO: 1911858
uuggaaacaauccuacauc

SEQ ID NO: 1911860 - RNA, 19 nt, Artificial Sequence
  Description of Artificial Sequence: Synthetic oligonucleotide
  Sense strand starting at position 755 of SEQ ID NO: 1879503
guaggauuguuuccaauua

SEQ ID NO: 1911861 - RNA, 19 nt, Artificial Sequence
  Description of Artificial Sequence: Synthetic oligonucleotide
  Antisense strand to SEQ ID NO: 1911860
uaauuggaaacaauccuac

SEQ ID NO: 1911862 - RNA, 19 nt, Artificial Sequence
  Description of Artificial Sequence: Synthetic oligonucleotide
  Sense strand starting at position 765 of SEQ ID NO: 1879503
uuccaauuauuggcagaag

SEQ ID NO: 1911863 - RNA, 19 nt, Artificial Sequence
  Description of Artificial Sequence: Synthetic oligonucleotide
  Antisense strand to SEQ ID NO: 1911862
cuucugccaauaauuggaa

SEQ ID NO: 1911864 - RNA, 19 nt, Artificial Sequence
  Description of Artificial Sequence: Synthetic oligonucleotide
  Sense strand starting at position 875 of SEQ ID NO: 1879503
gcugaagauauaugaguau

SEQ ID NO: 1911865 - RNA, 19 nt, Artificial Sequence
  Description of Artificial Sequence: Synthetic oligonucleotide
  Antisense strand to SEQ ID NO: 1911864
auacucauauaucuucagc

SEQ ID NO: 1911866 - RNA, 19 nt, Artificial Sequence
  Description of Artificial Sequence: Synthetic oligonucleotide
  Sense strand starting at position 961 of SEQ ID NO: 1879503
guacuaaaucaacgaguua

SEQ ID NO: 1911867 - RNA, 19 nt, Artificial Sequence
  Description of Artificial Sequence: Synthetic oligonucleotide
  Antisense strand to SEQ ID NO: 1911866
uaacucguugauuuaguac

SEQ ID NO: 1911868 - RNA, 19 nt, Artificial Sequence
  Description of Artificial Sequence: Synthetic oligonucleotide
  Sense strand starting at position 1009 of SEQ ID NO: 1879503
uggguacagucauucugaa

SEQ ID NO: 1911869 - RNA, 19 nt, Artificial Sequence
  Description of Artificial Sequence: Synthetic oligonucleotide
  Antisense strand to SEQ ID NO: 1911868
uucagaaugacuguaccca

SEQ ID NO: 1911870 - RNA, 19 nt, Artificial Sequence
  Description of Artificial Sequence: Synthetic oligonucleotide
  Sense strand starting at position 1241 of SEQ ID NO: 1879503
ccucuuagcgacuacauua

SEQ ID NO: 1911871 - RNA, 19 nt, Artificial Sequence
  Description of Artificial Sequence: Synthetic oligonucleotide
  Antisense strand to SEQ ID NO: 1911870
uaauguagucgcuaagagg

SEQ ID NO: 1911872 - RNA, 19 nt, Artificial Sequence
  Description of Artificial Sequence: Synthetic oligonucleotide
  Sense strand starting at position 1558 of SEQ ID NO: 1879503
cuuuguuauuuagccuuau

SEQ ID NO: 1911873 - RNA, 19 nt, Artificial Sequence
  Description of Artificial Sequence: Synthetic oligonucleotide
  Antisense strand to SEQ ID NO: 1911872
auaaggcuaaauaacaaag

SEQ ID NO: 1911874 - RNA, 19 nt, Artificial Sequence
  Description of Artificial Sequence: Synthetic oligonucleotide
  Sense strand starting at position 1613 of SEQ ID NO: 1879503
guacuagaauuugaacuca

SEQ ID NO: 1911875 - RNA, 19 nt, Artificial Sequence
  Description of Artificial Sequence: Synthetic oligonucleotide
  Antisense strand to SEQ ID NO: 1911874
ugaguucaaauucuaguac

SEQ ID NO: 1911876 - RNA, 19 nt, Artificial Sequence
  Description of Artificial Sequence: Synthetic oligonucleotide
  Sense strand starting at position 1656 of SEQ ID NO: 1879503
auuuguuucucuguuaucu

SEQ ID NO: 1911877 - RNA, 19 nt, Artificial Sequence
  Description of Artificial Sequence: Synthetic oligonucleotide
  Antisense strand to SEQ ID NO: 1911876
agauaacagagaaacaaau

SEQ ID NO: 1911878 - RNA, 19 nt, Artificial Sequence
  Description of Artificial Sequence: Synthetic oligonucleotide
  Sense strand starting at position 1916 of SEQ ID NO: 1879503
ucagacaugucuccugaau

SEQ ID NO: 1911879 - RNA, 19 nt, Artificial Sequence
  Description of Artificial Sequence: Synthetic oligonucleotide
  Antisense strand to SEQ ID NO: 1911878
auucaggagacaugucuga

SEQ ID NO: 1911880 - RNA, 19 nt, Artificial Sequence
  Description of Artificial Sequence: Synthetic oligonucleotide
  Sense strand starting at position 2854 of SEQ ID NO: 1879503
gugaguuggguuuaauaug

SEQ ID NO: 1911881 - RNA, 19 nt, Artificial Sequence
  Description of Artificial Sequence: Synthetic oligonucleotide
  Antisense strand to SEQ ID NO: 1911880
cauauuaaacccaacucac

SEQ ID NO: 1911882 - RNA, 19 nt, Artificial Sequence
  Description of Artificial Sequence: Synthetic oligonucleotide
  Sense strand starting at position 2860 of SEQ ID NO: 1879503
uggguuuaauaugcaauga

SEQ ID NO: 1911883 - RNA, 19 nt, Artificial Sequence
  Description of Artificial Sequence: Synthetic oligonucleotide
  Antisense strand to SEQ ID NO: 1911882
ucauugcauauuaaaccca

SEQ ID NO: 1911884 - RNA, 19 nt, Artificial Sequence
  Description of Artificial Sequence: Synthetic oligonucleotide
  Sense strand starting at position 2864 of SEQ ID NO: 1879503
uuuaauaugcaaugaggaa

SEQ ID NO: 1911885 - RNA, 19 nt, Artificial Sequence
  Description of Artificial Sequence: Synthetic oligonucleotide
  Antisense strand to SEQ ID NO: 1911884
uuccucauugcauauuaaa

SEQ ID NO: 1911886 - RNA, 19 nt, Artificial Sequence
  Description of Artificial Sequence: Synthetic oligonucleotide
  Sense strand starting at position 3078 of SEQ ID NO: 1879503
ggauaaguaggacgcuaaa

SEQ ID NO: 1911887 - RNA, 19 nt, Artificial Sequence
  Description of Artificial Sequence: Synthetic oligonucleotide
  Antisense strand to SEQ ID NO: 1911886
uuuagcguccuacuuaucc

SEQ ID NO: 1911888 - RNA, 19 nt, Artificial Sequence
  Description of Artificial Sequence: Synthetic oligonucleotide
  Sense strand starting at position 3115 of SEQ ID NO: 1879503
aauccaguguuuguaagga

SEQ ID NO: 1911889 - RNA, 19 nt, Artificial Sequence
  Description of Artificial Sequence: Synthetic oligonucleotide
  Antisense strand to SEQ ID NO: 1911888
uccuuacaaacacuggauu

SEQ ID NO: 1911890 - RNA, 19 nt, Artificial Sequence
  Description of Artificial Sequence: Synthetic oligonucleotide
  Sense strand starting at position 3147 of SEQ ID NO: 1879503
uucccaaagcuuggagauu

SEQ ID NO: 1911891 - RNA, 19 nt, Artificial Sequence
  Description of Artificial Sequence: Synthetic oligonucleotide
  Antisense strand to SEQ ID NO: 1911890
aaucuccaagcuuugggaa

SEQ ID NO: 1911892 - RNA, 19 nt, Artificial Sequence
  Description of Artificial Sequence: Synthetic oligonucleotide
  Sense strand starting at position 3156 of SEQ ID NO: 1879503
cuuggagauuacuuggcaa

SEQ ID NO: 1911893 - RNA, 19 nt, Artificial Sequence
  Description of Artificial Sequence: Synthetic oligonucleotide
  Antisense strand to SEQ ID NO: 1911892
uugccaaguaaucuccaag

SEQ ID NO: 1911894 - RNA, 19 nt, Artificial Sequence
  Description of Artificial Sequence: Synthetic oligonucleotide
  Sense strand starting at position 3158 of SEQ ID NO: 1879503
uggagauuacuuggcaaag

SEQ ID NO: 1911895 - RNA, 19 nt, Artificial Sequence
  Description of Artificial Sequence: Synthetic oligonucleotide
  Antisense strand to SEQ ID NO: 1911894
cuuugccaaguaaucucca

SEQ ID NO: 1911896 - RNA, 19 nt, Artificial Sequence
  Description of Artificial Sequence: Synthetic oligonucleotide
  Sense strand starting at position 3159 of SEQ ID NO: 1879503
ggagauuacuuggcaaagu

SEQ ID NO: 1911897 - RNA, 19 nt, Artificial Sequence
  Description of Artificial Sequence: Synthetic oligonucleotide
  Antisense strand to SEQ ID NO: 1911896
acuuugccaaguaaucucc

SEQ ID NO: 1911898 - RNA, 19 nt, Artificial Sequence
  Description of Artificial Sequence: Synthetic oligonucleotide
  Sense strand starting at position 3187 of SEQ ID NO: 1879503
cuacacagcccguaagaaa

SEQ ID NO: 1911899 - RNA, 19 nt, Artificial Sequence
  Description of Artificial Sequence: Synthetic oligonucleotide
  Antisense strand to SEQ ID NO: 1911898
uuucuuacgggcuguguag

SEQ ID NO: 1911900 - RNA, 19 nt, Artificial Sequence
  Description of Artificial Sequence: Synthetic oligonucleotide
  Sense strand starting at position 3198 of SEQ ID NO: 1879503
guaagaaauuuguaaucac

SEQ ID NO: 1911901 - RNA, 19 nt, Artificial Sequence
  Description of Artificial Sequence: Synthetic oligonucleotide
  Antisense strand to SEQ ID NO: 1911900
gugauuacaaauuucuuac

SEQ ID NO: 1911902 - RNA, 19 nt, Artificial Sequence
  Description of Artificial Sequence: Synthetic oligonucleotide
  Sense strand starting at position 3332 of SEQ ID NO: 1879503
gcaguuuagcaggacauau

SEQ ID NO: 1911903 - RNA, 19 nt, Artificial Sequence
  Description of Artificial Sequence: Synthetic oligonucleotide
  Antisense strand to SEQ ID NO: 1911902
auauguccugcuaaacugc

SEQ ID NO: 1911904 - RNA, 19 nt, Artificial Sequence
  Description of Artificial Sequence: Synthetic oligonucleotide
  Sense strand starting at position 3334 of SEQ ID NO: 1879503
aguuuagcaggacauauau

SEQ ID NO: 1911905 - RNA, 19 nt, Artificial Sequence
  Description of Artificial Sequence: Synthetic oligonucleotide
  Antisense strand to SEQ ID NO: 1911904
auauauguccugcuaaacu

SEQ ID NO: 1911906 - RNA, 19 nt, Artificial Sequence
  Description of Artificial Sequence: Synthetic oligonucleotide
  Sense strand starting at position 3357 of SEQ ID NO: 1879503
aagagauucugaguagcca

SEQ ID NO: 1911907 - RNA, 19 nt, Artificial Sequence
  Description of Artificial Sequence: Synthetic oligonucleotide
  Antisense strand to SEQ ID NO: 1911906
uggcuacucagaaucucuu

SEQ ID NO: 1911908 - RNA, 19 nt, Artificial Sequence
  Description of Artificial Sequence: Synthetic oligonucleotide
  Sense strand starting at position 3578 of SEQ ID NO: 1879503
gcaccuuuagaaugaaagu

SEQ ID NO: 1911909 - RNA, 19 nt, Artificial Sequence
  Description of Artificial Sequence: Synthetic oligonucleotide
  Antisense strand to SEQ ID NO: 1911908
acuuucauucuaaaggugc

SEQ ID NO: 1911910 - RNA, 19 nt, Artificial Sequence
  Description of Artificial Sequence: Synthetic oligonucleotide
  Sense strand starting at position 3696 of SEQ ID NO: 1879503
gaaguauuauuugacugaa

SEQ ID NO: 1911911 - RNA, 19 nt, Artificial Sequence
  Description of Artificial Sequence: Synthetic oligonucleotide
  Antisense strand to SEQ ID NO: 1911910
uucagucaaauaauacuuc

SEQ ID NO: 1911912 - RNA, 19 nt, Artificial Sequence
  Description of Artificial Sequence: Synthetic oligonucleotide
  Sense strand starting at position 3751 of SEQ ID NO: 1879503
ugagguaucuacuuauucu

SEQ ID NO: 1911913 - RNA, 19 nt, Artificial Sequence
  Description of Artificial Sequence: Synthetic oligonucleotide
  Antisense strand to SEQ ID NO: 1911912
agaauaaguagauaccuca

SEQ ID NO: 1911914 - RNA, 19 nt, Artificial Sequence
  Description of Artificial Sequence: Synthetic oligonucleotide
  Sense strand starting at position 3778 of SEQ ID NO: 1879503
agacaagucugacuccagu

SEQ ID NO: 1911915 - RNA, 19 nt, Artificial Sequence
  Description of Artificial Sequence: Synthetic oligonucleotide
  Antisense strand to SEQ ID NO: 1911914
acuggagucagacuugucu

SEQ ID NO: 1911916 - RNA, 19 nt, Artificial Sequence
  Description of Artificial Sequence: Synthetic oligonucleotide
  Sense strand starting at position 3870 of SEQ ID NO: 1879503
auuugaguuucccuuugua

SEQ ID NO: 1911917 - RNA, 19 nt, Artificial Sequence
  Description of Artificial Sequence: Synthetic oligonucleotide
  Antisense strand to SEQ ID NO: 1911916
uacaaagggaaacucaaau

SEQ ID NO: 1911918 - RNA, 19 nt, Artificial Sequence
  Description of Artificial Sequence: Synthetic oligonucleotide
  Sense strand starting at position 36 of SEQ ID NO: 1879504
agacuaauugagcgauagu

SEQ ID NO: 1911919 - RNA, 19 nt, Artificial Sequence
  Description of Artificial Sequence: Synthetic oligonucleotide
  Antisense strand to SEQ ID NO: 1911918
acuaucgcucaauuagucu

SEQ ID NO: 1911920 - RNA, 19 nt, Artificial Sequence
  Description of Artificial Sequence: Synthetic oligonucleotide
  Sense strand starting at position 244 of SEQ ID NO: 1879504
cagcaaguguuauuuguuu

SEQ ID NO: 1911921 - RNA, 19 nt, Artificial Sequence
  Description of Artificial Sequence: Synthetic oligonucleotide
  Antisense strand to SEQ ID NO: 1911920
aaacaaauaacacuugcug

SEQ ID NO: 1911922 - RNA, 19 nt, Artificial Sequence
  Description of Artificial Sequence: Synthetic oligonucleotide
  Sense strand starting at position 246 of SEQ ID NO: 1879504
gcaaguguuauuuguuuac

SEQ ID NO: 1911923 - RNA, 19 nt, Artificial Sequence
  Description of Artificial Sequence: Synthetic oligonucleotide
  Antisense strand to SEQ ID NO: 1911922
guaaacaaauaacacuugc

SEQ ID NO: 1911924 - RNA, 19 nt, Artificial Sequence
  Description of Artificial Sequence: Synthetic oligonucleotide
  Sense strand starting at position 249 of SEQ ID NO: 1879504
aguguuauuuguuuacaca

SEQ ID NO: 1911925 - RNA, 19 nt, Artificial Sequence
  Description of Artificial Sequence: Synthetic oligonucleotide
  Antisense strand to SEQ ID NO: 1911924
uguguaaacaaauaacacu

SEQ ID NO: 1911926 - RNA, 19 nt, Artificial Sequence
  Description of Artificial Sequence: Synthetic oligonucleotide
  Sense strand starting at position 302 of SEQ ID NO: 1879504
gauguaggauuguuuccaa

SEQ ID NO: 1911927 - RNA, 19 nt, Artificial Sequence
  Description of Artificial Sequence: Synthetic oligonucleotide
  Antisense strand to SEQ ID NO: 1911926
uuggaaacaauccuacauc

SEQ ID NO: 1911928 - RNA, 19 nt, Artificial Sequence
  Description of Artificial Sequence: Synthetic oligonucleotide
  Sense strand starting at position 305 of SEQ ID NO: 1879504
guaggauuguuuccaauua

SEQ ID NO: 1911929 - RNA, 19 nt, Artificial Sequence
  Description of Artificial Sequence: Synthetic oligonucleotide
  Antisense strand to SEQ ID NO: 1911928
uaauuggaaacaauccuac

SEQ ID NO: 1911930 - RNA, 19 nt, Artificial Sequence
  Description of Artificial Sequence: Synthetic oligonucleotide
  Sense strand starting at position 315 of SEQ ID NO: 1879504
uuccaauuauuggcagaag

SEQ ID NO: 1911931 - RNA, 19 nt, Artificial Sequence
  Description of Artificial Sequence: Synthetic oligonucleotide
  Antisense strand to SEQ ID NO: 1911930
cuucugccaauaauuggaa

SEQ ID NO: 1911932 - RNA, 19 nt, Artificial Sequence
  Description of Artificial Sequence: Synthetic oligonucleotide
  Sense strand starting at position 425 of SEQ ID NO: 1879504
gcugaagauauaugaguau

SEQ ID NO: 1911933 - RNA, 19 nt, Artificial Sequence
  Description of Artificial Sequence: Synthetic oligonucleotide
  Antisense strand to SEQ ID NO: 1911932
auacucauauaucuucagc

SEQ ID NO: 1911934 - RNA, 19 nt, Artificial Sequence
  Description of Artificial Sequence: Synthetic oligonucleotide
  Sense strand starting at position 511 of SEQ ID NO: 1879504
guacuaaaucaacgaguua

SEQ ID NO: 1911935 - RNA, 19 nt, Artificial Sequence
  Description of Artificial Sequence: Synthetic oligonucleotide
  Antisense strand to SEQ ID NO: 1911934
uaacucguugauuuaguac

SEQ ID NO: 1911936 - RNA, 19 nt, Artificial Sequence
  Description of Artificial Sequence: Synthetic oligonucleotide
  Sense strand starting at position 559 of SEQ ID NO: 1879504
uggguacagucauucugaa

SEQ ID NO: 1911937 - RNA, 19 nt, Artificial Sequence
  Description of Artificial Sequence: Synthetic oligonucleotide
  Antisense strand to SEQ ID NO: 1911936
uucagaaugacuguaccca

SEQ ID NO: 1911938 - RNA, 19 nt, Artificial Sequence
  Description of Artificial Sequence: Synthetic oligonucleotide
  Sense strand starting at position 791 of SEQ ID NO: 1879504
ccucuuagcgacuacauua

SEQ ID NO: 1911939 - RNA, 19 nt, Artificial Sequence
  Description of Artificial Sequence: Synthetic oligonucleotide
  Antisense strand to SEQ ID NO: 1911938
uaauguagucgcuaagagg

SEQ ID NO: 1911940 - RNA, 19 nt, Artificial Sequence
  Description of Artificial Sequence: Synthetic oligonucleotide
  Sense strand starting at position 1108 of SEQ ID NO: 1879504
cuuuguuauuuagccuuau

SEQ ID NO: 1911941 - RNA, 19 nt, Artificial Sequence
  Description of Artificial Sequence: Synthetic oligonucleotide
  Antisense strand to SEQ ID NO: 1911940
auaaggcuaaauaacaaag

SEQ ID NO: 1911942 - RNA, 19 nt, Artificial Sequence
  Description of Artificial Sequence: Synthetic oligonucleotide
  Sense strand starting at position 1163 of SEQ ID NO: 1879504
guacuagaauuugaacuca

SEQ ID NO: 1911943 - RNA, 19 nt, Artificial Sequence
  Description of Artificial Sequence: Synthetic oligonucleotide
  Antisense strand to SEQ ID NO: 1911942
ugaguucaaauucuaguac

SEQ ID NO: 1911944 - RNA, 19 nt, Artificial Sequence
  Description of Artificial Sequence: Synthetic oligonucleotide
  Sense strand starting at position 1206 of SEQ ID NO: 1879504
auuuguuucucuguuaucu

SEQ ID NO: 1911945 - RNA, 19 nt, Artificial Sequence
  Description of Artificial Sequence: Synthetic oligonucleotide
  Antisense strand to SEQ ID NO: 1911944
agauaacagagaaacaaau

SEQ ID NO: 1911946 - RNA, 19 nt, Artificial Sequence
  Description of Artificial Sequence: Synthetic oligonucleotide
  Sense strand starting at position 1450 of SEQ ID NO: 1879504
ucugaacgauccuuucuca

SEQ ID NO: 1911947 - RNA, 19 nt, Artificial Sequence
  Description of Artificial Sequence: Synthetic oligonucleotide
  Antisense strand to SEQ ID NO: 1911946
ugagaaaggaucguucaga

SEQ ID NO: 1911948 - RNA, 19 nt, Artificial Sequence
  Description of Artificial Sequence: Synthetic oligonucleotide
  Sense strand starting at position 1466 of SEQ ID NO: 1879504
ucagacaugucuccugaau

SEQ ID NO: 1911949 - RNA, 19 nt, Artificial Sequence
  Description of Artificial Sequence: Synthetic oligonucleotide
  Antisense strand to SEQ ID NO: 1911948
auucaggagacaugucuga

SEQ ID NO: 1911950 - RNA, 19 nt, Artificial Sequence
  Description of Artificial Sequence: Synthetic oligonucleotide
  Sense strand starting at position 2404 of SEQ ID NO: 1879504
gugaguuggguuuaauaug

SEQ ID NO: 1911951 - RNA, 19 nt, Artificial Sequence
  Description of Artificial Sequence: Synthetic oligonucleotide
  Antisense strand to SEQ ID NO: 1911950
cauauuaaacccaacucac

SEQ ID NO: 1911952 - RNA, 19 nt, Artificial Sequence
  Description of Artificial Sequence: Synthetic oligonucleotide
  Sense strand starting at position 2410 of SEQ ID NO: 1879504
uggguuuaauaugcaauga

SEQ ID NO: 1911953 - RNA, 19 nt, Artificial Sequence
  Description of Artificial Sequence: Synthetic oligonucleotide
  Antisense strand to SEQ ID NO: 1911952
ucauugcauauuaaaccca

SEQ ID NO: 1911954 - RNA, 19 nt, Artificial Sequence
  Description of Artificial Sequence: Synthetic oligonucleotide
  Sense strand starting at position 2414 of SEQ ID NO: 1879504
uuuaauaugcaaugaggaa

SEQ ID NO: 1911955 - RNA, 19 nt, Artificial Sequence
  Description of Artificial Sequence: Synthetic oligonucleotide
  Antisense strand to SEQ ID NO: 1911954
uuccucauugcauauuaaa

SEQ ID NO: 1911956 - RNA, 19 nt, Artificial Sequence
  Description of Artificial Sequence: Synthetic oligonucleotide
  Sense strand starting at position 2628 of SEQ ID NO: 1879504
ggauaaguaggacgcuaaa

SEQ ID NO: 1911957 - RNA, 19 nt, Artificial Sequence
  Description of Artificial Sequence: Synthetic oligonucleotide
  Antisense strand to SEQ ID NO: 1911956
uuuagcguccuacuuaucc

SEQ ID NO: 1911958 - RNA, 19 nt, Artificial Sequence
  Description of Artificial Sequence: Synthetic oligonucleotide
  Sense strand starting at position 2665 of SEQ ID NO: 1879504
aauccaguguuuguaagga

SEQ ID NO: 1911959 - RNA, 19 nt, Artificial Sequence
  Description of Artificial Sequence: Synthetic oligonucleotide
  Antisense strand to SEQ ID NO: 1911958
uccuuacaaacacuggauu

SEQ ID NO: 1911960 - RNA, 19 nt, Artificial Sequence
  Description of Artificial Sequence: Synthetic oligonucleotide
  Sense strand starting at position 2697 of SEQ ID NO: 1879504
uucccaaagcuuggagauu

SEQ ID NO: 1911961 - RNA, 19 nt, Artificial Sequence
  Description of Artificial Sequence: Synthetic oligonucleotide
  Antisense strand to SEQ ID NO: 1911960
aaucuccaagcuuugggaa

SEQ ID NO: 1911962 - RNA, 19 nt, Artificial Sequence
  Description of Artificial Sequence: Synthetic oligonucleotide
  Sense strand starting at position 2706 of SEQ ID NO: 1879504
cuuggagauuacuuggcaa

SEQ ID NO: 1911963 - RNA, 19 nt, Artificial Sequence
  Description of Artificial Sequence: Synthetic oligonucleotide
  Antisense strand to SEQ ID NO: 1911962
uugccaaguaaucuccaag

SEQ ID NO: 1911964 - RNA, 19 nt, Artificial Sequence
  Description of Artificial Sequence: Synthetic oligonucleotide
  Sense strand starting at position 2708 of SEQ ID NO: 1879504
uggagauuacuuggcaaag

SEQ ID NO: 1911965 - RNA, 19 nt, Artificial Sequence
  Description of Artificial Sequence: Synthetic oligonucleotide
  Antisense strand to SEQ ID NO: 1911964
cuuugccaaguaaucucca

SEQ ID NO: 1911966 - RNA, 19 nt, Artificial Sequence
  Description of Artificial Sequence: Synthetic oligonucleotide
  Sense strand starting at position 2709 of SEQ ID NO: 1879504
ggagauuacuuggcaaagu

SEQ ID NO: 1911967 - RNA, 19 nt, Artificial Sequence
  Description of Artificial Sequence: Synthetic oligonucleotide
  Antisense strand to SEQ ID NO: 1911966
acuuugccaaguaaucucc

SEQ ID NO: 1911968 - RNA, 19 nt, Artificial Sequence
  Description of Artificial Sequence: Synthetic oligonucleotide
  Sense strand starting at position 2737 of SEQ ID NO: 1879504
cuacacagcccguaagaaa

SEQ ID NO: 1911969 - RNA, 19 nt, Artificial Sequence
  Description of Artificial Sequence: Synthetic oligonucleotide
  Antisense strand to SEQ ID NO: 1911968
uuucuuacgggcuguguag

SEQ ID NO: 1911970 - RNA, 19 nt, Artificial Sequence
  Description of Artificial Sequence: Synthetic oligonucleotide
  Sense strand starting at position 2748 of SEQ ID NO: 1879504
guaagaaauuuguaaucac

SEQ ID NO: 1911971 - RNA, 19 nt, Artificial Sequence
  Description of Artificial Sequence: Synthetic oligonucleotide
  Antisense strand to SEQ ID NO: 1911970
gugauuacaaauuucuuac

SEQ ID NO: 1911972 - RNA, 19 nt, Artificial Sequence
  Description of Artificial Sequence: Synthetic oligonucleotide
  Sense strand starting at position 2882 of SEQ ID NO: 1879504
gcaguuuagcaggacauau

SEQ ID NO: 1911973 - RNA, 19 nt, Artificial Sequence
  Description of Artificial Sequence: Synthetic oligonucleotide
  Antisense strand to SEQ ID NO: 1911972
auauguccugcuaaacugc

SEQ ID NO: 1911974 - RNA, 19 nt, Artificial Sequence
  Description of Artificial Sequence: Synthetic oligonucleotide
  Sense strand starting at position 2884 of SEQ ID NO: 1879504
aguuuagcaggacauauau

SEQ ID NO: 1911975 - RNA, 19 nt, Artificial Sequence
  Description of Artificial Sequence: Synthetic oligonucleotide
  Antisense strand to SEQ ID NO: 1911974
auauauguccugcuaaacu

SEQ ID NO: 1911976 - RNA, 19 nt, Artificial Sequence
  Description of Artificial Sequence: Synthetic oligonucleotide
  Sense strand starting at position 2907 of SEQ ID NO: 1879504
aagagauucugaguagcca

SEQ ID NO: 1911977 - RNA, 19 nt, Artificial Sequence
  Description of Artificial Sequence: Synthetic oligonucleotide
  Antisense strand to SEQ ID NO: 1911976
uggcuacucagaaucucuu

SEQ ID NO: 1911978 - RNA, 19 nt, Artificial Sequence
  Description of Artificial Sequence: Synthetic oligonucleotide
  Sense strand starting at position 3128 of SEQ ID NO: 1879504
gcaccuuuagaaugaaagu

SEQ ID NO: 1911979 - RNA, 19 nt, Artificial Sequence
  Description of Artificial Sequence: Synthetic oligonucleotide
  Antisense strand to SEQ ID NO: 1911978
acuuucauucuaaaggugc

SEQ ID NO: 1911980 - RNA, 19 nt, Artificial Sequence
  Description of Artificial Sequence: Synthetic oligonucleotide
  Sense strand starting at position 3246 of SEQ ID NO: 1879504
gaaguauuauuugacugaa

SEQ ID NO: 1911981 - RNA, 19 nt, Artificial Sequence
  Description of Artificial Sequence: Synthetic oligonucleotide
  Antisense strand to SEQ ID NO: 1911980
uucagucaaauaauacuuc

SEQ ID NO: 1911982 - RNA, 19 nt, Artificial Sequence
  Description of Artificial Sequence: Synthetic oligonucleotide
  Sense strand starting at position 3301 of SEQ ID NO: 1879504
ugagguaucuacuuauucu

SEQ ID NO: 1911983 - RNA, 19 nt, Artificial Sequence
  Description of Artificial Sequence: Synthetic oligonucleotide
  Antisense strand to SEQ ID NO: 1911982
agaauaaguagauaccuca

SEQ ID NO: 1911984 - RNA, 19 nt, Artificial Sequence
  Description of Artificial Sequence: Synthetic oligonucleotide
  Sense strand starting at position 3328 of SEQ ID NO: 1879504
agacaagucugacuccagu

SEQ ID NO: 1911985 - RNA, 19 nt, Artificial Sequence
  Description of Artificial Sequence: Synthetic oligonucleotide
  Antisense strand to SEQ ID NO: 1911984
acuggagucagacuugucu

SEQ ID NO: 1911986 - RNA, 19 nt, Artificial Sequence
  Description of Artificial Sequence: Synthetic oligonucleotide
  Sense strand starting at position 3420 of SEQ ID NO: 1879504
auuugaguuucccuuugua

SEQ ID NO: 1911987 - RNA, 19 nt, Artificial Sequence
  Description of Artificial Sequence: Synthetic oligonucleotide
  Antisense strand to SEQ ID NO: 1911986
uacaaagggaaacucaaau

SEQ ID NO: 1911988 - RNA, 19 nt, Artificial Sequence
  Description of Artificial Sequence: Synthetic oligonucleotide
  Sense strand starting at position 3621 of SEQ ID NO: 1879504
agguuuauauaccuagauu

SEQ ID NO: 1911989 - RNA, 19 nt, Artificial Sequence
  Description of Artificial Sequence: Synthetic oligonucleotide
  Antisense strand to SEQ ID NO: 1911988
aaucuagguauauaaaccu

SEQ ID NO: 1911990 - RNA, 19 nt, Artificial Sequence
  Description of Artificial Sequence: Synthetic oligonucleotide
  Sense strand starting at position 3642 of SEQ ID NO: 1879504
ucacauacacugugucaua

SEQ ID NO: 1911991 - RNA, 19 nt, Artificial Sequence
  Description of Artificial Sequence: Synthetic oligonucleotide
  Antisense strand to SEQ ID NO: 1911990
uaugacacaguguauguga

SEQ ID NO: 1911992 - RNA, 19 nt, Artificial Sequence
  Description of Artificial Sequence: Synthetic oligonucleotide
  Sense strand starting at position 3919 of SEQ ID NO: 1879504
ggacaagaguuugaauuug

SEQ ID NO: 1911993 - RNA, 19 nt, Artificial Sequence
  Description of Artificial Sequence: Synthetic oligonucleotide
  Antisense strand to SEQ ID NO: 1911992
caaauucaaacucuugucc

SEQ ID NO: 1911994 - RNA, 19 nt, Artificial Sequence
  Description of Artificial Sequence: Synthetic oligonucleotide
  Sense strand starting at position 3972 of SEQ ID NO: 1879504
aagauugaaggcugccuua

SEQ ID NO: 1911995 - RNA, 19 nt, Artificial Sequence
  Description of Artificial Sequence: Synthetic oligonucleotide
  Antisense strand to SEQ ID NO: 1911994
uaaggcagccuucaaucuu

SEQ ID NO: 1911996 - RNA, 19 nt, Artificial Sequence
  Description of Artificial Sequence: Synthetic oligonucleotide
  Sense strand starting at position 3975 of SEQ ID NO: 1879504
auugaaggcugccuuaaua

SEQ ID NO: 1911997 - RNA, 19 nt, Artificial Sequence
  Description of Artificial Sequence: Synthetic oligonucleotide
  Antisense strand to SEQ ID NO: 1911996
uauuaaggcagccuucaau

SEQ ID NO: 1911998 - RNA, 19 nt, Artificial Sequence
  Description of Artificial Sequence: Synthetic oligonucleotide
  Sense strand starting at position 335 of SEQ ID NO: 1879505
gggaauaggaguugaguca

SEQ ID NO: 1911999 - RNA, 19 nt, Artificial Sequence
  Description of Artificial Sequence: Synthetic oligonucleotide
  Antisense strand to SEQ ID NO: 1911998
ugacucaacuccuauuccc

SEQ ID NO: 1912000 - RNA, 19 nt, Artificial Sequence
  Description of Artificial Sequence: Synthetic oligonucleotide
  Sense strand starting at position 476 of SEQ ID NO: 1879505
gacacauaguuguuugauu

SEQ ID NO: 1912001 - RNA, 19 nt, Artificial Sequence
  Description of Artificial Sequence: Synthetic oligonucleotide
  Antisense strand to SEQ ID NO: 1912000
aaucaaacaacuauguguc

SEQ ID NO: 1912002 - RNA, 19 nt, Artificial Sequence
  Description of Artificial Sequence: Synthetic oligonucleotide
  Sense strand starting at position 622 of SEQ ID NO: 1879505
uguuuaaugucaucuauga

SEQ ID NO: 1912003 - RNA, 19 nt, Artificial Sequence
  Description of Artificial Sequence: Synthetic oligonucleotide
  Antisense strand to SEQ ID NO: 1912002
ucauagaugacauuaaaca

SEQ ID NO: 1912004 - RNA, 19 nt, Artificial Sequence
  Description of Artificial Sequence: Synthetic oligonucleotide
  Sense strand starting at position 626 of SEQ ID NO: 1879505
uaaugucaucuaugaggcu

SEQ ID NO: 1912005 - RNA, 19 nt, Artificial Sequence
  Description of Artificial Sequence: Synthetic oligonucleotide
  Antisense strand to SEQ ID NO: 1912004
agccucauagaugacauua

SEQ ID NO: 1912006 - RNA, 19 nt, Artificial Sequence
  Description of Artificial Sequence: Synthetic oligonucleotide
  Sense strand starting at position 650 of SEQ ID NO: 1879505
gugucugagccaggacaua

SEQ ID NO: 1912007 - RNA, 19 nt, Artificial Sequence
  Description of Artificial Sequence: Synthetic oligonucleotide
  Antisense strand to SEQ ID NO: 1912006
uauguccuggcucagacac

SEQ ID NO: 1912008 - RNA, 19 nt, Artificial Sequence
  Description of Artificial Sequence: Synthetic oligonucleotide
  Sense strand starting at position 1074 of SEQ ID NO: 1879505
ugagccagaccuugaagaa

SEQ ID NO: 1912009 - RNA, 19 nt, Artificial Sequence
  Description of Artificial Sequence: Synthetic oligonucleotide
  Antisense strand to SEQ ID NO: 1912008
uucuucaaggucuggcuca

SEQ ID NO: 1912010 - RNA, 19 nt, Artificial Sequence
  Description of Artificial Sequence: Synthetic oligonucleotide
  Sense strand starting at position 1129 of SEQ ID NO: 1879505
uguucugggcagcaugaaa

SEQ ID NO: 1912011 - RNA, 19 nt, Artificial Sequence
  Description of Artificial Sequence: Synthetic oligonucleotide
  Antisense strand to SEQ ID NO: 1912010
uuucaugcugcccagaaca

SEQ ID NO: 1912012 - RNA, 19 nt, Artificial Sequence
  Description of Artificial Sequence: Synthetic oligonucleotide
  Sense strand starting at position 1550 of SEQ ID NO: 1879505
gagucaugacagggagcaa

SEQ ID NO: 1912013 - RNA, 19 nt, Artificial Sequence
  Description of Artificial Sequence: Synthetic oligonucleotide
  Antisense strand to SEQ ID NO: 1912012
uugcucccugucaugacuc

SEQ ID NO: 1912014 - RNA, 19 nt, Artificial Sequence
  Description of Artificial Sequence: Synthetic oligonucleotide
  Sense strand starting at position 1572 of SEQ ID NO: 1879505
uguauucaagggugguaca

SEQ ID NO: 1912015 - RNA, 19 nt, Artificial Sequence
  Description of Artificial Sequence: Synthetic oligonucleotide
  Antisense strand to SEQ ID NO: 1912014
uguaccacccuugaauaca

SEQ ID NO: 1912016 - RNA, 19 nt, Artificial Sequence
  Description of Artificial Sequence: Synthetic oligonucleotide
  Sense strand starting at position 1573 of SEQ ID NO: 1879505
guauucaagggugguacau

SEQ ID NO: 1912017 - RNA, 19 nt, Artificial Sequence
  Description of Artificial Sequence: Synthetic oligonucleotide
  Antisense strand to SEQ ID NO: 1912016
auguaccacccuugaauac

SEQ ID NO: 1912018 - RNA, 19 nt, Artificial Sequence
  Description of Artificial Sequence: Synthetic oligonucleotide
  Sense strand starting at position 1585 of SEQ ID NO: 1879505
gguacauguuacccuagaa

SEQ ID NO: 1912019 - RNA, 19 nt, Artificial Sequence
  Description of Artificial Sequence: Synthetic oligonucleotide
  Antisense strand to SEQ ID NO: 1912018
uucuaggguaacauguacc

SEQ ID NO: 1912020 - RNA, 19 nt, Artificial Sequence
  Description of Artificial Sequence: Synthetic oligonucleotide
  Sense strand starting at position 1621 of SEQ ID NO: 1879505
ccgucuuaaagaggaagaa

SEQ ID NO: 1912021 - RNA, 19 nt, Artificial Sequence
  Description of Artificial Sequence: Synthetic oligonucleotide
  Antisense strand to SEQ ID NO: 1912020
uucuuccucuuuaagacgg

SEQ ID NO: 1912022 - RNA, 19 nt, Artificial Sequence
  Description of Artificial Sequence: Synthetic oligonucleotide
  Sense strand starting at position 1652 of SEQ ID NO: 1879505
auagguauuuagcagaaga

SEQ ID NO: 1912023 - RNA, 19 nt, Artificial Sequence
  Description of Artificial Sequence: Synthetic oligonucleotide
  Antisense strand to SEQ ID NO: 1912022
ucuucugcuaaauaccuau

SEQ ID NO: 1912024 - RNA, 19 nt, Artificial Sequence
  Description of Artificial Sequence: Synthetic oligonucleotide
  Sense strand starting at position 2030 of SEQ ID NO: 1879505
gcuugaauuugagacccau

SEQ ID NO: 1912025 - RNA, 19 nt, Artificial Sequence
  Description of Artificial Sequence: Synthetic oligonucleotide
  Antisense strand to SEQ ID NO: 1912024
augggucucaaauucaagc

SEQ ID NO: 1912026 - RNA, 19 nt, Artificial Sequence
  Description of Artificial Sequence: Synthetic oligonucleotide
  Sense strand starting at position 2101 of SEQ ID NO: 1879505
aaaggauucuuggucccua

SEQ ID NO: 1912027 - RNA, 19 nt, Artificial Sequence
  Description of Artificial Sequence: Synthetic oligonucleotide
  Antisense strand to SEQ ID NO: 1912026
uagggaccaagaauccuuu

SEQ ID NO: 1912028 - RNA, 19 nt, Artificial Sequence
  Description of Artificial Sequence: Synthetic oligonucleotide
  Sense strand starting at position 2320 of SEQ ID NO: 1879505
agaaguuaguucuuugaua

SEQ ID NO: 1912029 - RNA, 19 nt, Artificial Sequence
  Description of Artificial Sequence: Synthetic oligonucleotide
  Antisense strand to SEQ ID NO: 1912028
uaucaaagaacuaacuucu

SEQ ID NO: 1912030 - RNA, 19 nt, Artificial Sequence
  Description of Artificial Sequence: Synthetic oligonucleotide
  Sense strand starting at position 2321 of SEQ ID NO: 1879505
gaaguuaguucuuugauag

SEQ ID NO: 1912031 - RNA, 19 nt, Artificial Sequence
  Description of Artificial Sequence: Synthetic oligonucleotide
  Antisense strand to SEQ ID NO: 1912030
cuaucaaagaacuaacuuc

SEQ ID NO: 1912032 - RNA, 19 nt, Artificial Sequence
  Description of Artificial Sequence: Synthetic oligonucleotide
  Sense strand starting at position 2427 of SEQ ID NO: 1879505
gugccuguugcagaggaga

SEQ ID NO: 1912033 - RNA, 19 nt, Artificial Sequence
  Description of Artificial Sequence: Synthetic oligonucleotide
  Antisense strand to SEQ ID NO: 1912032
ucuccucugcaacaggcac

SEQ ID NO: 1912034 - RNA, 19 nt, Artificial Sequence
  Description of Artificial Sequence: Synthetic oligonucleotide
  Sense strand starting at position 2607 of SEQ ID NO: 1879505
acagcauuucccuguugau

SEQ ID NO: 1912035 - RNA, 19 nt, Artificial Sequence
  Description of Artificial Sequence: Synthetic oligonucleotide
  Antisense strand to SEQ ID NO: 1912034
aucaacagggaaaugcugu

SEQ ID NO: 1912036 - RNA, 19 nt, Artificial Sequence
  Description of Artificial Sequence: Synthetic oligonucleotide
  Sense strand starting at position 2733 of SEQ ID NO: 1879505
guuuauuucucuuccucga

SEQ ID NO: 1912037 - RNA, 19 nt, Artificial Sequence
  Description of Artificial Sequence: Synthetic oligonucleotide
  Antisense strand to SEQ ID NO: 1912036
ucgaggaagagaaauaaac

SEQ ID NO: 1912038 - RNA, 19 nt, Artificial Sequence
  Description of Artificial Sequence: Synthetic oligonucleotide
  Sense strand starting at position 2839 of SEQ ID NO: 1879505
gugcaaugacaugaucgua

SEQ ID NO: 1912039 - RNA, 19 nt, Artificial Sequence
  Description of Artificial Sequence: Synthetic oligonucleotide
  Antisense strand to SEQ ID NO: 1912038
uacgaucaugucauugcac

SEQ ID NO: 1912040 - RNA, 19 nt, Artificial Sequence
  Description of Artificial Sequence: Synthetic oligonucleotide
  Sense strand starting at position 3097 of SEQ ID NO: 1879505
agaagaguuccagggcuau

SEQ ID NO: 1912041 - RNA, 19 nt, Artificial Sequence
  Description of Artificial Sequence: Synthetic oligonucleotide
  Antisense strand to SEQ ID NO: 1912040
auagcccuggaacucuucu

SEQ ID NO: 1912042 - RNA, 19 nt, Artificial Sequence
  Description of Artificial Sequence: Synthetic oligonucleotide
  Sense strand starting at position 3112 of SEQ ID NO: 1879505
cuaugacuguuagccaaga

SEQ ID NO: 1912043 - RNA, 19 nt, Artificial Sequence
  Description of Artificial Sequence: Synthetic oligonucleotide
  Antisense strand to SEQ ID NO: 1912042
ucuuggcuaacagucauag

SEQ ID NO: 1912044 - RNA, 19 nt, Artificial Sequence
  Description of Artificial Sequence: Synthetic oligonucleotide
  Sense strand starting at position 3113 of SEQ ID NO: 1879505
uaugacuguuagccaagau

SEQ ID NO: 1912045 - RNA, 19 nt, Artificial Sequence
  Description of Artificial Sequence: Synthetic oligonucleotide
  Antisense strand to SEQ ID NO: 1912044
aucuuggcuaacagucaua

SEQ ID NO: 1912046 - RNA, 19 nt, Artificial Sequence
  Description of Artificial Sequence: Synthetic oligonucleotide
  Sense strand starting at position 3114 of SEQ ID NO: 1879505
augacuguuagccaagaug

SEQ ID NO: 1912047 - RNA, 19 nt, Artificial Sequence
  Description of Artificial Sequence: Synthetic oligonucleotide
  Antisense strand to SEQ ID NO: 1912046
caucuuggcuaacagucau

SEQ ID NO: 1912048 - RNA, 19 nt, Artificial Sequence
  Description of Artificial Sequence: Synthetic oligonucleotide
  Sense strand starting at position 3117 of SEQ ID NO: 1879505
acuguuagccaagauguca

SEQ ID NO: 1912049 - RNA, 19 nt, Artificial Sequence
  Description of Artificial Sequence: Synthetic oligonucleotide
  Antisense strand to SEQ ID NO: 1912048
ugacaucuuggcuaacagu

SEQ ID NO: 1912050 - RNA, 19 nt, Artificial Sequence
  Description of Artificial Sequence: Synthetic oligonucleotide
  Sense strand starting at position 3126 of SEQ ID NO: 1879505
caagaugucagacguguaa

SEQ ID NO: 1912051 - RNA, 19 nt, Artificial Sequence
  Description of Artificial Sequence: Synthetic oligonucleotide
  Antisense strand to SEQ ID NO: 1912050
uuacacgucugacaucuug

SEQ ID NO: 1912052 - RNA, 19 nt, Artificial Sequence
  Description of Artificial Sequence: Synthetic oligonucleotide
  Sense strand starting at position 3135 of SEQ ID NO: 1879505
agacguguaaugggaaugu

SEQ ID NO: 1912053 - RNA, 19 nt, Artificial Sequence
  Description of Artificial Sequence: Synthetic oligonucleotide
  Antisense strand to SEQ ID NO: 1912052
acauucccauuacacgucu

SEQ ID NO: 1912054 - RNA, 19 nt, Artificial Sequence
  Description of Artificial Sequence: Synthetic oligonucleotide
  Sense strand starting at position 3144 of SEQ ID NO: 1879505
augggaauguuggccauca

SEQ ID NO: 1912055 - RNA, 19 nt, Artificial Sequence
  Description of Artificial Sequence: Synthetic oligonucleotide
  Antisense strand to SEQ ID NO: 1912054
ugauggccaacauucccau

SEQ ID NO: 1912056 - RNA, 19 nt, Artificial Sequence
  Description of Artificial Sequence: Synthetic oligonucleotide
  Sense strand starting at position 3146 of SEQ ID NO: 1879505
gggaauguuggccaucacu

SEQ ID NO: 1912057 - RNA, 19 nt, Artificial Sequence
  Description of Artificial Sequence: Synthetic oligonucleotide
  Antisense strand to SEQ ID NO: 1912056
agugauggccaacauuccc

SEQ ID NO: 1912058 - RNA, 19 nt, Artificial Sequence
  Description of Artificial Sequence: Synthetic oligonucleotide
  Sense strand starting at position 3524 of SEQ ID NO: 1879505
ugaauaaggcauuauuguu

SEQ ID NO: 1912059 - RNA, 19 nt, Artificial Sequence
  Description of Artificial Sequence: Synthetic oligonucleotide
  Antisense strand to SEQ ID NO: 1912058
aacaauaaugccuuauuca

SEQ ID NO: 1912060 - RNA, 19 nt, Artificial Sequence
  Description of Artificial Sequence: Synthetic oligonucleotide
  Sense strand starting at position 3530 of SEQ ID NO: 1879505
aggcauuauuguuuacaac

SEQ ID NO: 1912061 - RNA, 19 nt, Artificial Sequence
  Description of Artificial Sequence: Synthetic oligonucleotide
  Antisense strand to SEQ ID NO: 1912060
guuguaaacaauaaugccu

SEQ ID NO: 1912062 - RNA, 19 nt, Artificial Sequence
  Description of Artificial Sequence: Synthetic oligonucleotide
  Sense strand starting at position 3531 of SEQ ID NO: 1879505
ggcauuauuguuuacaaca

SEQ ID NO: 1912063 - RNA, 19 nt, Artificial Sequence
  Description of Artificial Sequence: Synthetic oligonucleotide
  Antisense strand to SEQ ID NO: 1912062
uguuguaaacaauaaugcc

SEQ ID NO: 1912064 - RNA, 19 nt, Artificial Sequence
  Description of Artificial Sequence: Synthetic oligonucleotide
  Sense strand starting at position 3561 of SEQ ID NO: 1879505
agauaagguucuccuuauu

SEQ ID NO: 1912065 - RNA, 19 nt, Artificial Sequence
  Description of Artificial Sequence: Synthetic oligonucleotide
  Antisense strand to SEQ ID NO: 1912064
aauaaggagaaccuuaucu

SEQ ID NO: 1912066 - RNA, 19 nt, Artificial Sequence
  Description of Artificial Sequence: Synthetic oligonucleotide
  Sense strand starting at position 3597 of SEQ ID NO: 1879505
guggucacucaagaacauu

SEQ ID NO: 1912067 - RNA, 19 nt, Artificial Sequence
  Description of Artificial Sequence: Synthetic oligonucleotide
  Antisense strand to SEQ ID NO: 1912066
aauguucuugagugaccac

SEQ ID NO: 1912068 - RNA, 19 nt, Artificial Sequence
  Description of Artificial Sequence: Synthetic oligonucleotide
  Sense strand starting at position 3675 of SEQ ID NO: 1879505
gagacaguuugacucgguu

SEQ ID NO: 1912069 - RNA, 19 nt, Artificial Sequence
  Description of Artificial Sequence: Synthetic oligonucleotide
  Antisense strand to SEQ ID NO: 1912068
aaccgagucaaacugucuc

SEQ ID NO: 1912070 - RNA, 19 nt, Artificial Sequence
  Description of Artificial Sequence: Synthetic oligonucleotide
  Sense strand starting at position 3677 of SEQ ID NO: 1879505
gacaguuugacucgguuaa

SEQ ID NO: 1912071 - RNA, 19 nt, Artificial Sequence
  Description of Artificial Sequence: Synthetic oligonucleotide
  Antisense strand to SEQ ID NO: 1912070
uuaaccgagucaaacuguc

SEQ ID NO: 1912072 - RNA, 19 nt, Artificial Sequence
  Description of Artificial Sequence: Synthetic oligonucleotide
  Sense strand starting at position 3678 of SEQ ID NO: 1879505
acaguuugacucgguuaaa

SEQ ID NO: 1912073 - RNA, 19 nt, Artificial Sequence
  Description of Artificial Sequence: Synthetic oligonucleotide
  Antisense strand to SEQ ID NO: 1912072
uuuaaccgagucaaacugu

SEQ ID NO: 1912074 - RNA, 19 nt, Artificial Sequence
  Description of Artificial Sequence: Synthetic oligonucleotide
  Sense strand starting at position 3679 of SEQ ID NO: 1879505
caguuugacucgguuaaag

SEQ ID NO: 1912075 - RNA, 19 nt, Artificial Sequence
  Description of Artificial Sequence: Synthetic oligonucleotide
  Antisense strand to SEQ ID NO: 1912074
cuuuaaccgagucaaacug

SEQ ID NO: 1912076 - RNA, 19 nt, Artificial Sequence
  Description of Artificial Sequence: Synthetic oligonucleotide
  Sense strand starting at position 3681 of SEQ ID NO: 1879505
guuugacucgguuaaagca

SEQ ID NO: 1912077 - RNA, 19 nt, Artificial Sequence
  Description of Artificial Sequence: Synthetic oligonucleotide
  Antisense strand to SEQ ID NO: 1912076
ugcuuuaaccgagucaaac

SEQ ID NO: 1912078 - RNA, 19 nt, Artificial Sequence
  Description of Artificial Sequence: Synthetic oligonucleotide
  Sense strand starting at position 46 of SEQ ID NO: 1879506
agaggaagcuaugccugua

SEQ ID NO: 1912079 - RNA, 19 nt, Artificial Sequence
  Description of Artificial Sequence: Synthetic oligonucleotide
  Antisense strand to SEQ ID NO: 1912078
uacaggcauagcuuccucu

SEQ ID NO: 1912080 - RNA, 19 nt, Artificial Sequence
  Description of Artificial Sequence: Synthetic oligonucleotide
  Sense strand starting at position 61 of SEQ ID NO: 1879506
uguauuccugcccauagaa

SEQ ID NO: 1912081 - RNA, 19 nt, Artificial Sequence
  Description of Artificial Sequence: Synthetic oligonucleotide
  Antisense strand to SEQ ID NO: 1912080
uucuaugggcaggaauaca

SEQ ID NO: 1912082 - RNA, 19 nt, Artificial Sequence
  Description of Artificial Sequence: Synthetic oligonucleotide
  Sense strand starting at position 119 of SEQ ID NO: 1879506
guaauauugcuacacagca

SEQ ID NO: 1912083 - RNA, 19 nt, Artificial Sequence
  Description of Artificial Sequence: Synthetic oligonucleotide
  Antisense strand to SEQ ID NO: 1912082
ugcuguguagcaauauuac

SEQ ID NO: 1912084 - RNA, 19 nt, Artificial Sequence
  Description of Artificial Sequence: Synthetic oligonucleotide
  Sense strand starting at position 278 of SEQ ID NO: 1879506
ucaaauaagugguuggaua

SEQ ID NO: 1912085 - RNA, 19 nt, Artificial Sequence
  Description of Artificial Sequence: Synthetic oligonucleotide
  Antisense strand to SEQ ID NO: 1912084
uauccaaccacuuauuuga

SEQ ID NO: 1912086 - RNA, 19 nt, Artificial Sequence
  Description of Artificial Sequence: Synthetic oligonucleotide
  Sense strand starting at position 279 of SEQ ID NO: 1879506
caaauaagugguuggauau

SEQ ID NO: 1912087 - RNA, 19 nt, Artificial Sequence
  Description of Artificial Sequence: Synthetic oligonucleotide
  Antisense strand to SEQ ID NO: 1912086
auauccaaccacuuauuug

SEQ ID NO: 1912088 - RNA, 19 nt, Artificial Sequence
  Description of Artificial Sequence: Synthetic oligonucleotide
  Sense strand starting at position 280 of SEQ ID NO: 1879506
aaauaagugguuggauaug

SEQ ID NO: 1912089 - RNA, 19 nt, Artificial Sequence
  Description of Artificial Sequence: Synthetic oligonucleotide
  Antisense strand to SEQ ID NO: 1912088
cauauccaaccacuuauuu

SEQ ID NO: 1912090 - RNA, 19 nt, Artificial Sequence
  Description of Artificial Sequence: Synthetic oligonucleotide
  Sense strand starting at position 285 of SEQ ID NO: 1879506
agugguuggauaugcacau

SEQ ID NO: 1912091 - RNA, 19 nt, Artificial Sequence
  Description of Artificial Sequence: Synthetic oligonucleotide
  Antisense strand to SEQ ID NO: 1912090
augugcauauccaaccacu

SEQ ID NO: 1912092 - RNA, 19 nt, Artificial Sequence
  Description of Artificial Sequence: Synthetic oligonucleotide
  Sense strand starting at position 286 of SEQ ID NO: 1879506
gugguuggauaugcacaua

SEQ ID NO: 1912093 - RNA, 19 nt, Artificial Sequence
  Description of Artificial Sequence: Synthetic oligonucleotide
  Antisense strand to SEQ ID NO: 1912092
uaugugcauauccaaccac

SEQ ID NO: 1912094 - RNA, 19 nt, Artificial Sequence
  Description of Artificial Sequence: Synthetic oligonucleotide
  Sense strand starting at position 352 of SEQ ID NO: 1879506
uuccuuuauccagaugugu

SEQ ID NO: 1912095 - RNA, 19 nt, Artificial Sequence
  Description of Artificial Sequence: Synthetic oligonucleotide
  Antisense strand to SEQ ID NO: 1912094
acacaucuggauaaaggaa

SEQ ID NO: 1912096 - RNA, 19 nt, Artificial Sequence
  Description of Artificial Sequence: Synthetic oligonucleotide
  Sense strand starting at position 739 of SEQ ID NO: 1879506
gaauauggauuuggagaaa

SEQ ID NO: 1912097 - RNA, 19 nt, Artificial Sequence
  Description of Artificial Sequence: Synthetic oligonucleotide
  Antisense strand to SEQ ID NO: 1912096
uuucuccaaauccauauuc

SEQ ID NO: 1912098 - RNA, 19 nt, Artificial Sequence
  Description of Artificial Sequence: Synthetic oligonucleotide
  Sense strand starting at position 751 of SEQ ID NO: 1879506
ggagaaagguuggaauuug

SEQ ID NO: 1912099 - RNA, 19 nt, Artificial Sequence
  Description of Artificial Sequence: Synthetic oligonucleotide
  Antisense strand to SEQ ID NO: 1912098
caaauuccaaccuuucucc

SEQ ID NO: 1912100 - RNA, 19 nt, Artificial Sequence
  Description of Artificial Sequence: Synthetic oligonucleotide
  Sense strand starting at position 783 of SEQ ID NO: 1879506
cuacucaugggcugagaaa

SEQ ID NO: 1912101 - RNA, 19 nt, Artificial Sequence
  Description of Artificial Sequence: Synthetic oligonucleotide
  Antisense strand to SEQ ID NO: 1912100
uuucucagcccaugaguag

SEQ ID NO: 1912102 - RNA, 19 nt, Artificial Sequence
  Description of Artificial Sequence: Synthetic oligonucleotide
  Sense strand starting at position 864 of SEQ ID NO: 1879506
cuccuaauguuguuuaaac

SEQ ID NO: 1912103 - RNA, 19 nt, Artificial Sequence
  Description of Artificial Sequence: Synthetic oligonucleotide
  Antisense strand to SEQ ID NO: 1912102
guuuaaacaacauuaggag

SEQ ID NO: 1912104 - RNA, 19 nt, Artificial Sequence
  Description of Artificial Sequence: Synthetic oligonucleotide
  Sense strand starting at position 865 of SEQ ID NO: 1879506
uccuaauguuguuuaaaca

SEQ ID NO: 1912105 - RNA, 19 nt, Artificial Sequence
  Description of Artificial Sequence: Synthetic oligonucleotide
  Antisense strand to SEQ ID NO: 1912104
uguuuaaacaacauuagga

SEQ ID NO: 1912106 - RNA, 19 nt, Artificial Sequence
  Description of Artificial Sequence: Synthetic oligonucleotide
  Sense strand starting at position 866 of SEQ ID NO: 1879506
ccuaauguuguuuaaacau

SEQ ID NO: 1912107 - RNA, 19 nt, Artificial Sequence
  Description of Artificial Sequence: Synthetic oligonucleotide
  Antisense strand to SEQ ID NO: 1912106
auguuuaaacaacauuagg

SEQ ID NO: 1912108 - RNA, 19 nt, Artificial Sequence
  Description of Artificial Sequence: Synthetic oligonucleotide
  Sense strand starting at position 924 of SEQ ID NO: 1879506
gcacauagcagguauggua

SEQ ID NO: 1912109 - RNA, 19 nt, Artificial Sequence
  Description of Artificial Sequence: Synthetic oligonucleotide
  Antisense strand to SEQ ID NO: 1912108
uaccauaccugcuaugugc

SEQ ID NO: 1912110 - RNA, 19 nt, Artificial Sequence
  Description of Artificial Sequence: Synthetic oligonucleotide
  Sense strand starting at position 1101 of SEQ ID NO: 1879506
ccagacacaucugucuuua

SEQ ID NO: 1912111 - RNA, 19 nt, Artificial Sequence
  Description of Artificial Sequence: Synthetic oligonucleotide
  Antisense strand to SEQ ID NO: 1912110
uaaagacagaugugucugg

SEQ ID NO: 1912112 - RNA, 19 nt, Artificial Sequence
  Description of Artificial Sequence: Synthetic oligonucleotide
  Sense strand starting at position 1601 of SEQ ID NO: 1879506
aaggcauuguuguuacuaa

SEQ ID NO: 1912113 - RNA, 19 nt, Artificial Sequence
  Description of Artificial Sequence: Synthetic oligonucleotide
  Antisense strand to SEQ ID NO: 1912112
uuaguaacaacaaugccuu

SEQ ID NO: 1912114 - RNA, 19 nt, Artificial Sequence
  Description of Artificial Sequence: Synthetic oligonucleotide
  Sense strand starting at position 1662 of SEQ ID NO: 1879506
ugcagcaauuaauuguaua

SEQ ID NO: 1912115 - RNA, 19 nt, Artificial Sequence
  Description of Artificial Sequence: Synthetic oligonucleotide
  Antisense strand to SEQ ID NO: 1912114
uauacaauuaauugcugca

SEQ ID NO: 1912116 - RNA, 19 nt, Artificial Sequence
  Description of Artificial Sequence: Synthetic oligonucleotide
  Sense strand starting at position 1715 of SEQ ID NO: 1879506
cuguguuucccauagguga

SEQ ID NO: 1912117 - RNA, 19 nt, Artificial Sequence
  Description of Artificial Sequence: Synthetic oligonucleotide
  Antisense strand to SEQ ID NO: 1912116
ucaccuaugggaaacacag

SEQ ID NO: 1912118 - RNA, 19 nt, Artificial Sequence
  Description of Artificial Sequence: Synthetic oligonucleotide
  Sense strand starting at position 1758 of SEQ ID NO: 1879506
cugacuauccaugggcuua

SEQ ID NO: 1912119 - RNA, 19 nt, Artificial Sequence
  Description of Artificial Sequence: Synthetic oligonucleotide
  Antisense strand to SEQ ID NO: 1912118
uaagcccauggauagucag

SEQ ID NO: 1912120 - RNA, 19 nt, Artificial Sequence
  Description of Artificial Sequence: Synthetic oligonucleotide
  Sense strand starting at position 2015 of SEQ ID NO: 1879506
ugcuguguucuauagauuc

SEQ ID NO: 1912121 - RNA, 19 nt, Artificial Sequence
  Description of Artificial Sequence: Synthetic oligonucleotide
  Antisense strand to SEQ ID NO: 1912120
gaaucuauagaacacagca

SEQ ID NO: 1912122 - RNA, 19 nt, Artificial Sequence
  Description of Artificial Sequence: Synthetic oligonucleotide
  Sense strand starting at position 3085 of SEQ ID NO: 1879506
gccgacucuugcuuuauuu

SEQ ID NO: 1912123 - RNA, 19 nt, Artificial Sequence
  Description of Artificial Sequence: Synthetic oligonucleotide
  Antisense strand to SEQ ID NO: 1912122
aaauaaagcaagagucggc

SEQ ID NO: 1912124 - RNA, 19 nt, Artificial Sequence
  Description of Artificial Sequence: Synthetic oligonucleotide
  Sense strand starting at position 3160 of SEQ ID NO: 1879506
uucugaacucagcacagau

SEQ ID NO: 1912125 - RNA, 19 nt, Artificial Sequence
  Description of Artificial Sequence: Synthetic oligonucleotide
  Antisense strand to SEQ ID NO: 1912124
aucugugcugaguucagaa

SEQ ID NO: 1912126 - RNA, 19 nt, Artificial Sequence
  Description of Artificial Sequence: Synthetic oligonucleotide
  Sense strand starting at position 3239 of SEQ ID NO: 1879506
ucaguaaagcaauaacgua

SEQ ID NO: 1912127 - RNA, 19 nt, Artificial Sequence
  Description of Artificial Sequence: Synthetic oligonucleotide
  Antisense strand to SEQ ID NO: 1912126
uacguuauugcuuuacuga

SEQ ID NO: 1912128 - RNA, 19 nt, Artificial Sequence
  Description of Artificial Sequence: Synthetic oligonucleotide
  Sense strand starting at position 3249 of SEQ ID NO: 1879506
aauaacguacguugaaauu

SEQ ID NO: 1912129 - RNA, 19 nt, Artificial Sequence
  Description of Artificial Sequence: Synthetic oligonucleotide
  Antisense strand to SEQ ID NO: 1912128
aauuucaacguacguuauu

SEQ ID NO: 1912130 - RNA, 19 nt, Artificial Sequence
  Description of Artificial Sequence: Synthetic oligonucleotide
  Sense strand starting at position 3300 of SEQ ID NO: 1879506
uuuccuguuccuugaagga

SEQ ID NO: 1912131 - RNA, 19 nt, Artificial Sequence
  Description of Artificial Sequence: Synthetic oligonucleotide
  Antisense strand to SEQ ID NO: 1912130
uccuucaaggaacaggaaa

SEQ ID NO: 1912132 - RNA, 19 nt, Artificial Sequence
  Description of Artificial Sequence: Synthetic oligonucleotide
  Sense strand starting at position 3373 of SEQ ID NO: 1879506
cggaaaugguugcucaaug

SEQ ID NO: 1912133 - RNA, 19 nt, Artificial Sequence
  Description of Artificial Sequence: Synthetic oligonucleotide
  Antisense strand to SEQ ID NO: 1912132
cauugagcaaccauuuccg

SEQ ID NO: 1912134 - RNA, 19 nt, Artificial Sequence
  Description of Artificial Sequence: Synthetic oligonucleotide
  Sense strand starting at position 3374 of SEQ ID NO: 1879506
ggaaaugguugcucaauga

SEQ ID NO: 1912135 - RNA, 19 nt, Artificial Sequence
  Description of Artificial Sequence: Synthetic oligonucleotide
  Antisense strand to SEQ ID NO: 1912134
ucauugagcaaccauuucc

SEQ ID NO: 1912136 - RNA, 19 nt, Artificial Sequence
  Description of Artificial Sequence: Synthetic oligonucleotide
  Sense strand starting at position 3378 of SEQ ID NO: 1879506
augguugcucaaugaauac

SEQ ID NO: 1912137 - RNA, 19 nt, Artificial Sequence
  Description of Artificial Sequence: Synthetic oligonucleotide
  Antisense strand to SEQ ID NO: 1912136
guauucauugagcaaccau

SEQ ID NO: 1912138 - RNA, 19 nt, Artificial Sequence
  Description of Artificial Sequence: Synthetic oligonucleotide
  Sense strand starting at position 3561 of SEQ ID NO: 1879506
ggagaaauuuacuaaccac

SEQ ID NO: 1912139 - RNA, 19 nt, Artificial Sequence
  Description of Artificial Sequence: Synthetic oligonucleotide
  Antisense strand to SEQ ID NO: 1912138
gugguuaguaaauuucucc

SEQ ID NO: 1912140 - RNA, 19 nt, Artificial Sequence
  Description of Artificial Sequence: Synthetic oligonucleotide
  Sense strand starting at position 3614 of SEQ ID NO: 1879506
ugguucuuauuaucuucua

SEQ ID NO: 1912141 - RNA, 19 nt, Artificial Sequence
  Description of Artificial Sequence: Synthetic oligonucleotide
  Antisense strand to SEQ ID NO: 1912140
uagaagauaauaagaacca

SEQ ID NO: 1912142 - RNA, 19 nt, Artificial Sequence
  Description of Artificial Sequence: Synthetic oligonucleotide
  Sense strand starting at position 3615 of SEQ ID NO: 1879506
gguucuuauuaucuucuau

SEQ ID NO: 1912143 - RNA, 19 nt, Artificial Sequence
  Description of Artificial Sequence: Synthetic oligonucleotide
  Antisense strand to SEQ ID NO: 1912142
auagaagauaauaagaacc

SEQ ID NO: 1912144 - RNA, 19 nt, Artificial Sequence
  Description of Artificial Sequence: Synthetic oligonucleotide
  Sense strand starting at position 3642 of SEQ ID NO: 1879506
uuguuaauuguaugacauc

SEQ ID NO: 1912145 - RNA, 19 nt, Artificial Sequence
  Description of Artificial Sequence: Synthetic oligonucleotide
  Antisense strand to SEQ ID NO: 1912144
gaugucauacaauuaacaa

SEQ ID NO: 1912146 - RNA, 19 nt, Artificial Sequence
  Description of Artificial Sequence: Synthetic oligonucleotide
  Sense strand starting at position 3739 of SEQ ID NO: 1879506
guuagaagauggcugacau

SEQ ID NO: 1912147 - RNA, 19 nt, Artificial Sequence
  Description of Artificial Sequence: Synthetic oligonucleotide
  Antisense strand to SEQ ID NO: 1912146
augucagccaucuucuaac

SEQ ID NO: 1912148 - RNA, 19 nt, Artificial Sequence
  Description of Artificial Sequence: Synthetic oligonucleotide
  Sense strand starting at position 3740 of SEQ ID NO: 1879506
uuagaagauggcugacaua

SEQ ID NO: 1912149 - RNA, 19 nt, Artificial Sequence
  Description of Artificial Sequence: Synthetic oligonucleotide
  Antisense strand to SEQ ID NO: 1912148
uaugucagccaucuucuaa

SEQ ID NO: 1912150 - RNA, 19 nt, Artificial Sequence
  Description of Artificial Sequence: Synthetic oligonucleotide
  Sense strand starting at position 3803 of SEQ ID NO: 1879506
aauugauguuaacuagcga

SEQ ID NO: 1912151 - RNA, 19 nt, Artificial Sequence
  Description of Artificial Sequence: Synthetic oligonucleotide
  Antisense strand to SEQ ID NO: 1912150
ucgcuaguuaacaucaauu

SEQ ID NO: 1912152 - RNA, 19 nt, Artificial Sequence
  Description of Artificial Sequence: Synthetic oligonucleotide
  Sense strand starting at position 3804 of SEQ ID NO: 1879506
auugauguuaacuagcgaa

SEQ ID NO: 1912153 - RNA, 19 nt, Artificial Sequence
  Description of Artificial Sequence: Synthetic oligonucleotide
  Antisense strand to SEQ ID NO: 1912152
uucgcuaguuaacaucaau

SEQ ID NO: 1912154 - RNA, 19 nt, Artificial Sequence
  Description of Artificial Sequence: Synthetic oligonucleotide
  Sense strand starting at position 3850 of SEQ ID NO: 1879506
gagauuugagcauguucgu

SEQ ID NO: 1912155 - RNA, 19 nt, Artificial Sequence
  Description of Artificial Sequence: Synthetic oligonucleotide
  Antisense strand to SEQ ID NO: 1912154
acgaacaugcucaaaucuc

SEQ ID NO: 1912156 - RNA, 19 nt, Artificial Sequence
  Description of Artificial Sequence: Synthetic oligonucleotide
  Sense strand starting at position 3853 of SEQ ID NO: 1879506
auuugagcauguucguaaa

SEQ ID NO: 1912157 - RNA, 19 nt, Artificial Sequence
  Description of Artificial Sequence: Synthetic oligonucleotide
  Antisense strand to SEQ ID NO: 1912156
uuuacgaacaugcucaaau

SEQ ID NO: 1912158 - RNA, 19 nt, Artificial Sequence
  Description of Artificial Sequence: Synthetic oligonucleotide
  Sense strand starting at position 1 of SEQ ID NO: 1879508
uguugaguuccauagugua

SEQ ID NO: 1912159 - RNA, 19 nt, Artificial Sequence
  Description of Artificial Sequence: Synthetic oligonucleotide
  Antisense strand to SEQ ID NO: 1912158
uacacuauggaacucaaca

SEQ ID NO: 1912160 - RNA, 19 nt, Artificial Sequence
  Description of Artificial Sequence: Synthetic oligonucleotide
  Sense strand starting at position 56 of SEQ ID NO: 1879508
ugauguuauugaucaugga

SEQ ID NO: 1912161 - RNA, 19 nt, Artificial Sequence
  Description of Artificial Sequence: Synthetic oligonucleotide
  Antisense strand to SEQ ID NO: 1912160
uccaugaucaauaacauca

SEQ ID NO: 1912162 - RNA, 19 nt, Artificial Sequence
  Description of Artificial Sequence: Synthetic oligonucleotide
  Sense strand starting at position 60 of SEQ ID NO: 1879508
guuauugaucauggaguug

SEQ ID NO: 1912163 - RNA, 19 nt, Artificial Sequence
  Description of Artificial Sequence: Synthetic oligonucleotide
  Antisense strand to SEQ ID NO: 1912162
caacuccaugaucaauaac

SEQ ID NO: 1912164 - RNA, 19 nt, Artificial Sequence
  Description of Artificial Sequence: Synthetic oligonucleotide
  Sense strand starting at position 79 of SEQ ID NO: 1879508
ccaagaggugugcacaauu

SEQ ID NO: 1912165 - RNA, 19 nt, Artificial Sequence
  Description of Artificial Sequence: Synthetic oligonucleotide
  Antisense strand to SEQ ID NO: 1912164
aauugugcacaccucuugg

SEQ ID NO: 1912166 - RNA, 19 nt, Artificial Sequence
  Description of Artificial Sequence: Synthetic oligonucleotide
  Sense strand starting at position 155 of SEQ ID NO: 1879508
ucguuaauuucugcucuua

SEQ ID NO: 1912167 - RNA, 19 nt, Artificial Sequence
  Description of Artificial Sequence: Synthetic oligonucleotide
  Antisense strand to SEQ ID NO: 1912166
uaagagcagaaauuaacga

SEQ ID NO: 1912168 - RNA, 19 nt, Artificial Sequence
  Description of Artificial Sequence: Synthetic oligonucleotide
  Sense strand starting at position 440 of SEQ ID NO: 1879508
uuaaaugcacuguaguaaa

SEQ ID NO: 1912169 - RNA, 19 nt, Artificial Sequence
  Description of Artificial Sequence: Synthetic oligonucleotide
  Antisense strand to SEQ ID NO: 1912168
uuuacuacagugcauuuaa

SEQ ID NO: 1912170 - RNA, 19 nt, Artificial Sequence
  Description of Artificial Sequence: Synthetic oligonucleotide
  Sense strand starting at position 523 of SEQ ID NO: 1879508
uguggugaugugucugcuu

SEQ ID NO: 1912171 - RNA, 19 nt, Artificial Sequence
  Description of Artificial Sequence: Synthetic oligonucleotide
  Antisense strand to SEQ ID NO: 1912170
aagcagacacaucaccaca

SEQ ID NO: 1912172 - RNA, 19 nt, Artificial Sequence
  Description of Artificial Sequence: Synthetic oligonucleotide
  Sense strand starting at position 567 of SEQ ID NO: 1879508
ggucguguuguucuguaca

SEQ ID NO: 1912173 - RNA, 19 nt, Artificial Sequence
  Description of Artificial Sequence: Synthetic oligonucleotide
  Antisense strand to SEQ ID NO: 1912172
uguacagaacaacacgacc

SEQ ID NO: 1912174 - RNA, 19 nt, Artificial Sequence
  Description of Artificial Sequence: Synthetic oligonucleotide
  Sense strand starting at position 572 of SEQ ID NO: 1879508
uguuguucuguacauauua

SEQ ID NO: 1912175 - RNA, 19 nt, Artificial Sequence
  Description of Artificial Sequence: Synthetic oligonucleotide
  Antisense strand to SEQ ID NO: 1912174
uaauauguacagaacaaca

SEQ ID NO: 1912176 - RNA, 19 nt, Artificial Sequence
  Description of Artificial Sequence: Synthetic oligonucleotide
  Sense strand starting at position 617 of SEQ ID NO: 1879508
ucacguuuccuauauccuu

SEQ ID NO: 1912177 - RNA, 19 nt, Artificial Sequence
  Description of Artificial Sequence: Synthetic oligonucleotide
  Antisense strand to SEQ ID NO: 1912176
aaggauauaggaaacguga

SEQ ID NO: 1912178 - RNA, 19 nt, Artificial Sequence
  Description of Artificial Sequence: Synthetic oligonucleotide
  Sense strand starting at position 651 of SEQ ID NO: 1879508
agucuuaacgauuagugag

SEQ ID NO: 1912179 - RNA, 19 nt, Artificial Sequence
  Description of Artificial Sequence: Synthetic oligonucleotide
  Antisense strand to SEQ ID NO: 1912178
cucacuaaucguuaagacu

SEQ ID NO: 1912180 - RNA, 19 nt, Artificial Sequence
  Description of Artificial Sequence: Synthetic oligonucleotide
  Sense strand starting at position 653 of SEQ ID NO: 1879508
ucuuaacgauuagugagaa

SEQ ID NO: 1912181 - RNA, 19 nt, Artificial Sequence
  Description of Artificial Sequence: Synthetic oligonucleotide
  Antisense strand to SEQ ID NO: 1912180
uucucacuaaucguuaaga

SEQ ID NO: 1912182 - RNA, 19 nt, Artificial Sequence
  Description of Artificial Sequence: Synthetic oligonucleotide
  Sense strand starting at position 877 of SEQ ID NO: 1879508
guaaacugacgucaauaga

SEQ ID NO: 1912183 - RNA, 19 nt, Artificial Sequence
  Description of Artificial Sequence: Synthetic oligonucleotide
  Antisense strand to SEQ ID NO: 1912182
ucuauugacgucaguuuac

SEQ ID NO: 1912184 - RNA, 19 nt, Artificial Sequence
  Description of Artificial Sequence: Synthetic oligonucleotide
  Sense strand starting at position 886 of SEQ ID NO: 1879508
cgucaauagacaugaugua

SEQ ID NO: 1912185 - RNA, 19 nt, Artificial Sequence
  Description of Artificial Sequence: Synthetic oligonucleotide
  Antisense strand to SEQ ID NO: 1912184
uacaucaugucuauugacg

SEQ ID NO: 1912186 - RNA, 19 nt, Artificial Sequence
  Description of Artificial Sequence: Synthetic oligonucleotide
  Sense strand starting at position 935 of SEQ ID NO: 1879508
guaacuccacuaugagagu

SEQ ID NO: 1912187 - RNA, 19 nt, Artificial Sequence
  Description of Artificial Sequence: Synthetic oligonucleotide
  Antisense strand to SEQ ID NO: 1912186
acucucauaguggaguuac

SEQ ID NO: 1912188 - RNA, 19 nt, Artificial Sequence
  Description of Artificial Sequence: Synthetic oligonucleotide
  Sense strand starting at position 941 of SEQ ID NO: 1879508
ccacuaugagagugcauua

SEQ ID NO: 1912189 - RNA, 19 nt, Artificial Sequence
  Description of Artificial Sequence: Synthetic oligonucleotide
  Antisense strand to SEQ ID NO: 1912188
uaaugcacucucauagugg

SEQ ID NO: 1912190 - RNA, 19 nt, Artificial Sequence
  Description of Artificial Sequence: Synthetic oligonucleotide
  Sense strand starting at position 946 of SEQ ID NO: 1879508
augagagugcauuaacuau

SEQ ID NO: 1912191 - RNA, 19 nt, Artificial Sequence
  Description of Artificial Sequence: Synthetic oligonucleotide
  Antisense strand to SEQ ID NO: 1912190
auaguuaaugcacucucau

SEQ ID NO: 1912192 - RNA, 19 nt, Artificial Sequence
  Description of Artificial Sequence: Synthetic oligonucleotide
  Sense strand starting at position 1156 of SEQ ID NO: 1879508
gugccagaugacugaccau

SEQ ID NO: 1912193 - RNA, 19 nt, Artificial Sequence
  Description of Artificial Sequence: Synthetic oligonucleotide
  Antisense strand to SEQ ID NO: 1912192
auggucagucaucuggcac

SEQ ID NO: 1912194 - RNA, 19 nt, Artificial Sequence
  Description of Artificial Sequence: Synthetic oligonucleotide
  Sense strand starting at position 1564 of SEQ ID NO: 1879508
gcaguaagccguguucuca

SEQ ID NO: 1912195 - RNA, 19 nt, Artificial Sequence
  Description of Artificial Sequence: Synthetic oligonucleotide
  Antisense strand to SEQ ID NO: 1912194
ugagaacacggcuuacugc

SEQ ID NO: 1912196 - RNA, 19 nt, Artificial Sequence
  Description of Artificial Sequence: Synthetic oligonucleotide
  Sense strand starting at position 1772 of SEQ ID NO: 1879508
ugcgaugauauauacguau

SEQ ID NO: 1912197 - RNA, 19 nt, Artificial Sequence
  Description of Artificial Sequence: Synthetic oligonucleotide
  Antisense strand to SEQ ID NO: 1912196
auacguauauaucaucgca

SEQ ID NO: 1912198 - RNA, 19 nt, Artificial Sequence
  Description of Artificial Sequence: Synthetic oligonucleotide
  Sense strand starting at position 1774 of SEQ ID NO: 1879508
cgaugauauauacguauau

SEQ ID NO: 1912199 - RNA, 19 nt, Artificial Sequence
  Description of Artificial Sequence: Synthetic oligonucleotide
  Antisense strand to SEQ ID NO: 1912198
auauacguauauaucaucg

SEQ ID NO: 1912200 - RNA, 19 nt, Artificial Sequence
  Description of Artificial Sequence: Synthetic oligonucleotide
  Sense strand starting at position 2305 of SEQ ID NO: 1879508
cgggcucggagagaauaaa

SEQ ID NO: 1912201 - RNA, 19 nt, Artificial Sequence
  Description of Artificial Sequence: Synthetic oligonucleotide
  Antisense strand to SEQ ID NO: 1912200
uuuauucucuccgagcccg

SEQ ID NO: 1912202 - RNA, 19 nt, Artificial Sequence
  Description of Artificial Sequence: Synthetic oligonucleotide
  Sense strand starting at position 2404 of SEQ ID NO: 1879508
caaaucacacagugugaga

SEQ ID NO: 1912203 - RNA, 19 nt, Artificial Sequence
  Description of Artificial Sequence: Synthetic oligonucleotide
  Antisense strand to SEQ ID NO: 1912202
ucucacacugugugauuug

SEQ ID NO: 1912204 - RNA, 19 nt, Artificial Sequence
  Description of Artificial Sequence: Synthetic oligonucleotide
  Sense strand starting at position 2406 of SEQ ID NO: 1879508
aaucacacagugugagaua

SEQ ID NO: 1912205 - RNA, 19 nt, Artificial Sequence
  Description of Artificial Sequence: Synthetic oligonucleotide
  Antisense strand to SEQ ID NO: 1912204
uaucucacacugugugauu

SEQ ID NO: 1912206 - RNA, 19 nt, Artificial Sequence
  Description of Artificial Sequence: Synthetic oligonucleotide
  Sense strand starting at position 2878 of SEQ ID NO: 1879508
cucucugaggcaugucaau

SEQ ID NO: 1912207 - RNA, 19 nt, Artificial Sequence
  Description of Artificial Sequence: Synthetic oligonucleotide
  Antisense strand to SEQ ID NO: 1912206
auugacaugccucagagag

SEQ ID NO: 1912208 - RNA, 19 nt, Artificial Sequence
  Description of Artificial Sequence: Synthetic oligonucleotide
  Sense strand starting at position 2904 of SEQ ID NO: 1879508
uucuuugaggcgcagagaa

SEQ ID NO: 1912209 - RNA, 19 nt, Artificial Sequence
  Description of Artificial Sequence: Synthetic oligonucleotide
  Antisense strand to SEQ ID NO: 1912208
uucucugcgccucaaagaa

SEQ ID NO: 1912210 - RNA, 19 nt, Artificial Sequence
  Description of Artificial Sequence: Synthetic oligonucleotide
  Sense strand starting at position 2954 of SEQ ID NO: 1879508
gcacuuacaucagcuagau

SEQ ID NO: 1912211 - RNA, 19 nt, Artificial Sequence
  Description of Artificial Sequence: Synthetic oligonucleotide
  Antisense strand to SEQ ID NO: 1912210
aucuagcugauguaagugc

SEQ ID NO: 1912212 - RNA, 19 nt, Artificial Sequence
  Description of Artificial Sequence: Synthetic oligonucleotide
  Sense strand starting at position 2963 of SEQ ID NO: 1879508
ucagcuagaucuuuggaga

SEQ ID NO: 1912213 - RNA, 19 nt, Artificial Sequence
  Description of Artificial Sequence: Synthetic oligonucleotide
  Antisense strand to SEQ ID NO: 1912212
ucuccaaagaucuagcuga

SEQ ID NO: 1912214 - RNA, 19 nt, Artificial Sequence
  Description of Artificial Sequence: Synthetic oligonucleotide
  Sense strand starting at position 2964 of SEQ ID NO: 1879508
cagcuagaucuuuggagaa

SEQ ID NO: 1912215 - RNA, 19 nt, Artificial Sequence
  Description of Artificial Sequence: Synthetic oligonucleotide
  Antisense strand to SEQ ID NO: 1912214
uucuccaaagaucuagcug

SEQ ID NO: 1912216 - RNA, 19 nt, Artificial Sequence
  Description of Artificial Sequence: Synthetic oligonucleotide
  Sense strand starting at position 3181 of SEQ ID NO: 1879508
uccuguaagucaucauaua

SEQ ID NO: 1912217 - RNA, 19 nt, Artificial Sequence
  Description of Artificial Sequence: Synthetic oligonucleotide
  Antisense strand to SEQ ID NO: 1912216
uauaugaugacuuacagga

SEQ ID NO: 1912218 - RNA, 19 nt, Artificial Sequence
  Description of Artificial Sequence: Synthetic oligonucleotide
  Sense strand starting at position 3182 of SEQ ID NO: 1879508
ccuguaagucaucauauac

SEQ ID NO: 1912219 - RNA, 19 nt, Artificial Sequence
  Description of Artificial Sequence: Synthetic oligonucleotide
  Antisense strand to SEQ ID NO: 1912218
guauaugaugacuuacagg

SEQ ID NO: 1912220 - RNA, 19 nt, Artificial Sequence
  Description of Artificial Sequence: Synthetic oligonucleotide
  Sense strand starting at position 3217 of SEQ ID NO: 1879508
ggaguuugguaagcagaag

SEQ ID NO: 1912221 - RNA, 19 nt, Artificial Sequence
  Description of Artificial Sequence: Synthetic oligonucleotide
  Antisense strand to SEQ ID NO: 1912220
cuucugcuuaccaaacucc

SEQ ID NO: 1912222 - RNA, 19 nt, Artificial Sequence
  Description of Artificial Sequence: Synthetic oligonucleotide
  Sense strand starting at position 3218 of SEQ ID NO: 1879508
gaguuugguaagcagaaga

SEQ ID NO: 1912223 - RNA, 19 nt, Artificial Sequence
  Description of Artificial Sequence: Synthetic oligonucleotide
  Antisense strand to SEQ ID NO: 1912222
ucuucugcuuaccaaacuc

SEQ ID NO: 1912224 - RNA, 19 nt, Artificial Sequence
  Description of Artificial Sequence: Synthetic oligonucleotide
  Sense strand starting at position 3244 of SEQ ID NO: 1879508
gguucauaugguggauucu

SEQ ID NO: 1912225 - RNA, 19 nt, Artificial Sequence
  Description of Artificial Sequence: Synthetic oligonucleotide
  Antisense strand to SEQ ID NO: 1912224
agaauccaccauaugaacc

SEQ ID NO: 1912226 - RNA, 19 nt, Artificial Sequence
  Description of Artificial Sequence: Synthetic oligonucleotide
  Sense strand starting at position 3709 of SEQ ID NO: 1879508
guuauucucuaucuccaga

SEQ ID NO: 1912227 - RNA, 19 nt, Artificial Sequence
  Description of Artificial Sequence: Synthetic oligonucleotide
  Antisense strand to SEQ ID NO: 1912226
ucuggagauagagaauaac

SEQ ID NO: 1912228 - RNA, 19 nt, Artificial Sequence
  Description of Artificial Sequence: Synthetic oligonucleotide
  Sense strand starting at position 3740 of SEQ ID NO: 1879508
agcucagagcauugaagua

SEQ ID NO: 1912229 - RNA, 19 nt, Artificial Sequence
  Description of Artificial Sequence: Synthetic oligonucleotide
  Antisense strand to SEQ ID NO: 1912228
uacuucaaugcucugagcu

SEQ ID NO: 1912230 - RNA, 19 nt, Artificial Sequence
  Description of Artificial Sequence: Synthetic oligonucleotide
  Sense strand starting at position 3835 of SEQ ID NO: 1879508
cuuggauuugccugugcuu

SEQ ID NO: 1912231 - RNA, 19 nt, Artificial Sequence
  Description of Artificial Sequence: Synthetic oligonucleotide
  Antisense strand to SEQ ID NO: 1912230
aagcacaggcaaauccaag

SEQ ID NO: 1912232 - RNA, 19 nt, Artificial Sequence
  Description of Artificial Sequence: Synthetic oligonucleotide
  Sense strand starting at position 3859 of SEQ ID NO: 1879508
cugucuuaugcugcugcaa

SEQ ID NO: 1912233 - RNA, 19 nt, Artificial Sequence
  Description of Artificial Sequence: Synthetic oligonucleotide
  Antisense strand to SEQ ID NO: 1912232
uugcagcagcauaagacag

SEQ ID NO: 1912234 - RNA, 19 nt, Artificial Sequence
  Description of Artificial Sequence: Synthetic oligonucleotide
  Sense strand starting at position 3880 of SEQ ID NO: 1879508
uauaccauguaguuggaaa

SEQ ID NO: 1912235 - RNA, 19 nt, Artificial Sequence
  Description of Artificial Sequence: Synthetic oligonucleotide
  Antisense strand to SEQ ID NO: 1912234
uuuccaacuacaugguaua

SEQ ID NO: 1912236 - RNA, 19 nt, Artificial Sequence
  Description of Artificial Sequence: Synthetic oligonucleotide
  Sense strand starting at position 3980 of SEQ ID NO: 1879508
acaagaaggcugugaugca

SEQ ID NO: 1912237 - RNA, 19 nt, Artificial Sequence
  Description of Artificial Sequence: Synthetic oligonucleotide
  Antisense strand to SEQ ID NO: 1912236
ugcaucacagccuucuugu

SEQ ID NO: 1912238 - RNA, 19 nt, Artificial Sequence
  Description of Artificial Sequence: Synthetic oligonucleotide
  Sense strand starting at position 54 of SEQ ID NO: 1879507
uguggugugcuagugaguu

SEQ ID NO: 1912239 - RNA, 19 nt, Artificial Sequence
  Description of Artificial Sequence: Synthetic oligonucleotide
  Antisense strand to SEQ ID NO: 1912238
aacucacuagcacaccaca

SEQ ID NO: 1912240 - RNA, 19 nt, Artificial Sequence
  Description of Artificial Sequence: Synthetic oligonucleotide
  Sense strand starting at position 66 of SEQ ID NO: 1879507
gugaguuagcuccaaacau

SEQ ID NO: 1912241 - RNA, 19 nt, Artificial Sequence
  Description of Artificial Sequence: Synthetic oligonucleotide
  Antisense strand to SEQ ID NO: 1912240
auguuuggagcuaacucac

SEQ ID NO: 1912242 - RNA, 19 nt, Artificial Sequence
  Description of Artificial Sequence: Synthetic oligonucleotide
  Sense strand starting at position 94 of SEQ ID NO: 1879507
gcuuguugauuuccauagu

SEQ ID NO: 1912243 - RNA, 19 nt, Artificial Sequence
  Description of Artificial Sequence: Synthetic oligonucleotide
  Antisense strand to SEQ ID NO: 1912242
acuauggaaaucaacaagc

SEQ ID NO: 1912244 - RNA, 19 nt, Artificial Sequence
  Description of Artificial Sequence: Synthetic oligonucleotide
  Sense strand starting at position 120 of SEQ ID NO: 1879507
gucccaucaugguugacuu

SEQ ID NO: 1912245 - RNA, 19 nt, Artificial Sequence
  Description of Artificial Sequence: Synthetic oligonucleotide
  Antisense strand to SEQ ID NO: 1912244
aagucaaccaugaugggac

SEQ ID NO: 1912246 - RNA, 19 nt, Artificial Sequence
  Description of Artificial Sequence: Synthetic oligonucleotide
  Sense strand starting at position 151 of SEQ ID NO: 1879507
uugaauuggcuccaaacau

SEQ ID NO: 1912247 - RNA, 19 nt, Artificial Sequence
  Description of Artificial Sequence: Synthetic oligonucleotide
  Antisense strand to SEQ ID NO: 1912246
auguuuggagccaauucaa

SEQ ID NO: 1912248 - RNA, 19 nt, Artificial Sequence
  Description of Artificial Sequence: Synthetic oligonucleotide
  Sense strand starting at position 191 of SEQ ID NO: 1879507
uguugaguuccauagugua

SEQ ID NO: 1912249 - RNA, 19 nt, Artificial Sequence
  Description of Artificial Sequence: Synthetic oligonucleotide
  Antisense strand to SEQ ID NO: 1912248
uacacuauggaacucaaca

SEQ ID NO: 1912250 - RNA, 19 nt, Artificial Sequence
  Description of Artificial Sequence: Synthetic oligonucleotide
  Sense strand starting at position 246 of SEQ ID NO: 1879507
ugauguuauugaucaugga

SEQ ID NO: 1912251 - RNA, 19 nt, Artificial Sequence
  Description of Artificial Sequence: Synthetic oligonucleotide
  Antisense strand to SEQ ID NO: 1912250
uccaugaucaauaacauca

SEQ ID NO: 1912252 - RNA, 19 nt, Artificial Sequence
  Description of Artificial Sequence: Synthetic oligonucleotide
  Sense strand starting at position 250 of SEQ ID NO: 1879507
guuauugaucauggaguug

SEQ ID NO: 1912253 - RNA, 19 nt, Artificial Sequence
  Description of Artificial Sequence: Synthetic oligonucleotide
  Antisense strand to SEQ ID NO: 1912252
caacuccaugaucaauaac

SEQ ID NO: 1912254 - RNA, 19 nt, Artificial Sequence
  Description of Artificial Sequence: Synthetic oligonucleotide
  Sense strand starting at position 269 of SEQ ID NO: 1879507
ccaagaggugugcacaauu

SEQ ID NO: 1912255 - RNA, 19 nt, Artificial Sequence
  Description of Artificial Sequence: Synthetic oligonucleotide
  Antisense strand to SEQ ID NO: 1912254
aauugugcacaccucuugg

SEQ ID NO: 1912256 - RNA, 19 nt, Artificial Sequence
  Description of Artificial Sequence: Synthetic oligonucleotide
  Sense strand starting at position 345 of SEQ ID NO: 1879507
ucguuaauuucugcucuua

SEQ ID NO: 1912257 - RNA, 19 nt, Artificial Sequence
  Description of Artificial Sequence: Synthetic oligonucleotide
  Antisense strand to SEQ ID NO: 1912256
uaagagcagaaauuaacga

SEQ ID NO: 1912258 - RNA, 19 nt, Artificial Sequence
  Description of Artificial Sequence: Synthetic oligonucleotide
  Sense strand starting at position 630 of SEQ ID NO: 1879507
uuaaaugcacuguaguaaa

SEQ ID NO: 1912259 - RNA, 19 nt, Artificial Sequence
  Description of Artificial Sequence: Synthetic oligonucleotide
  Antisense strand to SEQ ID NO: 1912258
uuuacuacagugcauuuaa

SEQ ID NO: 1912260 - RNA, 19 nt, Artificial Sequence
  Description of Artificial Sequence: Synthetic oligonucleotide
  Sense strand starting at position 713 of SEQ ID NO: 1879507
uguggugaugugucugcuu

SEQ ID NO: 1912261 - RNA, 19 nt, Artificial Sequence
  Description of Artificial Sequence: Synthetic oligonucleotide
  Antisense strand to SEQ ID NO: 1912260
aagcagacacaucaccaca

SEQ ID NO: 1912262 - RNA, 19 nt, Artificial Sequence
  Description of Artificial Sequence: Synthetic oligonucleotide
  Sense strand starting at position 757 of SEQ ID NO: 1879507
ggucguguuguucuguaca

SEQ ID NO: 1912263 - RNA, 19 nt, Artificial Sequence
  Description of Artificial Sequence: Synthetic oligonucleotide
  Antisense strand to SEQ ID NO: 1912262
uguacagaacaacacgacc

SEQ ID NO: 1912264 - RNA, 19 nt, Artificial Sequence
  Description of Artificial Sequence: Synthetic oligonucleotide
  Sense strand starting at position 762 of SEQ ID NO: 1879507
uguuguucuguacauauua

SEQ ID NO: 1912265 - RNA, 19 nt, Artificial Sequence
  Description of Artificial Sequence: Synthetic oligonucleotide
  Antisense strand to SEQ ID NO: 1912264
uaauauguacagaacaaca

SEQ ID NO: 1912266 - RNA, 19 nt, Artificial Sequence
  Description of Artificial Sequence: Synthetic oligonucleotide
  Sense strand starting at position 807 of SEQ ID NO: 1879507
ucacguuuccuauauccuu

SEQ ID NO: 1912267 - RNA, 19 nt, Artificial Sequence
  Description of Artificial Sequence: Synthetic oligonucleotide
  Antisense strand to SEQ ID NO: 1912266
aaggauauaggaaacguga

SEQ ID NO: 1912268 - RNA, 19 nt, Artificial Sequence
  Description of Artificial Sequence: Synthetic oligonucleotide
  Sense strand starting at position 841 of SEQ ID NO: 1879507
agucuuaacgauuagugag

SEQ ID NO: 1912269 - RNA, 19 nt, Artificial Sequence
  Description of Artificial Sequence: Synthetic oligonucleotide
  Antisense strand to SEQ ID NO: 1912268
cucacuaaucguuaagacu

SEQ ID NO: 1912270 - RNA, 19 nt, Artificial Sequence
  Description of Artificial Sequence: Synthetic oligonucleotide
  Sense strand starting at position 843 of SEQ ID NO: 1879507
ucuuaacgauuagugagaa

SEQ ID NO: 1912271 - RNA, 19 nt, Artificial Sequence
  Description of Artificial Sequence: Synthetic oligonucleotide
  Antisense strand to SEQ ID NO: 1912270
uucucacuaaucguuaaga

SEQ ID NO: 1912272 - RNA, 19 nt, Artificial Sequence
  Description of Artificial Sequence: Synthetic oligonucleotide
  Sense strand starting at position 1067 of SEQ ID NO: 1879507
guaaacugacgucaauaga

SEQ ID NO: 1912273 - RNA, 19 nt, Artificial Sequence
  Description of Artificial Sequence: Synthetic oligonucleotide
  Antisense strand to SEQ ID NO: 1912272
ucuauugacgucaguuuac

SEQ ID NO: 1912274 - RNA, 19 nt, Artificial Sequence
  Description of Artificial Sequence: Synthetic oligonucleotide
  Sense strand starting at position 1076 of SEQ ID NO: 1879507
cgucaauagacaugaugua

SEQ ID NO: 1912275 - RNA, 19 nt, Artificial Sequence
  Description of Artificial Sequence: Synthetic oligonucleotide
  Antisense strand to SEQ ID NO: 1912274
uacaucaugucuauugacg

SEQ ID NO: 1912276 - RNA, 19 nt, Artificial Sequence
  Description of Artificial Sequence: Synthetic oligonucleotide
  Sense strand starting at position 1125 of SEQ ID NO: 1879507
guaacuccacuaugagagu

SEQ ID NO: 1912277 - RNA, 19 nt, Artificial Sequence
  Description of Artificial Sequence: Synthetic oligonucleotide
  Antisense strand to SEQ ID NO: 1912276
acucucauaguggaguuac

SEQ ID NO: 1912278 - RNA, 19 nt, Artificial Sequence
  Description of Artificial Sequence: Synthetic oligonucleotide
  Sense strand starting at position 1131 of SEQ ID NO: 1879507
ccacuaugagagugcauua

SEQ ID NO: 1912279 - RNA, 19 nt, Artificial Sequence
  Description of Artificial Sequence: Synthetic oligonucleotide
  Antisense strand to SEQ ID NO: 1912278
uaaugcacucucauagugg

SEQ ID NO: 1912280 - RNA, 19 nt, Artificial Sequence
  Description of Artificial Sequence: Synthetic oligonucleotide
  Sense strand starting at position 1136 of SEQ ID NO: 1879507
augagagugcauuaacuau

SEQ ID NO: 1912281 - RNA, 19 nt, Artificial Sequence
  Description of Artificial Sequence: Synthetic oligonucleotide
  Antisense strand to SEQ ID NO: 1912280
auaguuaaugcacucucau

SEQ ID NO: 1912282 - RNA, 19 nt, Artificial Sequence
  Description of Artificial Sequence: Synthetic oligonucleotide
  Sense strand starting at position 1346 of SEQ ID NO: 1879507
gugccagaugacugaccau

SEQ ID NO: 1912283 - RNA, 19 nt, Artificial Sequence
  Description of Artificial Sequence: Synthetic oligonucleotide
  Antisense strand to SEQ ID NO: 1912282
auggucagucaucuggcac

SEQ ID NO: 1912284 - RNA, 19 nt, Artificial Sequence
  Description of Artificial Sequence: Synthetic oligonucleotide
  Sense strand starting at position 1754 of SEQ ID NO: 1879507
gcaguaagccguguucuca

SEQ ID NO: 1912285 - RNA, 19 nt, Artificial Sequence
  Description of Artificial Sequence: Synthetic oligonucleotide
  Antisense strand to SEQ ID NO: 1912284
ugagaacacggcuuacugc

SEQ ID NO: 1912286 - RNA, 19 nt, Artificial Sequence
  Description of Artificial Sequence: Synthetic oligonucleotide
  Sense strand starting at position 1962 of SEQ ID NO: 1879507
ugcgaugauauauacguau

SEQ ID NO: 1912287 - RNA, 19 nt, Artificial Sequence
  Description of Artificial Sequence: Synthetic oligonucleotide
  Antisense strand to SEQ ID NO: 1912286
auacguauauaucaucgca

SEQ ID NO: 1912288 - RNA, 19 nt, Artificial Sequence
  Description of Artificial Sequence: Synthetic oligonucleotide
  Sense strand starting at position 1964 of SEQ ID NO: 1879507
cgaugauauauacguauau

SEQ ID NO: 1912289 - RNA, 19 nt, Artificial Sequence
  Description of Artificial Sequence: Synthetic oligonucleotide
  Antisense strand to SEQ ID NO: 1912288
auauacguauauaucaucg

SEQ ID NO: 1912290 - RNA, 19 nt, Artificial Sequence
  Description of Artificial Sequence: Synthetic oligonucleotide
  Sense strand starting at position 2495 of SEQ ID NO: 1879507
cgggcucggagagaauaaa

SEQ ID NO: 1912291 - RNA, 19 nt, Artificial Sequence
  Description of Artificial Sequence: Synthetic oligonucleotide
  Antisense strand to SEQ ID NO: 1912290
uuuauucucuccgagcccg

SEQ ID NO: 1912292 - RNA, 19 nt, Artificial Sequence
  Description of Artificial Sequence: Synthetic oligonucleotide
  Sense strand starting at position 2594 of SEQ ID NO: 1879507
caaaucacacagugugaga

SEQ ID NO: 1912293 - RNA, 19 nt, Artificial Sequence
  Description of Artificial Sequence: Synthetic oligonucleotide
  Antisense strand to SEQ ID NO: 1912292
ucucacacugugugauuug

SEQ ID NO: 1912294 - RNA, 19 nt, Artificial Sequence
  Description of Artificial Sequence: Synthetic oligonucleotide
  Sense strand starting at position 2596 of SEQ ID NO: 1879507
aaucacacagugugagaua

SEQ ID NO: 1912295 - RNA, 19 nt, Artificial Sequence
  Description of Artificial Sequence: Synthetic oligonucleotide
  Antisense strand to SEQ ID NO: 1912294
uaucucacacugugugauu

SEQ ID NO: 1912296 - RNA, 19 nt, Artificial Sequence
  Description of Artificial Sequence: Synthetic oligonucleotide
  Sense strand starting at position 3094 of SEQ ID NO: 1879507
uucuuugaggcgcagagaa

SEQ ID NO: 1912297 - RNA, 19 nt, Artificial Sequence
  Description of Artificial Sequence: Synthetic oligonucleotide
  Antisense strand to SEQ ID NO: 1912296
uucucugcgccucaaagaa

SEQ ID NO: 1912298 - RNA, 19 nt, Artificial Sequence
  Description of Artificial Sequence: Synthetic oligonucleotide
  Sense strand starting at position 3144 of SEQ ID NO: 1879507
gcacuuacaucagcuagau

SEQ ID NO: 1912299 - RNA, 19 nt, Artificial Sequence
  Description of Artificial Sequence: Synthetic oligonucleotide
  Antisense strand to SEQ ID NO: 1912298
aucuagcugauguaagugc

SEQ ID NO: 1912300 - RNA, 19 nt, Artificial Sequence
  Description of Artificial Sequence: Synthetic oligonucleotide
  Sense strand starting at position 3153 of SEQ ID NO: 1879507
ucagcuagaucuuuggaga

SEQ ID NO: 1912301 - RNA, 19 nt, Artificial Sequence
  Description of Artificial Sequence: Synthetic oligonucleotide
  Antisense strand to SEQ ID NO: 1912300
ucuccaaagaucuagcuga

SEQ ID NO: 1912302 - RNA, 19 nt, Artificial Sequence
  Description of Artificial Sequence: Synthetic oligonucleotide
  Sense strand starting at position 3154 of SEQ ID NO: 1879507
cagcuagaucuuuggagaa

SEQ ID NO: 1912303 - RNA, 19 nt, Artificial Sequence
  Description of Artificial Sequence: Synthetic oligonucleotide
  Antisense strand to SEQ ID NO: 1912302
uucuccaaagaucuagcug

SEQ ID NO: 1912304 - RNA, 19 nt, Artificial Sequence
  Description of Artificial Sequence: Synthetic oligonucleotide
  Sense strand starting at position 3371 of SEQ ID NO: 1879507
uccuguaagucaucauaua

SEQ ID NO: 1912305 - RNA, 19 nt, Artificial Sequence
  Description of Artificial Sequence: Synthetic oligonucleotide
  Antisense strand to SEQ ID NO: 1912304
uauaugaugacuuacagga

SEQ ID NO: 1912306 - RNA, 19 nt, Artificial Sequence
  Description of Artificial Sequence: Synthetic oligonucleotide
  Sense strand starting at position 3372 of SEQ ID NO: 1879507
ccuguaagucaucauauac

SEQ ID NO: 1912307 - RNA, 19 nt, Artificial Sequence
  Description of Artificial Sequence: Synthetic oligonucleotide
  Antisense strand to SEQ ID NO: 1912306
guauaugaugacuuacagg

SEQ ID NO: 1912308 - RNA, 19 nt, Artificial Sequence
  Description of Artificial Sequence: Synthetic oligonucleotide
  Sense strand starting at position 3407 of SEQ ID NO: 1879507
ggaguuugguaagcagaag

SEQ ID NO: 1912309 - RNA, 19 nt, Artificial Sequence
  Description of Artificial Sequence: Synthetic oligonucleotide
  Antisense strand to SEQ ID NO: 1912308
cuucugcuuaccaaacucc

SEQ ID NO: 1912310 - RNA, 19 nt, Artificial Sequence
  Description of Artificial Sequence: Synthetic oligonucleotide
  Sense strand starting at position 3408 of SEQ ID NO: 1879507
gaguuugguaagcagaaga

SEQ ID NO: 1912311 - RNA, 19 nt, Artificial Sequence
  Description of Artificial Sequence: Synthetic oligonucleotide
  Antisense strand to SEQ ID NO: 1912310
ucuucugcuuaccaaacuc

SEQ ID NO: 1912312 - RNA, 19 nt, Artificial Sequence
  Description of Artificial Sequence: Synthetic oligonucleotide
  Sense strand starting at position 3434 of SEQ ID NO: 1879507
gguucauaugguggauucu

SEQ ID NO: 1912313 - RNA, 19 nt, Artificial Sequence
  Description of Artificial Sequence: Synthetic oligonucleotide
  Antisense strand to SEQ ID NO: 1912312
agaauccaccauaugaacc

SEQ ID NO: 1912314 - RNA, 19 nt, Artificial Sequence
  Description of Artificial Sequence: Synthetic oligonucleotide
  Sense strand starting at position 3899 of SEQ ID NO: 1879507
guuauucucuaucuccaga

SEQ ID NO: 1912315 - RNA, 19 nt, Artificial Sequence
  Description of Artificial Sequence: Synthetic oligonucleotide
  Antisense strand to SEQ ID NO: 1912314
ucuggagauagagaauaac

SEQ ID NO: 1912316 - RNA, 19 nt, Artificial Sequence
  Description of Artificial Sequence: Synthetic oligonucleotide
  Sense strand starting at position 3930 of SEQ ID NO: 1879507
agcucagagcauugaagua

SEQ ID NO: 1912317 - RNA, 19 nt, Artificial Sequence
  Description of Artificial Sequence: Synthetic oligonucleotide
  Antisense strand to SEQ ID NO: 1912316
uacuucaaugcucugagcu

SEQ ID NO: 1912318 - RNA, 19 nt, Artificial Sequence
  Description of Artificial Sequence: Synthetic oligonucleotide
  Sense strand starting at position 188 of SEQ ID NO: 1879509
aggcaugagucaccuuaag

SEQ ID NO: 1912319 - RNA, 19 nt, Artificial Sequence
  Description of Artificial Sequence: Synthetic oligonucleotide
  Antisense strand to SEQ ID NO: 1912318
cuuaaggugacucaugccu

SEQ ID NO: 1912320 - RNA, 19 nt, Artificial Sequence
  Description of Artificial Sequence: Synthetic oligonucleotide
  Sense strand starting at position 222 of SEQ ID NO: 1879509
acuaauuugugugagauuu

SEQ ID NO: 1912321 - RNA, 19 nt, Artificial Sequence
  Description of Artificial Sequence: Synthetic oligonucleotide
  Antisense strand to SEQ ID NO: 1912320
aaaucucacacaaauuagu

SEQ ID NO: 1912322 - RNA, 19 nt, Artificial Sequence
  Description of Artificial Sequence: Synthetic oligonucleotide
  Sense strand starting at position 246 of SEQ ID NO: 1879509
aggcccuuuggccagaaau

SEQ ID NO: 1912323 - RNA, 19 nt, Artificial Sequence
  Description of Artificial Sequence: Synthetic oligonucleotide
  Antisense strand to SEQ ID NO: 1912322
auuucuggccaaagggccu

SEQ ID NO: 1912324 - RNA, 19 nt, Artificial Sequence
  Description of Artificial Sequence: Synthetic oligonucleotide
  Sense strand starting at position 406 of SEQ ID NO: 1879509
gucuguauuagugccugua

SEQ ID NO: 1912325 - RNA, 19 nt, Artificial Sequence
  Description of Artificial Sequence: Synthetic oligonucleotide
  Antisense strand to SEQ ID NO: 1912324
uacaggcacuaauacagac

SEQ ID NO: 1912326 - RNA, 19 nt, Artificial Sequence
  Description of Artificial Sequence: Synthetic oligonucleotide
  Sense strand starting at position 474 of SEQ ID NO: 1879509
uguguaauuucugccuuua

SEQ ID NO: 1912327 - RNA, 19 nt, Artificial Sequence
  Description of Artificial Sequence: Synthetic oligonucleotide
  Antisense strand to SEQ ID NO: 1912326
uaaaggcagaaauuacaca

SEQ ID NO: 1912328 - RNA, 19 nt, Artificial Sequence
  Description of Artificial Sequence: Synthetic oligonucleotide
  Sense strand starting at position 630 of SEQ ID NO: 1879509
gguaaaugaggagguuuau

SEQ ID NO: 1912329 - RNA, 19 nt, Artificial Sequence
  Description of Artificial Sequence: Synthetic oligonucleotide
  Antisense strand to SEQ ID NO: 1912328
auaaaccuccucauuuacc

SEQ ID NO: 1912330 - RNA, 19 nt, Artificial Sequence
  Description of Artificial Sequence: Synthetic oligonucleotide
  Sense strand starting at position 1071 of SEQ ID NO: 1879509
agcuuucgagaccaugaau

SEQ ID NO: 1912331 - RNA, 19 nt, Artificial Sequence
  Description of Artificial Sequence: Synthetic oligonucleotide
  Antisense strand to SEQ ID NO: 1912330
auucauggucucgaaagcu

SEQ ID NO: 1912332 - RNA, 19 nt, Artificial Sequence
  Description of Artificial Sequence: Synthetic oligonucleotide
  Sense strand starting at position 1153 of SEQ ID NO: 1879509
cagaguggacucugaauca

SEQ ID NO: 1912333 - RNA, 19 nt, Artificial Sequence
  Description of Artificial Sequence: Synthetic oligonucleotide
  Antisense strand to SEQ ID NO: 1912332
ugauucagaguccacucug

SEQ ID NO: 1912334 - RNA, 19 nt, Artificial Sequence
  Description of Artificial Sequence: Synthetic oligonucleotide
  Sense strand starting at position 1298 of SEQ ID NO: 1879509
ccacuuucuguguaggaaa

SEQ ID NO: 1912335 - RNA, 19 nt, Artificial Sequence
  Description of Artificial Sequence: Synthetic oligonucleotide
  Antisense strand to SEQ ID NO: 1912334
uuuccuacacagaaagugg

SEQ ID NO: 1912336 - RNA, 19 nt, Artificial Sequence
  Description of Artificial Sequence: Synthetic oligonucleotide
  Sense strand starting at position 1329 of SEQ ID NO: 1879509
aaaugacuuguaugaggca

SEQ ID NO: 1912337 - RNA, 19 nt, Artificial Sequence
  Description of Artificial Sequence: Synthetic oligonucleotide
  Antisense strand to SEQ ID NO: 1912336
ugccucauacaagucauuu

SEQ ID NO: 1912338 - RNA, 19 nt, Artificial Sequence
  Description of Artificial Sequence: Synthetic oligonucleotide
  Sense strand starting at position 1360 of SEQ ID NO: 1879509
ugaguugacccagagucuu

SEQ ID NO: 1912339 - RNA, 19 nt, Artificial Sequence
  Description of Artificial Sequence: Synthetic oligonucleotide
  Antisense strand to SEQ ID NO: 1912338
aagacucugggucaacuca

SEQ ID NO: 1912340 - RNA, 19 nt, Artificial Sequence
  Description of Artificial Sequence: Synthetic oligonucleotide
  Sense strand starting at position 1366 of SEQ ID NO: 1879509
gacccagagucuuuaugga

SEQ ID NO: 1912341 - RNA, 19 nt, Artificial Sequence
  Description of Artificial Sequence: Synthetic oligonucleotide
  Antisense strand to SEQ ID NO: 1912340
uccauaaagacucuggguc

SEQ ID NO: 1912342 - RNA, 19 nt, Artificial Sequence
  Description of Artificial Sequence: Synthetic oligonucleotide
  Sense strand starting at position 1669 of SEQ ID NO: 1879509
gaaccuuaguuggcaagau

SEQ ID NO: 1912343 - RNA, 19 nt, Artificial Sequence
  Description of Artificial Sequence: Synthetic oligonucleotide
  Antisense strand to SEQ ID NO: 1912342
aucuugccaacuaagguuc

SEQ ID NO: 1912344 - RNA, 19 nt, Artificial Sequence
  Description of Artificial Sequence: Synthetic oligonucleotide
  Sense strand starting at position 1673 of SEQ ID NO: 1879509
cuuaguuggcaagaucaag

SEQ ID NO: 1912345 - RNA, 19 nt, Artificial Sequence
  Description of Artificial Sequence: Synthetic oligonucleotide
  Antisense strand to SEQ ID NO: 1912344
cuugaucuugccaacuaag

SEQ ID NO: 1912346 - RNA, 19 nt, Artificial Sequence
  Description of Artificial Sequence: Synthetic oligonucleotide
  Sense strand starting at position 1729 of SEQ ID NO: 1879509
aaaugauacuauguuugag

SEQ ID NO: 1912347 - RNA, 19 nt, Artificial Sequence
  Description of Artificial Sequence: Synthetic oligonucleotide
  Antisense strand to SEQ ID NO: 1912346
cucaaacauaguaucauuu

SEQ ID NO: 1912348 - RNA, 19 nt, Artificial Sequence
  Description of Artificial Sequence: Synthetic oligonucleotide
  Sense strand starting at position 1731 of SEQ ID NO: 1879509
augauacuauguuugagua

SEQ ID NO: 1912349 - RNA, 19 nt, Artificial Sequence
  Description of Artificial Sequence: Synthetic oligonucleotide
  Antisense strand to SEQ ID NO: 1912348
uacucaaacauaguaucau

SEQ ID NO: 1912350 - RNA, 19 nt, Artificial Sequence
  Description of Artificial Sequence: Synthetic oligonucleotide
  Sense strand starting at position 1732 of SEQ ID NO: 1879509
ugauacuauguuugaguaa

SEQ ID NO: 1912351 - RNA, 19 nt, Artificial Sequence
  Description of Artificial Sequence: Synthetic oligonucleotide
  Antisense strand to SEQ ID NO: 1912350
uuacucaaacauaguauca

SEQ ID NO: 1912352 - RNA, 19 nt, Artificial Sequence
  Description of Artificial Sequence: Synthetic oligonucleotide
  Sense strand starting at position 1739 of SEQ ID NO: 1879509
auguuugaguaauuacaca

SEQ ID NO: 1912353 - RNA, 19 nt, Artificial Sequence
  Description of Artificial Sequence: Synthetic oligonucleotide
  Antisense strand to SEQ ID NO: 1912352
uguguaauuacucaaacau

SEQ ID NO: 1912354 - RNA, 19 nt, Artificial Sequence
  Description of Artificial Sequence: Synthetic oligonucleotide
  Sense strand starting at position 1912 of SEQ ID NO: 1879509
agggcauauucuccaacaa

SEQ ID NO: 1912355 - RNA, 19 nt, Artificial Sequence
  Description of Artificial Sequence: Synthetic oligonucleotide
  Antisense strand to SEQ ID NO: 1912354
uuguuggagaauaugcccu

SEQ ID NO: 1912356 - RNA, 19 nt, Artificial Sequence
  Description of Artificial Sequence: Synthetic oligonucleotide
  Sense strand starting at position 2112 of SEQ ID NO: 1879509
uuacgucaucaauguauuu

SEQ ID NO: 1912357 - RNA, 19 nt, Artificial Sequence
  Description of Artificial Sequence: Synthetic oligonucleotide
  Antisense strand to SEQ ID NO: 1912356
aaauacauugaugacguaa

SEQ ID NO: 1912358 - RNA, 19 nt, Artificial Sequence
  Description of Artificial Sequence: Synthetic oligonucleotide
  Sense strand starting at position 2124 of SEQ ID NO: 1879509
uguauuucuugcucaugau

SEQ ID NO: 1912359 - RNA, 19 nt, Artificial Sequence
  Description of Artificial Sequence: Synthetic oligonucleotide
  Antisense strand to SEQ ID NO: 1912358
aucaugagcaagaaauaca

SEQ ID NO: 1912360 - RNA, 19 nt, Artificial Sequence
  Description of Artificial Sequence: Synthetic oligonucleotide
  Sense strand starting at position 2136 of SEQ ID NO: 1879509
ucaugauacacguaggcua

SEQ ID NO: 1912361 - RNA, 19 nt, Artificial Sequence
  Description of Artificial Sequence: Synthetic oligonucleotide
  Antisense strand to SEQ ID NO: 1912360
uagccuacguguaucauga

SEQ ID NO: 1912362 - RNA, 19 nt, Artificial Sequence
  Description of Artificial Sequence: Synthetic oligonucleotide
  Sense strand starting at position 2333 of SEQ ID NO: 1879509
uacgucauuggccaaugaa

SEQ ID NO: 1912363 - RNA, 19 nt, Artificial Sequence
  Description of Artificial Sequence: Synthetic oligonucleotide
  Antisense strand to SEQ ID NO: 1912362
uucauuggccaaugacgua

SEQ ID NO: 1912364 - RNA, 19 nt, Artificial Sequence
  Description of Artificial Sequence: Synthetic oligonucleotide
  Sense strand starting at position 2402 of SEQ ID NO: 1879509
gggucuaaggcagggauau

SEQ ID NO: 1912365 - RNA, 19 nt, Artificial Sequence
  Description of Artificial Sequence: Synthetic oligonucleotide
  Antisense strand to SEQ ID NO: 1912364
auaucccugccuuagaccc

SEQ ID NO: 1912366 - RNA, 19 nt, Artificial Sequence
  Description of Artificial Sequence: Synthetic oligonucleotide
  Sense strand starting at position 2403 of SEQ ID NO: 1879509
ggucuaaggcagggauaua

SEQ ID NO: 1912367 - RNA, 19 nt, Artificial Sequence
  Description of Artificial Sequence: Synthetic oligonucleotide
  Antisense strand to SEQ ID NO: 1912366
uauaucccugccuuagacc

SEQ ID NO: 1912368 - RNA, 19 nt, Artificial Sequence
  Description of Artificial Sequence: Synthetic oligonucleotide
  Sense strand starting at position 2613 of SEQ ID NO: 1879509
aaaggaaagucaucacugu

SEQ ID NO: 1912369 - RNA, 19 nt, Artificial Sequence
  Description of Artificial Sequence: Synthetic oligonucleotide
  Antisense strand to SEQ ID NO: 1912368
acagugaugacuuuccuuu

SEQ ID NO: 1912370 - RNA, 19 nt, Artificial Sequence
  Description of Artificial Sequence: Synthetic oligonucleotide
  Sense strand starting at position 2617 of SEQ ID NO: 1879509
gaaagucaucacugugaag

SEQ ID NO: 1912371 - RNA, 19 nt, Artificial Sequence
  Description of Artificial Sequence: Synthetic oligonucleotide
  Antisense strand to SEQ ID NO: 1912370
cuucacagugaugacuuuc

SEQ ID NO: 1912372 - RNA, 19 nt, Artificial Sequence
  Description of Artificial Sequence: Synthetic oligonucleotide
  Sense strand starting at position 2619 of SEQ ID NO: 1879509
aagucaucacugugaagga

SEQ ID NO: 1912373 - RNA, 19 nt, Artificial Sequence
  Description of Artificial Sequence: Synthetic oligonucleotide
  Antisense strand to SEQ ID NO: 1912372
uccuucacagugaugacuu

SEQ ID NO: 1912374 - RNA, 19 nt, Artificial Sequence
  Description of Artificial Sequence: Synthetic oligonucleotide
  Sense strand starting at position 2623 of SEQ ID NO: 1879509
caucacugugaaggauauu

SEQ ID NO: 1912375 - RNA, 19 nt, Artificial Sequence
  Description of Artificial Sequence: Synthetic oligonucleotide
  Antisense strand to SEQ ID NO: 1912374
aauauccuucacagugaug

SEQ ID NO: 1912376 - RNA, 19 nt, Artificial Sequence
  Description of Artificial Sequence: Synthetic oligonucleotide
  Sense strand starting at position 2727 of SEQ ID NO: 1879509
uuaacaaaggauugccaua

SEQ ID NO: 1912377 - RNA, 19 nt, Artificial Sequence
  Description of Artificial Sequence: Synthetic oligonucleotide
  Antisense strand to SEQ ID NO: 1912376
uauggcaauccuuuguuaa

SEQ ID NO: 1912378 - RNA, 19 nt, Artificial Sequence
  Description of Artificial Sequence: Synthetic oligonucleotide
  Sense strand starting at position 2732 of SEQ ID NO: 1879509
aaaggauugccauaguuua

SEQ ID NO: 1912379 - RNA, 19 nt, Artificial Sequence
  Description of Artificial Sequence: Synthetic oligonucleotide
  Antisense strand to SEQ ID NO: 1912378
uaaacuauggcaauccuuu

SEQ ID NO: 1912380 - RNA, 19 nt, Artificial Sequence
  Description of Artificial Sequence: Synthetic oligonucleotide
  Sense strand starting at position 2905 of SEQ ID NO: 1879509
acaguaauugcagaaguga

SEQ ID NO: 1912381 - RNA, 19 nt, Artificial Sequence
  Description of Artificial Sequence: Synthetic oligonucleotide
  Antisense strand to SEQ ID NO: 1912380
ucacuucugcaauuacugu

SEQ ID NO: 1912382 - RNA, 19 nt, Artificial Sequence
  Description of Artificial Sequence: Synthetic oligonucleotide
  Sense strand starting at position 2967 of SEQ ID NO: 1879509
guaggagaggcaggauaau

SEQ ID NO: 1912383 - RNA, 19 nt, Artificial Sequence
  Description of Artificial Sequence: Synthetic oligonucleotide
  Antisense strand to SEQ ID NO: 1912382
auuauccugccucuccuac

SEQ ID NO: 1912384 - RNA, 19 nt, Artificial Sequence
  Description of Artificial Sequence: Synthetic oligonucleotide
  Sense strand starting at position 3037 of SEQ ID NO: 1879509
cagguaucuguuuaugaca

SEQ ID NO: 1912385 - RNA, 19 nt, Artificial Sequence
  Description of Artificial Sequence: Synthetic oligonucleotide
  Antisense strand to SEQ ID NO: 1912384
ugucauaaacagauaccug

SEQ ID NO: 1912386 - RNA, 19 nt, Artificial Sequence
  Description of Artificial Sequence: Synthetic oligonucleotide
  Sense strand starting at position 3404 of SEQ ID NO: 1879509
gguccauugagaugacuga

SEQ ID NO: 1912387 - RNA, 19 nt, Artificial Sequence
  Description of Artificial Sequence: Synthetic oligonucleotide
  Antisense strand to SEQ ID NO: 1912386
ucagucaucucaauggacc

SEQ ID NO: 1912388 - RNA, 19 nt, Artificial Sequence
  Description of Artificial Sequence: Synthetic oligonucleotide
  Sense strand starting at position 3661 of SEQ ID NO: 1879509
agccgugucaacuuuguca

SEQ ID NO: 1912389 - RNA, 19 nt, Artificial Sequence
  Description of Artificial Sequence: Synthetic oligonucleotide
  Antisense strand to SEQ ID NO: 1912388
ugacaaaguugacacggcu

SEQ ID NO: 1912390 - RNA, 19 nt, Artificial Sequence
  Description of Artificial Sequence: Synthetic oligonucleotide
  Sense strand starting at position 3763 of SEQ ID NO: 1879509
acauuaugaccauguagua

SEQ ID NO: 1912391 - RNA, 19 nt, Artificial Sequence
  Description of Artificial Sequence: Synthetic oligonucleotide
  Antisense strand to SEQ ID NO: 1912390
uacuacauggucauaaugu

SEQ ID NO: 1912392 - RNA, 19 nt, Artificial Sequence
  Description of Artificial Sequence: Synthetic oligonucleotide
  Sense strand starting at position 3770 of SEQ ID NO: 1879509
gaccauguaguagauguua

SEQ ID NO: 1912393 - RNA, 19 nt, Artificial Sequence
  Description of Artificial Sequence: Synthetic oligonucleotide
  Antisense strand to SEQ ID NO: 1912392
uaacaucuacuacaugguc

SEQ ID NO: 1912394 - RNA, 19 nt, Artificial Sequence
  Description of Artificial Sequence: Synthetic oligonucleotide
  Sense strand starting at position 3781 of SEQ ID NO: 1879509
agauguuauagugaauugu

SEQ ID NO: 1912395 - RNA, 19 nt, Artificial Sequence
  Description of Artificial Sequence: Synthetic oligonucleotide
  Antisense strand to SEQ ID NO: 1912394
acaauucacuauaacaucu

SEQ ID NO: 1912396 - RNA, 19 nt, Artificial Sequence
  Description of Artificial Sequence: Synthetic oligonucleotide
  Sense strand starting at position 3963 of SEQ ID NO: 1879509
agaugcacucagggugaaa

SEQ ID NO: 1912397 - RNA, 19 nt, Artificial Sequence
  Description of Artificial Sequence: Synthetic oligonucleotide
  Antisense strand to SEQ ID NO: 1912396
uuucacccugagugcaucu

SEQ ID NO: 1912398 - RNA, 19 nt, Artificial Sequence
  Description of Artificial Sequence: Synthetic oligonucleotide
  Sense strand starting at position 94 of SEQ ID NO: 1879510
gcacauacacaguagacau

SEQ ID NO: 1912399 - RNA, 19 nt, Artificial Sequence
  Description of Artificial Sequence: Synthetic oligonucleotide
  Antisense strand to SEQ ID NO: 1912398
augucuacuguguaugugc

SEQ ID NO: 1912400 - RNA, 19 nt, Artificial Sequence
  Description of Artificial Sequence: Synthetic oligonucleotide
  Sense strand starting at position 347 of SEQ ID NO: 1879510
gagagaagauuuggcaaca

SEQ ID NO: 1912401 - RNA, 19 nt, Artificial Sequence
  Description of Artificial Sequence: Synthetic oligonucleotide
  Antisense strand to SEQ ID NO: 1912400
uguugccaaaucuucucuc

SEQ ID NO: 1912402 - RNA, 19 nt, Artificial Sequence
  Description of Artificial Sequence: Synthetic oligonucleotide
  Sense strand starting at position 545 of SEQ ID NO: 1879510
acccaagauguguagcaaa

SEQ ID NO: 1912403 - RNA, 19 nt, Artificial Sequence
  Description of Artificial Sequence: Synthetic oligonucleotide
  Antisense strand to SEQ ID NO: 1912402
uuugcuacacaucuugggu

SEQ ID NO: 1912404 - RNA, 19 nt, Artificial Sequence
  Description of Artificial Sequence: Synthetic oligonucleotide
  Sense strand starting at position 698 of SEQ ID NO: 1879510
ugacuaucuccagggcaga

SEQ ID NO: 1912405 - RNA, 19 nt, Artificial Sequence
  Description of Artificial Sequence: Synthetic oligonucleotide
  Antisense strand to SEQ ID NO: 1912404
ucugcccuggagauaguca

SEQ ID NO: 1912406 - RNA, 19 nt, Artificial Sequence
  Description of Artificial Sequence: Synthetic oligonucleotide
  Sense strand starting at position 745 of SEQ ID NO: 1879510
ugaguucugaugcagaaug

SEQ ID NO: 1912407 - RNA, 19 nt, Artificial Sequence
  Description of Artificial Sequence: Synthetic oligonucleotide
  Antisense strand to SEQ ID NO: 1912406
cauucugcaucagaacuca

SEQ ID NO: 1912408 - RNA, 19 nt, Artificial Sequence
  Description of Artificial Sequence: Synthetic oligonucleotide
  Sense strand starting at position 747 of SEQ ID NO: 1879510
aguucugaugcagaauguu

SEQ ID NO: 1912409 - RNA, 19 nt, Artificial Sequence
  Description of Artificial Sequence: Synthetic oligonucleotide
  Antisense strand to SEQ ID NO: 1912408
aacauucugcaucagaacu

SEQ ID NO: 1912410 - RNA, 19 nt, Artificial Sequence
  Description of Artificial Sequence: Synthetic oligonucleotide
  Sense strand starting at position 887 of SEQ ID NO: 1879510
cugggaguauuugaccaaa

SEQ ID NO: 1912411 - RNA, 19 nt, Artificial Sequence
  Description of Artificial Sequence: Synthetic oligonucleotide
  Antisense strand to SEQ ID NO: 1912410
uuuggucaaauacucccag

SEQ ID NO: 1912412 - RNA, 19 nt, Artificial Sequence
  Description of Artificial Sequence: Synthetic oligonucleotide
  Sense strand starting at position 928 of SEQ ID NO: 1879510
aggguuagguuuccagaag

SEQ ID NO: 1912413 - RNA, 19 nt, Artificial Sequence
  Description of Artificial Sequence: Synthetic oligonucleotide
  Antisense strand to SEQ ID NO: 1912412
cuucuggaaaccuaacccu

SEQ ID NO: 1912414 - RNA, 19 nt, Artificial Sequence
  Description of Artificial Sequence: Synthetic oligonucleotide
  Sense strand starting at position 1185 of SEQ ID NO: 1879510
agcuacucagucgagauaa

SEQ ID NO: 1912415 - RNA, 19 nt, Artificial Sequence
  Description of Artificial Sequence: Synthetic oligonucleotide
  Antisense strand to SEQ ID NO: 1912414
uuaucucgacugaguagcu

SEQ ID NO: 1912416 - RNA, 19 nt, Artificial Sequence
  Description of Artificial Sequence: Synthetic oligonucleotide
  Sense strand starting at position 1187 of SEQ ID NO: 1879510
cuacucagucgagauaaac

SEQ ID NO: 1912417 - RNA, 19 nt, Artificial Sequence
  Description of Artificial Sequence: Synthetic oligonucleotide
  Antisense strand to SEQ ID NO: 1912416
guuuaucucgacugaguag

SEQ ID NO: 1912418 - RNA, 19 nt, Artificial Sequence
  Description of Artificial Sequence: Synthetic oligonucleotide
  Sense strand starting at position 1493 of SEQ ID NO: 1879510
acaagagacuuuccuguuu

SEQ ID NO: 1912419 - RNA, 19 nt, Artificial Sequence
  Description of Artificial Sequence: Synthetic oligonucleotide
  Antisense strand to SEQ ID NO: 1912418
aaacaggaaagucucuugu

SEQ ID NO: 1912420 - RNA, 19 nt, Artificial Sequence
  Description of Artificial Sequence: Synthetic oligonucleotide
  Sense strand starting at position 1532 of SEQ ID NO: 1879510
ggucuuacagguuacucaa

SEQ ID NO: 1912421 - RNA, 19 nt, Artificial Sequence
  Description of Artificial Sequence: Synthetic oligonucleotide
  Antisense strand to SEQ ID NO: 1912420
uugaguaaccuguaagacc

SEQ ID NO: 1912422 - RNA, 19 nt, Artificial Sequence
  Description of Artificial Sequence: Synthetic oligonucleotide
  Sense strand starting at position 1560 of SEQ ID NO: 1879510
ucacuugcagcaugaauuu

SEQ ID NO: 1912423 - RNA, 19 nt, Artificial Sequence
  Description of Artificial Sequence: Synthetic oligonucleotide
  Antisense strand to SEQ ID NO: 1912422
aaauucaugcugcaaguga

SEQ ID NO: 1912424 - RNA, 19 nt, Artificial Sequence
  Description of Artificial Sequence: Synthetic oligonucleotide
  Sense strand starting at position 1650 of SEQ ID NO: 1879510
uacagugucccguugccaa

SEQ ID NO: 1912425 - RNA, 19 nt, Artificial Sequence
  Description of Artificial Sequence: Synthetic oligonucleotide
  Antisense strand to SEQ ID NO: 1912424
uuggcaacgggacacugua

SEQ ID NO: 1912426 - RNA, 19 nt, Artificial Sequence
  Description of Artificial Sequence: Synthetic oligonucleotide
  Sense strand starting at position 1709 of SEQ ID NO: 1879510
aagcuuuaagguuaaagua

SEQ ID NO: 1912427 - RNA, 19 nt, Artificial Sequence
  Description of Artificial Sequence: Synthetic oligonucleotide
  Antisense strand to SEQ ID NO: 1912426
uacuuuaaccuuaaagcuu

SEQ ID NO: 1912428 - RNA, 19 nt, Artificial Sequence
  Description of Artificial Sequence: Synthetic oligonucleotide
  Sense strand starting at position 1880 of SEQ ID NO: 1879510
gcaaauguacuguaagaaa

SEQ ID NO: 1912429 - RNA, 19 nt, Artificial Sequence
  Description of Artificial Sequence: Synthetic oligonucleotide
  Antisense strand to SEQ ID NO: 1912428
uuucuuacaguacauuugc

SEQ ID NO: 1912430 - RNA, 19 nt, Artificial Sequence
  Description of Artificial Sequence: Synthetic oligonucleotide
  Sense strand starting at position 1927 of SEQ ID NO: 1879510
uccuaagauguguagcaaa

SEQ ID NO: 1912431 - RNA, 19 nt, Artificial Sequence
  Description of Artificial Sequence: Synthetic oligonucleotide
  Antisense strand to SEQ ID NO: 1912430
uuugcuacacaucuuagga

SEQ ID NO: 1912432 - RNA, 19 nt, Artificial Sequence
  Description of Artificial Sequence: Synthetic oligonucleotide
  Sense strand starting at position 1940 of SEQ ID NO: 1879510
agcaaaucuguuggaaauu

SEQ ID NO: 1912433 - RNA, 19 nt, Artificial Sequence
  Description of Artificial Sequence: Synthetic oligonucleotide
  Antisense strand to SEQ ID NO: 1912432
aauuuccaacagauuugcu

SEQ ID NO: 1912434 - RNA, 19 nt, Artificial Sequence
  Description of Artificial Sequence: Synthetic oligonucleotide
  Sense strand starting at position 2062 of SEQ ID NO: 1879510
gcaggugaaagauguaaac

SEQ ID NO: 1912435 - RNA, 19 nt, Artificial Sequence
  Description of Artificial Sequence: Synthetic oligonucleotide
  Antisense strand to SEQ ID NO: 1912434
guuuacaucuuucaccugc

SEQ ID NO: 1912436 - RNA, 19 nt, Artificial Sequence
  Description of Artificial Sequence: Synthetic oligonucleotide
  Sense strand starting at position 2073 of SEQ ID NO: 1879510
auguaaacagugcaaucua

SEQ ID NO: 1912437 - RNA, 19 nt, Artificial Sequence
  Description of Artificial Sequence: Synthetic oligonucleotide
  Antisense strand to SEQ ID NO: 1912436
uagauugcacuguuuacau

SEQ ID NO: 1912438 - RNA, 19 nt, Artificial Sequence
  Description of Artificial Sequence: Synthetic oligonucleotide
  Sense strand starting at position 2209 of SEQ ID NO: 1879510
aucuaauaagagugucuua

SEQ ID NO: 1912439 - RNA, 19 nt, Artificial Sequence
  Description of Artificial Sequence: Synthetic oligonucleotide
  Antisense strand to SEQ ID NO: 1912438
uaagacacucuuauuagau

SEQ ID NO: 1912440 - RNA, 19 nt, Artificial Sequence
  Description of Artificial Sequence: Synthetic oligonucleotide
  Sense strand starting at position 2212 of SEQ ID NO: 1879510
uaauaagagugucuuauag

SEQ ID NO: 1912441 - RNA, 19 nt, Artificial Sequence
  Description of Artificial Sequence: Synthetic oligonucleotide
  Antisense strand to SEQ ID NO: 1912440
cuauaagacacucuuauua

SEQ ID NO: 1912442 - RNA, 19 nt, Artificial Sequence
  Description of Artificial Sequence: Synthetic oligonucleotide
  Sense strand starting at position 2220 of SEQ ID NO: 1879510
gugucuuauagaugagaua

SEQ ID NO: 1912443 - RNA, 19 nt, Artificial Sequence
  Description of Artificial Sequence: Synthetic oligonucleotide
  Antisense strand to SEQ ID NO: 1912442
uaucucaucuauaagacac

SEQ ID NO: 1912444 - RNA, 19 nt, Artificial Sequence
  Description of Artificial Sequence: Synthetic oligonucleotide
  Sense strand starting at position 2489 of SEQ ID NO: 1879510
gccuaaucagacugagaau

SEQ ID NO: 1912445 - RNA, 19 nt, Artificial Sequence
  Description of Artificial Sequence: Synthetic oligonucleotide
  Antisense strand to SEQ ID NO: 1912444
auucucagucugauuaggc

SEQ ID NO: 1912446 - RNA, 19 nt, Artificial Sequence
  Description of Artificial Sequence: Synthetic oligonucleotide
  Sense strand starting at position 2815 of SEQ ID NO: 1879510
gauguuuauguuugaggga

SEQ ID NO: 1912447 - RNA, 19 nt, Artificial Sequence
  Description of Artificial Sequence: Synthetic oligonucleotide
  Antisense strand to SEQ ID NO: 1912446
ucccucaaacauaaacauc

SEQ ID NO: 1912448 - RNA, 19 nt, Artificial Sequence
  Description of Artificial Sequence: Synthetic oligonucleotide
  Sense strand starting at position 2820 of SEQ ID NO: 1879510
uuauguuugagggaggguu

SEQ ID NO: 1912449 - RNA, 19 nt, Artificial Sequence
  Description of Artificial Sequence: Synthetic oligonucleotide
  Antisense strand to SEQ ID NO: 1912448
aacccucccucaaacauaa

SEQ ID NO: 1912450 - RNA, 19 nt, Artificial Sequence
  Description of Artificial Sequence: Synthetic oligonucleotide
  Sense strand starting at position 2862 of SEQ ID NO: 1879510
ucucuuaggaaaugugaag

SEQ ID NO: 1912451 - RNA, 19 nt, Artificial Sequence
  Description of Artificial Sequence: Synthetic oligonucleotide
  Antisense strand to SEQ ID NO: 1912450
cuucacauuuccuaagaga

SEQ ID NO: 1912452 - RNA, 19 nt, Artificial Sequence
  Description of Artificial Sequence: Synthetic oligonucleotide
  Sense strand starting at position 2869 of SEQ ID NO: 1879510
ggaaaugugaagugugaau

SEQ ID NO: 1912453 - RNA, 19 nt, Artificial Sequence
  Description of Artificial Sequence: Synthetic oligonucleotide
  Antisense strand to SEQ ID NO: 1912452
auucacacuucacauuucc

SEQ ID NO: 1912454 - RNA, 19 nt, Artificial Sequence
  Description of Artificial Sequence: Synthetic oligonucleotide
  Sense strand starting at position 2871 of SEQ ID NO: 1879510
aaaugugaagugugaauga

SEQ ID NO: 1912455 - RNA, 19 nt, Artificial Sequence
  Description of Artificial Sequence: Synthetic oligonucleotide
  Antisense strand to SEQ ID NO: 1912454
ucauucacacuucacauuu

SEQ ID NO: 1912456 - RNA, 19 nt, Artificial Sequence
  Description of Artificial Sequence: Synthetic oligonucleotide
  Sense strand starting at position 2944 of SEQ ID NO: 1879510
uguggaauaacgcaauaua

SEQ ID NO: 1912457 - RNA, 19 nt, Artificial Sequence
  Description of Artificial Sequence: Synthetic oligonucleotide
  Antisense strand to SEQ ID NO: 1912456
uauauugcguuauuccaca

SEQ ID NO: 1912458 - RNA, 19 nt, Artificial Sequence
  Description of Artificial Sequence: Synthetic oligonucleotide
  Sense strand starting at position 2954 of SEQ ID NO: 1879510
cgcaauauauccuuagagg

SEQ ID NO: 1912459 - RNA, 19 nt, Artificial Sequence
  Description of Artificial Sequence: Synthetic oligonucleotide
  Antisense strand to SEQ ID NO: 1912458
ccucuaaggauauauugcg

SEQ ID NO: 1912460 - RNA, 19 nt, Artificial Sequence
  Description of Artificial Sequence: Synthetic oligonucleotide
  Sense strand starting at position 3047 of SEQ ID NO: 1879510
ugguaaauggccuacuaug

SEQ ID NO: 1912461 - RNA, 19 nt, Artificial Sequence
  Description of Artificial Sequence: Synthetic oligonucleotide
  Antisense strand to SEQ ID NO: 1912460
cauaguaggccauuuacca

SEQ ID NO: 1912462 - RNA, 19 nt, Artificial Sequence
  Description of Artificial Sequence: Synthetic oligonucleotide
  Sense strand starting at position 3056 of SEQ ID NO: 1879510
gccuacuauguccauagga

SEQ ID NO: 1912463 - RNA, 19 nt, Artificial Sequence
  Description of Artificial Sequence: Synthetic oligonucleotide
  Antisense strand to SEQ ID NO: 1912462
uccuauggacauaguaggc

SEQ ID NO: 1912464 - RNA, 19 nt, Artificial Sequence
  Description of Artificial Sequence: Synthetic oligonucleotide
  Sense strand starting at position 3226 of SEQ ID NO: 1879510
ccaggacuucuaggccuaa

SEQ ID NO: 1912465 - RNA, 19 nt, Artificial Sequence
  Description of Artificial Sequence: Synthetic oligonucleotide
  Antisense strand to SEQ ID NO: 1912464
uuaggccuagaaguccugg

SEQ ID NO: 1912466 - RNA, 19 nt, Artificial Sequence
  Description of Artificial Sequence: Synthetic oligonucleotide
  Sense strand starting at position 3265 of SEQ ID NO: 1879510
cugaguuugcuggagaauu

SEQ ID NO: 1912467 - RNA, 19 nt, Artificial Sequence
  Description of Artificial Sequence: Synthetic oligonucleotide
  Antisense strand to SEQ ID NO: 1912466
aauucuccagcaaacucag

SEQ ID NO: 1912468 - RNA, 19 nt, Artificial Sequence
  Description of Artificial Sequence: Synthetic oligonucleotide
  Sense strand starting at position 3500 of SEQ ID NO: 1879510
gguaauggguacuucugau

SEQ ID NO: 1912469 - RNA, 19 nt, Artificial Sequence
  Description of Artificial Sequence: Synthetic oligonucleotide
  Antisense strand to SEQ ID NO: 1912468
aucagaaguacccauuacc

SEQ ID NO: 1912470 - RNA, 19 nt, Artificial Sequence
  Description of Artificial Sequence: Synthetic oligonucleotide
  Sense strand starting at position 3633 of SEQ ID NO: 1879510
aguauaaggcaucaccuua

SEQ ID NO: 1912471 - RNA, 19 nt, Artificial Sequence
  Description of Artificial Sequence: Synthetic oligonucleotide
  Antisense strand to SEQ ID NO: 1912470
uaaggugaugccuuauacu

SEQ ID NO: 1912472 - RNA, 19 nt, Artificial Sequence
  Description of Artificial Sequence: Synthetic oligonucleotide
  Sense strand starting at position 3756 of SEQ ID NO: 1879510
gguugucuggaagaauagu

SEQ ID NO: 1912473 - RNA, 19 nt, Artificial Sequence
  Description of Artificial Sequence: Synthetic oligonucleotide
  Antisense strand to SEQ ID NO: 1912472
acuauucuuccagacaacc

SEQ ID NO: 1912474 - RNA, 19 nt, Artificial Sequence
  Description of Artificial Sequence: Synthetic oligonucleotide
  Sense strand starting at position 3820 of SEQ ID NO: 1879510
guaguuauucuugaaggua

SEQ ID NO: 1912475 - RNA, 19 nt, Artificial Sequence
  Description of Artificial Sequence: Synthetic oligonucleotide
  Antisense strand to SEQ ID NO: 1912474
uaccuucaagaauaacuac

SEQ ID NO: 1912476 - RNA, 19 nt, Artificial Sequence
  Description of Artificial Sequence: Synthetic oligonucleotide
  Sense strand starting at position 3823 of SEQ ID NO: 1879510
guuauucuugaagguauga

SEQ ID NO: 1912477 - RNA, 19 nt, Artificial Sequence
  Description of Artificial Sequence: Synthetic oligonucleotide
  Antisense strand to SEQ ID NO: 1912476
ucauaccuucaagaauaac

SEQ ID NO: 1912478 - RNA, 19 nt, Artificial Sequence
  Description of Artificial Sequence: Synthetic oligonucleotide
  Sense strand starting at position 58 of SEQ ID NO: 1879511
cugcuuuccaucugggaag

SEQ ID NO: 1912479 - RNA, 19 nt, Artificial Sequence
  Description of Artificial Sequence: Synthetic oligonucleotide
  Antisense strand to SEQ ID NO: 1912478
cuucccagauggaaagcag

SEQ ID NO: 1912480 - RNA, 19 nt, Artificial Sequence
  Description of Artificial Sequence: Synthetic oligonucleotide
  Sense strand starting at position 77 of SEQ ID NO: 1879511
uuguuucuucuccagagac

SEQ ID NO: 1912481 - RNA, 19 nt, Artificial Sequence
  Description of Artificial Sequence: Synthetic oligonucleotide
  Antisense strand to SEQ ID NO: 1912480
gucucuggagaagaaacaa

SEQ ID NO: 1912482 - RNA, 19 nt, Artificial Sequence
  Description of Artificial Sequence: Synthetic oligonucleotide
  Sense strand starting at position 225 of SEQ ID NO: 1879511
aucuguuggccuuaagcaa

SEQ ID NO: 1912483 - RNA, 19 nt, Artificial Sequence
  Description of Artificial Sequence: Synthetic oligonucleotide
  Antisense strand to SEQ ID NO: 1912482
uugcuuaaggccaacagau

SEQ ID NO: 1912484 - RNA, 19 nt, Artificial Sequence
  Description of Artificial Sequence: Synthetic oligonucleotide
  Sense strand starting at position 346 of SEQ ID NO: 1879511
gagagcccuccaugaauag

SEQ ID NO: 1912485 - RNA, 19 nt, Artificial Sequence
  Description of Artificial Sequence: Synthetic oligonucleotide
  Antisense strand to SEQ ID NO: 1912484
cuauucauggagggcucuc

SEQ ID NO: 1912486 - RNA, 19 nt, Artificial Sequence
  Description of Artificial Sequence: Synthetic oligonucleotide
  Sense strand starting at position 356 of SEQ ID NO: 1879511
caugaauagugagugcuca

SEQ ID NO: 1912487 - RNA, 19 nt, Artificial Sequence
  Description of Artificial Sequence: Synthetic oligonucleotide
  Antisense strand to SEQ ID NO: 1912486
ugagcacucacuauucaug

SEQ ID NO: 1912488 - RNA, 19 nt, Artificial Sequence
  Description of Artificial Sequence: Synthetic oligonucleotide
  Sense strand starting at position 357 of SEQ ID NO: 1879511
augaauagugagugcucaa

SEQ ID NO: 1912489 - RNA, 19 nt, Artificial Sequence
  Description of Artificial Sequence: Synthetic oligonucleotide
  Antisense strand to SEQ ID NO: 1912488
uugagcacucacuauucau

SEQ ID NO: 1912490 - RNA, 19 nt, Artificial Sequence
  Description of Artificial Sequence: Synthetic oligonucleotide
  Sense strand starting at position 486 of SEQ ID NO: 1879511
ggacauugcuugucugaaa

SEQ ID NO: 1912491 - RNA, 19 nt, Artificial Sequence
  Description of Artificial Sequence: Synthetic oligonucleotide
  Antisense strand to SEQ ID NO: 1912490
uuucagacaagcaaugucc

SEQ ID NO: 1912492 - RNA, 19 nt, Artificial Sequence
  Description of Artificial Sequence: Synthetic oligonucleotide
  Sense strand starting at position 487 of SEQ ID NO: 1879511
gacauugcuugucugaaac

SEQ ID NO: 1912493 - RNA, 19 nt, Artificial Sequence
  Description of Artificial Sequence: Synthetic oligonucleotide
  Antisense strand to SEQ ID NO: 1912492
guuucagacaagcaauguc

SEQ ID NO: 1912494 - RNA, 19 nt, Artificial Sequence
  Description of Artificial Sequence: Synthetic oligonucleotide
  Sense strand starting at position 497 of SEQ ID NO: 1879511
gucugaaaccaguaugcaa

SEQ ID NO: 1912495 - RNA, 19 nt, Artificial Sequence
  Description of Artificial Sequence: Synthetic oligonucleotide
  Antisense strand to SEQ ID NO: 1912494
uugcauacugguuucagac

SEQ ID NO: 1912496 - RNA, 19 nt, Artificial Sequence
  Description of Artificial Sequence: Synthetic oligonucleotide
  Sense strand starting at position 633 of SEQ ID NO: 1879511
gugauucugcuauaucuag

SEQ ID NO: 1912497 - RNA, 19 nt, Artificial Sequence
  Description of Artificial Sequence: Synthetic oligonucleotide
  Antisense strand to SEQ ID NO: 1912496
cuagauauagcagaaucac

SEQ ID NO: 1912498 - RNA, 19 nt, Artificial Sequence
  Description of Artificial Sequence: Synthetic oligonucleotide
  Sense strand starting at position 655 of SEQ ID NO: 1879511
aggugugggcauuagagaa

SEQ ID NO: 1912499 - RNA, 19 nt, Artificial Sequence
  Description of Artificial Sequence: Synthetic oligonucleotide
  Antisense strand to SEQ ID NO: 1912498
uucucuaaugcccacaccu

SEQ ID NO: 1912500 - RNA, 19 nt, Artificial Sequence
  Description of Artificial Sequence: Synthetic oligonucleotide
  Sense strand starting at position 984 of SEQ ID NO: 1879511
caugcaucuguccaaagga

SEQ ID NO: 1912501 - RNA, 19 nt, Artificial Sequence
  Description of Artificial Sequence: Synthetic oligonucleotide
  Antisense strand to SEQ ID NO: 1912500
uccuuuggacagaugcaug

SEQ ID NO: 1912502 - RNA, 19 nt, Artificial Sequence
  Description of Artificial Sequence: Synthetic oligonucleotide
  Sense strand starting at position 1260 of SEQ ID NO: 1879511
uccaguucucuguauugac

SEQ ID NO: 1912503 - RNA, 19 nt, Artificial Sequence
  Description of Artificial Sequence: Synthetic oligonucleotide
  Antisense strand to SEQ ID NO: 1912502
gucaauacagagaacugga

SEQ ID NO: 1912504 - RNA, 19 nt, Artificial Sequence
  Description of Artificial Sequence: Synthetic oligonucleotide
  Sense strand starting at position 1389 of SEQ ID NO: 1879511
ccaguauaagggcaucuau

SEQ ID NO: 1912505 - RNA, 19 nt, Artificial Sequence
  Description of Artificial Sequence: Synthetic oligonucleotide
  Antisense strand to SEQ ID NO: 1912504
auagaugcccuuauacugg

SEQ ID NO: 1912506 - RNA, 19 nt, Artificial Sequence
  Description of Artificial Sequence: Synthetic oligonucleotide
  Sense strand starting at position 1399 of SEQ ID NO: 1879511
ggcaucuauugacuaaaca

SEQ ID NO: 1912507 - RNA, 19 nt, Artificial Sequence
  Description of Artificial Sequence: Synthetic oligonucleotide
  Antisense strand to SEQ ID NO: 1912506
uguuuagucaauagaugcc

SEQ ID NO: 1912508 - RNA, 19 nt, Artificial Sequence
  Description of Artificial Sequence: Synthetic oligonucleotide
  Sense strand starting at position 1503 of SEQ ID NO: 1879511
gcaucagaaaucuguguga

SEQ ID NO: 1912509 - RNA, 19 nt, Artificial Sequence
  Description of Artificial Sequence: Synthetic oligonucleotide
  Antisense strand to SEQ ID NO: 1912508
ucacacagauuucugaugc

SEQ ID NO: 1912510 - RNA, 19 nt, Artificial Sequence
  Description of Artificial Sequence: Synthetic oligonucleotide
  Sense strand starting at position 1505 of SEQ ID NO: 1879511
aucagaaaucugugugaag

SEQ ID NO: 1912511 - RNA, 19 nt, Artificial Sequence
  Description of Artificial Sequence: Synthetic oligonucleotide
  Antisense strand to SEQ ID NO: 1912510
cuucacacagauuucugau

SEQ ID NO: 1912512 - RNA, 19 nt, Artificial Sequence
  Description of Artificial Sequence: Synthetic oligonucleotide
  Sense strand starting at position 1506 of SEQ ID NO: 1879511
ucagaaaucugugugaagc

SEQ ID NO: 1912513 - RNA, 19 nt, Artificial Sequence
  Description of Artificial Sequence: Synthetic oligonucleotide
  Antisense strand to SEQ ID NO: 1912512
gcuucacacagauuucuga

SEQ ID NO: 1912514 - RNA, 19 nt, Artificial Sequence
  Description of Artificial Sequence: Synthetic oligonucleotide
  Sense strand starting at position 1621 of SEQ ID NO: 1879511
ccauguaugaccugaggga

SEQ ID NO: 1912515 - RNA, 19 nt, Artificial Sequence
  Description of Artificial Sequence: Synthetic oligonucleotide
  Antisense strand to SEQ ID NO: 1912514
ucccucaggucauacaugg

SEQ ID NO: 1912516 - RNA, 19 nt, Artificial Sequence
  Description of Artificial Sequence: Synthetic oligonucleotide
  Sense strand starting at position 1625 of SEQ ID NO: 1879511
guaugaccugagggauucu

SEQ ID NO: 1912517 - RNA, 19 nt, Artificial Sequence
  Description of Artificial Sequence: Synthetic oligonucleotide
  Antisense strand to SEQ ID NO: 1912516
agaaucccucaggucauac

SEQ ID NO: 1912518 - RNA, 19 nt, Artificial Sequence
  Description of Artificial Sequence: Synthetic oligonucleotide
  Sense strand starting at position 1684 of SEQ ID NO: 1879511
auggucuuccuagauacau

SEQ ID NO: 1912519 - RNA, 19 nt, Artificial Sequence
  Description of Artificial Sequence: Synthetic oligonucleotide
  Antisense strand to SEQ ID NO: 1912518
auguaucuaggaagaccau

SEQ ID NO: 1912520 - RNA, 19 nt, Artificial Sequence
  Description of Artificial Sequence: Synthetic oligonucleotide
  Sense strand starting at position 1790 of SEQ ID NO: 1879511
gaaguuugacgugaggcuu

SEQ ID NO: 1912521 - RNA, 19 nt, Artificial Sequence
  Description of Artificial Sequence: Synthetic oligonucleotide
  Antisense strand to SEQ ID NO: 1912520
aagccucacgucaaacuuc

SEQ ID NO: 1912522 - RNA, 19 nt, Artificial Sequence
  Description of Artificial Sequence: Synthetic oligonucleotide
  Sense strand starting at position 1900 of SEQ ID NO: 1879511
acuuguauucuuugacuca

SEQ ID NO: 1912523 - RNA, 19 nt, Artificial Sequence
  Description of Artificial Sequence: Synthetic oligonucleotide
  Antisense strand to SEQ ID NO: 1912522
ugagucaaagaauacaagu

SEQ ID NO: 1912524 - RNA, 19 nt, Artificial Sequence
  Description of Artificial Sequence: Synthetic oligonucleotide
  Sense strand starting at position 1903 of SEQ ID NO: 1879511
uguauucuuugacucagga

SEQ ID NO: 1912525 - RNA, 19 nt, Artificial Sequence
  Description of Artificial Sequence: Synthetic oligonucleotide
  Antisense strand to SEQ ID NO: 1912524
uccugagucaaagaauaca

SEQ ID NO: 1912526 - RNA, 19 nt, Artificial Sequence
  Description of Artificial Sequence: Synthetic oligonucleotide
  Sense strand starting at position 2077 of SEQ ID NO: 1879511
ggauaauguccucauccca

SEQ ID NO: 1912527 - RNA, 19 nt, Artificial Sequence
  Description of Artificial Sequence: Synthetic oligonucleotide
  Antisense strand to SEQ ID NO: 1912526
ugggaugaggacauuaucc

SEQ ID NO: 1912528 - RNA, 19 nt, Artificial Sequence
  Description of Artificial Sequence: Synthetic oligonucleotide
  Sense strand starting at position 2204 of SEQ ID NO: 1879511
gcaagugccaucuauugag

SEQ ID NO: 1912529 - RNA, 19 nt, Artificial Sequence
  Description of Artificial Sequence: Synthetic oligonucleotide
  Antisense strand to SEQ ID NO: 1912528
cucaauagauggcacuugc

SEQ ID NO: 1912530 - RNA, 19 nt, Artificial Sequence
  Description of Artificial Sequence: Synthetic oligonucleotide
  Sense strand starting at position 2208 of SEQ ID NO: 1879511
gugccaucuauugagaaga

SEQ ID NO: 1912531 - RNA, 19 nt, Artificial Sequence
  Description of Artificial Sequence: Synthetic oligonucleotide
  Antisense strand to SEQ ID NO: 1912530
ucuucucaauagauggcac

SEQ ID NO: 1912532 - RNA, 19 nt, Artificial Sequence
  Description of Artificial Sequence: Synthetic oligonucleotide
  Sense strand starting at position 2788 of SEQ ID NO: 1879511
agagacugaccucgauuga

SEQ ID NO: 1912533 - RNA, 19 nt, Artificial Sequence
  Description of Artificial Sequence: Synthetic oligonucleotide
  Antisense strand to SEQ ID NO: 1912532
ucaaucgaggucagucucu

SEQ ID NO: 1912534 - RNA, 19 nt, Artificial Sequence
  Description of Artificial Sequence: Synthetic oligonucleotide
  Sense strand starting at position 2986 of SEQ ID NO: 1879511
gauggagcccucuguaaua

SEQ ID NO: 1912535 - RNA, 19 nt, Artificial Sequence
  Description of Artificial Sequence: Synthetic oligonucleotide
  Antisense strand to SEQ ID NO: 1912534
uauuacagagggcuccauc

SEQ ID NO: 1912536 - RNA, 19 nt, Artificial Sequence
  Description of Artificial Sequence: Synthetic oligonucleotide
  Sense strand starting at position 3285 of SEQ ID NO: 1879511
cacagucuuuguguuauuu

SEQ ID NO: 1912537 - RNA, 19 nt, Artificial Sequence
  Description of Artificial Sequence: Synthetic oligonucleotide
  Antisense strand to SEQ ID NO: 1912536
aaauaacacaaagacugug

SEQ ID NO: 1912538 - RNA, 19 nt, Artificial Sequence
  Description of Artificial Sequence: Synthetic oligonucleotide
  Sense strand starting at position 3545 of SEQ ID NO: 1879511
aagcgaagugcucaggaaa

SEQ ID NO: 1912539 - RNA, 19 nt, Artificial Sequence
  Description of Artificial Sequence: Synthetic oligonucleotide
  Antisense strand to SEQ ID NO: 1912538
uuuccugagcacuucgcuu

SEQ ID NO: 1912540 - RNA, 19 nt, Artificial Sequence
  Description of Artificial Sequence: Synthetic oligonucleotide
  Sense strand starting at position 3548 of SEQ ID NO: 1879511
cgaagugcucaggaaacaa

SEQ ID NO: 1912541 - RNA, 19 nt, Artificial Sequence
  Description of Artificial Sequence: Synthetic oligonucleotide
  Antisense strand to SEQ ID NO: 1912540
uuguuuccugagcacuucg

SEQ ID NO: 1912542 - RNA, 19 nt, Artificial Sequence
  Description of Artificial Sequence: Synthetic oligonucleotide
  Sense strand starting at position 3577 of SEQ ID NO: 1879511
uauuauagugaugguaaug

SEQ ID NO: 1912543 - RNA, 19 nt, Artificial Sequence
  Description of Artificial Sequence: Synthetic oligonucleotide
  Antisense strand to SEQ ID NO: 1912542
cauuaccaucacuauaaua

SEQ ID NO: 1912544 - RNA, 19 nt, Artificial Sequence
  Description of Artificial Sequence: Synthetic oligonucleotide
  Sense strand starting at position 3631 of SEQ ID NO: 1879511
gaugaugaaugggaugaau

SEQ ID NO: 1912545 - RNA, 19 nt, Artificial Sequence
  Description of Artificial Sequence: Synthetic oligonucleotide
  Antisense strand to SEQ ID NO: 1912544
auucaucccauucaucauc

SEQ ID NO: 1912546 - RNA, 19 nt, Artificial Sequence
  Description of Artificial Sequence: Synthetic oligonucleotide
  Sense strand starting at position 3736 of SEQ ID NO: 1879511
auacauauuugccagauga

SEQ ID NO: 1912547 - RNA, 19 nt, Artificial Sequence
  Description of Artificial Sequence: Synthetic oligonucleotide
  Antisense strand to SEQ ID NO: 1912546
ucaucuggcaaauauguau

SEQ ID NO: 1912548 - RNA, 19 nt, Artificial Sequence
  Description of Artificial Sequence: Synthetic oligonucleotide
  Sense strand starting at position 3788 of SEQ ID NO: 1879511
guaugagugguguggagaa

SEQ ID NO: 1912549 - RNA, 19 nt, Artificial Sequence
  Description of Artificial Sequence: Synthetic oligonucleotide
  Antisense strand to SEQ ID NO: 1912548
uucuccacaccacucauac

SEQ ID NO: 1912550 - RNA, 19 nt, Artificial Sequence
  Description of Artificial Sequence: Synthetic oligonucleotide
  Sense strand starting at position 3852 of SEQ ID NO: 1879511
cauuauugggcugauguca

SEQ ID NO: 1912551 - RNA, 19 nt, Artificial Sequence
  Description of Artificial Sequence: Synthetic oligonucleotide
  Antisense strand to SEQ ID NO: 1912550
ugacaucagcccaauaaug

SEQ ID NO: 1912552 - RNA, 19 nt, Artificial Sequence
  Description of Artificial Sequence: Synthetic oligonucleotide
  Sense strand starting at position 3860 of SEQ ID NO: 1879511
ggcugaugucauggaagag

SEQ ID NO: 1912553 - RNA, 19 nt, Artificial Sequence
  Description of Artificial Sequence: Synthetic oligonucleotide
  Antisense strand to SEQ ID NO: 1912552
cucuuccaugacaucagcc

SEQ ID NO: 1912554 - RNA, 19 nt, Artificial Sequence
  Description of Artificial Sequence: Synthetic oligonucleotide
  Sense strand starting at position 3861 of SEQ ID NO: 1879511
gcugaugucauggaagagu

SEQ ID NO: 1912555 - RNA, 19 nt, Artificial Sequence
  Description of Artificial Sequence: Synthetic oligonucleotide
  Antisense strand to SEQ ID NO: 1912554
acucuuccaugacaucagc

SEQ ID NO: 1912556 - RNA, 19 nt, Artificial Sequence
  Description of Artificial Sequence: Synthetic oligonucleotide
  Sense strand starting at position 3875 of SEQ ID NO: 1879511
agaguucagcgugaugaug

SEQ ID NO: 1912557 - RNA, 19 nt, Artificial Sequence
  Description of Artificial Sequence: Synthetic oligonucleotide
  Antisense strand to SEQ ID NO: 1912556
caucaucacgcugaacucu

SEQ ID NO: 1912558 - RNA, 19 nt, Artificial Sequence
  Description of Artificial Sequence: Synthetic oligonucleotide
  Sense strand starting at position 418 of SEQ ID NO: 1879512
gagaaaugaaccggacugu

SEQ ID NO: 1912559 - RNA, 19 nt, Artificial Sequence
  Description of Artificial Sequence: Synthetic oligonucleotide
  Antisense strand to SEQ ID NO: 1912558
acaguccgguucauuucuc

SEQ ID NO: 1912560 - RNA, 19 nt, Artificial Sequence
  Description of Artificial Sequence: Synthetic oligonucleotide
  Sense strand starting at position 773 of SEQ ID NO: 1879512
agcaguggugaauaacaca

SEQ ID NO: 1912561 - RNA, 19 nt, Artificial Sequence
  Description of Artificial Sequence: Synthetic oligonucleotide
  Antisense strand to SEQ ID NO: 1912560
uguguuauucaccacugcu

SEQ ID NO: 1912562 - RNA, 19 nt, Artificial Sequence
  Description of Artificial Sequence: Synthetic oligonucleotide
  Sense strand starting at position 857 of SEQ ID NO: 1879512
uaaguauaaugguuacaug

SEQ ID NO: 1912563 - RNA, 19 nt, Artificial Sequence
  Description of Artificial Sequence: Synthetic oligonucleotide
  Antisense strand to SEQ ID NO: 1912562
cauguaaccauuauacuua

SEQ ID NO: 1912564 - RNA, 19 nt, Artificial Sequence
  Description of Artificial Sequence: Synthetic oligonucleotide
  Sense strand starting at position 946 of SEQ ID NO: 1879512
gagaguuugccugaaccuu

SEQ ID NO: 1912565 - RNA, 19 nt, Artificial Sequence
  Description of Artificial Sequence: Synthetic oligonucleotide
  Antisense strand to SEQ ID NO: 1912564
aagguucaggcaaacucuc

SEQ ID NO: 1912566 - RNA, 19 nt, Artificial Sequence
  Description of Artificial Sequence: Synthetic oligonucleotide
  Sense strand starting at position 963 of SEQ ID NO: 1879512
uuguauggaacaugaaagu

SEQ ID NO: 1912567 - RNA, 19 nt, Artificial Sequence
  Description of Artificial Sequence: Synthetic oligonucleotide
  Antisense strand to SEQ ID NO: 1912566
acuuucauguuccauacaa

SEQ ID NO: 1912568 - RNA, 19 nt, Artificial Sequence
  Description of Artificial Sequence: Synthetic oligonucleotide
  Sense strand starting at position 988 of SEQ ID NO: 1879512
gggagaguuccuggcugag

SEQ ID NO: 1912569 - RNA, 19 nt, Artificial Sequence
  Description of Artificial Sequence: Synthetic oligonucleotide
  Antisense strand to SEQ ID NO: 1912568
cucagccaggaacucuccc

SEQ ID NO: 1912570 - RNA, 19 nt, Artificial Sequence
  Description of Artificial Sequence: Synthetic oligonucleotide
  Sense strand starting at position 990 of SEQ ID NO: 1879512
gagaguuccuggcugagag

SEQ ID NO: 1912571 - RNA, 19 nt, Artificial Sequence
  Description of Artificial Sequence: Synthetic oligonucleotide
  Antisense strand to SEQ ID NO: 1912570
cucucagccaggaacucuc

SEQ ID NO: 1912572 - RNA, 19 nt, Artificial Sequence
  Description of Artificial Sequence: Synthetic oligonucleotide
  Sense strand starting at position 991 of SEQ ID NO: 1879512
agaguuccuggcugagaga

SEQ ID NO: 1912573 - RNA, 19 nt, Artificial Sequence
  Description of Artificial Sequence: Synthetic oligonucleotide
  Antisense strand to SEQ ID NO: 1912572
ucucucagccaggaacucu

SEQ ID NO: 1912574 - RNA, 19 nt, Artificial Sequence
  Description of Artificial Sequence: Synthetic oligonucleotide
  Sense strand starting at position 1045 of SEQ ID NO: 1879512
cuggcacauaucgggaaua

SEQ ID NO: 1912575 - RNA, 19 nt, Artificial Sequence
  Description of Artificial Sequence: Synthetic oligonucleotide
  Antisense strand to SEQ ID NO: 1912574
uauucccgauaugugccag

SEQ ID NO: 1912576 - RNA, 19 nt, Artificial Sequence
  Description of Artificial Sequence: Synthetic oligonucleotide
  Sense strand starting at position 1145 of SEQ ID NO: 1879512
aaccuuacgggucaauguu

SEQ ID NO: 1912577 - RNA, 19 nt, Artificial Sequence
  Description of Artificial Sequence: Synthetic oligonucleotide
  Antisense strand to SEQ ID NO: 1912576
aacauugacccguaagguu

SEQ ID NO: 1912578 - RNA, 19 nt, Artificial Sequence
  Description of Artificial Sequence: Synthetic oligonucleotide
  Sense strand starting at position 1322 of SEQ ID NO: 1879512
uuacgauuaguccaaguga

SEQ ID NO: 1912579 - RNA, 19 nt, Artificial Sequence
  Description of Artificial Sequence: Synthetic oligonucleotide
  Antisense strand to SEQ ID NO: 1912578
ucacuuggacuaaucguaa

SEQ ID NO: 1912580 - RNA, 19 nt, Artificial Sequence
  Description of Artificial Sequence: Synthetic oligonucleotide
  Sense strand starting at position 1343 of SEQ ID NO: 1879512
gaugaugguaccuggauga

SEQ ID NO: 1912581 - RNA, 19 nt, Artificial Sequence
  Description of Artificial Sequence: Synthetic oligonucleotide
  Antisense strand to SEQ ID NO: 1912580
ucauccagguaccaucauc

SEQ ID NO: 1912582 - RNA, 19 nt, Artificial Sequence
  Description of Artificial Sequence: Synthetic oligonucleotide
  Sense strand starting at position 1529 of SEQ ID NO: 1879512
uuaggucuaccuuacucua

SEQ ID NO: 1912583 - RNA, 19 nt, Artificial Sequence
  Description of Artificial Sequence: Synthetic oligonucleotide
  Antisense strand to SEQ ID NO: 1912582
uagaguaagguagaccuaa

SEQ ID NO: 1912584 - RNA, 19 nt, Artificial Sequence
  Description of Artificial Sequence: Synthetic oligonucleotide
  Sense strand starting at position 1709 of SEQ ID NO: 1879512
ucaacuugccuggaucuaa

SEQ ID NO: 1912585 - RNA, 19 nt, Artificial Sequence
  Description of Artificial Sequence: Synthetic oligonucleotide
  Antisense strand to SEQ ID NO: 1912584
uuagauccaggcaaguuga

SEQ ID NO: 1912586 - RNA, 19 nt, Artificial Sequence
  Description of Artificial Sequence: Synthetic oligonucleotide
  Sense strand starting at position 1736 of SEQ ID NO: 1879512
auaauuugggccuguagca

SEQ ID NO: 1912587 - RNA, 19 nt, Artificial Sequence
  Description of Artificial Sequence: Synthetic oligonucleotide
  Antisense strand to SEQ ID NO: 1912586
ugcuacaggcccaaauuau

SEQ ID NO: 1912588 - RNA, 19 nt, Artificial Sequence
  Description of Artificial Sequence: Synthetic oligonucleotide
  Sense strand starting at position 2212 of SEQ ID NO: 1879512
uguuuaaucagucagagug

SEQ ID NO: 1912589 - RNA, 19 nt, Artificial Sequence
  Description of Artificial Sequence: Synthetic oligonucleotide
  Antisense strand to SEQ ID NO: 1912588
cacucugacugauuaaaca

SEQ ID NO: 1912590 - RNA, 19 nt, Artificial Sequence
  Description of Artificial Sequence: Synthetic oligonucleotide
  Sense strand starting at position 2337 of SEQ ID NO: 1879512
auuggaguucuuggaagag

SEQ ID NO: 1912591 - RNA, 19 nt, Artificial Sequence
  Description of Artificial Sequence: Synthetic oligonucleotide
  Antisense strand to SEQ ID NO: 1912590
cucuuccaagaacuccaau

SEQ ID NO: 1912592 - RNA, 19 nt, Artificial Sequence
  Description of Artificial Sequence: Synthetic oligonucleotide
  Sense strand starting at position 2339 of SEQ ID NO: 1879512
uggaguucuuggaagagug

SEQ ID NO: 1912593 - RNA, 19 nt, Artificial Sequence
  Description of Artificial Sequence: Synthetic oligonucleotide
  Antisense strand to SEQ ID NO: 1912592
cacucuuccaagaacucca

SEQ ID NO: 1912594 - RNA, 19 nt, Artificial Sequence
  Description of Artificial Sequence: Synthetic oligonucleotide
  Sense strand starting at position 2407 of SEQ ID NO: 1879512
uuacauauggguuaugcca

SEQ ID NO: 1912595 - RNA, 19 nt, Artificial Sequence
  Description of Artificial Sequence: Synthetic oligonucleotide
  Antisense strand to SEQ ID NO: 1912594
uggcauaacccauauguaa

SEQ ID NO: 1912596 - RNA, 19 nt, Artificial Sequence
  Description of Artificial Sequence: Synthetic oligonucleotide
  Sense strand starting at position 2444 of SEQ ID NO: 1879512
agagaaauguaugucccua

SEQ ID NO: 1912597 - RNA, 19 nt, Artificial Sequence
  Description of Artificial Sequence: Synthetic oligonucleotide
  Antisense strand to SEQ ID NO: 1912596
uagggacauacauuucucu

SEQ ID NO: 1912598 - RNA, 19 nt, Artificial Sequence
  Description of Artificial Sequence: Synthetic oligonucleotide
  Sense strand starting at position 2446 of SEQ ID NO: 1879512
agaaauguaugucccuaua

SEQ ID NO: 1912599 - RNA, 19 nt, Artificial Sequence
  Description of Artificial Sequence: Synthetic oligonucleotide
  Antisense strand to SEQ ID NO: 1912598
uauagggacauacauuucu

SEQ ID NO: 1912600 - RNA, 19 nt, Artificial Sequence
  Description of Artificial Sequence: Synthetic oligonucleotide
  Sense strand starting at position 2565 of SEQ ID NO: 1879512
cugaauuacugagugaauc

SEQ ID NO: 1912601 - RNA, 19 nt, Artificial Sequence
  Description of Artificial Sequence: Synthetic oligonucleotide
  Antisense strand to SEQ ID NO: 1912600
gauucacucaguaauucag

SEQ ID NO: 1912602 - RNA, 19 nt, Artificial Sequence
  Description of Artificial Sequence: Synthetic oligonucleotide
  Sense strand starting at position 2566 of SEQ ID NO: 1879512
ugaauuacugagugaaucu

SEQ ID NO: 1912603 - RNA, 19 nt, Artificial Sequence
  Description of Artificial Sequence: Synthetic oligonucleotide
  Antisense strand to SEQ ID NO: 1912602
agauucacucaguaauuca

SEQ ID NO: 1912604 - RNA, 19 nt, Artificial Sequence
  Description of Artificial Sequence: Synthetic oligonucleotide
  Sense strand starting at position 2596 of SEQ ID NO: 1879512
uccuuuauggugugaaaga

SEQ ID NO: 1912605 - RNA, 19 nt, Artificial Sequence
  Description of Artificial Sequence: Synthetic oligonucleotide
  Antisense strand to SEQ ID NO: 1912604
ucuuucacaccauaaagga

SEQ ID NO: 1912606 - RNA, 19 nt, Artificial Sequence
  Description of Artificial Sequence: Synthetic oligonucleotide
  Sense strand starting at position 2679 of SEQ ID NO: 1879512
aggcauaaaugauucuuga

SEQ ID NO: 1912607 - RNA, 19 nt, Artificial Sequence
  Description of Artificial Sequence: Synthetic oligonucleotide
  Antisense strand to SEQ ID NO: 1912606
ucaagaaucauuuaugccu

SEQ ID NO: 1912608 - RNA, 19 nt, Artificial Sequence
  Description of Artificial Sequence: Synthetic oligonucleotide
  Sense strand starting at position 2692 of SEQ ID NO: 1879512
ucuugaagccagugagaga

SEQ ID NO: 1912609 - RNA, 19 nt, Artificial Sequence
  Description of Artificial Sequence: Synthetic oligonucleotide
  Antisense strand to SEQ ID NO: 1912608
ucucucacuggcuucaaga

SEQ ID NO: 1912610 - RNA, 19 nt, Artificial Sequence
  Description of Artificial Sequence: Synthetic oligonucleotide
  Sense strand starting at position 2701 of SEQ ID NO: 1879512
cagugagagacuugagucu

SEQ ID NO: 1912611 - RNA, 19 nt, Artificial Sequence
  Description of Artificial Sequence: Synthetic oligonucleotide
  Antisense strand to SEQ ID NO: 1912610
agacucaagucucucacug

SEQ ID NO: 1912612 - RNA, 19 nt, Artificial Sequence
  Description of Artificial Sequence: Synthetic oligonucleotide
  Sense strand starting at position 2886 of SEQ ID NO: 1879512
aggaaauaguuucuaagua

SEQ ID NO: 1912613 - RNA, 19 nt, Artificial Sequence
  Description of Artificial Sequence: Synthetic oligonucleotide
  Antisense strand to SEQ ID NO: 1912612
uacuuagaaacuauuuccu

SEQ ID NO: 1912614 - RNA, 19 nt, Artificial Sequence
  Description of Artificial Sequence: Synthetic oligonucleotide
  Sense strand starting at position 3208 of SEQ ID NO: 1879512
agagcagccagggaguaau

SEQ ID NO: 1912615 - RNA, 19 nt, Artificial Sequence
  Description of Artificial Sequence: Synthetic oligonucleotide
  Antisense strand to SEQ ID NO: 1912614
auuacucccuggcugcucu

SEQ ID NO: 1912616 - RNA, 19 nt, Artificial Sequence
  Description of Artificial Sequence: Synthetic oligonucleotide
  Sense strand starting at position 3255 of SEQ ID NO: 1879512
aguguuagccauguucugu

SEQ ID NO: 1912617 - RNA, 19 nt, Artificial Sequence
  Description of Artificial Sequence: Synthetic oligonucleotide
  Antisense strand to SEQ ID NO: 1912616
acagaacauggcuaacacu

SEQ ID NO: 1912618 - RNA, 19 nt, Artificial Sequence
  Description of Artificial Sequence: Synthetic oligonucleotide
  Sense strand starting at position 3390 of SEQ ID NO: 1879512
guagaaagaacgugagaua

SEQ ID NO: 1912619 - RNA, 19 nt, Artificial Sequence
  Description of Artificial Sequence: Synthetic oligonucleotide
  Antisense strand to SEQ ID NO: 1912618
uaucucacguucuuucuac

SEQ ID NO: 1912620 - RNA, 19 nt, Artificial Sequence
  Description of Artificial Sequence: Synthetic oligonucleotide
  Sense strand starting at position 3447 of SEQ ID NO: 1879512
ccagcugugcugucugagu

SEQ ID NO: 1912621 - RNA, 19 nt, Artificial Sequence
  Description of Artificial Sequence: Synthetic oligonucleotide
  Antisense strand to SEQ ID NO: 1912620
acucagacagcacagcugg

SEQ ID NO: 1912622 - RNA, 19 nt, Artificial Sequence
  Description of Artificial Sequence: Synthetic oligonucleotide
  Sense strand starting at position 3463 of SEQ ID NO: 1879512
agugaaguuccucaguauc

SEQ ID NO: 1912623 - RNA, 19 nt, Artificial Sequence
  Description of Artificial Sequence: Synthetic oligonucleotide
  Antisense strand to SEQ ID NO: 1912622
gauacugaggaacuucacu

SEQ ID NO: 1912624 - RNA, 19 nt, Artificial Sequence
  Description of Artificial Sequence: Synthetic oligonucleotide
  Sense strand starting at position 3555 of SEQ ID NO: 1879512
auguuuguccgccugucua

SEQ ID NO: 1912625 - RNA, 19 nt, Artificial Sequence
  Description of Artificial Sequence: Synthetic oligonucleotide
  Antisense strand to SEQ ID NO: 1912624
uagacaggcggacaaacau

SEQ ID NO: 1912626 - RNA, 19 nt, Artificial Sequence
  Description of Artificial Sequence: Synthetic oligonucleotide
  Sense strand starting at position 3557 of SEQ ID NO: 1879512
guuuguccgccugucuauu

SEQ ID NO: 1912627 - RNA, 19 nt, Artificial Sequence
  Description of Artificial Sequence: Synthetic oligonucleotide
  Antisense strand to SEQ ID NO: 1912626
aauagacaggcggacaaac

SEQ ID NO: 1912628 - RNA, 19 nt, Artificial Sequence
  Description of Artificial Sequence: Synthetic oligonucleotide
  Sense strand starting at position 3567 of SEQ ID NO: 1879512
cugucuauuuaugcacuua

SEQ ID NO: 1912629 - RNA, 19 nt, Artificial Sequence
  Description of Artificial Sequence: Synthetic oligonucleotide
  Antisense strand to SEQ ID NO: 1912628
uaagugcauaaauagacag

SEQ ID NO: 1912630 - RNA, 19 nt, Artificial Sequence
  Description of Artificial Sequence: Synthetic oligonucleotide
  Sense strand starting at position 3710 of SEQ ID NO: 1879512
ggauaaucccaguagcugu

SEQ ID NO: 1912631 - RNA, 19 nt, Artificial Sequence
  Description of Artificial Sequence: Synthetic oligonucleotide
  Antisense strand to SEQ ID NO: 1912630
acagcuacugggauuaucc

SEQ ID NO: 1912632 - RNA, 19 nt, Artificial Sequence
  Description of Artificial Sequence: Synthetic oligonucleotide
  Sense strand starting at position 3751 of SEQ ID NO: 1879512
agaggauuaagguggcaua

SEQ ID NO: 1912633 - RNA, 19 nt, Artificial Sequence
  Description of Artificial Sequence: Synthetic oligonucleotide
  Antisense strand to SEQ ID NO: 1912632
uaugccaccuuaauccucu

SEQ ID NO: 1912634 - RNA, 19 nt, Artificial Sequence
  Description of Artificial Sequence: Synthetic oligonucleotide
  Sense strand starting at position 3752 of SEQ ID NO: 1879512
gaggauuaagguggcauaa

SEQ ID NO: 1912635 - RNA, 19 nt, Artificial Sequence
  Description of Artificial Sequence: Synthetic oligonucleotide
  Antisense strand to SEQ ID NO: 1912634
uuaugccaccuuaauccuc

SEQ ID NO: 1912636 - RNA, 19 nt, Artificial Sequence
  Description of Artificial Sequence: Synthetic oligonucleotide
  Sense strand starting at position 3958 of SEQ ID NO: 1879512
aaggguagccugggagaaa

SEQ ID NO: 1912637 - RNA, 19 nt, Artificial Sequence
  Description of Artificial Sequence: Synthetic oligonucleotide
  Antisense strand to SEQ ID NO: 1912636
uuucucccaggcuacccuu

SEQ ID NO: 1912638 - RNA, 19 nt, Artificial Sequence
  Description of Artificial Sequence: Synthetic oligonucleotide
  Sense strand starting at position 163 of SEQ ID NO: 1879513
gucuucugcgaucaguuaa

SEQ ID NO: 1912639 - RNA, 19 nt, Artificial Sequence
  Description of Artificial Sequence: Synthetic oligonucleotide
  Antisense strand to SEQ ID NO: 1912638
uuaacugaucgcagaagac

SEQ ID NO: 1912640 - RNA, 19 nt, Artificial Sequence
  Description of Artificial Sequence: Synthetic oligonucleotide
  Sense strand starting at position 170 of SEQ ID NO: 1879513
gcgaucaguuaacccauuu

SEQ ID NO: 1912641 - RNA, 19 nt, Artificial Sequence
  Description of Artificial Sequence: Synthetic oligonucleotide
  Antisense strand to SEQ ID NO: 1912640
aaauggguuaacugaucgc

SEQ ID NO: 1912642 - RNA, 19 nt, Artificial Sequence
  Description of Artificial Sequence: Synthetic oligonucleotide
  Sense strand starting at position 421 of SEQ ID NO: 1879513
uuguuugguucuucucuga

SEQ ID NO: 1912643 - RNA, 19 nt, Artificial Sequence
  Description of Artificial Sequence: Synthetic oligonucleotide
  Antisense strand to SEQ ID NO: 1912642
ucagagaagaaccaaacaa

SEQ ID NO: 1912644 - RNA, 19 nt, Artificial Sequence
  Description of Artificial Sequence: Synthetic oligonucleotide
  Sense strand starting at position 424 of SEQ ID NO: 1879513
uuugguucuucucugagga

SEQ ID NO: 1912645 - RNA, 19 nt, Artificial Sequence
  Description of Artificial Sequence: Synthetic oligonucleotide
  Antisense strand to SEQ ID NO: 1912644
uccucagagaagaaccaaa

SEQ ID NO: 1912646 - RNA, 19 nt, Artificial Sequence
  Description of Artificial Sequence: Synthetic oligonucleotide
  Sense strand starting at position 629 of SEQ ID NO: 1879513
ugggaucuuugagagagga

SEQ ID NO: 1912647 - RNA, 19 nt, Artificial Sequence
  Description of Artificial Sequence: Synthetic oligonucleotide
  Antisense strand to SEQ ID NO: 1912646
uccucucucaaagauccca

SEQ ID NO: 1912648 - RNA, 19 nt, Artificial Sequence
  Description of Artificial Sequence: Synthetic oligonucleotide
  Sense strand starting at position 666 of SEQ ID NO: 1879513
ggacucagugcucaugguu

SEQ ID NO: 1912649 - RNA, 19 nt, Artificial Sequence
  Description of Artificial Sequence: Synthetic oligonucleotide
  Antisense strand to SEQ ID NO: 1912648
aaccaugagcacugagucc

SEQ ID NO: 1912650 - RNA, 19 nt, Artificial Sequence
  Description of Artificial Sequence: Synthetic oligonucleotide
  Sense strand starting at position 746 of SEQ ID NO: 1879513
cccagagagcagcacuaau

SEQ ID NO: 1912651 - RNA, 19 nt, Artificial Sequence
  Description of Artificial Sequence: Synthetic oligonucleotide
  Antisense strand to SEQ ID NO: 1912650
auuagugcugcucucuggg

SEQ ID NO: 1912652 - RNA, 19 nt, Artificial Sequence
  Description of Artificial Sequence: Synthetic oligonucleotide
  Sense strand starting at position 763 of SEQ ID NO: 1879513
augggauuagggugucuga

SEQ ID NO: 1912653 - RNA, 19 nt, Artificial Sequence
  Description of Artificial Sequence: Synthetic oligonucleotide
  Antisense strand to SEQ ID NO: 1912652
ucagacacccuaaucccau

SEQ ID NO: 1912654 - RNA, 19 nt, Artificial Sequence
  Description of Artificial Sequence: Synthetic oligonucleotide
  Sense strand starting at position 772 of SEQ ID NO: 1879513
gggugucugagguguuucu

SEQ ID NO: 1912655 - RNA, 19 nt, Artificial Sequence
  Description of Artificial Sequence: Synthetic oligonucleotide
  Antisense strand to SEQ ID NO: 1912654
agaaacaccucagacaccc

SEQ ID NO: 1912656 - RNA, 19 nt, Artificial Sequence
  Description of Artificial Sequence: Synthetic oligonucleotide
  Sense strand starting at position 921 of SEQ ID NO: 1879513
cugagagguugacccgaau

SEQ ID NO: 1912657 - RNA, 19 nt, Artificial Sequence
  Description of Artificial Sequence: Synthetic oligonucleotide
  Antisense strand to SEQ ID NO: 1912656
auucgggucaaccucucag

SEQ ID NO: 1912658 - RNA, 19 nt, Artificial Sequence
  Description of Artificial Sequence: Synthetic oligonucleotide
  Sense strand starting at position 1117 of SEQ ID NO: 1879513
gaccuuucccacugacguu

SEQ ID NO: 1912659 - RNA, 19 nt, Artificial Sequence
  Description of Artificial Sequence: Synthetic oligonucleotide
  Antisense strand to SEQ ID NO: 1912658
aacgucagugggaaagguc

SEQ ID NO: 1912660 - RNA, 19 nt, Artificial Sequence
  Description of Artificial Sequence: Synthetic oligonucleotide
  Sense strand starting at position 1286 of SEQ ID NO: 1879513
gagacaagguccucugugu

SEQ ID NO: 1912661 - RNA, 19 nt, Artificial Sequence
  Description of Artificial Sequence: Synthetic oligonucleotide
  Antisense strand to SEQ ID NO: 1912660
acacagaggaccuugucuc

SEQ ID NO: 1912662 - RNA, 19 nt, Artificial Sequence
  Description of Artificial Sequence: Synthetic oligonucleotide
  Sense strand starting at position 1317 of SEQ ID NO: 1879513
agagcaguggcuugagcau

SEQ ID NO: 1912663 - RNA, 19 nt, Artificial Sequence
  Description of Artificial Sequence: Synthetic oligonucleotide
  Antisense strand to SEQ ID NO: 1912662
augcucaagccacugcucu

SEQ ID NO: 1912664 - RNA, 19 nt, Artificial Sequence
  Description of Artificial Sequence: Synthetic oligonucleotide
  Sense strand starting at position 1468 of SEQ ID NO: 1879513
acagaagucucucuauguu

SEQ ID NO: 1912665 - RNA, 19 nt, Artificial Sequence
  Description of Artificial Sequence: Synthetic oligonucleotide
  Antisense strand to SEQ ID NO: 1912664
aacauagagagacuucugu

SEQ ID NO: 1912666 - RNA, 19 nt, Artificial Sequence
  Description of Artificial Sequence: Synthetic oligonucleotide
  Sense strand starting at position 2108 of SEQ ID NO: 1879513
uguggaacucuggguggau

SEQ ID NO: 1912667 - RNA, 19 nt, Artificial Sequence
  Description of Artificial Sequence: Synthetic oligonucleotide
  Antisense strand to SEQ ID NO: 1912666
auccacccagaguuccaca

SEQ ID NO: 1912668 - RNA, 19 nt, Artificial Sequence
  Description of Artificial Sequence: Synthetic oligonucleotide
  Sense strand starting at position 2109 of SEQ ID NO: 1879513
guggaacucuggguggauu

SEQ ID NO: 1912669 - RNA, 19 nt, Artificial Sequence
  Description of Artificial Sequence: Synthetic oligonucleotide
  Antisense strand to SEQ ID NO: 1912668
aauccacccagaguuccac

SEQ ID NO: 1912670 - RNA, 19 nt, Artificial Sequence
  Description of Artificial Sequence: Synthetic oligonucleotide
  Sense strand starting at position 2194 of SEQ ID NO: 1879513
gugagcaagugacugaauu

SEQ ID NO: 1912671 - RNA, 19 nt, Artificial Sequence
  Description of Artificial Sequence: Synthetic oligonucleotide
  Antisense strand to SEQ ID NO: 1912670
aauucagucacuugcucac

SEQ ID NO: 1912672 - RNA, 19 nt, Artificial Sequence
  Description of Artificial Sequence: Synthetic oligonucleotide
  Sense strand starting at position 2258 of SEQ ID NO: 1879513
gcuauaguacguguuggua

SEQ ID NO: 1912673 - RNA, 19 nt, Artificial Sequence
  Description of Artificial Sequence: Synthetic oligonucleotide
  Antisense strand to SEQ ID NO: 1912672
uaccaacacguacuauagc

SEQ ID NO: 1912674 - RNA, 19 nt, Artificial Sequence
  Description of Artificial Sequence: Synthetic oligonucleotide
  Sense strand starting at position 2836 of SEQ ID NO: 1879513
ccaagugcuccuggaggga

SEQ ID NO: 1912675 - RNA, 19 nt, Artificial Sequence
  Description of Artificial Sequence: Synthetic oligonucleotide
  Antisense strand to SEQ ID NO: 1912674
ucccuccaggagcacuugg

SEQ ID NO: 1912676 - RNA, 19 nt, Artificial Sequence
  Description of Artificial Sequence: Synthetic oligonucleotide
  Sense strand starting at position 2898 of SEQ ID NO: 1879513
gauuaauaagacggucucu

SEQ ID NO: 1912677 - RNA, 19 nt, Artificial Sequence
  Description of Artificial Sequence: Synthetic oligonucleotide
  Antisense strand to SEQ ID NO: 1912676
agagaccgucuuauuaauc

SEQ ID NO: 1912678 - RNA, 19 nt, Artificial Sequence
  Description of Artificial Sequence: Synthetic oligonucleotide
  Sense strand starting at position 2977 of SEQ ID NO: 1879513
augugaugguguccaccuu

SEQ ID NO: 1912679 - RNA, 19 nt, Artificial Sequence
  Description of Artificial Sequence: Synthetic oligonucleotide
  Antisense strand to SEQ ID NO: 1912678
aagguggacaccaucacau

SEQ ID NO: 1912680 - RNA, 19 nt, Artificial Sequence
  Description of Artificial Sequence: Synthetic oligonucleotide
  Sense strand starting at position 2996 of SEQ ID NO: 1879513
ccacaaguacucgggcaaa

SEQ ID NO: 1912681 - RNA, 19 nt, Artificial Sequence
  Description of Artificial Sequence: Synthetic oligonucleotide
  Antisense strand to SEQ ID NO: 1912680
uuugcccgaguacuugugg

SEQ ID NO: 1912682 - RNA, 19 nt, Artificial Sequence
  Description of Artificial Sequence: Synthetic oligonucleotide
  Sense strand starting at position 2999 of SEQ ID NO: 1879513
caaguacucgggcaaagag

SEQ ID NO: 1912683 - RNA, 19 nt, Artificial Sequence
  Description of Artificial Sequence: Synthetic oligonucleotide
  Antisense strand to SEQ ID NO: 1912682
cucuuugcccgaguacuug

SEQ ID NO: 1912684 - RNA, 19 nt, Artificial Sequence
  Description of Artificial Sequence: Synthetic oligonucleotide
  Sense strand starting at position 3094 of SEQ ID NO: 1879513
guggguagugccugaguga

SEQ ID NO: 1912685 - RNA, 19 nt, Artificial Sequence
  Description of Artificial Sequence: Synthetic oligonucleotide
  Antisense strand to SEQ ID NO: 1912684
ucacucaggcacuacccac

SEQ ID NO: 1912686 - RNA, 19 nt, Artificial Sequence
  Description of Artificial Sequence: Synthetic oligonucleotide
  Sense strand starting at position 3148 of SEQ ID NO: 1879513
gcagucuugcucuagagca

SEQ ID NO: 1912687 - RNA, 19 nt, Artificial Sequence
  Description of Artificial Sequence: Synthetic oligonucleotide
  Antisense strand to SEQ ID NO: 1912686
ugcucuagagcaagacugc

SEQ ID NO: 1912688 - RNA, 19 nt, Artificial Sequence
  Description of Artificial Sequence: Synthetic oligonucleotide
  Sense strand starting at position 3150 of SEQ ID NO: 1879513
agucuugcucuagagcauu

SEQ ID NO: 1912689 - RNA, 19 nt, Artificial Sequence
  Description of Artificial Sequence: Synthetic oligonucleotide
  Antisense strand to SEQ ID NO: 1912688
aaugcucuagagcaagacu

SEQ ID NO: 1912690 - RNA, 19 nt, Artificial Sequence
  Description of Artificial Sequence: Synthetic oligonucleotide
  Sense strand starting at position 3289 of SEQ ID NO: 1879513
aggugcuuugcacaacuua

SEQ ID NO: 1912691 - RNA, 19 nt, Artificial Sequence
  Description of Artificial Sequence: Synthetic oligonucleotide
  Antisense strand to SEQ ID NO: 1912690
uaaguugugcaaagcaccu

SEQ ID NO: 1912692 - RNA, 19 nt, Artificial Sequence
  Description of Artificial Sequence: Synthetic oligonucleotide
  Sense strand starting at position 3335 of SEQ ID NO: 1879513
cuaaguaacuucccaaggu

SEQ ID NO: 1912693 - RNA, 19 nt, Artificial Sequence
  Description of Artificial Sequence: Synthetic oligonucleotide
  Antisense strand to SEQ ID NO: 1912692
accuugggaaguuacuuag

SEQ ID NO: 1912694 - RNA, 19 nt, Artificial Sequence
  Description of Artificial Sequence: Synthetic oligonucleotide
  Sense strand starting at position 3414 of SEQ ID NO: 1879513
aguggacacuguuugaguu

SEQ ID NO: 1912695 - RNA, 19 nt, Artificial Sequence
  Description of Artificial Sequence: Synthetic oligonucleotide
  Antisense strand to SEQ ID NO: 1912694
aacucaaacaguguccacu

SEQ ID NO: 1912696 - RNA, 19 nt, Artificial Sequence
  Description of Artificial Sequence: Synthetic oligonucleotide
  Sense strand starting at position 3415 of SEQ ID NO: 1879513
guggacacuguuugaguuu

SEQ ID NO: 1912697 - RNA, 19 nt, Artificial Sequence
  Description of Artificial Sequence: Synthetic oligonucleotide
  Antisense strand to SEQ ID NO: 1912696
aaacucaaacaguguccac

SEQ ID NO: 1912698 - RNA, 19 nt, Artificial Sequence
  Description of Artificial Sequence: Synthetic oligonucleotide
  Sense strand starting at position 3418 of SEQ ID NO: 1879513
gacacuguuugaguuucua

SEQ ID NO: 1912699 - RNA, 19 nt, Artificial Sequence
  Description of Artificial Sequence: Synthetic oligonucleotide
  Antisense strand to SEQ ID NO: 1912698
uagaaacucaaacaguguc

SEQ ID NO: 1912700 - RNA, 19 nt, Artificial Sequence
  Description of Artificial Sequence: Synthetic oligonucleotide
  Sense strand starting at position 3426 of SEQ ID NO: 1879513
uugaguuucuauuuggcuu

SEQ ID NO: 1912701 - RNA, 19 nt, Artificial Sequence
  Description of Artificial Sequence: Synthetic oligonucleotide
  Antisense strand to SEQ ID NO: 1912700
aagccaaauagaaacucaa

SEQ ID NO: 1912702 - RNA, 19 nt, Artificial Sequence
  Description of Artificial Sequence: Synthetic oligonucleotide
  Sense strand starting at position 3432 of SEQ ID NO: 1879513
uucuauuuggcuuguagau

SEQ ID NO: 1912703 - RNA, 19 nt, Artificial Sequence
  Description of Artificial Sequence: Synthetic oligonucleotide
  Antisense strand to SEQ ID NO: 1912702
aucuacaagccaaauagaa

SEQ ID NO: 1912704 - RNA, 19 nt, Artificial Sequence
  Description of Artificial Sequence: Synthetic oligonucleotide
  Sense strand starting at position 3562 of SEQ ID NO: 1879513
uuacuaccucaugggauua

SEQ ID NO: 1912705 - RNA, 19 nt, Artificial Sequence
  Description of Artificial Sequence: Synthetic oligonucleotide
  Antisense strand to SEQ ID NO: 1912704
uaaucccaugagguaguaa

SEQ ID NO: 1912706 - RNA, 19 nt, Artificial Sequence
  Description of Artificial Sequence: Synthetic oligonucleotide
  Sense strand starting at position 3572 of SEQ ID NO: 1879513
augggauuauuagaacaac

SEQ ID NO: 1912707 - RNA, 19 nt, Artificial Sequence
  Description of Artificial Sequence: Synthetic oligonucleotide
  Antisense strand to SEQ ID NO: 1912706
guuguucuaauaaucccau

SEQ ID NO: 1912708 - RNA, 19 nt, Artificial Sequence
  Description of Artificial Sequence: Synthetic oligonucleotide
  Sense strand starting at position 3886 of SEQ ID NO: 1879513
guggacuuccaagaguacu

SEQ ID NO: 1912709 - RNA, 19 nt, Artificial Sequence
  Description of Artificial Sequence: Synthetic oligonucleotide
  Antisense strand to SEQ ID NO: 1912708
aguacucuuggaaguccac

SEQ ID NO: 1912710 - RNA, 19 nt, Artificial Sequence
  Description of Artificial Sequence: Synthetic oligonucleotide
  Sense strand starting at position 3894 of SEQ ID NO: 1879513
ccaagaguacugugucuuc

SEQ ID NO: 1912711 - RNA, 19 nt, Artificial Sequence
  Description of Artificial Sequence: Synthetic oligonucleotide
  Antisense strand to SEQ ID NO: 1912710
gaagacacaguacucuugg

SEQ ID NO: 1912712 - RNA, 19 nt, Artificial Sequence
  Description of Artificial Sequence: Synthetic oligonucleotide
  Sense strand starting at position 3924 of SEQ ID NO: 1879513
cgccaugauguguaacgaa

SEQ ID NO: 1912713 - RNA, 19 nt, Artificial Sequence
  Description of Artificial Sequence: Synthetic oligonucleotide
  Antisense strand to SEQ ID NO: 1912712
uucguuacacaucauggcg

SEQ ID NO: 1912714 - RNA, 19 nt, Artificial Sequence
  Description of Artificial Sequence: Synthetic oligonucleotide
  Sense strand starting at position 3946 of SEQ ID NO: 1879513
uuugaaggcuucccagaua

SEQ ID NO: 1912715 - RNA, 19 nt, Artificial Sequence
  Description of Artificial Sequence: Synthetic oligonucleotide
  Antisense strand to SEQ ID NO: 1912714
uaucugggaagccuucaaa

SEQ ID NO: 1912716 - RNA, 19 nt, Artificial Sequence
  Description of Artificial Sequence: Synthetic oligonucleotide
  Sense strand starting at position 3949 of SEQ ID NO: 1879513
gaaggcuucccagauaagc

SEQ ID NO: 1912717 - RNA, 19 nt, Artificial Sequence
  Description of Artificial Sequence: Synthetic oligonucleotide
  Antisense strand to SEQ ID NO: 1912716
gcuuaucugggaagccuuc

SEQ ID NO: 1912718 - RNA, 19 nt, Artificial Sequence
  Description of Artificial Sequence: Synthetic oligonucleotide
  Sense strand starting at position 74 of SEQ ID NO: 1879514
gcaggaaguccuuaaccua

SEQ ID NO: 1912719 - RNA, 19 nt, Artificial Sequence
  Description of Artificial Sequence: Synthetic oligonucleotide
  Antisense strand to SEQ ID NO: 1912718
uagguuaaggacuuccugc

SEQ ID NO: 1912720 - RNA, 19 nt, Artificial Sequence
  Description of Artificial Sequence: Synthetic oligonucleotide
  Sense strand starting at position 310 of SEQ ID NO: 1879514
gaacauuggcucuggagca

SEQ ID NO: 1912721 - RNA, 19 nt, Artificial Sequence
  Description of Artificial Sequence: Synthetic oligonucleotide
  Antisense strand to SEQ ID NO: 1912720
ugcuccagagccaauguuc

SEQ ID NO: 1912722 - RNA, 19 nt, Artificial Sequence
  Description of Artificial Sequence: Synthetic oligonucleotide
  Sense strand starting at position 387 of SEQ ID NO: 1879514
ggauaugccagcuggaaag

SEQ ID NO: 1912723 - RNA, 19 nt, Artificial Sequence
  Description of Artificial Sequence: Synthetic oligonucleotide
  Antisense strand to SEQ ID NO: 1912722
cuuuccagcuggcauaucc

SEQ ID NO: 1912724 - RNA, 19 nt, Artificial Sequence
  Description of Artificial Sequence: Synthetic oligonucleotide
  Sense strand starting at position 412 of SEQ ID NO: 1879514
ggagaagucaacugaguac

SEQ ID NO: 1912725 - RNA, 19 nt, Artificial Sequence
  Description of Artificial Sequence: Synthetic oligonucleotide
  Antisense strand to SEQ ID NO: 1912724
guacucaguugacuucucc

SEQ ID NO: 1912726 - RNA, 19 nt, Artificial Sequence
  Description of Artificial Sequence: Synthetic oligonucleotide
  Sense strand starting at position 518 of SEQ ID NO: 1879514
cauugaaccugugugauca

SEQ ID NO: 1912727 - RNA, 19 nt, Artificial Sequence
  Description of Artificial Sequence: Synthetic oligonucleotide
  Antisense strand to SEQ ID NO: 1912726
ugaucacacagguucaaug

SEQ ID NO: 1912728 - RNA, 19 nt, Artificial Sequence
  Description of Artificial Sequence: Synthetic oligonucleotide
  Sense strand starting at position 868 of SEQ ID NO: 1879514
guucuuaaccaucaggcga

SEQ ID NO: 1912729 - RNA, 19 nt, Artificial Sequence
  Description of Artificial Sequence: Synthetic oligonucleotide
  Antisense strand to SEQ ID NO: 1912728
ucgccugaugguuaagaac

SEQ ID NO: 1912730 - RNA, 19 nt, Artificial Sequence
  Description of Artificial Sequence: Synthetic oligonucleotide
  Sense strand starting at position 889 of SEQ ID NO: 1879514
gugcguagucugguagcaa

SEQ ID NO: 1912731 - RNA, 19 nt, Artificial Sequence
  Description of Artificial Sequence: Synthetic oligonucleotide
  Antisense strand to SEQ ID NO: 1912730
uugcuaccagacuacgcac

SEQ ID NO: 1912732 - RNA, 19 nt, Artificial Sequence
  Description of Artificial Sequence: Synthetic oligonucleotide
  Sense strand starting at position 1080 of SEQ ID NO: 1879514
ggaccacugucuccaaaca

SEQ ID NO: 1912733 - RNA, 19 nt, Artificial Sequence
  Description of Artificial Sequence: Synthetic oligonucleotide
  Antisense strand to SEQ ID NO: 1912732
uguuuggagacaguggucc

SEQ ID NO: 1912734 - RNA, 19 nt, Artificial Sequence
  Description of Artificial Sequence: Synthetic oligonucleotide
  Sense strand starting at position 1967 of SEQ ID NO: 1879514
cuuaucugugaauggaaau

SEQ ID NO: 1912735 - RNA, 19 nt, Artificial Sequence
  Description of Artificial Sequence: Synthetic oligonucleotide
  Antisense strand to SEQ ID NO: 1912734
auuuccauucacagauaag

SEQ ID NO: 1912736 - RNA, 19 nt, Artificial Sequence
  Description of Artificial Sequence: Synthetic oligonucleotide
  Sense strand starting at position 2018 of SEQ ID NO: 1879514
ucaguugugagggaaugca

SEQ ID NO: 1912737 - RNA, 19 nt, Artificial Sequence
  Description of Artificial Sequence: Synthetic oligonucleotide
  Antisense strand to SEQ ID NO: 1912736
ugcauucccucacaacuga

SEQ ID NO: 1912738 - RNA, 19 nt, Artificial Sequence
  Description of Artificial Sequence: Synthetic oligonucleotide
  Sense strand starting at position 2119 of SEQ ID NO: 1879514
aagaguuuaugauccugaa

SEQ ID NO: 1912739 - RNA, 19 nt, Artificial Sequence
  Description of Artificial Sequence: Synthetic oligonucleotide
  Antisense strand to SEQ ID NO: 1912738
uucaggaucauaaacucuu

SEQ ID NO: 1912740 - RNA, 19 nt, Artificial Sequence
  Description of Artificial Sequence: Synthetic oligonucleotide
  Sense strand starting at position 2151 of SEQ ID NO: 1879514
ggaggaggaucuguguaua

SEQ ID NO: 1912741 - RNA, 19 nt, Artificial Sequence
  Description of Artificial Sequence: Synthetic oligonucleotide
  Antisense strand to SEQ ID NO: 1912740
uauacacagauccuccucc

SEQ ID NO: 1912742 - RNA, 19 nt, Artificial Sequence
  Description of Artificial Sequence: Synthetic oligonucleotide
  Sense strand starting at position 2154 of SEQ ID NO: 1879514
ggaggaucuguguauaacg

SEQ ID NO: 1912743 - RNA, 19 nt, Artificial Sequence
  Description of Artificial Sequence: Synthetic oligonucleotide
  Antisense strand to SEQ ID NO: 1912742
cguuauacacagauccucc

SEQ ID NO: 1912744 - RNA, 19 nt, Artificial Sequence
  Description of Artificial Sequence: Synthetic oligonucleotide
  Sense strand starting at position 2161 of SEQ ID NO: 1879514
cuguguauaacguucggca

SEQ ID NO: 1912745 - RNA, 19 nt, Artificial Sequence
  Description of Artificial Sequence: Synthetic oligonucleotide
  Antisense strand to SEQ ID NO: 1912744
ugccgaacguuauacacag

SEQ ID NO: 1912746 - RNA, 19 nt, Artificial Sequence
  Description of Artificial Sequence: Synthetic oligonucleotide
  Sense strand starting at position 2349 of SEQ ID NO: 1879514
acucgaguaacugggauua

SEQ ID NO: 1912747 - RNA, 19 nt, Artificial Sequence
  Description of Artificial Sequence: Synthetic oligonucleotide
  Antisense strand to SEQ ID NO: 1912746
uaaucccaguuacucgagu

SEQ ID NO: 1912748 - RNA, 19 nt, Artificial Sequence
  Description of Artificial Sequence: Synthetic oligonucleotide
  Sense strand starting at position 2484 of SEQ ID NO: 1879514
uccaaagugcuagaaguau

SEQ ID NO: 1912749 - RNA, 19 nt, Artificial Sequence
  Description of Artificial Sequence: Synthetic oligonucleotide
  Antisense strand to SEQ ID NO: 1912748
auacuucuagcacuuugga

SEQ ID NO: 1912750 - RNA, 19 nt, Artificial Sequence
  Description of Artificial Sequence: Synthetic oligonucleotide
  Sense strand starting at position 2490 of SEQ ID NO: 1879514
gugcuagaaguauaggcau

SEQ ID NO: 1912751 - RNA, 19 nt, Artificial Sequence
  Description of Artificial Sequence: Synthetic oligonucleotide
  Antisense strand to SEQ ID NO: 1912750
augccuauacuucuagcac

SEQ ID NO: 1912752 - RNA, 19 nt, Artificial Sequence
  Description of Artificial Sequence: Synthetic oligonucleotide
  Sense strand starting at position 2492 of SEQ ID NO: 1879514
gcuagaaguauaggcauga

SEQ ID NO: 1912753 - RNA, 19 nt, Artificial Sequence
  Description of Artificial Sequence: Synthetic oligonucleotide
  Antisense strand to SEQ ID NO: 1912752
ucaugccuauacuucuagc

SEQ ID NO: 1912754 - RNA, 19 nt, Artificial Sequence
  Description of Artificial Sequence: Synthetic oligonucleotide
  Sense strand starting at position 2566 of SEQ ID NO: 1879514
aggaguuauuaacugguga

SEQ ID NO: 1912755 - RNA, 19 nt, Artificial Sequence
  Description of Artificial Sequence: Synthetic oligonucleotide
  Antisense strand to SEQ ID NO: 1912754
ucaccaguuaauaacuccu

SEQ ID NO: 1912756 - RNA, 19 nt, Artificial Sequence
  Description of Artificial Sequence: Synthetic oligonucleotide
  Sense strand starting at position 2567 of SEQ ID NO: 1879514
ggaguuauuaacuggugag

SEQ ID NO: 1912757 - RNA, 19 nt, Artificial Sequence
  Description of Artificial Sequence: Synthetic oligonucleotide
  Antisense strand to SEQ ID NO: 1912756
cucaccaguuaauaacucc

SEQ ID NO: 1912758 - RNA, 19 nt, Artificial Sequence
  Description of Artificial Sequence: Synthetic oligonucleotide
  Sense strand starting at position 2568 of SEQ ID NO: 1879514
gaguuauuaacuggugagg

SEQ ID NO: 1912759 - RNA, 19 nt, Artificial Sequence
  Description of Artificial Sequence: Synthetic oligonucleotide
  Antisense strand to SEQ ID NO: 1912758
ccucaccaguuaauaacuc

SEQ ID NO: 1912760 - RNA, 19 nt, Artificial Sequence
  Description of Artificial Sequence: Synthetic oligonucleotide
  Sense strand starting at position 2595 of SEQ ID NO: 1879514
guguuugguaagucgucuu

SEQ ID NO: 1912761 - RNA, 19 nt, Artificial Sequence
  Description of Artificial Sequence: Synthetic oligonucleotide
  Antisense strand to SEQ ID NO: 1912760
aagacgacuuaccaaacac

SEQ ID NO: 1912762 - RNA, 19 nt, Artificial Sequence
  Description of Artificial Sequence: Synthetic oligonucleotide
  Sense strand starting at position 2630 of SEQ ID NO: 1879514
uuauaagccggguaaauug

SEQ ID NO: 1912763 - RNA, 19 nt, Artificial Sequence
  Description of Artificial Sequence: Synthetic oligonucleotide
  Antisense strand to SEQ ID NO: 1912762
caauuuacccggcuuauaa

SEQ ID NO: 1912764 - RNA, 19 nt, Artificial Sequence
  Description of Artificial Sequence: Synthetic oligonucleotide
  Sense strand starting at position 2667 of SEQ ID NO: 1879514
gagagccagccuuaagaau

SEQ ID NO: 1912765 - RNA, 19 nt, Artificial Sequence
  Description of Artificial Sequence: Synthetic oligonucleotide
  Antisense strand to SEQ ID NO: 1912764
auucuuaaggcuggcucuc

SEQ ID NO: 1912766 - RNA, 19 nt, Artificial Sequence
  Description of Artificial Sequence: Synthetic oligonucleotide
  Sense strand starting at position 3013 of SEQ ID NO: 1879514
gacagucuguuccuagaaa

SEQ ID NO: 1912767 - RNA, 19 nt, Artificial Sequence
  Description of Artificial Sequence: Synthetic oligonucleotide
  Antisense strand to SEQ ID NO: 1912766
uuucuaggaacagacuguc

SEQ ID NO: 1912768 - RNA, 19 nt, Artificial Sequence
  Description of Artificial Sequence: Synthetic oligonucleotide
  Sense strand starting at position 3024 of SEQ ID NO: 1879514
ccuagaaaccuggguugua

SEQ ID NO: 1912769 - RNA, 19 nt, Artificial Sequence
  Description of Artificial Sequence: Synthetic oligonucleotide
  Antisense strand to SEQ ID NO: 1912768
uacaacccagguuucuagg

SEQ ID NO: 1912770 - RNA, 19 nt, Artificial Sequence
  Description of Artificial Sequence: Synthetic oligonucleotide
  Sense strand starting at position 3025 of SEQ ID NO: 1879514
cuagaaaccuggguuguaa

SEQ ID NO: 1912771 - RNA, 19 nt, Artificial Sequence
  Description of Artificial Sequence: Synthetic oligonucleotide
  Antisense strand to SEQ ID NO: 1912770
uuacaacccagguuucuag

SEQ ID NO: 1912772 - RNA, 19 nt, Artificial Sequence
  Description of Artificial Sequence: Synthetic oligonucleotide
  Sense strand starting at position 3471 of SEQ ID NO: 1879514
cacugagugguugacggua

SEQ ID NO: 1912773 - RNA, 19 nt, Artificial Sequence
  Description of Artificial Sequence: Synthetic oligonucleotide
  Antisense strand to SEQ ID NO: 1912772
uaccgucaaccacucagug

SEQ ID NO: 1912774 - RNA, 19 nt, Artificial Sequence
  Description of Artificial Sequence: Synthetic oligonucleotide
  Sense strand starting at position 3559 of SEQ ID NO: 1879514
ccaaccuuucuuggacgaa

SEQ ID NO: 1912775 - RNA, 19 nt, Artificial Sequence
  Description of Artificial Sequence: Synthetic oligonucleotide
  Antisense strand to SEQ ID NO: 1912774
uucguccaagaaagguugg

SEQ ID NO: 1912776 - RNA, 19 nt, Artificial Sequence
  Description of Artificial Sequence: Synthetic oligonucleotide
  Sense strand starting at position 3562 of SEQ ID NO: 1879514
accuuucuuggacgaaaua

SEQ ID NO: 1912777 - RNA, 19 nt, Artificial Sequence
  Description of Artificial Sequence: Synthetic oligonucleotide
  Antisense strand to SEQ ID NO: 1912776
uauuucguccaagaaaggu

SEQ ID NO: 1912778 - RNA, 19 nt, Artificial Sequence
  Description of Artificial Sequence: Synthetic oligonucleotide
  Sense strand starting at position 3563 of SEQ ID NO: 1879514
ccuuucuuggacgaaauau

SEQ ID NO: 1912779 - RNA, 19 nt, Artificial Sequence
  Description of Artificial Sequence: Synthetic oligonucleotide
  Antisense strand to SEQ ID NO: 1912778
auauuucguccaagaaagg

SEQ ID NO: 1912780 - RNA, 19 nt, Artificial Sequence
  Description of Artificial Sequence: Synthetic oligonucleotide
  Sense strand starting at position 3710 of SEQ ID NO: 1879514
guguacucccaagaauauc

SEQ ID NO: 1912781 - RNA, 19 nt, Artificial Sequence
  Description of Artificial Sequence: Synthetic oligonucleotide
  Antisense strand to SEQ ID NO: 1912780
gauauucuugggaguacac

SEQ ID NO: 1912782 - RNA, 19 nt, Artificial Sequence
  Description of Artificial Sequence: Synthetic oligonucleotide
  Sense strand starting at position 3852 of SEQ ID NO: 1879514
ucaauuguugcucaggaaa

SEQ ID NO: 1912783 - RNA, 19 nt, Artificial Sequence
  Description of Artificial Sequence: Synthetic oligonucleotide
  Antisense strand to SEQ ID NO: 1912782
uuuccugagcaacaauuga

SEQ ID NO: 1912784 - RNA, 19 nt, Artificial Sequence
  Description of Artificial Sequence: Synthetic oligonucleotide
  Sense strand starting at position 3876 of SEQ ID NO: 1879514
uugagagauucucugaggu

SEQ ID NO: 1912785 - RNA, 19 nt, Artificial Sequence
  Description of Artificial Sequence: Synthetic oligonucleotide
  Antisense strand to SEQ ID NO: 1912784
accucagagaaucucucaa

SEQ ID NO: 1912786 - RNA, 19 nt, Artificial Sequence
  Description of Artificial Sequence: Synthetic oligonucleotide
  Sense strand starting at position 3925 of SEQ ID NO: 1879514
uauguauuauaugucugga

SEQ ID NO: 1912787 - RNA, 19 nt, Artificial Sequence
  Description of Artificial Sequence: Synthetic oligonucleotide
  Antisense strand to SEQ ID NO: 1912786
uccagacauauaauacaua

SEQ ID NO: 1912788 - RNA, 19 nt, Artificial Sequence
  Description of Artificial Sequence: Synthetic oligonucleotide
  Sense strand starting at position 3927 of SEQ ID NO: 1879514
uguauuauaugucuggaag

SEQ ID NO: 1912789 - RNA, 19 nt, Artificial Sequence
  Description of Artificial Sequence: Synthetic oligonucleotide
  Antisense strand to SEQ ID NO: 1912788
cuuccagacauauaauaca

SEQ ID NO: 1912790 - RNA, 19 nt, Artificial Sequence
  Description of Artificial Sequence: Synthetic oligonucleotide
  Sense strand starting at position 3928 of SEQ ID NO: 1879514
guauuauaugucuggaagg

SEQ ID NO: 1912791 - RNA, 19 nt, Artificial Sequence
  Description of Artificial Sequence: Synthetic oligonucleotide
  Antisense strand to SEQ ID NO: 1912790
ccuuccagacauauaauac

SEQ ID NO: 1912792 - RNA, 19 nt, Artificial Sequence
  Description of Artificial Sequence: Synthetic oligonucleotide
  Sense strand starting at position 3944 of SEQ ID NO: 1879514
agggauuaguucuuugagg

SEQ ID NO: 1912793 - RNA, 19 nt, Artificial Sequence
  Description of Artificial Sequence: Synthetic oligonucleotide
  Antisense strand to SEQ ID NO: 1912792
ccucaaagaacuaaucccu

SEQ ID NO: 1912794 - RNA, 19 nt, Artificial Sequence
  Description of Artificial Sequence: Synthetic oligonucleotide
  Sense strand starting at position 3945 of SEQ ID NO: 1879514
gggauuaguucuuugaggg

SEQ ID NO: 1912795 - RNA, 19 nt, Artificial Sequence
  Description of Artificial Sequence: Synthetic oligonucleotide
  Antisense strand to SEQ ID NO: 1912794
cccucaaagaacuaauccc

SEQ ID NO: 1912796 - RNA, 19 nt, Artificial Sequence
  Description of Artificial Sequence: Synthetic oligonucleotide
  Sense strand starting at position 3946 of SEQ ID NO: 1879514
ggauuaguucuuugaggga

SEQ ID NO: 1912797 - RNA, 19 nt, Artificial Sequence
  Description of Artificial Sequence: Synthetic oligonucleotide
  Antisense strand to SEQ ID NO: 1912796
ucccucaaagaacuaaucc

SEQ ID NO: 1912798 - RNA, 19 nt, Artificial Sequence
  Description of Artificial Sequence: Synthetic oligonucleotide
  Sense strand starting at position 83 of SEQ ID NO: 1879515
cauauugacugagauuuag

SEQ ID NO: 1912799 - RNA, 19 nt, Artificial Sequence
  Description of Artificial Sequence: Synthetic oligonucleotide
  Antisense strand to SEQ ID NO: 1912798
cuaaaucucagucaauaug

SEQ ID NO: 1912800 - RNA, 19 nt, Artificial Sequence
  Description of Artificial Sequence: Synthetic oligonucleotide
  Sense strand starting at position 152 of SEQ ID NO: 1879515
uuuacuguacaagauugua

SEQ ID NO: 1912801 - RNA, 19 nt, Artificial Sequence
  Description of Artificial Sequence: Synthetic oligonucleotide
  Antisense strand to SEQ ID NO: 1912800
uacaaucuuguacaguaaa

SEQ ID NO: 1912802 - RNA, 19 nt, Artificial Sequence
  Description of Artificial Sequence: Synthetic oligonucleotide
  Sense strand starting at position 316 of SEQ ID NO: 1879515
aggauuuccugagagauua

SEQ ID NO: 1912803 - RNA, 19 nt, Artificial Sequence
  Description of Artificial Sequence: Synthetic oligonucleotide
  Antisense strand to SEQ ID NO: 1912802
uaaucucucaggaaauccu

SEQ ID NO: 1912804 - RNA, 19 nt, Artificial Sequence
  Description of Artificial Sequence: Synthetic oligonucleotide
  Sense strand starting at position 358 of SEQ ID NO: 1879515
cuguuaagucauuaaauac

SEQ ID NO: 1912805 - RNA, 19 nt, Artificial Sequence
  Description of Artificial Sequence: Synthetic oligonucleotide
  Antisense strand to SEQ ID NO: 1912804
guauuuaaugacuuaacag

SEQ ID NO: 1912806 - RNA, 19 nt, Artificial Sequence
  Description of Artificial Sequence: Synthetic oligonucleotide
  Sense strand starting at position 373 of SEQ ID NO: 1879515
auacgaguaccuuguauuu

SEQ ID NO: 1912807 - RNA, 19 nt, Artificial Sequence
  Description of Artificial Sequence: Synthetic oligonucleotide
  Antisense strand to SEQ ID NO: 1912806
aaauacaagguacucguau

SEQ ID NO: 1912808 - RNA, 19 nt, Artificial Sequence
  Description of Artificial Sequence: Synthetic oligonucleotide
  Sense strand starting at position 488 of SEQ ID NO: 1879515
accacaucauuagguauuu

SEQ ID NO: 1912809 - RNA, 19 nt, Artificial Sequence
  Description of Artificial Sequence: Synthetic oligonucleotide
  Antisense strand to SEQ ID NO: 1912808
aaauaccuaaugauguggu

SEQ ID NO: 1912810 - RNA, 19 nt, Artificial Sequence
  Description of Artificial Sequence: Synthetic oligonucleotide
  Sense strand starting at position 528 of SEQ ID NO: 1879515
agagcuuuacuauguucca

SEQ ID NO: 1912811 - RNA, 19 nt, Artificial Sequence
  Description of Artificial Sequence: Synthetic oligonucleotide
  Antisense strand to SEQ ID NO: 1912810
uggaacauaguaaagcucu

SEQ ID NO: 1912812 - RNA, 19 nt, Artificial Sequence
  Description of Artificial Sequence: Synthetic oligonucleotide
  Sense strand starting at position 531 of SEQ ID NO: 1879515
gcuuuacuauguuccagua

SEQ ID NO: 1912813 - RNA, 19 nt, Artificial Sequence
  Description of Artificial Sequence: Synthetic oligonucleotide
  Antisense strand to SEQ ID NO: 1912812
uacuggaacauaguaaagc

SEQ ID NO: 1912814 - RNA, 19 nt, Artificial Sequence
  Description of Artificial Sequence: Synthetic oligonucleotide
  Sense strand starting at position 590 of SEQ ID NO: 1879515
augcuauagcugcaaaguu

SEQ ID NO: 1912815 - RNA, 19 nt, Artificial Sequence
  Description of Artificial Sequence: Synthetic oligonucleotide
  Antisense strand to SEQ ID NO: 1912814
aacuuugcagcuauagcau

SEQ ID NO: 1912816 - RNA, 19 nt, Artificial Sequence
  Description of Artificial Sequence: Synthetic oligonucleotide
  Sense strand starting at position 691 of SEQ ID NO: 1879515
auguaauacugagcacaac

SEQ ID NO: 1912817 - RNA, 19 nt, Artificial Sequence
  Description of Artificial Sequence: Synthetic oligonucleotide
  Antisense strand to SEQ ID NO: 1912816
guugugcucaguauuacau

SEQ ID NO: 1912818 - RNA, 19 nt, Artificial Sequence
  Description of Artificial Sequence: Synthetic oligonucleotide
  Sense strand starting at position 692 of SEQ ID NO: 1879515
uguaauacugagcacaaca

SEQ ID NO: 1912819 - RNA, 19 nt, Artificial Sequence
  Description of Artificial Sequence: Synthetic oligonucleotide
  Antisense strand to SEQ ID NO: 1912818
uguugugcucaguauuaca

SEQ ID NO: 1912820 - RNA, 19 nt, Artificial Sequence
  Description of Artificial Sequence: Synthetic oligonucleotide
  Sense strand starting at position 773 of SEQ ID NO: 1879515
cgcaauguuugugcuauuu

SEQ ID NO: 1912821 - RNA, 19 nt, Artificial Sequence
  Description of Artificial Sequence: Synthetic oligonucleotide
  Antisense strand to SEQ ID NO: 1912820
aaauagcacaaacauugcg

SEQ ID NO: 1912822 - RNA, 19 nt, Artificial Sequence
  Description of Artificial Sequence: Synthetic oligonucleotide
  Sense strand starting at position 906 of SEQ ID NO: 1879515
ugucgcuuucucugggaaa

SEQ ID NO: 1912823 - RNA, 19 nt, Artificial Sequence
  Description of Artificial Sequence: Synthetic oligonucleotide
  Antisense strand to SEQ ID NO: 1912822
uuucccagagaaagcgaca

SEQ ID NO: 1912824 - RNA, 19 nt, Artificial Sequence
  Description of Artificial Sequence: Synthetic oligonucleotide
  Sense strand starting at position 1198 of SEQ ID NO: 1879515
ccaaauggaugagaaauaa

SEQ ID NO: 1912825 - RNA, 19 nt, Artificial Sequence
  Description of Artificial Sequence: Synthetic oligonucleotide
  Antisense strand to SEQ ID NO: 1912824
uuauuucucauccauuugg

SEQ ID NO: 1912826 - RNA, 19 nt, Artificial Sequence
  Description of Artificial Sequence: Synthetic oligonucleotide
  Sense strand starting at position 1982 of SEQ ID NO: 1879515
cugauaauggcgucguugu

SEQ ID NO: 1912827 - RNA, 19 nt, Artificial Sequence
  Description of Artificial Sequence: Synthetic oligonucleotide
  Antisense strand to SEQ ID NO: 1912826
acaacgacgccauuaucag

SEQ ID NO: 1912828 - RNA, 19 nt, Artificial Sequence
  Description of Artificial Sequence: Synthetic oligonucleotide
  Sense strand starting at position 2117 of SEQ ID NO: 1879515
aggaguucuggccgccuga

SEQ ID NO: 1912829 - RNA, 19 nt, Artificial Sequence
  Description of Artificial Sequence: Synthetic oligonucleotide
  Antisense strand to SEQ ID NO: 1912828
ucaggcggccagaacuccu

SEQ ID NO: 1912830 - RNA, 19 nt, Artificial Sequence
  Description of Artificial Sequence: Synthetic oligonucleotide
  Sense strand starting at position 2320 of SEQ ID NO: 1879515
ccuagugucuugucuuaaa

SEQ ID NO: 1912831 - RNA, 19 nt, Artificial Sequence
  Description of Artificial Sequence: Synthetic oligonucleotide
  Antisense strand to SEQ ID NO: 1912830
uuuaagacaagacacuagg

SEQ ID NO: 1912832 - RNA, 19 nt, Artificial Sequence
  Description of Artificial Sequence: Synthetic oligonucleotide
  Sense strand starting at position 2555 of SEQ ID NO: 1879515
ugauuacguuuauuugcaa

SEQ ID NO: 1912833 - RNA, 19 nt, Artificial Sequence
  Description of Artificial Sequence: Synthetic oligonucleotide
  Antisense strand to SEQ ID NO: 1912832
uugcaaauaaacguaauca

SEQ ID NO: 1912834 - RNA, 19 nt, Artificial Sequence
  Description of Artificial Sequence: Synthetic oligonucleotide
  Sense strand starting at position 2562 of SEQ ID NO: 1879515
guuuauuugcaagaccguu

SEQ ID NO: 1912835 - RNA, 19 nt, Artificial Sequence
  Description of Artificial Sequence: Synthetic oligonucleotide
  Antisense strand to SEQ ID NO: 1912834
aacggucuugcaaauaaac

SEQ ID NO: 1912836 - RNA, 19 nt, Artificial Sequence
  Description of Artificial Sequence: Synthetic oligonucleotide
  Sense strand starting at position 2658 of SEQ ID NO: 1879515
guuugauaguuggcaguca

SEQ ID NO: 1912837 - RNA, 19 nt, Artificial Sequence
  Description of Artificial Sequence: Synthetic oligonucleotide
  Antisense strand to SEQ ID NO: 1912836
ugacugccaacuaucaaac

SEQ ID NO: 1912838 - RNA, 19 nt, Artificial Sequence
  Description of Artificial Sequence: Synthetic oligonucleotide
  Sense strand starting at position 2752 of SEQ ID NO: 1879515
uucuuucuggagugcucaa

SEQ ID NO: 1912839 - RNA, 19 nt, Artificial Sequence
  Description of Artificial Sequence: Synthetic oligonucleotide
  Antisense strand to SEQ ID NO: 1912838
uugagcacuccagaaagaa

SEQ ID NO: 1912840 - RNA, 19 nt, Artificial Sequence
  Description of Artificial Sequence: Synthetic oligonucleotide
  Sense strand starting at position 2803 of SEQ ID NO: 1879515
aaccaaguguggucagguu

SEQ ID NO: 1912841 - RNA, 19 nt, Artificial Sequence
  Description of Artificial Sequence: Synthetic oligonucleotide
  Antisense strand to SEQ ID NO: 1912840
aaccugaccacacuugguu

SEQ ID NO: 1912842 - RNA, 19 nt, Artificial Sequence
  Description of Artificial Sequence: Synthetic oligonucleotide
  Sense strand starting at position 2825 of SEQ ID NO: 1879515
agcuaauauuuacaaggga

SEQ ID NO: 1912843 - RNA, 19 nt, Artificial Sequence
  Description of Artificial Sequence: Synthetic oligonucleotide
  Antisense strand to SEQ ID NO: 1912842
ucccuuguaaauauuagcu

SEQ ID NO: 1912844 - RNA, 19 nt, Artificial Sequence
  Description of Artificial Sequence: Synthetic oligonucleotide
  Sense strand starting at position 2870 of SEQ ID NO: 1879515
acuuguuccggugaucaca

SEQ ID NO: 1912845 - RNA, 19 nt, Artificial Sequence
  Description of Artificial Sequence: Synthetic oligonucleotide
  Antisense strand to SEQ ID NO: 1912844
ugugaucaccggaacaagu

SEQ ID NO: 1912846 - RNA, 19 nt, Artificial Sequence
  Description of Artificial Sequence: Synthetic oligonucleotide
  Sense strand starting at position 2916 of SEQ ID NO: 1879515
ugccaacgaucucucuauu

SEQ ID NO: 1912847 - RNA, 19 nt, Artificial Sequence
  Description of Artificial Sequence: Synthetic oligonucleotide
  Antisense strand to SEQ ID NO: 1912846
aauagagagaucguuggca

SEQ ID NO: 1912848 - RNA, 19 nt, Artificial Sequence
  Description of Artificial Sequence: Synthetic oligonucleotide
  Sense strand starting at position 2928 of SEQ ID NO: 1879515
cucuauugauaacaaggau

SEQ ID NO: 1912849 - RNA, 19 nt, Artificial Sequence
  Description of Artificial Sequence: Synthetic oligonucleotide
  Antisense strand to SEQ ID NO: 1912848
auccuuguuaucaauagag

SEQ ID NO: 1912850 - RNA, 19 nt, Artificial Sequence
  Description of Artificial Sequence: Synthetic oligonucleotide
  Sense strand starting at position 2964 of SEQ ID NO: 1879515
auauuaaucugagaagcca

SEQ ID NO: 1912851 - RNA, 19 nt, Artificial Sequence
  Description of Artificial Sequence: Synthetic oligonucleotide
  Antisense strand to SEQ ID NO: 1912850
uggcuucucagauuaauau

SEQ ID NO: 1912852 - RNA, 19 nt, Artificial Sequence
  Description of Artificial Sequence: Synthetic oligonucleotide
  Sense strand starting at position 2995 of SEQ ID NO: 1879515
agguauuagcuuuacgaag

SEQ ID NO: 1912853 - RNA, 19 nt, Artificial Sequence
  Description of Artificial Sequence: Synthetic oligonucleotide
  Antisense strand to SEQ ID NO: 1912852
cuucguaaagcuaauaccu

SEQ ID NO: 1912854 - RNA, 19 nt, Artificial Sequence
  Description of Artificial Sequence: Synthetic oligonucleotide
  Sense strand starting at position 3009 of SEQ ID NO: 1879515
cgaagaugcccuuacauac

SEQ ID NO: 1912855 - RNA, 19 nt, Artificial Sequence
  Description of Artificial Sequence: Synthetic oligonucleotide
  Antisense strand to SEQ ID NO: 1912854
guauguaagggcaucuucg

SEQ ID NO: 1912856 - RNA, 19 nt, Artificial Sequence
  Description of Artificial Sequence: Synthetic oligonucleotide
  Sense strand starting at position 3116 of SEQ ID NO: 1879515
gagauaaacuagcaaggua

SEQ ID NO: 1912857 - RNA, 19 nt, Artificial Sequence
  Description of Artificial Sequence: Synthetic oligonucleotide
  Antisense strand to SEQ ID NO: 1912856
uaccuugcuaguuuaucuc

SEQ ID NO: 1912858 - RNA, 19 nt, Artificial Sequence
  Description of Artificial Sequence: Synthetic oligonucleotide
  Sense strand starting at position 3119 of SEQ ID NO: 1879515
auaaacuagcaagguaauu

SEQ ID NO: 1912859 - RNA, 19 nt, Artificial Sequence
  Description of Artificial Sequence: Synthetic oligonucleotide
  Antisense strand to SEQ ID NO: 1912858
aauuaccuugcuaguuuau

SEQ ID NO: 1912860 - RNA, 19 nt, Artificial Sequence
  Description of Artificial Sequence: Synthetic oligonucleotide
  Sense strand starting at position 3166 of SEQ ID NO: 1879515
ugguuaggucagcaugaga

SEQ ID NO: 1912861 - RNA, 19 nt, Artificial Sequence
  Description of Artificial Sequence: Synthetic oligonucleotide
  Antisense strand to SEQ ID NO: 1912860
ucucaugcugaccuaacca

SEQ ID NO: 1912862 - RNA, 19 nt, Artificial Sequence
  Description of Artificial Sequence: Synthetic oligonucleotide
  Sense strand starting at position 3322 of SEQ ID NO: 1879515
agaaguaaugacuguuaaa

SEQ ID NO: 1912863 - RNA, 19 nt, Artificial Sequence
  Description of Artificial Sequence: Synthetic oligonucleotide
  Antisense strand to SEQ ID NO: 1912862
uuuaacagucauuacuucu

SEQ ID NO: 1912864 - RNA, 19 nt, Artificial Sequence
  Description of Artificial Sequence: Synthetic oligonucleotide
  Sense strand starting at position 3429 of SEQ ID NO: 1879515
gaaagacauugucuuugcu

SEQ ID NO: 1912865 - RNA, 19 nt, Artificial Sequence
  Description of Artificial Sequence: Synthetic oligonucleotide
  Antisense strand to SEQ ID NO: 1912864
agcaaagacaaugucuuuc

SEQ ID NO: 1912866 - RNA, 19 nt, Artificial Sequence
  Description of Artificial Sequence: Synthetic oligonucleotide
  Sense strand starting at position 3459 of SEQ ID NO: 1879515
ugagaugaguaagggagau

SEQ ID NO: 1912867 - RNA, 19 nt, Artificial Sequence
  Description of Artificial Sequence: Synthetic oligonucleotide
  Antisense strand to SEQ ID NO: 1912866
aucucccuuacucaucuca

SEQ ID NO: 1912868 - RNA, 19 nt, Artificial Sequence
  Description of Artificial Sequence: Synthetic oligonucleotide
  Sense strand starting at position 3501 of SEQ ID NO: 1879515
auaguuaacugggcugagu

SEQ ID NO: 1912869 - RNA, 19 nt, Artificial Sequence
  Description of Artificial Sequence: Synthetic oligonucleotide
  Antisense strand to SEQ ID NO: 1912868
acucagcccaguuaacuau

SEQ ID NO: 1912870 - RNA, 19 nt, Artificial Sequence
  Description of Artificial Sequence: Synthetic oligonucleotide
  Sense strand starting at position 3514 of SEQ ID NO: 1879515
cugaguagucugggugcca

SEQ ID NO: 1912871 - RNA, 19 nt, Artificial Sequence
  Description of Artificial Sequence: Synthetic oligonucleotide
  Antisense strand to SEQ ID NO: 1912870
uggcacccagacuacucag

SEQ ID NO: 1912872 - RNA, 19 nt, Artificial Sequence
  Description of Artificial Sequence: Synthetic oligonucleotide
  Sense strand starting at position 3515 of SEQ ID NO: 1879515
ugaguagucugggugccaa

SEQ ID NO: 1912873 - RNA, 19 nt, Artificial Sequence
  Description of Artificial Sequence: Synthetic oligonucleotide
  Antisense strand to SEQ ID NO: 1912872
uuggcacccagacuacuca

SEQ ID NO: 1912874 - RNA, 19 nt, Artificial Sequence
  Description of Artificial Sequence: Synthetic oligonucleotide
  Sense strand starting at position 3542 of SEQ ID NO: 1879515
cuagguguguauccuugua

SEQ ID NO: 1912875 - RNA, 19 nt, Artificial Sequence
  Description of Artificial Sequence: Synthetic oligonucleotide
  Antisense strand to SEQ ID NO: 1912874
uacaaggauacacaccuag

SEQ ID NO: 1912876 - RNA, 19 nt, Artificial Sequence
  Description of Artificial Sequence: Synthetic oligonucleotide
  Sense strand starting at position 3632 of SEQ ID NO: 1879515
guuuguaggugauuuguau

SEQ ID NO: 1912877 - RNA, 19 nt, Artificial Sequence
  Description of Artificial Sequence: Synthetic oligonucleotide
  Antisense strand to SEQ ID NO: 1912876
auacaaaucaccuacaaac

SEQ ID NO: 1912878 - RNA, 19 nt, Artificial Sequence
  Description of Artificial Sequence: Synthetic oligonucleotide
  Sense strand starting at position 566 of SEQ ID NO: 1879516
gcaguuaauuaugaaccua

SEQ ID NO: 1912879 - RNA, 19 nt, Artificial Sequence
  Description of Artificial Sequence: Synthetic oligonucleotide
  Antisense strand to SEQ ID NO: 1912878
uagguucauaauuaacugc

SEQ ID NO: 1912880 - RNA, 19 nt, Artificial Sequence
  Description of Artificial Sequence: Synthetic oligonucleotide
  Sense strand starting at position 592 of SEQ ID NO: 1879516
gcuggaacgucuguuauuu

SEQ ID NO: 1912881 - RNA, 19 nt, Artificial Sequence
  Description of Artificial Sequence: Synthetic oligonucleotide
  Antisense strand to SEQ ID NO: 1912880
aaauaacagacguuccagc

SEQ ID NO: 1912882 - RNA, 19 nt, Artificial Sequence
  Description of Artificial Sequence: Synthetic oligonucleotide
  Sense strand starting at position 641 of SEQ ID NO: 1879516
gccaauuggccauaucaga

SEQ ID NO: 1912883 - RNA, 19 nt, Artificial Sequence
  Description of Artificial Sequence: Synthetic oligonucleotide
  Antisense strand to SEQ ID NO: 1912882
ucugauauggccaauuggc

SEQ ID NO: 1912884 - RNA, 19 nt, Artificial Sequence
  Description of Artificial Sequence: Synthetic oligonucleotide
  Sense strand starting at position 646 of SEQ ID NO: 1879516
uuggccauaucagagauaa

SEQ ID NO: 1912885 - RNA, 19 nt, Artificial Sequence
  Description of Artificial Sequence: Synthetic oligonucleotide
  Antisense strand to SEQ ID NO: 1912884
uuaucucugauauggccaa

SEQ ID NO: 1912886 - RNA, 19 nt, Artificial Sequence
  Description of Artificial Sequence: Synthetic oligonucleotide
  Sense strand starting at position 721 of SEQ ID NO: 1879516
acugaaaucccauggcauc

SEQ ID NO: 1912887 - RNA, 19 nt, Artificial Sequence
  Description of Artificial Sequence: Synthetic oligonucleotide
  Antisense strand to SEQ ID NO: 1912886
gaugccaugggauuucagu

SEQ ID NO: 1912888 - RNA, 19 nt, Artificial Sequence
  Description of Artificial Sequence: Synthetic oligonucleotide
  Sense strand starting at position 761 of SEQ ID NO: 1879516
caguccaucuuguuagguu

SEQ ID NO: 1912889 - RNA, 19 nt, Artificial Sequence
  Description of Artificial Sequence: Synthetic oligonucleotide
  Antisense strand to SEQ ID NO: 1912888
aaccuaacaagauggacug

SEQ ID NO: 1912890 - RNA, 19 nt, Artificial Sequence
  Description of Artificial Sequence: Synthetic oligonucleotide
  Sense strand starting at position 791 of SEQ ID NO: 1879516
ccgggaagccaguaucuuu

SEQ ID NO: 1912891 - RNA, 19 nt, Artificial Sequence
  Description of Artificial Sequence: Synthetic oligonucleotide
  Antisense strand to SEQ ID NO: 1912890
aaagauacuggcuucccgg

SEQ ID NO: 1912892 - RNA, 19 nt, Artificial Sequence
  Description of Artificial Sequence: Synthetic oligonucleotide
  Sense strand starting at position 841 of SEQ ID NO: 1879516
gggaaugguaauggugaau

SEQ ID NO: 1912893 - RNA, 19 nt, Artificial Sequence
  Description of Artificial Sequence: Synthetic oligonucleotide
  Antisense strand to SEQ ID NO: 1912892
auucaccauuaccauuccc

SEQ ID NO: 1912894 - RNA, 19 nt, Artificial Sequence
  Description of Artificial Sequence: Synthetic oligonucleotide
  Sense strand starting at position 891 of SEQ ID NO: 1879516
uucugacuuccguagguca

SEQ ID NO: 1912895 - RNA, 19 nt, Artificial Sequence
  Description of Artificial Sequence: Synthetic oligonucleotide
  Antisense strand to SEQ ID NO: 1912894
ugaccuacggaagucagaa

SEQ ID NO: 1912896 - RNA, 19 nt, Artificial Sequence
  Description of Artificial Sequence: Synthetic oligonucleotide
  Sense strand starting at position 915 of SEQ ID NO: 1879516
uggagucacugccuaacaa

SEQ ID NO: 1912897 - RNA, 19 nt, Artificial Sequence
  Description of Artificial Sequence: Synthetic oligonucleotide
  Antisense strand to SEQ ID NO: 1912896
uuguuaggcagugacucca

SEQ ID NO: 1912898 - RNA, 19 nt, Artificial Sequence
  Description of Artificial Sequence: Synthetic oligonucleotide
  Sense strand starting at position 945 of SEQ ID NO: 1879516
agauuuaucucaugaaaug

SEQ ID NO: 1912899 - RNA, 19 nt, Artificial Sequence
  Description of Artificial Sequence: Synthetic oligonucleotide
  Antisense strand to SEQ ID NO: 1912898
cauuucaugagauaaaucu

SEQ ID NO: 1912900 - RNA, 19 nt, Artificial Sequence
  Description of Artificial Sequence: Synthetic oligonucleotide
  Sense strand starting at position 988 of SEQ ID NO: 1879516
gugagaacuccaugagcaa

SEQ ID NO: 1912901 - RNA, 19 nt, Artificial Sequence
  Description of Artificial Sequence: Synthetic oligonucleotide
  Antisense strand to SEQ ID NO: 1912900
uugcucauggaguucucac

SEQ ID NO: 1912902 - RNA, 19 nt, Artificial Sequence
  Description of Artificial Sequence: Synthetic oligonucleotide
  Sense strand starting at position 1086 of SEQ ID NO: 1879516
gaccuaacugcagauaagu

SEQ ID NO: 1912903 - RNA, 19 nt, Artificial Sequence
  Description of Artificial Sequence: Synthetic oligonucleotide
  Antisense strand to SEQ ID NO: 1912902
acuuaucugcaguuagguc

SEQ ID NO: 1912904 - RNA, 19 nt, Artificial Sequence
  Description of Artificial Sequence: Synthetic oligonucleotide
  Sense strand starting at position 1138 of SEQ ID NO: 1879516
uggauugcuuauucuguua

SEQ ID NO: 1912905 - RNA, 19 nt, Artificial Sequence
  Description of Artificial Sequence: Synthetic oligonucleotide
  Antisense strand to SEQ ID NO: 1912904
uaacagaauaagcaaucca

SEQ ID NO: 1912906 - RNA, 19 nt, Artificial Sequence
  Description of Artificial Sequence: Synthetic oligonucleotide
  Sense strand starting at position 1188 of SEQ ID NO: 1879516
aggugcugggcucaagaau

SEQ ID NO: 1912907 - RNA, 19 nt, Artificial Sequence
  Description of Artificial Sequence: Synthetic oligonucleotide
  Antisense strand to SEQ ID NO: 1912906
auucuugagcccagcaccu

SEQ ID NO: 1912908 - RNA, 19 nt, Artificial Sequence
  Description of Artificial Sequence: Synthetic oligonucleotide
  Sense strand starting at position 1194 of SEQ ID NO: 1879516
ugggcucaagaaugauaau

SEQ ID NO: 1912909 - RNA, 19 nt, Artificial Sequence
  Description of Artificial Sequence: Synthetic oligonucleotide
  Antisense strand to SEQ ID NO: 1912908
auuaucauucuugagccca

SEQ ID NO: 1912910 - RNA, 19 nt, Artificial Sequence
  Description of Artificial Sequence: Synthetic oligonucleotide
  Sense strand starting at position 1238 of SEQ ID NO: 1879516
auuguauuguaugcauuga

SEQ ID NO: 1912911 - RNA, 19 nt, Artificial Sequence
  Description of Artificial Sequence: Synthetic oligonucleotide
  Antisense strand to SEQ ID NO: 1912910
ucaaugcauacaauacaau

SEQ ID NO: 1912912 - RNA, 19 nt, Artificial Sequence
  Description of Artificial Sequence: Synthetic oligonucleotide
  Sense strand starting at position 1249 of SEQ ID NO: 1879516
ugcauugaauaucacgaaa

SEQ ID NO: 1912913 - RNA, 19 nt, Artificial Sequence
  Description of Artificial Sequence: Synthetic oligonucleotide
  Antisense strand to SEQ ID NO: 1912912
uuucgugauauucaaugca

SEQ ID NO: 1912914 - RNA, 19 nt, Artificial Sequence
  Description of Artificial Sequence: Synthetic oligonucleotide
  Sense strand starting at position 1288 of SEQ ID NO: 1879516
gcguuuacauucuuggauc

SEQ ID NO: 1912915 - RNA, 19 nt, Artificial Sequence
  Description of Artificial Sequence: Synthetic oligonucleotide
  Antisense strand to SEQ ID NO: 1912914
gauccaagaauguaaacgc

SEQ ID NO: 1912916 - RNA, 19 nt, Artificial Sequence
  Description of Artificial Sequence: Synthetic oligonucleotide
  Sense strand starting at position 1290 of SEQ ID NO: 1879516
guuuacauucuuggaucau

SEQ ID NO: 1912917 - RNA, 19 nt, Artificial Sequence
  Description of Artificial Sequence: Synthetic oligonucleotide
  Antisense strand to SEQ ID NO: 1912916
augauccaagaauguaaac

SEQ ID NO: 1912918 - RNA, 19 nt, Artificial Sequence
  Description of Artificial Sequence: Synthetic oligonucleotide
  Sense strand starting at position 1668 of SEQ ID NO: 1879516
ugugguuaucuccaacacu

SEQ ID NO: 1912919 - RNA, 19 nt, Artificial Sequence
  Description of Artificial Sequence: Synthetic oligonucleotide
  Antisense strand to SEQ ID NO: 1912918
aguguuggagauaaccaca

SEQ ID NO: 1912920 - RNA, 19 nt, Artificial Sequence
  Description of Artificial Sequence: Synthetic oligonucleotide
  Sense strand starting at position 1744 of SEQ ID NO: 1879516
guuuguuucuuccuaacuc

SEQ ID NO: 1912921 - RNA, 19 nt, Artificial Sequence
  Description of Artificial Sequence: Synthetic oligonucleotide
  Antisense strand to SEQ ID NO: 1912920
gaguuaggaagaaacaaac

SEQ ID NO: 1912922 - RNA, 19 nt, Artificial Sequence
  Description of Artificial Sequence: Synthetic oligonucleotide
  Sense strand starting at position 1767 of SEQ ID NO: 1879516
gugucuuucgcccaguuca

SEQ ID NO: 1912923 - RNA, 19 nt, Artificial Sequence
  Description of Artificial Sequence: Synthetic oligonucleotide
  Antisense strand to SEQ ID NO: 1912922
ugaacugggcgaaagacac

SEQ ID NO: 1912924 - RNA, 19 nt, Artificial Sequence
  Description of Artificial Sequence: Synthetic oligonucleotide
  Sense strand starting at position 2447 of SEQ ID NO: 1879516
ccggguuaguugaaugaug

SEQ ID NO: 1912925 - RNA, 19 nt, Artificial Sequence
  Description of Artificial Sequence: Synthetic oligonucleotide
  Antisense strand to SEQ ID NO: 1912924
caucauucaacuaacccgg

SEQ ID NO: 1912926 - RNA, 19 nt, Artificial Sequence
  Description of Artificial Sequence: Synthetic oligonucleotide
  Sense strand starting at position 2449 of SEQ ID NO: 1879516
ggguuaguugaaugaugga

SEQ ID NO: 1912927 - RNA, 19 nt, Artificial Sequence
  Description of Artificial Sequence: Synthetic oligonucleotide
  Antisense strand to SEQ ID NO: 1912926
uccaucauucaacuaaccc

SEQ ID NO: 1912928 - RNA, 19 nt, Artificial Sequence
  Description of Artificial Sequence: Synthetic oligonucleotide
  Sense strand starting at position 2750 of SEQ ID NO: 1879516
cggguauuuguaggucuua

SEQ ID NO: 1912929 - RNA, 19 nt, Artificial Sequence
  Description of Artificial Sequence: Synthetic oligonucleotide
  Antisense strand to SEQ ID NO: 1912928
uaagaccuacaaauacccg

SEQ ID NO: 1912930 - RNA, 19 nt, Artificial Sequence
  Description of Artificial Sequence: Synthetic oligonucleotide
  Sense strand starting at position 2783 of SEQ ID NO: 1879516
agggucuguuugguaauga

SEQ ID NO: 1912931 - RNA, 19 nt, Artificial Sequence
  Description of Artificial Sequence: Synthetic oligonucleotide
  Antisense strand to SEQ ID NO: 1912930
ucauuaccaaacagacccu

SEQ ID NO: 1912932 - RNA, 19 nt, Artificial Sequence
  Description of Artificial Sequence: Synthetic oligonucleotide
  Sense strand starting at position 2815 of SEQ ID NO: 1879516
guagguaguagguaaaugu

SEQ ID NO: 1912933 - RNA, 19 nt, Artificial Sequence
  Description of Artificial Sequence: Synthetic oligonucleotide
  Antisense strand to SEQ ID NO: 1912932
acauuuaccuacuaccuac

SEQ ID NO: 1912934 - RNA, 19 nt, Artificial Sequence
  Description of Artificial Sequence: Synthetic oligonucleotide
  Sense strand starting at position 2822 of SEQ ID NO: 1879516
guagguaaauguuuguuga

SEQ ID NO: 1912935 - RNA, 19 nt, Artificial Sequence
  Description of Artificial Sequence: Synthetic oligonucleotide
  Antisense strand to SEQ ID NO: 1912934
ucaacaaacauuuaccuac

SEQ ID NO: 1912936 - RNA, 19 nt, Artificial Sequence
  Description of Artificial Sequence: Synthetic oligonucleotide
  Sense strand starting at position 2823 of SEQ ID NO: 1879516
uagguaaauguuuguugac

SEQ ID NO: 1912937 - RNA, 19 nt, Artificial Sequence
  Description of Artificial Sequence: Synthetic oligonucleotide
  Antisense strand to SEQ ID NO: 1912936
gucaacaaacauuuaccua

SEQ ID NO: 1912938 - RNA, 19 nt, Artificial Sequence
  Description of Artificial Sequence: Synthetic oligonucleotide
  Sense strand starting at position 2824 of SEQ ID NO: 1879516
agguaaauguuuguugacu

SEQ ID NO: 1912939 - RNA, 19 nt, Artificial Sequence
  Description of Artificial Sequence: Synthetic oligonucleotide
  Antisense strand to SEQ ID NO: 1912938
agucaacaaacauuuaccu

SEQ ID NO: 1912940 - RNA, 19 nt, Artificial Sequence
  Description of Artificial Sequence: Synthetic oligonucleotide
  Sense strand starting at position 2825 of SEQ ID NO: 1879516
gguaaauguuuguugacug

SEQ ID NO: 1912941 - RNA, 19 nt, Artificial Sequence
  Description of Artificial Sequence: Synthetic oligonucleotide
  Antisense strand to SEQ ID NO: 1912940
cagucaacaaacauuuacc

SEQ ID NO: 1912942 - RNA, 19 nt, Artificial Sequence
  Description of Artificial Sequence: Synthetic oligonucleotide
  Sense strand starting at position 2932 of SEQ ID NO: 1879516
gguggagucucucuuguug

SEQ ID NO: 1912943 - RNA, 19 nt, Artificial Sequence
  Description of Artificial Sequence: Synthetic oligonucleotide
  Antisense strand to SEQ ID NO: 1912942
caacaagagagacuccacc

SEQ ID NO: 1912944 - RNA, 19 nt, Artificial Sequence
  Description of Artificial Sequence: Synthetic oligonucleotide
  Sense strand starting at position 3702 of SEQ ID NO: 1879516
ucuugagggcuuuauuagu

SEQ ID NO: 1912945 - RNA, 19 nt, Artificial Sequence
  Description of Artificial Sequence: Synthetic oligonucleotide
  Antisense strand to SEQ ID NO: 1912944
acuaauaaagcccucaaga

SEQ ID NO: 1912946 - RNA, 19 nt, Artificial Sequence
  Description of Artificial Sequence: Synthetic oligonucleotide
  Sense strand starting at position 3837 of SEQ ID NO: 1879516
uuugaugauaggugaaacu

SEQ ID NO: 1912947 - RNA, 19 nt, Artificial Sequence
  Description of Artificial Sequence: Synthetic oligonucleotide
  Antisense strand to SEQ ID NO: 1912946
aguuucaccuaucaucaaa

SEQ ID NO: 1912948 - RNA, 19 nt, Artificial Sequence
  Description of Artificial Sequence: Synthetic oligonucleotide
  Sense strand starting at position 3862 of SEQ ID NO: 1879516
cccuguauguggcuucuau

SEQ ID NO: 1912949 - RNA, 19 nt, Artificial Sequence
  Description of Artificial Sequence: Synthetic oligonucleotide
  Antisense strand to SEQ ID NO: 1912948
auagaagccacauacaggg

SEQ ID NO: 1912950 - RNA, 19 nt, Artificial Sequence
  Description of Artificial Sequence: Synthetic oligonucleotide
  Sense strand starting at position 3903 of SEQ ID NO: 1879516
cacugccauguaugagaaa

SEQ ID NO: 1912951 - RNA, 19 nt, Artificial Sequence
  Description of Artificial Sequence: Synthetic oligonucleotide
  Antisense strand to SEQ ID NO: 1912950
uuucucauacauggcagug

SEQ ID NO: 1912952 - RNA, 19 nt, Artificial Sequence
  Description of Artificial Sequence: Synthetic oligonucleotide
  Sense strand starting at position 3914 of SEQ ID NO: 1879516
augagaaagugacucaguu

SEQ ID NO: 1912953 - RNA, 19 nt, Artificial Sequence
  Description of Artificial Sequence: Synthetic oligonucleotide
  Antisense strand to SEQ ID NO: 1912952
aacugagucacuuucucau

SEQ ID NO: 1912954 - RNA, 19 nt, Artificial Sequence
  Description of Artificial Sequence: Synthetic oligonucleotide
  Sense strand starting at position 3971 of SEQ ID NO: 1879516
gcaugagauuuaucguucu

SEQ ID NO: 1912955 - RNA, 19 nt, Artificial Sequence
  Description of Artificial Sequence: Synthetic oligonucleotide
  Antisense strand to SEQ ID NO: 1912954
agaacgauaaaucucaugc

SEQ ID NO: 1912956 - RNA, 19 nt, Artificial Sequence
  Description of Artificial Sequence: Synthetic oligonucleotide
  Sense strand starting at position 3977 of SEQ ID NO: 1879516
gauuuaucguucuaauguu

SEQ ID NO: 1912957 - RNA, 19 nt, Artificial Sequence
  Description of Artificial Sequence: Synthetic oligonucleotide
  Antisense strand to SEQ ID NO: 1912956
aacauuagaacgauaaauc

SEQ ID NO: 1912958 - RNA, 19 nt, Artificial Sequence
  Description of Artificial Sequence: Synthetic oligonucleotide
  Sense strand starting at position 236 of SEQ ID NO: 1879517
uaauguuuaggucaaggua

SEQ ID NO: 1912959 - RNA, 19 nt, Artificial Sequence
  Description of Artificial Sequence: Synthetic oligonucleotide
  Antisense strand to SEQ ID NO: 1912958
uaccuugaccuaaacauua

SEQ ID NO: 1912960 - RNA, 19 nt, Artificial Sequence
  Description of Artificial Sequence: Synthetic oligonucleotide
  Sense strand starting at position 239 of SEQ ID NO: 1879517
uguuuaggucaagguaaau

SEQ ID NO: 1912961 - RNA, 19 nt, Artificial Sequence
  Description of Artificial Sequence: Synthetic oligonucleotide
  Antisense strand to SEQ ID NO: 1912960
auuuaccuugaccuaaaca

SEQ ID NO: 1912962 - RNA, 19 nt, Artificial Sequence
  Description of Artificial Sequence: Synthetic oligonucleotide
  Sense strand starting at position 778 of SEQ ID NO: 1879517
cugguuagagcaggaguua

SEQ ID NO: 1912963 - RNA, 19 nt, Artificial Sequence
  Description of Artificial Sequence: Synthetic oligonucleotide
  Antisense strand to SEQ ID NO: 1912962
uaacuccugcucuaaccag

SEQ ID NO: 1912964 - RNA, 19 nt, Artificial Sequence
  Description of Artificial Sequence: Synthetic oligonucleotide
  Sense strand starting at position 779 of SEQ ID NO: 1879517
ugguuagagcaggaguuaa

SEQ ID NO: 1912965 - RNA, 19 nt, Artificial Sequence
  Description of Artificial Sequence: Synthetic oligonucleotide
  Antisense strand to SEQ ID NO: 1912964
uuaacuccugcucuaacca

SEQ ID NO: 1912966 - RNA, 19 nt, Artificial Sequence
  Description of Artificial Sequence: Synthetic oligonucleotide
  Sense strand starting at position 804 of SEQ ID NO: 1879517
uguguuugggaggaacacu

SEQ ID NO: 1912967 - RNA, 19 nt, Artificial Sequence
  Description of Artificial Sequence: Synthetic oligonucleotide
  Antisense strand to SEQ ID NO: 1912966
aguguuccucccaaacaca

SEQ ID NO: 1912968 - RNA, 19 nt, Artificial Sequence
  Description of Artificial Sequence: Synthetic oligonucleotide
  Sense strand starting at position 862 of SEQ ID NO: 1879517
aggucacuccugugaaccu

SEQ ID NO: 1912969 - RNA, 19 nt, Artificial Sequence
  Description of Artificial Sequence: Synthetic oligonucleotide
  Antisense strand to SEQ ID NO: 1912968
agguucacaggagugaccu

SEQ ID NO: 1912970 - RNA, 19 nt, Artificial Sequence
  Description of Artificial Sequence: Synthetic oligonucleotide
  Sense strand starting at position 869 of SEQ ID NO: 1879517
uccugugaaccuuaguugu

SEQ ID NO: 1912971 - RNA, 19 nt, Artificial Sequence
  Description of Artificial Sequence: Synthetic oligonucleotide
  Antisense strand to SEQ ID NO: 1912970
acaacuaagguucacagga

SEQ ID NO: 1912972 - RNA, 19 nt, Artificial Sequence
  Description of Artificial Sequence: Synthetic oligonucleotide
  Sense strand starting at position 875 of SEQ ID NO: 1879517
gaaccuuaguuguugugaa

SEQ ID NO: 1912973 - RNA, 19 nt, Artificial Sequence
  Description of Artificial Sequence: Synthetic oligonucleotide
  Antisense strand to SEQ ID NO: 1912972
uucacaacaacuaagguuc

SEQ ID NO: 1912974 - RNA, 19 nt, Artificial Sequence
  Description of Artificial Sequence: Synthetic oligonucleotide
  Sense strand starting at position 939 of SEQ ID NO: 1879517
gcaagaaaguuuccucuac

SEQ ID NO: 1912975 - RNA, 19 nt, Artificial Sequence
  Description of Artificial Sequence: Synthetic oligonucleotide
  Antisense strand to SEQ ID NO: 1912974
guagaggaaacuuucuugc

SEQ ID NO: 1912976 - RNA, 19 nt, Artificial Sequence
  Description of Artificial Sequence: Synthetic oligonucleotide
  Sense strand starting at position 981 of SEQ ID NO: 1879517
gagcacugucuugaaggau

SEQ ID NO: 1912977 - RNA, 19 nt, Artificial Sequence
  Description of Artificial Sequence: Synthetic oligonucleotide
  Antisense strand to SEQ ID NO: 1912976
auccuucaagacagugcuc

SEQ ID NO: 1912978 - RNA, 19 nt, Artificial Sequence
  Description of Artificial Sequence: Synthetic oligonucleotide
  Sense strand starting at position 1057 of SEQ ID NO: 1879517
guuccagaauuacuggauu

SEQ ID NO: 1912979 - RNA, 19 nt, Artificial Sequence
  Description of Artificial Sequence: Synthetic oligonucleotide
  Antisense strand to SEQ ID NO: 1912978
aauccaguaauucuggaac

SEQ ID NO: 1912980 - RNA, 19 nt, Artificial Sequence
  Description of Artificial Sequence: Synthetic oligonucleotide
  Sense strand starting at position 1085 of SEQ ID NO: 1879517
cuugcuauaugacuuggaa

SEQ ID NO: 1912981 - RNA, 19 nt, Artificial Sequence
  Description of Artificial Sequence: Synthetic oligonucleotide
  Antisense strand to SEQ ID NO: 1912980
uuccaagucauauagcaag

SEQ ID NO: 1912982 - RNA, 19 nt, Artificial Sequence
  Description of Artificial Sequence: Synthetic oligonucleotide
  Sense strand starting at position 1087 of SEQ ID NO: 1879517
ugcuauaugacuuggaagu

SEQ ID NO: 1912983 - RNA, 19 nt, Artificial Sequence
  Description of Artificial Sequence: Synthetic oligonucleotide
  Antisense strand to SEQ ID NO: 1912982
acuuccaagucauauagca

SEQ ID NO: 1912984 - RNA, 19 nt, Artificial Sequence
  Description of Artificial Sequence: Synthetic oligonucleotide
  Sense strand starting at position 1088 of SEQ ID NO: 1879517
gcuauaugacuuggaaguc

SEQ ID NO: 1912985 - RNA, 19 nt, Artificial Sequence
  Description of Artificial Sequence: Synthetic oligonucleotide
  Antisense strand to SEQ ID NO: 1912984
gacuuccaagucauauagc

SEQ ID NO: 1912986 - RNA, 19 nt, Artificial Sequence
  Description of Artificial Sequence: Synthetic oligonucleotide
  Sense strand starting at position 1098 of SEQ ID NO: 1879517
uuggaagucacucgauuac

SEQ ID NO: 1912987 - RNA, 19 nt, Artificial Sequence
  Description of Artificial Sequence: Synthetic oligonucleotide
  Antisense strand to SEQ ID NO: 1912986
guaaucgagugacuuccaa

SEQ ID NO: 1912988 - RNA, 19 nt, Artificial Sequence
  Description of Artificial Sequence: Synthetic oligonucleotide
  Sense strand starting at position 1236 of SEQ ID NO: 1879517
cucagauaaucauugugau

SEQ ID NO: 1912989 - RNA, 19 nt, Artificial Sequence
  Description of Artificial Sequence: Synthetic oligonucleotide
  Antisense strand to SEQ ID NO: 1912988
aucacaaugauuaucugag

SEQ ID NO: 1912990 - RNA, 19 nt, Artificial Sequence
  Description of Artificial Sequence: Synthetic oligonucleotide
  Sense strand starting at position 1237 of SEQ ID NO: 1879517
ucagauaaucauugugauu

SEQ ID NO: 1912991 - RNA, 19 nt, Artificial Sequence
  Description of Artificial Sequence: Synthetic oligonucleotide
  Antisense strand to SEQ ID NO: 1912990
aaucacaaugauuaucuga

SEQ ID NO: 1912992 - RNA, 19 nt, Artificial Sequence
  Description of Artificial Sequence: Synthetic oligonucleotide
  Sense strand starting at position 1346 of SEQ ID NO: 1879517
acauuuaaguggcaggaua

SEQ ID NO: 1912993 - RNA, 19 nt, Artificial Sequence
  Description of Artificial Sequence: Synthetic oligonucleotide
  Antisense strand to SEQ ID NO: 1912992
uauccugccacuuaaaugu

SEQ ID NO: 1912994 - RNA, 19 nt, Artificial Sequence
  Description of Artificial Sequence: Synthetic oligonucleotide
  Sense strand starting at position 1403 of SEQ ID NO: 1879517
ggauuugaauuccagcuuu

SEQ ID NO: 1912995 - RNA, 19 nt, Artificial Sequence
  Description of Artificial Sequence: Synthetic oligonucleotide
  Antisense strand to SEQ ID NO: 1912994
aaagcuggaauucaaaucc

SEQ ID NO: 1912996 - RNA, 19 nt, Artificial Sequence
  Description of Artificial Sequence: Synthetic oligonucleotide
  Sense strand starting at position 1436 of SEQ ID NO: 1879517
gagugagcugagcaaauua

SEQ ID NO: 1912997 - RNA, 19 nt, Artificial Sequence
  Description of Artificial Sequence: Synthetic oligonucleotide
  Antisense strand to SEQ ID NO: 1912996
uaauuugcucagcucacuc

SEQ ID NO: 1912998 - RNA, 19 nt, Artificial Sequence
  Description of Artificial Sequence: Synthetic oligonucleotide
  Sense strand starting at position 1520 of SEQ ID NO: 1879517
uguuguagggcuuaaaugu

SEQ ID NO: 1912999 - RNA, 19 nt, Artificial Sequence
  Description of Artificial Sequence: Synthetic oligonucleotide
  Antisense strand to SEQ ID NO: 1912998
acauuuaagcccuacaaca

SEQ ID NO: 1913000 - RNA, 19 nt, Artificial Sequence
  Description of Artificial Sequence: Synthetic oligonucleotide
  Sense strand starting at position 1555 of SEQ ID NO: 1879517
cacuuagaacagugacagu

SEQ ID NO: 1913001 - RNA, 19 nt, Artificial Sequence
  Description of Artificial Sequence: Synthetic oligonucleotide
  Antisense strand to SEQ ID NO: 1913000
acugucacuguucuaagug

SEQ ID NO: 1913002 - RNA, 19 nt, Artificial Sequence
  Description of Artificial Sequence: Synthetic oligonucleotide
  Sense strand starting at position 1791 of SEQ ID NO: 1879517
acuuaaugagccuagguca

SEQ ID NO: 1913003 - RNA, 19 nt, Artificial Sequence
  Description of Artificial Sequence: Synthetic oligonucleotide
  Antisense strand to SEQ ID NO: 1913002
ugaccuaggcucauuaagu

SEQ ID NO: 1913004 - RNA, 19 nt, Artificial Sequence
  Description of Artificial Sequence: Synthetic oligonucleotide
  Sense strand starting at position 1890 of SEQ ID NO: 1879517
gggagaagacucgguauga

SEQ ID NO: 1913005 - RNA, 19 nt, Artificial Sequence
  Description of Artificial Sequence: Synthetic oligonucleotide
  Antisense strand to SEQ ID NO: 1913004
ucauaccgagucuucuccc

SEQ ID NO: 1913006 - RNA, 19 nt, Artificial Sequence
  Description of Artificial Sequence: Synthetic oligonucleotide
  Sense strand starting at position 1891 of SEQ ID NO: 1879517
ggagaagacucgguaugac

SEQ ID NO: 1913007 - RNA, 19 nt, Artificial Sequence
  Description of Artificial Sequence: Synthetic oligonucleotide
  Antisense strand to SEQ ID NO: 1913006
gucauaccgagucuucucc

SEQ ID NO: 1913008 - RNA, 19 nt, Artificial Sequence
  Description of Artificial Sequence: Synthetic oligonucleotide
  Sense strand starting at position 1894 of SEQ ID NO: 1879517
gaagacucgguaugacacu

SEQ ID NO: 1913009 - RNA, 19 nt, Artificial Sequence
  Description of Artificial Sequence: Synthetic oligonucleotide
  Antisense strand to SEQ ID NO: 1913008
agugucauaccgagucuuc

SEQ ID NO: 1913010 - RNA, 19 nt, Artificial Sequence
  Description of Artificial Sequence: Synthetic oligonucleotide
  Sense strand starting at position 2304 of SEQ ID NO: 1879517
ugcugaaguaaucggagaa

SEQ ID NO: 1913011 - RNA, 19 nt, Artificial Sequence
  Description of Artificial Sequence: Synthetic oligonucleotide
  Antisense strand to SEQ ID NO: 1913010
uucuccgauuacuucagca

SEQ ID NO: 1913012 - RNA, 19 nt, Artificial Sequence
  Description of Artificial Sequence: Synthetic oligonucleotide
  Sense strand starting at position 2305 of SEQ ID NO: 1879517
gcugaaguaaucggagaac

SEQ ID NO: 1913013 - RNA, 19 nt, Artificial Sequence
  Description of Artificial Sequence: Synthetic oligonucleotide
  Antisense strand to SEQ ID NO: 1913012
guucuccgauuacuucagc

SEQ ID NO: 1913014 - RNA, 19 nt, Artificial Sequence
  Description of Artificial Sequence: Synthetic oligonucleotide
  Sense strand starting at position 2308 of SEQ ID NO: 1879517
gaaguaaucggagaacgug

SEQ ID NO: 1913015 - RNA, 19 nt, Artificial Sequence
  Description of Artificial Sequence: Synthetic oligonucleotide
  Antisense strand to SEQ ID NO: 1913014
cacguucuccgauuacuuc

SEQ ID NO: 1913016 - RNA, 19 nt, Artificial Sequence
  Description of Artificial Sequence: Synthetic oligonucleotide
  Sense strand starting at position 2347 of SEQ ID NO: 1879517
ugacaucugggagguguaa

SEQ ID NO: 1913017 - RNA, 19 nt, Artificial Sequence
  Description of Artificial Sequence: Synthetic oligonucleotide
  Antisense strand to SEQ ID NO: 1913016
uuacaccucccagauguca

SEQ ID NO: 1913018 - RNA, 19 nt, Artificial Sequence
  Description of Artificial Sequence: Synthetic oligonucleotide
  Sense strand starting at position 2381 of SEQ ID NO: 1879517
ucagauucuuccucuugag

SEQ ID NO: 1913019 - RNA, 19 nt, Artificial Sequence
  Description of Artificial Sequence: Synthetic oligonucleotide
  Antisense strand to SEQ ID NO: 1913018
cucaagaggaagaaucuga

SEQ ID NO: 1913020 - RNA, 19 nt, Artificial Sequence
  Description of Artificial Sequence: Synthetic oligonucleotide
  Sense strand starting at position 2524 of SEQ ID NO: 1879517
gguuuaaagagcugaccua

SEQ ID NO: 1913021 - RNA, 19 nt, Artificial Sequence
  Description of Artificial Sequence: Synthetic oligonucleotide
  Antisense strand to SEQ ID NO: 1913020
uaggucagcucuuuaaacc

SEQ ID NO: 1913022 - RNA, 19 nt, Artificial Sequence
  Description of Artificial Sequence: Synthetic oligonucleotide
  Sense strand starting at position 2525 of SEQ ID NO: 1879517
guuuaaagagcugaccuau

SEQ ID NO: 1913023 - RNA, 19 nt, Artificial Sequence
  Description of Artificial Sequence: Synthetic oligonucleotide
  Antisense strand to SEQ ID NO: 1913022
auaggucagcucuuuaaac

SEQ ID NO: 1913024 - RNA, 19 nt, Artificial Sequence
  Description of Artificial Sequence: Synthetic oligonucleotide
  Sense strand starting at position 2538 of SEQ ID NO: 1879517
accuauagcccuuggcaua

SEQ ID NO: 1913025 - RNA, 19 nt, Artificial Sequence
  Description of Artificial Sequence: Synthetic oligonucleotide
  Antisense strand to SEQ ID NO: 1913024
uaugccaagggcuauaggu

SEQ ID NO: 1913026 - RNA, 19 nt, Artificial Sequence
  Description of Artificial Sequence: Synthetic oligonucleotide
  Sense strand starting at position 2724 of SEQ ID NO: 1879517
cugguagcucccugagaga

SEQ ID NO: 1913027 - RNA, 19 nt, Artificial Sequence
  Description of Artificial Sequence: Synthetic oligonucleotide
  Antisense strand to SEQ ID NO: 1913026
ucucucagggagcuaccag

SEQ ID NO: 1913028 - RNA, 19 nt, Artificial Sequence
  Description of Artificial Sequence: Synthetic oligonucleotide
  Sense strand starting at position 3016 of SEQ ID NO: 1879517
gagauauccuccuugguug

SEQ ID NO: 1913029 - RNA, 19 nt, Artificial Sequence
  Description of Artificial Sequence: Synthetic oligonucleotide
  Antisense strand to SEQ ID NO: 1913028
caaccaaggaggauaucuc

SEQ ID NO: 1913030 - RNA, 19 nt, Artificial Sequence
  Description of Artificial Sequence: Synthetic oligonucleotide
  Sense strand starting at position 3069 of SEQ ID NO: 1879517
guuuauaucuauccugagu

SEQ ID NO: 1913031 - RNA, 19 nt, Artificial Sequence
  Description of Artificial Sequence: Synthetic oligonucleotide
  Antisense strand to SEQ ID NO: 1913030
acucaggauagauauaaac

SEQ ID NO: 1913032 - RNA, 19 nt, Artificial Sequence
  Description of Artificial Sequence: Synthetic oligonucleotide
  Sense strand starting at position 3197 of SEQ ID NO: 1879517
gacucauuccgucauccag

SEQ ID NO: 1913033 - RNA, 19 nt, Artificial Sequence
  Description of Artificial Sequence: Synthetic oligonucleotide
  Antisense strand to SEQ ID NO: 1913032
cuggaugacggaaugaguc

SEQ ID NO: 1913034 - RNA, 19 nt, Artificial Sequence
  Description of Artificial Sequence: Synthetic oligonucleotide
  Sense strand starting at position 3465 of SEQ ID NO: 1879517
uggccucaaguuuauuaaa

SEQ ID NO: 1913035 - RNA, 19 nt, Artificial Sequence
  Description of Artificial Sequence: Synthetic oligonucleotide
  Antisense strand to SEQ ID NO: 1913034
uuuaauaaacuugaggcca

SEQ ID NO: 1913036 - RNA, 19 nt, Artificial Sequence
  Description of Artificial Sequence: Synthetic oligonucleotide
  Sense strand starting at position 3630 of SEQ ID NO: 1879517
aguugugugccugcugaac

SEQ ID NO: 1913037 - RNA, 19 nt, Artificial Sequence
  Description of Artificial Sequence: Synthetic oligonucleotide
  Antisense strand to SEQ ID NO: 1913036
guucagcaggcacacaacu

SEQ ID NO: 1913038 - RNA, 19 nt, Artificial Sequence
  Description of Artificial Sequence: Synthetic oligonucleotide
  Sense strand starting at position 3 of SEQ ID NO: 1879518
gccagagcuccaugaagua

SEQ ID NO: 1913039 - RNA, 19 nt, Artificial Sequence
  Description of Artificial Sequence: Synthetic oligonucleotide
  Antisense strand to SEQ ID NO: 1913038
uacuucauggagcucuggc

SEQ ID NO: 1913040 - RNA, 19 nt, Artificial Sequence
  Description of Artificial Sequence: Synthetic oligonucleotide
  Sense strand starting at position 210 of SEQ ID NO: 1879518
agaaacuguaagugagacu

SEQ ID NO: 1913041 - RNA, 19 nt, Artificial Sequence
  Description of Artificial Sequence: Synthetic oligonucleotide
  Antisense strand to SEQ ID NO: 1913040
agucucacuuacaguuucu

SEQ ID NO: 1913042 - RNA, 19 nt, Artificial Sequence
  Description of Artificial Sequence: Synthetic oligonucleotide
  Sense strand starting at position 280 of SEQ ID NO: 1879518
gcuggaguaggauauaagu

SEQ ID NO: 1913043 - RNA, 19 nt, Artificial Sequence
  Description of Artificial Sequence: Synthetic oligonucleotide
  Antisense strand to SEQ ID NO: 1913042
acuuauauccuacuccagc

SEQ ID NO: 1913044 - RNA, 19 nt, Artificial Sequence
  Description of Artificial Sequence: Synthetic oligonucleotide
  Sense strand starting at position 309 of SEQ ID NO: 1879518
ucuggugugauccaucuga

SEQ ID NO: 1913045 - RNA, 19 nt, Artificial Sequence
  Description of Artificial Sequence: Synthetic oligonucleotide
  Antisense strand to SEQ ID NO: 1913044
ucagauggaucacaccaga

SEQ ID NO: 1913046 - RNA, 19 nt, Artificial Sequence
  Description of Artificial Sequence: Synthetic oligonucleotide
  Sense strand starting at position 313 of SEQ ID NO: 1879518
gugugauccaucugacagg

SEQ ID NO: 1913047 - RNA, 19 nt, Artificial Sequence
  Description of Artificial Sequence: Synthetic oligonucleotide
  Antisense strand to SEQ ID NO: 1913046
ccugucagauggaucacac

SEQ ID NO: 1913048 - RNA, 19 nt, Artificial Sequence
  Description of Artificial Sequence: Synthetic oligonucleotide
  Sense strand starting at position 347 of SEQ ID NO: 1879518
ggcaaugagcuagaaaugu

SEQ ID NO: 1913049 - RNA, 19 nt, Artificial Sequence
  Description of Artificial Sequence: Synthetic oligonucleotide
  Antisense strand to SEQ ID NO: 1913048
acauuucuagcucauugcc

SEQ ID NO: 1913050 - RNA, 19 nt, Artificial Sequence
  Description of Artificial Sequence: Synthetic oligonucleotide
  Sense strand starting at position 356 of SEQ ID NO: 1879518
cuagaaauguguccuccaa

SEQ ID NO: 1913051 - RNA, 19 nt, Artificial Sequence
  Description of Artificial Sequence: Synthetic oligonucleotide
  Antisense strand to SEQ ID NO: 1913050
uuggaggacacauuucuag

SEQ ID NO: 1913052 - RNA, 19 nt, Artificial Sequence
  Description of Artificial Sequence: Synthetic oligonucleotide
  Sense strand starting at position 358 of SEQ ID NO: 1879518
agaaauguguccuccaaag

SEQ ID NO: 1913053 - RNA, 19 nt, Artificial Sequence
  Description of Artificial Sequence: Synthetic oligonucleotide
  Antisense strand to SEQ ID NO: 1913052
cuuuggaggacacauuucu

SEQ ID NO: 1913054 - RNA, 19 nt, Artificial Sequence
  Description of Artificial Sequence: Synthetic oligonucleotide
  Sense strand starting at position 604 of SEQ ID NO: 1879518
uguagacucuuuguaaauu

SEQ ID NO: 1913055 - RNA, 19 nt, Artificial Sequence
  Description of Artificial Sequence: Synthetic oligonucleotide
  Antisense strand to SEQ ID NO: 1913054
aauuuacaaagagucuaca

SEQ ID NO: 1913056 - RNA, 19 nt, Artificial Sequence
  Description of Artificial Sequence: Synthetic oligonucleotide
  Sense strand starting at position 640 of SEQ ID NO: 1879518
ucucuuauucuuggucuga

SEQ ID NO: 1913057 - RNA, 19 nt, Artificial Sequence
  Description of Artificial Sequence: Synthetic oligonucleotide
  Antisense strand to SEQ ID NO: 1913056
ucagaccaagaauaagaga

SEQ ID NO: 1913058 - RNA, 19 nt, Artificial Sequence
  Description of Artificial Sequence: Synthetic oligonucleotide
  Sense strand starting at position 644 of SEQ ID NO: 1879518
uuauucuuggucugaguua

SEQ ID NO: 1913059 - RNA, 19 nt, Artificial Sequence
  Description of Artificial Sequence: Synthetic oligonucleotide
  Antisense strand to SEQ ID NO: 1913058
uaacucagaccaagaauaa

SEQ ID NO: 1913060 - RNA, 19 nt, Artificial Sequence
  Description of Artificial Sequence: Synthetic oligonucleotide
  Sense strand starting at position 802 of SEQ ID NO: 1879518
gucaauagcaaucgaguga

SEQ ID NO: 1913061 - RNA, 19 nt, Artificial Sequence
  Description of Artificial Sequence: Synthetic oligonucleotide
  Antisense strand to SEQ ID NO: 1913060
ucacucgauugcuauugac

SEQ ID NO: 1913062 - RNA, 19 nt, Artificial Sequence
  Description of Artificial Sequence: Synthetic oligonucleotide
  Sense strand starting at position 803 of SEQ ID NO: 1879518
ucaauagcaaucgagugau

SEQ ID NO: 1913063 - RNA, 19 nt, Artificial Sequence
  Description of Artificial Sequence: Synthetic oligonucleotide
  Antisense strand to SEQ ID NO: 1913062
aucacucgauugcuauuga

SEQ ID NO: 1913064 - RNA, 19 nt, Artificial Sequence
  Description of Artificial Sequence: Synthetic oligonucleotide
  Sense strand starting at position 1164 of SEQ ID NO: 1879518
aaaguuuaagcuuggucau

SEQ ID NO: 1913065 - RNA, 19 nt, Artificial Sequence
  Description of Artificial Sequence: Synthetic oligonucleotide
  Antisense strand to SEQ ID NO: 1913064
augaccaagcuuaaacuuu

SEQ ID NO: 1913066 - RNA, 19 nt, Artificial Sequence
  Description of Artificial Sequence: Synthetic oligonucleotide
  Sense strand starting at position 1702 of SEQ ID NO: 1879518
gugaaagccaguuggacau

SEQ ID NO: 1913067 - RNA, 19 nt, Artificial Sequence
  Description of Artificial Sequence: Synthetic oligonucleotide
  Antisense strand to SEQ ID NO: 1913066
auguccaacuggcuuucac

SEQ ID NO: 1913068 - RNA, 19 nt, Artificial Sequence
  Description of Artificial Sequence: Synthetic oligonucleotide
  Sense strand starting at position 1745 of SEQ ID NO: 1879518
uguccucauuucuaagaga

SEQ ID NO: 1913069 - RNA, 19 nt, Artificial Sequence
  Description of Artificial Sequence: Synthetic oligonucleotide
  Antisense strand to SEQ ID NO: 1913068
ucucuuagaaaugaggaca

SEQ ID NO: 1913070 - RNA, 19 nt, Artificial Sequence
  Description of Artificial Sequence: Synthetic oligonucleotide
  Sense strand starting at position 1850 of SEQ ID NO: 1879518
aaguaccuguguuuaugau

SEQ ID NO: 1913071 - RNA, 19 nt, Artificial Sequence
  Description of Artificial Sequence: Synthetic oligonucleotide
  Antisense strand to SEQ ID NO: 1913070
aucauaaacacagguacuu

SEQ ID NO: 1913072 - RNA, 19 nt, Artificial Sequence
  Description of Artificial Sequence: Synthetic oligonucleotide
  Sense strand starting at position 1910 of SEQ ID NO: 1879518
auuugaguucuguaucgca

SEQ ID NO: 1913073 - RNA, 19 nt, Artificial Sequence
  Description of Artificial Sequence: Synthetic oligonucleotide
  Antisense strand to SEQ ID NO: 1913072
ugcgauacagaacucaaau

SEQ ID NO: 1913074 - RNA, 19 nt, Artificial Sequence
  Description of Artificial Sequence: Synthetic oligonucleotide
  Sense strand starting at position 2016 of SEQ ID NO: 1879518
cuuaaucucccaggagacu

SEQ ID NO: 1913075 - RNA, 19 nt, Artificial Sequence
  Description of Artificial Sequence: Synthetic oligonucleotide
  Antisense strand to SEQ ID NO: 1913074
agucuccugggagauuaag

SEQ ID NO: 1913076 - RNA, 19 nt, Artificial Sequence
  Description of Artificial Sequence: Synthetic oligonucleotide
  Sense strand starting at position 2022 of SEQ ID NO: 1879518
cucccaggagacuguuaaa

SEQ ID NO: 1913077 - RNA, 19 nt, Artificial Sequence
  Description of Artificial Sequence: Synthetic oligonucleotide
  Antisense strand to SEQ ID NO: 1913076
uuuaacagucuccugggag

SEQ ID NO: 1913078 - RNA, 19 nt, Artificial Sequence
  Description of Artificial Sequence: Synthetic oligonucleotide
  Sense strand starting at position 2046 of SEQ ID NO: 1879518
auagaagacuggcuaguua

SEQ ID NO: 1913079 - RNA, 19 nt, Artificial Sequence
  Description of Artificial Sequence: Synthetic oligonucleotide
  Antisense strand to SEQ ID NO: 1913078
uaacuagccagucuucuau

SEQ ID NO: 1913080 - RNA, 19 nt, Artificial Sequence
  Description of Artificial Sequence: Synthetic oligonucleotide
  Sense strand starting at position 2057 of SEQ ID NO: 1879518
gcuaguuauuugccauuga

SEQ ID NO: 1913081 - RNA, 19 nt, Artificial Sequence
  Description of Artificial Sequence: Synthetic oligonucleotide
  Antisense strand to SEQ ID NO: 1913080
ucaauggcaaauaacuagc

SEQ ID NO: 1913082 - RNA, 19 nt, Artificial Sequence
  Description of Artificial Sequence: Synthetic oligonucleotide
  Sense strand starting at position 2083 of SEQ ID NO: 1879518
auguacucauucucauaga

SEQ ID NO: 1913083 - RNA, 19 nt, Artificial Sequence
  Description of Artificial Sequence: Synthetic oligonucleotide
  Antisense strand to SEQ ID NO: 1913082
ucuaugagaaugaguacau

SEQ ID NO: 1913084 - RNA, 19 nt, Artificial Sequence
  Description of Artificial Sequence: Synthetic oligonucleotide
  Sense strand starting at position 2281 of SEQ ID NO: 1879518
ugauaugucagaugaugau

SEQ ID NO: 1913085 - RNA, 19 nt, Artificial Sequence
  Description of Artificial Sequence: Synthetic oligonucleotide
  Antisense strand to SEQ ID NO: 1913084
aucaucaucugacauauca

SEQ ID NO: 1913086 - RNA, 19 nt, Artificial Sequence
  Description of Artificial Sequence: Synthetic oligonucleotide
  Sense strand starting at position 2449 of SEQ ID NO: 1879518
uggucuuacaaguaaaggu

SEQ ID NO: 1913087 - RNA, 19 nt, Artificial Sequence
  Description of Artificial Sequence: Synthetic oligonucleotide
  Antisense strand to SEQ ID NO: 1913086
accuuuacuuguaagacca

SEQ ID NO: 1913088 - RNA, 19 nt, Artificial Sequence
  Description of Artificial Sequence: Synthetic oligonucleotide
  Sense strand starting at position 2476 of SEQ ID NO: 1879518
gcagaaugcacaggauacu

SEQ ID NO: 1913089 - RNA, 19 nt, Artificial Sequence
  Description of Artificial Sequence: Synthetic oligonucleotide
  Antisense strand to SEQ ID NO: 1913088
aguauccugugcauucugc

SEQ ID NO: 1913090 - RNA, 19 nt, Artificial Sequence
  Description of Artificial Sequence: Synthetic oligonucleotide
  Sense strand starting at position 2566 of SEQ ID NO: 1879518
uguccuagugaacagaagu

SEQ ID NO: 1913091 - RNA, 19 nt, Artificial Sequence
  Description of Artificial Sequence: Synthetic oligonucleotide
  Antisense strand to SEQ ID NO: 1913090
acuucuguucacuaggaca

SEQ ID NO: 1913092 - RNA, 19 nt, Artificial Sequence
  Description of Artificial Sequence: Synthetic oligonucleotide
  Sense strand starting at position 2606 of SEQ ID NO: 1879518
ucaaguguucuugcugcca

SEQ ID NO: 1913093 - RNA, 19 nt, Artificial Sequence
  Description of Artificial Sequence: Synthetic oligonucleotide
  Antisense strand to SEQ ID NO: 1913092
uggcagcaagaacacuuga

SEQ ID NO: 1913094 - RNA, 19 nt, Artificial Sequence
  Description of Artificial Sequence: Synthetic oligonucleotide
  Sense strand starting at position 2776 of SEQ ID NO: 1879518
ccugaagaauucuccuuag

SEQ ID NO: 1913095 - RNA, 19 nt, Artificial Sequence
  Description of Artificial Sequence: Synthetic oligonucleotide
  Antisense strand to SEQ ID NO: 1913094
cuaaggagaauucuucagg

SEQ ID NO: 1913096 - RNA, 19 nt, Artificial Sequence
  Description of Artificial Sequence: Synthetic oligonucleotide
  Sense strand starting at position 2840 of SEQ ID NO: 1879518
gccucuucugccucuguua

SEQ ID NO: 1913097 - RNA, 19 nt, Artificial Sequence
  Description of Artificial Sequence: Synthetic oligonucleotide
  Antisense strand to SEQ ID NO: 1913096
uaacagaggcagaagaggc

SEQ ID NO: 1913098 - RNA, 19 nt, Artificial Sequence
  Description of Artificial Sequence: Synthetic oligonucleotide
  Sense strand starting at position 2868 of SEQ ID NO: 1879518
ggaugaguaguaugugaca

SEQ ID NO: 1913099 - RNA, 19 nt, Artificial Sequence
  Description of Artificial Sequence: Synthetic oligonucleotide
  Antisense strand to SEQ ID NO: 1913098
ugucacauacuacucaucc

SEQ ID NO: 1913100 - RNA, 19 nt, Artificial Sequence
  Description of Artificial Sequence: Synthetic oligonucleotide
  Sense strand starting at position 2989 of SEQ ID NO: 1879518
agcaguugucagagguggu

SEQ ID NO: 1913101 - RNA, 19 nt, Artificial Sequence
  Description of Artificial Sequence: Synthetic oligonucleotide
  Antisense strand to SEQ ID NO: 1913100
accaccucugacaacugcu

SEQ ID NO: 1913102 - RNA, 19 nt, Artificial Sequence
  Description of Artificial Sequence: Synthetic oligonucleotide
  Sense strand starting at position 3029 of SEQ ID NO: 1879518
cagcauuggcguguccaca

SEQ ID NO: 1913103 - RNA, 19 nt, Artificial Sequence
  Description of Artificial Sequence: Synthetic oligonucleotide
  Antisense strand to SEQ ID NO: 1913102
uguggacacgccaaugcug

SEQ ID NO: 1913104 - RNA, 19 nt, Artificial Sequence
  Description of Artificial Sequence: Synthetic oligonucleotide
  Sense strand starting at position 3055 of SEQ ID NO: 1879518
ucgcgauggccuucacagu

SEQ ID NO: 1913105 - RNA, 19 nt, Artificial Sequence
  Description of Artificial Sequence: Synthetic oligonucleotide
  Antisense strand to SEQ ID NO: 1913104
acugugaaggccaucgcga

SEQ ID NO: 1913106 - RNA, 19 nt, Artificial Sequence
  Description of Artificial Sequence: Synthetic oligonucleotide
  Sense strand starting at position 3123 of SEQ ID NO: 1879518
cagauuucucagugcugca

SEQ ID NO: 1913107 - RNA, 19 nt, Artificial Sequence
  Description of Artificial Sequence: Synthetic oligonucleotide
  Antisense strand to SEQ ID NO: 1913106
ugcagcacugagaaaucug

SEQ ID NO: 1913108 - RNA, 19 nt, Artificial Sequence
  Description of Artificial Sequence: Synthetic oligonucleotide
  Sense strand starting at position 3369 of SEQ ID NO: 1879518
gggugcugccaugaagaga

SEQ ID NO: 1913109 - RNA, 19 nt, Artificial Sequence
  Description of Artificial Sequence: Synthetic oligonucleotide
  Antisense strand to SEQ ID NO: 1913108
ucucuucauggcagcaccc

SEQ ID NO: 1913110 - RNA, 19 nt, Artificial Sequence
  Description of Artificial Sequence: Synthetic oligonucleotide
  Sense strand starting at position 3438 of SEQ ID NO: 1879518
auuagagauccagggcuaa

SEQ ID NO: 1913111 - RNA, 19 nt, Artificial Sequence
  Description of Artificial Sequence: Synthetic oligonucleotide
  Antisense strand to SEQ ID NO: 1913110
uuagcccuggaucucuaau

SEQ ID NO: 1913112 - RNA, 19 nt, Artificial Sequence
  Description of Artificial Sequence: Synthetic oligonucleotide
  Sense strand starting at position 3465 of SEQ ID NO: 1879518
gcuuucucuggagagucuu

SEQ ID NO: 1913113 - RNA, 19 nt, Artificial Sequence
  Description of Artificial Sequence: Synthetic oligonucleotide
  Antisense strand to SEQ ID NO: 1913112
aagacucuccagagaaagc

SEQ ID NO: 1913114 - RNA, 19 nt, Artificial Sequence
  Description of Artificial Sequence: Synthetic oligonucleotide
  Sense strand starting at position 3473 of SEQ ID NO: 1879518
uggagagucuuguuugagg

SEQ ID NO: 1913115 - RNA, 19 nt, Artificial Sequence
  Description of Artificial Sequence: Synthetic oligonucleotide
  Antisense strand to SEQ ID NO: 1913114
ccucaaacaagacucucca

SEQ ID NO: 1913116 - RNA, 19 nt, Artificial Sequence
  Description of Artificial Sequence: Synthetic oligonucleotide
  Sense strand starting at position 3918 of SEQ ID NO: 1879518
aaugguuaacguuagagag

SEQ ID NO: 1913117 - RNA, 19 nt, Artificial Sequence
  Description of Artificial Sequence: Synthetic oligonucleotide
  Antisense strand to SEQ ID NO: 1913116
cucucuaacguuaaccauu

SEQ ID NO: 1913118 - RNA, 19 nt, Artificial Sequence
  Description of Artificial Sequence: Synthetic oligonucleotide
  Sense strand starting at position 126 of SEQ ID NO: 1879519
uguaguaaucaagacagca

SEQ ID NO: 1913119 - RNA, 19 nt, Artificial Sequence
  Description of Artificial Sequence: Synthetic oligonucleotide
  Antisense strand to SEQ ID NO: 1913118
ugcugucuugauuacuaca

SEQ ID NO: 1913120 - RNA, 19 nt, Artificial Sequence
  Description of Artificial Sequence: Synthetic oligonucleotide
  Sense strand starting at position 621 of SEQ ID NO: 1879519
gauaaaggauguguaucua

SEQ ID NO: 1913121 - RNA, 19 nt, Artificial Sequence
  Description of Artificial Sequence: Synthetic oligonucleotide
  Antisense strand to SEQ ID NO: 1913120
uagauacacauccuuuauc

SEQ ID NO: 1913122 - RNA, 19 nt, Artificial Sequence
  Description of Artificial Sequence: Synthetic oligonucleotide
  Sense strand starting at position 625 of SEQ ID NO: 1879519
aaggauguguaucuacaau

SEQ ID NO: 1913123 - RNA, 19 nt, Artificial Sequence
  Description of Artificial Sequence: Synthetic oligonucleotide
  Antisense strand to SEQ ID NO: 1913122
auuguagauacacauccuu

SEQ ID NO: 1913124 - RNA, 19 nt, Artificial Sequence
  Description of Artificial Sequence: Synthetic oligonucleotide
  Sense strand starting at position 631 of SEQ ID NO: 1879519
guguaucuacaauauguaa

SEQ ID NO: 1913125 - RNA, 19 nt, Artificial Sequence
  Description of Artificial Sequence: Synthetic oligonucleotide
  Antisense strand to SEQ ID NO: 1913124
uuacauauuguagauacac

SEQ ID NO: 1913126 - RNA, 19 nt, Artificial Sequence
  Description of Artificial Sequence: Synthetic oligonucleotide
  Sense strand starting at position 720 of SEQ ID NO: 1879519
cagcaaacauguguggaua

SEQ ID NO: 1913127 - RNA, 19 nt, Artificial Sequence
  Description of Artificial Sequence: Synthetic oligonucleotide
  Antisense strand to SEQ ID NO: 1913126
uauccacacauguuugcug

SEQ ID NO: 1913128 - RNA, 19 nt, Artificial Sequence
  Description of Artificial Sequence: Synthetic oligonucleotide
  Sense strand starting at position 822 of SEQ ID NO: 1879519
cuauuaaagugguuacaau

SEQ ID NO: 1913129 - RNA, 19 nt, Artificial Sequence
  Description of Artificial Sequence: Synthetic oligonucleotide
  Antisense strand to SEQ ID NO: 1913128
auuguaaccacuuuaauag

SEQ ID NO: 1913130 - RNA, 19 nt, Artificial Sequence
  Description of Artificial Sequence: Synthetic oligonucleotide
  Sense strand starting at position 976 of SEQ ID NO: 1879519
aagaguacacauuguaaag

SEQ ID NO: 1913131 - RNA, 19 nt, Artificial Sequence
  Description of Artificial Sequence: Synthetic oligonucleotide
  Antisense strand to SEQ ID NO: 1913130
cuuuacaauguguacucuu

SEQ ID NO: 1913132 - RNA, 19 nt, Artificial Sequence
  Description of Artificial Sequence: Synthetic oligonucleotide
  Sense strand starting at position 1114 of SEQ ID NO: 1879519
caagcaauccuuggagguu

SEQ ID NO: 1913133 - RNA, 19 nt, Artificial Sequence
  Description of Artificial Sequence: Synthetic oligonucleotide
  Antisense strand to SEQ ID NO: 1913132
aaccuccaaggauugcuug

SEQ ID NO: 1913134 - RNA, 19 nt, Artificial Sequence
  Description of Artificial Sequence: Synthetic oligonucleotide
  Sense strand starting at position 1136 of SEQ ID NO: 1879519
gccaauggucauuaucuuu

SEQ ID NO: 1913135 - RNA, 19 nt, Artificial Sequence
  Description of Artificial Sequence: Synthetic oligonucleotide
  Antisense strand to SEQ ID NO: 1913134
aaagauaaugaccauuggc

SEQ ID NO: 1913136 - RNA, 19 nt, Artificial Sequence
  Description of Artificial Sequence: Synthetic oligonucleotide
  Sense strand starting at position 1580 of SEQ ID NO: 1879519
gcagauuauuuagagacau

SEQ ID NO: 1913137 - RNA, 19 nt, Artificial Sequence
  Description of Artificial Sequence: Synthetic oligonucleotide
  Antisense strand to SEQ ID NO: 1913136
augucucuaaauaaucugc

SEQ ID NO: 1913138 - RNA, 19 nt, Artificial Sequence
  Description of Artificial Sequence: Synthetic oligonucleotide
  Sense strand starting at position 1590 of SEQ ID NO: 1879519
uagagacauagcgguaaga

SEQ ID NO: 1913139 - RNA, 19 nt, Artificial Sequence
  Description of Artificial Sequence: Synthetic oligonucleotide
  Antisense strand to SEQ ID NO: 1913138
ucuuaccgcuaugucucua

SEQ ID NO: 1913140 - RNA, 19 nt, Artificial Sequence
  Description of Artificial Sequence: Synthetic oligonucleotide
  Sense strand starting at position 1726 of SEQ ID NO: 1879519
cacguacauguguauauaa

SEQ ID NO: 1913141 - RNA, 19 nt, Artificial Sequence
  Description of Artificial Sequence: Synthetic oligonucleotide
  Antisense strand to SEQ ID NO: 1913140
uuauauacacauguacgug

SEQ ID NO: 1913142 - RNA, 19 nt, Artificial Sequence
  Description of Artificial Sequence: Synthetic oligonucleotide
  Sense strand starting at position 1844 of SEQ ID NO: 1879519
uaaacaugccuuggaaguu

SEQ ID NO: 1913143 - RNA, 19 nt, Artificial Sequence
  Description of Artificial Sequence: Synthetic oligonucleotide
  Antisense strand to SEQ ID NO: 1913142
aacuuccaaggcauguuua

SEQ ID NO: 1913144 - RNA, 19 nt, Artificial Sequence
  Description of Artificial Sequence: Synthetic oligonucleotide
  Sense strand starting at position 1895 of SEQ ID NO: 1879519
agauauaucucuccuggag

SEQ ID NO: 1913145 - RNA, 19 nt, Artificial Sequence
  Description of Artificial Sequence: Synthetic oligonucleotide
  Antisense strand to SEQ ID NO: 1913144
cuccaggagagauauaucu

SEQ ID NO: 1913146 - RNA, 19 nt, Artificial Sequence
  Description of Artificial Sequence: Synthetic oligonucleotide
  Sense strand starting at position 1899 of SEQ ID NO: 1879519
auaucucuccuggagccau

SEQ ID NO: 1913147 - RNA, 19 nt, Artificial Sequence
  Description of Artificial Sequence: Synthetic oligonucleotide
  Antisense strand to SEQ ID NO: 1913146
auggcuccaggagagauau

SEQ ID NO: 1913148 - RNA, 19 nt, Artificial Sequence
  Description of Artificial Sequence: Synthetic oligonucleotide
  Sense strand starting at position 1921 of SEQ ID NO: 1879519
cuuacaucccaaggguaau

SEQ ID NO: 1913149 - RNA, 19 nt, Artificial Sequence
  Description of Artificial Sequence: Synthetic oligonucleotide
  Antisense strand to SEQ ID NO: 1913148
auuacccuugggauguaag

SEQ ID NO: 1913150 - RNA, 19 nt, Artificial Sequence
  Description of Artificial Sequence: Synthetic oligonucleotide
  Sense strand starting at position 1978 of SEQ ID NO: 1879519
gcuuacaauccagaguaau

SEQ ID NO: 1913151 - RNA, 19 nt, Artificial Sequence
  Description of Artificial Sequence: Synthetic oligonucleotide
  Antisense strand to SEQ ID NO: 1913150
auuacucuggauuguaagc

SEQ ID NO: 1913152 - RNA, 19 nt, Artificial Sequence
  Description of Artificial Sequence: Synthetic oligonucleotide
  Sense strand starting at position 2012 of SEQ ID NO: 1879519
gagauuuguuuacagagua

SEQ ID NO: 1913153 - RNA, 19 nt, Artificial Sequence
  Description of Artificial Sequence: Synthetic oligonucleotide
  Antisense strand to SEQ ID NO: 1913152
uacucuguaaacaaaucuc

SEQ ID NO: 1913154 - RNA, 19 nt, Artificial Sequence
  Description of Artificial Sequence: Synthetic oligonucleotide
  Sense strand starting at position 2017 of SEQ ID NO: 1879519
uuguuuacagaguaaaguu

SEQ ID NO: 1913155 - RNA, 19 nt, Artificial Sequence
  Description of Artificial Sequence: Synthetic oligonucleotide
  Antisense strand to SEQ ID NO: 1913154
aacuuuacucuguaaacaa

SEQ ID NO: 1913156 - RNA, 19 nt, Artificial Sequence
  Description of Artificial Sequence: Synthetic oligonucleotide
  Sense strand starting at position 2041 of SEQ ID NO: 1879519
ucucuuucuagugggagaa

SEQ ID NO: 1913157 - RNA, 19 nt, Artificial Sequence
  Description of Artificial Sequence: Synthetic oligonucleotide
  Antisense strand to SEQ ID NO: 1913156
uucucccacuagaaagaga

SEQ ID NO: 1913158 - RNA, 19 nt, Artificial Sequence
  Description of Artificial Sequence: Synthetic oligonucleotide
  Sense strand starting at position 2165 of SEQ ID NO: 1879519
ucaaguuccuuuguggaga

SEQ ID NO: 1913159 - RNA, 19 nt, Artificial Sequence
  Description of Artificial Sequence: Synthetic oligonucleotide
  Antisense strand to SEQ ID NO: 1913158
ucuccacaaaggaacuuga

SEQ ID NO: 1913160 - RNA, 19 nt, Artificial Sequence
  Description of Artificial Sequence: Synthetic oligonucleotide
  Sense strand starting at position 2168 of SEQ ID NO: 1879519
aguuccuuuguggagaauu

SEQ ID NO: 1913161 - RNA, 19 nt, Artificial Sequence
  Description of Artificial Sequence: Synthetic oligonucleotide
  Antisense strand to SEQ ID NO: 1913160
aauucuccacaaaggaacu

SEQ ID NO: 1913162 - RNA, 19 nt, Artificial Sequence
  Description of Artificial Sequence: Synthetic oligonucleotide
  Sense strand starting at position 2231 of SEQ ID NO: 1879519
guuucuaugaaucagaggu

SEQ ID NO: 1913163 - RNA, 19 nt, Artificial Sequence
  Description of Artificial Sequence: Synthetic oligonucleotide
  Antisense strand to SEQ ID NO: 1913162
accucugauucauagaaac

SEQ ID NO: 1913164 - RNA, 19 nt, Artificial Sequence
  Description of Artificial Sequence: Synthetic oligonucleotide
  Sense strand starting at position 2235 of SEQ ID NO: 1879519
cuaugaaucagagguuuga

SEQ ID NO: 1913165 - RNA, 19 nt, Artificial Sequence
  Description of Artificial Sequence: Synthetic oligonucleotide
  Antisense strand to SEQ ID NO: 1913164
ucaaaccucugauucauag

SEQ ID NO: 1913166 - RNA, 19 nt, Artificial Sequence
  Description of Artificial Sequence: Synthetic oligonucleotide
  Sense strand starting at position 2239 of SEQ ID NO: 1879519
gaaucagagguuugaguau

SEQ ID NO: 1913167 - RNA, 19 nt, Artificial Sequence
  Description of Artificial Sequence: Synthetic oligonucleotide
  Antisense strand to SEQ ID NO: 1913166
auacucaaaccucugauuc

SEQ ID NO: 1913168 - RNA, 19 nt, Artificial Sequence
  Description of Artificial Sequence: Synthetic oligonucleotide
  Sense strand starting at position 2252 of SEQ ID NO: 1879519
gaguauggguugguuggau

SEQ ID NO: 1913169 - RNA, 19 nt, Artificial Sequence
  Description of Artificial Sequence: Synthetic oligonucleotide
  Antisense strand to SEQ ID NO: 1913168
auccaaccaacccauacuc

SEQ ID NO: 1913170 - RNA, 19 nt, Artificial Sequence
  Description of Artificial Sequence: Synthetic oligonucleotide
  Sense strand starting at position 2522 of SEQ ID NO: 1879519
guagauuagauguaagguu

SEQ ID NO: 1913171 - RNA, 19 nt, Artificial Sequence
  Description of Artificial Sequence: Synthetic oligonucleotide
  Antisense strand to SEQ ID NO: 1913170
aaccuuacaucuaaucuac

SEQ ID NO: 1913172 - RNA, 19 nt, Artificial Sequence
  Description of Artificial Sequence: Synthetic oligonucleotide
  Sense strand starting at position 2554 of SEQ ID NO: 1879519
uaagauaacugguuguuga

SEQ ID NO: 1913173 - RNA, 19 nt, Artificial Sequence
  Description of Artificial Sequence: Synthetic oligonucleotide
  Antisense strand to SEQ ID NO: 1913172
ucaacaaccaguuaucuua

SEQ ID NO: 1913174 - RNA, 19 nt, Artificial Sequence
  Description of Artificial Sequence: Synthetic oligonucleotide
  Sense strand starting at position 2555 of SEQ ID NO: 1879519
aagauaacugguuguugac

SEQ ID NO: 1913175 - RNA, 19 nt, Artificial Sequence
  Description of Artificial Sequence: Synthetic oligonucleotide
  Antisense strand to SEQ ID NO: 1913174
gucaacaaccaguuaucuu

SEQ ID NO: 1913176 - RNA, 19 nt, Artificial Sequence
  Description of Artificial Sequence: Synthetic oligonucleotide
  Sense strand starting at position 2564 of SEQ ID NO: 1879519
gguuguugacaguacugaa

SEQ ID NO: 1913177 - RNA, 19 nt, Artificial Sequence
  Description of Artificial Sequence: Synthetic oligonucleotide
  Antisense strand to SEQ ID NO: 1913176
uucaguacugucaacaacc

SEQ ID NO: 1913178 - RNA, 19 nt, Artificial Sequence
  Description of Artificial Sequence: Synthetic oligonucleotide
  Sense strand starting at position 2591 of SEQ ID NO: 1879519
aguuguaugacugaguucu

SEQ ID NO: 1913179 - RNA, 19 nt, Artificial Sequence
  Description of Artificial Sequence: Synthetic oligonucleotide
  Antisense strand to SEQ ID NO: 1913178
agaacucagucauacaacu

SEQ ID NO: 1913180 - RNA, 19 nt, Artificial Sequence
  Description of Artificial Sequence: Synthetic oligonucleotide
  Sense strand starting at position 2907 of SEQ ID NO: 1879519
guauucuaaccaugggagu

SEQ ID NO: 1913181 - RNA, 19 nt, Artificial Sequence
  Description of Artificial Sequence: Synthetic oligonucleotide
  Antisense strand to SEQ ID NO: 1913180
acucccaugguuagaauac

SEQ ID NO: 1913182 - RNA, 19 nt, Artificial Sequence
  Description of Artificial Sequence: Synthetic oligonucleotide
  Sense strand starting at position 2909 of SEQ ID NO: 1879519
auucuaaccaugggaguga

SEQ ID NO: 1913183 - RNA, 19 nt, Artificial Sequence
  Description of Artificial Sequence: Synthetic oligonucleotide
  Antisense strand to SEQ ID NO: 1913182
ucacucccaugguuagaau

SEQ ID NO: 1913184 - RNA, 19 nt, Artificial Sequence
  Description of Artificial Sequence: Synthetic oligonucleotide
  Sense strand starting at position 2923 of SEQ ID NO: 1879519
agugaaauccuuuauaguc

SEQ ID NO: 1913185 - RNA, 19 nt, Artificial Sequence
  Description of Artificial Sequence: Synthetic oligonucleotide
  Antisense strand to SEQ ID NO: 1913184
gacuauaaaggauuucacu

SEQ ID NO: 1913186 - RNA, 19 nt, Artificial Sequence
  Description of Artificial Sequence: Synthetic oligonucleotide
  Sense strand starting at position 2981 of SEQ ID NO: 1879519
cuguguauacuagaguaca

SEQ ID NO: 1913187 - RNA, 19 nt, Artificial Sequence
  Description of Artificial Sequence: Synthetic oligonucleotide
  Antisense strand to SEQ ID NO: 1913186
uguacucuaguauacacag

SEQ ID NO: 1913188 - RNA, 19 nt, Artificial Sequence
  Description of Artificial Sequence: Synthetic oligonucleotide
  Sense strand starting at position 3097 of SEQ ID NO: 1879519
aucacaaccuuguugguaa

SEQ ID NO: 1913189 - RNA, 19 nt, Artificial Sequence
  Description of Artificial Sequence: Synthetic oligonucleotide
  Antisense strand to SEQ ID NO: 1913188
uuaccaacaagguugugau

SEQ ID NO: 1913190 - RNA, 19 nt, Artificial Sequence
  Description of Artificial Sequence: Synthetic oligonucleotide
  Sense strand starting at position 3125 of SEQ ID NO: 1879519
ucauuaccuccugauaugu

SEQ ID NO: 1913191 - RNA, 19 nt, Artificial Sequence
  Description of Artificial Sequence: Synthetic oligonucleotide
  Antisense strand to SEQ ID NO: 1913190
acauaucaggagguaauga

SEQ ID NO: 1913192 - RNA, 19 nt, Artificial Sequence
  Description of Artificial Sequence: Synthetic oligonucleotide
  Sense strand starting at position 3182 of SEQ ID NO: 1879519
accgaaugccaguaugaua

SEQ ID NO: 1913193 - RNA, 19 nt, Artificial Sequence
  Description of Artificial Sequence: Synthetic oligonucleotide
  Antisense strand to SEQ ID NO: 1913192
uaucauacuggcauucggu

SEQ ID NO: 1913194 - RNA, 19 nt, Artificial Sequence
  Description of Artificial Sequence: Synthetic oligonucleotide
  Sense strand starting at position 3604 of SEQ ID NO: 1879519
gguaaauuauaugcaucuu

SEQ ID NO: 1913195 - RNA, 19 nt, Artificial Sequence
  Description of Artificial Sequence: Synthetic oligonucleotide
  Antisense strand to SEQ ID NO: 1913194
aagaugcauauaauuuacc

SEQ ID NO: 1913196 - RNA, 19 nt, Artificial Sequence
  Description of Artificial Sequence: Synthetic oligonucleotide
  Sense strand starting at position 3650 of SEQ ID NO: 1879519
uauggcagugaaugaaaua

SEQ ID NO: 1913197 - RNA, 19 nt, Artificial Sequence
  Description of Artificial Sequence: Synthetic oligonucleotide
  Antisense strand to SEQ ID NO: 1913196
uauuucauucacugccaua

SEQ ID NO: 1913198 - RNA, 19 nt, Artificial Sequence
  Description of Artificial Sequence: Synthetic oligonucleotide
  Sense strand starting at position 9 of SEQ ID NO: 1879520
auugaaacuguaggaguaa

SEQ ID NO: 1913199 - RNA, 19 nt, Artificial Sequence
  Description of Artificial Sequence: Synthetic oligonucleotide
  Antisense strand to SEQ ID NO: 1913198
uuacuccuacaguuucaau

SEQ ID NO: 1913200 - RNA, 19 nt, Artificial Sequence
  Description of Artificial Sequence: Synthetic oligonucleotide
  Sense strand starting at position 274 of SEQ ID NO: 1879520
cuggauguguuacuagaaa

SEQ ID NO: 1913201 - RNA, 19 nt, Artificial Sequence
  Description of Artificial Sequence: Synthetic oligonucleotide
  Antisense strand to SEQ ID NO: 1913200
uuucuaguaacacauccag

SEQ ID NO: 1913202 - RNA, 19 nt, Artificial Sequence
  Description of Artificial Sequence: Synthetic oligonucleotide
  Sense strand starting at position 558 of SEQ ID NO: 1879520
ugccuacaucaugagaucu

SEQ ID NO: 1913203 - RNA, 19 nt, Artificial Sequence
  Description of Artificial Sequence: Synthetic oligonucleotide
  Antisense strand to SEQ ID NO: 1913202
agaucucaugauguaggca

SEQ ID NO: 1913204 - RNA, 19 nt, Artificial Sequence
  Description of Artificial Sequence: Synthetic oligonucleotide
  Sense strand starting at position 1055 of SEQ ID NO: 1879520
guuuauuucuugcucucca

SEQ ID NO: 1913205 - RNA, 19 nt, Artificial Sequence
  Description of Artificial Sequence: Synthetic oligonucleotide
  Antisense strand to SEQ ID NO: 1913204
uggagagcaagaaauaaac

SEQ ID NO: 1913206 - RNA, 19 nt, Artificial Sequence
  Description of Artificial Sequence: Synthetic oligonucleotide
  Sense strand starting at position 1102 of SEQ ID NO: 1879520
ucuacauagucacugaaga

SEQ ID NO: 1913207 - RNA, 19 nt, Artificial Sequence
  Description of Artificial Sequence: Synthetic oligonucleotide
  Antisense strand to SEQ ID NO: 1913206
ucuucagugacuauguaga

SEQ ID NO: 1913208 - RNA, 19 nt, Artificial Sequence
  Description of Artificial Sequence: Synthetic oligonucleotide
  Sense strand starting at position 1332 of SEQ ID NO: 1879520
agaaauuagccacaugcua

SEQ ID NO: 1913209 - RNA, 19 nt, Artificial Sequence
  Description of Artificial Sequence: Synthetic oligonucleotide
  Antisense strand to SEQ ID NO: 1913208
uagcauguggcuaauuucu

SEQ ID NO: 1913210 - RNA, 19 nt, Artificial Sequence
  Description of Artificial Sequence: Synthetic oligonucleotide
  Sense strand starting at position 1360 of SEQ ID NO: 1879520
gucucugccaguguguuua

SEQ ID NO: 1913211 - RNA, 19 nt, Artificial Sequence
  Description of Artificial Sequence: Synthetic oligonucleotide
  Antisense strand to SEQ ID NO: 1913210
uaaacacacuggcagagac

SEQ ID NO: 1913212 - RNA, 19 nt, Artificial Sequence
  Description of Artificial Sequence: Synthetic oligonucleotide
  Sense strand starting at position 1581 of SEQ ID NO: 1879520
auauuauaguagccauaga

SEQ ID NO: 1913213 - RNA, 19 nt, Artificial Sequence
  Description of Artificial Sequence: Synthetic oligonucleotide
  Antisense strand to SEQ ID NO: 1913212
ucuauggcuacuauaauau

SEQ ID NO: 1913214 - RNA, 19 nt, Artificial Sequence
  Description of Artificial Sequence: Synthetic oligonucleotide
  Sense strand starting at position 1814 of SEQ ID NO: 1879520
agcauuugcuaugcaacua

SEQ ID NO: 1913215 - RNA, 19 nt, Artificial Sequence
  Description of Artificial Sequence: Synthetic oligonucleotide
  Antisense strand to SEQ ID NO: 1913214
uaguugcauagcaaaugcu

SEQ ID NO: 1913216 - RNA, 19 nt, Artificial Sequence
  Description of Artificial Sequence: Synthetic oligonucleotide
  Sense strand starting at position 1992 of SEQ ID NO: 1879520
cuguuaacucuguaagcaa

SEQ ID NO: 1913217 - RNA, 19 nt, Artificial Sequence
  Description of Artificial Sequence: Synthetic oligonucleotide
  Antisense strand to SEQ ID NO: 1913216
uugcuuacagaguuaacag

SEQ ID NO: 1913218 - RNA, 19 nt, Artificial Sequence
  Description of Artificial Sequence: Synthetic oligonucleotide
  Sense strand starting at position 2052 of SEQ ID NO: 1879520
guagccuuaaugggaauaa

SEQ ID NO: 1913219 - RNA, 19 nt, Artificial Sequence
  Description of Artificial Sequence: Synthetic oligonucleotide
  Antisense strand to SEQ ID NO: 1913218
uuauucccauuaaggcuac

SEQ ID NO: 1913220 - RNA, 19 nt, Artificial Sequence
  Description of Artificial Sequence: Synthetic oligonucleotide
  Sense strand starting at position 2343 of SEQ ID NO: 1879520
auacaaucccuguguuaag

SEQ ID NO: 1913221 - RNA, 19 nt, Artificial Sequence
  Description of Artificial Sequence: Synthetic oligonucleotide
  Antisense strand to SEQ ID NO: 1913220
cuuaacacagggauuguau

SEQ ID NO: 1913222 - RNA, 19 nt, Artificial Sequence
  Description of Artificial Sequence: Synthetic oligonucleotide
  Sense strand starting at position 2391 of SEQ ID NO: 1879520
gcauauggauaacuaaacu

SEQ ID NO: 1913223 - RNA, 19 nt, Artificial Sequence
  Description of Artificial Sequence: Synthetic oligonucleotide
  Antisense strand to SEQ ID NO: 1913222
aguuuaguuauccauaugc

SEQ ID NO: 1913224 - RNA, 19 nt, Artificial Sequence
  Description of Artificial Sequence: Synthetic oligonucleotide
  Sense strand starting at position 2443 of SEQ ID NO: 1879520
auuaguucugcucaaugaa

SEQ ID NO: 1913225 - RNA, 19 nt, Artificial Sequence
  Description of Artificial Sequence: Synthetic oligonucleotide
  Antisense strand to SEQ ID NO: 1913224
uucauugagcagaacuaau

SEQ ID NO: 1913226 - RNA, 19 nt, Artificial Sequence
  Description of Artificial Sequence: Synthetic oligonucleotide
  Sense strand starting at position 2446 of SEQ ID NO: 1879520
aguucugcucaaugaaaug

SEQ ID NO: 1913227 - RNA, 19 nt, Artificial Sequence
  Description of Artificial Sequence: Synthetic oligonucleotide
  Antisense strand to SEQ ID NO: 1913226
cauuucauugagcagaacu

SEQ ID NO: 1913228 - RNA, 19 nt, Artificial Sequence
  Description of Artificial Sequence: Synthetic oligonucleotide
  Sense strand starting at position 2462 of SEQ ID NO: 1879520
augugaauagcauaugucu

SEQ ID NO: 1913229 - RNA, 19 nt, Artificial Sequence
  Description of Artificial Sequence: Synthetic oligonucleotide
  Antisense strand to SEQ ID NO: 1913228
agacauaugcuauucacau

SEQ ID NO: 1913230 - RNA, 19 nt, Artificial Sequence
  Description of Artificial Sequence: Synthetic oligonucleotide
  Sense strand starting at position 2526 of SEQ ID NO: 1879520
uccuucugccauggaaaua

SEQ ID NO: 1913231 - RNA, 19 nt, Artificial Sequence
  Description of Artificial Sequence: Synthetic oligonucleotide
  Antisense strand to SEQ ID NO: 1913230
uauuuccauggcagaagga

SEQ ID NO: 1913232 - RNA, 19 nt, Artificial Sequence
  Description of Artificial Sequence: Synthetic oligonucleotide
  Sense strand starting at position 2546 of SEQ ID NO: 1879520
aagaacaguccuuguauug

SEQ ID NO: 1913233 - RNA, 19 nt, Artificial Sequence
  Description of Artificial Sequence: Synthetic oligonucleotide
  Antisense strand to SEQ ID NO: 1913232
caauacaaggacuguucuu

SEQ ID NO: 1913234 - RNA, 19 nt, Artificial Sequence
  Description of Artificial Sequence: Synthetic oligonucleotide
  Sense strand starting at position 2567 of SEQ ID NO: 1879520
aagguagagccucaaguuu

SEQ ID NO: 1913235 - RNA, 19 nt, Artificial Sequence
  Description of Artificial Sequence: Synthetic oligonucleotide
  Antisense strand to SEQ ID NO: 1913234
aaacuugaggcucuaccuu

SEQ ID NO: 1913236 - RNA, 19 nt, Artificial Sequence
  Description of Artificial Sequence: Synthetic oligonucleotide
  Sense strand starting at position 2636 of SEQ ID NO: 1879520
uugagaguugcccagaucu

SEQ ID NO: 1913237 - RNA, 19 nt, Artificial Sequence
  Description of Artificial Sequence: Synthetic oligonucleotide
  Antisense strand to SEQ ID NO: 1913236
agaucugggcaacucucaa

SEQ ID NO: 1913238 - RNA, 19 nt, Artificial Sequence
  Description of Artificial Sequence: Synthetic oligonucleotide
  Sense strand starting at position 2649 of SEQ ID NO: 1879520
agaucugcgacagauucuu

SEQ ID NO: 1913239 - RNA, 19 nt, Artificial Sequence
  Description of Artificial Sequence: Synthetic oligonucleotide
  Antisense strand to SEQ ID NO: 1913238
aagaaucugucgcagaucu

SEQ ID NO: 1913240 - RNA, 19 nt, Artificial Sequence
  Description of Artificial Sequence: Synthetic oligonucleotide
  Sense strand starting at position 2668 of SEQ ID NO: 1879520
gcaucagugagauguaaac

SEQ ID NO: 1913241 - RNA, 19 nt, Artificial Sequence
  Description of Artificial Sequence: Synthetic oligonucleotide
  Antisense strand to SEQ ID NO: 1913240
guuuacaucucacugaugc

SEQ ID NO: 1913242 - RNA, 19 nt, Artificial Sequence
  Description of Artificial Sequence: Synthetic oligonucleotide
  Sense strand starting at position 2712 of SEQ ID NO: 1879520
ugcaauagagccuaucaca

SEQ ID NO: 1913243 - RNA, 19 nt, Artificial Sequence
  Description of Artificial Sequence: Synthetic oligonucleotide
  Antisense strand to SEQ ID NO: 1913242
ugugauaggcucuauugca

SEQ ID NO: 1913244 - RNA, 19 nt, Artificial Sequence
  Description of Artificial Sequence: Synthetic oligonucleotide
  Sense strand starting at position 2759 of SEQ ID NO: 1879520
agacauaugcaagguggua

SEQ ID NO: 1913245 - RNA, 19 nt, Artificial Sequence
  Description of Artificial Sequence: Synthetic oligonucleotide
  Antisense strand to SEQ ID NO: 1913244
uaccaccuugcauaugucu

SEQ ID NO: 1913246 - RNA, 19 nt, Artificial Sequence
  Description of Artificial Sequence: Synthetic oligonucleotide
  Sense strand starting at position 3021 of SEQ ID NO: 1879520
agcagaaagaaaugguauu

SEQ ID NO: 1913247 - RNA, 19 nt, Artificial Sequence
  Description of Artificial Sequence: Synthetic oligonucleotide
  Antisense strand to SEQ ID NO: 1913246
aauaccauuucuuucugcu

SEQ ID NO: 1913248 - RNA, 19 nt, Artificial Sequence
  Description of Artificial Sequence: Synthetic oligonucleotide
  Sense strand starting at position 3075 of SEQ ID NO: 1879520
ucagaaauugucuguaaug

SEQ ID NO: 1913249 - RNA, 19 nt, Artificial Sequence
  Description of Artificial Sequence: Synthetic oligonucleotide
  Antisense strand to SEQ ID NO: 1913248
cauuacagacaauuucuga

SEQ ID NO: 1913250 - RNA, 19 nt, Artificial Sequence
  Description of Artificial Sequence: Synthetic oligonucleotide
  Sense strand starting at position 3077 of SEQ ID NO: 1879520
agaaauugucuguaauguc

SEQ ID NO: 1913251 - RNA, 19 nt, Artificial Sequence
  Description of Artificial Sequence: Synthetic oligonucleotide
  Antisense strand to SEQ ID NO: 1913250
gacauuacagacaauuucu

SEQ ID NO: 1913252 - RNA, 19 nt, Artificial Sequence
  Description of Artificial Sequence: Synthetic oligonucleotide
  Sense strand starting at position 3089 of SEQ ID NO: 1879520
uaaugucaauuguugggaa

SEQ ID NO: 1913253 - RNA, 19 nt, Artificial Sequence
  Description of Artificial Sequence: Synthetic oligonucleotide
  Antisense strand to SEQ ID NO: 1913252
uucccaacaauugacauua

SEQ ID NO: 1913254 - RNA, 19 nt, Artificial Sequence
  Description of Artificial Sequence: Synthetic oligonucleotide
  Sense strand starting at position 3162 of SEQ ID NO: 1879520
auaugcagacucuagugaa

SEQ ID NO: 1913255 - RNA, 19 nt, Artificial Sequence
  Description of Artificial Sequence: Synthetic oligonucleotide
  Antisense strand to SEQ ID NO: 1913254
uucacuagagucugcauau

SEQ ID NO: 1913256 - RNA, 19 nt, Artificial Sequence
  Description of Artificial Sequence: Synthetic oligonucleotide
  Sense strand starting at position 3288 of SEQ ID NO: 1879520
gagggaguugacugccgaa

SEQ ID NO: 1913257 - RNA, 19 nt, Artificial Sequence
  Description of Artificial Sequence: Synthetic oligonucleotide
  Antisense strand to SEQ ID NO: 1913256
uucggcagucaacucccuc

SEQ ID NO: 1913258 - RNA, 19 nt, Artificial Sequence
  Description of Artificial Sequence: Synthetic oligonucleotide
  Sense strand starting at position 3302 of SEQ ID NO: 1879520
ccgaauacauuugagacau

SEQ ID NO: 1913259 - RNA, 19 nt, Artificial Sequence
  Description of Artificial Sequence: Synthetic oligonucleotide
  Antisense strand to SEQ ID NO: 1913258
augucucaaauguauucgg

SEQ ID NO: 1913260 - RNA, 19 nt, Artificial Sequence
  Description of Artificial Sequence: Synthetic oligonucleotide
  Sense strand starting at position 3451 of SEQ ID NO: 1879520
aaguaaccuccugggacuu

SEQ ID NO: 1913261 - RNA, 19 nt, Artificial Sequence
  Description of Artificial Sequence: Synthetic oligonucleotide
  Antisense strand to SEQ ID NO: 1913260
aagucccaggagguuacuu

SEQ ID NO: 1913262 - RNA, 19 nt, Artificial Sequence
  Description of Artificial Sequence: Synthetic oligonucleotide
  Sense strand starting at position 3461 of SEQ ID NO: 1879520
cugggacuucuccacaagu

SEQ ID NO: 1913263 - RNA, 19 nt, Artificial Sequence
  Description of Artificial Sequence: Synthetic oligonucleotide
  Antisense strand to SEQ ID NO: 1913262
acuuguggagaagucccag

SEQ ID NO: 1913264 - RNA, 19 nt, Artificial Sequence
  Description of Artificial Sequence: Synthetic oligonucleotide
  Sense strand starting at position 3463 of SEQ ID NO: 1879520
gggacuucuccacaagugu

SEQ ID NO: 1913265 - RNA, 19 nt, Artificial Sequence
  Description of Artificial Sequence: Synthetic oligonucleotide
  Antisense strand to SEQ ID NO: 1913264
acacuuguggagaaguccc

SEQ ID NO: 1913266 - RNA, 19 nt, Artificial Sequence
  Description of Artificial Sequence: Synthetic oligonucleotide
  Sense strand starting at position 3471 of SEQ ID NO: 1879520
uccacaaguguugaccaau

SEQ ID NO: 1913267 - RNA, 19 nt, Artificial Sequence
  Description of Artificial Sequence: Synthetic oligonucleotide
  Antisense strand to SEQ ID NO: 1913266
auuggucaacacuugugga

SEQ ID NO: 1913268 - RNA, 19 nt, Artificial Sequence
  Description of Artificial Sequence: Synthetic oligonucleotide
  Sense strand starting at position 3477 of SEQ ID NO: 1879520
aguguugaccaauaaaguu

SEQ ID NO: 1913269 - RNA, 19 nt, Artificial Sequence
  Description of Artificial Sequence: Synthetic oligonucleotide
  Antisense strand to SEQ ID NO: 1913268
aacuuuauuggucaacacu

SEQ ID NO: 1913270 - RNA, 19 nt, Artificial Sequence
  Description of Artificial Sequence: Synthetic oligonucleotide
  Sense strand starting at position 3574 of SEQ ID NO: 1879520
uuaauuagguaugucuuga

SEQ ID NO: 1913271 - RNA, 19 nt, Artificial Sequence
  Description of Artificial Sequence: Synthetic oligonucleotide
  Antisense strand to SEQ ID NO: 1913270
ucaagacauaccuaauuaa

SEQ ID NO: 1913272 - RNA, 19 nt, Artificial Sequence
  Description of Artificial Sequence: Synthetic oligonucleotide
  Sense strand starting at position 3634 of SEQ ID NO: 1879520
gcacauuugugguuugcua

SEQ ID NO: 1913273 - RNA, 19 nt, Artificial Sequence
  Description of Artificial Sequence: Synthetic oligonucleotide
  Antisense strand to SEQ ID NO: 1913272
uagcaaaccacaaaugugc

SEQ ID NO: 1913274 - RNA, 19 nt, Artificial Sequence
  Description of Artificial Sequence: Synthetic oligonucleotide
  Sense strand starting at position 3719 of SEQ ID NO: 1879520
agauaagaauaacacagau

SEQ ID NO: 1913275 - RNA, 19 nt, Artificial Sequence
  Description of Artificial Sequence: Synthetic oligonucleotide
  Antisense strand to SEQ ID NO: 1913274
aucuguguuauucuuaucu

SEQ ID NO: 1913276 - RNA, 19 nt, Artificial Sequence
  Description of Artificial Sequence: Synthetic oligonucleotide
  Sense strand starting at position 3800 of SEQ ID NO: 1879520
acauauagggaaugcucaa

SEQ ID NO: 1913277 - RNA, 19 nt, Artificial Sequence
  Description of Artificial Sequence: Synthetic oligonucleotide
  Antisense strand to SEQ ID NO: 1913276
uugagcauucccuauaugu

SEQ ID NO: 1913278 - RNA, 19 nt, Artificial Sequence
  Description of Artificial Sequence: Synthetic oligonucleotide
  Sense strand starting at position 135 of SEQ ID NO: 1879521
ucaaucauuucuggauaga

SEQ ID NO: 1913279 - RNA, 19 nt, Artificial Sequence
  Description of Artificial Sequence: Synthetic oligonucleotide
  Antisense strand to SEQ ID NO: 1913278
ucuauccagaaaugauuga

SEQ ID NO: 1913280 - RNA, 19 nt, Artificial Sequence
  Description of Artificial Sequence: Synthetic oligonucleotide
  Sense strand starting at position 721 of SEQ ID NO: 1879521
gcuggaggcauuggacuau

SEQ ID NO: 1913281 - RNA, 19 nt, Artificial Sequence
  Description of Artificial Sequence: Synthetic oligonucleotide
  Antisense strand to SEQ ID NO: 1913280
auaguccaaugccuccagc

SEQ ID NO: 1913282 - RNA, 19 nt, Artificial Sequence
  Description of Artificial Sequence: Synthetic oligonucleotide
  Sense strand starting at position 830 of SEQ ID NO: 1879521
agggcuuggucucuuugaa

SEQ ID NO: 1913283 - RNA, 19 nt, Artificial Sequence
  Description of Artificial Sequence: Synthetic oligonucleotide
  Antisense strand to SEQ ID NO: 1913282
uucaaagagaccaagcccu

SEQ ID NO: 1913284 - RNA, 19 nt, Artificial Sequence
  Description of Artificial Sequence: Synthetic oligonucleotide
  Sense strand starting at position 854 of SEQ ID NO: 1879521
gauucagaagggugugaug

SEQ ID NO: 1913285 - RNA, 19 nt, Artificial Sequence
  Description of Artificial Sequence: Synthetic oligonucleotide
  Antisense strand to SEQ ID NO: 1913284
caucacacccuucugaauc

SEQ ID NO: 1913286 - RNA, 19 nt, Artificial Sequence
  Description of Artificial Sequence: Synthetic oligonucleotide
  Sense strand starting at position 856 of SEQ ID NO: 1879521
uucagaagggugugaugau

SEQ ID NO: 1913287 - RNA, 19 nt, Artificial Sequence
  Description of Artificial Sequence: Synthetic oligonucleotide
  Antisense strand to SEQ ID NO: 1913286
aucaucacacccuucugaa

SEQ ID NO: 1913288 - RNA, 19 nt, Artificial Sequence
  Description of Artificial Sequence: Synthetic oligonucleotide
  Sense strand starting at position 915 of SEQ ID NO: 1879521
gggcuuucccaagaggguu

SEQ ID NO: 1913289 - RNA, 19 nt, Artificial Sequence
  Description of Artificial Sequence: Synthetic oligonucleotide
  Antisense strand to SEQ ID NO: 1913288
aacccucuugggaaagccc

SEQ ID NO: 1913290 - RNA, 19 nt, Artificial Sequence
  Description of Artificial Sequence: Synthetic oligonucleotide
  Sense strand starting at position 1307 of SEQ ID NO: 1879521
gagagacuguuucuagauc

SEQ ID NO: 1913291 - RNA, 19 nt, Artificial Sequence
  Description of Artificial Sequence: Synthetic oligonucleotide
  Antisense strand to SEQ ID NO: 1913290
gaucuagaaacagucucuc

SEQ ID NO: 1913292 - RNA, 19 nt, Artificial Sequence
  Description of Artificial Sequence: Synthetic oligonucleotide
  Sense strand starting at position 1313 of SEQ ID NO: 1879521
cuguuucuagaucauuaag

SEQ ID NO: 1913293 - RNA, 19 nt, Artificial Sequence
  Description of Artificial Sequence: Synthetic oligonucleotide
  Antisense strand to SEQ ID NO: 1913292
cuuaaugaucuagaaacag

SEQ ID NO: 1913294 - RNA, 19 nt, Artificial Sequence
  Description of Artificial Sequence: Synthetic oligonucleotide
  Sense strand starting at position 1315 of SEQ ID NO: 1879521
guuucuagaucauuaagga

SEQ ID NO: 1913295 - RNA, 19 nt, Artificial Sequence
  Description of Artificial Sequence: Synthetic oligonucleotide
  Antisense strand to SEQ ID NO: 1913294
uccuuaaugaucuagaaac

SEQ ID NO: 1913296 - RNA, 19 nt, Artificial Sequence
  Description of Artificial Sequence: Synthetic oligonucleotide
  Sense strand starting at position 1371 of SEQ ID NO: 1879521
ggagaagagugaucuggug

SEQ ID NO: 1913297 - RNA, 19 nt, Artificial Sequence
  Description of Artificial Sequence: Synthetic oligonucleotide
  Antisense strand to SEQ ID NO: 1913296
caccagaucacucuucucc

SEQ ID NO: 1913298 - RNA, 19 nt, Artificial Sequence
  Description of Artificial Sequence: Synthetic oligonucleotide
  Sense strand starting at position 1373 of SEQ ID NO: 1879521
agaagagugaucuggugug

SEQ ID NO: 1913299 - RNA, 19 nt, Artificial Sequence
  Description of Artificial Sequence: Synthetic oligonucleotide
  Antisense strand to SEQ ID NO: 1913298
cacaccagaucacucuucu

SEQ ID NO: 1913300 - RNA, 19 nt, Artificial Sequence
  Description of Artificial Sequence: Synthetic oligonucleotide
  Sense strand starting at position 1437 of SEQ ID NO: 1879521
cuugaaguugacugaguga

SEQ ID NO: 1913301 - RNA, 19 nt, Artificial Sequence
  Description of Artificial Sequence: Synthetic oligonucleotide
  Antisense strand to SEQ ID NO: 1913300
ucacucagucaacuucaag

SEQ ID NO: 1913302 - RNA, 19 nt, Artificial Sequence
  Description of Artificial Sequence: Synthetic oligonucleotide
  Sense strand starting at position 1503 of SEQ ID NO: 1879521
ggaggagacuugcauuuag

SEQ ID NO: 1913303 - RNA, 19 nt, Artificial Sequence
  Description of Artificial Sequence: Synthetic oligonucleotide
  Antisense strand to SEQ ID NO: 1913302
cuaaaugcaagucuccucc

SEQ ID NO: 1913304 - RNA, 19 nt, Artificial Sequence
  Description of Artificial Sequence: Synthetic oligonucleotide
  Sense strand starting at position 2116 of SEQ ID NO: 1879521
aguguaucgcuggucgaga

SEQ ID NO: 1913305 - RNA, 19 nt, Artificial Sequence
  Description of Artificial Sequence: Synthetic oligonucleotide
  Antisense strand to SEQ ID NO: 1913304
ucucgaccagcgauacacu

SEQ ID NO: 1913306 - RNA, 19 nt, Artificial Sequence
  Description of Artificial Sequence: Synthetic oligonucleotide
  Sense strand starting at position 2505 of SEQ ID NO: 1879521
ccuuaaucacuggguucua

SEQ ID NO: 1913307 - RNA, 19 nt, Artificial Sequence
  Description of Artificial Sequence: Synthetic oligonucleotide
  Antisense strand to SEQ ID NO: 1913306
uagaacccagugauuaagg

SEQ ID NO: 1913308 - RNA, 19 nt, Artificial Sequence
  Description of Artificial Sequence: Synthetic oligonucleotide
  Sense strand starting at position 2506 of SEQ ID NO: 1879521
cuuaaucacuggguucuau

SEQ ID NO: 1913309 - RNA, 19 nt, Artificial Sequence
  Description of Artificial Sequence: Synthetic oligonucleotide
  Antisense strand to SEQ ID NO: 1913308
auagaacccagugauuaag

SEQ ID NO: 1913310 - RNA, 19 nt, Artificial Sequence
  Description of Artificial Sequence: Synthetic oligonucleotide
  Sense strand starting at position 2566 of SEQ ID NO: 1879521
ggccgugguguguuucaga

SEQ ID NO: 1913311 - RNA, 19 nt, Artificial Sequence
  Description of Artificial Sequence: Synthetic oligonucleotide
  Antisense strand to SEQ ID NO: 1913310
ucugaaacacaccacggcc

SEQ ID NO: 1913312 - RNA, 19 nt, Artificial Sequence
  Description of Artificial Sequence: Synthetic oligonucleotide
  Sense strand starting at position 2687 of SEQ ID NO: 1879521
aggguuguuuggaggaaua

SEQ ID NO: 1913313 - RNA, 19 nt, Artificial Sequence
  Description of Artificial Sequence: Synthetic oligonucleotide
  Antisense strand to SEQ ID NO: 1913312
uauuccuccaaacaacccu

SEQ ID NO: 1913314 - RNA, 19 nt, Artificial Sequence
  Description of Artificial Sequence: Synthetic oligonucleotide
  Sense strand starting at position 2735 of SEQ ID NO: 1879521
ugugaagccuuguuacuaa

SEQ ID NO: 1913315 - RNA, 19 nt, Artificial Sequence
  Description of Artificial Sequence: Synthetic oligonucleotide
  Antisense strand to SEQ ID NO: 1913314
uuaguaacaaggcuucaca

SEQ ID NO: 1913316 - RNA, 19 nt, Artificial Sequence
  Description of Artificial Sequence: Synthetic oligonucleotide
  Sense strand starting at position 2840 of SEQ ID NO: 1879521
uuagcaagaucugcaacuu

SEQ ID NO: 1913317 - RNA, 19 nt, Artificial Sequence
  Description of Artificial Sequence: Synthetic oligonucleotide
  Antisense strand to SEQ ID NO: 1913316
aaguugcagaucuugcuaa

SEQ ID NO: 1913318 - RNA, 19 nt, Artificial Sequence
  Description of Artificial Sequence: Synthetic oligonucleotide
  Sense strand starting at position 2852 of SEQ ID NO: 1879521
gcaacuuauugugugaacu

SEQ ID NO: 1913319 - RNA, 19 nt, Artificial Sequence
  Description of Artificial Sequence: Synthetic oligonucleotide
  Antisense strand to SEQ ID NO: 1913318
aguucacacaauaaguugc

SEQ ID NO: 1913320 - RNA, 19 nt, Artificial Sequence
  Description of Artificial Sequence: Synthetic oligonucleotide
  Sense strand starting at position 2853 of SEQ ID NO: 1879521
caacuuauugugugaacug

SEQ ID NO: 1913321 - RNA, 19 nt, Artificial Sequence
  Description of Artificial Sequence: Synthetic oligonucleotide
  Antisense strand to SEQ ID NO: 1913320
caguucacacaauaaguug

SEQ ID NO: 1913322 - RNA, 19 nt, Artificial Sequence
  Description of Artificial Sequence: Synthetic oligonucleotide
  Sense strand starting at position 2876 of SEQ ID NO: 1879521
ucaguuucucuauaaagug

SEQ ID NO: 1913323 - RNA, 19 nt, Artificial Sequence
  Description of Artificial Sequence: Synthetic oligonucleotide
  Antisense strand to SEQ ID NO: 1913322
cacuuuauagagaaacuga

SEQ ID NO: 1913324 - RNA, 19 nt, Artificial Sequence
  Description of Artificial Sequence: Synthetic oligonucleotide
  Sense strand starting at position 2884 of SEQ ID NO: 1879521
ucuauaaagugggaaugaa

SEQ ID NO: 1913325 - RNA, 19 nt, Artificial Sequence
  Description of Artificial Sequence: Synthetic oligonucleotide
  Antisense strand to SEQ ID NO: 1913324
uucauucccacuuuauaga

SEQ ID NO: 1913326 - RNA, 19 nt, Artificial Sequence
  Description of Artificial Sequence: Synthetic oligonucleotide
  Sense strand starting at position 3279 of SEQ ID NO: 1879521
ucaaacugugucuggcaua

SEQ ID NO: 1913327 - RNA, 19 nt, Artificial Sequence
  Description of Artificial Sequence: Synthetic oligonucleotide
  Antisense strand to SEQ ID NO: 1913326
uaugccagacacaguuuga

SEQ ID NO: 1913328 - RNA, 19 nt, Artificial Sequence
  Description of Artificial Sequence: Synthetic oligonucleotide
  Sense strand starting at position 3303 of SEQ ID NO: 1879521
aaugcuaugucaguauuag

SEQ ID NO: 1913329 - RNA, 19 nt, Artificial Sequence
  Description of Artificial Sequence: Synthetic oligonucleotide
  Antisense strand to SEQ ID NO: 1913328
cuaauacugacauagcauu

SEQ ID NO: 1913330 - RNA, 19 nt, Artificial Sequence
  Description of Artificial Sequence: Synthetic oligonucleotide
  Sense strand starting at position 3304 of SEQ ID NO: 1879521
augcuaugucaguauuaga

SEQ ID NO: 1913331 - RNA, 19 nt, Artificial Sequence
  Description of Artificial Sequence: Synthetic oligonucleotide
  Antisense strand to SEQ ID NO: 1913330
ucuaauacugacauagcau

SEQ ID NO: 1913332 - RNA, 19 nt, Artificial Sequence
  Description of Artificial Sequence: Synthetic oligonucleotide
  Sense strand starting at position 3412 of SEQ ID NO: 1879521
auuguaggcccucaguaau

SEQ ID NO: 1913333 - RNA, 19 nt, Artificial Sequence
  Description of Artificial Sequence: Synthetic oligonucleotide
  Antisense strand to SEQ ID NO: 1913332
auuacugagggccuacaau

SEQ ID NO: 1913334 - RNA, 19 nt, Artificial Sequence
  Description of Artificial Sequence: Synthetic oligonucleotide
  Sense strand starting at position 3415 of SEQ ID NO: 1879521
guaggcccucaguaauuga

SEQ ID NO: 1913335 - RNA, 19 nt, Artificial Sequence
  Description of Artificial Sequence: Synthetic oligonucleotide
  Antisense strand to SEQ ID NO: 1913334
ucaauuacugagggccuac

SEQ ID NO: 1913336 - RNA, 19 nt, Artificial Sequence
  Description of Artificial Sequence: Synthetic oligonucleotide
  Sense strand starting at position 3422 of SEQ ID NO: 1879521
cucaguaauugagcaaaga

SEQ ID NO: 1913337 - RNA, 19 nt, Artificial Sequence
  Description of Artificial Sequence: Synthetic oligonucleotide
  Antisense strand to SEQ ID NO: 1913336
ucuuugcucaauuacugag

SEQ ID NO: 1913338 - RNA, 19 nt, Artificial Sequence
  Description of Artificial Sequence: Synthetic oligonucleotide
  Sense strand starting at position 3608 of SEQ ID NO: 1879521
gacagaaucugugcucgag

SEQ ID NO: 1913339 - RNA, 19 nt, Artificial Sequence
  Description of Artificial Sequence: Synthetic oligonucleotide
  Antisense strand to SEQ ID NO: 1913338
cucgagcacagauucuguc

SEQ ID NO: 1913340 - RNA, 19 nt, Artificial Sequence
  Description of Artificial Sequence: Synthetic oligonucleotide
  Sense strand starting at position 3612 of SEQ ID NO: 1879521
gaaucugugcucgagggua

SEQ ID NO: 1913341 - RNA, 19 nt, Artificial Sequence
  Description of Artificial Sequence: Synthetic oligonucleotide
  Antisense strand to SEQ ID NO: 1913340
uacccucgagcacagauuc

SEQ ID NO: 1913342 - RNA, 19 nt, Artificial Sequence
  Description of Artificial Sequence: Synthetic oligonucleotide
  Sense strand starting at position 3742 of SEQ ID NO: 1879521
gcaccuguccuggagaugu

SEQ ID NO: 1913343 - RNA, 19 nt, Artificial Sequence
  Description of Artificial Sequence: Synthetic oligonucleotide
  Antisense strand to SEQ ID NO: 1913342
acaucuccaggacaggugc

SEQ ID NO: 1913344 - RNA, 19 nt, Artificial Sequence
  Description of Artificial Sequence: Synthetic oligonucleotide
  Sense strand starting at position 3790 of SEQ ID NO: 1879521
agggcaaaucacugcuuau

SEQ ID NO: 1913345 - RNA, 19 nt, Artificial Sequence
  Description of Artificial Sequence: Synthetic oligonucleotide
  Antisense strand to SEQ ID NO: 1913344
auaagcagugauuugcccu

SEQ ID NO: 1913346 - RNA, 19 nt, Artificial Sequence
  Description of Artificial Sequence: Synthetic oligonucleotide
  Sense strand starting at position 3803 of SEQ ID NO: 1879521
gcuuauugucuugaggacu

SEQ ID NO: 1913347 - RNA, 19 nt, Artificial Sequence
  Description of Artificial Sequence: Synthetic oligonucleotide
  Antisense strand to SEQ ID NO: 1913346
aguccucaagacaauaagc

SEQ ID NO: 1913348 - RNA, 19 nt, Artificial Sequence
  Description of Artificial Sequence: Synthetic oligonucleotide
  Sense strand starting at position 3811 of SEQ ID NO: 1879521
ucuugaggacuacguagaa

SEQ ID NO: 1913349 - RNA, 19 nt, Artificial Sequence
  Description of Artificial Sequence: Synthetic oligonucleotide
  Antisense strand to SEQ ID NO: 1913348
uucuacguaguccucaaga

SEQ ID NO: 1913350 - RNA, 19 nt, Artificial Sequence
  Description of Artificial Sequence: Synthetic oligonucleotide
  Sense strand starting at position 3864 of SEQ ID NO: 1879521
agaguuaagagcugaaggu

SEQ ID NO: 1913351 - RNA, 19 nt, Artificial Sequence
  Description of Artificial Sequence: Synthetic oligonucleotide
  Antisense strand to SEQ ID NO: 1913350
accuucagcucuuaacucu

SEQ ID NO: 1913352 - RNA, 19 nt, Artificial Sequence
  Description of Artificial Sequence: Synthetic oligonucleotide
  Sense strand starting at position 3873 of SEQ ID NO: 1879521
agcugaaggucugugaaga

SEQ ID NO: 1913353 - RNA, 19 nt, Artificial Sequence
  Description of Artificial Sequence: Synthetic oligonucleotide
  Antisense strand to SEQ ID NO: 1913352
ucuucacagaccuucagcu

SEQ ID NO: 1913354 - RNA, 19 nt, Artificial Sequence
  Description of Artificial Sequence: Synthetic oligonucleotide
  Sense strand starting at position 3874 of SEQ ID NO: 1879521
gcugaaggucugugaagau

SEQ ID NO: 1913355 - RNA, 19 nt, Artificial Sequence
  Description of Artificial Sequence: Synthetic oligonucleotide
  Antisense strand to SEQ ID NO: 1913354
aucuucacagaccuucagc

SEQ ID NO: 1913356 - RNA, 19 nt, Artificial Sequence
  Description of Artificial Sequence: Synthetic oligonucleotide
  Sense strand starting at position 3961 of SEQ ID NO: 1879521
gugaaacccucaucaugaa

SEQ ID NO: 1913357 - RNA, 19 nt, Artificial Sequence
  Description of Artificial Sequence: Synthetic oligonucleotide
  Antisense strand to SEQ ID NO: 1913356
uucaugaugaggguuucac

SEQ ID NO: 1913358 - RNA, 19 nt, Artificial Sequence
  Description of Artificial Sequence: Synthetic oligonucleotide
  Sense strand starting at position 26 of SEQ ID NO: 1879522
aaaugagagaaguagcguu

SEQ ID NO: 1913359 - RNA, 19 nt, Artificial Sequence
  Description of Artificial Sequence: Synthetic oligonucleotide
  Antisense strand to SEQ ID NO: 1913358
aacgcuacuucucucauuu

SEQ ID NO: 1913360 - RNA, 19 nt, Artificial Sequence
  Description of Artificial Sequence: Synthetic oligonucleotide
  Sense strand starting at position 33 of SEQ ID NO: 1879522
agaaguagcguuuacagua

SEQ ID NO: 1913361 - RNA, 19 nt, Artificial Sequence
  Description of Artificial Sequence: Synthetic oligonucleotide
  Antisense strand to SEQ ID NO: 1913360
uacuguaaacgcuacuucu

SEQ ID NO: 1913362 - RNA, 19 nt, Artificial Sequence
  Description of Artificial Sequence: Synthetic oligonucleotide
  Sense strand starting at position 65 of SEQ ID NO: 1879522
agguuugugauagggauuc

SEQ ID NO: 1913363 - RNA, 19 nt, Artificial Sequence
  Description of Artificial Sequence: Synthetic oligonucleotide
  Antisense strand to SEQ ID NO: 1913362
gaaucccuaucacaaaccu

SEQ ID NO: 1913364 - RNA, 19 nt, Artificial Sequence
  Description of Artificial Sequence: Synthetic oligonucleotide
  Sense strand starting at position 140 of SEQ ID NO: 1879522
caagaaugguggccaauau

SEQ ID NO: 1913365 - RNA, 19 nt, Artificial Sequence
  Description of Artificial Sequence: Synthetic oligonucleotide
  Antisense strand to SEQ ID NO: 1913364
auauuggccaccauucuug

SEQ ID NO: 1913366 - RNA, 19 nt, Artificial Sequence
  Description of Artificial Sequence: Synthetic oligonucleotide
  Sense strand starting at position 191 of SEQ ID NO: 1879522
ucagacuccucucuggaaa

SEQ ID NO: 1913367 - RNA, 19 nt, Artificial Sequence
  Description of Artificial Sequence: Synthetic oligonucleotide
  Antisense strand to SEQ ID NO: 1913366
uuuccagagaggagucuga

SEQ ID NO: 1913368 - RNA, 19 nt, Artificial Sequence
  Description of Artificial Sequence: Synthetic oligonucleotide
  Sense strand starting at position 257 of SEQ ID NO: 1879522
cucugagggugcuucagaa

SEQ ID NO: 1913369 - RNA, 19 nt, Artificial Sequence
  Description of Artificial Sequence: Synthetic oligonucleotide
  Antisense strand to SEQ ID NO: 1913368
uucugaagcacccucagag

SEQ ID NO: 1913370 - RNA, 19 nt, Artificial Sequence
  Description of Artificial Sequence: Synthetic oligonucleotide
  Sense strand starting at position 312 of SEQ ID NO: 1879522
gagagcagcccucagaaau

SEQ ID NO: 1913371 - RNA, 19 nt, Artificial Sequence
  Description of Artificial Sequence: Synthetic oligonucleotide
  Antisense strand to SEQ ID NO: 1913370
auuucugagggcugcucuc

SEQ ID NO: 1913372 - RNA, 19 nt, Artificial Sequence
  Description of Artificial Sequence: Synthetic oligonucleotide
  Sense strand starting at position 481 of SEQ ID NO: 1879522
auuacaucuuguucucuga

SEQ ID NO: 1913373 - RNA, 19 nt, Artificial Sequence
  Description of Artificial Sequence: Synthetic oligonucleotide
  Antisense strand to SEQ ID NO: 1913372
ucagagaacaagauguaau

SEQ ID NO: 1913374 - RNA, 19 nt, Artificial Sequence
  Description of Artificial Sequence: Synthetic oligonucleotide
  Sense strand starting at position 612 of SEQ ID NO: 1879522
uuggauaaggucuguacaa

SEQ ID NO: 1913375 - RNA, 19 nt, Artificial Sequence
  Description of Artificial Sequence: Synthetic oligonucleotide
  Antisense strand to SEQ ID NO: 1913374
uuguacagaccuuauccaa

SEQ ID NO: 1913376 - RNA, 19 nt, Artificial Sequence
  Description of Artificial Sequence: Synthetic oligonucleotide
  Sense strand starting at position 613 of SEQ ID NO: 1879522
uggauaaggucuguacaaa

SEQ ID NO: 1913377 - RNA, 19 nt, Artificial Sequence
  Description of Artificial Sequence: Synthetic oligonucleotide
  Antisense strand to SEQ ID NO: 1913376
uuuguacagaccuuaucca

SEQ ID NO: 1913378 - RNA, 19 nt, Artificial Sequence
  Description of Artificial Sequence: Synthetic oligonucleotide
  Sense strand starting at position 667 of SEQ ID NO: 1879522
ccugauuggucauuauaca

SEQ ID NO: 1913379 - RNA, 19 nt, Artificial Sequence
  Description of Artificial Sequence: Synthetic oligonucleotide
  Antisense strand to SEQ ID NO: 1913378
uguauaaugaccaaucagg

SEQ ID NO: 1913380 - RNA, 19 nt, Artificial Sequence
  Description of Artificial Sequence: Synthetic oligonucleotide
  Sense strand starting at position 675 of SEQ ID NO: 1879522
gucauuauacaaggauagu

SEQ ID NO: 1913381 - RNA, 19 nt, Artificial Sequence
  Description of Artificial Sequence: Synthetic oligonucleotide
  Antisense strand to SEQ ID NO: 1913380
acuauccuuguauaaugac

SEQ ID NO: 1913382 - RNA, 19 nt, Artificial Sequence
  Description of Artificial Sequence: Synthetic oligonucleotide
  Sense strand starting at position 729 of SEQ ID NO: 1879522
ggacuucuguuagcuugga

SEQ ID NO: 1913383 - RNA, 19 nt, Artificial Sequence
  Description of Artificial Sequence: Synthetic oligonucleotide
  Antisense strand to SEQ ID NO: 1913382
uccaagcuaacagaagucc

SEQ ID NO: 1913384 - RNA, 19 nt, Artificial Sequence
  Description of Artificial Sequence: Synthetic oligonucleotide
  Sense strand starting at position 730 of SEQ ID NO: 1879522
gacuucuguuagcuuggau

SEQ ID NO: 1913385 - RNA, 19 nt, Artificial Sequence
  Description of Artificial Sequence: Synthetic oligonucleotide
  Antisense strand to SEQ ID NO: 1913384
auccaagcuaacagaaguc

SEQ ID NO: 1913386 - RNA, 19 nt, Artificial Sequence
  Description of Artificial Sequence: Synthetic oligonucleotide
  Sense strand starting at position 755 of SEQ ID NO: 1879522
aggguaaguacuugagaag

SEQ ID NO: 1913387 - RNA, 19 nt, Artificial Sequence
  Description of Artificial Sequence: Synthetic oligonucleotide
  Antisense strand to SEQ ID NO: 1913386
cuucucaaguacuuacccu

SEQ ID NO: 1913388 - RNA, 19 nt, Artificial Sequence
  Description of Artificial Sequence: Synthetic oligonucleotide
  Sense strand starting at position 912 of SEQ ID NO: 1879522
uuguccucucaagaaguua

SEQ ID NO: 1913389 - RNA, 19 nt, Artificial Sequence
  Description of Artificial Sequence: Synthetic oligonucleotide
  Antisense strand to SEQ ID NO: 1913388
uaacuucuugagaggacaa

SEQ ID NO: 1913390 - RNA, 19 nt, Artificial Sequence
  Description of Artificial Sequence: Synthetic oligonucleotide
  Sense strand starting at position 920 of SEQ ID NO: 1879522
ucaagaaguuaucuuagug

SEQ ID NO: 1913391 - RNA, 19 nt, Artificial Sequence
  Description of Artificial Sequence: Synthetic oligonucleotide
  Antisense strand to SEQ ID NO: 1913390
cacuaagauaacuucuuga

SEQ ID NO: 1913392 - RNA, 19 nt, Artificial Sequence
  Description of Artificial Sequence: Synthetic oligonucleotide
  Sense strand starting at position 924 of SEQ ID NO: 1879522
gaaguuaucuuaguggaga

SEQ ID NO: 1913393 - RNA, 19 nt, Artificial Sequence
  Description of Artificial Sequence: Synthetic oligonucleotide
  Antisense strand to SEQ ID NO: 1913392
ucuccacuaagauaacuuc

SEQ ID NO: 1913394 - RNA, 19 nt, Artificial Sequence
  Description of Artificial Sequence: Synthetic oligonucleotide
  Sense strand starting at position 926 of SEQ ID NO: 1879522
aguuaucuuaguggagaag

SEQ ID NO: 1913395 - RNA, 19 nt, Artificial Sequence
  Description of Artificial Sequence: Synthetic oligonucleotide
  Antisense strand to SEQ ID NO: 1913394
cuucuccacuaagauaacu

SEQ ID NO: 1913396 - RNA, 19 nt, Artificial Sequence
  Description of Artificial Sequence: Synthetic oligonucleotide
  Sense strand starting at position 1101 of SEQ ID NO: 1879522
ucugaugccaucuggaaga

SEQ ID NO: 1913397 - RNA, 19 nt, Artificial Sequence
  Description of Artificial Sequence: Synthetic oligonucleotide
  Antisense strand to SEQ ID NO: 1913396
ucuuccagauggcaucaga

SEQ ID NO: 1913398 - RNA, 19 nt, Artificial Sequence
  Description of Artificial Sequence: Synthetic oligonucleotide
  Sense strand starting at position 1193 of SEQ ID NO: 1879522
ucuguucugccagaaacuu

SEQ ID NO: 1913399 - RNA, 19 nt, Artificial Sequence
  Description of Artificial Sequence: Synthetic oligonucleotide
  Antisense strand to SEQ ID NO: 1913398
aaguuucuggcagaacaga

SEQ ID NO: 1913400 - RNA, 19 nt, Artificial Sequence
  Description of Artificial Sequence: Synthetic oligonucleotide
  Sense strand starting at position 1231 of SEQ ID NO: 1879522
acaaguggcggugauagaa

SEQ ID NO: 1913401 - RNA, 19 nt, Artificial Sequence
  Description of Artificial Sequence: Synthetic oligonucleotide
  Antisense strand to SEQ ID NO: 1913400
uucuaucaccgccacuugu

SEQ ID NO: 1913402 - RNA, 19 nt, Artificial Sequence
  Description of Artificial Sequence: Synthetic oligonucleotide
  Sense strand starting at position 1548 of SEQ ID NO: 1879522
ucaaauucugucuguccau

SEQ ID NO: 1913403 - RNA, 19 nt, Artificial Sequence
  Description of Artificial Sequence: Synthetic oligonucleotide
  Antisense strand to SEQ ID NO: 1913402
auggacagacagaauuuga

SEQ ID NO: 1913404 - RNA, 19 nt, Artificial Sequence
  Description of Artificial Sequence: Synthetic oligonucleotide
  Sense strand starting at position 1959 of SEQ ID NO: 1879522
gcaguaaaccuuuauugcu

SEQ ID NO: 1913405 - RNA, 19 nt, Artificial Sequence
  Description of Artificial Sequence: Synthetic oligonucleotide
  Antisense strand to SEQ ID NO: 1913404
agcaauaaagguuuacugc

SEQ ID NO: 1913406 - RNA, 19 nt, Artificial Sequence
  Description of Artificial Sequence: Synthetic oligonucleotide
  Sense strand starting at position 1966 of SEQ ID NO: 1879522
accuuuauugcugagagac

SEQ ID NO: 1913407 - RNA, 19 nt, Artificial Sequence
  Description of Artificial Sequence: Synthetic oligonucleotide
  Antisense strand to SEQ ID NO: 1913406
gucucucagcaauaaaggu

SEQ ID NO: 1913408 - RNA, 19 nt, Artificial Sequence
  Description of Artificial Sequence: Synthetic oligonucleotide
  Sense strand starting at position 2008 of SEQ ID NO: 1879522
gucugucuccagcagaaag

SEQ ID NO: 1913409 - RNA, 19 nt, Artificial Sequence
  Description of Artificial Sequence: Synthetic oligonucleotide
  Antisense strand to SEQ ID NO: 1913408
cuuucugcuggagacagac

SEQ ID NO: 1913410 - RNA, 19 nt, Artificial Sequence
  Description of Artificial Sequence: Synthetic oligonucleotide
  Sense strand starting at position 2010 of SEQ ID NO: 1879522
cugucuccagcagaaagua

SEQ ID NO: 1913411 - RNA, 19 nt, Artificial Sequence
  Description of Artificial Sequence: Synthetic oligonucleotide
  Antisense strand to SEQ ID NO: 1913410
uacuuucugcuggagacag

SEQ ID NO: 1913412 - RNA, 19 nt, Artificial Sequence
  Description of Artificial Sequence: Synthetic oligonucleotide
  Sense strand starting at position 2158 of SEQ ID NO: 1879522
uguauacaaguuuaucgua

SEQ ID NO: 1913413 - RNA, 19 nt, Artificial Sequence
  Description of Artificial Sequence: Synthetic oligonucleotide
  Antisense strand to SEQ ID NO: 1913412
uacgauaaacuuguauaca

SEQ ID NO: 1913414 - RNA, 19 nt, Artificial Sequence
  Description of Artificial Sequence: Synthetic oligonucleotide
  Sense strand starting at position 2171 of SEQ ID NO: 1879522
aucguaauacaagguagaa

SEQ ID NO: 1913415 - RNA, 19 nt, Artificial Sequence
  Description of Artificial Sequence: Synthetic oligonucleotide
  Antisense strand to SEQ ID NO: 1913414
uucuaccuuguauuacgau

SEQ ID NO: 1913416 - RNA, 19 nt, Artificial Sequence
  Description of Artificial Sequence: Synthetic oligonucleotide
  Sense strand starting at position 2330 of SEQ ID NO: 1879522
acaggaaagccuugguucu

SEQ ID NO: 1913417 - RNA, 19 nt, Artificial Sequence
  Description of Artificial Sequence: Synthetic oligonucleotide
  Antisense strand to SEQ ID NO: 1913416
agaaccaaggcuuuccugu

SEQ ID NO: 1913418 - RNA, 19 nt, Artificial Sequence
  Description of Artificial Sequence: Synthetic oligonucleotide
  Sense strand starting at position 2484 of SEQ ID NO: 1879522
ccucuaguacuugggauga

SEQ ID NO: 1913419 - RNA, 19 nt, Artificial Sequence
  Description of Artificial Sequence: Synthetic oligonucleotide
  Antisense strand to SEQ ID NO: 1913418
ucaucccaaguacuagagg

SEQ ID NO: 1913420 - RNA, 19 nt, Artificial Sequence
  Description of Artificial Sequence: Synthetic oligonucleotide
  Sense strand starting at position 2488 of SEQ ID NO: 1879522
uaguacuugggaugauaac

SEQ ID NO: 1913421 - RNA, 19 nt, Artificial Sequence
  Description of Artificial Sequence: Synthetic oligonucleotide
  Antisense strand to SEQ ID NO: 1913420
guuaucaucccaaguacua

SEQ ID NO: 1913422 - RNA, 19 nt, Artificial Sequence
  Description of Artificial Sequence: Synthetic oligonucleotide
  Sense strand starting at position 2598 of SEQ ID NO: 1879522
gaaagaguggauugugaac

SEQ ID NO: 1913423 - RNA, 19 nt, Artificial Sequence
  Description of Artificial Sequence: Synthetic oligonucleotide
  Antisense strand to SEQ ID NO: 1913422
guucacaauccacucuuuc

SEQ ID NO: 1913424 - RNA, 19 nt, Artificial Sequence
  Description of Artificial Sequence: Synthetic oligonucleotide
  Sense strand starting at position 2643 of SEQ ID NO: 1879522
ugcaauaaguggcuuaaga

SEQ ID NO: 1913425 - RNA, 19 nt, Artificial Sequence
  Description of Artificial Sequence: Synthetic oligonucleotide
  Antisense strand to SEQ ID NO: 1913424
ucuuaagccacuuauugca

SEQ ID NO: 1913426 - RNA, 19 nt, Artificial Sequence
  Description of Artificial Sequence: Synthetic oligonucleotide
  Sense strand starting at position 2654 of SEQ ID NO: 1879522
gcuuaagagaguugaaccu

SEQ ID NO: 1913427 - RNA, 19 nt, Artificial Sequence
  Description of Artificial Sequence: Synthetic oligonucleotide
  Antisense strand to SEQ ID NO: 1913426
agguucaacucucuuaagc

SEQ ID NO: 1913428 - RNA, 19 nt, Artificial Sequence
  Description of Artificial Sequence: Synthetic oligonucleotide
  Sense strand starting at position 2666 of SEQ ID NO: 1879522
ugaaccugcuucucagaau

SEQ ID NO: 1913429 - RNA, 19 nt, Artificial Sequence
  Description of Artificial Sequence: Synthetic oligonucleotide
  Antisense strand to SEQ ID NO: 1913428
auucugagaagcagguuca

SEQ ID NO: 1913430 - RNA, 19 nt, Artificial Sequence
  Description of Artificial Sequence: Synthetic oligonucleotide
  Sense strand starting at position 2708 of SEQ ID NO: 1879522
gaaggaucaggcuggucuu

SEQ ID NO: 1913431 - RNA, 19 nt, Artificial Sequence
  Description of Artificial Sequence: Synthetic oligonucleotide
  Antisense strand to SEQ ID NO: 1913430
aagaccagccugauccuuc

SEQ ID NO: 1913432 - RNA, 19 nt, Artificial Sequence
  Description of Artificial Sequence: Synthetic oligonucleotide
  Sense strand starting at position 2711 of SEQ ID NO: 1879522
ggaucaggcuggucuucau

SEQ ID NO: 1913433 - RNA, 19 nt, Artificial Sequence
  Description of Artificial Sequence: Synthetic oligonucleotide
  Antisense strand to SEQ ID NO: 1913432
augaagaccagccugaucc

SEQ ID NO: 1913434 - RNA, 19 nt, Artificial Sequence
  Description of Artificial Sequence: Synthetic oligonucleotide
  Sense strand starting at position 2855 of SEQ ID NO: 1879522
uuucuugcagcggagaaua

SEQ ID NO: 1913435 - RNA, 19 nt, Artificial Sequence
  Description of Artificial Sequence: Synthetic oligonucleotide
  Antisense strand to SEQ ID NO: 1913434
uauucuccgcugcaagaaa

SEQ ID NO: 1913436 - RNA, 19 nt, Artificial Sequence
  Description of Artificial Sequence: Synthetic oligonucleotide
  Sense strand starting at position 3088 of SEQ ID NO: 1879522
guuccaagagcaugagaaa

SEQ ID NO: 1913437 - RNA, 19 nt, Artificial Sequence
  Description of Artificial Sequence: Synthetic oligonucleotide
  Antisense strand to SEQ ID NO: 1913436
uuucucaugcucuuggaac

SEQ ID NO: 1913438 - RNA, 19 nt, Artificial Sequence
  Description of Artificial Sequence: Synthetic oligonucleotide
  Sense strand starting at position 123 of SEQ ID NO: 1879523
cuguuugagguuuaucaug

SEQ ID NO: 1913439 - RNA, 19 nt, Artificial Sequence
  Description of Artificial Sequence: Synthetic oligonucleotide
  Antisense strand to SEQ ID NO: 1913438
caugauaaaccucaaacag

SEQ ID NO: 1913440 - RNA, 19 nt, Artificial Sequence
  Description of Artificial Sequence: Synthetic oligonucleotide
  Sense strand starting at position 138 of SEQ ID NO: 1879523
caugguggucuggaguagu

SEQ ID NO: 1913441 - RNA, 19 nt, Artificial Sequence
  Description of Artificial Sequence: Synthetic oligonucleotide
  Antisense strand to SEQ ID NO: 1913440
acuacuccagaccaccaug

SEQ ID NO: 1913442 - RNA, 19 nt, Artificial Sequence
  Description of Artificial Sequence: Synthetic oligonucleotide
  Sense strand starting at position 148 of SEQ ID NO: 1879523
uggaguagugguuaagagu

SEQ ID NO: 1913443 - RNA, 19 nt, Artificial Sequence
  Description of Artificial Sequence: Synthetic oligonucleotide
  Antisense strand to SEQ ID NO: 1913442
acucuuaaccacuacucca

SEQ ID NO: 1913444 - RNA, 19 nt, Artificial Sequence
  Description of Artificial Sequence: Synthetic oligonucleotide
  Sense strand starting at position 194 of SEQ ID NO: 1879523
ugcuuaauaugucugggag

SEQ ID NO: 1913445 - RNA, 19 nt, Artificial Sequence
  Description of Artificial Sequence: Synthetic oligonucleotide
  Antisense strand to SEQ ID NO: 1913444
cucccagacauauuaagca

SEQ ID NO: 1913446 - RNA, 19 nt, Artificial Sequence
  Description of Artificial Sequence: Synthetic oligonucleotide
  Sense strand starting at position 197 of SEQ ID NO: 1879523
uuaauaugucugggaguca

SEQ ID NO: 1913447 - RNA, 19 nt, Artificial Sequence
  Description of Artificial Sequence: Synthetic oligonucleotide
  Antisense strand to SEQ ID NO: 1913446
ugacucccagacauauuaa

SEQ ID NO: 1913448 - RNA, 19 nt, Artificial Sequence
  Description of Artificial Sequence: Synthetic oligonucleotide
  Sense strand starting at position 211 of SEQ ID NO: 1879523
agucaauuuccuuguuugu

SEQ ID NO: 1913449 - RNA, 19 nt, Artificial Sequence
  Description of Artificial Sequence: Synthetic oligonucleotide
  Antisense strand to SEQ ID NO: 1913448
acaaacaaggaaauugacu

SEQ ID NO: 1913450 - RNA, 19 nt, Artificial Sequence
  Description of Artificial Sequence: Synthetic oligonucleotide
  Sense strand starting at position 271 of SEQ ID NO: 1879523
ggauuaauauguguaacac

SEQ ID NO: 1913451 - RNA, 19 nt, Artificial Sequence
  Description of Artificial Sequence: Synthetic oligonucleotide
  Antisense strand to SEQ ID NO: 1913450
guguuacacauauuaaucc

SEQ ID NO: 1913452 - RNA, 19 nt, Artificial Sequence
  Description of Artificial Sequence: Synthetic oligonucleotide
  Sense strand starting at position 283 of SEQ ID NO: 1879523
guaacacuaugugcaaaua

SEQ ID NO: 1913453 - RNA, 19 nt, Artificial Sequence
  Description of Artificial Sequence: Synthetic oligonucleotide
  Antisense strand to SEQ ID NO: 1913452
uauuugcacauaguguuac

SEQ ID NO: 1913454 - RNA, 19 nt, Artificial Sequence
  Description of Artificial Sequence: Synthetic oligonucleotide
  Sense strand starting at position 321 of SEQ ID NO: 1879523
ugagauaucauaggcagac

SEQ ID NO: 1913455 - RNA, 19 nt, Artificial Sequence
  Description of Artificial Sequence: Synthetic oligonucleotide
  Antisense strand to SEQ ID NO: 1913454
gucugccuaugauaucuca

SEQ ID NO: 1913456 - RNA, 19 nt, Artificial Sequence
  Description of Artificial Sequence: Synthetic oligonucleotide
  Sense strand starting at position 469 of SEQ ID NO: 1879523
ucagaaaugcagcaaaugu

SEQ ID NO: 1913457 - RNA, 19 nt, Artificial Sequence
  Description of Artificial Sequence: Synthetic oligonucleotide
  Antisense strand to SEQ ID NO: 1913456
acauuugcugcauuucuga

SEQ ID NO: 1913458 - RNA, 19 nt, Artificial Sequence
  Description of Artificial Sequence: Synthetic oligonucleotide
  Sense strand starting at position 647 of SEQ ID NO: 1879523
caccuuaguugucugaaug

SEQ ID NO: 1913459 - RNA, 19 nt, Artificial Sequence
  Description of Artificial Sequence: Synthetic oligonucleotide
  Antisense strand to SEQ ID NO: 1913458
cauucagacaacuaaggug

SEQ ID NO: 1913460 - RNA, 19 nt, Artificial Sequence
  Description of Artificial Sequence: Synthetic oligonucleotide
  Sense strand starting at position 648 of SEQ ID NO: 1879523
accuuaguugucugaauga

SEQ ID NO: 1913461 - RNA, 19 nt, Artificial Sequence
  Description of Artificial Sequence: Synthetic oligonucleotide
  Antisense strand to SEQ ID NO: 1913460
ucauucagacaacuaaggu

SEQ ID NO: 1913462 - RNA, 19 nt, Artificial Sequence
  Description of Artificial Sequence: Synthetic oligonucleotide
  Sense strand starting at position 722 of SEQ ID NO: 1879523
agguuaaauuaaccuagca

SEQ ID NO: 1913463 - RNA, 19 nt, Artificial Sequence
  Description of Artificial Sequence: Synthetic oligonucleotide
  Antisense strand to SEQ ID NO: 1913462
ugcuagguuaauuuaaccu

SEQ ID NO: 1913464 - RNA, 19 nt, Artificial Sequence
  Description of Artificial Sequence: Synthetic oligonucleotide
  Sense strand starting at position 748 of SEQ ID NO: 1879523
gauacagacuaggugugaa

SEQ ID NO: 1913465 - RNA, 19 nt, Artificial Sequence
  Description of Artificial Sequence: Synthetic oligonucleotide
  Antisense strand to SEQ ID NO: 1913464
uucacaccuagucuguauc

SEQ ID NO: 1913466 - RNA, 19 nt, Artificial Sequence
  Description of Artificial Sequence: Synthetic oligonucleotide
  Sense strand starting at position 751 of SEQ ID NO: 1879523
acagacuaggugugaaauu

SEQ ID NO: 1913467 - RNA, 19 nt, Artificial Sequence
  Description of Artificial Sequence: Synthetic oligonucleotide
  Antisense strand to SEQ ID NO: 1913466
aauuucacaccuagucugu

SEQ ID NO: 1913468 - RNA, 19 nt, Artificial Sequence
  Description of Artificial Sequence: Synthetic oligonucleotide
  Sense strand starting at position 752 of SEQ ID NO: 1879523
cagacuaggugugaaauuu

SEQ ID NO: 1913469 - RNA, 19 nt, Artificial Sequence
  Description of Artificial Sequence: Synthetic oligonucleotide
  Antisense strand to SEQ ID NO: 1913468
aaauuucacaccuagucug

SEQ ID NO: 1913470 - RNA, 19 nt, Artificial Sequence
  Description of Artificial Sequence: Synthetic oligonucleotide
  Sense strand starting at position 786 of SEQ ID NO: 1879523
ggcuuuaaagaaugcauaa

SEQ ID NO: 1913471 - RNA, 19 nt, Artificial Sequence
  Description of Artificial Sequence: Synthetic oligonucleotide
  Antisense strand to SEQ ID NO: 1913470
uuaugcauucuuuaaagcc

SEQ ID NO: 1913472 - RNA, 19 nt, Artificial Sequence
  Description of Artificial Sequence: Synthetic oligonucleotide
  Sense strand starting at position 922 of SEQ ID NO: 1879523
ggaucuacucuggagucuu

SEQ ID NO: 1913473 - RNA, 19 nt, Artificial Sequence
  Description of Artificial Sequence: Synthetic oligonucleotide
  Antisense strand to SEQ ID NO: 1913472
aagacuccagaguagaucc

SEQ ID NO: 1913474 - RNA, 19 nt, Artificial Sequence
  Description of Artificial Sequence: Synthetic oligonucleotide
  Sense strand starting at position 988 of SEQ ID NO: 1879523
ugaagcuguggguauguau

SEQ ID NO: 1913475 - RNA, 19 nt, Artificial Sequence
  Description of Artificial Sequence: Synthetic oligonucleotide
  Antisense strand to SEQ ID NO: 1913474
auacauacccacagcuuca

SEQ ID NO: 1913476 - RNA, 19 nt, Artificial Sequence
  Description of Artificial Sequence: Synthetic oligonucleotide
  Sense strand starting at position 2059 of SEQ ID NO: 1879523
ggagaauccucuccacagc

SEQ ID NO: 1913477 - RNA, 19 nt, Artificial Sequence
  Description of Artificial Sequence: Synthetic oligonucleotide
  Antisense strand to SEQ ID NO: 1913476
gcuguggagaggauucucc

SEQ ID NO: 1913478 - RNA, 19 nt, Artificial Sequence
  Description of Artificial Sequence: Synthetic oligonucleotide
  Sense strand starting at position 2097 of SEQ ID NO: 1879523
gggcgagggcagugauuua

SEQ ID NO: 1913479 - RNA, 19 nt, Artificial Sequence
  Description of Artificial Sequence: Synthetic oligonucleotide
  Antisense strand to SEQ ID NO: 1913478
uaaaucacugcccucgccc

SEQ ID NO: 1913480 - RNA, 19 nt, Artificial Sequence
  Description of Artificial Sequence: Synthetic oligonucleotide
  Sense strand starting at position 2741 of SEQ ID NO: 1879523
aucagauuguucuugggca

SEQ ID NO: 1913481 - RNA, 19 nt, Artificial Sequence
  Description of Artificial Sequence: Synthetic oligonucleotide
  Antisense strand to SEQ ID NO: 1913480
ugcccaagaacaaucugau

SEQ ID NO: 1913482 - RNA, 19 nt, Artificial Sequence
  Description of Artificial Sequence: Synthetic oligonucleotide
  Sense strand starting at position 2917 of SEQ ID NO: 1879523
uggguaauggcuuaaauua

SEQ ID NO: 1913483 - RNA, 19 nt, Artificial Sequence
  Description of Artificial Sequence: Synthetic oligonucleotide
  Antisense strand to SEQ ID NO: 1913482
uaauuuaagccauuaccca

SEQ ID NO: 1913484 - RNA, 19 nt, Artificial Sequence
  Description of Artificial Sequence: Synthetic oligonucleotide
  Sense strand starting at position 3022 of SEQ ID NO: 1879523
cugggauuguucucaucuc

SEQ ID NO: 1913485 - RNA, 19 nt, Artificial Sequence
  Description of Artificial Sequence: Synthetic oligonucleotide
  Antisense strand to SEQ ID NO: 1913484
gagaugagaacaaucccag

SEQ ID NO: 1913486 - RNA, 19 nt, Artificial Sequence
  Description of Artificial Sequence: Synthetic oligonucleotide
  Sense strand starting at position 3099 of SEQ ID NO: 1879523
uagacuucugcugaccagu

SEQ ID NO: 1913487 - RNA, 19 nt, Artificial Sequence
  Description of Artificial Sequence: Synthetic oligonucleotide
  Antisense strand to SEQ ID NO: 1913486
acuggucagcagaagucua

SEQ ID NO: 1913488 - RNA, 19 nt, Artificial Sequence
  Description of Artificial Sequence: Synthetic oligonucleotide
  Sense strand starting at position 3234 of SEQ ID NO: 1879523
uaaugugaguuucugaaga

SEQ ID NO: 1913489 - RNA, 19 nt, Artificial Sequence
  Description of Artificial Sequence: Synthetic oligonucleotide
  Antisense strand to SEQ ID NO: 1913488
ucuucagaaacucacauua

SEQ ID NO: 1913490 - RNA, 19 nt, Artificial Sequence
  Description of Artificial Sequence: Synthetic oligonucleotide
  Sense strand starting at position 3239 of SEQ ID NO: 1879523
ugaguuucugaagaguagu

SEQ ID NO: 1913491 - RNA, 19 nt, Artificial Sequence
  Description of Artificial Sequence: Synthetic oligonucleotide
  Antisense strand to SEQ ID NO: 1913490
acuacucuucagaaacuca

SEQ ID NO: 1913492 - RNA, 19 nt, Artificial Sequence
  Description of Artificial Sequence: Synthetic oligonucleotide
  Sense strand starting at position 3266 of SEQ ID NO: 1879523
cgaaauuagaaauguggua

SEQ ID NO: 1913493 - RNA, 19 nt, Artificial Sequence
  Description of Artificial Sequence: Synthetic oligonucleotide
  Antisense strand to SEQ ID NO: 1913492
uaccacauuucuaauuucg

SEQ ID NO: 1913494 - RNA, 19 nt, Artificial Sequence
  Description of Artificial Sequence: Synthetic oligonucleotide
  Sense strand starting at position 3307 of SEQ ID NO: 1879523
guaguuugauuucucucuu

SEQ ID NO: 1913495 - RNA, 19 nt, Artificial Sequence
  Description of Artificial Sequence: Synthetic oligonucleotide
  Antisense strand to SEQ ID NO: 1913494
aagagagaaaucaaacuac

SEQ ID NO: 1913496 - RNA, 19 nt, Artificial Sequence
  Description of Artificial Sequence: Synthetic oligonucleotide
  Sense strand starting at position 3374 of SEQ ID NO: 1879523
ucaacuaauguacgaaacu

SEQ ID NO: 1913497 - RNA, 19 nt, Artificial Sequence
  Description of Artificial Sequence: Synthetic oligonucleotide
  Antisense strand to SEQ ID NO: 1913496
aguuucguacauuaguuga

SEQ ID NO: 1913498 - RNA, 19 nt, Artificial Sequence
  Description of Artificial Sequence: Synthetic oligonucleotide
  Sense strand starting at position 3629 of SEQ ID NO: 1879523
ccuagagaguuauuaauag

SEQ ID NO: 1913499 - RNA, 19 nt, Artificial Sequence
  Description of Artificial Sequence: Synthetic oligonucleotide
  Antisense strand to SEQ ID NO: 1913498
cuauuaauaacucucuagg

SEQ ID NO: 1913500 - RNA, 19 nt, Artificial Sequence
  Description of Artificial Sequence: Synthetic oligonucleotide
  Sense strand starting at position 3692 of SEQ ID NO: 1879523
ugauuucuugcauggcaca

SEQ ID NO: 1913501 - RNA, 19 nt, Artificial Sequence
  Description of Artificial Sequence: Synthetic oligonucleotide
  Antisense strand to SEQ ID NO: 1913500
ugugccaugcaagaaauca

SEQ ID NO: 1913502 - RNA, 19 nt, Artificial Sequence
  Description of Artificial Sequence: Synthetic oligonucleotide
  Sense strand starting at position 3693 of SEQ ID NO: 1879523
gauuucuugcauggcacau

SEQ ID NO: 1913503 - RNA, 19 nt, Artificial Sequence
  Description of Artificial Sequence: Synthetic oligonucleotide
  Antisense strand to SEQ ID NO: 1913502
augugccaugcaagaaauc

SEQ ID NO: 1913504 - RNA, 19 nt, Artificial Sequence
  Description of Artificial Sequence: Synthetic oligonucleotide
  Sense strand starting at position 3779 of SEQ ID NO: 1879523
gugugucuucgcccucaga

SEQ ID NO: 1913505 - RNA, 19 nt, Artificial Sequence
  Description of Artificial Sequence: Synthetic oligonucleotide
  Antisense strand to SEQ ID NO: 1913504
ucugagggcgaagacacac

SEQ ID NO: 1913506 - RNA, 19 nt, Artificial Sequence
  Description of Artificial Sequence: Synthetic oligonucleotide
  Sense strand starting at position 3781 of SEQ ID NO: 1879523
gugucuucgcccucagacu

SEQ ID NO: 1913507 - RNA, 19 nt, Artificial Sequence
  Description of Artificial Sequence: Synthetic oligonucleotide
  Antisense strand to SEQ ID NO: 1913506
agucugagggcgaagacac

SEQ ID NO: 1913508 - RNA, 19 nt, Artificial Sequence
  Description of Artificial Sequence: Synthetic oligonucleotide
  Sense strand starting at position 3835 of SEQ ID NO: 1879523
gguauugagcgugcagcua

SEQ ID NO: 1913509 - RNA, 19 nt, Artificial Sequence
  Description of Artificial Sequence: Synthetic oligonucleotide
  Antisense strand to SEQ ID NO: 1913508
uagcugcacgcucaauacc

SEQ ID NO: 1913510 - RNA, 19 nt, Artificial Sequence
  Description of Artificial Sequence: Synthetic oligonucleotide
  Sense strand starting at position 3857 of SEQ ID NO: 1879523
uggugacugcuucagagaa

SEQ ID NO: 1913511 - RNA, 19 nt, Artificial Sequence
  Description of Artificial Sequence: Synthetic oligonucleotide
  Antisense strand to SEQ ID NO: 1913510
uucucugaagcagucacca

SEQ ID NO: 1913512 - RNA, 19 nt, Artificial Sequence
  Description of Artificial Sequence: Synthetic oligonucleotide
  Sense strand starting at position 3870 of SEQ ID NO: 1879523
agagaaucucauggcugga

SEQ ID NO: 1913513 - RNA, 19 nt, Artificial Sequence
  Description of Artificial Sequence: Synthetic oligonucleotide
  Antisense strand to SEQ ID NO: 1913512
uccagccaugagauucucu

SEQ ID NO: 1913514 - RNA, 19 nt, Artificial Sequence
  Description of Artificial Sequence: Synthetic oligonucleotide
  Sense strand starting at position 3872 of SEQ ID NO: 1879523
agaaucucauggcuggaaa

SEQ ID NO: 1913515 - RNA, 19 nt, Artificial Sequence
  Description of Artificial Sequence: Synthetic oligonucleotide
  Antisense strand to SEQ ID NO: 1913514
uuuccagccaugagauucu

SEQ ID NO: 1913516 - RNA, 19 nt, Artificial Sequence
  Description of Artificial Sequence: Synthetic oligonucleotide
  Sense strand starting at position 3873 of SEQ ID NO: 1879523
gaaucucauggcuggaaau

SEQ ID NO: 1913517 - RNA, 19 nt, Artificial Sequence
  Description of Artificial Sequence: Synthetic oligonucleotide
  Antisense strand to SEQ ID NO: 1913516
auuuccagccaugagauuc

SEQ ID NO: 1913518 - RNA, 19 nt, Artificial Sequence
  Description of Artificial Sequence: Synthetic oligonucleotide
  Sense strand starting at position 2119 of SEQ ID NO: 1879524
auggcauauucugcauaua

SEQ ID NO: 1913519 - RNA, 19 nt, Artificial Sequence
  Description of Artificial Sequence: Synthetic oligonucleotide
  Antisense strand to SEQ ID NO: 1913518
uauaugcagaauaugccau

SEQ ID NO: 1913520 - RNA, 19 nt, Artificial Sequence
  Description of Artificial Sequence: Synthetic oligonucleotide
  Sense strand starting at position 2120 of SEQ ID NO: 1879524
uggcauauucugcauauag

SEQ ID NO: 1913521 - RNA, 19 nt, Artificial Sequence
  Description of Artificial Sequence: Synthetic oligonucleotide
  Antisense strand to SEQ ID NO: 1913520
cuauaugcagaauaugcca

SEQ ID NO: 1913522 - RNA, 19 nt, Artificial Sequence
  Description of Artificial Sequence: Synthetic oligonucleotide
  Sense strand starting at position 2139 of SEQ ID NO: 1879524
ccugccaauucuuugguaa

SEQ ID NO: 1913523 - RNA, 19 nt, Artificial Sequence
  Description of Artificial Sequence: Synthetic oligonucleotide
  Antisense strand to SEQ ID NO: 1913522
uuaccaaagaauuggcagg

SEQ ID NO: 1913524 - RNA, 19 nt, Artificial Sequence
  Description of Artificial Sequence: Synthetic oligonucleotide
  Sense strand starting at position 2142 of SEQ ID NO: 1879524
gccaauucuuugguaauuc

SEQ ID NO: 1913525 - RNA, 19 nt, Artificial Sequence
  Description of Artificial Sequence: Synthetic oligonucleotide
  Antisense strand to SEQ ID NO: 1913524
gaauuaccaaagaauuggc

SEQ ID NO: 1913526 - RNA, 19 nt, Artificial Sequence
  Description of Artificial Sequence: Synthetic oligonucleotide
  Sense strand starting at position 2172 of SEQ ID NO: 1879524
ccaaauuugggcgggcuua

SEQ ID NO: 1913527 - RNA, 19 nt, Artificial Sequence
  Description of Artificial Sequence: Synthetic oligonucleotide
  Antisense strand to SEQ ID NO: 1913526
uaagcccgcccaaauuugg

SEQ ID NO: 1913528 - RNA, 19 nt, Artificial Sequence
  Description of Artificial Sequence: Synthetic oligonucleotide
  Sense strand starting at position 2184 of SEQ ID NO: 1879524
gggcuuagugacuaaguuu

SEQ ID NO: 1913529 - RNA, 19 nt, Artificial Sequence
  Description of Artificial Sequence: Synthetic oligonucleotide
  Antisense strand to SEQ ID NO: 1913528
aaacuuagucacuaagccc

SEQ ID NO: 1913530 - RNA, 19 nt, Artificial Sequence
  Description of Artificial Sequence: Synthetic oligonucleotide
  Sense strand starting at position 2219 of SEQ ID NO: 1879524
gcagaagugugaccucuga

SEQ ID NO: 1913531 - RNA, 19 nt, Artificial Sequence
  Description of Artificial Sequence: Synthetic oligonucleotide
  Antisense strand to SEQ ID NO: 1913530
ucagaggucacacuucugc

SEQ ID NO: 1913532 - RNA, 19 nt, Artificial Sequence
  Description of Artificial Sequence: Synthetic oligonucleotide
  Sense strand starting at position 2223 of SEQ ID NO: 1879524
aagugugaccucugagacu

SEQ ID NO: 1913533 - RNA, 19 nt, Artificial Sequence
  Description of Artificial Sequence: Synthetic oligonucleotide
  Antisense strand to SEQ ID NO: 1913532
agucucagaggucacacuu

SEQ ID NO: 1913534 - RNA, 19 nt, Artificial Sequence
  Description of Artificial Sequence: Synthetic oligonucleotide
  Sense strand starting at position 2272 of SEQ ID NO: 1879524
ggcuuucucuuucuuagga

SEQ ID NO: 1913535 - RNA, 19 nt, Artificial Sequence
  Description of Artificial Sequence: Synthetic oligonucleotide
  Antisense strand to SEQ ID NO: 1913534
uccuaagaaagagaaagcc

SEQ ID NO: 1913536 - RNA, 19 nt, Artificial Sequence
  Description of Artificial Sequence: Synthetic oligonucleotide
  Sense strand starting at position 2340 of SEQ ID NO: 1879524
agcugcuaugcuggagaga

SEQ ID NO: 1913537 - RNA, 19 nt, Artificial Sequence
  Description of Artificial Sequence: Synthetic oligonucleotide
  Antisense strand to SEQ ID NO: 1913536
ucucuccagcauagcagcu

SEQ ID NO: 1913538 - RNA, 19 nt, Artificial Sequence
  Description of Artificial Sequence: Synthetic oligonucleotide
  Sense strand starting at position 2382 of SEQ ID NO: 1879524
guagaaagaugcccaagaa

SEQ ID NO: 1913539 - RNA, 19 nt, Artificial Sequence
  Description of Artificial Sequence: Synthetic oligonucleotide
  Antisense strand to SEQ ID NO: 1913538
uucuugggcaucuuucuac

SEQ ID NO: 1913540 - RNA, 19 nt, Artificial Sequence
  Description of Artificial Sequence: Synthetic oligonucleotide
  Sense strand starting at position 2444 of SEQ ID NO: 1879524
agggaucggacauguuaga

SEQ ID NO: 1913541 - RNA, 19 nt, Artificial Sequence
  Description of Artificial Sequence: Synthetic oligonucleotide
  Antisense strand to SEQ ID NO: 1913540
ucuaacauguccgaucccu

SEQ ID NO: 1913542 - RNA, 19 nt, Artificial Sequence
  Description of Artificial Sequence: Synthetic oligonucleotide
  Sense strand starting at position 2461 of SEQ ID NO: 1879524
gagaaagagucuuaaagau

SEQ ID NO: 1913543 - RNA, 19 nt, Artificial Sequence
  Description of Artificial Sequence: Synthetic oligonucleotide
  Antisense strand to SEQ ID NO: 1913542
aucuuuaagacucuuucuc

SEQ ID NO: 1913544 - RNA, 19 nt, Artificial Sequence
  Description of Artificial Sequence: Synthetic oligonucleotide
  Sense strand starting at position 2537 of SEQ ID NO: 1879524
gugguaucagcucaaacuu

SEQ ID NO: 1913545 - RNA, 19 nt, Artificial Sequence
  Description of Artificial Sequence: Synthetic oligonucleotide
  Antisense strand to SEQ ID NO: 1913544
aaguuugagcugauaccac

SEQ ID NO: 1913546 - RNA, 19 nt, Artificial Sequence
  Description of Artificial Sequence: Synthetic oligonucleotide
  Sense strand starting at position 2586 of SEQ ID NO: 1879524
ccagauuuaugugauugag

SEQ ID NO: 1913547 - RNA, 19 nt, Artificial Sequence
  Description of Artificial Sequence: Synthetic oligonucleotide
  Antisense strand to SEQ ID NO: 1913546
cucaaucacauaaaucugg

SEQ ID NO: 1913548 - RNA, 19 nt, Artificial Sequence
  Description of Artificial Sequence: Synthetic oligonucleotide
  Sense strand starting at position 2592 of SEQ ID NO: 1879524
uuaugugauugagccuaau

SEQ ID NO: 1913549 - RNA, 19 nt, Artificial Sequence
  Description of Artificial Sequence: Synthetic oligonucleotide
  Antisense strand to SEQ ID NO: 1913548
auuaggcucaaucacauaa

SEQ ID NO: 1913550 - RNA, 19 nt, Artificial Sequence
  Description of Artificial Sequence: Synthetic oligonucleotide
  Sense strand starting at position 2595 of SEQ ID NO: 1879524
ugugauugagccuaauaaa

SEQ ID NO: 1913551 - RNA, 19 nt, Artificial Sequence
  Description of Artificial Sequence: Synthetic oligonucleotide
  Antisense strand to SEQ ID NO: 1913550
uuuauuaggcucaaucaca

SEQ ID NO: 1913552 - RNA, 19 nt, Artificial Sequence
  Description of Artificial Sequence: Synthetic oligonucleotide
  Sense strand starting at position 2606 of SEQ ID NO: 1879524
cuaauaaacuggccugagu

SEQ ID NO: 1913553 - RNA, 19 nt, Artificial Sequence
  Description of Artificial Sequence: Synthetic oligonucleotide
  Antisense strand to SEQ ID NO: 1913552
acucaggccaguuuauuag

SEQ ID NO: 1913554 - RNA, 19 nt, Artificial Sequence
  Description of Artificial Sequence: Synthetic oligonucleotide
  Sense strand starting at position 2625 of SEQ ID NO: 1879524
aagcuucccugguugacaa

SEQ ID NO: 1913555 - RNA, 19 nt, Artificial Sequence
  Description of Artificial Sequence: Synthetic oligonucleotide
  Antisense strand to SEQ ID NO: 1913554
uugucaaccagggaagcuu

SEQ ID NO: 1913556 - RNA, 19 nt, Artificial Sequence
  Description of Artificial Sequence: Synthetic oligonucleotide
  Sense strand starting at position 2638 of SEQ ID NO: 1879524
ugacaauauucugcgagua

SEQ ID NO: 1913557 - RNA, 19 nt, Artificial Sequence
  Description of Artificial Sequence: Synthetic oligonucleotide
  Antisense strand to SEQ ID NO: 1913556
uacucgcagaauauuguca

SEQ ID NO: 1913558 - RNA, 19 nt, Artificial Sequence
  Description of Artificial Sequence: Synthetic oligonucleotide
  Sense strand starting at position 2639 of SEQ ID NO: 1879524
gacaauauucugcgaguau

SEQ ID NO: 1913559 - RNA, 19 nt, Artificial Sequence
  Description of Artificial Sequence: Synthetic oligonucleotide
  Antisense strand to SEQ ID NO: 1913558
auacucgcagaauauuguc

SEQ ID NO: 1913560 - RNA, 19 nt, Artificial Sequence
  Description of Artificial Sequence: Synthetic oligonucleotide
  Sense strand starting at position 2643 of SEQ ID NO: 1879524
auauucugcgaguauuauc

SEQ ID NO: 1913561 - RNA, 19 nt, Artificial Sequence
  Description of Artificial Sequence: Synthetic oligonucleotide
  Antisense strand to SEQ ID NO: 1913560
gauaauacucgcagaauau

SEQ ID NO: 1913562 - RNA, 19 nt, Artificial Sequence
  Description of Artificial Sequence: Synthetic oligonucleotide
  Sense strand starting at position 2648 of SEQ ID NO: 1879524
cugcgaguauuaucacaca

SEQ ID NO: 1913563 - RNA, 19 nt, Artificial Sequence
  Description of Artificial Sequence: Synthetic oligonucleotide
  Antisense strand to SEQ ID NO: 1913562
ugugugauaauacucgcag

SEQ ID NO: 1913564 - RNA, 19 nt, Artificial Sequence
  Description of Artificial Sequence: Synthetic oligonucleotide
  Sense strand starting at position 2728 of SEQ ID NO: 1879524
uuuagagcuuuccugaacu

SEQ ID NO: 1913565 - RNA, 19 nt, Artificial Sequence
  Description of Artificial Sequence: Synthetic oligonucleotide
  Antisense strand to SEQ ID NO: 1913564
aguucaggaaagcucuaaa

SEQ ID NO: 1913566 - RNA, 19 nt, Artificial Sequence
  Description of Artificial Sequence: Synthetic oligonucleotide
  Sense strand starting at position 2796 of SEQ ID NO: 1879524
ugcaauaaaccguaacuuu

SEQ ID NO: 1913567 - RNA, 19 nt, Artificial Sequence
  Description of Artificial Sequence: Synthetic oligonucleotide
  Antisense strand to SEQ ID NO: 1913566
aaaguuacgguuuauugca

SEQ ID NO: 1913568 - RNA, 19 nt, Artificial Sequence
  Description of Artificial Sequence: Synthetic oligonucleotide
  Sense strand starting at position 2807 of SEQ ID NO: 1879524
guaacuuuccaugagcacu

SEQ ID NO: 1913569 - RNA, 19 nt, Artificial Sequence
  Description of Artificial Sequence: Synthetic oligonucleotide
  Antisense strand to SEQ ID NO: 1913568
agugcucauggaaaguuac

SEQ ID NO: 1913570 - RNA, 19 nt, Artificial Sequence
  Description of Artificial Sequence: Synthetic oligonucleotide
  Sense strand starting at position 2985 of SEQ ID NO: 1879524
ccagcauaaccuugauaug

SEQ ID NO: 1913571 - RNA, 19 nt, Artificial Sequence
  Description of Artificial Sequence: Synthetic oligonucleotide
  Antisense strand to SEQ ID NO: 1913570
cauaucaagguuaugcugg

SEQ ID NO: 1913572 - RNA, 19 nt, Artificial Sequence
  Description of Artificial Sequence: Synthetic oligonucleotide
  Sense strand starting at position 3134 of SEQ ID NO: 1879524
cauagcauugcugagcauu

SEQ ID NO: 1913573 - RNA, 19 nt, Artificial Sequence
  Description of Artificial Sequence: Synthetic oligonucleotide
  Antisense strand to SEQ ID NO: 1913572
aaugcucagcaaugcuaug

SEQ ID NO: 1913574 - RNA, 19 nt, Artificial Sequence
  Description of Artificial Sequence: Synthetic oligonucleotide
  Sense strand starting at position 3144 of SEQ ID NO: 1879524
cugagcauucuguaugaau

SEQ ID NO: 1913575 - RNA, 19 nt, Artificial Sequence
  Description of Artificial Sequence: Synthetic oligonucleotide
  Antisense strand to SEQ ID NO: 1913574
auucauacagaaugcucag

SEQ ID NO: 1913576 - RNA, 19 nt, Artificial Sequence
  Description of Artificial Sequence: Synthetic oligonucleotide
  Sense strand starting at position 3146 of SEQ ID NO: 1879524
gagcauucuguaugaauau

SEQ ID NO: 1913577 - RNA, 19 nt, Artificial Sequence
  Description of Artificial Sequence: Synthetic oligonucleotide
  Antisense strand to SEQ ID NO: 1913576
auauucauacagaaugcuc

SEQ ID NO: 1913578 - RNA, 19 nt, Artificial Sequence
  Description of Artificial Sequence: Synthetic oligonucleotide
  Sense strand starting at position 3184 of SEQ ID NO: 1879524
gacugaugauugcuauugu

SEQ ID NO: 1913579 - RNA, 19 nt, Artificial Sequence
  Description of Artificial Sequence: Synthetic oligonucleotide
  Antisense strand to SEQ ID NO: 1913578
acaauagcaaucaucaguc

SEQ ID NO: 1913580 - RNA, 19 nt, Artificial Sequence
  Description of Artificial Sequence: Synthetic oligonucleotide
  Sense strand starting at position 3207 of SEQ ID NO: 1879524
ugaacuguguucccuaaag

SEQ ID NO: 1913581 - RNA, 19 nt, Artificial Sequence
  Description of Artificial Sequence: Synthetic oligonucleotide
  Antisense strand to SEQ ID NO: 1913580
cuuuagggaacacaguuca

SEQ ID NO: 1913582 - RNA, 19 nt, Artificial Sequence
  Description of Artificial Sequence: Synthetic oligonucleotide
  Sense strand starting at position 3209 of SEQ ID NO: 1879524
aacuguguucccuaaagug

SEQ ID NO: 1913583 - RNA, 19 nt, Artificial Sequence
  Description of Artificial Sequence: Synthetic oligonucleotide
  Antisense strand to SEQ ID NO: 1913582
cacuuuagggaacacaguu

SEQ ID NO: 1913584 - RNA, 19 nt, Artificial Sequence
  Description of Artificial Sequence: Synthetic oligonucleotide
  Sense strand starting at position 3439 of SEQ ID NO: 1879524
gaguuauguggccacaaau

SEQ ID NO: 1913585 - RNA, 19 nt, Artificial Sequence
  Description of Artificial Sequence: Synthetic oligonucleotide
  Antisense strand to SEQ ID NO: 1913584
auuuguggccacauaacuc

SEQ ID NO: 1913586 - RNA, 19 nt, Artificial Sequence
  Description of Artificial Sequence: Synthetic oligonucleotide
  Sense strand starting at position 3675 of SEQ ID NO: 1879524
ccugcagagucuuuggaca

SEQ ID NO: 1913587 - RNA, 19 nt, Artificial Sequence
  Description of Artificial Sequence: Synthetic oligonucleotide
  Antisense strand to SEQ ID NO: 1913586
uguccaaagacucugcagg

SEQ ID NO: 1913588 - RNA, 19 nt, Artificial Sequence
  Description of Artificial Sequence: Synthetic oligonucleotide
  Sense strand starting at position 3682 of SEQ ID NO: 1879524
agucuuuggacagagcaca

SEQ ID NO: 1913589 - RNA, 19 nt, Artificial Sequence
  Description of Artificial Sequence: Synthetic oligonucleotide
  Antisense strand to SEQ ID NO: 1913588
ugugcucuguccaaagacu

SEQ ID NO: 1913590 - RNA, 19 nt, Artificial Sequence
  Description of Artificial Sequence: Synthetic oligonucleotide
  Sense strand starting at position 3875 of SEQ ID NO: 1879524
guggcugcucuagaacuaa

SEQ ID NO: 1913591 - RNA, 19 nt, Artificial Sequence
  Description of Artificial Sequence: Synthetic oligonucleotide
  Antisense strand to SEQ ID NO: 1913590
uuaguucuagagcagccac

SEQ ID NO: 1913592 - RNA, 19 nt, Artificial Sequence
  Description of Artificial Sequence: Synthetic oligonucleotide
  Sense strand starting at position 3920 of SEQ ID NO: 1879524
ucacaaauuuguguguuua

SEQ ID NO: 1913593 - RNA, 19 nt, Artificial Sequence
  Description of Artificial Sequence: Synthetic oligonucleotide
  Antisense strand to SEQ ID NO: 1913592
uaaacacacaaauuuguga

SEQ ID NO: 1913594 - RNA, 19 nt, Artificial Sequence
  Description of Artificial Sequence: Synthetic oligonucleotide
  Sense strand starting at position 3963 of SEQ ID NO: 1879524
agccuauuaugugccagaa

SEQ ID NO: 1913595 - RNA, 19 nt, Artificial Sequence
  Description of Artificial Sequence: Synthetic oligonucleotide
  Antisense strand to SEQ ID NO: 1913594
uucuggcacauaauaggcu

SEQ ID NO: 1913596 - RNA, 19 nt, Artificial Sequence
  Description of Artificial Sequence: Synthetic oligonucleotide
  Sense strand starting at position 3975 of SEQ ID NO: 1879524
gccagaacauauucuagau

SEQ ID NO: 1913597 - RNA, 19 nt, Artificial Sequence
  Description of Artificial Sequence: Synthetic oligonucleotide
  Antisense strand to SEQ ID NO: 1913596
aucuagaauauguucuggc

SEQ ID NO: 1913598 - RNA, 19 nt, Artificial Sequence
  Description of Artificial Sequence: Synthetic oligonucleotide
  Sense strand starting at position 84 of SEQ ID NO: 1879525
aggaguuauugaccucuag

SEQ ID NO: 1913599 - RNA, 19 nt, Artificial Sequence
  Description of Artificial Sequence: Synthetic oligonucleotide
  Antisense strand to SEQ ID NO: 1913598
cuagaggucaauaacuccu

SEQ ID NO: 1913600 - RNA, 19 nt, Artificial Sequence
  Description of Artificial Sequence: Synthetic oligonucleotide
  Sense strand starting at position 88 of SEQ ID NO: 1879525
guuauugaccucuaguaga

SEQ ID NO: 1913601 - RNA, 19 nt, Artificial Sequence
  Description of Artificial Sequence: Synthetic oligonucleotide
  Antisense strand to SEQ ID NO: 1913600
ucuacuagaggucaauaac

SEQ ID NO: 1913602 - RNA, 19 nt, Artificial Sequence
  Description of Artificial Sequence: Synthetic oligonucleotide
  Sense strand starting at position 288 of SEQ ID NO: 1879525
aucuaugaugccuguauuu

SEQ ID NO: 1913603 - RNA, 19 nt, Artificial Sequence
  Description of Artificial Sequence: Synthetic oligonucleotide
  Antisense strand to SEQ ID NO: 1913602
aaauacaggcaucauagau

SEQ ID NO: 1913604 - RNA, 19 nt, Artificial Sequence
  Description of Artificial Sequence: Synthetic oligonucleotide
  Sense strand starting at position 299 of SEQ ID NO: 1879525
cuguauuucuagccagcaa

SEQ ID NO: 1913605 - RNA, 19 nt, Artificial Sequence
  Description of Artificial Sequence: Synthetic oligonucleotide
  Antisense strand to SEQ ID NO: 1913604
uugcuggcuagaaauacag

SEQ ID NO: 1913606 - RNA, 19 nt, Artificial Sequence
  Description of Artificial Sequence: Synthetic oligonucleotide
  Sense strand starting at position 440 of SEQ ID NO: 1879525
cauguucugcaaugaggaa

SEQ ID NO: 1913607 - RNA, 19 nt, Artificial Sequence
  Description of Artificial Sequence: Synthetic oligonucleotide
  Antisense strand to SEQ ID NO: 1913606
uuccucauugcagaacaug

SEQ ID NO: 1913608 - RNA, 19 nt, Artificial Sequence
  Description of Artificial Sequence: Synthetic oligonucleotide
  Sense strand starting at position 441 of SEQ ID NO: 1879525
auguucugcaaugaggaau

SEQ ID NO: 1913609 - RNA, 19 nt, Artificial Sequence
  Description of Artificial Sequence: Synthetic oligonucleotide
  Antisense strand to SEQ ID NO: 1913608
auuccucauugcagaacau

SEQ ID NO: 1913610 - RNA, 19 nt, Artificial Sequence
  Description of Artificial Sequence: Synthetic oligonucleotide
  Sense strand starting at position 634 of SEQ ID NO: 1879525
cccgaaauaucauuguaua

SEQ ID NO: 1913611 - RNA, 19 nt, Artificial Sequence
  Description of Artificial Sequence: Synthetic oligonucleotide
  Antisense strand to SEQ ID NO: 1913610
uauacaaugauauuucggg

SEQ ID NO: 1913612 - RNA, 19 nt, Artificial Sequence
  Description of Artificial Sequence: Synthetic oligonucleotide
  Sense strand starting at position 635 of SEQ ID NO: 1879525
ccgaaauaucauuguauaa

SEQ ID NO: 1913613 - RNA, 19 nt, Artificial Sequence
  Description of Artificial Sequence: Synthetic oligonucleotide
  Antisense strand to SEQ ID NO: 1913612
uuauacaaugauauuucgg

SEQ ID NO: 1913614 - RNA, 19 nt, Artificial Sequence
  Description of Artificial Sequence: Synthetic oligonucleotide
  Sense strand starting at position 675 of SEQ ID NO: 1879525
uuugauugccuggacaguu

SEQ ID NO: 1913615 - RNA, 19 nt, Artificial Sequence
  Description of Artificial Sequence: Synthetic oligonucleotide
  Antisense strand to SEQ ID NO: 1913614
aacuguccaggcaaucaaa

SEQ ID NO: 1913616 - RNA, 19 nt, Artificial Sequence
  Description of Artificial Sequence: Synthetic oligonucleotide
  Sense strand starting at position 758 of SEQ ID NO: 1879525
augcuuugucagucuguuu

SEQ ID NO: 1913617 - RNA, 19 nt, Artificial Sequence
  Description of Artificial Sequence: Synthetic oligonucleotide
  Antisense strand to SEQ ID NO: 1913616
aaacagacugacaaagcau

SEQ ID NO: 1913618 - RNA, 19 nt, Artificial Sequence
  Description of Artificial Sequence: Synthetic oligonucleotide
  Sense strand starting at position 930 of SEQ ID NO: 1879525
aggguuucugcauauauaa

SEQ ID NO: 1913619 - RNA, 19 nt, Artificial Sequence
  Description of Artificial Sequence: Synthetic oligonucleotide
  Antisense strand to SEQ ID NO: 1913618
uuauauaugcagaaacccu

SEQ ID NO: 1913620 - RNA, 19 nt, Artificial Sequence
  Description of Artificial Sequence: Synthetic oligonucleotide
  Sense strand starting at position 973 of SEQ ID NO: 1879525
gagaaauuauauguuggcu

SEQ ID NO: 1913621 - RNA, 19 nt, Artificial Sequence
  Description of Artificial Sequence: Synthetic oligonucleotide
  Antisense strand to SEQ ID NO: 1913620
agccaacauauaauuucuc

SEQ ID NO: 1913622 - RNA, 19 nt, Artificial Sequence
  Description of Artificial Sequence: Synthetic oligonucleotide
  Sense strand starting at position 981 of SEQ ID NO: 1879525
auauguuggcuauaaccuu

SEQ ID NO: 1913623 - RNA, 19 nt, Artificial Sequence
  Description of Artificial Sequence: Synthetic oligonucleotide
  Antisense strand to SEQ ID NO: 1913622
aagguuauagccaacauau

SEQ ID NO: 1913624 - RNA, 19 nt, Artificial Sequence
  Description of Artificial Sequence: Synthetic oligonucleotide
  Sense strand starting at position 1017 of SEQ ID NO: 1879525
ucucaagcauuuguguaua

SEQ ID NO: 1913625 - RNA, 19 nt, Artificial Sequence
  Description of Artificial Sequence: Synthetic oligonucleotide
  Antisense strand to SEQ ID NO: 1913624
uauacacaaaugcuugaga

SEQ ID NO: 1913626 - RNA, 19 nt, Artificial Sequence
  Description of Artificial Sequence: Synthetic oligonucleotide
  Sense strand starting at position 1116 of SEQ ID NO: 1879525
uguuauaaguggguaggaa

SEQ ID NO: 1913627 - RNA, 19 nt, Artificial Sequence
  Description of Artificial Sequence: Synthetic oligonucleotide
  Antisense strand to SEQ ID NO: 1913626
uuccuacccacuuauaaca

SEQ ID NO: 1913628 - RNA, 19 nt, Artificial Sequence
  Description of Artificial Sequence: Synthetic oligonucleotide
  Sense strand starting at position 1238 of SEQ ID NO: 1879525
uugggauguggauguggaa

SEQ ID NO: 1913629 - RNA, 19 nt, Artificial Sequence
  Description of Artificial Sequence: Synthetic oligonucleotide
  Antisense strand to SEQ ID NO: 1913628
uuccacauccacaucccaa

SEQ ID NO: 1913630 - RNA, 19 nt, Artificial Sequence
  Description of Artificial Sequence: Synthetic oligonucleotide
  Sense strand starting at position 1567 of SEQ ID NO: 1879525
cuuccuuguccugaggaua

SEQ ID NO: 1913631 - RNA, 19 nt, Artificial Sequence
  Description of Artificial Sequence: Synthetic oligonucleotide
  Antisense strand to SEQ ID NO: 1913630
uauccucaggacaaggaag

SEQ ID NO: 1913632 - RNA, 19 nt, Artificial Sequence
  Description of Artificial Sequence: Synthetic oligonucleotide
  Sense strand starting at position 1728 of SEQ ID NO: 1879525
cgugauucccuggacaaac

SEQ ID NO: 1913633 - RNA, 19 nt, Artificial Sequence
  Description of Artificial Sequence: Synthetic oligonucleotide
  Antisense strand to SEQ ID NO: 1913632
guuuguccagggaaucacg

SEQ ID NO: 1913634 - RNA, 19 nt, Artificial Sequence
  Description of Artificial Sequence: Synthetic oligonucleotide
  Sense strand starting at position 1751 of SEQ ID NO: 1879525
gcagaacaacuguaaguuu

SEQ ID NO: 1913635 - RNA, 19 nt, Artificial Sequence
  Description of Artificial Sequence: Synthetic oligonucleotide
  Antisense strand to SEQ ID NO: 1913634
aaacuuacaguuguucugc

SEQ ID NO: 1913636 - RNA, 19 nt, Artificial Sequence
  Description of Artificial Sequence: Synthetic oligonucleotide
  Sense strand starting at position 2150 of SEQ ID NO: 1879525
cuaacaagucaugaguagu

SEQ ID NO: 1913637 - RNA, 19 nt, Artificial Sequence
  Description of Artificial Sequence: Synthetic oligonucleotide
  Antisense strand to SEQ ID NO: 1913636
acuacucaugacuuguuag

SEQ ID NO: 1913638 - RNA, 19 nt, Artificial Sequence
  Description of Artificial Sequence: Synthetic oligonucleotide
  Sense strand starting at position 2153 of SEQ ID NO: 1879525
acaagucaugaguaguaca

SEQ ID NO: 1913639 - RNA, 19 nt, Artificial Sequence
  Description of Artificial Sequence: Synthetic oligonucleotide
  Antisense strand to SEQ ID NO: 1913638
uguacuacucaugacuugu

SEQ ID NO: 1913640 - RNA, 19 nt, Artificial Sequence
  Description of Artificial Sequence: Synthetic oligonucleotide
  Sense strand starting at position 2289 of SEQ ID NO: 1879525
gacaaaggugcugaucagu

SEQ ID NO: 1913641 - RNA, 19 nt, Artificial Sequence
  Description of Artificial Sequence: Synthetic oligonucleotide
  Antisense strand to SEQ ID NO: 1913640
acugaucagcaccuuuguc

SEQ ID NO: 1913642 - RNA, 19 nt, Artificial Sequence
  Description of Artificial Sequence: Synthetic oligonucleotide
  Sense strand starting at position 2470 of SEQ ID NO: 1879525
uucucuguuccauauagga

SEQ ID NO: 1913643 - RNA, 19 nt, Artificial Sequence
  Description of Artificial Sequence: Synthetic oligonucleotide
  Antisense strand to SEQ ID NO: 1913642
uccuauauggaacagagaa

SEQ ID NO: 1913644 - RNA, 19 nt, Artificial Sequence
  Description of Artificial Sequence: Synthetic oligonucleotide
  Sense strand starting at position 2577 of SEQ ID NO: 1879525
auaagaaaugccuaguguu

SEQ ID NO: 1913645 - RNA, 19 nt, Artificial Sequence
  Description of Artificial Sequence: Synthetic oligonucleotide
  Antisense strand to SEQ ID NO: 1913644
aacacuaggcauuucuuau

SEQ ID NO: 1913646 - RNA, 19 nt, Artificial Sequence
  Description of Artificial Sequence: Synthetic oligonucleotide
  Sense strand starting at position 2709 of SEQ ID NO: 1879525
cuucuaugauagguuauaa

SEQ ID NO: 1913647 - RNA, 19 nt, Artificial Sequence
  Description of Artificial Sequence: Synthetic oligonucleotide
  Antisense strand to SEQ ID NO: 1913646
uuauaaccuaucauagaag

SEQ ID NO: 1913648 - RNA, 19 nt, Artificial Sequence
  Description of Artificial Sequence: Synthetic oligonucleotide
  Sense strand starting at position 2954 of SEQ ID NO: 1879525
uaugauuaaugggcacaga

SEQ ID NO: 1913649 - RNA, 19 nt, Artificial Sequence
  Description of Artificial Sequence: Synthetic oligonucleotide
  Antisense strand to SEQ ID NO: 1913648
ucugugcccauuaaucaua

SEQ ID NO: 1913650 - RNA, 19 nt, Artificial Sequence
  Description of Artificial Sequence: Synthetic oligonucleotide
  Sense strand starting at position 2992 of SEQ ID NO: 1879525
uguugaauuguauaugaac

SEQ ID NO: 1913651 - RNA, 19 nt, Artificial Sequence
  Description of Artificial Sequence: Synthetic oligonucleotide
  Antisense strand to SEQ ID NO: 1913650
guucauauacaauucaaca

SEQ ID NO: 1913652 - RNA, 19 nt, Artificial Sequence
  Description of Artificial Sequence: Synthetic oligonucleotide
  Sense strand starting at position 3032 of SEQ ID NO: 1879525
gugucauaagcuucugcuu

SEQ ID NO: 1913653 - RNA, 19 nt, Artificial Sequence
  Description of Artificial Sequence: Synthetic oligonucleotide
  Antisense strand to SEQ ID NO: 1913652
aagcagaagcuuaugacac

SEQ ID NO: 1913654 - RNA, 19 nt, Artificial Sequence
  Description of Artificial Sequence: Synthetic oligonucleotide
  Sense strand starting at position 3047 of SEQ ID NO: 1879525
gcuuaccugcaauagaauu

SEQ ID NO: 1913655 - RNA, 19 nt, Artificial Sequence
  Description of Artificial Sequence: Synthetic oligonucleotide
  Antisense strand to SEQ ID NO: 1913654
aauucuauugcagguaagc

SEQ ID NO: 1913656 - RNA, 19 nt, Artificial Sequence
  Description of Artificial Sequence: Synthetic oligonucleotide
  Sense strand starting at position 3107 of SEQ ID NO: 1879525
uggaacuuucucuagcuua

SEQ ID NO: 1913657 - RNA, 19 nt, Artificial Sequence
  Description of Artificial Sequence: Synthetic oligonucleotide
  Antisense strand to SEQ ID NO: 1913656
uaagcuagagaaaguucca

SEQ ID NO: 1913658 - RNA, 19 nt, Artificial Sequence
  Description of Artificial Sequence: Synthetic oligonucleotide
  Sense strand starting at position 3185 of SEQ ID NO: 1879525
auguaagauguuuggugaa

SEQ ID NO: 1913659 - RNA, 19 nt, Artificial Sequence
  Description of Artificial Sequence: Synthetic oligonucleotide
  Antisense strand to SEQ ID NO: 1913658
uucaccaaacaucuuacau

SEQ ID NO: 1913660 - RNA, 19 nt, Artificial Sequence
  Description of Artificial Sequence: Synthetic oligonucleotide
  Sense strand starting at position 3187 of SEQ ID NO: 1879525
guaagauguuuggugaaua

SEQ ID NO: 1913661 - RNA, 19 nt, Artificial Sequence
  Description of Artificial Sequence: Synthetic oligonucleotide
  Antisense strand to SEQ ID NO: 1913660
uauucaccaaacaucuuac

SEQ ID NO: 1913662 - RNA, 19 nt, Artificial Sequence
  Description of Artificial Sequence: Synthetic oligonucleotide
  Sense strand starting at position 3200 of SEQ ID NO: 1879525
ugaauaguuauguagugaa

SEQ ID NO: 1913663 - RNA, 19 nt, Artificial Sequence
  Description of Artificial Sequence: Synthetic oligonucleotide
  Antisense strand to SEQ ID NO: 1913662
uucacuacauaacuauuca

SEQ ID NO: 1913664 - RNA, 19 nt, Artificial Sequence
  Description of Artificial Sequence: Synthetic oligonucleotide
  Sense strand starting at position 3204 of SEQ ID NO: 1879525
uaguuauguagugaaugag

SEQ ID NO: 1913665 - RNA, 19 nt, Artificial Sequence
  Description of Artificial Sequence: Synthetic oligonucleotide
  Antisense strand to SEQ ID NO: 1913664
cucauucacuacauaacua

SEQ ID NO: 1913666 - RNA, 19 nt, Artificial Sequence
  Description of Artificial Sequence: Synthetic oligonucleotide
  Sense strand starting at position 3208 of SEQ ID NO: 1879525
uauguagugaaugagugaa

SEQ ID NO: 1913667 - RNA, 19 nt, Artificial Sequence
  Description of Artificial Sequence: Synthetic oligonucleotide
  Antisense strand to SEQ ID NO: 1913666
uucacucauucacuacaua

SEQ ID NO: 1913668 - RNA, 19 nt, Artificial Sequence
  Description of Artificial Sequence: Synthetic oligonucleotide
  Sense strand starting at position 3525 of SEQ ID NO: 1879525
agggcuacaugucuauaua

SEQ ID NO: 1913669 - RNA, 19 nt, Artificial Sequence
  Description of Artificial Sequence: Synthetic oligonucleotide
  Antisense strand to SEQ ID NO: 1913668
uauauagacauguagcccu

SEQ ID NO: 1913670 - RNA, 19 nt, Artificial Sequence
  Description of Artificial Sequence: Synthetic oligonucleotide
  Sense strand starting at position 3526 of SEQ ID NO: 1879525
gggcuacaugucuauauau

SEQ ID NO: 1913671 - RNA, 19 nt, Artificial Sequence
  Description of Artificial Sequence: Synthetic oligonucleotide
  Antisense strand to SEQ ID NO: 1913670
auauauagacauguagccc

SEQ ID NO: 1913672 - RNA, 19 nt, Artificial Sequence
  Description of Artificial Sequence: Synthetic oligonucleotide
  Sense strand starting at position 3601 of SEQ ID NO: 1879525
guuaaagagaguuaagcua

SEQ ID NO: 1913673 - RNA, 19 nt, Artificial Sequence
  Description of Artificial Sequence: Synthetic oligonucleotide
  Antisense strand to SEQ ID NO: 1913672
uagcuuaacucucuuuaac

SEQ ID NO: 1913674 - RNA, 19 nt, Artificial Sequence
  Description of Artificial Sequence: Synthetic oligonucleotide
  Sense strand starting at position 3698 of SEQ ID NO: 1879525
agagccucacaguaauauu

SEQ ID NO: 1913675 - RNA, 19 nt, Artificial Sequence
  Description of Artificial Sequence: Synthetic oligonucleotide
  Antisense strand to SEQ ID NO: 1913674
aauauuacugugaggcucu

SEQ ID NO: 1913676 - RNA, 19 nt, Artificial Sequence
  Description of Artificial Sequence: Synthetic oligonucleotide
  Sense strand starting at position 3905 of SEQ ID NO: 1879525
uuugccuguguguuuauau

SEQ ID NO: 1913677 - RNA, 19 nt, Artificial Sequence
  Description of Artificial Sequence: Synthetic oligonucleotide
  Antisense strand to SEQ ID NO: 1913676
auauaaacacacaggcaaa

SEQ ID NO: 1913678 - RNA, 19 nt, Artificial Sequence
  Description of Artificial Sequence: Synthetic oligonucleotide
  Sense strand starting at position 101 of SEQ ID NO: 1879526
agugguucugcuguuguua

SEQ ID NO: 1913679 - RNA, 19 nt, Artificial Sequence
  Description of Artificial Sequence: Synthetic oligonucleotide
  Antisense strand to SEQ ID NO: 1913678
uaacaacagcagaaccacu

SEQ ID NO: 1913680 - RNA, 19 nt, Artificial Sequence
  Description of Artificial Sequence: Synthetic oligonucleotide
  Sense strand starting at position 102 of SEQ ID NO: 1879526
gugguucugcuguuguuaa

SEQ ID NO: 1913681 - RNA, 19 nt, Artificial Sequence
  Description of Artificial Sequence: Synthetic oligonucleotide
  Antisense strand to SEQ ID NO: 1913680
uuaacaacagcagaaccac

SEQ ID NO: 1913682 - RNA, 19 nt, Artificial Sequence
  Description of Artificial Sequence: Synthetic oligonucleotide
  Sense strand starting at position 110 of SEQ ID NO: 1879526
gcuguuguuaaggaauaaa

SEQ ID NO: 1913683 - RNA, 19 nt, Artificial Sequence
  Description of Artificial Sequence: Synthetic oligonucleotide
  Antisense strand to SEQ ID NO: 1913682
uuuauuccuuaacaacagc

SEQ ID NO: 1913684 - RNA, 19 nt, Artificial Sequence
  Description of Artificial Sequence: Synthetic oligonucleotide
  Sense strand starting at position 1015 of SEQ ID NO: 1879526
ucaaaucuugcccaggaca

SEQ ID NO: 1913685 - RNA, 19 nt, Artificial Sequence
  Description of Artificial Sequence: Synthetic oligonucleotide
  Antisense strand to SEQ ID NO: 1913684
uguccugggcaagauuuga

SEQ ID NO: 1913686 - RNA, 19 nt, Artificial Sequence
  Description of Artificial Sequence: Synthetic oligonucleotide
  Sense strand starting at position 1094 of SEQ ID NO: 1879526
cuaauuguggcucagugaa

SEQ ID NO: 1913687 - RNA, 19 nt, Artificial Sequence
  Description of Artificial Sequence: Synthetic oligonucleotide
  Antisense strand to SEQ ID NO: 1913686
uucacugagccacaauuag

SEQ ID NO: 1913688 - RNA, 19 nt, Artificial Sequence
  Description of Artificial Sequence: Synthetic oligonucleotide
  Sense strand starting at position 1174 of SEQ ID NO: 1879526
aaucucuuccggugagauu

SEQ ID NO: 1913689 - RNA, 19 nt, Artificial Sequence
  Description of Artificial Sequence: Synthetic oligonucleotide
  Antisense strand to SEQ ID NO: 1913688
aaucucaccggaagagauu

SEQ ID NO: 1913690 - RNA, 19 nt, Artificial Sequence
  Description of Artificial Sequence: Synthetic oligonucleotide
  Sense strand starting at position 1263 of SEQ ID NO: 1879526
cccugucagcaucaugaau

SEQ ID NO: 1913691 - RNA, 19 nt, Artificial Sequence
  Description of Artificial Sequence: Synthetic oligonucleotide
  Antisense strand to SEQ ID NO: 1913690
auucaugaugcugacaggg

SEQ ID NO: 1913692 - RNA, 19 nt, Artificial Sequence
  Description of Artificial Sequence: Synthetic oligonucleotide
  Sense strand starting at position 1442 of SEQ ID NO: 1879526
guggaugaaucacaaauuu

SEQ ID NO: 1913693 - RNA, 19 nt, Artificial Sequence
  Description of Artificial Sequence: Synthetic oligonucleotide
  Antisense strand to SEQ ID NO: 1913692
aaauuugugauucauccac

SEQ ID NO: 1913694 - RNA, 19 nt, Artificial Sequence
  Description of Artificial Sequence: Synthetic oligonucleotide
  Sense strand starting at position 1637 of SEQ ID NO: 1879526
cgaaguguacacggagaca

SEQ ID NO: 1913695 - RNA, 19 nt, Artificial Sequence
  Description of Artificial Sequence: Synthetic oligonucleotide
  Antisense strand to SEQ ID NO: 1913694
ugucuccguguacacuucg

SEQ ID NO: 1913696 - RNA, 19 nt, Artificial Sequence
  Description of Artificial Sequence: Synthetic oligonucleotide
  Sense strand starting at position 2200 of SEQ ID NO: 1879526
aggguaguucccugaggga

SEQ ID NO: 1913697 - RNA, 19 nt, Artificial Sequence
  Description of Artificial Sequence: Synthetic oligonucleotide
  Antisense strand to SEQ ID NO: 1913696
ucccucagggaacuacccu

SEQ ID NO: 1913698 - RNA, 19 nt, Artificial Sequence
  Description of Artificial Sequence: Synthetic oligonucleotide
  Sense strand starting at position 2213 of SEQ ID NO: 1879526
gagggagggucugucgauu

SEQ ID NO: 1913699 - RNA, 19 nt, Artificial Sequence
  Description of Artificial Sequence: Synthetic oligonucleotide
  Antisense strand to SEQ ID NO: 1913698
aaucgacagacccucccuc

SEQ ID NO: 1913700 - RNA, 19 nt, Artificial Sequence
  Description of Artificial Sequence: Synthetic oligonucleotide
  Sense strand starting at position 2224 of SEQ ID NO: 1879526
ugucgauuuggugggaagu

SEQ ID NO: 1913701 - RNA, 19 nt, Artificial Sequence
  Description of Artificial Sequence: Synthetic oligonucleotide
  Antisense strand to SEQ ID NO: 1913700
acuucccaccaaaucgaca

SEQ ID NO: 1913702 - RNA, 19 nt, Artificial Sequence
  Description of Artificial Sequence: Synthetic oligonucleotide
  Sense strand starting at position 2225 of SEQ ID NO: 1879526
gucgauuuggugggaagug

SEQ ID NO: 1913703 - RNA, 19 nt, Artificial Sequence
  Description of Artificial Sequence: Synthetic oligonucleotide
  Antisense strand to SEQ ID NO: 1913702
cacuucccaccaaaucgac

SEQ ID NO: 1913704 - RNA, 19 nt, Artificial Sequence
  Description of Artificial Sequence: Synthetic oligonucleotide
  Sense strand starting at position 2296 of SEQ ID NO: 1879526
auugccugagaucauuaau

SEQ ID NO: 1913705 - RNA, 19 nt, Artificial Sequence
  Description of Artificial Sequence: Synthetic oligonucleotide
  Antisense strand to SEQ ID NO: 1913704
auuaaugaucucaggcaau

SEQ ID NO: 1913706 - RNA, 19 nt, Artificial Sequence
  Description of Artificial Sequence: Synthetic oligonucleotide
  Sense strand starting at position 2678 of SEQ ID NO: 1879526
aagguuuggcucuggauag

SEQ ID NO: 1913707 - RNA, 19 nt, Artificial Sequence
  Description of Artificial Sequence: Synthetic oligonucleotide
  Antisense strand to SEQ ID NO: 1913706
cuauccagagccaaaccuu

SEQ ID NO: 1913708 - RNA, 19 nt, Artificial Sequence
  Description of Artificial Sequence: Synthetic oligonucleotide
  Sense strand starting at position 2731 of SEQ ID NO: 1879526
uacugccugguuuaaagaa

SEQ ID NO: 1913709 - RNA, 19 nt, Artificial Sequence
  Description of Artificial Sequence: Synthetic oligonucleotide
  Antisense strand to SEQ ID NO: 1913708
uucuuuaaaccaggcagua

SEQ ID NO: 1913710 - RNA, 19 nt, Artificial Sequence
  Description of Artificial Sequence: Synthetic oligonucleotide
  Sense strand starting at position 2777 of SEQ ID NO: 1879526
aaauaaguuucuguugaag

SEQ ID NO: 1913711 - RNA, 19 nt, Artificial Sequence
  Description of Artificial Sequence: Synthetic oligonucleotide
  Antisense strand to SEQ ID NO: 1913710
cuucaacagaaacuuauuu

SEQ ID NO: 1913712 - RNA, 19 nt, Artificial Sequence
  Description of Artificial Sequence: Synthetic oligonucleotide
  Sense strand starting at position 2780 of SEQ ID NO: 1879526
uaaguuucuguugaagaca

SEQ ID NO: 1913713 - RNA, 19 nt, Artificial Sequence
  Description of Artificial Sequence: Synthetic oligonucleotide
  Antisense strand to SEQ ID NO: 1913712
ugucuucaacagaaacuua

SEQ ID NO: 1913714 - RNA, 19 nt, Artificial Sequence
  Description of Artificial Sequence: Synthetic oligonucleotide
  Sense strand starting at position 2783 of SEQ ID NO: 1879526
guuucuguugaagacauga

SEQ ID NO: 1913715 - RNA, 19 nt, Artificial Sequence
  Description of Artificial Sequence: Synthetic oligonucleotide
  Antisense strand to SEQ ID NO: 1913714
ucaugucuucaacagaaac

SEQ ID NO: 1913716 - RNA, 19 nt, Artificial Sequence
  Description of Artificial Sequence: Synthetic oligonucleotide
  Sense strand starting at position 2806 of SEQ ID NO: 1879526
uuugaaguuguuugcauuu

SEQ ID NO: 1913717 - RNA, 19 nt, Artificial Sequence
  Description of Artificial Sequence: Synthetic oligonucleotide
  Antisense strand to SEQ ID NO: 1913716
aaaugcaaacaacuucaaa

SEQ ID NO: 1913718 - RNA, 19 nt, Artificial Sequence
  Description of Artificial Sequence: Synthetic oligonucleotide
  Sense strand starting at position 2838 of SEQ ID NO: 1879526
agccucaagccauagaaau

SEQ ID NO: 1913719 - RNA, 19 nt, Artificial Sequence
  Description of Artificial Sequence: Synthetic oligonucleotide
  Antisense strand to SEQ ID NO: 1913718
auuucuauggcuugaggcu

SEQ ID NO: 1913720 - RNA, 19 nt, Artificial Sequence
  Description of Artificial Sequence: Synthetic oligonucleotide
  Sense strand starting at position 2856 of SEQ ID NO: 1879526
uggagcuccagugguagaa

SEQ ID NO: 1913721 - RNA, 19 nt, Artificial Sequence
  Description of Artificial Sequence: Synthetic oligonucleotide
  Antisense strand to SEQ ID NO: 1913720
uucuaccacuggagcucca

SEQ ID NO: 1913722 - RNA, 19 nt, Artificial Sequence
  Description of Artificial Sequence: Synthetic oligonucleotide
  Sense strand starting at position 2929 of SEQ ID NO: 1879526
gaugacugucuuggaaagu

SEQ ID NO: 1913723 - RNA, 19 nt, Artificial Sequence
  Description of Artificial Sequence: Synthetic oligonucleotide
  Antisense strand to SEQ ID NO: 1913722
acuuuccaagacagucauc

SEQ ID NO: 1913724 - RNA, 19 nt, Artificial Sequence
  Description of Artificial Sequence: Synthetic oligonucleotide
  Sense strand starting at position 2935 of SEQ ID NO: 1879526
ugucuuggaaaguggaauu

SEQ ID NO: 1913725 - RNA, 19 nt, Artificial Sequence
  Description of Artificial Sequence: Synthetic oligonucleotide
  Antisense strand to SEQ ID NO: 1913724
aauuccacuuuccaagaca

SEQ ID NO: 1913726 - RNA, 19 nt, Artificial Sequence
  Description of Artificial Sequence: Synthetic oligonucleotide
  Sense strand starting at position 3034 of SEQ ID NO: 1879526
ggaggaaacuucucuaguc

SEQ ID NO: 1913727 - RNA, 19 nt, Artificial Sequence
  Description of Artificial Sequence: Synthetic oligonucleotide
  Antisense strand to SEQ ID NO: 1913726
gacuagagaaguuuccucc

SEQ ID NO: 1913728 - RNA, 19 nt, Artificial Sequence
  Description of Artificial Sequence: Synthetic oligonucleotide
  Sense strand starting at position 3035 of SEQ ID NO: 1879526
gaggaaacuucucuagucu

SEQ ID NO: 1913729 - RNA, 19 nt, Artificial Sequence
  Description of Artificial Sequence: Synthetic oligonucleotide
  Antisense strand to SEQ ID NO: 1913728
agacuagagaaguuuccuc

SEQ ID NO: 1913730 - RNA, 19 nt, Artificial Sequence
  Description of Artificial Sequence: Synthetic oligonucleotide
  Sense strand starting at position 3036 of SEQ ID NO: 1879526
aggaaacuucucuagucuu

SEQ ID NO: 1913731 - RNA, 19 nt, Artificial Sequence
  Description of Artificial Sequence: Synthetic oligonucleotide
  Antisense strand to SEQ ID NO: 1913730
aagacuagagaaguuuccu

SEQ ID NO: 1913732 - RNA, 19 nt, Artificial Sequence
  Description of Artificial Sequence: Synthetic oligonucleotide
  Sense strand starting at position 3069 of SEQ ID NO: 1879526
ccugguucugguugacaga

SEQ ID NO: 1913733 - RNA, 19 nt, Artificial Sequence
  Description of Artificial Sequence: Synthetic oligonucleotide
  Antisense strand to SEQ ID NO: 1913732
ucugucaaccagaaccagg

SEQ ID NO: 1913734 - RNA, 19 nt, Artificial Sequence
  Description of Artificial Sequence: Synthetic oligonucleotide
  Sense strand starting at position 3082 of SEQ ID NO: 1879526
gacagaauguuccuccuga

SEQ ID NO: 1913735 - RNA, 19 nt, Artificial Sequence
  Description of Artificial Sequence: Synthetic oligonucleotide
  Antisense strand to SEQ ID NO: 1913734
ucaggaggaacauucuguc

SEQ ID NO: 1913736 - RNA, 19 nt, Artificial Sequence
  Description of Artificial Sequence: Synthetic oligonucleotide
  Sense strand starting at position 3083 of SEQ ID NO: 1879526
acagaauguuccuccugau

SEQ ID NO: 1913737 - RNA, 19 nt, Artificial Sequence
  Description of Artificial Sequence: Synthetic oligonucleotide
  Antisense strand to SEQ ID NO: 1913736
aucaggaggaacauucugu

SEQ ID NO: 1913738 - RNA, 19 nt, Artificial Sequence
  Description of Artificial Sequence: Synthetic oligonucleotide
  Sense strand starting at position 3301 of SEQ ID NO: 1879526
gaggcacauccugaccauu

SEQ ID NO: 1913739 - RNA, 19 nt, Artificial Sequence
  Description of Artificial Sequence: Synthetic oligonucleotide
  Antisense strand to SEQ ID NO: 1913738
aauggucaggaugugccuc

SEQ ID NO: 1913740 - RNA, 19 nt, Artificial Sequence
  Description of Artificial Sequence: Synthetic oligonucleotide
  Sense strand starting at position 3680 of SEQ ID NO: 1879526
gccuauuucugucuuggca

SEQ ID NO: 1913741 - RNA, 19 nt, Artificial Sequence
  Description of Artificial Sequence: Synthetic oligonucleotide
  Antisense strand to SEQ ID NO: 1913740
ugccaagacagaaauaggc

SEQ ID NO: 1913742 - RNA, 19 nt, Artificial Sequence
  Description of Artificial Sequence: Synthetic oligonucleotide
  Sense strand starting at position 3710 of SEQ ID NO: 1879526
gucugucuccuccacuaaa

SEQ ID NO: 1913743 - RNA, 19 nt, Artificial Sequence
  Description of Artificial Sequence: Synthetic oligonucleotide
  Antisense strand to SEQ ID NO: 1913742
uuuaguggaggagacagac

SEQ ID NO: 1913744 - RNA, 19 nt, Artificial Sequence
  Description of Artificial Sequence: Synthetic oligonucleotide
  Sense strand starting at position 3720 of SEQ ID NO: 1879526
uccacuaaacugugagcau

SEQ ID NO: 1913745 - RNA, 19 nt, Artificial Sequence
  Description of Artificial Sequence: Synthetic oligonucleotide
  Antisense strand to SEQ ID NO: 1913744
augcucacaguuuagugga

SEQ ID NO: 1913746 - RNA, 19 nt, Artificial Sequence
  Description of Artificial Sequence: Synthetic oligonucleotide
  Sense strand starting at position 3732 of SEQ ID NO: 1879526
ugagcauaccuaggucaga

SEQ ID NO: 1913747 - RNA, 19 nt, Artificial Sequence
  Description of Artificial Sequence: Synthetic oligonucleotide
  Antisense strand to SEQ ID NO: 1913746
ucugaccuagguaugcuca

SEQ ID NO: 1913748 - RNA, 19 nt, Artificial Sequence
  Description of Artificial Sequence: Synthetic oligonucleotide
  Sense strand starting at position 3733 of SEQ ID NO: 1879526
gagcauaccuaggucagaa

SEQ ID NO: 1913749 - RNA, 19 nt, Artificial Sequence
  Description of Artificial Sequence: Synthetic oligonucleotide
  Antisense strand to SEQ ID NO: 1913748
uucugaccuagguaugcuc

SEQ ID NO: 1913750 - RNA, 19 nt, Artificial Sequence
  Description of Artificial Sequence: Synthetic oligonucleotide
  Sense strand starting at position 3765 of SEQ ID NO: 1879526
uucugucuccagcaucaga

SEQ ID NO: 1913751 - RNA, 19 nt, Artificial Sequence
  Description of Artificial Sequence: Synthetic oligonucleotide
  Antisense strand to SEQ ID NO: 1913750
ucugaugcuggagacagaa

SEQ ID NO: 1913752 - RNA, 19 nt, Artificial Sequence
  Description of Artificial Sequence: Synthetic oligonucleotide
  Sense strand starting at position 3816 of SEQ ID NO: 1879526
ggguuaaaugaaggaucga

SEQ ID NO: 1913753 - RNA, 19 nt, Artificial Sequence
  Description of Artificial Sequence: Synthetic oligonucleotide
  Antisense strand to SEQ ID NO: 1913752
ucgauccuucauuuaaccc

SEQ ID NO: 1913754 - RNA, 19 nt, Artificial Sequence
  Description of Artificial Sequence: Synthetic oligonucleotide
  Sense strand starting at position 3921 of SEQ ID NO: 1879526
ccugcauuugucugcuaug

SEQ ID NO: 1913755 - RNA, 19 nt, Artificial Sequence
  Description of Artificial Sequence: Synthetic oligonucleotide
  Antisense strand to SEQ ID NO: 1913754
cauagcagacaaaugcagg

SEQ ID NO: 1913756 - RNA, 19 nt, Artificial Sequence
  Description of Artificial Sequence: Synthetic oligonucleotide
  Sense strand starting at position 3966 of SEQ ID NO: 1879526
gugaucauuaggugcauuu

SEQ ID NO: 1913757 - RNA, 19 nt, Artificial Sequence
  Description of Artificial Sequence: Synthetic oligonucleotide
  Antisense strand to SEQ ID NO: 1913756
aaaugcaccuaaugaucac

SEQ ID NO: 1913758 - RNA, 19 nt, Artificial Sequence
  Description of Artificial Sequence: Synthetic oligonucleotide
  Sense strand starting at position 87 of SEQ ID NO: 1879527
agucuauugcaugaauuau

SEQ ID NO: 1913759 - RNA, 19 nt, Artificial Sequence
  Description of Artificial Sequence: Synthetic oligonucleotide
  Antisense strand to SEQ ID NO: 1913758
auaauucaugcaauagacu

SEQ ID NO: 1913760 - RNA, 19 nt, Artificial Sequence
  Description of Artificial Sequence: Synthetic oligonucleotide
  Sense strand starting at position 109 of SEQ ID NO: 1879527
gugaaugaauuguccaacu

SEQ ID NO: 1913761 - RNA, 19 nt, Artificial Sequence
  Description of Artificial Sequence: Synthetic oligonucleotide
  Antisense strand to SEQ ID NO: 1913760
aguuggacaauucauucac

SEQ ID NO: 1913762 - RNA, 19 nt, Artificial Sequence
  Description of Artificial Sequence: Synthetic oligonucleotide
  Sense strand starting at position 122 of SEQ ID NO: 1879527
ccaacuugugaagguagua

SEQ ID NO: 1913763 - RNA, 19 nt, Artificial Sequence
  Description of Artificial Sequence: Synthetic oligonucleotide
  Antisense strand to SEQ ID NO: 1913762
uacuaccuucacaaguugg

SEQ ID NO: 1913764 - RNA, 19 nt, Artificial Sequence
  Description of Artificial Sequence: Synthetic oligonucleotide
  Sense strand starting at position 142 of SEQ ID NO: 1879527
auuguauguguccacauau

SEQ ID NO: 1913765 - RNA, 19 nt, Artificial Sequence
  Description of Artificial Sequence: Synthetic oligonucleotide
  Antisense strand to SEQ ID NO: 1913764
auauguggacacauacaau

SEQ ID NO: 1913766 - RNA, 19 nt, Artificial Sequence
  Description of Artificial Sequence: Synthetic oligonucleotide
  Sense strand starting at position 174 of SEQ ID NO: 1879527
uguauuuccuucccgguga

SEQ ID NO: 1913767 - RNA, 19 nt, Artificial Sequence
  Description of Artificial Sequence: Synthetic oligonucleotide
  Antisense strand to SEQ ID NO: 1913766
ucaccgggaaggaaauaca

SEQ ID NO: 1913768 - RNA, 19 nt, Artificial Sequence
  Description of Artificial Sequence: Synthetic oligonucleotide
  Sense strand starting at position 345 of SEQ ID NO: 1879527
gauauagaaugucuuugca

SEQ ID NO: 1913769 - RNA, 19 nt, Artificial Sequence
  Description of Artificial Sequence: Synthetic oligonucleotide
  Antisense strand to SEQ ID NO: 1913768
ugcaaagacauucuauauc

SEQ ID NO: 1913770 - RNA, 19 nt, Artificial Sequence
  Description of Artificial Sequence: Synthetic oligonucleotide
  Sense strand starting at position 464 of SEQ ID NO: 1879527
accaucaugucaguugaga

SEQ ID NO: 1913771 - RNA, 19 nt, Artificial Sequence
  Description of Artificial Sequence: Synthetic oligonucleotide
  Antisense strand to SEQ ID NO: 1913770
ucucaacugacaugauggu

SEQ ID NO: 1913772 - RNA, 19 nt, Artificial Sequence
  Description of Artificial Sequence: Synthetic oligonucleotide
  Sense strand starting at position 492 of SEQ ID NO: 1879527
ucauuuguauugguaggca

SEQ ID NO: 1913773 - RNA, 19 nt, Artificial Sequence
  Description of Artificial Sequence: Synthetic oligonucleotide
  Antisense strand to SEQ ID NO: 1913772
ugccuaccaauacaaauga

SEQ ID NO: 1913774 - RNA, 19 nt, Artificial Sequence
  Description of Artificial Sequence: Synthetic oligonucleotide
  Sense strand starting at position 612 of SEQ ID NO: 1879527
uauguaggguuucuuugaa

SEQ ID NO: 1913775 - RNA, 19 nt, Artificial Sequence
  Description of Artificial Sequence: Synthetic oligonucleotide
  Antisense strand to SEQ ID NO: 1913774
uucaaagaaacccuacaua

SEQ ID NO: 1913776 - RNA, 19 nt, Artificial Sequence
  Description of Artificial Sequence: Synthetic oligonucleotide
  Sense strand starting at position 829 of SEQ ID NO: 1879527
ggacccugacgucaaugau

SEQ ID NO: 1913777 - RNA, 19 nt, Artificial Sequence
  Description of Artificial Sequence: Synthetic oligonucleotide
  Antisense strand to SEQ ID NO: 1913776
aucauugacgucagggucc

SEQ ID NO: 1913778 - RNA, 19 nt, Artificial Sequence
  Description of Artificial Sequence: Synthetic oligonucleotide
  Sense strand starting at position 951 of SEQ ID NO: 1879527
ucacuacaguguuuaauaa

SEQ ID NO: 1913779 - RNA, 19 nt, Artificial Sequence
  Description of Artificial Sequence: Synthetic oligonucleotide
  Antisense strand to SEQ ID NO: 1913778
uuauuaaacacuguaguga

SEQ ID NO: 1913780 - RNA, 19 nt, Artificial Sequence
  Description of Artificial Sequence: Synthetic oligonucleotide
  Sense strand starting at position 1095 of SEQ ID NO: 1879527
guagguuagguguauuaua

SEQ ID NO: 1913781 - RNA, 19 nt, Artificial Sequence
  Description of Artificial Sequence: Synthetic oligonucleotide
  Antisense strand to SEQ ID NO: 1913780
uauaauacaccuaaccuac

SEQ ID NO: 1913782 - RNA, 19 nt, Artificial Sequence
  Description of Artificial Sequence: Synthetic oligonucleotide
  Sense strand starting at position 1782 of SEQ ID NO: 1879527
ucauuauuucucuguuugu

SEQ ID NO: 1913783 - RNA, 19 nt, Artificial Sequence
  Description of Artificial Sequence: Synthetic oligonucleotide
  Antisense strand to SEQ ID NO: 1913782
acaaacagagaaauaauga

SEQ ID NO: 1913784 - RNA, 19 nt, Artificial Sequence
  Description of Artificial Sequence: Synthetic oligonucleotide
  Sense strand starting at position 1785 of SEQ ID NO: 1879527
uuauuucucuguuuguacu

SEQ ID NO: 1913785 - RNA, 19 nt, Artificial Sequence
  Description of Artificial Sequence: Synthetic oligonucleotide
  Antisense strand to SEQ ID NO: 1913784
aguacaaacagagaaauaa

SEQ ID NO: 1913786 - RNA, 19 nt, Artificial Sequence
  Description of Artificial Sequence: Synthetic oligonucleotide
  Sense strand starting at position 1841 of SEQ ID NO: 1879527
guaggaaauuuagaucaua

SEQ ID NO: 1913787 - RNA, 19 nt, Artificial Sequence
  Description of Artificial Sequence: Synthetic oligonucleotide
  Antisense strand to SEQ ID NO: 1913786
uaugaucuaaauuuccuac

SEQ ID NO: 1913788 - RNA, 19 nt, Artificial Sequence
  Description of Artificial Sequence: Synthetic oligonucleotide
  Sense strand starting at position 1996 of SEQ ID NO: 1879527
guauuaggauucuuguuag

SEQ ID NO: 1913789 - RNA, 19 nt, Artificial Sequence
  Description of Artificial Sequence: Synthetic oligonucleotide
  Antisense strand to SEQ ID NO: 1913788
cuaacaagaauccuaauac

SEQ ID NO: 1913790 - RNA, 19 nt, Artificial Sequence
  Description of Artificial Sequence: Synthetic oligonucleotide
  Sense strand starting at position 2037 of SEQ ID NO: 1879527
ccagauucugaaugccuau

SEQ ID NO: 1913791 - RNA, 19 nt, Artificial Sequence
  Description of Artificial Sequence: Synthetic oligonucleotide
  Antisense strand to SEQ ID NO: 1913790
auaggcauucagaaucugg

SEQ ID NO: 1913792 - RNA, 19 nt, Artificial Sequence
  Description of Artificial Sequence: Synthetic oligonucleotide
  Sense strand starting at position 2108 of SEQ ID NO: 1879527
cuggaucucuugucugaaa

SEQ ID NO: 1913793 - RNA, 19 nt, Artificial Sequence
  Description of Artificial Sequence: Synthetic oligonucleotide
  Antisense strand to SEQ ID NO: 1913792
uuucagacaagagauccag

SEQ ID NO: 1913794 - RNA, 19 nt, Artificial Sequence
  Description of Artificial Sequence: Synthetic oligonucleotide
  Sense strand starting at position 2109 of SEQ ID NO: 1879527
uggaucucuugucugaaac

SEQ ID NO: 1913795 - RNA, 19 nt, Artificial Sequence
  Description of Artificial Sequence: Synthetic oligonucleotide
  Antisense strand to SEQ ID NO: 1913794
guuucagacaagagaucca

SEQ ID NO: 1913796 - RNA, 19 nt, Artificial Sequence
  Description of Artificial Sequence: Synthetic oligonucleotide
  Sense strand starting at position 2110 of SEQ ID NO: 1879527
ggaucucuugucugaaaca

SEQ ID NO: 1913797 - RNA, 19 nt, Artificial Sequence
  Description of Artificial Sequence: Synthetic oligonucleotide
  Antisense strand to SEQ ID NO: 1913796
uguuucagacaagagaucc

SEQ ID NO: 1913798 - RNA, 19 nt, Artificial Sequence
  Description of Artificial Sequence: Synthetic oligonucleotide
  Sense strand starting at position 2348 of SEQ ID NO: 1879527
caggcaguugacuacuaga

SEQ ID NO: 1913799 - RNA, 19 nt, Artificial Sequence
  Description of Artificial Sequence: Synthetic oligonucleotide
  Antisense strand to SEQ ID NO: 1913798
ucuaguagucaacugccug

SEQ ID NO: 1913800 - RNA, 19 nt, Artificial Sequence
  Description of Artificial Sequence: Synthetic oligonucleotide
  Sense strand starting at position 2482 of SEQ ID NO: 1879527
aagaguauagucuagucaa

SEQ ID NO: 1913801 - RNA, 19 nt, Artificial Sequence
  Description of Artificial Sequence: Synthetic oligonucleotide
  Antisense strand to SEQ ID NO: 1913800
uugacuagacuauacucuu

SEQ ID NO: 1913802 - RNA, 19 nt, Artificial Sequence
  Description of Artificial Sequence: Synthetic oligonucleotide
  Sense strand starting at position 2509 of SEQ ID NO: 1879527
cuuaucgcccuugagagau

SEQ ID NO: 1913803 - RNA, 19 nt, Artificial Sequence
  Description of Artificial Sequence: Synthetic oligonucleotide
  Antisense strand to SEQ ID NO: 1913802
aucucucaagggcgauaag

SEQ ID NO: 1913804 - RNA, 19 nt, Artificial Sequence
  Description of Artificial Sequence: Synthetic oligonucleotide
  Sense strand starting at position 2556 of SEQ ID NO: 1879527
cauuauuguguagaauugu

SEQ ID NO: 1913805 - RNA, 19 nt, Artificial Sequence
  Description of Artificial Sequence: Synthetic oligonucleotide
  Antisense strand to SEQ ID NO: 1913804
acaauucuacacaauaaug

SEQ ID NO: 1913806 - RNA, 19 nt, Artificial Sequence
  Description of Artificial Sequence: Synthetic oligonucleotide
  Sense strand starting at position 2566 of SEQ ID NO: 1879527
uagaauugugucuagagug

SEQ ID NO: 1913807 - RNA, 19 nt, Artificial Sequence
  Description of Artificial Sequence: Synthetic oligonucleotide
  Antisense strand to SEQ ID NO: 1913806
cacucuagacacaauucua

SEQ ID NO: 1913808 - RNA, 19 nt, Artificial Sequence
  Description of Artificial Sequence: Synthetic oligonucleotide
  Sense strand starting at position 2573 of SEQ ID NO: 1879527
gugucuagaguggacuaaa

SEQ ID NO: 1913809 - RNA, 19 nt, Artificial Sequence
  Description of Artificial Sequence: Synthetic oligonucleotide
  Antisense strand to SEQ ID NO: 1913808
uuuaguccacucuagacac

SEQ ID NO: 1913810 - RNA, 19 nt, Artificial Sequence
  Description of Artificial Sequence: Synthetic oligonucleotide
  Sense strand starting at position 2649 of SEQ ID NO: 1879527
gugacauauuuagaacauu

SEQ ID NO: 1913811 - RNA, 19 nt, Artificial Sequence
  Description of Artificial Sequence: Synthetic oligonucleotide
  Antisense strand to SEQ ID NO: 1913810
aauguucuaaauaugucac

SEQ ID NO: 1913812 - RNA, 19 nt, Artificial Sequence
  Description of Artificial Sequence: Synthetic oligonucleotide
  Sense strand starting at position 2658 of SEQ ID NO: 1879527
uuagaacauugagcugaau

SEQ ID NO: 1913813 - RNA, 19 nt, Artificial Sequence
  Description of Artificial Sequence: Synthetic oligonucleotide
  Antisense strand to SEQ ID NO: 1913812
auucagcucaauguucuaa

SEQ ID NO: 1913814 - RNA, 19 nt, Artificial Sequence
  Description of Artificial Sequence: Synthetic oligonucleotide
  Sense strand starting at position 2664 of SEQ ID NO: 1879527
cauugagcugaaugaaagu

SEQ ID NO: 1913815 - RNA, 19 nt, Artificial Sequence
  Description of Artificial Sequence: Synthetic oligonucleotide
  Antisense strand to SEQ ID NO: 1913814
acuuucauucagcucaaug

SEQ ID NO: 1913816 - RNA, 19 nt, Artificial Sequence
  Description of Artificial Sequence: Synthetic oligonucleotide
  Sense strand starting at position 2673 of SEQ ID NO: 1879527
gaaugaaagucauuguuaa

SEQ ID NO: 1913817 - RNA, 19 nt, Artificial Sequence
  Description of Artificial Sequence: Synthetic oligonucleotide
  Antisense strand to SEQ ID NO: 1913816
uuaacaaugacuuucauuc

SEQ ID NO: 1913818 - RNA, 19 nt, Artificial Sequence
  Description of Artificial Sequence: Synthetic oligonucleotide
  Sense strand starting at position 2693 of SEQ ID NO: 1879527
cacauuuguugagcuagua

SEQ ID NO: 1913819 - RNA, 19 nt, Artificial Sequence
  Description of Artificial Sequence: Synthetic oligonucleotide
  Antisense strand to SEQ ID NO: 1913818
uacuagcucaacaaaugug

SEQ ID NO: 1913820 - RNA, 19 nt, Artificial Sequence
  Description of Artificial Sequence: Synthetic oligonucleotide
  Sense strand starting at position 2980 of SEQ ID NO: 1879527
auauaaaugcuuggacuaa

SEQ ID NO: 1913821 - RNA, 19 nt, Artificial Sequence
  Description of Artificial Sequence: Synthetic oligonucleotide
  Antisense strand to SEQ ID NO: 1913820
uuaguccaagcauuuauau

SEQ ID NO: 1913822 - RNA, 19 nt, Artificial Sequence
  Description of Artificial Sequence: Synthetic oligonucleotide
  Sense strand starting at position 3245 of SEQ ID NO: 1879527
gucaacauucuguauauua

SEQ ID NO: 1913823 - RNA, 19 nt, Artificial Sequence
  Description of Artificial Sequence: Synthetic oligonucleotide
  Antisense strand to SEQ ID NO: 1913822
uaauauacagaauguugac

SEQ ID NO: 1913824 - RNA, 19 nt, Artificial Sequence
  Description of Artificial Sequence: Synthetic oligonucleotide
  Sense strand starting at position 3411 of SEQ ID NO: 1879527
guaaucuuaggacauaguu

SEQ ID NO: 1913825 - RNA, 19 nt, Artificial Sequence
  Description of Artificial Sequence: Synthetic oligonucleotide
  Antisense strand to SEQ ID NO: 1913824
aacuauguccuaagauuac

SEQ ID NO: 1913826 - RNA, 19 nt, Artificial Sequence
  Description of Artificial Sequence: Synthetic oligonucleotide
  Sense strand starting at position 3465 of SEQ ID NO: 1879527
auacuaccucagugaagga

SEQ ID NO: 1913827 - RNA, 19 nt, Artificial Sequence
  Description of Artificial Sequence: Synthetic oligonucleotide
  Antisense strand to SEQ ID NO: 1913826
uccuucacugagguaguau

SEQ ID NO: 1913828 - RNA, 19 nt, Artificial Sequence
  Description of Artificial Sequence: Synthetic oligonucleotide
  Sense strand starting at position 3619 of SEQ ID NO: 1879527
ugguauauuugacauugag

SEQ ID NO: 1913829 - RNA, 19 nt, Artificial Sequence
  Description of Artificial Sequence: Synthetic oligonucleotide
  Antisense strand to SEQ ID NO: 1913828
cucaaugucaaauauacca

SEQ ID NO: 1913830 - RNA, 19 nt, Artificial Sequence
  Description of Artificial Sequence: Synthetic oligonucleotide
  Sense strand starting at position 3628 of SEQ ID NO: 1879527
ugacauugaguauacaugu

SEQ ID NO: 1913831 - RNA, 19 nt, Artificial Sequence
  Description of Artificial Sequence: Synthetic oligonucleotide
  Antisense strand to SEQ ID NO: 1913830
acauguauacucaauguca

SEQ ID NO: 1913832 - RNA, 19 nt, Artificial Sequence
  Description of Artificial Sequence: Synthetic oligonucleotide
  Sense strand starting at position 3715 of SEQ ID NO: 1879527
ugagacaaguuaucacuua

SEQ ID NO: 1913833 - RNA, 19 nt, Artificial Sequence
  Description of Artificial Sequence: Synthetic oligonucleotide
  Antisense strand to SEQ ID NO: 1913832
uaagugauaacuugucuca

SEQ ID NO: 1913834 - RNA, 19 nt, Artificial Sequence
  Description of Artificial Sequence: Synthetic oligonucleotide
  Sense strand starting at position 3826 of SEQ ID NO: 1879527
augugugucccauaaaucu

SEQ ID NO: 1913835 - RNA, 19 nt, Artificial Sequence
  Description of Artificial Sequence: Synthetic oligonucleotide
  Antisense strand to SEQ ID NO: 1913834
agauuuaugggacacacau

SEQ ID NO: 1913836 - RNA, 19 nt, Artificial Sequence
  Description of Artificial Sequence: Synthetic oligonucleotide
  Sense strand starting at position 3914 of SEQ ID NO: 1879527
guuucauuugguugguaag

SEQ ID NO: 1913837 - RNA, 19 nt, Artificial Sequence
  Description of Artificial Sequence: Synthetic oligonucleotide
  Antisense strand to SEQ ID NO: 1913836
cuuaccaaccaaaugaaac

SEQ ID NO: 1913838 - RNA, 19 nt, Artificial Sequence
  Description of Artificial Sequence: Synthetic oligonucleotide
  Sense strand starting at position 393 of SEQ ID NO: 1879528
ugugcuuaccaauaaagac

SEQ ID NO: 1913839 - RNA, 19 nt, Artificial Sequence
  Description of Artificial Sequence: Synthetic oligonucleotide
  Antisense strand to SEQ ID NO: 1913838
gucuuuauugguaagcaca

SEQ ID NO: 1913840 - RNA, 19 nt, Artificial Sequence
  Description of Artificial Sequence: Synthetic oligonucleotide
  Sense strand starting at position 449 of SEQ ID NO: 1879528
gaggacuuguucuccuuaa

SEQ ID NO: 1913841 - RNA, 19 nt, Artificial Sequence
  Description of Artificial Sequence: Synthetic oligonucleotide
  Antisense strand to SEQ ID NO: 1913840
uuaaggagaacaaguccuc

SEQ ID NO: 1913842 - RNA, 19 nt, Artificial Sequence
  Description of Artificial Sequence: Synthetic oligonucleotide
  Sense strand starting at position 450 of SEQ ID NO: 1879528
aggacuuguucuccuuaau

SEQ ID NO: 1913843 - RNA, 19 nt, Artificial Sequence
  Description of Artificial Sequence: Synthetic oligonucleotide
  Antisense strand to SEQ ID NO: 1913842
auuaaggagaacaaguccu

SEQ ID NO: 1913844 - RNA, 19 nt, Artificial Sequence
  Description of Artificial Sequence: Synthetic oligonucleotide
  Sense strand starting at position 478 of SEQ ID NO: 1879528
uuccuuugacaacgaaauu

SEQ ID NO: 1913845 - RNA, 19 nt, Artificial Sequence
  Description of Artificial Sequence: Synthetic oligonucleotide
  Antisense strand to SEQ ID NO: 1913844
aauuucguugucaaaggaa

SEQ ID NO: 1913846 - RNA, 19 nt, Artificial Sequence
  Description of Artificial Sequence: Synthetic oligonucleotide
  Sense strand starting at position 514 of SEQ ID NO: 1879528
ucauuaugauaccugugga

SEQ ID NO: 1913847 - RNA, 19 nt, Artificial Sequence
  Description of Artificial Sequence: Synthetic oligonucleotide
  Antisense strand to SEQ ID NO: 1913846
uccacagguaucauaauga

SEQ ID NO: 1913848 - RNA, 19 nt, Artificial Sequence
  Description of Artificial Sequence: Synthetic oligonucleotide
  Sense strand starting at position 563 of SEQ ID NO: 1879528
ggcuguuugggagaauauu

SEQ ID NO: 1913849 - RNA, 19 nt, Artificial Sequence
  Description of Artificial Sequence: Synthetic oligonucleotide
  Antisense strand to SEQ ID NO: 1913848
aauauucucccaaacagcc

SEQ ID NO: 1913850 - RNA, 19 nt, Artificial Sequence
  Description of Artificial Sequence: Synthetic oligonucleotide
  Sense strand starting at position 583 of SEQ ID NO: 1879528
uugauaagcuaugcuagaa

SEQ ID NO: 1913851 - RNA, 19 nt, Artificial Sequence
  Description of Artificial Sequence: Synthetic oligonucleotide
  Antisense strand to SEQ ID NO: 1913850
uucuagcauagcuuaucaa

SEQ ID NO: 1913852 - RNA, 19 nt, Artificial Sequence
  Description of Artificial Sequence: Synthetic oligonucleotide
  Sense strand starting at position 595 of SEQ ID NO: 1879528
gcuagaauauaggucagau

SEQ ID NO: 1913853 - RNA, 19 nt, Artificial Sequence
  Description of Artificial Sequence: Synthetic oligonucleotide
  Antisense strand to SEQ ID NO: 1913852
aucugaccuauauucuagc

SEQ ID NO: 1913854 - RNA, 19 nt, Artificial Sequence
  Description of Artificial Sequence: Synthetic oligonucleotide
  Sense strand starting at position 604 of SEQ ID NO: 1879528
uaggucagaucagcuauau

SEQ ID NO: 1913855 - RNA, 19 nt, Artificial Sequence
  Description of Artificial Sequence: Synthetic oligonucleotide
  Antisense strand to SEQ ID NO: 1913854
auauagcugaucugaccua

SEQ ID NO: 1913856 - RNA, 19 nt, Artificial Sequence
  Description of Artificial Sequence: Synthetic oligonucleotide
  Sense strand starting at position 830 of SEQ ID NO: 1879528
uugaaauucccaugguauu

SEQ ID NO: 1913857 - RNA, 19 nt, Artificial Sequence
  Description of Artificial Sequence: Synthetic oligonucleotide
  Antisense strand to SEQ ID NO: 1913856
aauaccaugggaauuucaa

SEQ ID NO: 1913858 - RNA, 19 nt, Artificial Sequence
  Description of Artificial Sequence: Synthetic oligonucleotide
  Sense strand starting at position 831 of SEQ ID NO: 1879528
ugaaauucccaugguauua

SEQ ID NO: 1913859 - RNA, 19 nt, Artificial Sequence
  Description of Artificial Sequence: Synthetic oligonucleotide
  Antisense strand to SEQ ID NO: 1913858
uaauaccaugggaauuuca

SEQ ID NO: 1913860 - RNA, 19 nt, Artificial Sequence
  Description of Artificial Sequence: Synthetic oligonucleotide
  Sense strand starting at position 890 of SEQ ID NO: 1879528
ggaaacauguuauuaacug

SEQ ID NO: 1913861 - RNA, 19 nt, Artificial Sequence
  Description of Artificial Sequence: Synthetic oligonucleotide
  Antisense strand to SEQ ID NO: 1913860
caguuaauaacauguuucc

SEQ ID NO: 1913862 - RNA, 19 nt, Artificial Sequence
  Description of Artificial Sequence: Synthetic oligonucleotide
  Sense strand starting at position 922 of SEQ ID NO: 1879528
uagaguaggugguuucaga

SEQ ID NO: 1913863 - RNA, 19 nt, Artificial Sequence
  Description of Artificial Sequence: Synthetic oligonucleotide
  Antisense strand to SEQ ID NO: 1913862
ucugaaaccaccuacucua

SEQ ID NO: 1913864 - RNA, 19 nt, Artificial Sequence
  Description of Artificial Sequence: Synthetic oligonucleotide
  Sense strand starting at position 978 of SEQ ID NO: 1879528
uuuaauggucuggaauguu

SEQ ID NO: 1913865 - RNA, 19 nt, Artificial Sequence
  Description of Artificial Sequence: Synthetic oligonucleotide
  Antisense strand to SEQ ID NO: 1913864
aacauuccagaccauuaaa

SEQ ID NO: 1913866 - RNA, 19 nt, Artificial Sequence
  Description of Artificial Sequence: Synthetic oligonucleotide
  Sense strand starting at position 1009 of SEQ ID NO: 1879528
accugucucgauggaauga

SEQ ID NO: 1913867 - RNA, 19 nt, Artificial Sequence
  Description of Artificial Sequence: Synthetic oligonucleotide
  Antisense strand to SEQ ID NO: 1913866
ucauuccaucgagacaggu

SEQ ID NO: 1913868 - RNA, 19 nt, Artificial Sequence
  Description of Artificial Sequence: Synthetic oligonucleotide
  Sense strand starting at position 1010 of SEQ ID NO: 1879528
ccugucucgauggaaugaa

SEQ ID NO: 1913869 - RNA, 19 nt, Artificial Sequence
  Description of Artificial Sequence: Synthetic oligonucleotide
  Antisense strand to SEQ ID NO: 1913868
uucauuccaucgagacagg

SEQ ID NO: 1913870 - RNA, 19 nt, Artificial Sequence
  Description of Artificial Sequence: Synthetic oligonucleotide
  Sense strand starting at position 1103 of SEQ ID NO: 1879528
uguagugaugauuauacua

SEQ ID NO: 1913871 - RNA, 19 nt, Artificial Sequence
  Description of Artificial Sequence: Synthetic oligonucleotide
  Antisense strand to SEQ ID NO: 1913870
uaguauaaucaucacuaca

SEQ ID NO: 1913872 - RNA, 19 nt, Artificial Sequence
  Description of Artificial Sequence: Synthetic oligonucleotide
  Sense strand starting at position 1265 of SEQ ID NO: 1879528
cgcaauuuguuaucuucua

SEQ ID NO: 1913873 - RNA, 19 nt, Artificial Sequence
  Description of Artificial Sequence: Synthetic oligonucleotide
  Antisense strand to SEQ ID NO: 1913872
uagaagauaacaaauugcg

SEQ ID NO: 1913874 - RNA, 19 nt, Artificial Sequence
  Description of Artificial Sequence: Synthetic oligonucleotide
  Sense strand starting at position 1406 of SEQ ID NO: 1879528
uuggaauagugacauauuu

SEQ ID NO: 1913875 - RNA, 19 nt, Artificial Sequence
  Description of Artificial Sequence: Synthetic oligonucleotide
  Antisense strand to SEQ ID NO: 1913874
aaauaugucacuauuccaa

SEQ ID NO: 1913876 - RNA, 19 nt, Artificial Sequence
  Description of Artificial Sequence: Synthetic oligonucleotide
  Sense strand starting at position 1449 of SEQ ID NO: 1879528
ucuuguuaugcugauaaca

SEQ ID NO: 1913877 - RNA, 19 nt, Artificial Sequence
  Description of Artificial Sequence: Synthetic oligonucleotide
  Antisense strand to SEQ ID NO: 1913876
uguuaucagcauaacaaga

SEQ ID NO: 1913878 - RNA, 19 nt, Artificial Sequence
  Description of Artificial Sequence: Synthetic oligonucleotide
  Sense strand starting at position 1965 of SEQ ID NO: 1879528
uagugcauucuggagauua

SEQ ID NO: 1913879 - RNA, 19 nt, Artificial Sequence
  Description of Artificial Sequence: Synthetic oligonucleotide
  Antisense strand to SEQ ID NO: 1913878
uaaucuccagaaugcacua

SEQ ID NO: 1913880 - RNA, 19 nt, Artificial Sequence
  Description of Artificial Sequence: Synthetic oligonucleotide
  Sense strand starting at position 1967 of SEQ ID NO: 1879528
gugcauucuggagauuaga

SEQ ID NO: 1913881 - RNA, 19 nt, Artificial Sequence
  Description of Artificial Sequence: Synthetic oligonucleotide
  Antisense strand to SEQ ID NO: 1913880
ucuaaucuccagaaugcac

SEQ ID NO: 1913882 - RNA, 19 nt, Artificial Sequence
  Description of Artificial Sequence: Synthetic oligonucleotide
  Sense strand starting at position 2106 of SEQ ID NO: 1879528
uuggcauuuccguggacau

SEQ ID NO: 1913883 - RNA, 19 nt, Artificial Sequence
  Description of Artificial Sequence: Synthetic oligonucleotide
  Antisense strand to SEQ ID NO: 1913882
auguccacggaaaugccaa

SEQ ID NO: 1913884 - RNA, 19 nt, Artificial Sequence
  Description of Artificial Sequence: Synthetic oligonucleotide
  Sense strand starting at position 2107 of SEQ ID NO: 1879528
uggcauuuccguggacaug

SEQ ID NO: 1913885 - RNA, 19 nt, Artificial Sequence
  Description of Artificial Sequence: Synthetic oligonucleotide
  Antisense strand to SEQ ID NO: 1913884
cauguccacggaaaugcca

SEQ ID NO: 1913886 - RNA, 19 nt, Artificial Sequence
  Description of Artificial Sequence: Synthetic oligonucleotide
  Sense strand starting at position 2344 of SEQ ID NO: 1879528
uauuuagugcuuuggguaa

SEQ ID NO: 1913887 - RNA, 19 nt, Artificial Sequence
  Description of Artificial Sequence: Synthetic oligonucleotide
  Antisense strand to SEQ ID NO: 1913886
uuacccaaagcacuaaaua

SEQ ID NO: 1913888 - RNA, 19 nt, Artificial Sequence
  Description of Artificial Sequence: Synthetic oligonucleotide
  Sense strand starting at position 2385 of SEQ ID NO: 1879528
uaguuuauguuccugagaa

SEQ ID NO: 1913889 - RNA, 19 nt, Artificial Sequence
  Description of Artificial Sequence: Synthetic oligonucleotide
  Antisense strand to SEQ ID NO: 1913888
uucucaggaacauaaacua

SEQ ID NO: 1913890 - RNA, 19 nt, Artificial Sequence
  Description of Artificial Sequence: Synthetic oligonucleotide
  Sense strand starting at position 2398 of SEQ ID NO: 1879528
ugagaaagguaguuucaga

SEQ ID NO: 1913891 - RNA, 19 nt, Artificial Sequence
  Description of Artificial Sequence: Synthetic oligonucleotide
  Antisense strand to SEQ ID NO: 1913890
ucugaaacuaccuuucuca

SEQ ID NO: 1913892 - RNA, 19 nt, Artificial Sequence
  Description of Artificial Sequence: Synthetic oligonucleotide
  Sense strand starting at position 2496 of SEQ ID NO: 1879528
cggccauguauugaauaua

SEQ ID NO: 1913893 - RNA, 19 nt, Artificial Sequence
  Description of Artificial Sequence: Synthetic oligonucleotide
  Antisense strand to SEQ ID NO: 1913892
uauauucaauacauggccg

SEQ ID NO: 1913894 - RNA, 19 nt, Artificial Sequence
  Description of Artificial Sequence: Synthetic oligonucleotide
  Sense strand starting at position 2679 of SEQ ID NO: 1879528
gccuuauggcuauagacac

SEQ ID NO: 1913895 - RNA, 19 nt, Artificial Sequence
  Description of Artificial Sequence: Synthetic oligonucleotide
  Antisense strand to SEQ ID NO: 1913894
gugucuauagccauaaggc

SEQ ID NO: 1913896 - RNA, 19 nt, Artificial Sequence
  Description of Artificial Sequence: Synthetic oligonucleotide
  Sense strand starting at position 2818 of SEQ ID NO: 1879528
cuugauacugcugauauaa

SEQ ID NO: 1913897 - RNA, 19 nt, Artificial Sequence
  Description of Artificial Sequence: Synthetic oligonucleotide
  Antisense strand to SEQ ID NO: 1913896
uuauaucagcaguaucaag

SEQ ID NO: 1913898 - RNA, 19 nt, Artificial Sequence
  Description of Artificial Sequence: Synthetic oligonucleotide
  Sense strand starting at position 2915 of SEQ ID NO: 1879528
caaggacacucuguugaga

SEQ ID NO: 1913899 - RNA, 19 nt, Artificial Sequence
  Description of Artificial Sequence: Synthetic oligonucleotide
  Antisense strand to SEQ ID NO: 1913898
ucucaacagaguguccuug

SEQ ID NO: 1913900 - RNA, 19 nt, Artificial Sequence
  Description of Artificial Sequence: Synthetic oligonucleotide
  Sense strand starting at position 2937 of SEQ ID NO: 1879528
ggguuagacaucuagguac

SEQ ID NO: 1913901 - RNA, 19 nt, Artificial Sequence
  Description of Artificial Sequence: Synthetic oligonucleotide
  Antisense strand to SEQ ID NO: 1913900
guaccuagaugucuaaccc

SEQ ID NO: 1913902 - RNA, 19 nt, Artificial Sequence
  Description of Artificial Sequence: Synthetic oligonucleotide
  Sense strand starting at position 2939 of SEQ ID NO: 1879528
guuagacaucuagguacug

SEQ ID NO: 1913903 - RNA, 19 nt, Artificial Sequence
  Description of Artificial Sequence: Synthetic oligonucleotide
  Antisense strand to SEQ ID NO: 1913902
caguaccuagaugucuaac

SEQ ID NO: 1913904 - RNA, 19 nt, Artificial Sequence
  Description of Artificial Sequence: Synthetic oligonucleotide
  Sense strand starting at position 2982 of SEQ ID NO: 1879528
acacaauugugagcacauu

SEQ ID NO: 1913905 - RNA, 19 nt, Artificial Sequence
  Description of Artificial Sequence: Synthetic oligonucleotide
  Antisense strand to SEQ ID NO: 1913904
aaugugcucacaauugugu

SEQ ID NO: 1913906 - RNA, 19 nt, Artificial Sequence
  Description of Artificial Sequence: Synthetic oligonucleotide
  Sense strand starting at position 3065 of SEQ ID NO: 1879528
gugaaacaguaauuccuaa

SEQ ID NO: 1913907 - RNA, 19 nt, Artificial Sequence
  Description of Artificial Sequence: Synthetic oligonucleotide
  Antisense strand to SEQ ID NO: 1913906
uuaggaauuacuguuucac

SEQ ID NO: 1913908 - RNA, 19 nt, Artificial Sequence
  Description of Artificial Sequence: Synthetic oligonucleotide
  Sense strand starting at position 3381 of SEQ ID NO: 1879528
augggcuaggguuauuaua

SEQ ID NO: 1913909 - RNA, 19 nt, Artificial Sequence
  Description of Artificial Sequence: Synthetic oligonucleotide
  Antisense strand to SEQ ID NO: 1913908
uauaauaacccuagcccau

SEQ ID NO: 1913910 - RNA, 19 nt, Artificial Sequence
  Description of Artificial Sequence: Synthetic oligonucleotide
  Sense strand starting at position 3434 of SEQ ID NO: 1879528
cuuacagucuacuuggaga

SEQ ID NO: 1913911 - RNA, 19 nt, Artificial Sequence
  Description of Artificial Sequence: Synthetic oligonucleotide
  Antisense strand to SEQ ID NO: 1913910
ucuccaaguagacuguaag

SEQ ID NO: 1913912 - RNA, 19 nt, Artificial Sequence
  Description of Artificial Sequence: Synthetic oligonucleotide
  Sense strand starting at position 3436 of SEQ ID NO: 1879528
uacagucuacuuggagaua

SEQ ID NO: 1913913 - RNA, 19 nt, Artificial Sequence
  Description of Artificial Sequence: Synthetic oligonucleotide
  Antisense strand to SEQ ID NO: 1913912
uaucuccaaguagacugua

SEQ ID NO: 1913914 - RNA, 19 nt, Artificial Sequence
  Description of Artificial Sequence: Synthetic oligonucleotide
  Sense strand starting at position 3813 of SEQ ID NO: 1879528
auuauaugcccagggagua

SEQ ID NO: 1913915 - RNA, 19 nt, Artificial Sequence
  Description of Artificial Sequence: Synthetic oligonucleotide
  Antisense strand to SEQ ID NO: 1913914
uacucccugggcauauaau

SEQ ID NO: 1913916 - RNA, 19 nt, Artificial Sequence
  Description of Artificial Sequence: Synthetic oligonucleotide
  Sense strand starting at position 3814 of SEQ ID NO: 1879528
uuauaugcccagggaguaa

SEQ ID NO: 1913917 - RNA, 19 nt, Artificial Sequence
  Description of Artificial Sequence: Synthetic oligonucleotide
  Antisense strand to SEQ ID NO: 1913916
uuacucccugggcauauaa

SEQ ID NO: 1913918 - RNA, 19 nt, Artificial Sequence
  Description of Artificial Sequence: Synthetic oligonucleotide
  Sense strand starting at position 501 of SEQ ID NO: 1879529
augucuguugaaugcauga

SEQ ID NO: 1913919 - RNA, 19 nt, Artificial Sequence
  Description of Artificial Sequence: Synthetic oligonucleotide
  Antisense strand to SEQ ID NO: 1913918
ucaugcauucaacagacau

SEQ ID NO: 1913920 - RNA, 19 nt, Artificial Sequence
  Description of Artificial Sequence: Synthetic oligonucleotide
  Sense strand starting at position 503 of SEQ ID NO: 1879529
gucuguugaaugcaugaaa

SEQ ID NO: 1913921 - RNA, 19 nt, Artificial Sequence
  Description of Artificial Sequence: Synthetic oligonucleotide
  Antisense strand to SEQ ID NO: 1913920
uuucaugcauucaacagac

SEQ ID NO: 1913922 - RNA, 19 nt, Artificial Sequence
  Description of Artificial Sequence: Synthetic oligonucleotide
  Sense strand starting at position 569 of SEQ ID NO: 1879529
guagaaaucucagcaguuc

SEQ ID NO: 1913923 - RNA, 19 nt, Artificial Sequence
  Description of Artificial Sequence: Synthetic oligonucleotide
  Antisense strand to SEQ ID NO: 1913922
gaacugcugagauuucuac

SEQ ID NO: 1913924 - RNA, 19 nt, Artificial Sequence
  Description of Artificial Sequence: Synthetic oligonucleotide
  Sense strand starting at position 1025 of SEQ ID NO: 1879529
gaucaucuaugguugcauu

SEQ ID NO: 1913925 - RNA, 19 nt, Artificial Sequence
  Description of Artificial Sequence: Synthetic oligonucleotide
  Antisense strand to SEQ ID NO: 1913924
aaugcaaccauagaugauc

SEQ ID NO: 1913926 - RNA, 19 nt, Artificial Sequence
  Description of Artificial Sequence: Synthetic oligonucleotide
  Sense strand starting at position 1026 of SEQ ID NO: 1879529
aucaucuaugguugcauua

SEQ ID NO: 1913927 - RNA, 19 nt, Artificial Sequence
  Description of Artificial Sequence: Synthetic oligonucleotide
  Antisense strand to SEQ ID NO: 1913926
uaaugcaaccauagaugau

SEQ ID NO: 1913928 - RNA, 19 nt, Artificial Sequence
  Description of Artificial Sequence: Synthetic oligonucleotide
  Sense strand starting at position 2482 of SEQ ID NO: 1879529
ccuuauuucuaggacuaug

SEQ ID NO: 1913929 - RNA, 19 nt, Artificial Sequence
  Description of Artificial Sequence: Synthetic oligonucleotide
  Antisense strand to SEQ ID NO: 1913928
cauaguccuagaaauaagg

SEQ ID NO: 1913930 - RNA, 19 nt, Artificial Sequence
  Description of Artificial Sequence: Synthetic oligonucleotide
  Sense strand starting at position 2506 of SEQ ID NO: 1879529
cgaacccaucccugagaau

SEQ ID NO: 1913931 - RNA, 19 nt, Artificial Sequence
  Description of Artificial Sequence: Synthetic oligonucleotide
  Antisense strand to SEQ ID NO: 1913930
auucucagggauggguucg

SEQ ID NO: 1913932 - RNA, 19 nt, Artificial Sequence
  Description of Artificial Sequence: Synthetic oligonucleotide
  Sense strand starting at position 2691 of SEQ ID NO: 1879529
gcgcuaagcucgcacugau

SEQ ID NO: 1913933 - RNA, 19 nt, Artificial Sequence
  Description of Artificial Sequence: Synthetic oligonucleotide
  Antisense strand to SEQ ID NO: 1913932
aucagugcgagcuuagcgc

SEQ ID NO: 1913934 - RNA, 19 nt, Artificial Sequence
  Description of Artificial Sequence: Synthetic oligonucleotide
  Sense strand starting at position 2789 of SEQ ID NO: 1879529
agaagcugccaucaaguau

SEQ ID NO: 1913935 - RNA, 19 nt, Artificial Sequence
  Description of Artificial Sequence: Synthetic oligonucleotide
  Antisense strand to SEQ ID NO: 1913934
auacuugauggcagcuucu

SEQ ID NO: 1913936 - RNA, 19 nt, Artificial Sequence
  Description of Artificial Sequence: Synthetic oligonucleotide
  Sense strand starting at position 2800 of SEQ ID NO: 1879529
ucaaguauuuccucacgca

SEQ ID NO: 1913937 - RNA, 19 nt, Artificial Sequence
  Description of Artificial Sequence: Synthetic oligonucleotide
  Antisense strand to SEQ ID NO: 1913936
ugcgugaggaaauacuuga

SEQ ID NO: 1913938 - RNA, 19 nt, Artificial Sequence
  Description of Artificial Sequence: Synthetic oligonucleotide
  Sense strand starting at position 2860 of SEQ ID NO: 1879529
acaauauacucuccggaca

SEQ ID NO: 1913939 - RNA, 19 nt, Artificial Sequence
  Description of Artificial Sequence: Synthetic oligonucleotide
  Antisense strand to SEQ ID NO: 1913938
uguccggagaguauauugu

SEQ ID NO: 1913940 - RNA, 19 nt, Artificial Sequence
  Description of Artificial Sequence: Synthetic oligonucleotide
  Sense strand starting at position 2923 of SEQ ID NO: 1879529
ucauaauggcuauagcaau

SEQ ID NO: 1913941 - RNA, 19 nt, Artificial Sequence
  Description of Artificial Sequence: Synthetic oligonucleotide
  Antisense strand to SEQ ID NO: 1913940
auugcuauagccauuauga

SEQ ID NO: 1913942 - RNA, 19 nt, Artificial Sequence
  Description of Artificial Sequence: Synthetic oligonucleotide
  Sense strand starting at position 2967 of SEQ ID NO: 1879529
uucugagucccagagguua

SEQ ID NO: 1913943 - RNA, 19 nt, Artificial Sequence
  Description of Artificial Sequence: Synthetic oligonucleotide
  Antisense strand to SEQ ID NO: 1913942
uaaccucugggacucagaa

SEQ ID NO: 1913944 - RNA, 19 nt, Artificial Sequence
  Description of Artificial Sequence: Synthetic oligonucleotide
  Sense strand starting at position 3123 of SEQ ID NO: 1879529
ggcaguugagguggauuaa

SEQ ID NO: 1913945 - RNA, 19 nt, Artificial Sequence
  Description of Artificial Sequence: Synthetic oligonucleotide
  Antisense strand to SEQ ID NO: 1913944
uuaauccaccucaacugcc

SEQ ID NO: 1913946 - RNA, 19 nt, Artificial Sequence
  Description of Artificial Sequence: Synthetic oligonucleotide
  Sense strand starting at position 3124 of SEQ ID NO: 1879529
gcaguugagguggauuaaa

SEQ ID NO: 1913947 - RNA, 19 nt, Artificial Sequence
  Description of Artificial Sequence: Synthetic oligonucleotide
  Antisense strand to SEQ ID NO: 1913946
uuuaauccaccucaacugc

SEQ ID NO: 1913948 - RNA, 19 nt, Artificial Sequence
  Description of Artificial Sequence: Synthetic oligonucleotide
  Sense strand starting at position 3420 of SEQ ID NO: 1879529
ugggccauuaucgaagaau

SEQ ID NO: 1913949 - RNA, 19 nt, Artificial Sequence
  Description of Artificial Sequence: Synthetic oligonucleotide
  Antisense strand to SEQ ID NO: 1913948
auucuucgauaauggccca

SEQ ID NO: 1913950 - RNA, 19 nt, Artificial Sequence
  Description of Artificial Sequence: Synthetic oligonucleotide
  Sense strand starting at position 3713 of SEQ ID NO: 1879529
cucaguaaguugcaauacu

SEQ ID NO: 1913951 - RNA, 19 nt, Artificial Sequence
  Description of Artificial Sequence: Synthetic oligonucleotide
  Antisense strand to SEQ ID NO: 1913950
aguauugcaacuuacugag

SEQ ID NO: 1913952 - RNA, 19 nt, Artificial Sequence
  Description of Artificial Sequence: Synthetic oligonucleotide
  Sense strand starting at position 124 of SEQ ID NO: 1879530
ggauuuacaugggaaauuc

SEQ ID NO: 1913953 - RNA, 19 nt, Artificial Sequence
  Description of Artificial Sequence: Synthetic oligonucleotide
  Antisense strand to SEQ ID NO: 1913952
gaauuucccauguaaaucc

SEQ ID NO: 1913954 - RNA, 19 nt, Artificial Sequence
  Description of Artificial Sequence: Synthetic oligonucleotide
  Sense strand starting at position 352 of SEQ ID NO: 1879530
auaacuaggucucucuuga

SEQ ID NO: 1913955 - RNA, 19 nt, Artificial Sequence
  Description of Artificial Sequence: Synthetic oligonucleotide
  Antisense strand to SEQ ID NO: 1913954
ucaagagagaccuaguuau

SEQ ID NO: 1913956 - RNA, 19 nt, Artificial Sequence
  Description of Artificial Sequence: Synthetic oligonucleotide
  Sense strand starting at position 446 of SEQ ID NO: 1879530
gggaucucagguuaguguu

SEQ ID NO: 1913957 - RNA, 19 nt, Artificial Sequence
  Description of Artificial Sequence: Synthetic oligonucleotide
  Antisense strand to SEQ ID NO: 1913956
aacacuaaccugagauccc

SEQ ID NO: 1913958 - RNA, 19 nt, Artificial Sequence
  Description of Artificial Sequence: Synthetic oligonucleotide
  Sense strand starting at position 1676 of SEQ ID NO: 1879530
guuacaagauggguuuaca

SEQ ID NO: 1913959 - RNA, 19 nt, Artificial Sequence
  Description of Artificial Sequence: Synthetic oligonucleotide
  Antisense strand to SEQ ID NO: 1913958
uguaaacccaucuuguaac

SEQ ID NO: 1913960 - RNA, 19 nt, Artificial Sequence
  Description of Artificial Sequence: Synthetic oligonucleotide
  Sense strand starting at position 1699 of SEQ ID NO: 1879530
uuuaauucuugggucuuaa

SEQ ID NO: 1913961 - RNA, 19 nt, Artificial Sequence
  Description of Artificial Sequence: Synthetic oligonucleotide
  Antisense strand to SEQ ID NO: 1913960
uuaagacccaagaauuaaa

SEQ ID NO: 1913962 - RNA, 19 nt, Artificial Sequence
  Description of Artificial Sequence: Synthetic oligonucleotide
  Sense strand starting at position 1783 of SEQ ID NO: 1879530
gcggaaggcgcuguaagua

SEQ ID NO: 1913963 - RNA, 19 nt, Artificial Sequence
  Description of Artificial Sequence: Synthetic oligonucleotide
  Antisense strand to SEQ ID NO: 1913962
uacuuacagcgccuuccgc

SEQ ID NO: 1913964 - RNA, 19 nt, Artificial Sequence
  Description of Artificial Sequence: Synthetic oligonucleotide
  Sense strand starting at position 1819 of SEQ ID NO: 1879530
gguuucagaggaggacuua

SEQ ID NO: 1913965 - RNA, 19 nt, Artificial Sequence
  Description of Artificial Sequence: Synthetic oligonucleotide
  Antisense strand to SEQ ID NO: 1913964
uaaguccuccucugaaacc

SEQ ID NO: 1913966 - RNA, 19 nt, Artificial Sequence
  Description of Artificial Sequence: Synthetic oligonucleotide
  Sense strand starting at position 1829 of SEQ ID NO: 1879530
gaggacuuacugggaguca

SEQ ID NO: 1913967 - RNA, 19 nt, Artificial Sequence
  Description of Artificial Sequence: Synthetic oligonucleotide
  Antisense strand to SEQ ID NO: 1913966
ugacucccaguaaguccuc

SEQ ID NO: 1913968 - RNA, 19 nt, Artificial Sequence
  Description of Artificial Sequence: Synthetic oligonucleotide
  Sense strand starting at position 1863 of SEQ ID NO: 1879530
gccagaggacugggaucuu

SEQ ID NO: 1913969 - RNA, 19 nt, Artificial Sequence
  Description of Artificial Sequence: Synthetic oligonucleotide
  Antisense strand to SEQ ID NO: 1913968
aagaucccaguccucuggc

SEQ ID NO: 1913970 - RNA, 19 nt, Artificial Sequence
  Description of Artificial Sequence: Synthetic oligonucleotide
  Sense strand starting at position 1972 of SEQ ID NO: 1879530
gggugucucccuuagggaa

SEQ ID NO: 1913971 - RNA, 19 nt, Artificial Sequence
  Description of Artificial Sequence: Synthetic oligonucleotide
  Antisense strand to SEQ ID NO: 1913970
uucccuaagggagacaccc

SEQ ID NO: 1913972 - RNA, 19 nt, Artificial Sequence
  Description of Artificial Sequence: Synthetic oligonucleotide
  Sense strand starting at position 1987 of SEQ ID NO: 1879530
ggaagauugcugcaggaau

SEQ ID NO: 1913973 - RNA, 19 nt, Artificial Sequence
  Description of Artificial Sequence: Synthetic oligonucleotide
  Antisense strand to SEQ ID NO: 1913972
auuccugcagcaaucuucc

SEQ ID NO: 1913974 - RNA, 19 nt, Artificial Sequence
  Description of Artificial Sequence: Synthetic oligonucleotide
  Sense strand starting at position 1989 of SEQ ID NO: 1879530
aagauugcugcaggaauca

SEQ ID NO: 1913975 - RNA, 19 nt, Artificial Sequence
  Description of Artificial Sequence: Synthetic oligonucleotide
  Antisense strand to SEQ ID NO: 1913974
ugauuccugcagcaaucuu

SEQ ID NO: 1913976 - RNA, 19 nt, Artificial Sequence
  Description of Artificial Sequence: Synthetic oligonucleotide
  Sense strand starting at position 1998 of SEQ ID NO: 1879530
gcaggaaucaacgguugga

SEQ ID NO: 1913977 - RNA, 19 nt, Artificial Sequence
  Description of Artificial Sequence: Synthetic oligonucleotide
  Antisense strand to SEQ ID NO: 1913976
uccaaccguugauuccugc

SEQ ID NO: 1913978 - RNA, 19 nt, Artificial Sequence
  Description of Artificial Sequence: Synthetic oligonucleotide
  Sense strand starting at position 2015 of SEQ ID NO: 1879530
gaagguuagggucagggua

SEQ ID NO: 1913979 - RNA, 19 nt, Artificial Sequence
  Description of Artificial Sequence: Synthetic oligonucleotide
  Antisense strand to SEQ ID NO: 1913978
uacccugacccuaaccuuc

SEQ ID NO: 1913980 - RNA, 19 nt, Artificial Sequence
  Description of Artificial Sequence: Synthetic oligonucleotide
  Sense strand starting at position 2234 of SEQ ID NO: 1879530
gggucuuugagaggguaga

SEQ ID NO: 1913981 - RNA, 19 nt, Artificial Sequence
  Description of Artificial Sequence: Synthetic oligonucleotide
  Antisense strand to SEQ ID NO: 1913980
ucuacccucucaaagaccc

SEQ ID NO: 1913982 - RNA, 19 nt, Artificial Sequence
  Description of Artificial Sequence: Synthetic oligonucleotide
  Sense strand starting at position 2235 of SEQ ID NO: 1879530
ggucuuugagaggguagau

SEQ ID NO: 1913983 - RNA, 19 nt, Artificial Sequence
  Description of Artificial Sequence: Synthetic oligonucleotide
  Antisense strand to SEQ ID NO: 1913982
aucuacccucucaaagacc

SEQ ID NO: 1913984 - RNA, 19 nt, Artificial Sequence
  Description of Artificial Sequence: Synthetic oligonucleotide
  Sense strand starting at position 2252 of SEQ ID NO: 1879530
augugaagacuuuauaugu

SEQ ID NO: 1913985 - RNA, 19 nt, Artificial Sequence
  Description of Artificial Sequence: Synthetic oligonucleotide
  Antisense strand to SEQ ID NO: 1913984
acauauaaagucuucacau

SEQ ID NO: 1913986 - RNA, 19 nt, Artificial Sequence
  Description of Artificial Sequence: Synthetic oligonucleotide
  Sense strand starting at position 2282 of SEQ ID NO: 1879530
cagucuuacugacuuugga

SEQ ID NO: 1913987 - RNA, 19 nt, Artificial Sequence
  Description of Artificial Sequence: Synthetic oligonucleotide
  Antisense strand to SEQ ID NO: 1913986
uccaaagucaguaagacug

SEQ ID NO: 1913988 - RNA, 19 nt, Artificial Sequence
  Description of Artificial Sequence: Synthetic oligonucleotide
  Sense strand starting at position 2285 of SEQ ID NO: 1879530
ucuuacugacuuuggagua

SEQ ID NO: 1913989 - RNA, 19 nt, Artificial Sequence
  Description of Artificial Sequence: Synthetic oligonucleotide
  Antisense strand to SEQ ID NO: 1913988
uacuccaaagucaguaaga

SEQ ID NO: 1913990 - RNA, 19 nt, Artificial Sequence
  Description of Artificial Sequence: Synthetic oligonucleotide
  Sense strand starting at position 2290 of SEQ ID NO: 1879530
cugacuuuggaguaagcua

SEQ ID NO: 1913991 - RNA, 19 nt, Artificial Sequence
  Description of Artificial Sequence: Synthetic oligonucleotide
  Antisense strand to SEQ ID NO: 1913990
uagcuuacuccaaagucag

SEQ ID NO: 1913992 - RNA, 19 nt, Artificial Sequence
  Description of Artificial Sequence: Synthetic oligonucleotide
  Sense strand starting at position 2328 of SEQ ID NO: 1879530
ggcuuuauagaguaaucau

SEQ ID NO: 1913993 - RNA, 19 nt, Artificial Sequence
  Description of Artificial Sequence: Synthetic oligonucleotide
  Antisense strand to SEQ ID NO: 1913992
augauuacucuauaaagcc

SEQ ID NO: 1913994 - RNA, 19 nt, Artificial Sequence
  Description of Artificial Sequence: Synthetic oligonucleotide
  Sense strand starting at position 2345 of SEQ ID NO: 1879530
auugaaugggcuuguacaa

SEQ ID NO: 1913995 - RNA, 19 nt, Artificial Sequence
  Description of Artificial Sequence: Synthetic oligonucleotide
  Antisense strand to SEQ ID NO: 1913994
uuguacaagcccauucaau

SEQ ID NO: 1913996 - RNA, 19 nt, Artificial Sequence
  Description of Artificial Sequence: Synthetic oligonucleotide
  Sense strand starting at position 2368 of SEQ ID NO: 1879530
uuuguuguuguggaaggaa

SEQ ID NO: 1913997 - RNA, 19 nt, Artificial Sequence
  Description of Artificial Sequence: Synthetic oligonucleotide
  Antisense strand to SEQ ID NO: 1913996
uuccuuccacaacaacaaa

SEQ ID NO: 1913998 - RNA, 19 nt, Artificial Sequence
  Description of Artificial Sequence: Synthetic oligonucleotide
  Sense strand starting at position 2371 of SEQ ID NO: 1879530
guuguuguggaaggaauua

SEQ ID NO: 1913999 - RNA, 19 nt, Artificial Sequence
  Description of Artificial Sequence: Synthetic oligonucleotide
  Antisense strand to SEQ ID NO: 1913998
uaauuccuuccacaacaac

SEQ ID NO: 1914000 - RNA, 19 nt, Artificial Sequence
  Description of Artificial Sequence: Synthetic oligonucleotide
  Sense strand starting at position 2382 of SEQ ID NO: 1879530
aggaauuaaguuugcugau

SEQ ID NO: 1914001 - RNA, 19 nt, Artificial Sequence
  Description of Artificial Sequence: Synthetic oligonucleotide
  Antisense strand to SEQ ID NO: 1914000
aucagcaaacuuaauuccu

SEQ ID NO: 1914002 - RNA, 19 nt, Artificial Sequence
  Description of Artificial Sequence: Synthetic oligonucleotide
  Sense strand starting at position 2384 of SEQ ID NO: 1879530
gaauuaaguuugcugauug

SEQ ID NO: 1914003 - RNA, 19 nt, Artificial Sequence
  Description of Artificial Sequence: Synthetic oligonucleotide
  Antisense strand to SEQ ID NO: 1914002
caaucagcaaacuuaauuc

SEQ ID NO: 1914004 - RNA, 19 nt, Artificial Sequence
  Description of Artificial Sequence: Synthetic oligonucleotide
  Sense strand starting at position 2443 of SEQ ID NO: 1879530
gguugaaauuucgcaguga

SEQ ID NO: 1914005 - RNA, 19 nt, Artificial Sequence
  Description of Artificial Sequence: Synthetic oligonucleotide
  Antisense strand to SEQ ID NO: 1914004
ucacugcgaaauuucaacc

SEQ ID NO: 1914006 - RNA, 19 nt, Artificial Sequence
  Description of Artificial Sequence: Synthetic oligonucleotide
  Sense strand starting at position 2495 of SEQ ID NO: 1879530
cuguaagaaguguacauca

SEQ ID NO: 1914007 - RNA, 19 nt, Artificial Sequence
  Description of Artificial Sequence: Synthetic oligonucleotide
  Antisense strand to SEQ ID NO: 1914006
ugauguacacuucuuacag

SEQ ID NO: 1914008 - RNA, 19 nt, Artificial Sequence
  Description of Artificial Sequence: Synthetic oligonucleotide
  Sense strand starting at position 2497 of SEQ ID NO: 1879530
guaagaaguguacaucacu

SEQ ID NO: 1914009 - RNA, 19 nt, Artificial Sequence
  Description of Artificial Sequence: Synthetic oligonucleotide
  Antisense strand to SEQ ID NO: 1914008
agugauguacacuucuuac

SEQ ID NO: 1914010 - RNA, 19 nt, Artificial Sequence
  Description of Artificial Sequence: Synthetic oligonucleotide
  Sense strand starting at position 2674 of SEQ ID NO: 1879530
guaagauagggccaaugua

SEQ ID NO: 1914011 - RNA, 19 nt, Artificial Sequence
  Description of Artificial Sequence: Synthetic oligonucleotide
  Antisense strand to SEQ ID NO: 1914010
uacauuggcccuaucuuac

SEQ ID NO: 1914012 - RNA, 19 nt, Artificial Sequence
  Description of Artificial Sequence: Synthetic oligonucleotide
  Sense strand starting at position 2843 of SEQ ID NO: 1879530
uuugauauacaggguacaa

SEQ ID NO: 1914013 - RNA, 19 nt, Artificial Sequence
  Description of Artificial Sequence: Synthetic oligonucleotide
  Antisense strand to SEQ ID NO: 1914012
uuguacccuguauaucaaa

SEQ ID NO: 1914014 - RNA, 19 nt, Artificial Sequence
  Description of Artificial Sequence: Synthetic oligonucleotide
  Sense strand starting at position 2920 of SEQ ID NO: 1879530
ugugauaguagauauugca

SEQ ID NO: 1914015 - RNA, 19 nt, Artificial Sequence
  Description of Artificial Sequence: Synthetic oligonucleotide
  Antisense strand to SEQ ID NO: 1914014
ugcaauaucuacuaucaca

SEQ ID NO: 1914016 - RNA, 19 nt, Artificial Sequence
  Description of Artificial Sequence: Synthetic oligonucleotide
  Sense strand starting at position 3248 of SEQ ID NO: 1879530
aaacacagugauuggcaua

SEQ ID NO: 1914017 - RNA, 19 nt, Artificial Sequence
  Description of Artificial Sequence: Synthetic oligonucleotide
  Antisense strand to SEQ ID NO: 1914016
uaugccaaucacuguguuu

SEQ ID NO: 1914018 - RNA, 19 nt, Artificial Sequence
  Description of Artificial Sequence: Synthetic oligonucleotide
  Sense strand starting at position 3255 of SEQ ID NO: 1879530
gugauuggcauauagaacu

SEQ ID NO: 1914019 - RNA, 19 nt, Artificial Sequence
  Description of Artificial Sequence: Synthetic oligonucleotide
  Antisense strand to SEQ ID NO: 1914018
aguucuauaugccaaucac

SEQ ID NO: 1914020 - RNA, 19 nt, Artificial Sequence
  Description of Artificial Sequence: Synthetic oligonucleotide
  Sense strand starting at position 3354 of SEQ ID NO: 1879530
auuucuagcuguucucuau

SEQ ID NO: 1914021 - RNA, 19 nt, Artificial Sequence
  Description of Artificial Sequence: Synthetic oligonucleotide
  Antisense strand to SEQ ID NO: 1914020
auagagaacagcuagaaau

SEQ ID NO: 1914022 - RNA, 19 nt, Artificial Sequence
  Description of Artificial Sequence: Synthetic oligonucleotide
  Sense strand starting at position 3431 of SEQ ID NO: 1879530
acaguaguacucuggagac

SEQ ID NO: 1914023 - RNA, 19 nt, Artificial Sequence
  Description of Artificial Sequence: Synthetic oligonucleotide
  Antisense strand to SEQ ID NO: 1914022
gucuccagaguacuacugu

SEQ ID NO: 1914024 - RNA, 19 nt, Artificial Sequence
  Description of Artificial Sequence: Synthetic oligonucleotide
  Sense strand starting at position 3452 of SEQ ID NO: 1879530
cuguaugggcauugaggaa

SEQ ID NO: 1914025 - RNA, 19 nt, Artificial Sequence
  Description of Artificial Sequence: Synthetic oligonucleotide
  Antisense strand to SEQ ID NO: 1914024
uuccucaaugcccauacag

SEQ ID NO: 1914026 - RNA, 19 nt, Artificial Sequence
  Description of Artificial Sequence: Synthetic oligonucleotide
  Sense strand starting at position 3476 of SEQ ID NO: 1879530
ucaagaaaguuguuaauag

SEQ ID NO: 1914027 - RNA, 19 nt, Artificial Sequence
  Description of Artificial Sequence: Synthetic oligonucleotide
  Antisense strand to SEQ ID NO: 1914026
cuauuaacaacuuucuuga

SEQ ID NO: 1914028 - RNA, 19 nt, Artificial Sequence
  Description of Artificial Sequence: Synthetic oligonucleotide
  Sense strand starting at position 3688 of SEQ ID NO: 1879530
acaaguuugaacugugaug

SEQ ID NO: 1914029 - RNA, 19 nt, Artificial Sequence
  Description of Artificial Sequence: Synthetic oligonucleotide
  Antisense strand to SEQ ID NO: 1914028
caucacaguucaaacuugu

SEQ ID NO: 1914030 - RNA, 19 nt, Artificial Sequence
  Description of Artificial Sequence: Synthetic oligonucleotide
  Sense strand starting at position 3951 of SEQ ID NO: 1879530
ggaccacauauauggugau

SEQ ID NO: 1914031 - RNA, 19 nt, Artificial Sequence
  Description of Artificial Sequence: Synthetic oligonucleotide
  Antisense strand to SEQ ID NO: 1914030
aucaccauauauguggucc

SEQ ID NO: 1914032 - RNA, 19 nt, Artificial Sequence
  Description of Artificial Sequence: Synthetic oligonucleotide
  Sense strand starting at position 67 of SEQ ID NO: 1879531
aucaguaaguucuaauaca

SEQ ID NO: 1914033 - RNA, 19 nt, Artificial Sequence
  Description of Artificial Sequence: Synthetic oligonucleotide
  Antisense strand to SEQ ID NO: 1914032
uguauuagaacuuacugau

SEQ ID NO: 1914034 - RNA, 19 nt, Artificial Sequence
  Description of Artificial Sequence: Synthetic oligonucleotide
  Sense strand starting at position 95 of SEQ ID NO: 1879531
acagauaauuccuggauua

SEQ ID NO: 1914035 - RNA, 19 nt, Artificial Sequence
  Description of Artificial Sequence: Synthetic oligonucleotide
  Antisense strand to SEQ ID NO: 1914034
uaauccaggaauuaucugu

SEQ ID NO: 1914036 - RNA, 19 nt, Artificial Sequence
  Description of Artificial Sequence: Synthetic oligonucleotide
  Sense strand starting at position 114 of SEQ ID NO: 1879531
uuuaaacauucggccagua

SEQ ID NO: 1914037 - RNA, 19 nt, Artificial Sequence
  Description of Artificial Sequence: Synthetic oligonucleotide
  Antisense strand to SEQ ID NO: 1914036
uacuggccgaauguuuaaa

SEQ ID NO: 1914038 - RNA, 19 nt, Artificial Sequence
  Description of Artificial Sequence: Synthetic oligonucleotide
  Sense strand starting at position 116 of SEQ ID NO: 1879531
uaaacauucggccaguaca

SEQ ID NO: 1914039 - RNA, 19 nt, Artificial Sequence
  Description of Artificial Sequence: Synthetic oligonucleotide
  Antisense strand to SEQ ID NO: 1914038
uguacuggccgaauguuua

SEQ ID NO: 1914040 - RNA, 19 nt, Artificial Sequence
  Description of Artificial Sequence: Synthetic oligonucleotide
  Sense strand starting at position 253 of SEQ ID NO: 1879531
gucaaauauuagcaagucu

SEQ ID NO: 1914041 - RNA, 19 nt, Artificial Sequence
  Description of Artificial Sequence: Synthetic oligonucleotide
  Antisense strand to SEQ ID NO: 1914040
agacuugcuaauauuugac

SEQ ID NO: 1914042 - RNA, 19 nt, Artificial Sequence
  Description of Artificial Sequence: Synthetic oligonucleotide
  Sense strand starting at position 332 of SEQ ID NO: 1879531
gaggguauuucugaacuca

SEQ ID NO: 1914043 - RNA, 19 nt, Artificial Sequence
  Description of Artificial Sequence: Synthetic oligonucleotide
  Antisense strand to SEQ ID NO: 1914042
ugaguucagaaauacccuc

SEQ ID NO: 1914044 - RNA, 19 nt, Artificial Sequence
  Description of Artificial Sequence: Synthetic oligonucleotide
  Sense strand starting at position 398 of SEQ ID NO: 1879531
uuacguuauuaagaaccca

SEQ ID NO: 1914045 - RNA, 19 nt, Artificial Sequence
  Description of Artificial Sequence: Synthetic oligonucleotide
  Antisense strand to SEQ ID NO: 1914044
uggguucuuaauaacguaa

SEQ ID NO: 1914046 - RNA, 19 nt, Artificial Sequence
  Description of Artificial Sequence: Synthetic oligonucleotide
  Sense strand starting at position 425 of SEQ ID NO: 1879531
gggccaaguuggccaauua

SEQ ID NO: 1914047 - RNA, 19 nt, Artificial Sequence
  Description of Artificial Sequence: Synthetic oligonucleotide
  Antisense strand to SEQ ID NO: 1914046
uaauuggccaacuuggccc

SEQ ID NO: 1914048 - RNA, 19 nt, Artificial Sequence
  Description of Artificial Sequence: Synthetic oligonucleotide
  Sense strand starting at position 510 of SEQ ID NO: 1879531
cugaaauauccaggcacuc

SEQ ID NO: 1914049 - RNA, 19 nt, Artificial Sequence
  Description of Artificial Sequence: Synthetic oligonucleotide
  Antisense strand to SEQ ID NO: 1914048
gagugccuggauauuucag

SEQ ID NO: 1914050 - RNA, 19 nt, Artificial Sequence
  Description of Artificial Sequence: Synthetic oligonucleotide
  Sense strand starting at position 779 of SEQ ID NO: 1879531
agagguguguugagucuca

SEQ ID NO: 1914051 - RNA, 19 nt, Artificial Sequence
  Description of Artificial Sequence: Synthetic oligonucleotide
  Antisense strand to SEQ ID NO: 1914050
ugagacucaacacaccucu

SEQ ID NO: 1914052 - RNA, 19 nt, Artificial Sequence
  Description of Artificial Sequence: Synthetic oligonucleotide
  Sense strand starting at position 864 of SEQ ID NO: 1879531
aacagaggugucuguaacu

SEQ ID NO: 1914053 - RNA, 19 nt, Artificial Sequence
  Description of Artificial Sequence: Synthetic oligonucleotide
  Antisense strand to SEQ ID NO: 1914052
aguuacagacaccucuguu

SEQ ID NO: 1914054 - RNA, 19 nt, Artificial Sequence
  Description of Artificial Sequence: Synthetic oligonucleotide
  Sense strand starting at position 891 of SEQ ID NO: 1879531
gugggaggucuguacauac

SEQ ID NO: 1914055 - RNA, 19 nt, Artificial Sequence
  Description of Artificial Sequence: Synthetic oligonucleotide
  Antisense strand to SEQ ID NO: 1914054
guauguacagaccucccac

SEQ ID NO: 1914056 - RNA, 19 nt, Artificial Sequence
  Description of Artificial Sequence: Synthetic oligonucleotide
  Sense strand starting at position 989 of SEQ ID NO: 1879531
gaccuacuggcuuggaaua

SEQ ID NO: 1914057 - RNA, 19 nt, Artificial Sequence
  Description of Artificial Sequence: Synthetic oligonucleotide
  Antisense strand to SEQ ID NO: 1914056
uauuccaagccaguagguc

SEQ ID NO: 1914058 - RNA, 19 nt, Artificial Sequence
  Description of Artificial Sequence: Synthetic oligonucleotide
  Sense strand starting at position 990 of SEQ ID NO: 1879531
accuacuggcuuggaauau

SEQ ID NO: 1914059 - RNA, 19 nt, Artificial Sequence
  Description of Artificial Sequence: Synthetic oligonucleotide
  Antisense strand to SEQ ID NO: 1914058
auauuccaagccaguaggu

SEQ ID NO: 1914060 - RNA, 19 nt, Artificial Sequence
  Description of Artificial Sequence: Synthetic oligonucleotide
  Sense strand starting at position 991 of SEQ ID NO: 1879531
ccuacuggcuuggaauaua

SEQ ID NO: 1914061 - RNA, 19 nt, Artificial Sequence
  Description of Artificial Sequence: Synthetic oligonucleotide
  Antisense strand to SEQ ID NO: 1914060
uauauuccaagccaguagg

SEQ ID NO: 1914062 - RNA, 19 nt, Artificial Sequence
  Description of Artificial Sequence: Synthetic oligonucleotide
  Sense strand starting at position 1012 of SEQ ID NO: 1879531
cuaccugugaugggacaga

SEQ ID NO: 1914063 - RNA, 19 nt, Artificial Sequence
  Description of Artificial Sequence: Synthetic oligonucleotide
  Antisense strand to SEQ ID NO: 1914062
ucugucccaucacagguag

SEQ ID NO: 1914064 - RNA, 19 nt, Artificial Sequence
  Description of Artificial Sequence: Synthetic oligonucleotide
  Sense strand starting at position 1089 of SEQ ID NO: 1879531
gucuaugggcuucggagaa

SEQ ID NO: 1914065 - RNA, 19 nt, Artificial Sequence
  Description of Artificial Sequence: Synthetic oligonucleotide
  Antisense strand to SEQ ID NO: 1914064
uucuccgaagcccauagac

SEQ ID NO: 1914066 - RNA, 19 nt, Artificial Sequence
  Description of Artificial Sequence: Synthetic oligonucleotide
  Sense strand starting at position 1171 of SEQ ID NO: 1879531
ccagguugcuucuuuaagu

SEQ ID NO: 1914067 - RNA, 19 nt, Artificial Sequence
  Description of Artificial Sequence: Synthetic oligonucleotide
  Antisense strand to SEQ ID NO: 1914066
acuuaaagaagcaaccugg

SEQ ID NO: 1914068 - RNA, 19 nt, Artificial Sequence
  Description of Artificial Sequence: Synthetic oligonucleotide
  Sense strand starting at position 1274 of SEQ ID NO: 1879531
ccugaucucuuucuggaau

SEQ ID NO: 1914069 - RNA, 19 nt, Artificial Sequence
  Description of Artificial Sequence: Synthetic oligonucleotide
  Antisense strand to SEQ ID NO: 1914068
auuccagaaagagaucagg

SEQ ID NO: 1914070 - RNA, 19 nt, Artificial Sequence
  Description of Artificial Sequence: Synthetic oligonucleotide
  Sense strand starting at position 1275 of SEQ ID NO: 1879531
cugaucucuuucuggaaua

SEQ ID NO: 1914071 - RNA, 19 nt, Artificial Sequence
  Description of Artificial Sequence: Synthetic oligonucleotide
  Antisense strand to SEQ ID NO: 1914070
uauuccagaaagagaucag

SEQ ID NO: 1914072 - RNA, 19 nt, Artificial Sequence
  Description of Artificial Sequence: Synthetic oligonucleotide
  Sense strand starting at position 1276 of SEQ ID NO: 1879531
ugaucucuuucuggaauag

SEQ ID NO: 1914073 - RNA, 19 nt, Artificial Sequence
  Description of Artificial Sequence: Synthetic oligonucleotide
  Antisense strand to SEQ ID NO: 1914072
cuauuccagaaagagauca

SEQ ID NO: 1914074 - RNA, 19 nt, Artificial Sequence
  Description of Artificial Sequence: Synthetic oligonucleotide
  Sense strand starting at position 1431 of SEQ ID NO: 1879531
gaagcaguuucccagcaca

SEQ ID NO: 1914075 - RNA, 19 nt, Artificial Sequence
  Description of Artificial Sequence: Synthetic oligonucleotide
  Antisense strand to SEQ ID NO: 1914074
ugugcugggaaacugcuuc

SEQ ID NO: 1914076 - RNA, 19 nt, Artificial Sequence
  Description of Artificial Sequence: Synthetic oligonucleotide
  Sense strand starting at position 1434 of SEQ ID NO: 1879531
gcaguuucccagcacaaca

SEQ ID NO: 1914077 - RNA, 19 nt, Artificial Sequence
  Description of Artificial Sequence: Synthetic oligonucleotide
  Antisense strand to SEQ ID NO: 1914076
uguugugcugggaaacugc

SEQ ID NO: 1914078 - RNA, 19 nt, Artificial Sequence
  Description of Artificial Sequence: Synthetic oligonucleotide
  Sense strand starting at position 1454 of SEQ ID NO: 1879531
ggcuguucuauugaggcau

SEQ ID NO: 1914079 - RNA, 19 nt, Artificial Sequence
  Description of Artificial Sequence: Synthetic oligonucleotide
  Antisense strand to SEQ ID NO: 1914078
augccucaauagaacagcc

SEQ ID NO: 1914080 - RNA, 19 nt, Artificial Sequence
  Description of Artificial Sequence: Synthetic oligonucleotide
  Sense strand starting at position 1475 of SEQ ID NO: 1879531
ccagauggcuucuuuaagu

SEQ ID NO: 1914081 - RNA, 19 nt, Artificial Sequence
  Description of Artificial Sequence: Synthetic oligonucleotide
  Antisense strand to SEQ ID NO: 1914080
acuuaaagaagccaucugg

SEQ ID NO: 1914082 - RNA, 19 nt, Artificial Sequence
  Description of Artificial Sequence: Synthetic oligonucleotide
  Sense strand starting at position 1511 of SEQ ID NO: 1879531
uuccuugacggguagauca

SEQ ID NO: 1914083 - RNA, 19 nt, Artificial Sequence
  Description of Artificial Sequence: Synthetic oligonucleotide
  Antisense strand to SEQ ID NO: 1914082
ugaucuacccgucaaggaa

SEQ ID NO: 1914084 - RNA, 19 nt, Artificial Sequence
  Description of Artificial Sequence: Synthetic oligonucleotide
  Sense strand starting at position 1557 of SEQ ID NO: 1879531
gcccauguucuguggccaa

SEQ ID NO: 1914085 - RNA, 19 nt, Artificial Sequence
  Description of Artificial Sequence: Synthetic oligonucleotide
  Antisense strand to SEQ ID NO: 1914084
uuggccacagaacaugggc

SEQ ID NO: 1914086 - RNA, 19 nt, Artificial Sequence
  Description of Artificial Sequence: Synthetic oligonucleotide
  Sense strand starting at position 1561 of SEQ ID NO: 1879531
auguucuguggccaacaga

SEQ ID NO: 1914087 - RNA, 19 nt, Artificial Sequence
  Description of Artificial Sequence: Synthetic oligonucleotide
  Antisense strand to SEQ ID NO: 1914086
ucuguuggccacagaacau

SEQ ID NO: 1914088 - RNA, 19 nt, Artificial Sequence
  Description of Artificial Sequence: Synthetic oligonucleotide
  Sense strand starting at position 1777 of SEQ ID NO: 1879531
ccuccugacuaggugagau

SEQ ID NO: 1914089 - RNA, 19 nt, Artificial Sequence
  Description of Artificial Sequence: Synthetic oligonucleotide
  Antisense strand to SEQ ID NO: 1914088
aucucaccuagucaggagg

SEQ ID NO: 1914090 - RNA, 19 nt, Artificial Sequence
  Description of Artificial Sequence: Synthetic oligonucleotide
  Sense strand starting at position 1926 of SEQ ID NO: 1879531
ugcugauaccuccaaguac

SEQ ID NO: 1914091 - RNA, 19 nt, Artificial Sequence
  Description of Artificial Sequence: Synthetic oligonucleotide
  Antisense strand to SEQ ID NO: 1914090
guacuuggagguaucagca

SEQ ID NO: 1914092 - RNA, 19 nt, Artificial Sequence
  Description of Artificial Sequence: Synthetic oligonucleotide
  Sense strand starting at position 2009 of SEQ ID NO: 1879531
gaguaaacagacugcuaaa

SEQ ID NO: 1914093 - RNA, 19 nt, Artificial Sequence
  Description of Artificial Sequence: Synthetic oligonucleotide
  Antisense strand to SEQ ID NO: 1914092
uuuagcagucuguuuacuc

SEQ ID NO: 1914094 - RNA, 19 nt, Artificial Sequence
  Description of Artificial Sequence: Synthetic oligonucleotide
  Sense strand starting at position 2054 of SEQ ID NO: 1879531
ccaugaaagcgccauccaa

SEQ ID NO: 1914095 - RNA, 19 nt, Artificial Sequence
  Description of Artificial Sequence: Synthetic oligonucleotide
  Antisense strand to SEQ ID NO: 1914094
uuggauggcgcuuucaugg

SEQ ID NO: 1914096 - RNA, 19 nt, Artificial Sequence
  Description of Artificial Sequence: Synthetic oligonucleotide
  Sense strand starting at position 2277 of SEQ ID NO: 1879531
gcuaaagguguauguccua

SEQ ID NO: 1914097 - RNA, 19 nt, Artificial Sequence
  Description of Artificial Sequence: Synthetic oligonucleotide
  Antisense strand to SEQ ID NO: 1914096
uaggacauacaccuuuagc

SEQ ID NO: 1914098 - RNA, 19 nt, Artificial Sequence
  Description of Artificial Sequence: Synthetic oligonucleotide
  Sense strand starting at position 2282 of SEQ ID NO: 1879531
agguguauguccuaaccaa

SEQ ID NO: 1914099 - RNA, 19 nt, Artificial Sequence
  Description of Artificial Sequence: Synthetic oligonucleotide
  Antisense strand to SEQ ID NO: 1914098
uugguuaggacauacaccu

SEQ ID NO: 1914100 - RNA, 19 nt, Artificial Sequence
  Description of Artificial Sequence: Synthetic oligonucleotide
  Sense strand starting at position 2408 of SEQ ID NO: 1879531
aaguacucgcaauguaauc

SEQ ID NO: 1914101 - RNA, 19 nt, Artificial Sequence
  Description of Artificial Sequence: Synthetic oligonucleotide
  Antisense strand to SEQ ID NO: 1914100
gauuacauugcgaguacuu

SEQ ID NO: 1914102 - RNA, 19 nt, Artificial Sequence
  Description of Artificial Sequence: Synthetic oligonucleotide
  Sense strand starting at position 2477 of SEQ ID NO: 1879531
ugcagacuaucucucugaa

SEQ ID NO: 1914103 - RNA, 19 nt, Artificial Sequence
  Description of Artificial Sequence: Synthetic oligonucleotide
  Antisense strand to SEQ ID NO: 1914102
uucagagagauagucugca

SEQ ID NO: 1914104 - RNA, 19 nt, Artificial Sequence
  Description of Artificial Sequence: Synthetic oligonucleotide
  Sense strand starting at position 2552 of SEQ ID NO: 1879531
cugagaaauauggguuuau

SEQ ID NO: 1914105 - RNA, 19 nt, Artificial Sequence
  Description of Artificial Sequence: Synthetic oligonucleotide
  Antisense strand to SEQ ID NO: 1914104
auaaacccauauuucucag

SEQ ID NO: 1914106 - RNA, 19 nt, Artificial Sequence
  Description of Artificial Sequence: Synthetic oligonucleotide
  Sense strand starting at position 2754 of SEQ ID NO: 1879531
uaagauauguaucagcaga

SEQ ID NO: 1914107 - RNA, 19 nt, Artificial Sequence
  Description of Artificial Sequence: Synthetic oligonucleotide
  Antisense strand to SEQ ID NO: 1914106
ucugcugauacauaucuua

SEQ ID NO: 1914108 - RNA, 19 nt, Artificial Sequence
  Description of Artificial Sequence: Synthetic oligonucleotide
  Sense strand starting at position 2756 of SEQ ID NO: 1879531
agauauguaucagcagauu

SEQ ID NO: 1914109 - RNA, 19 nt, Artificial Sequence
  Description of Artificial Sequence: Synthetic oligonucleotide
  Antisense strand to SEQ ID NO: 1914108
aaucugcugauacauaucu

SEQ ID NO: 1914110 - RNA, 19 nt, Artificial Sequence
  Description of Artificial Sequence: Synthetic oligonucleotide
  Sense strand starting at position 3713 of SEQ ID NO: 1879531
gugcaauccuaguuuauaa

SEQ ID NO: 1914111 - RNA, 19 nt, Artificial Sequence
  Description of Artificial Sequence: Synthetic oligonucleotide
  Antisense strand to SEQ ID NO: 1914110
uuauaaacuaggauugcac

SEQ ID NO: 1914112 - RNA, 19 nt, Artificial Sequence
  Description of Artificial Sequence: Synthetic oligonucleotide
  Sense strand starting at position 19 of SEQ ID NO: 1879532
uugcuugagccuuggauuu

SEQ ID NO: 1914113 - RNA, 19 nt, Artificial Sequence
  Description of Artificial Sequence: Synthetic oligonucleotide
  Antisense strand to SEQ ID NO: 1914112
aaauccaaggcucaagcaa

SEQ ID NO: 1914114 - RNA, 19 nt, Artificial Sequence
  Description of Artificial Sequence: Synthetic oligonucleotide
  Sense strand starting at position 261 of SEQ ID NO: 1879532
aaugaugauugaguuugau

SEQ ID NO: 1914115 - RNA, 19 nt, Artificial Sequence
  Description of Artificial Sequence: Synthetic oligonucleotide
  Antisense strand to SEQ ID NO: 1914114
aucaaacucaaucaucauu

SEQ ID NO: 1914116 - RNA, 19 nt, Artificial Sequence
  Description of Artificial Sequence: Synthetic oligonucleotide
  Sense strand starting at position 264 of SEQ ID NO: 1879532
gaugauugaguuugauaau

SEQ ID NO: 1914117 - RNA, 19 nt, Artificial Sequence
  Description of Artificial Sequence: Synthetic oligonucleotide
  Antisense strand to SEQ ID NO: 1914116
auuaucaaacucaaucauc

SEQ ID NO: 1914118 - RNA, 19 nt, Artificial Sequence
  Description of Artificial Sequence: Synthetic oligonucleotide
  Sense strand starting at position 863 of SEQ ID NO: 1879532
gggugauaucacugguuga

SEQ ID NO: 1914119 - RNA, 19 nt, Artificial Sequence
  Description of Artificial Sequence: Synthetic oligonucleotide
  Antisense strand to SEQ ID NO: 1914118
ucaaccagugauaucaccc

SEQ ID NO: 1914120 - RNA, 19 nt, Artificial Sequence
  Description of Artificial Sequence: Synthetic oligonucleotide
  Sense strand starting at position 866 of SEQ ID NO: 1879532
ugauaucacugguugauau

SEQ ID NO: 1914121 - RNA, 19 nt, Artificial Sequence
  Description of Artificial Sequence: Synthetic oligonucleotide
  Antisense strand to SEQ ID NO: 1914120
auaucaaccagugauauca

SEQ ID NO: 1914122 - RNA, 19 nt, Artificial Sequence
  Description of Artificial Sequence: Synthetic oligonucleotide
  Sense strand starting at position 867 of SEQ ID NO: 1879532
gauaucacugguugauaug

SEQ ID NO: 1914123 - RNA, 19 nt, Artificial Sequence
  Description of Artificial Sequence: Synthetic oligonucleotide
  Antisense strand to SEQ ID NO: 1914122
cauaucaaccagugauauc

SEQ ID NO: 1914124 - RNA, 19 nt, Artificial Sequence
  Description of Artificial Sequence: Synthetic oligonucleotide
  Sense strand starting at position 878 of SEQ ID NO: 1879532
uugauaugauuagugagau

SEQ ID NO: 1914125 - RNA, 19 nt, Artificial Sequence
  Description of Artificial Sequence: Synthetic oligonucleotide
  Antisense strand to SEQ ID NO: 1914124
aucucacuaaucauaucaa

SEQ ID NO: 1914126 - RNA, 19 nt, Artificial Sequence
  Description of Artificial Sequence: Synthetic oligonucleotide
  Sense strand starting at position 1032 of SEQ ID NO: 1879532
gaagaaaguuggguguauu

SEQ ID NO: 1914127 - RNA, 19 nt, Artificial Sequence
  Description of Artificial Sequence: Synthetic oligonucleotide
  Antisense strand to SEQ ID NO: 1914126
aauacacccaacuuucuuc

SEQ ID NO: 1914128 - RNA, 19 nt, Artificial Sequence
  Description of Artificial Sequence: Synthetic oligonucleotide
  Sense strand starting at position 1035 of SEQ ID NO: 1879532
gaaaguuggguguauucuu

SEQ ID NO: 1914129 - RNA, 19 nt, Artificial Sequence
  Description of Artificial Sequence: Synthetic oligonucleotide
  Antisense strand to SEQ ID NO: 1914128
aagaauacacccaacuuuc

SEQ ID NO: 1914130 - RNA, 19 nt, Artificial Sequence
  Description of Artificial Sequence: Synthetic oligonucleotide
  Sense strand starting at position 1154 of SEQ ID NO: 1879532
auugaaggucacuguuuaa

SEQ ID NO: 1914131 - RNA, 19 nt, Artificial Sequence
  Description of Artificial Sequence: Synthetic oligonucleotide
  Antisense strand to SEQ ID NO: 1914130
uuaaacagugaccuucaau

SEQ ID NO: 1914132 - RNA, 19 nt, Artificial Sequence
  Description of Artificial Sequence: Synthetic oligonucleotide
  Sense strand starting at position 1157 of SEQ ID NO: 1879532
gaaggucacuguuuaacac

SEQ ID NO: 1914133 - RNA, 19 nt, Artificial Sequence
  Description of Artificial Sequence: Synthetic oligonucleotide
  Antisense strand to SEQ ID NO: 1914132
guguuaaacagugaccuuc

SEQ ID NO: 1914134 - RNA, 19 nt, Artificial Sequence
  Description of Artificial Sequence: Synthetic oligonucleotide
  Sense strand starting at position 1292 of SEQ ID NO: 1879532
uauugaugauaaguagagu

SEQ ID NO: 1914135 - RNA, 19 nt, Artificial Sequence
  Description of Artificial Sequence: Synthetic oligonucleotide
  Antisense strand to SEQ ID NO: 1914134
acucuacuuaucaucaaua

SEQ ID NO: 1914136 - RNA, 19 nt, Artificial Sequence
  Description of Artificial Sequence: Synthetic oligonucleotide
  Sense strand starting at position 1346 of SEQ ID NO: 1879532
cucugaguauuaucaucag

SEQ ID NO: 1914137 - RNA, 19 nt, Artificial Sequence
  Description of Artificial Sequence: Synthetic oligonucleotide
  Antisense strand to SEQ ID NO: 1914136
cugaugauaauacucagag

SEQ ID NO: 1914138 - RNA, 19 nt, Artificial Sequence
  Description of Artificial Sequence: Synthetic oligonucleotide
  Sense strand starting at position 1408 of SEQ ID NO: 1879532
caaacugcugguuaugaaa

SEQ ID NO: 1914139 - RNA, 19 nt, Artificial Sequence
  Description of Artificial Sequence: Synthetic oligonucleotide
  Antisense strand to SEQ ID NO: 1914138
uuucauaaccagcaguuug

SEQ ID NO: 1914140 - RNA, 19 nt, Artificial Sequence
  Description of Artificial Sequence: Synthetic oligonucleotide
  Sense strand starting at position 1431 of SEQ ID NO: 1879532
uuuagagggucugugaaau

SEQ ID NO: 1914141 - RNA, 19 nt, Artificial Sequence
  Description of Artificial Sequence: Synthetic oligonucleotide
  Antisense strand to SEQ ID NO: 1914140
auuucacagacccucuaaa

SEQ ID NO: 1914142 - RNA, 19 nt, Artificial Sequence
  Description of Artificial Sequence: Synthetic oligonucleotide
  Sense strand starting at position 1441 of SEQ ID NO: 1879532
cugugaaaucacuguggaa

SEQ ID NO: 1914143 - RNA, 19 nt, Artificial Sequence
  Description of Artificial Sequence: Synthetic oligonucleotide
  Antisense strand to SEQ ID NO: 1914142
uuccacagugauuucacag

SEQ ID NO: 1914144 - RNA, 19 nt, Artificial Sequence
  Description of Artificial Sequence: Synthetic oligonucleotide
  Sense strand starting at position 1443 of SEQ ID NO: 1879532
gugaaaucacuguggaaua

SEQ ID NO: 1914145 - RNA, 19 nt, Artificial Sequence
  Description of Artificial Sequence: Synthetic oligonucleotide
  Antisense strand to SEQ ID NO: 1914144
uauuccacagugauuucac

SEQ ID NO: 1914146 - RNA, 19 nt, Artificial Sequence
  Description of Artificial Sequence: Synthetic oligonucleotide
  Sense strand starting at position 1454 of SEQ ID NO: 1879532
guggaauacgaugaaacgu

SEQ ID NO: 1914147 - RNA, 19 nt, Artificial Sequence
  Description of Artificial Sequence: Synthetic oligonucleotide
  Antisense strand to SEQ ID NO: 1914146
acguuucaucguauuccac

SEQ ID NO: 1914148 - RNA, 19 nt, Artificial Sequence
  Description of Artificial Sequence: Synthetic oligonucleotide
  Sense strand starting at position 1475 of SEQ ID NO: 1879532
uagaaaguaucagcagaca

SEQ ID NO: 1914149 - RNA, 19 nt, Artificial Sequence
  Description of Artificial Sequence: Synthetic oligonucleotide
  Antisense strand to SEQ ID NO: 1914148
ugucugcugauacuuucua

SEQ ID NO: 1914150 - RNA, 19 nt, Artificial Sequence
  Description of Artificial Sequence: Synthetic oligonucleotide
  Sense strand starting at position 1842 of SEQ ID NO: 1879532
caaguuuguccugaaagau

SEQ ID NO: 1914151 - RNA, 19 nt, Artificial Sequence
  Description of Artificial Sequence: Synthetic oligonucleotide
  Antisense strand to SEQ ID NO: 1914150
aucuuucaggacaaacuug

SEQ ID NO: 1914152 - RNA, 19 nt, Artificial Sequence
  Description of Artificial Sequence: Synthetic oligonucleotide
  Sense strand starting at position 2044 of SEQ ID NO: 1879532
cauauuguucugggaaccu

SEQ ID NO: 1914153 - RNA, 19 nt, Artificial Sequence
  Description of Artificial Sequence: Synthetic oligonucleotide
  Antisense strand to SEQ ID NO: 1914152
agguucccagaacaauaug

SEQ ID NO: 1914154 - RNA, 19 nt, Artificial Sequence
  Description of Artificial Sequence: Synthetic oligonucleotide
  Sense strand starting at position 2064 of SEQ ID NO: 1879532
cucuguuucccugaacaag

SEQ ID NO: 1914155 - RNA, 19 nt, Artificial Sequence
  Description of Artificial Sequence: Synthetic oligonucleotide
  Antisense strand to SEQ ID NO: 1914154
cuuguucagggaaacagag

SEQ ID NO: 1914156 - RNA, 19 nt, Artificial Sequence
  Description of Artificial Sequence: Synthetic oligonucleotide
  Sense strand starting at position 2116 of SEQ ID NO: 1879532
gggaaaggauuagcuuauu

SEQ ID NO: 1914157 - RNA, 19 nt, Artificial Sequence
  Description of Artificial Sequence: Synthetic oligonucleotide
  Antisense strand to SEQ ID NO: 1914156
aauaagcuaauccuuuccc

SEQ ID NO: 1914158 - RNA, 19 nt, Artificial Sequence
  Description of Artificial Sequence: Synthetic oligonucleotide
  Sense strand starting at position 2121 of SEQ ID NO: 1879532
aggauuagcuuauugagag

SEQ ID NO: 1914159 - RNA, 19 nt, Artificial Sequence
  Description of Artificial Sequence: Synthetic oligonucleotide
  Antisense strand to SEQ ID NO: 1914158
cucucaauaagcuaauccu

SEQ ID NO: 1914160 - RNA, 19 nt, Artificial Sequence
  Description of Artificial Sequence: Synthetic oligonucleotide
  Sense strand starting at position 2309 of SEQ ID NO: 1879532
agaauucucuaggcacaag

SEQ ID NO: 1914161 - RNA, 19 nt, Artificial Sequence
  Description of Artificial Sequence: Synthetic oligonucleotide
  Antisense strand to SEQ ID NO: 1914160
cuugugccuagagaauucu

SEQ ID NO: 1914162 - RNA, 19 nt, Artificial Sequence
  Description of Artificial Sequence: Synthetic oligonucleotide
  Sense strand starting at position 2323 of SEQ ID NO: 1879532
acaagcuuccaguauguaa

SEQ ID NO: 1914163 - RNA, 19 nt, Artificial Sequence
  Description of Artificial Sequence: Synthetic oligonucleotide
  Antisense strand to SEQ ID NO: 1914162
uuacauacuggaagcuugu

SEQ ID NO: 1914164 - RNA, 19 nt, Artificial Sequence
  Description of Artificial Sequence: Synthetic oligonucleotide
  Sense strand starting at position 2624 of SEQ ID NO: 1879532
uagugcuagugauuugcaa

SEQ ID NO: 1914165 - RNA, 19 nt, Artificial Sequence
  Description of Artificial Sequence: Synthetic oligonucleotide
  Antisense strand to SEQ ID NO: 1914164
uugcaaaucacuagcacua

SEQ ID NO: 1914166 - RNA, 19 nt, Artificial Sequence
  Description of Artificial Sequence: Synthetic oligonucleotide
  Sense strand starting at position 2707 of SEQ ID NO: 1879532
agaaauugagacugcuauc

SEQ ID NO: 1914167 - RNA, 19 nt, Artificial Sequence
  Description of Artificial Sequence: Synthetic oligonucleotide
  Antisense strand to SEQ ID NO: 1914166
gauagcagucucaauuucu

SEQ ID NO: 1914168 - RNA, 19 nt, Artificial Sequence
  Description of Artificial Sequence: Synthetic oligonucleotide
  Sense strand starting at position 2768 of SEQ ID NO: 1879532
uguguauauuucccuuguu

SEQ ID NO: 1914169 - RNA, 19 nt, Artificial Sequence
  Description of Artificial Sequence: Synthetic oligonucleotide
  Antisense strand to SEQ ID NO: 1914168
aacaagggaaauauacaca

SEQ ID NO: 1914170 - RNA, 19 nt, Artificial Sequence
  Description of Artificial Sequence: Synthetic oligonucleotide
  Sense strand starting at position 2769 of SEQ ID NO: 1879532
guguauauuucccuuguuu

SEQ ID NO: 1914171 - RNA, 19 nt, Artificial Sequence
  Description of Artificial Sequence: Synthetic oligonucleotide
  Antisense strand to SEQ ID NO: 1914170
aaacaagggaaauauacac

SEQ ID NO: 1914172 - RNA, 19 nt, Artificial Sequence
  Description of Artificial Sequence: Synthetic oligonucleotide
  Sense strand starting at position 2771 of SEQ ID NO: 1879532
guauauuucccuuguuuau

SEQ ID NO: 1914173 - RNA, 19 nt, Artificial Sequence
  Description of Artificial Sequence: Synthetic oligonucleotide
  Antisense strand to SEQ ID NO: 1914172
auaaacaagggaaauauac

SEQ ID NO: 1914174 - RNA, 19 nt, Artificial Sequence
  Description of Artificial Sequence: Synthetic oligonucleotide
  Sense strand starting at position 2856 of SEQ ID NO: 1879532
acaguauacuuguuagagg

SEQ ID NO: 1914175 - RNA, 19 nt, Artificial Sequence
  Description of Artificial Sequence: Synthetic oligonucleotide
  Antisense strand to SEQ ID NO: 1914174
ccucuaacaaguauacugu

SEQ ID NO: 1914176 - RNA, 19 nt, Artificial Sequence
  Description of Artificial Sequence: Synthetic oligonucleotide
  Sense strand starting at position 2867 of SEQ ID NO: 1879532
guuagaggucucuggagau

SEQ ID NO: 1914177 - RNA, 19 nt, Artificial Sequence
  Description of Artificial Sequence: Synthetic oligonucleotide
  Antisense strand to SEQ ID NO: 1914176
aucuccagagaccucuaac

SEQ ID NO: 1914178 - RNA, 19 nt, Artificial Sequence
  Description of Artificial Sequence: Synthetic oligonucleotide
  Sense strand starting at position 2870 of SEQ ID NO: 1879532
agaggucucuggagaugga

SEQ ID NO: 1914179 - RNA, 19 nt, Artificial Sequence
  Description of Artificial Sequence: Synthetic oligonucleotide
  Antisense strand to SEQ ID NO: 1914178
uccaucuccagagaccucu

SEQ ID NO: 1914180 - RNA, 19 nt, Artificial Sequence
  Description of Artificial Sequence: Synthetic oligonucleotide
  Sense strand starting at position 2873 of SEQ ID NO: 1879532
ggucucuggagauggagua

SEQ ID NO: 1914181 - RNA, 19 nt, Artificial Sequence
  Description of Artificial Sequence: Synthetic oligonucleotide
  Antisense strand to SEQ ID NO: 1914180
uacuccaucuccagagacc

SEQ ID NO: 1914182 - RNA, 19 nt, Artificial Sequence
  Description of Artificial Sequence: Synthetic oligonucleotide
  Sense strand starting at position 2886 of SEQ ID NO: 1879532
ggaguaauaaaggauucgu

SEQ ID NO: 1914183 - RNA, 19 nt, Artificial Sequence
  Description of Artificial Sequence: Synthetic oligonucleotide
  Antisense strand to SEQ ID NO: 1914182
acgaauccuuuauuacucc

SEQ ID NO: 1914184 - RNA, 19 nt, Artificial Sequence
  Description of Artificial Sequence: Synthetic oligonucleotide
  Sense strand starting at position 3058 of SEQ ID NO: 1879532
uuggacugaguuugugaaa

SEQ ID NO: 1914185 - RNA, 19 nt, Artificial Sequence
  Description of Artificial Sequence: Synthetic oligonucleotide
  Antisense strand to SEQ ID NO: 1914184
uuucacaaacucaguccaa

SEQ ID NO: 1914186 - RNA, 19 nt, Artificial Sequence
  Description of Artificial Sequence: Synthetic oligonucleotide
  Sense strand starting at position 3069 of SEQ ID NO: 1879532
uugugaaacuucccaauug

SEQ ID NO: 1914187 - RNA, 19 nt, Artificial Sequence
  Description of Artificial Sequence: Synthetic oligonucleotide
  Antisense strand to SEQ ID NO: 1914186
caauugggaaguuucacaa

SEQ ID NO: 1914188 - RNA, 19 nt, Artificial Sequence
  Description of Artificial Sequence: Synthetic oligonucleotide
  Sense strand starting at position 3401 of SEQ ID NO: 1879532
gguauuauggcagauacug

SEQ ID NO: 1914189 - RNA, 19 nt, Artificial Sequence
  Description of Artificial Sequence: Synthetic oligonucleotide
  Antisense strand to SEQ ID NO: 1914188
caguaucugccauaauacc

SEQ ID NO: 1914190 - RNA, 19 nt, Artificial Sequence
  Description of Artificial Sequence: Synthetic oligonucleotide
  Sense strand starting at position 3457 of SEQ ID NO: 1879532
agaaguuugcaacauagca

SEQ ID NO: 1914191 - RNA, 19 nt, Artificial Sequence
  Description of Artificial Sequence: Synthetic oligonucleotide
  Antisense strand to SEQ ID NO: 1914190
ugcuauguugcaaacuucu

SEQ ID NO: 1914192 - RNA, 19 nt, Artificial Sequence
  Description of Artificial Sequence: Synthetic oligonucleotide
  Sense strand starting at position 28 of SEQ ID NO: 1879533
guaacagaaugccuauaaa

SEQ ID NO: 1914193 - RNA, 19 nt, Artificial Sequence
  Description of Artificial Sequence: Synthetic oligonucleotide
  Antisense strand to SEQ ID NO: 1914192
uuuauaggcauucuguuac

SEQ ID NO: 1914194 - RNA, 19 nt, Artificial Sequence
  Description of Artificial Sequence: Synthetic oligonucleotide
  Sense strand starting at position 114 of SEQ ID NO: 1879533
gugauuggugugaguucua

SEQ ID NO: 1914195 - RNA, 19 nt, Artificial Sequence
  Description of Artificial Sequence: Synthetic oligonucleotide
  Antisense strand to SEQ ID NO: 1914194
uagaacucacaccaaucac

SEQ ID NO: 1914196 - RNA, 19 nt, Artificial Sequence
  Description of Artificial Sequence: Synthetic oligonucleotide
  Sense strand starting at position 121 of SEQ ID NO: 1879533
gugugaguucuacagaacc

SEQ ID NO: 1914197 - RNA, 19 nt, Artificial Sequence
  Description of Artificial Sequence: Synthetic oligonucleotide
  Antisense strand to SEQ ID NO: 1914196
gguucuguagaacucacac

SEQ ID NO: 1914198 - RNA, 19 nt, Artificial Sequence
  Description of Artificial Sequence: Synthetic oligonucleotide
  Sense strand starting at position 255 of SEQ ID NO: 1879533
aauuacuguccuugagaag

SEQ ID NO: 1914199 - RNA, 19 nt, Artificial Sequence
  Description of Artificial Sequence: Synthetic oligonucleotide
  Antisense strand to SEQ ID NO: 1914198
cuucucaaggacaguaauu

SEQ ID NO: 1914200 - RNA, 19 nt, Artificial Sequence
  Description of Artificial Sequence: Synthetic oligonucleotide
  Sense strand starting at position 343 of SEQ ID NO: 1879533
uuauuuauagugugaugug

SEQ ID NO: 1914201 - RNA, 19 nt, Artificial Sequence
  Description of Artificial Sequence: Synthetic oligonucleotide
  Antisense strand to SEQ ID NO: 1914200
cacaucacacuauaaauaa

SEQ ID NO: 1914202 - RNA, 19 nt, Artificial Sequence
  Description of Artificial Sequence: Synthetic oligonucleotide
  Sense strand starting at position 485 of SEQ ID NO: 1879533
gguacauggcugggauaga

SEQ ID NO: 1914203 - RNA, 19 nt, Artificial Sequence
  Description of Artificial Sequence: Synthetic oligonucleotide
  Antisense strand to SEQ ID NO: 1914202
ucuaucccagccauguacc

SEQ ID NO: 1914204 - RNA, 19 nt, Artificial Sequence
  Description of Artificial Sequence: Synthetic oligonucleotide
  Sense strand starting at position 543 of SEQ ID NO: 1879533
gcgaguuaggaugauaaag

SEQ ID NO: 1914205 - RNA, 19 nt, Artificial Sequence
  Description of Artificial Sequence: Synthetic oligonucleotide
  Antisense strand to SEQ ID NO: 1914204
cuuuaucauccuaacucgc

SEQ ID NO: 1914206 - RNA, 19 nt, Artificial Sequence
  Description of Artificial Sequence: Synthetic oligonucleotide
  Sense strand starting at position 608 of SEQ ID NO: 1879533
gugaaauauuuggaggcaa

SEQ ID NO: 1914207 - RNA, 19 nt, Artificial Sequence
  Description of Artificial Sequence: Synthetic oligonucleotide
  Antisense strand to SEQ ID NO: 1914206
uugccuccaaauauuucac

SEQ ID NO: 1914208 - RNA, 19 nt, Artificial Sequence
  Description of Artificial Sequence: Synthetic oligonucleotide
  Sense strand starting at position 638 of SEQ ID NO: 1879533
cuugguaaauuguuagaaa

SEQ ID NO: 1914209 - RNA, 19 nt, Artificial Sequence
  Description of Artificial Sequence: Synthetic oligonucleotide
  Antisense strand to SEQ ID NO: 1914208
uuucuaacaauuuaccaag

SEQ ID NO: 1914210 - RNA, 19 nt, Artificial Sequence
  Description of Artificial Sequence: Synthetic oligonucleotide
  Sense strand starting at position 646 of SEQ ID NO: 1879533
auuguuagaaaguggcaaa

SEQ ID NO: 1914211 - RNA, 19 nt, Artificial Sequence
  Description of Artificial Sequence: Synthetic oligonucleotide
  Antisense strand to SEQ ID NO: 1914210
uuugccacuuucuaacaau

SEQ ID NO: 1914212 - RNA, 19 nt, Artificial Sequence
  Description of Artificial Sequence: Synthetic oligonucleotide
  Sense strand starting at position 673 of SEQ ID NO: 1879533
gaauaauucccagguuugu

SEQ ID NO: 1914213 - RNA, 19 nt, Artificial Sequence
  Description of Artificial Sequence: Synthetic oligonucleotide
  Antisense strand to SEQ ID NO: 1914212
acaaaccugggaauuauuc

SEQ ID NO: 1914214 - RNA, 19 nt, Artificial Sequence
  Description of Artificial Sequence: Synthetic oligonucleotide
  Sense strand starting at position 845 of SEQ ID NO: 1879533
accaccuuccaaugggauu

SEQ ID NO: 1914215 - RNA, 19 nt, Artificial Sequence
  Description of Artificial Sequence: Synthetic oligonucleotide
  Antisense strand to SEQ ID NO: 1914214
aaucccauuggaagguggu

SEQ ID NO: 1914216 - RNA, 19 nt, Artificial Sequence
  Description of Artificial Sequence: Synthetic oligonucleotide
  Sense strand starting at position 856 of SEQ ID NO: 1879533
augggauuaccaugucaaa

SEQ ID NO: 1914217 - RNA, 19 nt, Artificial Sequence
  Description of Artificial Sequence: Synthetic oligonucleotide
  Antisense strand to SEQ ID NO: 1914216
uuugacaugguaaucccau

SEQ ID NO: 1914218 - RNA, 19 nt, Artificial Sequence
  Description of Artificial Sequence: Synthetic oligonucleotide
  Sense strand starting at position 1208 of SEQ ID NO: 1879533
ugacuaagaguuuguuaua

SEQ ID NO: 1914219 - RNA, 19 nt, Artificial Sequence
  Description of Artificial Sequence: Synthetic oligonucleotide
  Antisense strand to SEQ ID NO: 1914218
uauaacaaacucuuaguca

SEQ ID NO: 1914220 - RNA, 19 nt, Artificial Sequence
  Description of Artificial Sequence: Synthetic oligonucleotide
  Sense strand starting at position 1209 of SEQ ID NO: 1879533
gacuaagaguuuguuauag

SEQ ID NO: 1914221 - RNA, 19 nt, Artificial Sequence
  Description of Artificial Sequence: Synthetic oligonucleotide
  Antisense strand to SEQ ID NO: 1914220
cuauaacaaacucuuaguc

SEQ ID NO: 1914222 - RNA, 19 nt, Artificial Sequence
  Description of Artificial Sequence: Synthetic oligonucleotide
  Sense strand starting at position 1221 of SEQ ID NO: 1879533
guuauaggagcucaaucau

SEQ ID NO: 1914223 - RNA, 19 nt, Artificial Sequence
  Description of Artificial Sequence: Synthetic oligonucleotide
  Antisense strand to SEQ ID NO: 1914222
augauugagcuccuauaac

SEQ ID NO: 1914224 - RNA, 19 nt, Artificial Sequence
  Description of Artificial Sequence: Synthetic oligonucleotide
  Sense strand starting at position 1316 of SEQ ID NO: 1879533
gguucuuguccucauagag

SEQ ID NO: 1914225 - RNA, 19 nt, Artificial Sequence
  Description of Artificial Sequence: Synthetic oligonucleotide
  Antisense strand to SEQ ID NO: 1914224
cucuaugaggacaagaacc

SEQ ID NO: 1914226 - RNA, 19 nt, Artificial Sequence
  Description of Artificial Sequence: Synthetic oligonucleotide
  Sense strand starting at position 1439 of SEQ ID NO: 1879533
ggaugacagagcugucuua

SEQ ID NO: 1914227 - RNA, 19 nt, Artificial Sequence
  Description of Artificial Sequence: Synthetic oligonucleotide
  Antisense strand to SEQ ID NO: 1914226
uaagacagcucugucaucc

SEQ ID NO: 1914228 - RNA, 19 nt, Artificial Sequence
  Description of Artificial Sequence: Synthetic oligonucleotide
  Sense strand starting at position 1534 of SEQ ID NO: 1879533
cugccuacgcaugaaauga

SEQ ID NO: 1914229 - RNA, 19 nt, Artificial Sequence
  Description of Artificial Sequence: Synthetic oligonucleotide
  Antisense strand to SEQ ID NO: 1914228
ucauuucaugcguaggcag

SEQ ID NO: 1914230 - RNA, 19 nt, Artificial Sequence
  Description of Artificial Sequence: Synthetic oligonucleotide
  Sense strand starting at position 1712 of SEQ ID NO: 1879533
ggagaucugaggcggagau

SEQ ID NO: 1914231 - RNA, 19 nt, Artificial Sequence
  Description of Artificial Sequence: Synthetic oligonucleotide
  Antisense strand to SEQ ID NO: 1914230
aucuccgccucagaucucc

SEQ ID NO: 1914232 - RNA, 19 nt, Artificial Sequence
  Description of Artificial Sequence: Synthetic oligonucleotide
  Sense strand starting at position 1713 of SEQ ID NO: 1879533
gagaucugaggcggagaua

SEQ ID NO: 1914233 - RNA, 19 nt, Artificial Sequence
  Description of Artificial Sequence: Synthetic oligonucleotide
  Antisense strand to SEQ ID NO: 1914232
uaucuccgccucagaucuc

SEQ ID NO: 1914234 - RNA, 19 nt, Artificial Sequence
  Description of Artificial Sequence: Synthetic oligonucleotide
  Sense strand starting at position 1803 of SEQ ID NO: 1879533
agggacuugcuaggagaua

SEQ ID NO: 1914235 - RNA, 19 nt, Artificial Sequence
  Description of Artificial Sequence: Synthetic oligonucleotide
  Antisense strand to SEQ ID NO: 1914234
uaucuccuagcaagucccu

SEQ ID NO: 1914236 - RNA, 19 nt, Artificial Sequence
  Description of Artificial Sequence: Synthetic oligonucleotide
  Sense strand starting at position 1826 of SEQ ID NO: 1879533
ggguuuaucucaccggaga

SEQ ID NO: 1914237 - RNA, 19 nt, Artificial Sequence
  Description of Artificial Sequence: Synthetic oligonucleotide
  Antisense strand to SEQ ID NO: 1914236
ucuccggugagauaaaccc

SEQ ID NO: 1914238 - RNA, 19 nt, Artificial Sequence
  Description of Artificial Sequence: Synthetic oligonucleotide
  Sense strand starting at position 1828 of SEQ ID NO: 1879533
guuuaucucaccggagaua

SEQ ID NO: 1914239 - RNA, 19 nt, Artificial Sequence
  Description of Artificial Sequence: Synthetic oligonucleotide
  Antisense strand to SEQ ID NO: 1914238
uaucuccggugagauaaac

SEQ ID NO: 1914240 - RNA, 19 nt, Artificial Sequence
  Description of Artificial Sequence: Synthetic oligonucleotide
  Sense strand starting at position 1837 of SEQ ID NO: 1879533
accggagauaaaugugguu

SEQ ID NO: 1914241 - RNA, 19 nt, Artificial Sequence
  Description of Artificial Sequence: Synthetic oligonucleotide
  Antisense strand to SEQ ID NO: 1914240
aaccacauuuaucuccggu

SEQ ID NO: 1914242 - RNA, 19 nt, Artificial Sequence
  Description of Artificial Sequence: Synthetic oligonucleotide
  Sense strand starting at position 1842 of SEQ ID NO: 1879533
agauaaaugugguugcaca

SEQ ID NO: 1914243 - RNA, 19 nt, Artificial Sequence
  Description of Artificial Sequence: Synthetic oligonucleotide
  Antisense strand to SEQ ID NO: 1914242
ugugcaaccacauuuaucu

SEQ ID NO: 1914244 - RNA, 19 nt, Artificial Sequence
  Description of Artificial Sequence: Synthetic oligonucleotide
  Sense strand starting at position 2855 of SEQ ID NO: 1879533
cgcuacgcucaguuaacuu

SEQ ID NO: 1914245 - RNA, 19 nt, Artificial Sequence
  Description of Artificial Sequence: Synthetic oligonucleotide
  Antisense strand to SEQ ID NO: 1914244
aaguuaacugagcguagcg

SEQ ID NO: 1914246 - RNA, 19 nt, Artificial Sequence
  Description of Artificial Sequence: Synthetic oligonucleotide
  Sense strand starting at position 2941 of SEQ ID NO: 1879533
ugguucuaaguuugagaag

SEQ ID NO: 1914247 - RNA, 19 nt, Artificial Sequence
  Description of Artificial Sequence: Synthetic oligonucleotide
  Antisense strand to SEQ ID NO: 1914246
cuucucaaacuuagaacca

SEQ ID NO: 1914248 - RNA, 19 nt, Artificial Sequence
  Description of Artificial Sequence: Synthetic oligonucleotide
  Sense strand starting at position 2956 of SEQ ID NO: 1879533
gaagauaaacgguaaacgu

SEQ ID NO: 1914249 - RNA, 19 nt, Artificial Sequence
  Description of Artificial Sequence: Synthetic oligonucleotide
  Antisense strand to SEQ ID NO: 1914248
acguuuaccguuuaucuuc

SEQ ID NO: 1914250 - RNA, 19 nt, Artificial Sequence
  Description of Artificial Sequence: Synthetic oligonucleotide
  Sense strand starting at position 3231 of SEQ ID NO: 1879533
ggugaguuagcugagagga

SEQ ID NO: 1914251 - RNA, 19 nt, Artificial Sequence
  Description of Artificial Sequence: Synthetic oligonucleotide
  Antisense strand to SEQ ID NO: 1914250
uccucucagcuaacucacc

SEQ ID NO: 1914252 - RNA, 19 nt, Artificial Sequence
  Description of Artificial Sequence: Synthetic oligonucleotide
  Sense strand starting at position 3319 of SEQ ID NO: 1879533
aagugaauuugaugaauga

SEQ ID NO: 1914253 - RNA, 19 nt, Artificial Sequence
  Description of Artificial Sequence: Synthetic oligonucleotide
  Antisense strand to SEQ ID NO: 1914252
ucauucaucaaauucacuu

SEQ ID NO: 1914254 - RNA, 19 nt, Artificial Sequence
  Description of Artificial Sequence: Synthetic oligonucleotide
  Sense strand starting at position 3326 of SEQ ID NO: 1879533
uuugaugaaugauugaguu

SEQ ID NO: 1914255 - RNA, 19 nt, Artificial Sequence
  Description of Artificial Sequence: Synthetic oligonucleotide
  Antisense strand to SEQ ID NO: 1914254
aacucaaucauucaucaaa

SEQ ID NO: 1914256 - RNA, 19 nt, Artificial Sequence
  Description of Artificial Sequence: Synthetic oligonucleotide
  Sense strand starting at position 3330 of SEQ ID NO: 1879533
augaaugauugaguuaagu

SEQ ID NO: 1914257 - RNA, 19 nt, Artificial Sequence
  Description of Artificial Sequence: Synthetic oligonucleotide
  Antisense strand to SEQ ID NO: 1914256
acuuaacucaaucauucau

SEQ ID NO: 1914258 - RNA, 19 nt, Artificial Sequence
  Description of Artificial Sequence: Synthetic oligonucleotide
  Sense strand starting at position 3349 of SEQ ID NO: 1879533
gguggugguggcgaaauuu

SEQ ID NO: 1914259 - RNA, 19 nt, Artificial Sequence
  Description of Artificial Sequence: Synthetic oligonucleotide
  Antisense strand to SEQ ID NO: 1914258
aaauuucgccaccaccacc

SEQ ID NO: 1914260 - RNA, 19 nt, Artificial Sequence
  Description of Artificial Sequence: Synthetic oligonucleotide
  Sense strand starting at position 3378 of SEQ ID NO: 1879533
augcguaccuuauuuaaau

SEQ ID NO: 1914261 - RNA, 19 nt, Artificial Sequence
  Description of Artificial Sequence: Synthetic oligonucleotide
  Antisense strand to SEQ ID NO: 1914260
auuuaaauaagguacgcau

SEQ ID NO: 1914262 - RNA, 19 nt, Artificial Sequence
  Description of Artificial Sequence: Synthetic oligonucleotide
  Sense strand starting at position 3379 of SEQ ID NO: 1879533
ugcguaccuuauuuaaaua

SEQ ID NO: 1914263 - RNA, 19 nt, Artificial Sequence
  Description of Artificial Sequence: Synthetic oligonucleotide
  Antisense strand to SEQ ID NO: 1914262
uauuuaaauaagguacgca

SEQ ID NO: 1914264 - RNA, 19 nt, Artificial Sequence
  Description of Artificial Sequence: Synthetic oligonucleotide
  Sense strand starting at position 3853 of SEQ ID NO: 1879533
cuuaaagcucuguaaaugu

SEQ ID NO: 1914265 - RNA, 19 nt, Artificial Sequence
  Description of Artificial Sequence: Synthetic oligonucleotide
  Antisense strand to SEQ ID NO: 1914264
acauuuacagagcuuuaag

SEQ ID NO: 1914266 - RNA, 19 nt, Artificial Sequence
  Description of Artificial Sequence: Synthetic oligonucleotide
  Sense strand starting at position 3870 of SEQ ID NO: 1879533
guaucauauugaucuccca

SEQ ID NO: 1914267 - RNA, 19 nt, Artificial Sequence
  Description of Artificial Sequence: Synthetic oligonucleotide
  Antisense strand to SEQ ID NO: 1914266
ugggagaucaauaugauac

SEQ ID NO: 1914268 - RNA, 19 nt, Artificial Sequence
  Description of Artificial Sequence: Synthetic oligonucleotide
  Sense strand starting at position 3902 of SEQ ID NO: 1879533
cuuagaguguuucuaagau

SEQ ID NO: 1914269 - RNA, 19 nt, Artificial Sequence
  Description of Artificial Sequence: Synthetic oligonucleotide
  Antisense strand to SEQ ID NO: 1914268
aucuuagaaacacucuaag

SEQ ID NO: 1914270 - RNA, 19 nt, Artificial Sequence
  Description of Artificial Sequence: Synthetic oligonucleotide
  Sense strand starting at position 3928 of SEQ ID NO: 1879533
cccaaauuagcaggaaauu

SEQ ID NO: 1914271 - RNA, 19 nt, Artificial Sequence
  Description of Artificial Sequence: Synthetic oligonucleotide
  Antisense strand to SEQ ID NO: 1914270
aauuuccugcuaauuuggg

SEQ ID NO: 1914272 - RNA, 19 nt, Artificial Sequence
  Description of Artificial Sequence: Synthetic oligonucleotide
  Sense strand starting at position 109 of SEQ ID NO: 1879534
agggcagguuguuugauuu

SEQ ID NO: 1914273 - RNA, 19 nt, Artificial Sequence
  Description of Artificial Sequence: Synthetic oligonucleotide
  Antisense strand to SEQ ID NO: 1914272
aaaucaaacaaccugcccu

SEQ ID NO: 1914274 - RNA, 19 nt, Artificial Sequence
  Description of Artificial Sequence: Synthetic oligonucleotide
  Sense strand starting at position 415 of SEQ ID NO: 1879534
uuuagcauaugagucaaua

SEQ ID NO: 1914275 - RNA, 19 nt, Artificial Sequence
  Description of Artificial Sequence: Synthetic oligonucleotide
  Antisense strand to SEQ ID NO: 1914274
uauugacucauaugcuaaa

SEQ ID NO: 1914276 - RNA, 19 nt, Artificial Sequence
  Description of Artificial Sequence: Synthetic oligonucleotide
  Sense strand starting at position 630 of SEQ ID NO: 1879534
agcuuucugccagcaguuu

SEQ ID NO: 1914277 - RNA, 19 nt, Artificial Sequence
  Description of Artificial Sequence: Synthetic oligonucleotide
  Antisense strand to SEQ ID NO: 1914276
aaacugcuggcagaaagcu

SEQ ID NO: 1914278 - RNA, 19 nt, Artificial Sequence
  Description of Artificial Sequence: Synthetic oligonucleotide
  Sense strand starting at position 695 of SEQ ID NO: 1879534
uugggaacccuuugucaca

SEQ ID NO: 1914279 - RNA, 19 nt, Artificial Sequence
  Description of Artificial Sequence: Synthetic oligonucleotide
  Antisense strand to SEQ ID NO: 1914278
ugugacaaaggguucccaa

SEQ ID NO: 1914280 - RNA, 19 nt, Artificial Sequence
  Description of Artificial Sequence: Synthetic oligonucleotide
  Sense strand starting at position 696 of SEQ ID NO: 1879534
ugggaacccuuugucacau

SEQ ID NO: 1914281 - RNA, 19 nt, Artificial Sequence
  Description of Artificial Sequence: Synthetic oligonucleotide
  Antisense strand to SEQ ID NO: 1914280
augugacaaaggguuccca

SEQ ID NO: 1914282 - RNA, 19 nt, Artificial Sequence
  Description of Artificial Sequence: Synthetic oligonucleotide
  Sense strand starting at position 697 of SEQ ID NO: 1879534
gggaacccuuugucacauu

SEQ ID NO: 1914283 - RNA, 19 nt, Artificial Sequence
  Description of Artificial Sequence: Synthetic oligonucleotide
  Antisense strand to SEQ ID NO: 1914282
aaugugacaaaggguuccc

SEQ ID NO: 1914284 - RNA, 19 nt, Artificial Sequence
  Description of Artificial Sequence: Synthetic oligonucleotide
  Sense strand starting at position 868 of SEQ ID NO: 1879534
gcagaucaccgcuauaaga

SEQ ID NO: 1914285 - RNA, 19 nt, Artificial Sequence
  Description of Artificial Sequence: Synthetic oligonucleotide
  Antisense strand to SEQ ID NO: 1914284
ucuuauagcggugaucugc

SEQ ID NO: 1914286 - RNA, 19 nt, Artificial Sequence
  Description of Artificial Sequence: Synthetic oligonucleotide
  Sense strand starting at position 870 of SEQ ID NO: 1879534
agaucaccgcuauaagagu

SEQ ID NO: 1914287 - RNA, 19 nt, Artificial Sequence
  Description of Artificial Sequence: Synthetic oligonucleotide
  Antisense strand to SEQ ID NO: 1914286
acucuuauagcggugaucu

SEQ ID NO: 1914288 - RNA, 19 nt, Artificial Sequence
  Description of Artificial Sequence: Synthetic oligonucleotide
  Sense strand starting at position 1035 of SEQ ID NO: 1879534
gcagcacaagagcaauaau

SEQ ID NO: 1914289 - RNA, 19 nt, Artificial Sequence
  Description of Artificial Sequence: Synthetic oligonucleotide
  Antisense strand to SEQ ID NO: 1914288
auuauugcucuugugcugc

SEQ ID NO: 1914290 - RNA, 19 nt, Artificial Sequence
  Description of Artificial Sequence: Synthetic oligonucleotide
  Sense strand starting at position 1124 of SEQ ID NO: 1879534
gcgcuaucgaucgccagaa

SEQ ID NO: 1914291 - RNA, 19 nt, Artificial Sequence
  Description of Artificial Sequence: Synthetic oligonucleotide
  Antisense strand to SEQ ID NO: 1914290
uucuggcgaucgauagcgc

SEQ ID NO: 1914292 - RNA, 19 nt, Artificial Sequence
  Description of Artificial Sequence: Synthetic oligonucleotide
  Sense strand starting at position 1260 of SEQ ID NO: 1879534
auuuguaauugggagaaac

SEQ ID NO: 1914293 - RNA, 19 nt, Artificial Sequence
  Description of Artificial Sequence: Synthetic oligonucleotide
  Antisense strand to SEQ ID NO: 1914292
guuucucccaauuacaaau

SEQ ID NO: 1914294 - RNA, 19 nt, Artificial Sequence
  Description of Artificial Sequence: Synthetic oligonucleotide
  Sense strand starting at position 1271 of SEQ ID NO: 1879534
ggagaaacauaacagacua

SEQ ID NO: 1914295 - RNA, 19 nt, Artificial Sequence
  Description of Artificial Sequence: Synthetic oligonucleotide
  Antisense strand to SEQ ID NO: 1914294
uagucuguuauguuucucc

SEQ ID NO: 1914296 - RNA, 19 nt, Artificial Sequence
  Description of Artificial Sequence: Synthetic oligonucleotide
  Sense strand starting at position 1457 of SEQ ID NO: 1879534
gaaggaaauucccucuggu

SEQ ID NO: 1914297 - RNA, 19 nt, Artificial Sequence
  Description of Artificial Sequence: Synthetic oligonucleotide
  Antisense strand to SEQ ID NO: 1914296
accagagggaauuuccuuc

SEQ ID NO: 1914298 - RNA, 19 nt, Artificial Sequence
  Description of Artificial Sequence: Synthetic oligonucleotide
  Sense strand starting at position 1460 of SEQ ID NO: 1879534
ggaaauucccucuggucag

SEQ ID NO: 1914299 - RNA, 19 nt, Artificial Sequence
  Description of Artificial Sequence: Synthetic oligonucleotide
  Antisense strand to SEQ ID NO: 1914298
cugaccagagggaauuucc

SEQ ID NO: 1914300 - RNA, 19 nt, Artificial Sequence
  Description of Artificial Sequence: Synthetic oligonucleotide
  Sense strand starting at position 1664 of SEQ ID NO: 1879534
cagugacagccuuaaaguu

SEQ ID NO: 1914301 - RNA, 19 nt, Artificial Sequence
  Description of Artificial Sequence: Synthetic oligonucleotide
  Antisense strand to SEQ ID NO: 1914300
aacuuuaaggcugucacug

SEQ ID NO: 1914302 - RNA, 19 nt, Artificial Sequence
  Description of Artificial Sequence: Synthetic oligonucleotide
  Sense strand starting at position 1677 of SEQ ID NO: 1879534
aaaguugugggagacguau

SEQ ID NO: 1914303 - RNA, 19 nt, Artificial Sequence
  Description of Artificial Sequence: Synthetic oligonucleotide
  Antisense strand to SEQ ID NO: 1914302
auacgucucccacaacuuu

SEQ ID NO: 1914304 - RNA, 19 nt, Artificial Sequence
  Description of Artificial Sequence: Synthetic oligonucleotide
  Sense strand starting at position 1688 of SEQ ID NO: 1879534
agacguaugagugauccau

SEQ ID NO: 1914305 - RNA, 19 nt, Artificial Sequence
  Description of Artificial Sequence: Synthetic oligonucleotide
  Antisense strand to SEQ ID NO: 1914304
auggaucacucauacgucu

SEQ ID NO: 1914306 - RNA, 19 nt, Artificial Sequence
  Description of Artificial Sequence: Synthetic oligonucleotide
  Sense strand starting at position 1692 of SEQ ID NO: 1879534
guaugagugauccauagca

SEQ ID NO: 1914307 - RNA, 19 nt, Artificial Sequence
  Description of Artificial Sequence: Synthetic oligonucleotide
  Antisense strand to SEQ ID NO: 1914306
ugcuauggaucacucauac

SEQ ID NO: 1914308 - RNA, 19 nt, Artificial Sequence
  Description of Artificial Sequence: Synthetic oligonucleotide
  Sense strand starting at position 1694 of SEQ ID NO: 1879534
augagugauccauagcauu

SEQ ID NO: 1914309 - RNA, 19 nt, Artificial Sequence
  Description of Artificial Sequence: Synthetic oligonucleotide
  Antisense strand to SEQ ID NO: 1914308
aaugcuauggaucacucau

SEQ ID NO: 1914310 - RNA, 19 nt, Artificial Sequence
  Description of Artificial Sequence: Synthetic oligonucleotide
  Sense strand starting at position 1700 of SEQ ID NO: 1879534
gauccauagcauugaugag

SEQ ID NO: 1914311 - RNA, 19 nt, Artificial Sequence
  Description of Artificial Sequence: Synthetic oligonucleotide
  Antisense strand to SEQ ID NO: 1914310
cucaucaaugcuauggauc

SEQ ID NO: 1914312 - RNA, 19 nt, Artificial Sequence
  Description of Artificial Sequence: Synthetic oligonucleotide
  Sense strand starting at position 1709 of SEQ ID NO: 1879534
cauugaugagauuggcaga

SEQ ID NO: 1914313 - RNA, 19 nt, Artificial Sequence
  Description of Artificial Sequence: Synthetic oligonucleotide
  Antisense strand to SEQ ID NO: 1914312
ucugccaaucucaucaaug

SEQ ID NO: 1914314 - RNA, 19 nt, Artificial Sequence
  Description of Artificial Sequence: Synthetic oligonucleotide
  Sense strand starting at position 1740 of SEQ ID NO: 1879534
caugaaguaccuggaucuu

SEQ ID NO: 1914315 - RNA, 19 nt, Artificial Sequence
  Description of Artificial Sequence: Synthetic oligonucleotide
  Antisense strand to SEQ ID NO: 1914314
aagauccagguacuucaug

SEQ ID NO: 1914316 - RNA, 19 nt, Artificial Sequence
  Description of Artificial Sequence: Synthetic oligonucleotide
  Sense strand starting at position 2027 of SEQ ID NO: 1879534
agggacuggccuugcaaga

SEQ ID NO: 1914317 - RNA, 19 nt, Artificial Sequence
  Description of Artificial Sequence: Synthetic oligonucleotide
  Antisense strand to SEQ ID NO: 1914316
ucuugcaaggccagucccu

SEQ ID NO: 1914318 - RNA, 19 nt, Artificial Sequence
  Description of Artificial Sequence: Synthetic oligonucleotide
  Sense strand starting at position 2186 of SEQ ID NO: 1879534
uuugaugaugcugaggauu

SEQ ID NO: 1914319 - RNA, 19 nt, Artificial Sequence
  Description of Artificial Sequence: Synthetic oligonucleotide
  Antisense strand to SEQ ID NO: 1914318
aauccucagcaucaucaaa

SEQ ID NO: 1914320 - RNA, 19 nt, Artificial Sequence
  Description of Artificial Sequence: Synthetic oligonucleotide
  Sense strand starting at position 2198 of SEQ ID NO: 1879534
gaggauuaauuggucucca

SEQ ID NO: 1914321 - RNA, 19 nt, Artificial Sequence
  Description of Artificial Sequence: Synthetic oligonucleotide
  Antisense strand to SEQ ID NO: 1914320
uggagaccaauuaauccuc

SEQ ID NO: 1914322 - RNA, 19 nt, Artificial Sequence
  Description of Artificial Sequence: Synthetic oligonucleotide
  Sense strand starting at position 2327 of SEQ ID NO: 1879534
agugaagaagcuggaauua

SEQ ID NO: 1914323 - RNA, 19 nt, Artificial Sequence
  Description of Artificial Sequence: Synthetic oligonucleotide
  Antisense strand to SEQ ID NO: 1914322
uaauuccagcuucuucacu

SEQ ID NO: 1914324 - RNA, 19 nt, Artificial Sequence
  Description of Artificial Sequence: Synthetic oligonucleotide
  Sense strand starting at position 2337 of SEQ ID NO: 1879534
cuggaauuagccugaagau

SEQ ID NO: 1914325 - RNA, 19 nt, Artificial Sequence
  Description of Artificial Sequence: Synthetic oligonucleotide
  Antisense strand to SEQ ID NO: 1914324
aucuucaggcuaauuccag

SEQ ID NO: 1914326 - RNA, 19 nt, Artificial Sequence
  Description of Artificial Sequence: Synthetic oligonucleotide
  Sense strand starting at position 2543 of SEQ ID NO: 1879534
caccuuuaccuaggugaga

SEQ ID NO: 1914327 - RNA, 19 nt, Artificial Sequence
  Description of Artificial Sequence: Synthetic oligonucleotide
  Antisense strand to SEQ ID NO: 1914326
ucucaccuagguaaaggug

SEQ ID NO: 1914328 - RNA, 19 nt, Artificial Sequence
  Description of Artificial Sequence: Synthetic oligonucleotide
  Sense strand starting at position 2562 of SEQ ID NO: 1879534
gcaccauugcacuagaacu

SEQ ID NO: 1914329 - RNA, 19 nt, Artificial Sequence
  Description of Artificial Sequence: Synthetic oligonucleotide
  Antisense strand to SEQ ID NO: 1914328
aguucuagugcaauggugc

SEQ ID NO: 1914330 - RNA, 19 nt, Artificial Sequence
  Description of Artificial Sequence: Synthetic oligonucleotide
  Sense strand starting at position 2710 of SEQ ID NO: 1879534
agauaugaggguugccaca

SEQ ID NO: 1914331 - RNA, 19 nt, Artificial Sequence
  Description of Artificial Sequence: Synthetic oligonucleotide
  Antisense strand to SEQ ID NO: 1914330
uguggcaacccucauaucu

SEQ ID NO: 1914332 - RNA, 19 nt, Artificial Sequence
  Description of Artificial Sequence: Synthetic oligonucleotide
  Sense strand starting at position 2788 of SEQ ID NO: 1879534
gggccuuucccagggagaa

SEQ ID NO: 1914333 - RNA, 19 nt, Artificial Sequence
  Description of Artificial Sequence: Synthetic oligonucleotide
  Antisense strand to SEQ ID NO: 1914332
uucucccugggaaaggccc

SEQ ID NO: 1914334 - RNA, 19 nt, Artificial Sequence
  Description of Artificial Sequence: Synthetic oligonucleotide
  Sense strand starting at position 2789 of SEQ ID NO: 1879534
ggccuuucccagggagaau

SEQ ID NO: 1914335 - RNA, 19 nt, Artificial Sequence
  Description of Artificial Sequence: Synthetic oligonucleotide
  Antisense strand to SEQ ID NO: 1914334
auucucccugggaaaggcc

SEQ ID NO: 1914336 - RNA, 19 nt, Artificial Sequence
  Description of Artificial Sequence: Synthetic oligonucleotide
  Sense strand starting at position 3093 of SEQ ID NO: 1879534
guuucuuagcuacaaagua

SEQ ID NO: 1914337 - RNA, 19 nt, Artificial Sequence
  Description of Artificial Sequence: Synthetic oligonucleotide
  Antisense strand to SEQ ID NO: 1914336
uacuuuguagcuaagaaac

SEQ ID NO: 1914338 - RNA, 19 nt, Artificial Sequence
  Description of Artificial Sequence: Synthetic oligonucleotide
  Sense strand starting at position 3137 of SEQ ID NO: 1879534
gaauguaaagccuauagca

SEQ ID NO: 1914339 - RNA, 19 nt, Artificial Sequence
  Description of Artificial Sequence: Synthetic oligonucleotide
  Antisense strand to SEQ ID NO: 1914338
ugcuauaggcuuuacauuc

SEQ ID NO: 1914340 - RNA, 19 nt, Artificial Sequence
  Description of Artificial Sequence: Synthetic oligonucleotide
  Sense strand starting at position 3228 of SEQ ID NO: 1879534
ggucuucucugaccucaaa

SEQ ID NO: 1914341 - RNA, 19 nt, Artificial Sequence
  Description of Artificial Sequence: Synthetic oligonucleotide
  Antisense strand to SEQ ID NO: 1914340
uuugaggucagagaagacc

SEQ ID NO: 1914342 - RNA, 19 nt, Artificial Sequence
  Description of Artificial Sequence: Synthetic oligonucleotide
  Sense strand starting at position 3380 of SEQ ID NO: 1879534
cuaacuugaguuggguaga

SEQ ID NO: 1914343 - RNA, 19 nt, Artificial Sequence
  Description of Artificial Sequence: Synthetic oligonucleotide
  Antisense strand to SEQ ID NO: 1914342
ucuacccaacucaaguuag

SEQ ID NO: 1914344 - RNA, 19 nt, Artificial Sequence
  Description of Artificial Sequence: Synthetic oligonucleotide
  Sense strand starting at position 3383 of SEQ ID NO: 1879534
acuugaguuggguagaugu

SEQ ID NO: 1914345 - RNA, 19 nt, Artificial Sequence
  Description of Artificial Sequence: Synthetic oligonucleotide
  Antisense strand to SEQ ID NO: 1914344
acaucuacccaacucaagu

SEQ ID NO: 1914346 - RNA, 19 nt, Artificial Sequence
  Description of Artificial Sequence: Synthetic oligonucleotide
  Sense strand starting at position 3426 of SEQ ID NO: 1879534
aucugaguugguggaauaa

SEQ ID NO: 1914347 - RNA, 19 nt, Artificial Sequence
  Description of Artificial Sequence: Synthetic oligonucleotide
  Antisense strand to SEQ ID NO: 1914346
uuauuccaccaacucagau

SEQ ID NO: 1914348 - RNA, 19 nt, Artificial Sequence
  Description of Artificial Sequence: Synthetic oligonucleotide
  Sense strand starting at position 3778 of SEQ ID NO: 1879534
cgaggauggucuucugaaa

SEQ ID NO: 1914349 - RNA, 19 nt, Artificial Sequence
  Description of Artificial Sequence: Synthetic oligonucleotide
  Antisense strand to SEQ ID NO: 1914348
uuucagaagaccauccucg

SEQ ID NO: 1914350 - RNA, 19 nt, Artificial Sequence
  Description of Artificial Sequence: Synthetic oligonucleotide
  Sense strand starting at position 3961 of SEQ ID NO: 1879534
gacagaaaggagugucuga

SEQ ID NO: 1914351 - RNA, 19 nt, Artificial Sequence
  Description of Artificial Sequence: Synthetic oligonucleotide
  Antisense strand to SEQ ID NO: 1914350
ucagacacuccuuucuguc

SEQ ID NO: 1914352 - RNA, 19 nt, Artificial Sequence
  Description of Artificial Sequence: Synthetic oligonucleotide
  Sense strand starting at position 178 of SEQ ID NO: 1879535
gcaagugcauuucugcaaa

SEQ ID NO: 1914353 - RNA, 19 nt, Artificial Sequence
  Description of Artificial Sequence: Synthetic oligonucleotide
  Antisense strand to SEQ ID NO: 1914352
uuugcagaaaugcacuugc

SEQ ID NO: 1914354 - RNA, 19 nt, Artificial Sequence
  Description of Artificial Sequence: Synthetic oligonucleotide
  Sense strand starting at position 332 of SEQ ID NO: 1879535
ugaagauaagucugcuaag

SEQ ID NO: 1914355 - RNA, 19 nt, Artificial Sequence
  Description of Artificial Sequence: Synthetic oligonucleotide
  Antisense strand to SEQ ID NO: 1914354
cuuagcagacuuaucuuca

SEQ ID NO: 1914356 - RNA, 19 nt, Artificial Sequence
  Description of Artificial Sequence: Synthetic oligonucleotide
  Sense strand starting at position 333 of SEQ ID NO: 1879535
gaagauaagucugcuaagc

SEQ ID NO: 1914357 - RNA, 19 nt, Artificial Sequence
  Description of Artificial Sequence: Synthetic oligonucleotide
  Antisense strand to SEQ ID NO: 1914356
gcuuagcagacuuaucuuc

SEQ ID NO: 1914358 - RNA, 19 nt, Artificial Sequence
  Description of Artificial Sequence: Synthetic oligonucleotide
  Sense strand starting at position 482 of SEQ ID NO: 1879535
uugggcaauuacuuauuaa

SEQ ID NO: 1914359 - RNA, 19 nt, Artificial Sequence
  Description of Artificial Sequence: Synthetic oligonucleotide
  Antisense strand to SEQ ID NO: 1914358
uuaauaaguaauugcccaa

SEQ ID NO: 1914360 - RNA, 19 nt, Artificial Sequence
  Description of Artificial Sequence: Synthetic oligonucleotide
  Sense strand starting at position 485 of SEQ ID NO: 1879535
ggcaauuacuuauuaaaug

SEQ ID NO: 1914361 - RNA, 19 nt, Artificial Sequence
  Description of Artificial Sequence: Synthetic oligonucleotide
  Antisense strand to SEQ ID NO: 1914360
cauuuaauaaguaauugcc

SEQ ID NO: 1914362 - RNA, 19 nt, Artificial Sequence
  Description of Artificial Sequence: Synthetic oligonucleotide
  Sense strand starting at position 787 of SEQ ID NO: 1879535
ugccuagaguacuccauaa

SEQ ID NO: 1914363 - RNA, 19 nt, Artificial Sequence
  Description of Artificial Sequence: Synthetic oligonucleotide
  Antisense strand to SEQ ID NO: 1914362
uuauggaguacucuaggca

SEQ ID NO: 1914364 - RNA, 19 nt, Artificial Sequence
  Description of Artificial Sequence: Synthetic oligonucleotide
  Sense strand starting at position 804 of SEQ ID NO: 1879535
aaauuuguuuguccuccga

SEQ ID NO: 1914365 - RNA, 19 nt, Artificial Sequence
  Description of Artificial Sequence: Synthetic oligonucleotide
  Antisense strand to SEQ ID NO: 1914364
ucggaggacaaacaaauuu

SEQ ID NO: 1914366 - RNA, 19 nt, Artificial Sequence
  Description of Artificial Sequence: Synthetic oligonucleotide
  Sense strand starting at position 806 of SEQ ID NO: 1879535
auuuguuuguccuccgauc

SEQ ID NO: 1914367 - RNA, 19 nt, Artificial Sequence
  Description of Artificial Sequence: Synthetic oligonucleotide
  Antisense strand to SEQ ID NO: 1914366
gaucggaggacaaacaaau

SEQ ID NO: 1914368 - RNA, 19 nt, Artificial Sequence
  Description of Artificial Sequence: Synthetic oligonucleotide
  Sense strand starting at position 1992 of SEQ ID NO: 1879535
ugacacagauagucucuaa

SEQ ID NO: 1914369 - RNA, 19 nt, Artificial Sequence
  Description of Artificial Sequence: Synthetic oligonucleotide
  Antisense strand to SEQ ID NO: 1914368
uuagagacuaucuguguca

SEQ ID NO: 1914370 - RNA, 19 nt, Artificial Sequence
  Description of Artificial Sequence: Synthetic oligonucleotide
  Sense strand starting at position 1995 of SEQ ID NO: 1879535
cacagauagucucuaaggu

SEQ ID NO: 1914371 - RNA, 19 nt, Artificial Sequence
  Description of Artificial Sequence: Synthetic oligonucleotide
  Antisense strand to SEQ ID NO: 1914370
accuuagagacuaucugug

SEQ ID NO: 1914372 - RNA, 19 nt, Artificial Sequence
  Description of Artificial Sequence: Synthetic oligonucleotide
  Sense strand starting at position 2161 of SEQ ID NO: 1879535
cccgacuacuuacugaaau

SEQ ID NO: 1914373 - RNA, 19 nt, Artificial Sequence
  Description of Artificial Sequence: Synthetic oligonucleotide
  Antisense strand to SEQ ID NO: 1914372
auuucaguaaguagucggg

SEQ ID NO: 1914374 - RNA, 19 nt, Artificial Sequence
  Description of Artificial Sequence: Synthetic oligonucleotide
  Sense strand starting at position 2188 of SEQ ID NO: 1879535
aaguauucucgugaaagua

SEQ ID NO: 1914375 - RNA, 19 nt, Artificial Sequence
  Description of Artificial Sequence: Synthetic oligonucleotide
  Antisense strand to SEQ ID NO: 1914374
uacuuucacgagaauacuu

SEQ ID NO: 1914376 - RNA, 19 nt, Artificial Sequence
  Description of Artificial Sequence: Synthetic oligonucleotide
  Sense strand starting at position 2211 of SEQ ID NO: 1879535
guauauguaguugauaucu

SEQ ID NO: 1914377 - RNA, 19 nt, Artificial Sequence
  Description of Artificial Sequence: Synthetic oligonucleotide
  Antisense strand to SEQ ID NO: 1914376
agauaucaacuacauauac

SEQ ID NO: 1914378 - RNA, 19 nt, Artificial Sequence
  Description of Artificial Sequence: Synthetic oligonucleotide
  Sense strand starting at position 2217 of SEQ ID NO: 1879535
guaguugauaucuauguuc

SEQ ID NO: 1914379 - RNA, 19 nt, Artificial Sequence
  Description of Artificial Sequence: Synthetic oligonucleotide
  Antisense strand to SEQ ID NO: 1914378
gaacauagauaucaacuac

SEQ ID NO: 1914380 - RNA, 19 nt, Artificial Sequence
  Description of Artificial Sequence: Synthetic oligonucleotide
  Sense strand starting at position 2274 of SEQ ID NO: 1879535
cguuuaucaguugacaaug

SEQ ID NO: 1914381 - RNA, 19 nt, Artificial Sequence
  Description of Artificial Sequence: Synthetic oligonucleotide
  Antisense strand to SEQ ID NO: 1914380
cauugucaacugauaaacg

SEQ ID NO: 1914382 - RNA, 19 nt, Artificial Sequence
  Description of Artificial Sequence: Synthetic oligonucleotide
  Sense strand starting at position 2279 of SEQ ID NO: 1879535
aucaguugacaauguuaag

SEQ ID NO: 1914383 - RNA, 19 nt, Artificial Sequence
  Description of Artificial Sequence: Synthetic oligonucleotide
  Antisense strand to SEQ ID NO: 1914382
cuuaacauugucaacugau

SEQ ID NO: 1914384 - RNA, 19 nt, Artificial Sequence
  Description of Artificial Sequence: Synthetic oligonucleotide
  Sense strand starting at position 2347 of SEQ ID NO: 1879535
ugaaacuucuacuugaguu

SEQ ID NO: 1914385 - RNA, 19 nt, Artificial Sequence
  Description of Artificial Sequence: Synthetic oligonucleotide
  Antisense strand to SEQ ID NO: 1914384
aacucaaguagaaguuuca

SEQ ID NO: 1914386 - RNA, 19 nt, Artificial Sequence
  Description of Artificial Sequence: Synthetic oligonucleotide
  Sense strand starting at position 2412 of SEQ ID NO: 1879535
accauugcaugagcuaauu

SEQ ID NO: 1914387 - RNA, 19 nt, Artificial Sequence
  Description of Artificial Sequence: Synthetic oligonucleotide
  Antisense strand to SEQ ID NO: 1914386
aauuagcucaugcaauggu

SEQ ID NO: 1914388 - RNA, 19 nt, Artificial Sequence
  Description of Artificial Sequence: Synthetic oligonucleotide
  Sense strand starting at position 2493 of SEQ ID NO: 1879535
gguauauaugaugguauau

SEQ ID NO: 1914389 - RNA, 19 nt, Artificial Sequence
  Description of Artificial Sequence: Synthetic oligonucleotide
  Antisense strand to SEQ ID NO: 1914388
auauaccaucauauauacc

SEQ ID NO: 1914390 - RNA, 19 nt, Artificial Sequence
  Description of Artificial Sequence: Synthetic oligonucleotide
  Sense strand starting at position 2657 of SEQ ID NO: 1879535
cagagugcugaguauuauu

SEQ ID NO: 1914391 - RNA, 19 nt, Artificial Sequence
  Description of Artificial Sequence: Synthetic oligonucleotide
  Antisense strand to SEQ ID NO: 1914390
aauaauacucagcacucug

SEQ ID NO: 1914392 - RNA, 19 nt, Artificial Sequence
  Description of Artificial Sequence: Synthetic oligonucleotide
  Sense strand starting at position 2778 of SEQ ID NO: 1879535
aguuuaaggugguugaaag

SEQ ID NO: 1914393 - RNA, 19 nt, Artificial Sequence
  Description of Artificial Sequence: Synthetic oligonucleotide
  Antisense strand to SEQ ID NO: 1914392
cuuucaaccaccuuaaacu

SEQ ID NO: 1914394 - RNA, 19 nt, Artificial Sequence
  Description of Artificial Sequence: Synthetic oligonucleotide
  Sense strand starting at position 2785 of SEQ ID NO: 1879535
ggugguugaaaguaugguu

SEQ ID NO: 1914395 - RNA, 19 nt, Artificial Sequence
  Description of Artificial Sequence: Synthetic oligonucleotide
  Antisense strand to SEQ ID NO: 1914394
aaccauacuuucaaccacc

SEQ ID NO: 1914396 - RNA, 19 nt, Artificial Sequence
  Description of Artificial Sequence: Synthetic oligonucleotide
  Sense strand starting at position 2790 of SEQ ID NO: 1879535
uugaaaguaugguuuggau

SEQ ID NO: 1914397 - RNA, 19 nt, Artificial Sequence
  Description of Artificial Sequence: Synthetic oligonucleotide
  Antisense strand to SEQ ID NO: 1914396
auccaaaccauacuuucaa

SEQ ID NO: 1914398 - RNA, 19 nt, Artificial Sequence
  Description of Artificial Sequence: Synthetic oligonucleotide
  Sense strand starting at position 2802 of SEQ ID NO: 1879535
uuuggaucacuaugucuuu

SEQ ID NO: 1914399 - RNA, 19 nt, Artificial Sequence
  Description of Artificial Sequence: Synthetic oligonucleotide
  Antisense strand to SEQ ID NO: 1914398
aaagacauagugauccaaa

SEQ ID NO: 1914400 - RNA, 19 nt, Artificial Sequence
  Description of Artificial Sequence: Synthetic oligonucleotide
  Sense strand starting at position 2803 of SEQ ID NO: 1879535
uuggaucacuaugucuuua

SEQ ID NO: 1914401 - RNA, 19 nt, Artificial Sequence
  Description of Artificial Sequence: Synthetic oligonucleotide
  Antisense strand to SEQ ID NO: 1914400
uaaagacauagugauccaa

SEQ ID NO: 1914402 - RNA, 19 nt, Artificial Sequence
  Description of Artificial Sequence: Synthetic oligonucleotide
  Sense strand starting at position 2805 of SEQ ID NO: 1879535
ggaucacuaugucuuuacu

SEQ ID NO: 1914403 - RNA, 19 nt, Artificial Sequence
  Description of Artificial Sequence: Synthetic oligonucleotide
  Antisense strand to SEQ ID NO: 1914402
aguaaagacauagugaucc

SEQ ID NO: 1914404 - RNA, 19 nt, Artificial Sequence
  Description of Artificial Sequence: Synthetic oligonucleotide
  Sense strand starting at position 2807 of SEQ ID NO: 1879535
aucacuaugucuuuacuga

SEQ ID NO: 1914405 - RNA, 19 nt, Artificial Sequence
  Description of Artificial Sequence: Synthetic oligonucleotide
  Antisense strand to SEQ ID NO: 1914404
ucaguaaagacauagugau

SEQ ID NO: 1914406 - RNA, 19 nt, Artificial Sequence
  Description of Artificial Sequence: Synthetic oligonucleotide
  Sense strand starting at position 2808 of SEQ ID NO: 1879535
ucacuaugucuuuacugau

SEQ ID NO: 1914407 - RNA, 19 nt, Artificial Sequence
  Description of Artificial Sequence: Synthetic oligonucleotide
  Antisense strand to SEQ ID NO: 1914406
aucaguaaagacauaguga

SEQ ID NO: 1914408 - RNA, 19 nt, Artificial Sequence
  Description of Artificial Sequence: Synthetic oligonucleotide
  Sense strand starting at position 2852 of SEQ ID NO: 1879535
uuggaagaugggugcuaaa

SEQ ID NO: 1914409 - RNA, 19 nt, Artificial Sequence
  Description of Artificial Sequence: Synthetic oligonucleotide
  Antisense strand to SEQ ID NO: 1914408
uuuagcacccaucuuccaa

SEQ ID NO: 1914410 - RNA, 19 nt, Artificial Sequence
  Description of Artificial Sequence: Synthetic oligonucleotide
  Sense strand starting at position 2959 of SEQ ID NO: 1879535
ccacauugaugauuguuau

SEQ ID NO: 1914411 - RNA, 19 nt, Artificial Sequence
  Description of Artificial Sequence: Synthetic oligonucleotide
  Antisense strand to SEQ ID NO: 1914410
auaacaaucaucaaugugg

SEQ ID NO: 1914412 - RNA, 19 nt, Artificial Sequence
  Description of Artificial Sequence: Synthetic oligonucleotide
  Sense strand starting at position 2974 of SEQ ID NO: 1879535
uuaugucuucuugauaaga

SEQ ID NO: 1914413 - RNA, 19 nt, Artificial Sequence
  Description of Artificial Sequence: Synthetic oligonucleotide
  Antisense strand to SEQ ID NO: 1914412
ucuuaucaagaagacauaa

SEQ ID NO: 1914414 - RNA, 19 nt, Artificial Sequence
  Description of Artificial Sequence: Synthetic oligonucleotide
  Sense strand starting at position 3306 of SEQ ID NO: 1879535
cuuuguuguuccuuuauuu

SEQ ID NO: 1914415 - RNA, 19 nt, Artificial Sequence
  Description of Artificial Sequence: Synthetic oligonucleotide
  Antisense strand to SEQ ID NO: 1914414
aaauaaaggaacaacaaag

SEQ ID NO: 1914416 - RNA, 19 nt, Artificial Sequence
  Description of Artificial Sequence: Synthetic oligonucleotide
  Sense strand starting at position 3402 of SEQ ID NO: 1879535
gguuauucuaaggacugca

SEQ ID NO: 1914417 - RNA, 19 nt, Artificial Sequence
  Description of Artificial Sequence: Synthetic oligonucleotide
  Antisense strand to SEQ ID NO: 1914416
ugcaguccuuagaauaacc

SEQ ID NO: 1914418 - RNA, 19 nt, Artificial Sequence
  Description of Artificial Sequence: Synthetic oligonucleotide
  Sense strand starting at position 3481 of SEQ ID NO: 1879535
auaugaaacuuuguaagug

SEQ ID NO: 1914419 - RNA, 19 nt, Artificial Sequence
  Description of Artificial Sequence: Synthetic oligonucleotide
  Antisense strand to SEQ ID NO: 1914418
cacuuacaaaguuucauau

SEQ ID NO: 1914420 - RNA, 19 nt, Artificial Sequence
  Description of Artificial Sequence: Synthetic oligonucleotide
  Sense strand starting at position 3485 of SEQ ID NO: 1879535
gaaacuuuguaaguguaua

SEQ ID NO: 1914421 - RNA, 19 nt, Artificial Sequence
  Description of Artificial Sequence: Synthetic oligonucleotide
  Antisense strand to SEQ ID NO: 1914420
uauacacuuacaaaguuuc

SEQ ID NO: 1914422 - RNA, 19 nt, Artificial Sequence
  Description of Artificial Sequence: Synthetic oligonucleotide
  Sense strand starting at position 3548 of SEQ ID NO: 1879535
aguugucauauguauuaag

SEQ ID NO: 1914423 - RNA, 19 nt, Artificial Sequence
  Description of Artificial Sequence: Synthetic oligonucleotide
  Antisense strand to SEQ ID NO: 1914422
cuuaauacauaugacaacu

SEQ ID NO: 1914424 - RNA, 19 nt, Artificial Sequence
  Description of Artificial Sequence: Synthetic oligonucleotide
  Sense strand starting at position 3559 of SEQ ID NO: 1879535
guauuaaguccacauagac

SEQ ID NO: 1914425 - RNA, 19 nt, Artificial Sequence
  Description of Artificial Sequence: Synthetic oligonucleotide
  Antisense strand to SEQ ID NO: 1914424
gucuauguggacuuaauac

SEQ ID NO: 1914426 - RNA, 19 nt, Artificial Sequence
  Description of Artificial Sequence: Synthetic oligonucleotide
  Sense strand starting at position 3699 of SEQ ID NO: 1879535
cuaagaaucugagcucuua

SEQ ID NO: 1914427 - RNA, 19 nt, Artificial Sequence
  Description of Artificial Sequence: Synthetic oligonucleotide
  Antisense strand to SEQ ID NO: 1914426
uaagagcucagauucuuag

SEQ ID NO: 1914428 - RNA, 19 nt, Artificial Sequence
  Description of Artificial Sequence: Synthetic oligonucleotide
  Sense strand starting at position 3754 of SEQ ID NO: 1879535
uuauuuguagugugaaucu

SEQ ID NO: 1914429 - RNA, 19 nt, Artificial Sequence
  Description of Artificial Sequence: Synthetic oligonucleotide
  Antisense strand to SEQ ID NO: 1914428
agauucacacuacaaauaa

SEQ ID NO: 1914430 - RNA, 19 nt, Artificial Sequence
  Description of Artificial Sequence: Synthetic oligonucleotide
  Sense strand starting at position 3767 of SEQ ID NO: 1879535
gaaucugcuggugaugagu

SEQ ID NO: 1914431 - RNA, 19 nt, Artificial Sequence
  Description of Artificial Sequence: Synthetic oligonucleotide
  Antisense strand to SEQ ID NO: 1914430
acucaucaccagcagauuc

SEQ ID NO: 1914432 - RNA, 19 nt, Artificial Sequence
  Description of Artificial Sequence: Synthetic oligonucleotide
  Sense strand starting at position 23 of SEQ ID NO: 1879536
uuuacuaaagcguaaauca

SEQ ID NO: 1914433 - RNA, 19 nt, Artificial Sequence
  Description of Artificial Sequence: Synthetic oligonucleotide
  Antisense strand to SEQ ID NO: 1914432
ugauuuacgcuuuaguaaa

SEQ ID NO: 1914434 - RNA, 19 nt, Artificial Sequence
  Description of Artificial Sequence: Synthetic oligonucleotide
  Sense strand starting at position 30 of SEQ ID NO: 1879536
aagcguaaaucauugguaa

SEQ ID NO: 1914435 - RNA, 19 nt, Artificial Sequence
  Description of Artificial Sequence: Synthetic oligonucleotide
  Antisense strand to SEQ ID NO: 1914434
uuaccaaugauuuacgcuu

SEQ ID NO: 1914436 - RNA, 19 nt, Artificial Sequence
  Description of Artificial Sequence: Synthetic oligonucleotide
  Sense strand starting at position 31 of SEQ ID NO: 1879536
agcguaaaucauugguaag

SEQ ID NO: 1914437 - RNA, 19 nt, Artificial Sequence
  Description of Artificial Sequence: Synthetic oligonucleotide
  Antisense strand to SEQ ID NO: 1914436
cuuaccaaugauuuacgcu

SEQ ID NO: 1914438 - RNA, 19 nt, Artificial Sequence
  Description of Artificial Sequence: Synthetic oligonucleotide
  Sense strand starting at position 32 of SEQ ID NO: 1879536
gcguaaaucauugguaagg

SEQ ID NO: 1914439 - RNA, 19 nt, Artificial Sequence
  Description of Artificial Sequence: Synthetic oligonucleotide
  Antisense strand to SEQ ID NO: 1914438
ccuuaccaaugauuuacgc

SEQ ID NO: 1914440 - RNA, 19 nt, Artificial Sequence
  Description of Artificial Sequence: Synthetic oligonucleotide
  Sense strand starting at position 33 of SEQ ID NO: 1879536
cguaaaucauugguaaggu

SEQ ID NO: 1914441 - RNA, 19 nt, Artificial Sequence
  Description of Artificial Sequence: Synthetic oligonucleotide
  Antisense strand to SEQ ID NO: 1914440
accuuaccaaugauuuacg

SEQ ID NO: 1914442 - RNA, 19 nt, Artificial Sequence
  Description of Artificial Sequence: Synthetic oligonucleotide
  Sense strand starting at position 63 of SEQ ID NO: 1879536
cagggagcugugugcaaau

SEQ ID NO: 1914443 - RNA, 19 nt, Artificial Sequence
  Description of Artificial Sequence: Synthetic oligonucleotide
  Antisense strand to SEQ ID NO: 1914442
auuugcacacagcucccug

SEQ ID NO: 1914444 - RNA, 19 nt, Artificial Sequence
  Description of Artificial Sequence: Synthetic oligonucleotide
  Sense strand starting at position 65 of SEQ ID NO: 1879536
gggagcugugugcaaauaa

SEQ ID NO: 1914445 - RNA, 19 nt, Artificial Sequence
  Description of Artificial Sequence: Synthetic oligonucleotide
  Antisense strand to SEQ ID NO: 1914444
uuauuugcacacagcuccc

SEQ ID NO: 1914446 - RNA, 19 nt, Artificial Sequence
  Description of Artificial Sequence: Synthetic oligonucleotide
  Sense strand starting at position 106 of SEQ ID NO: 1879536
uuccacugaugaggagaaa

SEQ ID NO: 1914447 - RNA, 19 nt, Artificial Sequence
  Description of Artificial Sequence: Synthetic oligonucleotide
  Antisense strand to SEQ ID NO: 1914446
uuucuccucaucaguggaa

SEQ ID NO: 1914448 - RNA, 19 nt, Artificial Sequence
  Description of Artificial Sequence: Synthetic oligonucleotide
  Sense strand starting at position 258 of SEQ ID NO: 1879536
gagggauccuuggaaugca

SEQ ID NO: 1914449 - RNA, 19 nt, Artificial Sequence
  Description of Artificial Sequence: Synthetic oligonucleotide
  Antisense strand to SEQ ID NO: 1914448
ugcauuccaaggaucccuc

SEQ ID NO: 1914450 - RNA, 19 nt, Artificial Sequence
  Description of Artificial Sequence: Synthetic oligonucleotide
  Sense strand starting at position 284 of SEQ ID NO: 1879536
gcucacuucucgcucauaa

SEQ ID NO: 1914451 - RNA, 19 nt, Artificial Sequence
  Description of Artificial Sequence: Synthetic oligonucleotide
  Antisense strand to SEQ ID NO: 1914450
uuaugagcgagaagugagc

SEQ ID NO: 1914452 - RNA, 19 nt, Artificial Sequence
  Description of Artificial Sequence: Synthetic oligonucleotide
  Sense strand starting at position 317 of SEQ ID NO: 1879536
cccugugagcccggcuaau

SEQ ID NO: 1914453 - RNA, 19 nt, Artificial Sequence
  Description of Artificial Sequence: Synthetic oligonucleotide
  Antisense strand to SEQ ID NO: 1914452
auuagccgggcucacaggg

SEQ ID NO: 1914454 - RNA, 19 nt, Artificial Sequence
  Description of Artificial Sequence: Synthetic oligonucleotide
  Sense strand starting at position 419 of SEQ ID NO: 1879536
guuccauccuguccuugaa

SEQ ID NO: 1914455 - RNA, 19 nt, Artificial Sequence
  Description of Artificial Sequence: Synthetic oligonucleotide
  Antisense strand to SEQ ID NO: 1914454
uucaaggacaggauggaac

SEQ ID NO: 1914456 - RNA, 19 nt, Artificial Sequence
  Description of Artificial Sequence: Synthetic oligonucleotide
  Sense strand starting at position 479 of SEQ ID NO: 1879536
gucccuaucccuggaaugu

SEQ ID NO: 1914457 - RNA, 19 nt, Artificial Sequence
  Description of Artificial Sequence: Synthetic oligonucleotide
  Antisense strand to SEQ ID NO: 1914456
acauuccagggauagggac

SEQ ID NO: 1914458 - RNA, 19 nt, Artificial Sequence
  Description of Artificial Sequence: Synthetic oligonucleotide
  Sense strand starting at position 511 of SEQ ID NO: 1879536
agagaucuaaguggcucaa

SEQ ID NO: 1914459 - RNA, 19 nt, Artificial Sequence
  Description of Artificial Sequence: Synthetic oligonucleotide
  Antisense strand to SEQ ID NO: 1914458
uugagccacuuagaucucu

SEQ ID NO: 1914460 - RNA, 19 nt, Artificial Sequence
  Description of Artificial Sequence: Synthetic oligonucleotide
  Sense strand starting at position 661 of SEQ ID NO: 1879536
ucagucuuccuccacuaga

SEQ ID NO: 1914461 - RNA, 19 nt, Artificial Sequence
  Description of Artificial Sequence: Synthetic oligonucleotide
  Antisense strand to SEQ ID NO: 1914460
ucuaguggaggaagacuga

SEQ ID NO: 1914462 - RNA, 19 nt, Artificial Sequence
  Description of Artificial Sequence: Synthetic oligonucleotide
  Sense strand starting at position 675 of SEQ ID NO: 1879536
cuagaauaugcacacguga

SEQ ID NO: 1914463 - RNA, 19 nt, Artificial Sequence
  Description of Artificial Sequence: Synthetic oligonucleotide
  Antisense strand to SEQ ID NO: 1914462
ucacgugugcauauucuag

SEQ ID NO: 1914464 - RNA, 19 nt, Artificial Sequence
  Description of Artificial Sequence: Synthetic oligonucleotide
  Sense strand starting at position 677 of SEQ ID NO: 1879536
agaauaugcacacgugaua

SEQ ID NO: 1914465 - RNA, 19 nt, Artificial Sequence
  Description of Artificial Sequence: Synthetic oligonucleotide
  Antisense strand to SEQ ID NO: 1914464
uaucacgugugcauauucu

SEQ ID NO: 1914466 - RNA, 19 nt, Artificial Sequence
  Description of Artificial Sequence: Synthetic oligonucleotide
  Sense strand starting at position 754 of SEQ ID NO: 1879536
ccuguauuagcuggucagu

SEQ ID NO: 1914467 - RNA, 19 nt, Artificial Sequence
  Description of Artificial Sequence: Synthetic oligonucleotide
  Antisense strand to SEQ ID NO: 1914466
acugaccagcuaauacagg

SEQ ID NO: 1914468 - RNA, 19 nt, Artificial Sequence
  Description of Artificial Sequence: Synthetic oligonucleotide
  Sense strand starting at position 756 of SEQ ID NO: 1879536
uguauuagcuggucaguga

SEQ ID NO: 1914469 - RNA, 19 nt, Artificial Sequence
  Description of Artificial Sequence: Synthetic oligonucleotide
  Antisense strand to SEQ ID NO: 1914468
ucacugaccagcuaauaca

SEQ ID NO: 1914470 - RNA, 19 nt, Artificial Sequence
  Description of Artificial Sequence: Synthetic oligonucleotide
  Sense strand starting at position 763 of SEQ ID NO: 1879536
gcuggucagugaccuauca

SEQ ID NO: 1914471 - RNA, 19 nt, Artificial Sequence
  Description of Artificial Sequence: Synthetic oligonucleotide
  Antisense strand to SEQ ID NO: 1914470
ugauaggucacugaccagc

SEQ ID NO: 1914472 - RNA, 19 nt, Artificial Sequence
  Description of Artificial Sequence: Synthetic oligonucleotide
  Sense strand starting at position 770 of SEQ ID NO: 1879536
agugaccuaucaucagaua

SEQ ID NO: 1914473 - RNA, 19 nt, Artificial Sequence
  Description of Artificial Sequence: Synthetic oligonucleotide
  Antisense strand to SEQ ID NO: 1914472
uaucugaugauaggucacu

SEQ ID NO: 1914474 - RNA, 19 nt, Artificial Sequence
  Description of Artificial Sequence: Synthetic oligonucleotide
  Sense strand starting at position 1191 of SEQ ID NO: 1879536
acaguauuauucuuacagu

SEQ ID NO: 1914475 - RNA, 19 nt, Artificial Sequence
  Description of Artificial Sequence: Synthetic oligonucleotide
  Antisense strand to SEQ ID NO: 1914474
acuguaagaauaauacugu

SEQ ID NO: 1914476 - RNA, 19 nt, Artificial Sequence
  Description of Artificial Sequence: Synthetic oligonucleotide
  Sense strand starting at position 1462 of SEQ ID NO: 1879536
uuagauaagccaggcuaau

SEQ ID NO: 1914477 - RNA, 19 nt, Artificial Sequence
  Description of Artificial Sequence: Synthetic oligonucleotide
  Antisense strand to SEQ ID NO: 1914476
auuagccuggcuuaucuaa

SEQ ID NO: 1914478 - RNA, 19 nt, Artificial Sequence
  Description of Artificial Sequence: Synthetic oligonucleotide
  Sense strand starting at position 1474 of SEQ ID NO: 1879536
ggcuaaucaccucaagauc

SEQ ID NO: 1914479 - RNA, 19 nt, Artificial Sequence
  Description of Artificial Sequence: Synthetic oligonucleotide
  Antisense strand to SEQ ID NO: 1914478
gaucuugaggugauuagcc

SEQ ID NO: 1914480 - RNA, 19 nt, Artificial Sequence
  Description of Artificial Sequence: Synthetic oligonucleotide
  Sense strand starting at position 1534 of SEQ ID NO: 1879536
cuccuagugccagggauua

SEQ ID NO: 1914481 - RNA, 19 nt, Artificial Sequence
  Description of Artificial Sequence: Synthetic oligonucleotide
  Antisense strand to SEQ ID NO: 1914480
uaaucccuggcacuaggag

SEQ ID NO: 1914482 - RNA, 19 nt, Artificial Sequence
  Description of Artificial Sequence: Synthetic oligonucleotide
  Sense strand starting at position 1621 of SEQ ID NO: 1879536
aaccacugucaggauguua

SEQ ID NO: 1914483 - RNA, 19 nt, Artificial Sequence
  Description of Artificial Sequence: Synthetic oligonucleotide
  Antisense strand to SEQ ID NO: 1914482
uaacauccugacagugguu

SEQ ID NO: 1914484 - RNA, 19 nt, Artificial Sequence
  Description of Artificial Sequence: Synthetic oligonucleotide
  Sense strand starting at position 2260 of SEQ ID NO: 1879536
augggagugucuucagcau

SEQ ID NO: 1914485 - RNA, 19 nt, Artificial Sequence
  Description of Artificial Sequence: Synthetic oligonucleotide
  Antisense strand to SEQ ID NO: 1914484
augcugaagacacucccau

SEQ ID NO: 1914486 - RNA, 19 nt, Artificial Sequence
  Description of Artificial Sequence: Synthetic oligonucleotide
  Sense strand starting at position 2532 of SEQ ID NO: 1879536
uuccaacgccuuugacaau

SEQ ID NO: 1914487 - RNA, 19 nt, Artificial Sequence
  Description of Artificial Sequence: Synthetic oligonucleotide
  Antisense strand to SEQ ID NO: 1914486
auugucaaaggcguuggaa

SEQ ID NO: 1914488 - RNA, 19 nt, Artificial Sequence
  Description of Artificial Sequence: Synthetic oligonucleotide
  Sense strand starting at position 2595 of SEQ ID NO: 1879536
cucccagaguccuucuauc

SEQ ID NO: 1914489 - RNA, 19 nt, Artificial Sequence
  Description of Artificial Sequence: Synthetic oligonucleotide
  Antisense strand to SEQ ID NO: 1914488
gauagaaggacucugggag

SEQ ID NO: 1914490 - RNA, 19 nt, Artificial Sequence
  Description of Artificial Sequence: Synthetic oligonucleotide
  Sense strand starting at position 2983 of SEQ ID NO: 1879536
auagucagugcauggagaa

SEQ ID NO: 1914491 - RNA, 19 nt, Artificial Sequence
  Description of Artificial Sequence: Synthetic oligonucleotide
  Antisense strand to SEQ ID NO: 1914490
uucuccaugcacugacuau

SEQ ID NO: 1914492 - RNA, 19 nt, Artificial Sequence
  Description of Artificial Sequence: Synthetic oligonucleotide
  Sense strand starting at position 3059 of SEQ ID NO: 1879536
ggaaucacauucugaauga

SEQ ID NO: 1914493 - RNA, 19 nt, Artificial Sequence
  Description of Artificial Sequence: Synthetic oligonucleotide
  Antisense strand to SEQ ID NO: 1914492
ucauucagaaugugauucc

SEQ ID NO: 1914494 - RNA, 19 nt, Artificial Sequence
  Description of Artificial Sequence: Synthetic oligonucleotide
  Sense strand starting at position 3063 of SEQ ID NO: 1879536
ucacauucugaaugauguu

SEQ ID NO: 1914495 - RNA, 19 nt, Artificial Sequence
  Description of Artificial Sequence: Synthetic oligonucleotide
  Antisense strand to SEQ ID NO: 1914494
aacaucauucagaauguga

SEQ ID NO: 1914496 - RNA, 19 nt, Artificial Sequence
  Description of Artificial Sequence: Synthetic oligonucleotide
  Sense strand starting at position 3182 of SEQ ID NO: 1879536
aucccugauggcugugaga

SEQ ID NO: 1914497 - RNA, 19 nt, Artificial Sequence
  Description of Artificial Sequence: Synthetic oligonucleotide
  Antisense strand to SEQ ID NO: 1914496
ucucacagccaucagggau

SEQ ID NO: 1914498 - RNA, 19 nt, Artificial Sequence
  Description of Artificial Sequence: Synthetic oligonucleotide
  Sense strand starting at position 3184 of SEQ ID NO: 1879536
cccugauggcugugagacu

SEQ ID NO: 1914499 - RNA, 19 nt, Artificial Sequence
  Description of Artificial Sequence: Synthetic oligonucleotide
  Antisense strand to SEQ ID NO: 1914498
agucucacagccaucaggg

SEQ ID NO: 1914500 - RNA, 19 nt, Artificial Sequence
  Description of Artificial Sequence: Synthetic oligonucleotide
  Sense strand starting at position 3318 of SEQ ID NO: 1879536
auggaagaaucguuguaac

SEQ ID NO: 1914501 - RNA, 19 nt, Artificial Sequence
  Description of Artificial Sequence: Synthetic oligonucleotide
  Antisense strand to SEQ ID NO: 1914500
guuacaacgauucuuccau

SEQ ID NO: 1914502 - RNA, 19 nt, Artificial Sequence
  Description of Artificial Sequence: Synthetic oligonucleotide
  Sense strand starting at position 3356 of SEQ ID NO: 1879536
agagaucauggcugcaaga

SEQ ID NO: 1914503 - RNA, 19 nt, Artificial Sequence
  Description of Artificial Sequence: Synthetic oligonucleotide
  Antisense strand to SEQ ID NO: 1914502
ucuugcagccaugaucucu

SEQ ID NO: 1914504 - RNA, 19 nt, Artificial Sequence
  Description of Artificial Sequence: Synthetic oligonucleotide
  Sense strand starting at position 3358 of SEQ ID NO: 1879536
agaucauggcugcaagaac

SEQ ID NO: 1914505 - RNA, 19 nt, Artificial Sequence
  Description of Artificial Sequence: Synthetic oligonucleotide
  Antisense strand to SEQ ID NO: 1914504
guucuugcagccaugaucu

SEQ ID NO: 1914506 - RNA, 19 nt, Artificial Sequence
  Description of Artificial Sequence: Synthetic oligonucleotide
  Sense strand starting at position 3688 of SEQ ID NO: 1879536
ucaaaucagucuucuggaa

SEQ ID NO: 1914507 - RNA, 19 nt, Artificial Sequence
  Description of Artificial Sequence: Synthetic oligonucleotide
  Antisense strand to SEQ ID NO: 1914506
uuccagaagacugauuuga

SEQ ID NO: 1914508 - RNA, 19 nt, Artificial Sequence
  Description of Artificial Sequence: Synthetic oligonucleotide
  Sense strand starting at position 3729 of SEQ ID NO: 1879536
aggauaauuuggugaguca

SEQ ID NO: 1914509 - RNA, 19 nt, Artificial Sequence
  Description of Artificial Sequence: Synthetic oligonucleotide
  Antisense strand to SEQ ID NO: 1914508
ugacucaccaaauuauccu

SEQ ID NO: 1914510 - RNA, 19 nt, Artificial Sequence
  Description of Artificial Sequence: Synthetic oligonucleotide
  Sense strand starting at position 3923 of SEQ ID NO: 1879536
ggcagaucuuggguucaca

SEQ ID NO: 1914511 - RNA, 19 nt, Artificial Sequence
  Description of Artificial Sequence: Synthetic oligonucleotide
  Antisense strand to SEQ ID NO: 1914510
ugugaacccaagaucugcc

SEQ ID NO: 1914512 - RNA, 19 nt, Artificial Sequence
  Description of Artificial Sequence: Synthetic oligonucleotide
  Sense strand starting at position 5 of SEQ ID NO: 1879537
accauaauguacccgauua

SEQ ID NO: 1914513 - RNA, 19 nt, Artificial Sequence
  Description of Artificial Sequence: Synthetic oligonucleotide
  Antisense strand to SEQ ID NO: 1914512
uaaucggguacauuauggu

SEQ ID NO: 1914514 - RNA, 19 nt, Artificial Sequence
  Description of Artificial Sequence: Synthetic oligonucleotide
  Sense strand starting at position 10 of SEQ ID NO: 1879537
aauguacccgauuaucaga

SEQ ID NO: 1914515 - RNA, 19 nt, Artificial Sequence
  Description of Artificial Sequence: Synthetic oligonucleotide
  Antisense strand to SEQ ID NO: 1914514
ucugauaaucggguacauu

SEQ ID NO: 1914516 - RNA, 19 nt, Artificial Sequence
  Description of Artificial Sequence: Synthetic oligonucleotide
  Sense strand starting at position 100 of SEQ ID NO: 1879537
uaaugaggauucguaggaa

SEQ ID NO: 1914517 - RNA, 19 nt, Artificial Sequence
  Description of Artificial Sequence: Synthetic oligonucleotide
  Antisense strand to SEQ ID NO: 1914516
uuccuacgaauccucauua

SEQ ID NO: 1914518 - RNA, 19 nt, Artificial Sequence
  Description of Artificial Sequence: Synthetic oligonucleotide
  Sense strand starting at position 103 of SEQ ID NO: 1879537
ugaggauucguaggaaaca

SEQ ID NO: 1914519 - RNA, 19 nt, Artificial Sequence
  Description of Artificial Sequence: Synthetic oligonucleotide
  Antisense strand to SEQ ID NO: 1914518
uguuuccuacgaauccuca

SEQ ID NO: 1914520 - RNA, 19 nt, Artificial Sequence
  Description of Artificial Sequence: Synthetic oligonucleotide
  Sense strand starting at position 170 of SEQ ID NO: 1879537
cguuuccuuaaguaagaga

SEQ ID NO: 1914521 - RNA, 19 nt, Artificial Sequence
  Description of Artificial Sequence: Synthetic oligonucleotide
  Antisense strand to SEQ ID NO: 1914520
ucucuuacuuaaggaaacg

SEQ ID NO: 1914522 - RNA, 19 nt, Artificial Sequence
  Description of Artificial Sequence: Synthetic oligonucleotide
  Sense strand starting at position 207 of SEQ ID NO: 1879537
guuuauagaguuuacaguu

SEQ ID NO: 1914523 - RNA, 19 nt, Artificial Sequence
  Description of Artificial Sequence: Synthetic oligonucleotide
  Antisense strand to SEQ ID NO: 1914522
aacuguaaacucuauaaac

SEQ ID NO: 1914524 - RNA, 19 nt, Artificial Sequence
  Description of Artificial Sequence: Synthetic oligonucleotide
  Sense strand starting at position 417 of SEQ ID NO: 1879537
acuagaagucauggucuag

SEQ ID NO: 1914525 - RNA, 19 nt, Artificial Sequence
  Description of Artificial Sequence: Synthetic oligonucleotide
  Antisense strand to SEQ ID NO: 1914524
cuagaccaugacuucuagu

SEQ ID NO: 1914526 - RNA, 19 nt, Artificial Sequence
  Description of Artificial Sequence: Synthetic oligonucleotide
  Sense strand starting at position 1804 of SEQ ID NO: 1879537
gggaauuguuacccuaccu

SEQ ID NO: 1914527 - RNA, 19 nt, Artificial Sequence
  Description of Artificial Sequence: Synthetic oligonucleotide
  Antisense strand to SEQ ID NO: 1914526
agguaggguaacaauuccc

SEQ ID NO: 1914528 - RNA, 19 nt, Artificial Sequence
  Description of Artificial Sequence: Synthetic oligonucleotide
  Sense strand starting at position 1855 of SEQ ID NO: 1879537
ucuugauaaucugcagaca

SEQ ID NO: 1914529 - RNA, 19 nt, Artificial Sequence
  Description of Artificial Sequence: Synthetic oligonucleotide
  Antisense strand to SEQ ID NO: 1914528
ugucugcagauuaucaaga

SEQ ID NO: 1914530 - RNA, 19 nt, Artificial Sequence
  Description of Artificial Sequence: Synthetic oligonucleotide
  Sense strand starting at position 1874 of SEQ ID NO: 1879537
aaagguugugucuaggauc

SEQ ID NO: 1914531 - RNA, 19 nt, Artificial Sequence
  Description of Artificial Sequence: Synthetic oligonucleotide
  Antisense strand to SEQ ID NO: 1914530
gauccuagacacaaccuuu

SEQ ID NO: 1914532 - RNA, 19 nt, Artificial Sequence
  Description of Artificial Sequence: Synthetic oligonucleotide
  Sense strand starting at position 1976 of SEQ ID NO: 1879537
uuuauuucccucugguuua

SEQ ID NO: 1914533 - RNA, 19 nt, Artificial Sequence
  Description of Artificial Sequence: Synthetic oligonucleotide
  Antisense strand to SEQ ID NO: 1914532
uaaaccagagggaaauaaa

SEQ ID NO: 1914534 - RNA, 19 nt, Artificial Sequence
  Description of Artificial Sequence: Synthetic oligonucleotide
  Sense strand starting at position 2072 of SEQ ID NO: 1879537
gugguuaucaaauggaauc

SEQ ID NO: 1914535 - RNA, 19 nt, Artificial Sequence
  Description of Artificial Sequence: Synthetic oligonucleotide
  Antisense strand to SEQ ID NO: 1914534
gauuccauuugauaaccac

SEQ ID NO: 1914536 - RNA, 19 nt, Artificial Sequence
  Description of Artificial Sequence: Synthetic oligonucleotide
  Sense strand starting at position 2158 of SEQ ID NO: 1879537
ugcgaaaggucacuacaga

SEQ ID NO: 1914537 - RNA, 19 nt, Artificial Sequence
  Description of Artificial Sequence: Synthetic oligonucleotide
  Antisense strand to SEQ ID NO: 1914536
ucuguagugaccuuucgca

SEQ ID NO: 1914538 - RNA, 19 nt, Artificial Sequence
  Description of Artificial Sequence: Synthetic oligonucleotide
  Sense strand starting at position 2159 of SEQ ID NO: 1879537
gcgaaaggucacuacagau

SEQ ID NO: 1914539 - RNA, 19 nt, Artificial Sequence
  Description of Artificial Sequence: Synthetic oligonucleotide
  Antisense strand to SEQ ID NO: 1914538
aucuguagugaccuuucgc

SEQ ID NO: 1914540 - RNA, 19 nt, Artificial Sequence
  Description of Artificial Sequence: Synthetic oligonucleotide
  Sense strand starting at position 2244 of SEQ ID NO: 1879537
cucaauaugccagaggcau

SEQ ID NO: 1914541 - RNA, 19 nt, Artificial Sequence
  Description of Artificial Sequence: Synthetic oligonucleotide
  Antisense strand to SEQ ID NO: 1914540
augccucuggcauauugag

SEQ ID NO: 1914542 - RNA, 19 nt, Artificial Sequence
  Description of Artificial Sequence: Synthetic oligonucleotide
  Sense strand starting at position 2283 of SEQ ID NO: 1879537
uaguauuugcugugagcca

SEQ ID NO: 1914543 - RNA, 19 nt, Artificial Sequence
  Description of Artificial Sequence: Synthetic oligonucleotide
  Antisense strand to SEQ ID NO: 1914542
uggcucacagcaaauacua

SEQ ID NO: 1914544 - RNA, 19 nt, Artificial Sequence
  Description of Artificial Sequence: Synthetic oligonucleotide
  Sense strand starting at position 2343 of SEQ ID NO: 1879537
cuaggaugugcugaacaua

SEQ ID NO: 1914545 - RNA, 19 nt, Artificial Sequence
  Description of Artificial Sequence: Synthetic oligonucleotide
  Antisense strand to SEQ ID NO: 1914544
uauguucagcacauccuag

SEQ ID NO: 1914546 - RNA, 19 nt, Artificial Sequence
  Description of Artificial Sequence: Synthetic oligonucleotide
  Sense strand starting at position 2453 of SEQ ID NO: 1879537
uuagcaugugaugauaguu

SEQ ID NO: 1914547 - RNA, 19 nt, Artificial Sequence
  Description of Artificial Sequence: Synthetic oligonucleotide
  Antisense strand to SEQ ID NO: 1914546
aacuaucaucacaugcuaa

SEQ ID NO: 1914548 - RNA, 19 nt, Artificial Sequence
  Description of Artificial Sequence: Synthetic oligonucleotide
  Sense strand starting at position 2458 of SEQ ID NO: 1879537
augugaugauaguuauucu

SEQ ID NO: 1914549 - RNA, 19 nt, Artificial Sequence
  Description of Artificial Sequence: Synthetic oligonucleotide
  Antisense strand to SEQ ID NO: 1914548
agaauaacuaucaucacau

SEQ ID NO: 1914550 - RNA, 19 nt, Artificial Sequence
  Description of Artificial Sequence: Synthetic oligonucleotide
  Sense strand starting at position 2461 of SEQ ID NO: 1879537
ugaugauaguuauucugca

SEQ ID NO: 1914551 - RNA, 19 nt, Artificial Sequence
  Description of Artificial Sequence: Synthetic oligonucleotide
  Antisense strand to SEQ ID NO: 1914550
ugcagaauaacuaucauca

SEQ ID NO: 1914552 - RNA, 19 nt, Artificial Sequence
  Description of Artificial Sequence: Synthetic oligonucleotide
  Sense strand starting at position 2465 of SEQ ID NO: 1879537
gauaguuauucugcaggaa

SEQ ID NO: 1914553 - RNA, 19 nt, Artificial Sequence
  Description of Artificial Sequence: Synthetic oligonucleotide
  Antisense strand to SEQ ID NO: 1914552
uuccugcagaauaacuauc

SEQ ID NO: 1914554 - RNA, 19 nt, Artificial Sequence
  Description of Artificial Sequence: Synthetic oligonucleotide
  Sense strand starting at position 2466 of SEQ ID NO: 1879537
auaguuauucugcaggaag

SEQ ID NO: 1914555 - RNA, 19 nt, Artificial Sequence
  Description of Artificial Sequence: Synthetic oligonucleotide
  Antisense strand to SEQ ID NO: 1914554
cuuccugcagaauaacuau

SEQ ID NO: 1914556 - RNA, 19 nt, Artificial Sequence
  Description of Artificial Sequence: Synthetic oligonucleotide
  Sense strand starting at position 2480 of SEQ ID NO: 1879537
ggaaguacagaguggucau

SEQ ID NO: 1914557 - RNA, 19 nt, Artificial Sequence
  Description of Artificial Sequence: Synthetic oligonucleotide
  Antisense strand to SEQ ID NO: 1914556
augaccacucuguacuucc

SEQ ID NO: 1914558 - RNA, 19 nt, Artificial Sequence
  Description of Artificial Sequence: Synthetic oligonucleotide
  Sense strand starting at position 2487 of SEQ ID NO: 1879537
cagaguggucauggauaua

SEQ ID NO: 1914559 - RNA, 19 nt, Artificial Sequence
  Description of Artificial Sequence: Synthetic oligonucleotide
  Antisense strand to SEQ ID NO: 1914558
uauauccaugaccacucug

SEQ ID NO: 1914560 - RNA, 19 nt, Artificial Sequence
  Description of Artificial Sequence: Synthetic oligonucleotide
  Sense strand starting at position 2515 of SEQ ID NO: 1879537
ccacaaguugcuuaaagcu

SEQ ID NO: 1914561 - RNA, 19 nt, Artificial Sequence
  Description of Artificial Sequence: Synthetic oligonucleotide
  Antisense strand to SEQ ID NO: 1914560
agcuuuaagcaacuugugg

SEQ ID NO: 1914562 - RNA, 19 nt, Artificial Sequence
  Description of Artificial Sequence: Synthetic oligonucleotide
  Sense strand starting at position 2635 of SEQ ID NO: 1879537
gguucaaaugauggaguca

SEQ ID NO: 1914563 - RNA, 19 nt, Artificial Sequence
  Description of Artificial Sequence: Synthetic oligonucleotide
  Antisense strand to SEQ ID NO: 1914562
ugacuccaucauuugaacc

SEQ ID NO: 1914564 - RNA, 19 nt, Artificial Sequence
  Description of Artificial Sequence: Synthetic oligonucleotide
  Sense strand starting at position 2834 of SEQ ID NO: 1879537
auaacaguuucuuugagaa

SEQ ID NO: 1914565 - RNA, 19 nt, Artificial Sequence
  Description of Artificial Sequence: Synthetic oligonucleotide
  Antisense strand to SEQ ID NO: 1914564
uucucaaagaaacuguuau

SEQ ID NO: 1914566 - RNA, 19 nt, Artificial Sequence
  Description of Artificial Sequence: Synthetic oligonucleotide
  Sense strand starting at position 2963 of SEQ ID NO: 1879537
uuauuugccuagccaagua

SEQ ID NO: 1914567 - RNA, 19 nt, Artificial Sequence
  Description of Artificial Sequence: Synthetic oligonucleotide
  Antisense strand to SEQ ID NO: 1914566
uacuuggcuaggcaaauaa

SEQ ID NO: 1914568 - RNA, 19 nt, Artificial Sequence
  Description of Artificial Sequence: Synthetic oligonucleotide
  Sense strand starting at position 2985 of SEQ ID NO: 1879537
acuaacuuggaguaaguuu

SEQ ID NO: 1914569 - RNA, 19 nt, Artificial Sequence
  Description of Artificial Sequence: Synthetic oligonucleotide
  Antisense strand to SEQ ID NO: 1914568
aaacuuacuccaaguuagu

SEQ ID NO: 1914570 - RNA, 19 nt, Artificial Sequence
  Description of Artificial Sequence: Synthetic oligonucleotide
  Sense strand starting at position 3146 of SEQ ID NO: 1879537
ucacuaaaccuuggaugau

SEQ ID NO: 1914571 - RNA, 19 nt, Artificial Sequence
  Description of Artificial Sequence: Synthetic oligonucleotide
  Antisense strand to SEQ ID NO: 1914570
aucauccaagguuuaguga

SEQ ID NO: 1914572 - RNA, 19 nt, Artificial Sequence
  Description of Artificial Sequence: Synthetic oligonucleotide
  Sense strand starting at position 3211 of SEQ ID NO: 1879537
ggaugagugacugauuguu

SEQ ID NO: 1914573 - RNA, 19 nt, Artificial Sequence
  Description of Artificial Sequence: Synthetic oligonucleotide
  Antisense strand to SEQ ID NO: 1914572
aacaaucagucacucaucc

SEQ ID NO: 1914574 - RNA, 19 nt, Artificial Sequence
  Description of Artificial Sequence: Synthetic oligonucleotide
  Sense strand starting at position 3213 of SEQ ID NO: 1879537
augagugacugauuguuua

SEQ ID NO: 1914575 - RNA, 19 nt, Artificial Sequence
  Description of Artificial Sequence: Synthetic oligonucleotide
  Antisense strand to SEQ ID NO: 1914574
uaaacaaucagucacucau

SEQ ID NO: 1914576 - RNA, 19 nt, Artificial Sequence
  Description of Artificial Sequence: Synthetic oligonucleotide
  Sense strand starting at position 3221 of SEQ ID NO: 1879537
cugauuguuuaucuuauag

SEQ ID NO: 1914577 - RNA, 19 nt, Artificial Sequence
  Description of Artificial Sequence: Synthetic oligonucleotide
  Antisense strand to SEQ ID NO: 1914576
cuauaagauaaacaaucag

SEQ ID NO: 1914578 - RNA, 19 nt, Artificial Sequence
  Description of Artificial Sequence: Synthetic oligonucleotide
  Sense strand starting at position 3229 of SEQ ID NO: 1879537
uuaucuuauagaugugggu

SEQ ID NO: 1914579 - RNA, 19 nt, Artificial Sequence
  Description of Artificial Sequence: Synthetic oligonucleotide
  Antisense strand to SEQ ID NO: 1914578
acccacaucuauaagauaa

SEQ ID NO: 1914580 - RNA, 19 nt, Artificial Sequence
  Description of Artificial Sequence: Synthetic oligonucleotide
  Sense strand starting at position 3268 of SEQ ID NO: 1879537
ugcuuauaccaguggagga

SEQ ID NO: 1914581 - RNA, 19 nt, Artificial Sequence
  Description of Artificial Sequence: Synthetic oligonucleotide
  Antisense strand to SEQ ID NO: 1914580
uccuccacugguauaagca

SEQ ID NO: 1914582 - RNA, 19 nt, Artificial Sequence
  Description of Artificial Sequence: Synthetic oligonucleotide
  Sense strand starting at position 3388 of SEQ ID NO: 1879537
agagcuacccuggguauga

SEQ ID NO: 1914583 - RNA, 19 nt, Artificial Sequence
  Description of Artificial Sequence: Synthetic oligonucleotide
  Antisense strand to SEQ ID NO: 1914582
ucauacccaggguagcucu

SEQ ID NO: 1914584 - RNA, 19 nt, Artificial Sequence
  Description of Artificial Sequence: Synthetic oligonucleotide
  Sense strand starting at position 3398 of SEQ ID NO: 1879537
uggguaugagaguggauau

SEQ ID NO: 1914585 - RNA, 19 nt, Artificial Sequence
  Description of Artificial Sequence: Synthetic oligonucleotide
  Antisense strand to SEQ ID NO: 1914584
auauccacucucauaccca

SEQ ID NO: 1914586 - RNA, 19 nt, Artificial Sequence
  Description of Artificial Sequence: Synthetic oligonucleotide
  Sense strand starting at position 3399 of SEQ ID NO: 1879537
ggguaugagaguggauauc

SEQ ID NO: 1914587 - RNA, 19 nt, Artificial Sequence
  Description of Artificial Sequence: Synthetic oligonucleotide
  Antisense strand to SEQ ID NO: 1914586
gauauccacucucauaccc

SEQ ID NO: 1914588 - RNA, 19 nt, Artificial Sequence
  Description of Artificial Sequence: Synthetic oligonucleotide
  Sense strand starting at position 3826 of SEQ ID NO: 1879537
cugggaccauuauuauuau

SEQ ID NO: 1914589 - RNA, 19 nt, Artificial Sequence
  Description of Artificial Sequence: Synthetic oligonucleotide
  Antisense strand to SEQ ID NO: 1914588
auaauaauaauggucccag

SEQ ID NO: 1914590 - RNA, 19 nt, Artificial Sequence
  Description of Artificial Sequence: Synthetic oligonucleotide
  Sense strand starting at position 3950 of SEQ ID NO: 1879537
cuugaauuauugguaccau

SEQ ID NO: 1914591 - RNA, 19 nt, Artificial Sequence
  Description of Artificial Sequence: Synthetic oligonucleotide
  Antisense strand to SEQ ID NO: 1914590
augguaccaauaauucaag

SEQ ID NO: 1914592 - RNA, 19 nt, Artificial Sequence
  Description of Artificial Sequence: Synthetic oligonucleotide
  Sense strand starting at position 524 of SEQ ID NO: 1879538
ugucuuugcaaccgacaga

SEQ ID NO: 1914593 - RNA, 19 nt, Artificial Sequence
  Description of Artificial Sequence: Synthetic oligonucleotide
  Antisense strand to SEQ ID NO: 1914592
ucugucgguugcaaagaca

SEQ ID NO: 1914594 - RNA, 19 nt, Artificial Sequence
  Description of Artificial Sequence: Synthetic oligonucleotide
  Sense strand starting at position 1044 of SEQ ID NO: 1879538
gcuugaauucgugagguca

SEQ ID NO: 1914595 - RNA, 19 nt, Artificial Sequence
  Description of Artificial Sequence: Synthetic oligonucleotide
  Antisense strand to SEQ ID NO: 1914594
ugaccucacgaauucaagc

SEQ ID NO: 1914596 - RNA, 19 nt, Artificial Sequence
  Description of Artificial Sequence: Synthetic oligonucleotide
  Sense strand starting at position 1588 of SEQ ID NO: 1879538
uugucugacccaugguuua

SEQ ID NO: 1914597 - RNA, 19 nt, Artificial Sequence
  Description of Artificial Sequence: Synthetic oligonucleotide
  Antisense strand to SEQ ID NO: 1914596
uaaaccaugggucagacaa

SEQ ID NO: 1914598 - RNA, 19 nt, Artificial Sequence
  Description of Artificial Sequence: Synthetic oligonucleotide
  Sense strand starting at position 1744 of SEQ ID NO: 1879538
uuaggauaguuggauacau

SEQ ID NO: 1914599 - RNA, 19 nt, Artificial Sequence
  Description of Artificial Sequence: Synthetic oligonucleotide
  Antisense strand to SEQ ID NO: 1914598
auguauccaacuauccuaa

SEQ ID NO: 1914600 - RNA, 19 nt, Artificial Sequence
  Description of Artificial Sequence: Synthetic oligonucleotide
  Sense strand starting at position 1798 of SEQ ID NO: 1879538
ugcggaaugcuacaucaca

SEQ ID NO: 1914601 - RNA, 19 nt, Artificial Sequence
  Description of Artificial Sequence: Synthetic oligonucleotide
  Antisense strand to SEQ ID NO: 1914600
ugugauguagcauuccgca

SEQ ID NO: 1914602 - RNA, 19 nt, Artificial Sequence
  Description of Artificial Sequence: Synthetic oligonucleotide
  Sense strand starting at position 1859 of SEQ ID NO: 1879538
aacguucuagucugagaau

SEQ ID NO: 1914603 - RNA, 19 nt, Artificial Sequence
  Description of Artificial Sequence: Synthetic oligonucleotide
  Antisense strand to SEQ ID NO: 1914602
auucucagacuagaacguu

SEQ ID NO: 1914604 - RNA, 19 nt, Artificial Sequence
  Description of Artificial Sequence: Synthetic oligonucleotide
  Sense strand starting at position 1862 of SEQ ID NO: 1879538
guucuagucugagaauuaa

SEQ ID NO: 1914605 - RNA, 19 nt, Artificial Sequence
  Description of Artificial Sequence: Synthetic oligonucleotide
  Antisense strand to SEQ ID NO: 1914604
uuaauucucagacuagaac

SEQ ID NO: 1914606 - RNA, 19 nt, Artificial Sequence
  Description of Artificial Sequence: Synthetic oligonucleotide
  Sense strand starting at position 1880 of SEQ ID NO: 1879538
aaagccauuguucgaagaa

SEQ ID NO: 1914607 - RNA, 19 nt, Artificial Sequence
  Description of Artificial Sequence: Synthetic oligonucleotide
  Antisense strand to SEQ ID NO: 1914606
uucuucgaacaauggcuuu

SEQ ID NO: 1914608 - RNA, 19 nt, Artificial Sequence
  Description of Artificial Sequence: Synthetic oligonucleotide
  Sense strand starting at position 1923 of SEQ ID NO: 1879538
ccgaaagcuugcuccgcaa

SEQ ID NO: 1914609 - RNA, 19 nt, Artificial Sequence
  Description of Artificial Sequence: Synthetic oligonucleotide
  Antisense strand to SEQ ID NO: 1914608
uugcggagcaagcuuucgg

SEQ ID NO: 1914610 - RNA, 19 nt, Artificial Sequence
  Description of Artificial Sequence: Synthetic oligonucleotide
  Sense strand starting at position 1925 of SEQ ID NO: 1879538
gaaagcuugcuccgcaaua

SEQ ID NO: 1914611 - RNA, 19 nt, Artificial Sequence
  Description of Artificial Sequence: Synthetic oligonucleotide
  Antisense strand to SEQ ID NO: 1914610
uauugcggagcaagcuuuc

SEQ ID NO: 1914612 - RNA, 19 nt, Artificial Sequence
  Description of Artificial Sequence: Synthetic oligonucleotide
  Sense strand starting at position 1955 of SEQ ID NO: 1879538
ccagcuucuuuggaagaga

SEQ ID NO: 1914613 - RNA, 19 nt, Artificial Sequence
  Description of Artificial Sequence: Synthetic oligonucleotide
  Antisense strand to SEQ ID NO: 1914612
ucucuuccaaagaagcugg

SEQ ID NO: 1914614 - RNA, 19 nt, Artificial Sequence
  Description of Artificial Sequence: Synthetic oligonucleotide
  Sense strand starting at position 2368 of SEQ ID NO: 1879538
gagagauacccuggucacg

SEQ ID NO: 1914615 - RNA, 19 nt, Artificial Sequence
  Description of Artificial Sequence: Synthetic oligonucleotide
  Antisense strand to SEQ ID NO: 1914614
cgugaccaggguaucucuc

SEQ ID NO: 1914616 - RNA, 19 nt, Artificial Sequence
  Description of Artificial Sequence: Synthetic oligonucleotide
  Sense strand starting at position 2370 of SEQ ID NO: 1879538
gagauacccuggucacgaa

SEQ ID NO: 1914617 - RNA, 19 nt, Artificial Sequence
  Description of Artificial Sequence: Synthetic oligonucleotide
  Antisense strand to SEQ ID NO: 1914616
uucgugaccaggguaucuc

SEQ ID NO: 1914618 - RNA, 19 nt, Artificial Sequence
  Description of Artificial Sequence: Synthetic oligonucleotide
  Sense strand starting at position 2402 of SEQ ID NO: 1879538
gagcgagucuuauccauug

SEQ ID NO: 1914619 - RNA, 19 nt, Artificial Sequence
  Description of Artificial Sequence: Synthetic oligonucleotide
  Antisense strand to SEQ ID NO: 1914618
caauggauaagacucgcuc

SEQ ID NO: 1914620 - RNA, 19 nt, Artificial Sequence
  Description of Artificial Sequence: Synthetic oligonucleotide
  Sense strand starting at position 2404 of SEQ ID NO: 1879538
gcgagucuuauccauugca

SEQ ID NO: 1914621 - RNA, 19 nt, Artificial Sequence
  Description of Artificial Sequence: Synthetic oligonucleotide
  Antisense strand to SEQ ID NO: 1914620
ugcaauggauaagacucgc

SEQ ID NO: 1914622 - RNA, 19 nt, Artificial Sequence
  Description of Artificial Sequence: Synthetic oligonucleotide
  Sense strand starting at position 2459 of SEQ ID NO: 1879538
ugggaaacuugacuguaua

SEQ ID NO: 1914623 - RNA, 19 nt, Artificial Sequence
  Description of Artificial Sequence: Synthetic oligonucleotide
  Antisense strand to SEQ ID NO: 1914622
uauacagucaaguuuccca

SEQ ID NO: 1914624 - RNA, 19 nt, Artificial Sequence
  Description of Artificial Sequence: Synthetic oligonucleotide
  Sense strand starting at position 2571 of SEQ ID NO: 1879538
gucagcguaagcugagaau

SEQ ID NO: 1914625 - RNA, 19 nt, Artificial Sequence
  Description of Artificial Sequence: Synthetic oligonucleotide
  Antisense strand to SEQ ID NO: 1914624
auucucagcuuacgcugac

SEQ ID NO: 1914626 - RNA, 19 nt, Artificial Sequence
  Description of Artificial Sequence: Synthetic oligonucleotide
  Sense strand starting at position 2641 of SEQ ID NO: 1879538
cgugguucucacguuugua

SEQ ID NO: 1914627 - RNA, 19 nt, Artificial Sequence
  Description of Artificial Sequence: Synthetic oligonucleotide
  Antisense strand to SEQ ID NO: 1914626
uacaaacgugagaaccacg

SEQ ID NO: 1914628 - RNA, 19 nt, Artificial Sequence
  Description of Artificial Sequence: Synthetic oligonucleotide
  Sense strand starting at position 2674 of SEQ ID NO: 1879538
ugagguacgucgauagguu

SEQ ID NO: 1914629 - RNA, 19 nt, Artificial Sequence
  Description of Artificial Sequence: Synthetic oligonucleotide
  Antisense strand to SEQ ID NO: 1914628
aaccuaucgacguaccuca

SEQ ID NO: 1914630 - RNA, 19 nt, Artificial Sequence
  Description of Artificial Sequence: Synthetic oligonucleotide
  Sense strand starting at position 2675 of SEQ ID NO: 1879538
gagguacgucgauagguua

SEQ ID NO: 1914631 - RNA, 19 nt, Artificial Sequence
  Description of Artificial Sequence: Synthetic oligonucleotide
  Antisense strand to SEQ ID NO: 1914630
uaaccuaucgacguaccuc

SEQ ID NO: 1914632 - RNA, 19 nt, Artificial Sequence
  Description of Artificial Sequence: Synthetic oligonucleotide
  Sense strand starting at position 2676 of SEQ ID NO: 1879538
agguacgucgauagguuau

SEQ ID NO: 1914633 - RNA, 19 nt, Artificial Sequence
  Description of Artificial Sequence: Synthetic oligonucleotide
  Antisense strand to SEQ ID NO: 1914632
auaaccuaucgacguaccu

SEQ ID NO: 1914634 - RNA, 19 nt, Artificial Sequence
  Description of Artificial Sequence: Synthetic oligonucleotide
  Sense strand starting at position 2683 of SEQ ID NO: 1879538
ucgauagguuauguuuaug

SEQ ID NO: 1914635 - RNA, 19 nt, Artificial Sequence
  Description of Artificial Sequence: Synthetic oligonucleotide
  Antisense strand to SEQ ID NO: 1914634
cauaaacauaaccuaucga

SEQ ID NO: 1914636 - RNA, 19 nt, Artificial Sequence
  Description of Artificial Sequence: Synthetic oligonucleotide
  Sense strand starting at position 2702 of SEQ ID NO: 1879538
uuaauaucgcucgaccuca

SEQ ID NO: 1914637 - RNA, 19 nt, Artificial Sequence
  Description of Artificial Sequence: Synthetic oligonucleotide
  Antisense strand to SEQ ID NO: 1914636
ugaggucgagcgauauuaa

SEQ ID NO: 1914638 - RNA, 19 nt, Artificial Sequence
  Description of Artificial Sequence: Synthetic oligonucleotide
  Sense strand starting at position 2720 of SEQ ID NO: 1879538
aggcgugugugggcaaaua

SEQ ID NO: 1914639 - RNA, 19 nt, Artificial Sequence
  Description of Artificial Sequence: Synthetic oligonucleotide
  Antisense strand to SEQ ID NO: 1914638
uauuugcccacacacgccu

SEQ ID NO: 1914640 - RNA, 19 nt, Artificial Sequence
  Description of Artificial Sequence: Synthetic oligonucleotide
  Sense strand starting at position 2721 of SEQ ID NO: 1879538
ggcgugugugggcaaauau

SEQ ID NO: 1914641 - RNA, 19 nt, Artificial Sequence
  Description of Artificial Sequence: Synthetic oligonucleotide
  Antisense strand to SEQ ID NO: 1914640
auauuugcccacacacgcc

SEQ ID NO: 1914642 - RNA, 19 nt, Artificial Sequence
  Description of Artificial Sequence: Synthetic oligonucleotide
  Sense strand starting at position 2722 of SEQ ID NO: 1879538
gcgugugugggcaaauaua

SEQ ID NO: 1914643 - RNA, 19 nt, Artificial Sequence
  Description of Artificial Sequence: Synthetic oligonucleotide
  Antisense strand to SEQ ID NO: 1914642
uauauuugcccacacacgc

SEQ ID NO: 1914644 - RNA, 19 nt, Artificial Sequence
  Description of Artificial Sequence: Synthetic oligonucleotide
  Sense strand starting at position 2776 of SEQ ID NO: 1879538
guuguuguucuauagaaau

SEQ ID NO: 1914645 - RNA, 19 nt, Artificial Sequence
  Description of Artificial Sequence: Synthetic oligonucleotide
  Antisense strand to SEQ ID NO: 1914644
auuucuauagaacaacaac

SEQ ID NO: 1914646 - RNA, 19 nt, Artificial Sequence
  Description of Artificial Sequence: Synthetic oligonucleotide
  Sense strand starting at position 3503 of SEQ ID NO: 1879538
uugcgauuaguguauauua

SEQ ID NO: 1914647 - RNA, 19 nt, Artificial Sequence
  Description of Artificial Sequence: Synthetic oligonucleotide
  Antisense strand to SEQ ID NO: 1914646
uaauauacacuaaucgcaa

SEQ ID NO: 1914648 - RNA, 19 nt, Artificial Sequence
  Description of Artificial Sequence: Synthetic oligonucleotide
  Sense strand starting at position 3505 of SEQ ID NO: 1879538
gcgauuaguguauauuaug

SEQ ID NO: 1914649 - RNA, 19 nt, Artificial Sequence
  Description of Artificial Sequence: Synthetic oligonucleotide
  Antisense strand to SEQ ID NO: 1914648
cauaauauacacuaaucgc

SEQ ID NO: 1914650 - RNA, 19 nt, Artificial Sequence
  Description of Artificial Sequence: Synthetic oligonucleotide
  Sense strand starting at position 3514 of SEQ ID NO: 1879538
guauauuauguuuggccca

SEQ ID NO: 1914651 - RNA, 19 nt, Artificial Sequence
  Description of Artificial Sequence: Synthetic oligonucleotide
  Antisense strand to SEQ ID NO: 1914650
ugggccaaacauaauauac

SEQ ID NO: 1914652 - RNA, 19 nt, Artificial Sequence
  Description of Artificial Sequence: Synthetic oligonucleotide
  Sense strand starting at position 3517 of SEQ ID NO: 1879538
uauuauguuuggcccaaga

SEQ ID NO: 1914653 - RNA, 19 nt, Artificial Sequence
  Description of Artificial Sequence: Synthetic oligonucleotide
  Antisense strand to SEQ ID NO: 1914652
ucuugggccaaacauaaua

SEQ ID NO: 1914654 - RNA, 19 nt, Artificial Sequence
  Description of Artificial Sequence: Synthetic oligonucleotide
  Sense strand starting at position 3624 of SEQ ID NO: 1879538
ggguuaugcuuauugccua

SEQ ID NO: 1914655 - RNA, 19 nt, Artificial Sequence
  Description of Artificial Sequence: Synthetic oligonucleotide
  Antisense strand to SEQ ID NO: 1914654
uaggcaauaagcauaaccc

SEQ ID NO: 1914656 - RNA, 19 nt, Artificial Sequence
  Description of Artificial Sequence: Synthetic oligonucleotide
  Sense strand starting at position 3757 of SEQ ID NO: 1879538
gcuggaauccugcaacuuc

SEQ ID NO: 1914657 - RNA, 19 nt, Artificial Sequence
  Description of Artificial Sequence: Synthetic oligonucleotide
  Antisense strand to SEQ ID NO: 1914656
gaaguugcaggauuccagc

SEQ ID NO: 1914658 - RNA, 19 nt, Artificial Sequence
  Description of Artificial Sequence: Synthetic oligonucleotide
  Sense strand starting at position 3778 of SEQ ID NO: 1879538
accuuaauguuagaucaag

SEQ ID NO: 1914659 - RNA, 19 nt, Artificial Sequence
  Description of Artificial Sequence: Synthetic oligonucleotide
  Antisense strand to SEQ ID NO: 1914658
cuugaucuaacauuaaggu

SEQ ID NO: 1914660 - RNA, 19 nt, Artificial Sequence
  Description of Artificial Sequence: Synthetic oligonucleotide
  Sense strand starting at position 3837 of SEQ ID NO: 1879538
gaucaugccugagcuguaa

SEQ ID NO: 1914661 - RNA, 19 nt, Artificial Sequence
  Description of Artificial Sequence: Synthetic oligonucleotide
  Antisense strand to SEQ ID NO: 1914660
uuacagcucaggcaugauc

SEQ ID NO: 1914662 - RNA, 19 nt, Artificial Sequence
  Description of Artificial Sequence: Synthetic oligonucleotide
  Sense strand starting at position 3859 of SEQ ID NO: 1879538
cgcccuucccaguauacaa

SEQ ID NO: 1914663 - RNA, 19 nt, Artificial Sequence
  Description of Artificial Sequence: Synthetic oligonucleotide
  Antisense strand to SEQ ID NO: 1914662
uuguauacugggaagggcg

SEQ ID NO: 1914664 - RNA, 19 nt, Artificial Sequence
  Description of Artificial Sequence: Synthetic oligonucleotide
  Sense strand starting at position 3896 of SEQ ID NO: 1879538
cgaauucuaucuuccaagu

SEQ ID NO: 1914665 - RNA, 19 nt, Artificial Sequence
  Description of Artificial Sequence: Synthetic oligonucleotide
  Antisense strand to SEQ ID NO: 1914664
acuuggaagauagaauucg

SEQ ID NO: 1914666 - RNA, 19 nt, Artificial Sequence
  Description of Artificial Sequence: Synthetic oligonucleotide
  Sense strand starting at position 3943 of SEQ ID NO: 1879538
cuaucuaaagauggcaaau

SEQ ID NO: 1914667 - RNA, 19 nt, Artificial Sequence
  Description of Artificial Sequence: Synthetic oligonucleotide
  Antisense strand to SEQ ID NO: 1914666
auuugccaucuuuagauag

SEQ ID NO: 1914668 - RNA, 19 nt, Artificial Sequence
  Description of Artificial Sequence: Synthetic oligonucleotide
  Sense strand starting at position 3952 of SEQ ID NO: 1879538
gauggcaaaucugggaaau

SEQ ID NO: 1914669 - RNA, 19 nt, Artificial Sequence
  Description of Artificial Sequence: Synthetic oligonucleotide
  Antisense strand to SEQ ID NO: 1914668
auuucccagauuugccauc

SEQ ID NO: 1914670 - RNA, 19 nt, Artificial Sequence
  Description of Artificial Sequence: Synthetic oligonucleotide
  Sense strand starting at position 3954 of SEQ ID NO: 1879538
uggcaaaucugggaaaugu

SEQ ID NO: 1914671 - RNA, 19 nt, Artificial Sequence
  Description of Artificial Sequence: Synthetic oligonucleotide
  Antisense strand to SEQ ID NO: 1914670
acauuucccagauuugcca

SEQ ID NO: 1914672 - RNA, 19 nt, Artificial Sequence
  Description of Artificial Sequence: Synthetic oligonucleotide
  Sense strand starting at position 30 of SEQ ID NO: 1879539
cuuaaauacuguuugguua

SEQ ID NO: 1914673 - RNA, 19 nt, Artificial Sequence
  Description of Artificial Sequence: Synthetic oligonucleotide
  Antisense strand to SEQ ID NO: 1914672
uaaccaaacaguauuuaag

SEQ ID NO: 1914674 - RNA, 19 nt, Artificial Sequence
  Description of Artificial Sequence: Synthetic oligonucleotide
  Sense strand starting at position 215 of SEQ ID NO: 1879539
uaaugcuauggugaucauu

SEQ ID NO: 1914675 - RNA, 19 nt, Artificial Sequence
  Description of Artificial Sequence: Synthetic oligonucleotide
  Antisense strand to SEQ ID NO: 1914674
aaugaucaccauagcauua

SEQ ID NO: 1914676 - RNA, 19 nt, Artificial Sequence
  Description of Artificial Sequence: Synthetic oligonucleotide
  Sense strand starting at position 223 of SEQ ID NO: 1879539
uggugaucauucuuguaug

SEQ ID NO: 1914677 - RNA, 19 nt, Artificial Sequence
  Description of Artificial Sequence: Synthetic oligonucleotide
  Antisense strand to SEQ ID NO: 1914676
cauacaagaaugaucacca

SEQ ID NO: 1914678 - RNA, 19 nt, Artificial Sequence
  Description of Artificial Sequence: Synthetic oligonucleotide
  Sense strand starting at position 228 of SEQ ID NO: 1879539
aucauucuuguauguaaac

SEQ ID NO: 1914679 - RNA, 19 nt, Artificial Sequence
  Description of Artificial Sequence: Synthetic oligonucleotide
  Antisense strand to SEQ ID NO: 1914678
guuuacauacaagaaugau

SEQ ID NO: 1914680 - RNA, 19 nt, Artificial Sequence
  Description of Artificial Sequence: Synthetic oligonucleotide
  Sense strand starting at position 296 of SEQ ID NO: 1879539
uaagucaaaguguauguuu

SEQ ID NO: 1914681 - RNA, 19 nt, Artificial Sequence
  Description of Artificial Sequence: Synthetic oligonucleotide
  Antisense strand to SEQ ID NO: 1914680
aaacauacacuuugacuua

SEQ ID NO: 1914682 - RNA, 19 nt, Artificial Sequence
  Description of Artificial Sequence: Synthetic oligonucleotide
  Sense strand starting at position 332 of SEQ ID NO: 1879539
ugagguauagcauauauac

SEQ ID NO: 1914683 - RNA, 19 nt, Artificial Sequence
  Description of Artificial Sequence: Synthetic oligonucleotide
  Antisense strand to SEQ ID NO: 1914682
guauauaugcuauaccuca

SEQ ID NO: 1914684 - RNA, 19 nt, Artificial Sequence
  Description of Artificial Sequence: Synthetic oligonucleotide
  Sense strand starting at position 373 of SEQ ID NO: 1879539
uguacugcgauuugaauuc

SEQ ID NO: 1914685 - RNA, 19 nt, Artificial Sequence
  Description of Artificial Sequence: Synthetic oligonucleotide
  Antisense strand to SEQ ID NO: 1914684
gaauucaaaucgcaguaca

SEQ ID NO: 1914686 - RNA, 19 nt, Artificial Sequence
  Description of Artificial Sequence: Synthetic oligonucleotide
  Sense strand starting at position 514 of SEQ ID NO: 1879539
ggaaucauagaguguguau

SEQ ID NO: 1914687 - RNA, 19 nt, Artificial Sequence
  Description of Artificial Sequence: Synthetic oligonucleotide
  Antisense strand to SEQ ID NO: 1914686
auacacacucuaugauucc

SEQ ID NO: 1914688 - RNA, 19 nt, Artificial Sequence
  Description of Artificial Sequence: Synthetic oligonucleotide
  Sense strand starting at position 580 of SEQ ID NO: 1879539
auccaugcuguggaguaua

SEQ ID NO: 1914689 - RNA, 19 nt, Artificial Sequence
  Description of Artificial Sequence: Synthetic oligonucleotide
  Antisense strand to SEQ ID NO: 1914688
uauacuccacagcauggau

SEQ ID NO: 1914690 - RNA, 19 nt, Artificial Sequence
  Description of Artificial Sequence: Synthetic oligonucleotide
  Sense strand starting at position 809 of SEQ ID NO: 1879539
gcuuuaaaugcagaguaaa

SEQ ID NO: 1914691 - RNA, 19 nt, Artificial Sequence
  Description of Artificial Sequence: Synthetic oligonucleotide
  Antisense strand to SEQ ID NO: 1914690
uuuacucugcauuuaaagc

SEQ ID NO: 1914692 - RNA, 19 nt, Artificial Sequence
  Description of Artificial Sequence: Synthetic oligonucleotide
  Sense strand starting at position 915 of SEQ ID NO: 1879539
auccaaugucaugagugua

SEQ ID NO: 1914693 - RNA, 19 nt, Artificial Sequence
  Description of Artificial Sequence: Synthetic oligonucleotide
  Antisense strand to SEQ ID NO: 1914692
uacacucaugacauuggau

SEQ ID NO: 1914694 - RNA, 19 nt, Artificial Sequence
  Description of Artificial Sequence: Synthetic oligonucleotide
  Sense strand starting at position 1025 of SEQ ID NO: 1879539
uuauauuguguuugaugac

SEQ ID NO: 1914695 - RNA, 19 nt, Artificial Sequence
  Description of Artificial Sequence: Synthetic oligonucleotide
  Antisense strand to SEQ ID NO: 1914694
gucaucaaacacaauauaa

SEQ ID NO: 1914696 - RNA, 19 nt, Artificial Sequence
  Description of Artificial Sequence: Synthetic oligonucleotide
  Sense strand starting at position 1031 of SEQ ID NO: 1879539
uguguuugaugaccaagaa

SEQ ID NO: 1914697 - RNA, 19 nt, Artificial Sequence
  Description of Artificial Sequence: Synthetic oligonucleotide
  Antisense strand to SEQ ID NO: 1914696
uucuuggucaucaaacaca

SEQ ID NO: 1914698 - RNA, 19 nt, Artificial Sequence
  Description of Artificial Sequence: Synthetic oligonucleotide
  Sense strand starting at position 1131 of SEQ ID NO: 1879539
ugcuauuagcuuuaagaua

SEQ ID NO: 1914699 - RNA, 19 nt, Artificial Sequence
  Description of Artificial Sequence: Synthetic oligonucleotide
  Antisense strand to SEQ ID NO: 1914698
uaucuuaaagcuaauagca

SEQ ID NO: 1914700 - RNA, 19 nt, Artificial Sequence
  Description of Artificial Sequence: Synthetic oligonucleotide
  Sense strand starting at position 1171 of SEQ ID NO: 1879539
uccauauaguauguauaga

SEQ ID NO: 1914701 - RNA, 19 nt, Artificial Sequence
  Description of Artificial Sequence: Synthetic oligonucleotide
  Antisense strand to SEQ ID NO: 1914700
ucuauacauacuauaugga

SEQ ID NO: 1914702 - RNA, 19 nt, Artificial Sequence
  Description of Artificial Sequence: Synthetic oligonucleotide
  Sense strand starting at position 1189 of SEQ ID NO: 1879539
auccauuggcauuguaaga

SEQ ID NO: 1914703 - RNA, 19 nt, Artificial Sequence
  Description of Artificial Sequence: Synthetic oligonucleotide
  Antisense strand to SEQ ID NO: 1914702
ucuuacaaugccaauggau

SEQ ID NO: 1914704 - RNA, 19 nt, Artificial Sequence
  Description of Artificial Sequence: Synthetic oligonucleotide
  Sense strand starting at position 1435 of SEQ ID NO: 1879539
uuuacaagugcagaaauca

SEQ ID NO: 1914705 - RNA, 19 nt, Artificial Sequence
  Description of Artificial Sequence: Synthetic oligonucleotide
  Antisense strand to SEQ ID NO: 1914704
ugauuucugcacuuguaaa

SEQ ID NO: 1914706 - RNA, 19 nt, Artificial Sequence
  Description of Artificial Sequence: Synthetic oligonucleotide
  Sense strand starting at position 1477 of SEQ ID NO: 1879539
aaaugauuaagugguggga

SEQ ID NO: 1914707 - RNA, 19 nt, Artificial Sequence
  Description of Artificial Sequence: Synthetic oligonucleotide
  Antisense strand to SEQ ID NO: 1914706
ucccaccacuuaaucauuu

SEQ ID NO: 1914708 - RNA, 19 nt, Artificial Sequence
  Description of Artificial Sequence: Synthetic oligonucleotide
  Sense strand starting at position 1578 of SEQ ID NO: 1879539
ucuggccuaucaucugaau

SEQ ID NO: 1914709 - RNA, 19 nt, Artificial Sequence
  Description of Artificial Sequence: Synthetic oligonucleotide
  Antisense strand to SEQ ID NO: 1914708
auucagaugauaggccaga

SEQ ID NO: 1914710 - RNA, 19 nt, Artificial Sequence
  Description of Artificial Sequence: Synthetic oligonucleotide
  Sense strand starting at position 1595 of SEQ ID NO: 1879539
auguuuguauccuccuaaa

SEQ ID NO: 1914711 - RNA, 19 nt, Artificial Sequence
  Description of Artificial Sequence: Synthetic oligonucleotide
  Antisense strand to SEQ ID NO: 1914710
uuuaggaggauacaaacau

SEQ ID NO: 1914712 - RNA, 19 nt, Artificial Sequence
  Description of Artificial Sequence: Synthetic oligonucleotide
  Sense strand starting at position 1693 of SEQ ID NO: 1879539
aaggcaggccaucaugaau

SEQ ID NO: 1914713 - RNA, 19 nt, Artificial Sequence
  Description of Artificial Sequence: Synthetic oligonucleotide
  Antisense strand to SEQ ID NO: 1914712
auucaugauggccugccuu

SEQ ID NO: 1914714 - RNA, 19 nt, Artificial Sequence
  Description of Artificial Sequence: Synthetic oligonucleotide
  Sense strand starting at position 1696 of SEQ ID NO: 1879539
gcaggccaucaugaaugau

SEQ ID NO: 1914715 - RNA, 19 nt, Artificial Sequence
  Description of Artificial Sequence: Synthetic oligonucleotide
  Antisense strand to SEQ ID NO: 1914714
aucauucaugauggccugc

SEQ ID NO: 1914716 - RNA, 19 nt, Artificial Sequence
  Description of Artificial Sequence: Synthetic oligonucleotide
  Sense strand starting at position 1706 of SEQ ID NO: 1879539
augaaugaucaguguccuu

SEQ ID NO: 1914717 - RNA, 19 nt, Artificial Sequence
  Description of Artificial Sequence: Synthetic oligonucleotide
  Antisense strand to SEQ ID NO: 1914716
aaggacacugaucauucau

SEQ ID NO: 1914718 - RNA, 19 nt, Artificial Sequence
  Description of Artificial Sequence: Synthetic oligonucleotide
  Sense strand starting at position 1803 of SEQ ID NO: 1879539
gaaguuagcccuuaccaga

SEQ ID NO: 1914719 - RNA, 19 nt, Artificial Sequence
  Description of Artificial Sequence: Synthetic oligonucleotide
  Antisense strand to SEQ ID NO: 1914718
ucugguaagggcuaacuuc

SEQ ID NO: 1914720 - RNA, 19 nt, Artificial Sequence
  Description of Artificial Sequence: Synthetic oligonucleotide
  Sense strand starting at position 1894 of SEQ ID NO: 1879539
uuguaagucacucagguau

SEQ ID NO: 1914721 - RNA, 19 nt, Artificial Sequence
  Description of Artificial Sequence: Synthetic oligonucleotide
  Antisense strand to SEQ ID NO: 1914720
auaccugagugacuuacaa

SEQ ID NO: 1914722 - RNA, 19 nt, Artificial Sequence
  Description of Artificial Sequence: Synthetic oligonucleotide
  Sense strand starting at position 1942 of SEQ ID NO: 1879539
uaagauaagcagugauucu

SEQ ID NO: 1914723 - RNA, 19 nt, Artificial Sequence
  Description of Artificial Sequence: Synthetic oligonucleotide
  Antisense strand to SEQ ID NO: 1914722
agaaucacugcuuaucuua

SEQ ID NO: 1914724 - RNA, 19 nt, Artificial Sequence
  Description of Artificial Sequence: Synthetic oligonucleotide
  Sense strand starting at position 2083 of SEQ ID NO: 1879539
ggaucucugggcuaucaag

SEQ ID NO: 1914725 - RNA, 19 nt, Artificial Sequence
  Description of Artificial Sequence: Synthetic oligonucleotide
  Antisense strand to SEQ ID NO: 1914724
cuugauagcccagagaucc

SEQ ID NO: 1914726 - RNA, 19 nt, Artificial Sequence
  Description of Artificial Sequence: Synthetic oligonucleotide
  Sense strand starting at position 2271 of SEQ ID NO: 1879539
gggucugaagcuuacauaa

SEQ ID NO: 1914727 - RNA, 19 nt, Artificial Sequence
  Description of Artificial Sequence: Synthetic oligonucleotide
  Antisense strand to SEQ ID NO: 1914726
uuauguaagcuucagaccc

SEQ ID NO: 1914728 - RNA, 19 nt, Artificial Sequence
  Description of Artificial Sequence: Synthetic oligonucleotide
  Sense strand starting at position 2504 of SEQ ID NO: 1879539
auauauucuugggucacga

SEQ ID NO: 1914729 - RNA, 19 nt, Artificial Sequence
  Description of Artificial Sequence: Synthetic oligonucleotide
  Antisense strand to SEQ ID NO: 1914728
ucgugacccaagaauauau

SEQ ID NO: 1914730 - RNA, 19 nt, Artificial Sequence
  Description of Artificial Sequence: Synthetic oligonucleotide
  Sense strand starting at position 2577 of SEQ ID NO: 1879539
auagauuagucuuuccagu

SEQ ID NO: 1914731 - RNA, 19 nt, Artificial Sequence
  Description of Artificial Sequence: Synthetic oligonucleotide
  Antisense strand to SEQ ID NO: 1914730
acuggaaagacuaaucuau

SEQ ID NO: 1914732 - RNA, 19 nt, Artificial Sequence
  Description of Artificial Sequence: Synthetic oligonucleotide
  Sense strand starting at position 2579 of SEQ ID NO: 1879539
agauuagucuuuccaguag

SEQ ID NO: 1914733 - RNA, 19 nt, Artificial Sequence
  Description of Artificial Sequence: Synthetic oligonucleotide
  Antisense strand to SEQ ID NO: 1914732
cuacuggaaagacuaaucu

SEQ ID NO: 1914734 - RNA, 19 nt, Artificial Sequence
  Description of Artificial Sequence: Synthetic oligonucleotide
  Sense strand starting at position 2583 of SEQ ID NO: 1879539
uagucuuuccaguagcaug

SEQ ID NO: 1914735 - RNA, 19 nt, Artificial Sequence
  Description of Artificial Sequence: Synthetic oligonucleotide
  Antisense strand to SEQ ID NO: 1914734
caugcuacuggaaagacua

SEQ ID NO: 1914736 - RNA, 19 nt, Artificial Sequence
  Description of Artificial Sequence: Synthetic oligonucleotide
  Sense strand starting at position 2593 of SEQ ID NO: 1879539
aguagcaugguugaucaaa

SEQ ID NO: 1914737 - RNA, 19 nt, Artificial Sequence
  Description of Artificial Sequence: Synthetic oligonucleotide
  Antisense strand to SEQ ID NO: 1914736
uuugaucaaccaugcuacu

SEQ ID NO: 1914738 - RNA, 19 nt, Artificial Sequence
  Description of Artificial Sequence: Synthetic oligonucleotide
  Sense strand starting at position 2595 of SEQ ID NO: 1879539
uagcaugguugaucaaauu

SEQ ID NO: 1914739 - RNA, 19 nt, Artificial Sequence
  Description of Artificial Sequence: Synthetic oligonucleotide
  Antisense strand to SEQ ID NO: 1914738
aauuugaucaaccaugcua

SEQ ID NO: 1914740 - RNA, 19 nt, Artificial Sequence
  Description of Artificial Sequence: Synthetic oligonucleotide
  Sense strand starting at position 2674 of SEQ ID NO: 1879539
ucacauaaaugcuugggau

SEQ ID NO: 1914741 - RNA, 19 nt, Artificial Sequence
  Description of Artificial Sequence: Synthetic oligonucleotide
  Antisense strand to SEQ ID NO: 1914740
aucccaagcauuuauguga

SEQ ID NO: 1914742 - RNA, 19 nt, Artificial Sequence
  Description of Artificial Sequence: Synthetic oligonucleotide
  Sense strand starting at position 2676 of SEQ ID NO: 1879539
acauaaaugcuugggauca

SEQ ID NO: 1914743 - RNA, 19 nt, Artificial Sequence
  Description of Artificial Sequence: Synthetic oligonucleotide
  Antisense strand to SEQ ID NO: 1914742
ugaucccaagcauuuaugu

SEQ ID NO: 1914744 - RNA, 19 nt, Artificial Sequence
  Description of Artificial Sequence: Synthetic oligonucleotide
  Sense strand starting at position 2980 of SEQ ID NO: 1879539
acguauuacgaucacuuaa

SEQ ID NO: 1914745 - RNA, 19 nt, Artificial Sequence
  Description of Artificial Sequence: Synthetic oligonucleotide
  Antisense strand to SEQ ID NO: 1914744
uuaagugaucguaauacgu

SEQ ID NO: 1914746 - RNA, 19 nt, Artificial Sequence
  Description of Artificial Sequence: Synthetic oligonucleotide
  Sense strand starting at position 2982 of SEQ ID NO: 1879539
guauuacgaucacuuaacu

SEQ ID NO: 1914747 - RNA, 19 nt, Artificial Sequence
  Description of Artificial Sequence: Synthetic oligonucleotide
  Antisense strand to SEQ ID NO: 1914746
aguuaagugaucguaauac

SEQ ID NO: 1914748 - RNA, 19 nt, Artificial Sequence
  Description of Artificial Sequence: Synthetic oligonucleotide
  Sense strand starting at position 3027 of SEQ ID NO: 1879539
guggcccucagaggaaaua

SEQ ID NO: 1914749 - RNA, 19 nt, Artificial Sequence
  Description of Artificial Sequence: Synthetic oligonucleotide
  Antisense strand to SEQ ID NO: 1914748
uauuuccucugagggccac

SEQ ID NO: 1914750 - RNA, 19 nt, Artificial Sequence
  Description of Artificial Sequence: Synthetic oligonucleotide
  Sense strand starting at position 3507 of SEQ ID NO: 1879539
acagauaaguagcucuuaa

SEQ ID NO: 1914751 - RNA, 19 nt, Artificial Sequence
  Description of Artificial Sequence: Synthetic oligonucleotide
  Antisense strand to SEQ ID NO: 1914750
uuaagagcuacuuaucugu

SEQ ID NO: 1914752 - RNA, 19 nt, Artificial Sequence
  Description of Artificial Sequence: Synthetic oligonucleotide
  Sense strand starting at position 79 of SEQ ID NO: 1879540
guaaccuauuucgaaauua

SEQ ID NO: 1914753 - RNA, 19 nt, Artificial Sequence
  Description of Artificial Sequence: Synthetic oligonucleotide
  Antisense strand to SEQ ID NO: 1914752
uaauuucgaaauagguuac

SEQ ID NO: 1914754 - RNA, 19 nt, Artificial Sequence
  Description of Artificial Sequence: Synthetic oligonucleotide
  Sense strand starting at position 243 of SEQ ID NO: 1879540
guacuaugggcugaguauu

SEQ ID NO: 1914755 - RNA, 19 nt, Artificial Sequence
  Description of Artificial Sequence: Synthetic oligonucleotide
  Antisense strand to SEQ ID NO: 1914754
aauacucagcccauaguac

SEQ ID NO: 1914756 - RNA, 19 nt, Artificial Sequence
  Description of Artificial Sequence: Synthetic oligonucleotide
  Sense strand starting at position 249 of SEQ ID NO: 1879540
ugggcugaguauucaaaga

SEQ ID NO: 1914757 - RNA, 19 nt, Artificial Sequence
  Description of Artificial Sequence: Synthetic oligonucleotide
  Antisense strand to SEQ ID NO: 1914756
ucuuugaauacucagccca

SEQ ID NO: 1914758 - RNA, 19 nt, Artificial Sequence
  Description of Artificial Sequence: Synthetic oligonucleotide
  Sense strand starting at position 320 of SEQ ID NO: 1879540
gaaggcacuuucucaagga

SEQ ID NO: 1914759 - RNA, 19 nt, Artificial Sequence
  Description of Artificial Sequence: Synthetic oligonucleotide
  Antisense strand to SEQ ID NO: 1914758
uccuugagaaagugccuuc

SEQ ID NO: 1914760 - RNA, 19 nt, Artificial Sequence
  Description of Artificial Sequence: Synthetic oligonucleotide
  Sense strand starting at position 459 of SEQ ID NO: 1879540
ggagcagauguuugaagga

SEQ ID NO: 1914761 - RNA, 19 nt, Artificial Sequence
  Description of Artificial Sequence: Synthetic oligonucleotide
  Antisense strand to SEQ ID NO: 1914760
uccuucaaacaucugcucc

SEQ ID NO: 1914762 - RNA, 19 nt, Artificial Sequence
  Description of Artificial Sequence: Synthetic oligonucleotide
  Sense strand starting at position 551 of SEQ ID NO: 1879540
aguucuuugggaggagaac

SEQ ID NO: 1914763 - RNA, 19 nt, Artificial Sequence
  Description of Artificial Sequence: Synthetic oligonucleotide
  Antisense strand to SEQ ID NO: 1914762
guucuccucccaaagaacu

SEQ ID NO: 1914764 - RNA, 19 nt, Artificial Sequence
  Description of Artificial Sequence: Synthetic oligonucleotide
  Sense strand starting at position 621 of SEQ ID NO: 1879540
gggugacaccuuuggccaa

SEQ ID NO: 1914765 - RNA, 19 nt, Artificial Sequence
  Description of Artificial Sequence: Synthetic oligonucleotide
  Antisense strand to SEQ ID NO: 1914764
uuggccaaaggugucaccc

SEQ ID NO: 1914766 - RNA, 19 nt, Artificial Sequence
  Description of Artificial Sequence: Synthetic oligonucleotide
  Sense strand starting at position 670 of SEQ ID NO: 1879540
agggcucuuucugucugaa

SEQ ID NO: 1914767 - RNA, 19 nt, Artificial Sequence
  Description of Artificial Sequence: Synthetic oligonucleotide
  Antisense strand to SEQ ID NO: 1914766
uucagacagaaagagcccu

SEQ ID NO: 1914768 - RNA, 19 nt, Artificial Sequence
  Description of Artificial Sequence: Synthetic oligonucleotide
  Sense strand starting at position 998 of SEQ ID NO: 1879540
ugacuagaguccuugaaca

SEQ ID NO: 1914769 - RNA, 19 nt, Artificial Sequence
  Description of Artificial Sequence: Synthetic oligonucleotide
  Antisense strand to SEQ ID NO: 1914768
uguucaaggacucuaguca

SEQ ID NO: 1914770 - RNA, 19 nt, Artificial Sequence
  Description of Artificial Sequence: Synthetic oligonucleotide
  Sense strand starting at position 1037 of SEQ ID NO: 1879540
cgugaugggugacuuaaug

SEQ ID NO: 1914771 - RNA, 19 nt, Artificial Sequence
  Description of Artificial Sequence: Synthetic oligonucleotide
  Antisense strand to SEQ ID NO: 1914770
cauuaagucacccaucacg

SEQ ID NO: 1914772 - RNA, 19 nt, Artificial Sequence
  Description of Artificial Sequence: Synthetic oligonucleotide
  Sense strand starting at position 1241 of SEQ ID NO: 1879540
uuuccuccggauuaaugaa

SEQ ID NO: 1914773 - RNA, 19 nt, Artificial Sequence
  Description of Artificial Sequence: Synthetic oligonucleotide
  Antisense strand to SEQ ID NO: 1914772
uucauuaauccggaggaaa

SEQ ID NO: 1914774 - RNA, 19 nt, Artificial Sequence
  Description of Artificial Sequence: Synthetic oligonucleotide
  Sense strand starting at position 1281 of SEQ ID NO: 1879540
ugcuguaaugauuaauaug

SEQ ID NO: 1914775 - RNA, 19 nt, Artificial Sequence
  Description of Artificial Sequence: Synthetic oligonucleotide
  Antisense strand to SEQ ID NO: 1914774
cauauuaaucauuacagca

SEQ ID NO: 1914776 - RNA, 19 nt, Artificial Sequence
  Description of Artificial Sequence: Synthetic oligonucleotide
  Sense strand starting at position 1326 of SEQ ID NO: 1879540
acaggaaagcgaugugaga

SEQ ID NO: 1914777 - RNA, 19 nt, Artificial Sequence
  Description of Artificial Sequence: Synthetic oligonucleotide
  Antisense strand to SEQ ID NO: 1914776
ucucacaucgcuuuccugu

SEQ ID NO: 1914778 - RNA, 19 nt, Artificial Sequence
  Description of Artificial Sequence: Synthetic oligonucleotide
  Sense strand starting at position 1541 of SEQ ID NO: 1879540
ucaagucaguuccugagga

SEQ ID NO: 1914779 - RNA, 19 nt, Artificial Sequence
  Description of Artificial Sequence: Synthetic oligonucleotide
  Antisense strand to SEQ ID NO: 1914778
uccucaggaacugacuuga

SEQ ID NO: 1914780 - RNA, 19 nt, Artificial Sequence
  Description of Artificial Sequence: Synthetic oligonucleotide
  Sense strand starting at position 1575 of SEQ ID NO: 1879540
caguuauuagcauaagguu

SEQ ID NO: 1914781 - RNA, 19 nt, Artificial Sequence
  Description of Artificial Sequence: Synthetic oligonucleotide
  Antisense strand to SEQ ID NO: 1914780
aaccuuaugcuaauaacug

SEQ ID NO: 1914782 - RNA, 19 nt, Artificial Sequence
  Description of Artificial Sequence: Synthetic oligonucleotide
  Sense strand starting at position 1607 of SEQ ID NO: 1879540
ggucauggaccuugaagau

SEQ ID NO: 1914783 - RNA, 19 nt, Artificial Sequence
  Description of Artificial Sequence: Synthetic oligonucleotide
  Antisense strand to SEQ ID NO: 1914782
aucuucaagguccaugacc

SEQ ID NO: 1914784 - RNA, 19 nt, Artificial Sequence
  Description of Artificial Sequence: Synthetic oligonucleotide
  Sense strand starting at position 1930 of SEQ ID NO: 1879540
ccaggaugaggucaugcuu

SEQ ID NO: 1914785 - RNA, 19 nt, Artificial Sequence
  Description of Artificial Sequence: Synthetic oligonucleotide
  Antisense strand to SEQ ID NO: 1914784
aagcaugaccucauccugg

SEQ ID NO: 1914786 - RNA, 19 nt, Artificial Sequence
  Description of Artificial Sequence: Synthetic oligonucleotide
  Sense strand starting at position 2087 of SEQ ID NO: 1879540
ugggaaauacuuugcaaug

SEQ ID NO: 1914787 - RNA, 19 nt, Artificial Sequence
  Description of Artificial Sequence: Synthetic oligonucleotide
  Antisense strand to SEQ ID NO: 1914786
cauugcaaaguauuuccca

SEQ ID NO: 1914788 - RNA, 19 nt, Artificial Sequence
  Description of Artificial Sequence: Synthetic oligonucleotide
  Sense strand starting at position 2105 of SEQ ID NO: 1879540
gcaaaugaguccuccaaag

SEQ ID NO: 1914789 - RNA, 19 nt, Artificial Sequence
  Description of Artificial Sequence: Synthetic oligonucleotide
  Antisense strand to SEQ ID NO: 1914788
cuuuggaggacucauuugc

SEQ ID NO: 1914790 - RNA, 19 nt, Artificial Sequence
  Description of Artificial Sequence: Synthetic oligonucleotide
  Sense strand starting at position 2166 of SEQ ID NO: 1879540
auuagaaauccuggccaac

SEQ ID NO: 1914791 - RNA, 19 nt, Artificial Sequence
  Description of Artificial Sequence: Synthetic oligonucleotide
  Antisense strand to SEQ ID NO: 1914790
guuggccaggauuucuaau

SEQ ID NO: 1914792 - RNA, 19 nt, Artificial Sequence
  Description of Artificial Sequence: Synthetic oligonucleotide
  Sense strand starting at position 2427 of SEQ ID NO: 1879540
gucauugucucuccugaaa

SEQ ID NO: 1914793 - RNA, 19 nt, Artificial Sequence
  Description of Artificial Sequence: Synthetic oligonucleotide
  Antisense strand to SEQ ID NO: 1914792
uuucaggagagacaaugac

SEQ ID NO: 1914794 - RNA, 19 nt, Artificial Sequence
  Description of Artificial Sequence: Synthetic oligonucleotide
  Sense strand starting at position 2445 of SEQ ID NO: 1879540
aucaccugucagugcaaga

SEQ ID NO: 1914795 - RNA, 19 nt, Artificial Sequence
  Description of Artificial Sequence: Synthetic oligonucleotide
  Antisense strand to SEQ ID NO: 1914794
ucuugcacugacaggugau

SEQ ID NO: 1914796 - RNA, 19 nt, Artificial Sequence
  Description of Artificial Sequence: Synthetic oligonucleotide
  Sense strand starting at position 2490 of SEQ ID NO: 1879540
uugaucuaagcauguauau

SEQ ID NO: 1914797 - RNA, 19 nt, Artificial Sequence
  Description of Artificial Sequence: Synthetic oligonucleotide
  Antisense strand to SEQ ID NO: 1914796
auauacaugcuuagaucaa

SEQ ID NO: 1914798 - RNA, 19 nt, Artificial Sequence
  Description of Artificial Sequence: Synthetic oligonucleotide
  Sense strand starting at position 2643 of SEQ ID NO: 1879540
ugugaugggaacuguacaa

SEQ ID NO: 1914799 - RNA, 19 nt, Artificial Sequence
  Description of Artificial Sequence: Synthetic oligonucleotide
  Antisense strand to SEQ ID NO: 1914798
uuguacaguucccaucaca

SEQ ID NO: 1914800 - RNA, 19 nt, Artificial Sequence
  Description of Artificial Sequence: Synthetic oligonucleotide
  Sense strand starting at position 2691 of SEQ ID NO: 1879540
uuacauacucaguagguga

SEQ ID NO: 1914801 - RNA, 19 nt, Artificial Sequence
  Description of Artificial Sequence: Synthetic oligonucleotide
  Antisense strand to SEQ ID NO: 1914800
ucaccuacugaguauguaa

SEQ ID NO: 1914802 - RNA, 19 nt, Artificial Sequence
  Description of Artificial Sequence: Synthetic oligonucleotide
  Sense strand starting at position 2693 of SEQ ID NO: 1879540
acauacucaguaggugaaa

SEQ ID NO: 1914803 - RNA, 19 nt, Artificial Sequence
  Description of Artificial Sequence: Synthetic oligonucleotide
  Antisense strand to SEQ ID NO: 1914802
uuucaccuacugaguaugu

SEQ ID NO: 1914804 - RNA, 19 nt, Artificial Sequence
  Description of Artificial Sequence: Synthetic oligonucleotide
  Sense strand starting at position 2695 of SEQ ID NO: 1879540
auacucaguaggugaaaga

SEQ ID NO: 1914805 - RNA, 19 nt, Artificial Sequence
  Description of Artificial Sequence: Synthetic oligonucleotide
  Antisense strand to SEQ ID NO: 1914804
ucuuucaccuacugaguau

SEQ ID NO: 1914806 - RNA, 19 nt, Artificial Sequence
  Description of Artificial Sequence: Synthetic oligonucleotide
  Sense strand starting at position 2706 of SEQ ID NO: 1879540
gugaaagagugagccaauu

SEQ ID NO: 1914807 - RNA, 19 nt, Artificial Sequence
  Description of Artificial Sequence: Synthetic oligonucleotide
  Antisense strand to SEQ ID NO: 1914806
aauuggcucacucuuucac

SEQ ID NO: 1914808 - RNA, 19 nt, Artificial Sequence
  Description of Artificial Sequence: Synthetic oligonucleotide
  Sense strand starting at position 2781 of SEQ ID NO: 1879540
uccacagaagguugcuaaa

SEQ ID NO: 1914809 - RNA, 19 nt, Artificial Sequence
  Description of Artificial Sequence: Synthetic oligonucleotide
  Antisense strand to SEQ ID NO: 1914808
uuuagcaaccuucugugga

SEQ ID NO: 1914810 - RNA, 19 nt, Artificial Sequence
  Description of Artificial Sequence: Synthetic oligonucleotide
  Sense strand starting at position 2816 of SEQ ID NO: 1879540
aauguccaucgauggauaa

SEQ ID NO: 1914811 - RNA, 19 nt, Artificial Sequence
  Description of Artificial Sequence: Synthetic oligonucleotide
  Antisense strand to SEQ ID NO: 1914810
uuauccaucgauggacauu

SEQ ID NO: 1914812 - RNA, 19 nt, Artificial Sequence
  Description of Artificial Sequence: Synthetic oligonucleotide
  Sense strand starting at position 2817 of SEQ ID NO: 1879540
auguccaucgauggauaaa

SEQ ID NO: 1914813 - RNA, 19 nt, Artificial Sequence
  Description of Artificial Sequence: Synthetic oligonucleotide
  Antisense strand to SEQ ID NO: 1914812
uuuauccaucgauggacau

SEQ ID NO: 1914814 - RNA, 19 nt, Artificial Sequence
  Description of Artificial Sequence: Synthetic oligonucleotide
  Sense strand starting at position 2932 of SEQ ID NO: 1879540
acugcugucagugggaaca

SEQ ID NO: 1914815 - RNA, 19 nt, Artificial Sequence
  Description of Artificial Sequence: Synthetic oligonucleotide
  Antisense strand to SEQ ID NO: 1914814
uguucccacugacagcagu

SEQ ID NO: 1914816 - RNA, 19 nt, Artificial Sequence
  Description of Artificial Sequence: Synthetic oligonucleotide
  Sense strand starting at position 3152 of SEQ ID NO: 1879540
uuuccugaagccgagaauu

SEQ ID NO: 1914817 - RNA, 19 nt, Artificial Sequence
  Description of Artificial Sequence: Synthetic oligonucleotide
  Antisense strand to SEQ ID NO: 1914816
aauucucggcuucaggaaa

SEQ ID NO: 1914818 - RNA, 19 nt, Artificial Sequence
  Description of Artificial Sequence: Synthetic oligonucleotide
  Sense strand starting at position 3212 of SEQ ID NO: 1879540
ugguauauuugaguugcca

SEQ ID NO: 1914819 - RNA, 19 nt, Artificial Sequence
  Description of Artificial Sequence: Synthetic oligonucleotide
  Antisense strand to SEQ ID NO: 1914818
uggcaacucaaauauacca

SEQ ID NO: 1914820 - RNA, 19 nt, Artificial Sequence
  Description of Artificial Sequence: Synthetic oligonucleotide
  Sense strand starting at position 3216 of SEQ ID NO: 1879540
auauuugaguugccagcau

SEQ ID NO: 1914821 - RNA, 19 nt, Artificial Sequence
  Description of Artificial Sequence: Synthetic oligonucleotide
  Antisense strand to SEQ ID NO: 1914820
augcuggcaacucaaauau

SEQ ID NO: 1914822 - RNA, 19 nt, Artificial Sequence
  Description of Artificial Sequence: Synthetic oligonucleotide
  Sense strand starting at position 3220 of SEQ ID NO: 1879540
uugaguugccagcaucacu

SEQ ID NO: 1914823 - RNA, 19 nt, Artificial Sequence
  Description of Artificial Sequence: Synthetic oligonucleotide
  Antisense strand to SEQ ID NO: 1914822
agugaugcuggcaacucaa

SEQ ID NO: 1914824 - RNA, 19 nt, Artificial Sequence
  Description of Artificial Sequence: Synthetic oligonucleotide
  Sense strand starting at position 3620 of SEQ ID NO: 1879540
ucugauauguuucuaugac

SEQ ID NO: 1914825 - RNA, 19 nt, Artificial Sequence
  Description of Artificial Sequence: Synthetic oligonucleotide
  Antisense strand to SEQ ID NO: 1914824
gucauagaaacauaucaga

SEQ ID NO: 1914826 - RNA, 19 nt, Artificial Sequence
  Description of Artificial Sequence: Synthetic oligonucleotide
  Sense strand starting at position 3628 of SEQ ID NO: 1879540
guuucuaugacauggauga

SEQ ID NO: 1914827 - RNA, 19 nt, Artificial Sequence
  Description of Artificial Sequence: Synthetic oligonucleotide
  Antisense strand to SEQ ID NO: 1914826
ucauccaugucauagaaac

SEQ ID NO: 1914828 - RNA, 19 nt, Artificial Sequence
  Description of Artificial Sequence: Synthetic oligonucleotide
  Sense strand starting at position 3723 of SEQ ID NO: 1879540
cacuuauacgaguagucaa

SEQ ID NO: 1914829 - RNA, 19 nt, Artificial Sequence
  Description of Artificial Sequence: Synthetic oligonucleotide
  Antisense strand to SEQ ID NO: 1914828
uugacuacucguauaagug

SEQ ID NO: 1914830 - RNA, 19 nt, Artificial Sequence
  Description of Artificial Sequence: Synthetic oligonucleotide
  Sense strand starting at position 3726 of SEQ ID NO: 1879540
uuauacgaguagucaaauu

SEQ ID NO: 1914831 - RNA, 19 nt, Artificial Sequence
  Description of Artificial Sequence: Synthetic oligonucleotide
  Antisense strand to SEQ ID NO: 1914830
aauuugacuacucguauaa

SEQ ID NO: 1914832 - RNA, 19 nt, Artificial Sequence
  Description of Artificial Sequence: Synthetic oligonucleotide
  Sense strand starting at position 4 of SEQ ID NO: 1879541
ccauuaggauguuuccuua

SEQ ID NO: 1914833 - RNA, 19 nt, Artificial Sequence
  Description of Artificial Sequence: Synthetic oligonucleotide
  Antisense strand to SEQ ID NO: 1914832
uaaggaaacauccuaaugg

SEQ ID NO: 1914834 - RNA, 19 nt, Artificial Sequence
  Description of Artificial Sequence: Synthetic oligonucleotide
  Sense strand starting at position 8 of SEQ ID NO: 1879541
uaggauguuuccuuaagga

SEQ ID NO: 1914835 - RNA, 19 nt, Artificial Sequence
  Description of Artificial Sequence: Synthetic oligonucleotide
  Antisense strand to SEQ ID NO: 1914834
uccuuaaggaaacauccua

SEQ ID NO: 1914836 - RNA, 19 nt, Artificial Sequence
  Description of Artificial Sequence: Synthetic oligonucleotide
  Sense strand starting at position 120 of SEQ ID NO: 1879541
agguauaauuuagauguca

SEQ ID NO: 1914837 - RNA, 19 nt, Artificial Sequence
  Description of Artificial Sequence: Synthetic oligonucleotide
  Antisense strand to SEQ ID NO: 1914836
ugacaucuaaauuauaccu

SEQ ID NO: 1914838 - RNA, 19 nt, Artificial Sequence
  Description of Artificial Sequence: Synthetic oligonucleotide
  Sense strand starting at position 250 of SEQ ID NO: 1879541
ugaccagcuccauacugaa

SEQ ID NO: 1914839 - RNA, 19 nt, Artificial Sequence
  Description of Artificial Sequence: Synthetic oligonucleotide
  Antisense strand to SEQ ID NO: 1914838
uucaguauggagcugguca

SEQ ID NO: 1914840 - RNA, 19 nt, Artificial Sequence
  Description of Artificial Sequence: Synthetic oligonucleotide
  Sense strand starting at position 427 of SEQ ID NO: 1879541
gggucuguaggcuaauuaa

SEQ ID NO: 1914841 - RNA, 19 nt, Artificial Sequence
  Description of Artificial Sequence: Synthetic oligonucleotide
  Antisense strand to SEQ ID NO: 1914840
uuaauuagccuacagaccc

SEQ ID NO: 1914842 - RNA, 19 nt, Artificial Sequence
  Description of Artificial Sequence: Synthetic oligonucleotide
  Sense strand starting at position 430 of SEQ ID NO: 1879541
ucuguaggcuaauuaacaa

SEQ ID NO: 1914843 - RNA, 19 nt, Artificial Sequence
  Description of Artificial Sequence: Synthetic oligonucleotide
  Antisense strand to SEQ ID NO: 1914842
uuguuaauuagccuacaga

SEQ ID NO: 1914844 - RNA, 19 nt, Artificial Sequence
  Description of Artificial Sequence: Synthetic oligonucleotide
  Sense strand starting at position 750 of SEQ ID NO: 1879541
uccaguuaugaccaucuuu

SEQ ID NO: 1914845 - RNA, 19 nt, Artificial Sequence
  Description of Artificial Sequence: Synthetic oligonucleotide
  Antisense strand to SEQ ID NO: 1914844
aaagauggucauaacugga

SEQ ID NO: 1914846 - RNA, 19 nt, Artificial Sequence
  Description of Artificial Sequence: Synthetic oligonucleotide
  Sense strand starting at position 817 of SEQ ID NO: 1879541
ggaauaaguuguccaggga

SEQ ID NO: 1914847 - RNA, 19 nt, Artificial Sequence
  Description of Artificial Sequence: Synthetic oligonucleotide
  Antisense strand to SEQ ID NO: 1914846
ucccuggacaacuuauucc

SEQ ID NO: 1914848 - RNA, 19 nt, Artificial Sequence
  Description of Artificial Sequence: Synthetic oligonucleotide
  Sense strand starting at position 820 of SEQ ID NO: 1879541
auaaguuguccagggacuu

SEQ ID NO: 1914849 - RNA, 19 nt, Artificial Sequence
  Description of Artificial Sequence: Synthetic oligonucleotide
  Antisense strand to SEQ ID NO: 1914848
aagucccuggacaacuuau

SEQ ID NO: 1914850 - RNA, 19 nt, Artificial Sequence
  Description of Artificial Sequence: Synthetic oligonucleotide
  Sense strand starting at position 821 of SEQ ID NO: 1879541
uaaguuguccagggacuua

SEQ ID NO: 1914851 - RNA, 19 nt, Artificial Sequence
  Description of Artificial Sequence: Synthetic oligonucleotide
  Antisense strand to SEQ ID NO: 1914850
uaagucccuggacaacuua

SEQ ID NO: 1914852 - RNA, 19 nt, Artificial Sequence
  Description of Artificial Sequence: Synthetic oligonucleotide
  Sense strand starting at position 880 of SEQ ID NO: 1879541
uuccuccugucugugauuu

SEQ ID NO: 1914853 - RNA, 19 nt, Artificial Sequence
  Description of Artificial Sequence: Synthetic oligonucleotide
  Antisense strand to SEQ ID NO: 1914852
aaaucacagacaggaggaa

SEQ ID NO: 1914854 - RNA, 19 nt, Artificial Sequence
  Description of Artificial Sequence: Synthetic oligonucleotide
  Sense strand starting at position 890 of SEQ ID NO: 1879541
cugugauuuggcugugcac

SEQ ID NO: 1914855 - RNA, 19 nt, Artificial Sequence
  Description of Artificial Sequence: Synthetic oligonucleotide
  Antisense strand to SEQ ID NO: 1914854
gugcacagccaaaucacag

SEQ ID NO: 1914856 - RNA, 19 nt, Artificial Sequence
  Description of Artificial Sequence: Synthetic oligonucleotide
  Sense strand starting at position 915 of SEQ ID NO: 1879541
gugagguuggacuggagau

SEQ ID NO: 1914857 - RNA, 19 nt, Artificial Sequence
  Description of Artificial Sequence: Synthetic oligonucleotide
  Antisense strand to SEQ ID NO: 1914856
aucuccaguccaaccucac

SEQ ID NO: 1914858 - RNA, 19 nt, Artificial Sequence
  Description of Artificial Sequence: Synthetic oligonucleotide
  Sense strand starting at position 955 of SEQ ID NO: 1879541
ggaggagcuucuuccuuaa

SEQ ID NO: 1914859 - RNA, 19 nt, Artificial Sequence
  Description of Artificial Sequence: Synthetic oligonucleotide
  Antisense strand to SEQ ID NO: 1914858
uuaaggaagaagcuccucc

SEQ ID NO: 1914860 - RNA, 19 nt, Artificial Sequence
  Description of Artificial Sequence: Synthetic oligonucleotide
  Sense strand starting at position 1174 of SEQ ID NO: 1879541
cugucuuaucucuaaguuc

SEQ ID NO: 1914861 - RNA, 19 nt, Artificial Sequence
  Description of Artificial Sequence: Synthetic oligonucleotide
  Antisense strand to SEQ ID NO: 1914860
gaacuuagagauaagacag

SEQ ID NO: 1914862 - RNA, 19 nt, Artificial Sequence
  Description of Artificial Sequence: Synthetic oligonucleotide
  Sense strand starting at position 1206 of SEQ ID NO: 1879541
aaggguaguuauguauaaa

SEQ ID NO: 1914863 - RNA, 19 nt, Artificial Sequence
  Description of Artificial Sequence: Synthetic oligonucleotide
  Antisense strand to SEQ ID NO: 1914862
uuuauacauaacuacccuu

SEQ ID NO: 1914864 - RNA, 19 nt, Artificial Sequence
  Description of Artificial Sequence: Synthetic oligonucleotide
  Sense strand starting at position 1207 of SEQ ID NO: 1879541
aggguaguuauguauaaag

SEQ ID NO: 1914865 - RNA, 19 nt, Artificial Sequence
  Description of Artificial Sequence: Synthetic oligonucleotide
  Antisense strand to SEQ ID NO: 1914864
cuuuauacauaacuacccu

SEQ ID NO: 1914866 - RNA, 19 nt, Artificial Sequence
  Description of Artificial Sequence: Synthetic oligonucleotide
  Sense strand starting at position 1209 of SEQ ID NO: 1879541
gguaguuauguauaaagga

SEQ ID NO: 1914867 - RNA, 19 nt, Artificial Sequence
  Description of Artificial Sequence: Synthetic oligonucleotide
  Antisense strand to SEQ ID NO: 1914866
uccuuuauacauaacuacc

SEQ ID NO: 1914868 - RNA, 19 nt, Artificial Sequence
  Description of Artificial Sequence: Synthetic oligonucleotide
  Sense strand starting at position 1252 of SEQ ID NO: 1879541
ucucuaguccuagagaguu

SEQ ID NO: 1914869 - RNA, 19 nt, Artificial Sequence
  Description of Artificial Sequence: Synthetic oligonucleotide
  Antisense strand to SEQ ID NO: 1914868
aacucucuaggacuagaga

SEQ ID NO: 1914870 - RNA, 19 nt, Artificial Sequence
  Description of Artificial Sequence: Synthetic oligonucleotide
  Sense strand starting at position 1260 of SEQ ID NO: 1879541
ccuagagaguuacugcuaa

SEQ ID NO: 1914871 - RNA, 19 nt, Artificial Sequence
  Description of Artificial Sequence: Synthetic oligonucleotide
  Antisense strand to SEQ ID NO: 1914870
uuagcaguaacucucuagg

SEQ ID NO: 1914872 - RNA, 19 nt, Artificial Sequence
  Description of Artificial Sequence: Synthetic oligonucleotide
  Sense strand starting at position 1369 of SEQ ID NO: 1879541
guuccuugugcuuagaaua

SEQ ID NO: 1914873 - RNA, 19 nt, Artificial Sequence
  Description of Artificial Sequence: Synthetic oligonucleotide
  Antisense strand to SEQ ID NO: 1914872
uauucuaagcacaaggaac

SEQ ID NO: 1914874 - RNA, 19 nt, Artificial Sequence
  Description of Artificial Sequence: Synthetic oligonucleotide
  Sense strand starting at position 1621 of SEQ ID NO: 1879541
acaccauaugucugggaca

SEQ ID NO: 1914875 - RNA, 19 nt, Artificial Sequence
  Description of Artificial Sequence: Synthetic oligonucleotide
  Antisense strand to SEQ ID NO: 1914874
ugucccagacauauggugu

SEQ ID NO: 1914876 - RNA, 19 nt, Artificial Sequence
  Description of Artificial Sequence: Synthetic oligonucleotide
  Sense strand starting at position 1623 of SEQ ID NO: 1879541
accauaugucugggacaua

SEQ ID NO: 1914877 - RNA, 19 nt, Artificial Sequence
  Description of Artificial Sequence: Synthetic oligonucleotide
  Antisense strand to SEQ ID NO: 1914876
uaugucccagacauauggu

SEQ ID NO: 1914878 - RNA, 19 nt, Artificial Sequence
  Description of Artificial Sequence: Synthetic oligonucleotide
  Sense strand starting at position 1633 of SEQ ID NO: 1879541
ugggacauaugguccucaa

SEQ ID NO: 1914879 - RNA, 19 nt, Artificial Sequence
  Description of Artificial Sequence: Synthetic oligonucleotide
  Antisense strand to SEQ ID NO: 1914878
uugaggaccauauguccca

SEQ ID NO: 1914880 - RNA, 19 nt, Artificial Sequence
  Description of Artificial Sequence: Synthetic oligonucleotide
  Sense strand starting at position 1636 of SEQ ID NO: 1879541
gacauaugguccucaauag

SEQ ID NO: 1914881 - RNA, 19 nt, Artificial Sequence
  Description of Artificial Sequence: Synthetic oligonucleotide
  Antisense strand to SEQ ID NO: 1914880
cuauugaggaccauauguc

SEQ ID NO: 1914882 - RNA, 19 nt, Artificial Sequence
  Description of Artificial Sequence: Synthetic oligonucleotide
  Sense strand starting at position 1646 of SEQ ID NO: 1879541
ccucaauagcugcaauaug

SEQ ID NO: 1914883 - RNA, 19 nt, Artificial Sequence
  Description of Artificial Sequence: Synthetic oligonucleotide
  Antisense strand to SEQ ID NO: 1914882
cauauugcagcuauugagg

SEQ ID NO: 1914884 - RNA, 19 nt, Artificial Sequence
  Description of Artificial Sequence: Synthetic oligonucleotide
  Sense strand starting at position 1789 of SEQ ID NO: 1879541
uauuuaaccucgucuucga

SEQ ID NO: 1914885 - RNA, 19 nt, Artificial Sequence
  Description of Artificial Sequence: Synthetic oligonucleotide
  Antisense strand to SEQ ID NO: 1914884
ucgaagacgagguuaaaua

SEQ ID NO: 1914886 - RNA, 19 nt, Artificial Sequence
  Description of Artificial Sequence: Synthetic oligonucleotide
  Sense strand starting at position 2056 of SEQ ID NO: 1879541
uugggugagucucucaaac

SEQ ID NO: 1914887 - RNA, 19 nt, Artificial Sequence
  Description of Artificial Sequence: Synthetic oligonucleotide
  Antisense strand to SEQ ID NO: 1914886
guuugagagacucacccaa

SEQ ID NO: 1914888 - RNA, 19 nt, Artificial Sequence
  Description of Artificial Sequence: Synthetic oligonucleotide
  Sense strand starting at position 2680 of SEQ ID NO: 1879541
uuccuauaugauuggcuga

SEQ ID NO: 1914889 - RNA, 19 nt, Artificial Sequence
  Description of Artificial Sequence: Synthetic oligonucleotide
  Antisense strand to SEQ ID NO: 1914888
ucagccaaucauauaggaa

SEQ ID NO: 1914890 - RNA, 19 nt, Artificial Sequence
  Description of Artificial Sequence: Synthetic oligonucleotide
  Sense strand starting at position 2682 of SEQ ID NO: 1879541
ccuauaugauuggcugaua

SEQ ID NO: 1914891 - RNA, 19 nt, Artificial Sequence
  Description of Artificial Sequence: Synthetic oligonucleotide
  Antisense strand to SEQ ID NO: 1914890
uaucagccaaucauauagg

SEQ ID NO: 1914892 - RNA, 19 nt, Artificial Sequence
  Description of Artificial Sequence: Synthetic oligonucleotide
  Sense strand starting at position 2683 of SEQ ID NO: 1879541
cuauaugauuggcugauag

SEQ ID NO: 1914893 - RNA, 19 nt, Artificial Sequence
  Description of Artificial Sequence: Synthetic oligonucleotide
  Antisense strand to SEQ ID NO: 1914892
cuaucagccaaucauauag

SEQ ID NO: 1914894 - RNA, 19 nt, Artificial Sequence
  Description of Artificial Sequence: Synthetic oligonucleotide
  Sense strand starting at position 2729 of SEQ ID NO: 1879541
ggagaauuaugggagggau

SEQ ID NO: 1914895 - RNA, 19 nt, Artificial Sequence
  Description of Artificial Sequence: Synthetic oligonucleotide
  Antisense strand to SEQ ID NO: 1914894
aucccucccauaauucucc

SEQ ID NO: 1914896 - RNA, 19 nt, Artificial Sequence
  Description of Artificial Sequence: Synthetic oligonucleotide
  Sense strand starting at position 2768 of SEQ ID NO: 1879541
gaugguugguuccugaaca

SEQ ID NO: 1914897 - RNA, 19 nt, Artificial Sequence
  Description of Artificial Sequence: Synthetic oligonucleotide
  Antisense strand to SEQ ID NO: 1914896
uguucaggaaccaaccauc

SEQ ID NO: 1914898 - RNA, 19 nt, Artificial Sequence
  Description of Artificial Sequence: Synthetic oligonucleotide
  Sense strand starting at position 2931 of SEQ ID NO: 1879541
ggcguaaucguuguucacu

SEQ ID NO: 1914899 - RNA, 19 nt, Artificial Sequence
  Description of Artificial Sequence: Synthetic oligonucleotide
  Antisense strand to SEQ ID NO: 1914898
agugaacaacgauuacgcc

SEQ ID NO: 1914900 - RNA, 19 nt, Artificial Sequence
  Description of Artificial Sequence: Synthetic oligonucleotide
  Sense strand starting at position 3545 of SEQ ID NO: 1879541
uaaguaggauucucugcau

SEQ ID NO: 1914901 - RNA, 19 nt, Artificial Sequence
  Description of Artificial Sequence: Synthetic oligonucleotide
  Antisense strand to SEQ ID NO: 1914900
augcagagaauccuacuua

SEQ ID NO: 1914902 - RNA, 19 nt, Artificial Sequence
  Description of Artificial Sequence: Synthetic oligonucleotide
  Sense strand starting at position 3589 of SEQ ID NO: 1879541
agaaauuagcgcuggaaga

SEQ ID NO: 1914903 - RNA, 19 nt, Artificial Sequence
  Description of Artificial Sequence: Synthetic oligonucleotide
  Antisense strand to SEQ ID NO: 1914902
ucuuccagcgcuaauuucu

SEQ ID NO: 1914904 - RNA, 19 nt, Artificial Sequence
  Description of Artificial Sequence: Synthetic oligonucleotide
  Sense strand starting at position 3590 of SEQ ID NO: 1879541
gaaauuagcgcuggaagaa

SEQ ID NO: 1914905 - RNA, 19 nt, Artificial Sequence
  Description of Artificial Sequence: Synthetic oligonucleotide
  Antisense strand to SEQ ID NO: 1914904
uucuuccagcgcuaauuuc

SEQ ID NO: 1914906 - RNA, 19 nt, Artificial Sequence
  Description of Artificial Sequence: Synthetic oligonucleotide
  Sense strand starting at position 3591 of SEQ ID NO: 1879541
aaauuagcgcuggaagaaa

SEQ ID NO: 1914907 - RNA, 19 nt, Artificial Sequence
  Description of Artificial Sequence: Synthetic oligonucleotide
  Antisense strand to SEQ ID NO: 1914906
uuucuuccagcgcuaauuu

SEQ ID NO: 1914908 - RNA, 19 nt, Artificial Sequence
  Description of Artificial Sequence: Synthetic oligonucleotide
  Sense strand starting at position 3852 of SEQ ID NO: 1879541
gaaaguuaauaguuuguca

SEQ ID NO: 1914909 - RNA, 19 nt, Artificial Sequence
  Description of Artificial Sequence: Synthetic oligonucleotide
  Antisense strand to SEQ ID NO: 1914908
ugacaaacuauuaacuuuc

SEQ ID NO: 1914910 - RNA, 19 nt, Artificial Sequence
  Description of Artificial Sequence: Synthetic oligonucleotide
  Sense strand starting at position 3854 of SEQ ID NO: 1879541
aaguuaauaguuugucaag

SEQ ID NO: 1914911 - RNA, 19 nt, Artificial Sequence
  Description of Artificial Sequence: Synthetic oligonucleotide
  Antisense strand to SEQ ID NO: 1914910
cuugacaaacuauuaacuu

SEQ ID NO: 1914912 - RNA, 19 nt, Artificial Sequence
  Description of Artificial Sequence: Synthetic oligonucleotide
  Sense strand starting at position 22 of SEQ ID NO: 1879542
aauugcuagggucauguaa

SEQ ID NO: 1914913 - RNA, 19 nt, Artificial Sequence
  Description of Artificial Sequence: Synthetic oligonucleotide
  Antisense strand to SEQ ID NO: 1914912
uuacaugacccuagcaauu

SEQ ID NO: 1914914 - RNA, 19 nt, Artificial Sequence
  Description of Artificial Sequence: Synthetic oligonucleotide
  Sense strand starting at position 29 of SEQ ID NO: 1879542
agggucauguaaucucauu

SEQ ID NO: 1914915 - RNA, 19 nt, Artificial Sequence
  Description of Artificial Sequence: Synthetic oligonucleotide
  Antisense strand to SEQ ID NO: 1914914
aaugagauuacaugacccu

SEQ ID NO: 1914916 - RNA, 19 nt, Artificial Sequence
  Description of Artificial Sequence: Synthetic oligonucleotide
  Sense strand starting at position 420 of SEQ ID NO: 1879542
ugaucagcuuuguugaaga

SEQ ID NO: 1914917 - RNA, 19 nt, Artificial Sequence
  Description of Artificial Sequence: Synthetic oligonucleotide
  Antisense strand to SEQ ID NO: 1914916
ucuucaacaaagcugauca

SEQ ID NO: 1914918 - RNA, 19 nt, Artificial Sequence
  Description of Artificial Sequence: Synthetic oligonucleotide
  Sense strand starting at position 422 of SEQ ID NO: 1879542
aucagcuuuguugaagacu

SEQ ID NO: 1914919 - RNA, 19 nt, Artificial Sequence
  Description of Artificial Sequence: Synthetic oligonucleotide
  Antisense strand to SEQ ID NO: 1914918
agucuucaacaaagcugau

SEQ ID NO: 1914920 - RNA, 19 nt, Artificial Sequence
  Description of Artificial Sequence: Synthetic oligonucleotide
  Sense strand starting at position 425 of SEQ ID NO: 1879542
agcuuuguugaagacuaua

SEQ ID NO: 1914921 - RNA, 19 nt, Artificial Sequence
  Description of Artificial Sequence: Synthetic oligonucleotide
  Antisense strand to SEQ ID NO: 1914920
uauagucuucaacaaagcu

SEQ ID NO: 1914922 - RNA, 19 nt, Artificial Sequence
  Description of Artificial Sequence: Synthetic oligonucleotide
  Sense strand starting at position 644 of SEQ ID NO: 1879542
ucaguagcuggaugaauua

SEQ ID NO: 1914923 - RNA, 19 nt, Artificial Sequence
  Description of Artificial Sequence: Synthetic oligonucleotide
  Antisense strand to SEQ ID NO: 1914922
uaauucauccagcuacuga

SEQ ID NO: 1914924 - RNA, 19 nt, Artificial Sequence
  Description of Artificial Sequence: Synthetic oligonucleotide
  Sense strand starting at position 715 of SEQ ID NO: 1879542
cugaaacacucguuaucug

SEQ ID NO: 1914925 - RNA, 19 nt, Artificial Sequence
  Description of Artificial Sequence: Synthetic oligonucleotide
  Antisense strand to SEQ ID NO: 1914924
cagauaacgaguguuucag

SEQ ID NO: 1914926 - RNA, 19 nt, Artificial Sequence
  Description of Artificial Sequence: Synthetic oligonucleotide
  Sense strand starting at position 716 of SEQ ID NO: 1879542
ugaaacacucguuaucugu

SEQ ID NO: 1914927 - RNA, 19 nt, Artificial Sequence
  Description of Artificial Sequence: Synthetic oligonucleotide
  Antisense strand to SEQ ID NO: 1914926
acagauaacgaguguuuca

SEQ ID NO: 1914928 - RNA, 19 nt, Artificial Sequence
  Description of Artificial Sequence: Synthetic oligonucleotide
  Sense strand starting at position 834 of SEQ ID NO: 1879542
ugcagccuucccuagacua

SEQ ID NO: 1914929 - RNA, 19 nt, Artificial Sequence
  Description of Artificial Sequence: Synthetic oligonucleotide
  Antisense strand to SEQ ID NO: 1914928
uagucuagggaaggcugca

SEQ ID NO: 1914930 - RNA, 19 nt, Artificial Sequence
  Description of Artificial Sequence: Synthetic oligonucleotide
  Sense strand starting at position 842 of SEQ ID NO: 1879542
ucccuagacuagguugaaa

SEQ ID NO: 1914931 - RNA, 19 nt, Artificial Sequence
  Description of Artificial Sequence: Synthetic oligonucleotide
  Antisense strand to SEQ ID NO: 1914930
uuucaaccuagucuaggga

SEQ ID NO: 1914932 - RNA, 19 nt, Artificial Sequence
  Description of Artificial Sequence: Synthetic oligonucleotide
  Sense strand starting at position 854 of SEQ ID NO: 1879542
guugaaacaccacagucau

SEQ ID NO: 1914933 - RNA, 19 nt, Artificial Sequence
  Description of Artificial Sequence: Synthetic oligonucleotide
  Antisense strand to SEQ ID NO: 1914932
augacugugguguuucaac

SEQ ID NO: 1914934 - RNA, 19 nt, Artificial Sequence
  Description of Artificial Sequence: Synthetic oligonucleotide
  Sense strand starting at position 914 of SEQ ID NO: 1879542
accuauuaaguguacauca

SEQ ID NO: 1914935 - RNA, 19 nt, Artificial Sequence
  Description of Artificial Sequence: Synthetic oligonucleotide
  Antisense strand to SEQ ID NO: 1914934
ugauguacacuuaauaggu

SEQ ID NO: 1914936 - RNA, 19 nt, Artificial Sequence
  Description of Artificial Sequence: Synthetic oligonucleotide
  Sense strand starting at position 916 of SEQ ID NO: 1879542
cuauuaaguguacaucauu

SEQ ID NO: 1914937 - RNA, 19 nt, Artificial Sequence
  Description of Artificial Sequence: Synthetic oligonucleotide
  Antisense strand to SEQ ID NO: 1914936
aaugauguacacuuaauag

SEQ ID NO: 1914938 - RNA, 19 nt, Artificial Sequence
  Description of Artificial Sequence: Synthetic oligonucleotide
  Sense strand starting at position 1033 of SEQ ID NO: 1879542
aaguuuacaggacgaauga

SEQ ID NO: 1914939 - RNA, 19 nt, Artificial Sequence
  Description of Artificial Sequence: Synthetic oligonucleotide
  Antisense strand to SEQ ID NO: 1914938
ucauucguccuguaaacuu

SEQ ID NO: 1914940 - RNA, 19 nt, Artificial Sequence
  Description of Artificial Sequence: Synthetic oligonucleotide
  Sense strand starting at position 1253 of SEQ ID NO: 1879542
aggagaauagcuugagucu

SEQ ID NO: 1914941 - RNA, 19 nt, Artificial Sequence
  Description of Artificial Sequence: Synthetic oligonucleotide
  Antisense strand to SEQ ID NO: 1914940
agacucaagcuauucuccu

SEQ ID NO: 1914942 - RNA, 19 nt, Artificial Sequence
  Description of Artificial Sequence: Synthetic oligonucleotide
  Sense strand starting at position 1493 of SEQ ID NO: 1879542
gucuaaagcguugcuacua

SEQ ID NO: 1914943 - RNA, 19 nt, Artificial Sequence
  Description of Artificial Sequence: Synthetic oligonucleotide
  Antisense strand to SEQ ID NO: 1914942
uaguagcaacgcuuuagac

SEQ ID NO: 1914944 - RNA, 19 nt, Artificial Sequence
  Description of Artificial Sequence: Synthetic oligonucleotide
  Sense strand starting at position 1696 of SEQ ID NO: 1879542
gggauuggcucucugaaca

SEQ ID NO: 1914945 - RNA, 19 nt, Artificial Sequence
  Description of Artificial Sequence: Synthetic oligonucleotide
  Antisense strand to SEQ ID NO: 1914944
uguucagagagccaauccc

SEQ ID NO: 1914946 - RNA, 19 nt, Artificial Sequence
  Description of Artificial Sequence: Synthetic oligonucleotide
  Sense strand starting at position 1928 of SEQ ID NO: 1879542
ccgcuucuuagggaaagua

SEQ ID NO: 1914947 - RNA, 19 nt, Artificial Sequence
  Description of Artificial Sequence: Synthetic oligonucleotide
  Antisense strand to SEQ ID NO: 1914946
uacuuucccuaagaagcgg

SEQ ID NO: 1914948 - RNA, 19 nt, Artificial Sequence
  Description of Artificial Sequence: Synthetic oligonucleotide
  Sense strand starting at position 1998 of SEQ ID NO: 1879542
gagcguagugacguugcaa

SEQ ID NO: 1914949 - RNA, 19 nt, Artificial Sequence
  Description of Artificial Sequence: Synthetic oligonucleotide
  Antisense strand to SEQ ID NO: 1914948
uugcaacgucacuacgcuc

SEQ ID NO: 1914950 - RNA, 19 nt, Artificial Sequence
  Description of Artificial Sequence: Synthetic oligonucleotide
  Sense strand starting at position 2016 of SEQ ID NO: 1879542
aggauacgugaugacguaa

SEQ ID NO: 1914951 - RNA, 19 nt, Artificial Sequence
  Description of Artificial Sequence: Synthetic oligonucleotide
  Antisense strand to SEQ ID NO: 1914950
uuacgucaucacguauccu

SEQ ID NO: 1914952 - RNA, 19 nt, Artificial Sequence
  Description of Artificial Sequence: Synthetic oligonucleotide
  Sense strand starting at position 2033 of SEQ ID NO: 1879542
aaagguuucuugguggaaa

SEQ ID NO: 1914953 - RNA, 19 nt, Artificial Sequence
  Description of Artificial Sequence: Synthetic oligonucleotide
  Antisense strand to SEQ ID NO: 1914952
uuuccaccaagaaaccuuu

SEQ ID NO: 1914954 - RNA, 19 nt, Artificial Sequence
  Description of Artificial Sequence: Synthetic oligonucleotide
  Sense strand starting at position 2320 of SEQ ID NO: 1879542
gcaagugucagugcaucuu

SEQ ID NO: 1914955 - RNA, 19 nt, Artificial Sequence
  Description of Artificial Sequence: Synthetic oligonucleotide
  Antisense strand to SEQ ID NO: 1914954
aagaugcacugacacuugc

SEQ ID NO: 1914956 - RNA, 19 nt, Artificial Sequence
  Description of Artificial Sequence: Synthetic oligonucleotide
  Sense strand starting at position 2489 of SEQ ID NO: 1879542
ccuggucuuauugggaauu

SEQ ID NO: 1914957 - RNA, 19 nt, Artificial Sequence
  Description of Artificial Sequence: Synthetic oligonucleotide
  Antisense strand to SEQ ID NO: 1914956
aauucccaauaagaccagg

SEQ ID NO: 1914958 - RNA, 19 nt, Artificial Sequence
  Description of Artificial Sequence: Synthetic oligonucleotide
  Sense strand starting at position 2630 of SEQ ID NO: 1879542
auacuuuaucuacgggaga

SEQ ID NO: 1914959 - RNA, 19 nt, Artificial Sequence
  Description of Artificial Sequence: Synthetic oligonucleotide
  Antisense strand to SEQ ID NO: 1914958
ucucccguagauaaaguau

SEQ ID NO: 1914960 - RNA, 19 nt, Artificial Sequence
  Description of Artificial Sequence: Synthetic oligonucleotide
  Sense strand starting at position 2632 of SEQ ID NO: 1879542
acuuuaucuacgggagaua

SEQ ID NO: 1914961 - RNA, 19 nt, Artificial Sequence
  Description of Artificial Sequence: Synthetic oligonucleotide
  Antisense strand to SEQ ID NO: 1914960
uaucucccguagauaaagu

SEQ ID NO: 1914962 - RNA, 19 nt, Artificial Sequence
  Description of Artificial Sequence: Synthetic oligonucleotide
  Sense strand starting at position 2691 of SEQ ID NO: 1879542
uuagguaauuucccggcau

SEQ ID NO: 1914963 - RNA, 19 nt, Artificial Sequence
  Description of Artificial Sequence: Synthetic oligonucleotide
  Antisense strand to SEQ ID NO: 1914962
augccgggaaauuaccuaa

SEQ ID NO: 1914964 - RNA, 19 nt, Artificial Sequence
  Description of Artificial Sequence: Synthetic oligonucleotide
  Sense strand starting at position 2693 of SEQ ID NO: 1879542
agguaauuucccggcauca

SEQ ID NO: 1914965 - RNA, 19 nt, Artificial Sequence
  Description of Artificial Sequence: Synthetic oligonucleotide
  Antisense strand to SEQ ID NO: 1914964
ugaugccgggaaauuaccu

SEQ ID NO: 1914966 - RNA, 19 nt, Artificial Sequence
  Description of Artificial Sequence: Synthetic oligonucleotide
  Sense strand starting at position 2727 of SEQ ID NO: 1879542
ccauaaugaguagguguga

SEQ ID NO: 1914967 - RNA, 19 nt, Artificial Sequence
  Description of Artificial Sequence: Synthetic oligonucleotide
  Antisense strand to SEQ ID NO: 1914966
ucacaccuacucauuaugg

SEQ ID NO: 1914968 - RNA, 19 nt, Artificial Sequence
  Description of Artificial Sequence: Synthetic oligonucleotide
  Sense strand starting at position 2882 of SEQ ID NO: 1879542
gcucauauugaguggagga

SEQ ID NO: 1914969 - RNA, 19 nt, Artificial Sequence
  Description of Artificial Sequence: Synthetic oligonucleotide
  Antisense strand to SEQ ID NO: 1914968
uccuccacucaauaugagc

SEQ ID NO: 1914970 - RNA, 19 nt, Artificial Sequence
  Description of Artificial Sequence: Synthetic oligonucleotide
  Sense strand starting at position 2950 of SEQ ID NO: 1879542
ucuauaguuccaugauuau

SEQ ID NO: 1914971 - RNA, 19 nt, Artificial Sequence
  Description of Artificial Sequence: Synthetic oligonucleotide
  Antisense strand to SEQ ID NO: 1914970
auaaucauggaacuauaga

SEQ ID NO: 1914972 - RNA, 19 nt, Artificial Sequence
  Description of Artificial Sequence: Synthetic oligonucleotide
  Sense strand starting at position 2953 of SEQ ID NO: 1879542
auaguuccaugauuaugaa

SEQ ID NO: 1914973 - RNA, 19 nt, Artificial Sequence
  Description of Artificial Sequence: Synthetic oligonucleotide
  Antisense strand to SEQ ID NO: 1914972
uucauaaucauggaacuau

SEQ ID NO: 1914974 - RNA, 19 nt, Artificial Sequence
  Description of Artificial Sequence: Synthetic oligonucleotide
  Sense strand starting at position 3172 of SEQ ID NO: 1879542
agcaauguuagguaagaca

SEQ ID NO: 1914975 - RNA, 19 nt, Artificial Sequence
  Description of Artificial Sequence: Synthetic oligonucleotide
  Antisense strand to SEQ ID NO: 1914974
ugucuuaccuaacauugcu

SEQ ID NO: 1914976 - RNA, 19 nt, Artificial Sequence
  Description of Artificial Sequence: Synthetic oligonucleotide
  Sense strand starting at position 3239 of SEQ ID NO: 1879542
ggguuugauucugcagaac

SEQ ID NO: 1914977 - RNA, 19 nt, Artificial Sequence
  Description of Artificial Sequence: Synthetic oligonucleotide
  Antisense strand to SEQ ID NO: 1914976
guucugcagaaucaaaccc

SEQ ID NO: 1914978 - RNA, 19 nt, Artificial Sequence
  Description of Artificial Sequence: Synthetic oligonucleotide
  Sense strand starting at position 3242 of SEQ ID NO: 1879542
uuugauucugcagaacuag

SEQ ID NO: 1914979 - RNA, 19 nt, Artificial Sequence
  Description of Artificial Sequence: Synthetic oligonucleotide
  Antisense strand to SEQ ID NO: 1914978
cuaguucugcagaaucaaa

SEQ ID NO: 1914980 - RNA, 19 nt, Artificial Sequence
  Description of Artificial Sequence: Synthetic oligonucleotide
  Sense strand starting at position 3571 of SEQ ID NO: 1879542
uccaguaccgaugaauguu

SEQ ID NO: 1914981 - RNA, 19 nt, Artificial Sequence
  Description of Artificial Sequence: Synthetic oligonucleotide
  Antisense strand to SEQ ID NO: 1914980
aacauucaucgguacugga

SEQ ID NO: 1914982 - RNA, 19 nt, Artificial Sequence
  Description of Artificial Sequence: Synthetic oligonucleotide
  Sense strand starting at position 3577 of SEQ ID NO: 1879542
accgaugaauguuucuaaa

SEQ ID NO: 1914983 - RNA, 19 nt, Artificial Sequence
  Description of Artificial Sequence: Synthetic oligonucleotide
  Antisense strand to SEQ ID NO: 1914982
uuuagaaacauucaucggu

SEQ ID NO: 1914984 - RNA, 19 nt, Artificial Sequence
  Description of Artificial Sequence: Synthetic oligonucleotide
  Sense strand starting at position 3579 of SEQ ID NO: 1879542
cgaugaauguuucuaaacc

SEQ ID NO: 1914985 - RNA, 19 nt, Artificial Sequence
  Description of Artificial Sequence: Synthetic oligonucleotide
  Antisense strand to SEQ ID NO: 1914984
gguuuagaaacauucaucg

SEQ ID NO: 1914986 - RNA, 19 nt, Artificial Sequence
  Description of Artificial Sequence: Synthetic oligonucleotide
  Sense strand starting at position 3603 of SEQ ID NO: 1879542
uuuagcuuugaguagaaua

SEQ ID NO: 1914987 - RNA, 19 nt, Artificial Sequence
  Description of Artificial Sequence: Synthetic oligonucleotide
  Antisense strand to SEQ ID NO: 1914986
uauucuacucaaagcuaaa

SEQ ID NO: 1914988 - RNA, 19 nt, Artificial Sequence
  Description of Artificial Sequence: Synthetic oligonucleotide
  Sense strand starting at position 3859 of SEQ ID NO: 1879542
uccuaaauaguggguuaaa

SEQ ID NO: 1914989 - RNA, 19 nt, Artificial Sequence
  Description of Artificial Sequence: Synthetic oligonucleotide
  Antisense strand to SEQ ID NO: 1914988
uuuaacccacuauuuagga

SEQ ID NO: 1914990 - RNA, 19 nt, Artificial Sequence
  Description of Artificial Sequence: Synthetic oligonucleotide
  Sense strand starting at position 3979 of SEQ ID NO: 1879542
uuauacagaucuuuaguca

SEQ ID NO: 1914991 - RNA, 19 nt, Artificial Sequence
  Description of Artificial Sequence: Synthetic oligonucleotide
  Antisense strand to SEQ ID NO: 1914990
ugacuaaagaucuguauaa

SEQ ID NO: 1914992 - RNA, 19 nt, Artificial Sequence
  Description of Artificial Sequence: Synthetic oligonucleotide
  Sense strand starting at position 52 of SEQ ID NO: 1879543
guaauagugucgcugggau

SEQ ID NO: 1914993 - RNA, 19 nt, Artificial Sequence
  Description of Artificial Sequence: Synthetic oligonucleotide
  Antisense strand to SEQ ID NO: 1914992
aucccagcgacacuauuac

SEQ ID NO: 1914994 - RNA, 19 nt, Artificial Sequence
  Description of Artificial Sequence: Synthetic oligonucleotide
  Sense strand starting at position 56 of SEQ ID NO: 1879543
uagugucgcugggauugaa

SEQ ID NO: 1914995 - RNA, 19 nt, Artificial Sequence
  Description of Artificial Sequence: Synthetic oligonucleotide
  Antisense strand to SEQ ID NO: 1914994
uucaaucccagcgacacua

SEQ ID NO: 1914996 - RNA, 19 nt, Artificial Sequence
  Description of Artificial Sequence: Synthetic oligonucleotide
  Sense strand starting at position 80 of SEQ ID NO: 1879543
cucugucuguuuccaaaca

SEQ ID NO: 1914997 - RNA, 19 nt, Artificial Sequence
  Description of Artificial Sequence: Synthetic oligonucleotide
  Antisense strand to SEQ ID NO: 1914996
uguuuggaaacagacagag

SEQ ID NO: 1914998 - RNA, 19 nt, Artificial Sequence
  Description of Artificial Sequence: Synthetic oligonucleotide
  Sense strand starting at position 113 of SEQ ID NO: 1879543
gccagaagcugcuaugaag

SEQ ID NO: 1914999 - RNA, 19 nt, Artificial Sequence
  Description of Artificial Sequence: Synthetic oligonucleotide
  Antisense strand to SEQ ID NO: 1914998
cuucauagcagcuucuggc

SEQ ID NO: 1915000 - RNA, 19 nt, Artificial Sequence
  Description of Artificial Sequence: Synthetic oligonucleotide
  Sense strand starting at position 116 of SEQ ID NO: 1879543
agaagcugcuaugaaguua

SEQ ID NO: 1915001 - RNA, 19 nt, Artificial Sequence
  Description of Artificial Sequence: Synthetic oligonucleotide
  Antisense strand to SEQ ID NO: 1915000
uaacuucauagcagcuucu

SEQ ID NO: 1915002 - RNA, 19 nt, Artificial Sequence
  Description of Artificial Sequence: Synthetic oligonucleotide
  Sense strand starting at position 124 of SEQ ID NO: 1879543
cuaugaaguuauccaggca

SEQ ID NO: 1915003 - RNA, 19 nt, Artificial Sequence
  Description of Artificial Sequence: Synthetic oligonucleotide
  Antisense strand to SEQ ID NO: 1915002
ugccuggauaacuucauag

SEQ ID NO: 1915004 - RNA, 19 nt, Artificial Sequence
  Description of Artificial Sequence: Synthetic oligonucleotide
  Sense strand starting at position 127 of SEQ ID NO: 1879543
ugaaguuauccaggcagag

SEQ ID NO: 1915005 - RNA, 19 nt, Artificial Sequence
  Description of Artificial Sequence: Synthetic oligonucleotide
  Antisense strand to SEQ ID NO: 1915004
cucugccuggauaacuuca

SEQ ID NO: 1915006 - RNA, 19 nt, Artificial Sequence
  Description of Artificial Sequence: Synthetic oligonucleotide
  Sense strand starting at position 165 of SEQ ID NO: 1879543
agcuucuccuaggcuuuaa

SEQ ID NO: 1915007 - RNA, 19 nt, Artificial Sequence
  Description of Artificial Sequence: Synthetic oligonucleotide
  Antisense strand to SEQ ID NO: 1915006
uuaaagccuaggagaagcu

SEQ ID NO: 1915008 - RNA, 19 nt, Artificial Sequence
  Description of Artificial Sequence: Synthetic oligonucleotide
  Sense strand starting at position 213 of SEQ ID NO: 1879543
aacgaagacucaugaugug

SEQ ID NO: 1915009 - RNA, 19 nt, Artificial Sequence
  Description of Artificial Sequence: Synthetic oligonucleotide
  Antisense strand to SEQ ID NO: 1915008
cacaucaugagucuucguu

SEQ ID NO: 1915010 - RNA, 19 nt, Artificial Sequence
  Description of Artificial Sequence: Synthetic oligonucleotide
  Sense strand starting at position 223 of SEQ ID NO: 1879543
caugaugugccaggcagua

SEQ ID NO: 1915011 - RNA, 19 nt, Artificial Sequence
  Description of Artificial Sequence: Synthetic oligonucleotide
  Antisense strand to SEQ ID NO: 1915010
uacugccuggcacaucaug

SEQ ID NO: 1915012 - RNA, 19 nt, Artificial Sequence
  Description of Artificial Sequence: Synthetic oligonucleotide
  Sense strand starting at position 225 of SEQ ID NO: 1879543
ugaugugccaggcaguauu

SEQ ID NO: 1915013 - RNA, 19 nt, Artificial Sequence
  Description of Artificial Sequence: Synthetic oligonucleotide
  Antisense strand to SEQ ID NO: 1915012
aauacugccuggcacauca

SEQ ID NO: 1915014 - RNA, 19 nt, Artificial Sequence
  Description of Artificial Sequence: Synthetic oligonucleotide
  Sense strand starting at position 256 of SEQ ID NO: 1879543
cguggauucuccucuuuag

SEQ ID NO: 1915015 - RNA, 19 nt, Artificial Sequence
  Description of Artificial Sequence: Synthetic oligonucleotide
  Antisense strand to SEQ ID NO: 1915014
cuaaagaggagaauccacg

SEQ ID NO: 1915016 - RNA, 19 nt, Artificial Sequence
  Description of Artificial Sequence: Synthetic oligonucleotide
  Sense strand starting at position 439 of SEQ ID NO: 1879543
cucuucuguuccucaggaa

SEQ ID NO: 1915017 - RNA, 19 nt, Artificial Sequence
  Description of Artificial Sequence: Synthetic oligonucleotide
  Antisense strand to SEQ ID NO: 1915016
uuccugaggaacagaagag

SEQ ID NO: 1915018 - RNA, 19 nt, Artificial Sequence
  Description of Artificial Sequence: Synthetic oligonucleotide
  Sense strand starting at position 482 of SEQ ID NO: 1879543
gugccaagcacugcuguua

SEQ ID NO: 1915019 - RNA, 19 nt, Artificial Sequence
  Description of Artificial Sequence: Synthetic oligonucleotide
  Antisense strand to SEQ ID NO: 1915018
uaacagcagugcuuggcac

SEQ ID NO: 1915020 - RNA, 19 nt, Artificial Sequence
  Description of Artificial Sequence: Synthetic oligonucleotide
  Sense strand starting at position 494 of SEQ ID NO: 1879543
gcuguuaaaugcccaauaa

SEQ ID NO: 1915021 - RNA, 19 nt, Artificial Sequence
  Description of Artificial Sequence: Synthetic oligonucleotide
  Antisense strand to SEQ ID NO: 1915020
uuauugggcauuuaacagc

SEQ ID NO: 1915022 - RNA, 19 nt, Artificial Sequence
  Description of Artificial Sequence: Synthetic oligonucleotide
  Sense strand starting at position 598 of SEQ ID NO: 1879543
ugggucaugagaggguaua

SEQ ID NO: 1915023 - RNA, 19 nt, Artificial Sequence
  Description of Artificial Sequence: Synthetic oligonucleotide
  Antisense strand to SEQ ID NO: 1915022
uauacccucucaugaccca

SEQ ID NO: 1915024 - RNA, 19 nt, Artificial Sequence
  Description of Artificial Sequence: Synthetic oligonucleotide
  Sense strand starting at position 599 of SEQ ID NO: 1879543
gggucaugagaggguauaa

SEQ ID NO: 1915025 - RNA, 19 nt, Artificial Sequence
  Description of Artificial Sequence: Synthetic oligonucleotide
  Antisense strand to SEQ ID NO: 1915024
uuauacccucucaugaccc

SEQ ID NO: 1915026 - RNA, 19 nt, Artificial Sequence
  Description of Artificial Sequence: Synthetic oligonucleotide
  Sense strand starting at position 625 of SEQ ID NO: 1879543
acaguaugauucucaaagu

SEQ ID NO: 1915027 - RNA, 19 nt, Artificial Sequence
  Description of Artificial Sequence: Synthetic oligonucleotide
  Antisense strand to SEQ ID NO: 1915026
acuuugagaaucauacugu

SEQ ID NO: 1915028 - RNA, 19 nt, Artificial Sequence
  Description of Artificial Sequence: Synthetic oligonucleotide
  Sense strand starting at position 626 of SEQ ID NO: 1879543
caguaugauucucaaagug

SEQ ID NO: 1915029 - RNA, 19 nt, Artificial Sequence
  Description of Artificial Sequence: Synthetic oligonucleotide
  Antisense strand to SEQ ID NO: 1915028
cacuuugagaaucauacug

SEQ ID NO: 1915030 - RNA, 19 nt, Artificial Sequence
  Description of Artificial Sequence: Synthetic oligonucleotide
  Sense strand starting at position 1147 of SEQ ID NO: 1879543
cguuuccugugcccugaaa

SEQ ID NO: 1915031 - RNA, 19 nt, Artificial Sequence
  Description of Artificial Sequence: Synthetic oligonucleotide
  Antisense strand to SEQ ID NO: 1915030
uuucagggcacaggaaacg

SEQ ID NO: 1915032 - RNA, 19 nt, Artificial Sequence
  Description of Artificial Sequence: Synthetic oligonucleotide
  Sense strand starting at position 1149 of SEQ ID NO: 1879543
uuuccugugcccugaaaca

SEQ ID NO: 1915033 - RNA, 19 nt, Artificial Sequence
  Description of Artificial Sequence: Synthetic oligonucleotide
  Antisense strand to SEQ ID NO: 1915032
uguuucagggcacaggaaa

SEQ ID NO: 1915034 - RNA, 19 nt, Artificial Sequence
  Description of Artificial Sequence: Synthetic oligonucleotide
  Sense strand starting at position 1279 of SEQ ID NO: 1879543
uugauuaagcccugauauu

SEQ ID NO: 1915035 - RNA, 19 nt, Artificial Sequence
  Description of Artificial Sequence: Synthetic oligonucleotide
  Antisense strand to SEQ ID NO: 1915034
aauaucagggcuuaaucaa

SEQ ID NO: 1915036 - RNA, 19 nt, Artificial Sequence
  Description of Artificial Sequence: Synthetic oligonucleotide
  Sense strand starting at position 3051 of SEQ ID NO: 1879543
uugcuugugucuucuccau

SEQ ID NO: 1915037 - RNA, 19 nt, Artificial Sequence
  Description of Artificial Sequence: Synthetic oligonucleotide
  Antisense strand to SEQ ID NO: 1915036
auggagaagacacaagcaa

SEQ ID NO: 1915038 - RNA, 19 nt, Artificial Sequence
  Description of Artificial Sequence: Synthetic oligonucleotide
  Sense strand starting at position 3241 of SEQ ID NO: 1879543
cguggaaucuaacaaacgu

SEQ ID NO: 1915039 - RNA, 19 nt, Artificial Sequence
  Description of Artificial Sequence: Synthetic oligonucleotide
  Antisense strand to SEQ ID NO: 1915038
acguuuguuagauuccacg

SEQ ID NO: 1915040 - RNA, 19 nt, Artificial Sequence
  Description of Artificial Sequence: Synthetic oligonucleotide
  Sense strand starting at position 3481 of SEQ ID NO: 1879543
uggcuaguuaguugcugau

SEQ ID NO: 1915041 - RNA, 19 nt, Artificial Sequence
  Description of Artificial Sequence: Synthetic oligonucleotide
  Antisense strand to SEQ ID NO: 1915040
aucagcaacuaacuagcca

SEQ ID NO: 1915042 - RNA, 19 nt, Artificial Sequence
  Description of Artificial Sequence: Synthetic oligonucleotide
  Sense strand starting at position 47 of SEQ ID NO: 1879544
ucugcuuuaucuuugaaag

SEQ ID NO: 1915043 - RNA, 19 nt, Artificial Sequence
  Description of Artificial Sequence: Synthetic oligonucleotide
  Antisense strand to SEQ ID NO: 1915042
cuuucaaagauaaagcaga

SEQ ID NO: 1915044 - RNA, 19 nt, Artificial Sequence
  Description of Artificial Sequence: Synthetic oligonucleotide
  Sense strand starting at position 156 of SEQ ID NO: 1879544
uccuacuagccuuauuagu

SEQ ID NO: 1915045 - RNA, 19 nt, Artificial Sequence
  Description of Artificial Sequence: Synthetic oligonucleotide
  Antisense strand to SEQ ID NO: 1915044
acuaauaaggcuaguagga

SEQ ID NO: 1915046 - RNA, 19 nt, Artificial Sequence
  Description of Artificial Sequence: Synthetic oligonucleotide
  Sense strand starting at position 353 of SEQ ID NO: 1879544
uucuguuauagguauguga

SEQ ID NO: 1915047 - RNA, 19 nt, Artificial Sequence
  Description of Artificial Sequence: Synthetic oligonucleotide
  Antisense strand to SEQ ID NO: 1915046
ucacauaccuauaacagaa

SEQ ID NO: 1915048 - RNA, 19 nt, Artificial Sequence
  Description of Artificial Sequence: Synthetic oligonucleotide
  Sense strand starting at position 357 of SEQ ID NO: 1879544
guuauagguaugugaccua

SEQ ID NO: 1915049 - RNA, 19 nt, Artificial Sequence
  Description of Artificial Sequence: Synthetic oligonucleotide
  Antisense strand to SEQ ID NO: 1915048
uaggucacauaccuauaac

SEQ ID NO: 1915050 - RNA, 19 nt, Artificial Sequence
  Description of Artificial Sequence: Synthetic oligonucleotide
  Sense strand starting at position 360 of SEQ ID NO: 1879544
auagguaugugaccuacga

SEQ ID NO: 1915051 - RNA, 19 nt, Artificial Sequence
  Description of Artificial Sequence: Synthetic oligonucleotide
  Antisense strand to SEQ ID NO: 1915050
ucguaggucacauaccuau

SEQ ID NO: 1915052 - RNA, 19 nt, Artificial Sequence
  Description of Artificial Sequence: Synthetic oligonucleotide
  Sense strand starting at position 362 of SEQ ID NO: 1879544
agguaugugaccuacgaac

SEQ ID NO: 1915053 - RNA, 19 nt, Artificial Sequence
  Description of Artificial Sequence: Synthetic oligonucleotide
  Antisense strand to SEQ ID NO: 1915052
guucguaggucacauaccu

SEQ ID NO: 1915054 - RNA, 19 nt, Artificial Sequence
  Description of Artificial Sequence: Synthetic oligonucleotide
  Sense strand starting at position 382 of SEQ ID NO: 1879544
ugggaagucugauacauuu

SEQ ID NO: 1915055 - RNA, 19 nt, Artificial Sequence
  Description of Artificial Sequence: Synthetic oligonucleotide
  Antisense strand to SEQ ID NO: 1915054
aaauguaucagacuuccca

SEQ ID NO: 1915056 - RNA, 19 nt, Artificial Sequence
  Description of Artificial Sequence: Synthetic oligonucleotide
  Sense strand starting at position 391 of SEQ ID NO: 1879544
ugauacauuuagucugugu

SEQ ID NO: 1915057 - RNA, 19 nt, Artificial Sequence
  Description of Artificial Sequence: Synthetic oligonucleotide
  Antisense strand to SEQ ID NO: 1915056
acacagacuaaauguauca

SEQ ID NO: 1915058 - RNA, 19 nt, Artificial Sequence
  Description of Artificial Sequence: Synthetic oligonucleotide
  Sense strand starting at position 395 of SEQ ID NO: 1879544
acauuuagucugugugguu

SEQ ID NO: 1915059 - RNA, 19 nt, Artificial Sequence
  Description of Artificial Sequence: Synthetic oligonucleotide
  Antisense strand to SEQ ID NO: 1915058
aaccacacagacuaaaugu

SEQ ID NO: 1915060 - RNA, 19 nt, Artificial Sequence
  Description of Artificial Sequence: Synthetic oligonucleotide
  Sense strand starting at position 407 of SEQ ID NO: 1879544
ugugguucccaucaauaaa

SEQ ID NO: 1915061 - RNA, 19 nt, Artificial Sequence
  Description of Artificial Sequence: Synthetic oligonucleotide
  Antisense strand to SEQ ID NO: 1915060
uuuauugaugggaaccaca

SEQ ID NO: 1915062 - RNA, 19 nt, Artificial Sequence
  Description of Artificial Sequence: Synthetic oligonucleotide
  Sense strand starting at position 565 of SEQ ID NO: 1879544
acaaauguugagugauaaa

SEQ ID NO: 1915063 - RNA, 19 nt, Artificial Sequence
  Description of Artificial Sequence: Synthetic oligonucleotide
  Antisense strand to SEQ ID NO: 1915062
uuuaucacucaacauuugu

SEQ ID NO: 1915064 - RNA, 19 nt, Artificial Sequence
  Description of Artificial Sequence: Synthetic oligonucleotide
  Sense strand starting at position 587 of SEQ ID NO: 1879544
cgaauuccaggcuauaugu

SEQ ID NO: 1915065 - RNA, 19 nt, Artificial Sequence
  Description of Artificial Sequence: Synthetic oligonucleotide
  Antisense strand to SEQ ID NO: 1915064
acauauagccuggaauucg

SEQ ID NO: 1915066 - RNA, 19 nt, Artificial Sequence
  Description of Artificial Sequence: Synthetic oligonucleotide
  Sense strand starting at position 706 of SEQ ID NO: 1879544
gauagugguggugagcuaa

SEQ ID NO: 1915067 - RNA, 19 nt, Artificial Sequence
  Description of Artificial Sequence: Synthetic oligonucleotide
  Antisense strand to SEQ ID NO: 1915066
uuagcucaccaccacuauc

SEQ ID NO: 1915068 - RNA, 19 nt, Artificial Sequence
  Description of Artificial Sequence: Synthetic oligonucleotide
  Sense strand starting at position 999 of SEQ ID NO: 1879544
agggaaaugucagcccaca

SEQ ID NO: 1915069 - RNA, 19 nt, Artificial Sequence
  Description of Artificial Sequence: Synthetic oligonucleotide
  Antisense strand to SEQ ID NO: 1915068
ugugggcugacauuucccu

SEQ ID NO: 1915070 - RNA, 19 nt, Artificial Sequence
  Description of Artificial Sequence: Synthetic oligonucleotide
  Sense strand starting at position 1020 of SEQ ID NO: 1879544
gaacaagaaccgugacuug

SEQ ID NO: 1915071 - RNA, 19 nt, Artificial Sequence
  Description of Artificial Sequence: Synthetic oligonucleotide
  Antisense strand to SEQ ID NO: 1915070
caagucacgguucuuguuc

SEQ ID NO: 1915072 - RNA, 19 nt, Artificial Sequence
  Description of Artificial Sequence: Synthetic oligonucleotide
  Sense strand starting at position 1087 of SEQ ID NO: 1879544
aggaaauauuauccagcuu

SEQ ID NO: 1915073 - RNA, 19 nt, Artificial Sequence
  Description of Artificial Sequence: Synthetic oligonucleotide
  Antisense strand to SEQ ID NO: 1915072
aagcuggauaauauuuccu

SEQ ID NO: 1915074 - RNA, 19 nt, Artificial Sequence
  Description of Artificial Sequence: Synthetic oligonucleotide
  Sense strand starting at position 2014 of SEQ ID NO: 1879544
cgcguuggcgagaauugga

SEQ ID NO: 1915075 - RNA, 19 nt, Artificial Sequence
  Description of Artificial Sequence: Synthetic oligonucleotide
  Antisense strand to SEQ ID NO: 1915074
uccaauucucgccaacgcg

SEQ ID NO: 1915076 - RNA, 19 nt, Artificial Sequence
  Description of Artificial Sequence: Synthetic oligonucleotide
  Sense strand starting at position 2093 of SEQ ID NO: 1879544
uuggaagacugaguuccaa

SEQ ID NO: 1915077 - RNA, 19 nt, Artificial Sequence
  Description of Artificial Sequence: Synthetic oligonucleotide
  Antisense strand to SEQ ID NO: 1915076
uuggaacucagucuuccaa

SEQ ID NO: 1915078 - RNA, 19 nt, Artificial Sequence
  Description of Artificial Sequence: Synthetic oligonucleotide
  Sense strand starting at position 2174 of SEQ ID NO: 1879544
gauuuaggauaguaauucu

SEQ ID NO: 1915079 - RNA, 19 nt, Artificial Sequence
  Description of Artificial Sequence: Synthetic oligonucleotide
  Antisense strand to SEQ ID NO: 1915078
agaauuacuauccuaaauc

SEQ ID NO: 1915080 - RNA, 19 nt, Artificial Sequence
  Description of Artificial Sequence: Synthetic oligonucleotide
  Sense strand starting at position 2177 of SEQ ID NO: 1879544
uuaggauaguaauucuaga

SEQ ID NO: 1915081 - RNA, 19 nt, Artificial Sequence
  Description of Artificial Sequence: Synthetic oligonucleotide
  Antisense strand to SEQ ID NO: 1915080
ucuagaauuacuauccuaa

SEQ ID NO: 1915082 - RNA, 19 nt, Artificial Sequence
  Description of Artificial Sequence: Synthetic oligonucleotide
  Sense strand starting at position 2201 of SEQ ID NO: 1879544
gguugcauuucuguuggaa

SEQ ID NO: 1915083 - RNA, 19 nt, Artificial Sequence
  Description of Artificial Sequence: Synthetic oligonucleotide
  Antisense strand to SEQ ID NO: 1915082
uuccaacagaaaugcaacc

SEQ ID NO: 1915084 - RNA, 19 nt, Artificial Sequence
  Description of Artificial Sequence: Synthetic oligonucleotide
  Sense strand starting at position 2367 of SEQ ID NO: 1879544
gguauagauauggguugau

SEQ ID NO: 1915085 - RNA, 19 nt, Artificial Sequence
  Description of Artificial Sequence: Synthetic oligonucleotide
  Antisense strand to SEQ ID NO: 1915084
aucaacccauaucuauacc

SEQ ID NO: 1915086 - RNA, 19 nt, Artificial Sequence
  Description of Artificial Sequence: Synthetic oligonucleotide
  Sense strand starting at position 2481 of SEQ ID NO: 1879544
acaugugcccaaggaaauu

SEQ ID NO: 1915087 - RNA, 19 nt, Artificial Sequence
  Description of Artificial Sequence: Synthetic oligonucleotide
  Antisense strand to SEQ ID NO: 1915086
aauuuccuugggcacaugu

SEQ ID NO: 1915088 - RNA, 19 nt, Artificial Sequence
  Description of Artificial Sequence: Synthetic oligonucleotide
  Sense strand starting at position 2561 of SEQ ID NO: 1879544
uacauugguuuaguuuaga

SEQ ID NO: 1915089 - RNA, 19 nt, Artificial Sequence
  Description of Artificial Sequence: Synthetic oligonucleotide
  Antisense strand to SEQ ID NO: 1915088
ucuaaacuaaaccaaugua

SEQ ID NO: 1915090 - RNA, 19 nt, Artificial Sequence
  Description of Artificial Sequence: Synthetic oligonucleotide
  Sense strand starting at position 2586 of SEQ ID NO: 1879544
gggcaacucaaucgguaaa

SEQ ID NO: 1915091 - RNA, 19 nt, Artificial Sequence
  Description of Artificial Sequence: Synthetic oligonucleotide
  Antisense strand to SEQ ID NO: 1915090
uuuaccgauugaguugccc

SEQ ID NO: 1915092 - RNA, 19 nt, Artificial Sequence
  Description of Artificial Sequence: Synthetic oligonucleotide
  Sense strand starting at position 2587 of SEQ ID NO: 1879544
ggcaacucaaucgguaaau

SEQ ID NO: 1915093 - RNA, 19 nt, Artificial Sequence
  Description of Artificial Sequence: Synthetic oligonucleotide
  Antisense strand to SEQ ID NO: 1915092
auuuaccgauugaguugcc

SEQ ID NO: 1915094 - RNA, 19 nt, Artificial Sequence
  Description of Artificial Sequence: Synthetic oligonucleotide
  Sense strand starting at position 2588 of SEQ ID NO: 1879544
gcaacucaaucgguaaaug

SEQ ID NO: 1915095 - RNA, 19 nt, Artificial Sequence
  Description of Artificial Sequence: Synthetic oligonucleotide
  Antisense strand to SEQ ID NO: 1915094
cauuuaccgauugaguugc

SEQ ID NO: 1915096 - RNA, 19 nt, Artificial Sequence
  Description of Artificial Sequence: Synthetic oligonucleotide
  Sense strand starting at position 2589 of SEQ ID NO: 1879544
caacucaaucgguaaaugu

SEQ ID NO: 1915097 - RNA, 19 nt, Artificial Sequence
  Description of Artificial Sequence: Synthetic oligonucleotide
  Antisense strand to SEQ ID NO: 1915096
acauuuaccgauugaguug

SEQ ID NO: 1915098 - RNA, 19 nt, Artificial Sequence
  Description of Artificial Sequence: Synthetic oligonucleotide
  Sense strand starting at position 2616 of SEQ ID NO: 1879544
ucugguugagguuaucuaa

SEQ ID NO: 1915099 - RNA, 19 nt, Artificial Sequence
  Description of Artificial Sequence: Synthetic oligonucleotide
  Antisense strand to SEQ ID NO: 1915098
uuagauaaccucaaccaga

SEQ ID NO: 1915100 - RNA, 19 nt, Artificial Sequence
  Description of Artificial Sequence: Synthetic oligonucleotide
  Sense strand starting at position 2619 of SEQ ID NO: 1879544
gguugagguuaucuaaaga

SEQ ID NO: 1915101 - RNA, 19 nt, Artificial Sequence
  Description of Artificial Sequence: Synthetic oligonucleotide
  Antisense strand to SEQ ID NO: 1915100
ucuuuagauaaccucaacc

SEQ ID NO: 1915102 - RNA, 19 nt, Artificial Sequence
  Description of Artificial Sequence: Synthetic oligonucleotide
  Sense strand starting at position 2666 of SEQ ID NO: 1879544
gcuagagauaaaggauugu

SEQ ID NO: 1915103 - RNA, 19 nt, Artificial Sequence
  Description of Artificial Sequence: Synthetic oligonucleotide
  Antisense strand to SEQ ID NO: 1915102
acaauccuuuaucucuagc

SEQ ID NO: 1915104 - RNA, 19 nt, Artificial Sequence
  Description of Artificial Sequence: Synthetic oligonucleotide
  Sense strand starting at position 3081 of SEQ ID NO: 1879544
agcuuaguccucguauggu

SEQ ID NO: 1915105 - RNA, 19 nt, Artificial Sequence
  Description of Artificial Sequence: Synthetic oligonucleotide
  Antisense strand to SEQ ID NO: 1915104
accauacgaggacuaagcu

SEQ ID NO: 1915106 - RNA, 19 nt, Artificial Sequence
  Description of Artificial Sequence: Synthetic oligonucleotide
  Sense strand starting at position 3146 of SEQ ID NO: 1879544
agaauugugugagcuugga

SEQ ID NO: 1915107 - RNA, 19 nt, Artificial Sequence
  Description of Artificial Sequence: Synthetic oligonucleotide
  Antisense strand to SEQ ID NO: 1915106
uccaagcucacacaauucu

SEQ ID NO: 1915108 - RNA, 19 nt, Artificial Sequence
  Description of Artificial Sequence: Synthetic oligonucleotide
  Sense strand starting at position 3150 of SEQ ID NO: 1879544
uugugugagcuuggacaaa

SEQ ID NO: 1915109 - RNA, 19 nt, Artificial Sequence
  Description of Artificial Sequence: Synthetic oligonucleotide
  Antisense strand to SEQ ID NO: 1915108
uuuguccaagcucacacaa

SEQ ID NO: 1915110 - RNA, 19 nt, Artificial Sequence
  Description of Artificial Sequence: Synthetic oligonucleotide
  Sense strand starting at position 3521 of SEQ ID NO: 1879544
uucuucugaguguauauaa

SEQ ID NO: 1915111 - RNA, 19 nt, Artificial Sequence
  Description of Artificial Sequence: Synthetic oligonucleotide
  Antisense strand to SEQ ID NO: 1915110
uuauauacacucagaagaa

SEQ ID NO: 1915112 - RNA, 19 nt, Artificial Sequence
  Description of Artificial Sequence: Synthetic oligonucleotide
  Sense strand starting at position 3629 of SEQ ID NO: 1879544
uagucuuguguauauuacu

SEQ ID NO: 1915113 - RNA, 19 nt, Artificial Sequence
  Description of Artificial Sequence: Synthetic oligonucleotide
  Antisense strand to SEQ ID NO: 1915112
aguaauauacacaagacua

SEQ ID NO: 1915114 - RNA, 19 nt, Artificial Sequence
  Description of Artificial Sequence: Synthetic oligonucleotide
  Sense strand starting at position 3660 of SEQ ID NO: 1879544
ccuaguauagcauaaugaa

SEQ ID NO: 1915115 - RNA, 19 nt, Artificial Sequence
  Description of Artificial Sequence: Synthetic oligonucleotide
  Antisense strand to SEQ ID NO: 1915114
uucauuaugcuauacuagg

SEQ ID NO: 1915116 - RNA, 19 nt, Artificial Sequence
  Description of Artificial Sequence: Synthetic oligonucleotide
  Sense strand starting at position 3726 of SEQ ID NO: 1879544
gguugugaagauuagguga

SEQ ID NO: 1915117 - RNA, 19 nt, Artificial Sequence
  Description of Artificial Sequence: Synthetic oligonucleotide
  Antisense strand to SEQ ID NO: 1915116
ucaccuaaucuucacaacc

SEQ ID NO: 1915118 - RNA, 19 nt, Artificial Sequence
  Description of Artificial Sequence: Synthetic oligonucleotide
  Sense strand starting at position 3749 of SEQ ID NO: 1879544
cugugcuuggcauauaaua

SEQ ID NO: 1915119 - RNA, 19 nt, Artificial Sequence
  Description of Artificial Sequence: Synthetic oligonucleotide
  Antisense strand to SEQ ID NO: 1915118
uauuauaugccaagcacag

SEQ ID NO: 1915120 - RNA, 19 nt, Artificial Sequence
  Description of Artificial Sequence: Synthetic oligonucleotide
  Sense strand starting at position 3941 of SEQ ID NO: 1879544
ggaaauagaccauguguac

SEQ ID NO: 1915121 - RNA, 19 nt, Artificial Sequence
  Description of Artificial Sequence: Synthetic oligonucleotide
  Antisense strand to SEQ ID NO: 1915120
guacacauggucuauuucc

SEQ ID NO: 1915122 - RNA, 19 nt, Artificial Sequence
  Description of Artificial Sequence: Synthetic oligonucleotide
  Sense strand starting at position 2 of SEQ ID NO: 1879545
gagggacuugucuauccug

SEQ ID NO: 1915123 - RNA, 19 nt, Artificial Sequence
  Description of Artificial Sequence: Synthetic oligonucleotide
  Antisense strand to SEQ ID NO: 1915122
caggauagacaagucccuc

SEQ ID NO: 1915124 - RNA, 19 nt, Artificial Sequence
  Description of Artificial Sequence: Synthetic oligonucleotide
  Sense strand starting at position 5 of SEQ ID NO: 1879545
ggacuugucuauccugaag

SEQ ID NO: 1915125 - RNA, 19 nt, Artificial Sequence
  Description of Artificial Sequence: Synthetic oligonucleotide
  Antisense strand to SEQ ID NO: 1915124
cuucaggauagacaagucc

SEQ ID NO: 1915126 - RNA, 19 nt, Artificial Sequence
  Description of Artificial Sequence: Synthetic oligonucleotide
  Sense strand starting at position 8 of SEQ ID NO: 1879545
cuugucuauccugaagcau

SEQ ID NO: 1915127 - RNA, 19 nt, Artificial Sequence
  Description of Artificial Sequence: Synthetic oligonucleotide
  Antisense strand to SEQ ID NO: 1915126
augcuucaggauagacaag

SEQ ID NO: 1915128 - RNA, 19 nt, Artificial Sequence
  Description of Artificial Sequence: Synthetic oligonucleotide
  Sense strand starting at position 107 of SEQ ID NO: 1879545
cucuguagcugauuuauac

SEQ ID NO: 1915129 - RNA, 19 nt, Artificial Sequence
  Description of Artificial Sequence: Synthetic oligonucleotide
  Antisense strand to SEQ ID NO: 1915128
guauaaaucagcuacagag

SEQ ID NO: 1915130 - RNA, 19 nt, Artificial Sequence
  Description of Artificial Sequence: Synthetic oligonucleotide
  Sense strand starting at position 145 of SEQ ID NO: 1879545
uagggacucuuguuaaugu

SEQ ID NO: 1915131 - RNA, 19 nt, Artificial Sequence
  Description of Artificial Sequence: Synthetic oligonucleotide
  Antisense strand to SEQ ID NO: 1915130
acauuaacaagagucccua

SEQ ID NO: 1915132 - RNA, 19 nt, Artificial Sequence
  Description of Artificial Sequence: Synthetic oligonucleotide
  Sense strand starting at position 156 of SEQ ID NO: 1879545
guuaaugucugacuuacag

SEQ ID NO: 1915133 - RNA, 19 nt, Artificial Sequence
  Description of Artificial Sequence: Synthetic oligonucleotide
  Antisense strand to SEQ ID NO: 1915132
cuguaagucagacauuaac

SEQ ID NO: 1915134 - RNA, 19 nt, Artificial Sequence
  Description of Artificial Sequence: Synthetic oligonucleotide
  Sense strand starting at position 342 of SEQ ID NO: 1879545
cauguauggucauccagaa

SEQ ID NO: 1915135 - RNA, 19 nt, Artificial Sequence
  Description of Artificial Sequence: Synthetic oligonucleotide
  Antisense strand to SEQ ID NO: 1915134
uucuggaugaccauacaug

SEQ ID NO: 1915136 - RNA, 19 nt, Artificial Sequence
  Description of Artificial Sequence: Synthetic oligonucleotide
  Sense strand starting at position 346 of SEQ ID NO: 1879545
uauggucauccagaagugu

SEQ ID NO: 1915137 - RNA, 19 nt, Artificial Sequence
  Description of Artificial Sequence: Synthetic oligonucleotide
  Antisense strand to SEQ ID NO: 1915136
acacuucuggaugaccaua

SEQ ID NO: 1915138 - RNA, 19 nt, Artificial Sequence
  Description of Artificial Sequence: Synthetic oligonucleotide
  Sense strand starting at position 427 of SEQ ID NO: 1879545
gagauuggagauugagcau

SEQ ID NO: 1915139 - RNA, 19 nt, Artificial Sequence
  Description of Artificial Sequence: Synthetic oligonucleotide
  Antisense strand to SEQ ID NO: 1915138
augcucaaucuccaaucuc

SEQ ID NO: 1915140 - RNA, 19 nt, Artificial Sequence
  Description of Artificial Sequence: Synthetic oligonucleotide
  Sense strand starting at position 650 of SEQ ID NO: 1879545
ccuccuguccuugagcaau

SEQ ID NO: 1915141 - RNA, 19 nt, Artificial Sequence
  Description of Artificial Sequence: Synthetic oligonucleotide
  Antisense strand to SEQ ID NO: 1915140
auugcucaaggacaggagg

SEQ ID NO: 1915142 - RNA, 19 nt, Artificial Sequence
  Description of Artificial Sequence: Synthetic oligonucleotide
  Sense strand starting at position 736 of SEQ ID NO: 1879545
gcacauaagcgacagcuaa

SEQ ID NO: 1915143 - RNA, 19 nt, Artificial Sequence
  Description of Artificial Sequence: Synthetic oligonucleotide
  Antisense strand to SEQ ID NO: 1915142
uuagcugucgcuuaugugc

SEQ ID NO: 1915144 - RNA, 19 nt, Artificial Sequence
  Description of Artificial Sequence: Synthetic oligonucleotide
  Sense strand starting at position 749 of SEQ ID NO: 1879545
agcuaagauugacuugaug

SEQ ID NO: 1915145 - RNA, 19 nt, Artificial Sequence
  Description of Artificial Sequence: Synthetic oligonucleotide
  Antisense strand to SEQ ID NO: 1915144
caucaagucaaucuuagcu

SEQ ID NO: 1915146 - RNA, 19 nt, Artificial Sequence
  Description of Artificial Sequence: Synthetic oligonucleotide
  Sense strand starting at position 763 of SEQ ID NO: 1879545
ugauguugucaauauuccu

SEQ ID NO: 1915147 - RNA, 19 nt, Artificial Sequence
  Description of Artificial Sequence: Synthetic oligonucleotide
  Antisense strand to SEQ ID NO: 1915146
aggaauauugacaacauca

SEQ ID NO: 1915148 - RNA, 19 nt, Artificial Sequence
  Description of Artificial Sequence: Synthetic oligonucleotide
  Sense strand starting at position 934 of SEQ ID NO: 1879545
gcccaauuccuuuacugag

SEQ ID NO: 1915149 - RNA, 19 nt, Artificial Sequence
  Description of Artificial Sequence: Synthetic oligonucleotide
  Antisense strand to SEQ ID NO: 1915148
cucaguaaaggaauugggc

SEQ ID NO: 1915150 - RNA, 19 nt, Artificial Sequence
  Description of Artificial Sequence: Synthetic oligonucleotide
  Sense strand starting at position 1019 of SEQ ID NO: 1879545
gucccauaaucuguaacug

SEQ ID NO: 1915151 - RNA, 19 nt, Artificial Sequence
  Description of Artificial Sequence: Synthetic oligonucleotide
  Antisense strand to SEQ ID NO: 1915150
caguuacagauuaugggac

SEQ ID NO: 1915152 - RNA, 19 nt, Artificial Sequence
  Description of Artificial Sequence: Synthetic oligonucleotide
  Sense strand starting at position 1087 of SEQ ID NO: 1879545
cuguaacugcaggacuauu

SEQ ID NO: 1915153 - RNA, 19 nt, Artificial Sequence
  Description of Artificial Sequence: Synthetic oligonucleotide
  Antisense strand to SEQ ID NO: 1915152
aauaguccugcaguuacag

SEQ ID NO: 1915154 - RNA, 19 nt, Artificial Sequence
  Description of Artificial Sequence: Synthetic oligonucleotide
  Sense strand starting at position 1125 of SEQ ID NO: 1879545
uacagaugaugggaagaaa

SEQ ID NO: 1915155 - RNA, 19 nt, Artificial Sequence
  Description of Artificial Sequence: Synthetic oligonucleotide
  Antisense strand to SEQ ID NO: 1915154
uuucuucccaucaucugua

SEQ ID NO: 1915156 - RNA, 19 nt, Artificial Sequence
  Description of Artificial Sequence: Synthetic oligonucleotide
  Sense strand starting at position 1238 of SEQ ID NO: 1879545
ggcucaauuccagagugaa

SEQ ID NO: 1915157 - RNA, 19 nt, Artificial Sequence
  Description of Artificial Sequence: Synthetic oligonucleotide
  Antisense strand to SEQ ID NO: 1915156
uucacucuggaauugagcc

SEQ ID NO: 1915158 - RNA, 19 nt, Artificial Sequence
  Description of Artificial Sequence: Synthetic oligonucleotide
  Sense strand starting at position 1323 of SEQ ID NO: 1879545
augugaccucccugaacca

SEQ ID NO: 1915159 - RNA, 19 nt, Artificial Sequence
  Description of Artificial Sequence: Synthetic oligonucleotide
  Antisense strand to SEQ ID NO: 1915158
ugguucagggaggucacau

SEQ ID NO: 1915160 - RNA, 19 nt, Artificial Sequence
  Description of Artificial Sequence: Synthetic oligonucleotide
  Sense strand starting at position 1420 of SEQ ID NO: 1879545
uuagcucugccuuagagau

SEQ ID NO: 1915161 - RNA, 19 nt, Artificial Sequence
  Description of Artificial Sequence: Synthetic oligonucleotide
  Antisense strand to SEQ ID NO: 1915160
aucucuaaggcagagcuaa

SEQ ID NO: 1915162 - RNA, 19 nt, Artificial Sequence
  Description of Artificial Sequence: Synthetic oligonucleotide
  Sense strand starting at position 1432 of SEQ ID NO: 1879545
uagagauucucuuuagguc

SEQ ID NO: 1915163 - RNA, 19 nt, Artificial Sequence
  Description of Artificial Sequence: Synthetic oligonucleotide
  Antisense strand to SEQ ID NO: 1915162
gaccuaaagagaaucucua

SEQ ID NO: 1915164 - RNA, 19 nt, Artificial Sequence
  Description of Artificial Sequence: Synthetic oligonucleotide
  Sense strand starting at position 1433 of SEQ ID NO: 1879545
agagauucucuuuaggucu

SEQ ID NO: 1915165 - RNA, 19 nt, Artificial Sequence
  Description of Artificial Sequence: Synthetic oligonucleotide
  Antisense strand to SEQ ID NO: 1915164
agaccuaaagagaaucucu

SEQ ID NO: 1915166 - RNA, 19 nt, Artificial Sequence
  Description of Artificial Sequence: Synthetic oligonucleotide
  Sense strand starting at position 1474 of SEQ ID NO: 1879545
gggaauuagucacugguuc

SEQ ID NO: 1915167 - RNA, 19 nt, Artificial Sequence
  Description of Artificial Sequence: Synthetic oligonucleotide
  Antisense strand to SEQ ID NO: 1915166
gaaccagugacuaauuccc

SEQ ID NO: 1915168 - RNA, 19 nt, Artificial Sequence
  Description of Artificial Sequence: Synthetic oligonucleotide
  Sense strand starting at position 1593 of SEQ ID NO: 1879545
cugcacaaucuuuagaguu

SEQ ID NO: 1915169 - RNA, 19 nt, Artificial Sequence
  Description of Artificial Sequence: Synthetic oligonucleotide
  Antisense strand to SEQ ID NO: 1915168
aacucuaaagauugugcag

SEQ ID NO: 1915170 - RNA, 19 nt, Artificial Sequence
  Description of Artificial Sequence: Synthetic oligonucleotide
  Sense strand starting at position 1605 of SEQ ID NO: 1879545
uagaguuaacuguaugagc

SEQ ID NO: 1915171 - RNA, 19 nt, Artificial Sequence
  Description of Artificial Sequence: Synthetic oligonucleotide
  Antisense strand to SEQ ID NO: 1915170
gcucauacaguuaacucua

SEQ ID NO: 1915172 - RNA, 19 nt, Artificial Sequence
  Description of Artificial Sequence: Synthetic oligonucleotide
  Sense strand starting at position 1607 of SEQ ID NO: 1879545
gaguuaacuguaugagcua

SEQ ID NO: 1915173 - RNA, 19 nt, Artificial Sequence
  Description of Artificial Sequence: Synthetic oligonucleotide
  Antisense strand to SEQ ID NO: 1915172
uagcucauacaguuaacuc

SEQ ID NO: 1915174 - RNA, 19 nt, Artificial Sequence
  Description of Artificial Sequence: Synthetic oligonucleotide
  Sense strand starting at position 1660 of SEQ ID NO: 1879545
ccagucuaugccuaugaag

SEQ ID NO: 1915175 - RNA, 19 nt, Artificial Sequence
  Description of Artificial Sequence: Synthetic oligonucleotide
  Antisense strand to SEQ ID NO: 1915174
cuucauaggcauagacugg

SEQ ID NO: 1915176 - RNA, 19 nt, Artificial Sequence
  Description of Artificial Sequence: Synthetic oligonucleotide
  Sense strand starting at position 1839 of SEQ ID NO: 1879545
uagggucacucugugacau

SEQ ID NO: 1915177 - RNA, 19 nt, Artificial Sequence
  Description of Artificial Sequence: Synthetic oligonucleotide
  Antisense strand to SEQ ID NO: 1915176
augucacagagugacccua

SEQ ID NO: 1915178 - RNA, 19 nt, Artificial Sequence
  Description of Artificial Sequence: Synthetic oligonucleotide
  Sense strand starting at position 2172 of SEQ ID NO: 1879545
gagguaagaccucaguucu

SEQ ID NO: 1915179 - RNA, 19 nt, Artificial Sequence
  Description of Artificial Sequence: Synthetic oligonucleotide
  Antisense strand to SEQ ID NO: 1915178
agaacugaggucuuaccuc

SEQ ID NO: 1915180 - RNA, 19 nt, Artificial Sequence
  Description of Artificial Sequence: Synthetic oligonucleotide
  Sense strand starting at position 2321 of SEQ ID NO: 1879545
gaauaauuacuagguguaa

SEQ ID NO: 1915181 - RNA, 19 nt, Artificial Sequence
  Description of Artificial Sequence: Synthetic oligonucleotide
  Antisense strand to SEQ ID NO: 1915180
uuacaccuaguaauuauuc

SEQ ID NO: 1915182 - RNA, 19 nt, Artificial Sequence
  Description of Artificial Sequence: Synthetic oligonucleotide
  Sense strand starting at position 2392 of SEQ ID NO: 1879545
guuguuagucuagacucua

SEQ ID NO: 1915183 - RNA, 19 nt, Artificial Sequence
  Description of Artificial Sequence: Synthetic oligonucleotide
  Antisense strand to SEQ ID NO: 1915182
uagagucuagacuaacaac

SEQ ID NO: 1915184 - RNA, 19 nt, Artificial Sequence
  Description of Artificial Sequence: Synthetic oligonucleotide
  Sense strand starting at position 2415 of SEQ ID NO: 1879545
ggagauuggcucugagcag

SEQ ID NO: 1915185 - RNA, 19 nt, Artificial Sequence
  Description of Artificial Sequence: Synthetic oligonucleotide
  Antisense strand to SEQ ID NO: 1915184
cugcucagagccaaucucc

SEQ ID NO: 1915186 - RNA, 19 nt, Artificial Sequence
  Description of Artificial Sequence: Synthetic oligonucleotide
  Sense strand starting at position 2469 of SEQ ID NO: 1879545
gugagagaggcugagugau

SEQ ID NO: 1915187 - RNA, 19 nt, Artificial Sequence
  Description of Artificial Sequence: Synthetic oligonucleotide
  Antisense strand to SEQ ID NO: 1915186
aucacucagccucucucac

SEQ ID NO: 1915188 - RNA, 19 nt, Artificial Sequence
  Description of Artificial Sequence: Synthetic oligonucleotide
  Sense strand starting at position 2481 of SEQ ID NO: 1879545
gagugaucagcucauguuc

SEQ ID NO: 1915189 - RNA, 19 nt, Artificial Sequence
  Description of Artificial Sequence: Synthetic oligonucleotide
  Antisense strand to SEQ ID NO: 1915188
gaacaugagcugaucacuc

SEQ ID NO: 1915190 - RNA, 19 nt, Artificial Sequence
  Description of Artificial Sequence: Synthetic oligonucleotide
  Sense strand starting at position 2495 of SEQ ID NO: 1879545
uguucacaugguugggaaa

SEQ ID NO: 1915191 - RNA, 19 nt, Artificial Sequence
  Description of Artificial Sequence: Synthetic oligonucleotide
  Antisense strand to SEQ ID NO: 1915190
uuucccaaccaugugaaca

SEQ ID NO: 1915192 - RNA, 19 nt, Artificial Sequence
  Description of Artificial Sequence: Synthetic oligonucleotide
  Sense strand starting at position 2785 of SEQ ID NO: 1879545
uggugaucugaccaaguca

SEQ ID NO: 1915193 - RNA, 19 nt, Artificial Sequence
  Description of Artificial Sequence: Synthetic oligonucleotide
  Antisense strand to SEQ ID NO: 1915192
ugacuuggucagaucacca

SEQ ID NO: 1915194 - RNA, 19 nt, Artificial Sequence
  Description of Artificial Sequence: Synthetic oligonucleotide
  Sense strand starting at position 2879 of SEQ ID NO: 1879545
accugacaucucuggcauu

SEQ ID NO: 1915195 - RNA, 19 nt, Artificial Sequence
  Description of Artificial Sequence: Synthetic oligonucleotide
  Antisense strand to SEQ ID NO: 1915194
aaugccagagaugucaggu

SEQ ID NO: 1915196 - RNA, 19 nt, Artificial Sequence
  Description of Artificial Sequence: Synthetic oligonucleotide
  Sense strand starting at position 3151 of SEQ ID NO: 1879545
ggcugucauuguccauuua

SEQ ID NO: 1915197 - RNA, 19 nt, Artificial Sequence
  Description of Artificial Sequence: Synthetic oligonucleotide
  Antisense strand to SEQ ID NO: 1915196
uaaauggacaaugacagcc

SEQ ID NO: 1915198 - RNA, 19 nt, Artificial Sequence
  Description of Artificial Sequence: Synthetic oligonucleotide
  Sense strand starting at position 3281 of SEQ ID NO: 1879545
cauauugucguuuaagauu

SEQ ID NO: 1915199 - RNA, 19 nt, Artificial Sequence
  Description of Artificial Sequence: Synthetic oligonucleotide
  Antisense strand to SEQ ID NO: 1915198
aaucuuaaacgacaauaug

SEQ ID NO: 1915200 - RNA, 19 nt, Artificial Sequence
  Description of Artificial Sequence: Synthetic oligonucleotide
  Sense strand starting at position 3679 of SEQ ID NO: 1879545
guacucagacacugaugua

SEQ ID NO: 1915201 - RNA, 19 nt, Artificial Sequence
  Description of Artificial Sequence: Synthetic oligonucleotide
  Antisense strand to SEQ ID NO: 1915200
uacaucagugucugaguac

SEQ ID NO: 1915202 - RNA, 19 nt, Artificial Sequence
  Description of Artificial Sequence: Synthetic oligonucleotide
  Sense strand starting at position 75 of SEQ ID NO: 1879546
aggcaucuuggaugucaga

SEQ ID NO: 1915203 - RNA, 19 nt, Artificial Sequence
  Description of Artificial Sequence: Synthetic oligonucleotide
  Antisense strand to SEQ ID NO: 1915202
ucugacauccaagaugccu

SEQ ID NO: 1915204 - RNA, 19 nt, Artificial Sequence
  Description of Artificial Sequence: Synthetic oligonucleotide
  Sense strand starting at position 84 of SEQ ID NO: 1879546
ggaugucagagccauguuu

SEQ ID NO: 1915205 - RNA, 19 nt, Artificial Sequence
  Description of Artificial Sequence: Synthetic oligonucleotide
  Antisense strand to SEQ ID NO: 1915204
aaacauggcucugacaucc

SEQ ID NO: 1915206 - RNA, 19 nt, Artificial Sequence
  Description of Artificial Sequence: Synthetic oligonucleotide
  Sense strand starting at position 193 of SEQ ID NO: 1879546
aaagguagcuucuuaagga

SEQ ID NO: 1915207 - RNA, 19 nt, Artificial Sequence
  Description of Artificial Sequence: Synthetic oligonucleotide
  Antisense strand to SEQ ID NO: 1915206
uccuuaagaagcuaccuuu

SEQ ID NO: 1915208 - RNA, 19 nt, Artificial Sequence
  Description of Artificial Sequence: Synthetic oligonucleotide
  Sense strand starting at position 238 of SEQ ID NO: 1879546
cagaccugucggcacagau

SEQ ID NO: 1915209 - RNA, 19 nt, Artificial Sequence
  Description of Artificial Sequence: Synthetic oligonucleotide
  Antisense strand to SEQ ID NO: 1915208
aucugugccgacaggucug

SEQ ID NO: 1915210 - RNA, 19 nt, Artificial Sequence
  Description of Artificial Sequence: Synthetic oligonucleotide
  Sense strand starting at position 320 of SEQ ID NO: 1879546
cagagaggccuuugcagaa

SEQ ID NO: 1915211 - RNA, 19 nt, Artificial Sequence
  Description of Artificial Sequence: Synthetic oligonucleotide
  Antisense strand to SEQ ID NO: 1915210
uucugcaaaggccucucug

SEQ ID NO: 1915212 - RNA, 19 nt, Artificial Sequence
  Description of Artificial Sequence: Synthetic oligonucleotide
  Sense strand starting at position 369 of SEQ ID NO: 1879546
agugcacaguccucacaau

SEQ ID NO: 1915213 - RNA, 19 nt, Artificial Sequence
  Description of Artificial Sequence: Synthetic oligonucleotide
  Antisense strand to SEQ ID NO: 1915212
auugugaggacugugcacu

SEQ ID NO: 1915214 - RNA, 19 nt, Artificial Sequence
  Description of Artificial Sequence: Synthetic oligonucleotide
  Sense strand starting at position 370 of SEQ ID NO: 1879546
gugcacaguccucacaauu

SEQ ID NO: 1915215 - RNA, 19 nt, Artificial Sequence
  Description of Artificial Sequence: Synthetic oligonucleotide
  Antisense strand to SEQ ID NO: 1915214
aauugugaggacugugcac

SEQ ID NO: 1915216 - RNA, 19 nt, Artificial Sequence
  Description of Artificial Sequence: Synthetic oligonucleotide
  Sense strand starting at position 387 of SEQ ID NO: 1879546
uuaggagacuccguucgau

SEQ ID NO: 1915217 - RNA, 19 nt, Artificial Sequence
  Description of Artificial Sequence: Synthetic oligonucleotide
  Antisense strand to SEQ ID NO: 1915216
aucgaacggagucuccuaa

SEQ ID NO: 1915218 - RNA, 19 nt, Artificial Sequence
  Description of Artificial Sequence: Synthetic oligonucleotide
  Sense strand starting at position 954 of SEQ ID NO: 1879546
ccacauggccucugauaac

SEQ ID NO: 1915219 - RNA, 19 nt, Artificial Sequence
  Description of Artificial Sequence: Synthetic oligonucleotide
  Antisense strand to SEQ ID NO: 1915218
guuaucagaggccaugugg

SEQ ID NO: 1915220 - RNA, 19 nt, Artificial Sequence
  Description of Artificial Sequence: Synthetic oligonucleotide
  Sense strand starting at position 960 of SEQ ID NO: 1879546
ggccucugauaacuugauu

SEQ ID NO: 1915221 - RNA, 19 nt, Artificial Sequence
  Description of Artificial Sequence: Synthetic oligonucleotide
  Antisense strand to SEQ ID NO: 1915220
aaucaaguuaucagaggcc

SEQ ID NO: 1915222 - RNA, 19 nt, Artificial Sequence
  Description of Artificial Sequence: Synthetic oligonucleotide
  Sense strand starting at position 965 of SEQ ID NO: 1879546
cugauaacuugauugauug

SEQ ID NO: 1915223 - RNA, 19 nt, Artificial Sequence
  Description of Artificial Sequence: Synthetic oligonucleotide
  Antisense strand to SEQ ID NO: 1915222
caaucaaucaaguuaucag

SEQ ID NO: 1915224 - RNA, 19 nt, Artificial Sequence
  Description of Artificial Sequence: Synthetic oligonucleotide
  Sense strand starting at position 971 of SEQ ID NO: 1879546
acuugauugauuggcugau

SEQ ID NO: 1915225 - RNA, 19 nt, Artificial Sequence
  Description of Artificial Sequence: Synthetic oligonucleotide
  Antisense strand to SEQ ID NO: 1915224
aucagccaaucaaucaagu

SEQ ID NO: 1915226 - RNA, 19 nt, Artificial Sequence
  Description of Artificial Sequence: Synthetic oligonucleotide
  Sense strand starting at position 972 of SEQ ID NO: 1879546
cuugauugauuggcugauu

SEQ ID NO: 1915227 - RNA, 19 nt, Artificial Sequence
  Description of Artificial Sequence: Synthetic oligonucleotide
  Antisense strand to SEQ ID NO: 1915226
aaucagccaaucaaucaag

SEQ ID NO: 1915228 - RNA, 19 nt, Artificial Sequence
  Description of Artificial Sequence: Synthetic oligonucleotide
  Sense strand starting at position 1066 of SEQ ID NO: 1879546
gagguugacccaugcaucu

SEQ ID NO: 1915229 - RNA, 19 nt, Artificial Sequence
  Description of Artificial Sequence: Synthetic oligonucleotide
  Antisense strand to SEQ ID NO: 1915228
agaugcaugggucaaccuc

SEQ ID NO: 1915230 - RNA, 19 nt, Artificial Sequence
  Description of Artificial Sequence: Synthetic oligonucleotide
  Sense strand starting at position 1101 of SEQ ID NO: 1879546
guugcacuugcaugauaug

SEQ ID NO: 1915231 - RNA, 19 nt, Artificial Sequence
  Description of Artificial Sequence: Synthetic oligonucleotide
  Antisense strand to SEQ ID NO: 1915230
cauaucaugcaagugcaac

SEQ ID NO: 1915232 - RNA, 19 nt, Artificial Sequence
  Description of Artificial Sequence: Synthetic oligonucleotide
  Sense strand starting at position 2053 of SEQ ID NO: 1879546
augaccugcucugcaagaa

SEQ ID NO: 1915233 - RNA, 19 nt, Artificial Sequence
  Description of Artificial Sequence: Synthetic oligonucleotide
  Antisense strand to SEQ ID NO: 1915232
uucuugcagagcaggucau

SEQ ID NO: 1915234 - RNA, 19 nt, Artificial Sequence
  Description of Artificial Sequence: Synthetic oligonucleotide
  Sense strand starting at position 2054 of SEQ ID NO: 1879546
ugaccugcucugcaagaau

SEQ ID NO: 1915235 - RNA, 19 nt, Artificial Sequence
  Description of Artificial Sequence: Synthetic oligonucleotide
  Antisense strand to SEQ ID NO: 1915234
auucuugcagagcagguca

SEQ ID NO: 1915236 - RNA, 19 nt, Artificial Sequence
  Description of Artificial Sequence: Synthetic oligonucleotide
  Sense strand starting at position 2057 of SEQ ID NO: 1879546
ccugcucugcaagaauauc

SEQ ID NO: 1915237 - RNA, 19 nt, Artificial Sequence
  Description of Artificial Sequence: Synthetic oligonucleotide
  Antisense strand to SEQ ID NO: 1915236
gauauucuugcagagcagg

SEQ ID NO: 1915238 - RNA, 19 nt, Artificial Sequence
  Description of Artificial Sequence: Synthetic oligonucleotide
  Sense strand starting at position 2065 of SEQ ID NO: 1879546
gcaagaauaucaucuauga

SEQ ID NO: 1915239 - RNA, 19 nt, Artificial Sequence
  Description of Artificial Sequence: Synthetic oligonucleotide
  Antisense strand to SEQ ID NO: 1915238
ucauagaugauauucuugc

SEQ ID NO: 1915240 - RNA, 19 nt, Artificial Sequence
  Description of Artificial Sequence: Synthetic oligonucleotide
  Sense strand starting at position 2198 of SEQ ID NO: 1879546
gaccuugauuuaggucuua

SEQ ID NO: 1915241 - RNA, 19 nt, Artificial Sequence
  Description of Artificial Sequence: Synthetic oligonucleotide
  Antisense strand to SEQ ID NO: 1915240
uaagaccuaaaucaagguc

SEQ ID NO: 1915242 - RNA, 19 nt, Artificial Sequence
  Description of Artificial Sequence: Synthetic oligonucleotide
  Sense strand starting at position 2203 of SEQ ID NO: 1879546
ugauuuaggucuuaaguua

SEQ ID NO: 1915243 - RNA, 19 nt, Artificial Sequence
  Description of Artificial Sequence: Synthetic oligonucleotide
  Antisense strand to SEQ ID NO: 1915242
uaacuuaagaccuaaauca

SEQ ID NO: 1915244 - RNA, 19 nt, Artificial Sequence
  Description of Artificial Sequence: Synthetic oligonucleotide
  Sense strand starting at position 2218 of SEQ ID NO: 1879546
guuaauuuguaggagggaa

SEQ ID NO: 1915245 - RNA, 19 nt, Artificial Sequence
  Description of Artificial Sequence: Synthetic oligonucleotide
  Antisense strand to SEQ ID NO: 1915244
uucccuccuacaaauuaac

SEQ ID NO: 1915246 - RNA, 19 nt, Artificial Sequence
  Description of Artificial Sequence: Synthetic oligonucleotide
  Sense strand starting at position 3007 of SEQ ID NO: 1879546
gaggacagcugucuuuaga

SEQ ID NO: 1915247 - RNA, 19 nt, Artificial Sequence
  Description of Artificial Sequence: Synthetic oligonucleotide
  Antisense strand to SEQ ID NO: 1915246
ucuaaagacagcuguccuc

SEQ ID NO: 1915248 - RNA, 19 nt, Artificial Sequence
  Description of Artificial Sequence: Synthetic oligonucleotide
  Sense strand starting at position 3010 of SEQ ID NO: 1879546
gacagcugucuuuagauga

SEQ ID NO: 1915249 - RNA, 19 nt, Artificial Sequence
  Description of Artificial Sequence: Synthetic oligonucleotide
  Antisense strand to SEQ ID NO: 1915248
ucaucuaaagacagcuguc

SEQ ID NO: 1915250 - RNA, 19 nt, Artificial Sequence
  Description of Artificial Sequence: Synthetic oligonucleotide
  Sense strand starting at position 3037 of SEQ ID NO: 1879546
ugaagauccagcuguguga

SEQ ID NO: 1915251 - RNA, 19 nt, Artificial Sequence
  Description of Artificial Sequence: Synthetic oligonucleotide
  Antisense strand to SEQ ID NO: 1915250
ucacacagcuggaucuuca

SEQ ID NO: 1915252 - RNA, 19 nt, Artificial Sequence
  Description of Artificial Sequence: Synthetic oligonucleotide
  Sense strand starting at position 3141 of SEQ ID NO: 1879546
ggaagacugcugcagugau

SEQ ID NO: 1915253 - RNA, 19 nt, Artificial Sequence
  Description of Artificial Sequence: Synthetic oligonucleotide
  Antisense strand to SEQ ID NO: 1915252
aucacugcagcagucuucc

SEQ ID NO: 1915254 - RNA, 19 nt, Artificial Sequence
  Description of Artificial Sequence: Synthetic oligonucleotide
  Sense strand starting at position 3207 of SEQ ID NO: 1879546
aucccagaggucuguggaa

SEQ ID NO: 1915255 - RNA, 19 nt, Artificial Sequence
  Description of Artificial Sequence: Synthetic oligonucleotide
  Antisense strand to SEQ ID NO: 1915254
uuccacagaccucugggau

SEQ ID NO: 1915256 - RNA, 19 nt, Artificial Sequence
  Description of Artificial Sequence: Synthetic oligonucleotide
  Sense strand starting at position 3244 of SEQ ID NO: 1879546
gccagaucuccugggccaa

SEQ ID NO: 1915257 - RNA, 19 nt, Artificial Sequence
  Description of Artificial Sequence: Synthetic oligonucleotide
  Antisense strand to SEQ ID NO: 1915256
uuggcccaggagaucuggc

SEQ ID NO: 1915258 - RNA, 19 nt, Artificial Sequence
  Description of Artificial Sequence: Synthetic oligonucleotide
  Sense strand starting at position 3257 of SEQ ID NO: 1879546
ggccaacucucaucgauuc

SEQ ID NO: 1915259 - RNA, 19 nt, Artificial Sequence
  Description of Artificial Sequence: Synthetic oligonucleotide
  Antisense strand to SEQ ID NO: 1915258
gaaucgaugagaguuggcc

SEQ ID NO: 1915260 - RNA, 19 nt, Artificial Sequence
  Description of Artificial Sequence: Synthetic oligonucleotide
  Sense strand starting at position 3298 of SEQ ID NO: 1879546
gcgguucauugacuaugaa

SEQ ID NO: 1915261 - RNA, 19 nt, Artificial Sequence
  Description of Artificial Sequence: Synthetic oligonucleotide
  Antisense strand to SEQ ID NO: 1915260
uucauagucaaugaaccgc

SEQ ID NO: 1915262 - RNA, 19 nt, Artificial Sequence
  Description of Artificial Sequence: Synthetic oligonucleotide
  Sense strand starting at position 3313 of SEQ ID NO: 1879546
ugaauaugcuggcuacaac

SEQ ID NO: 1915263 - RNA, 19 nt, Artificial Sequence
  Description of Artificial Sequence: Synthetic oligonucleotide
  Antisense strand to SEQ ID NO: 1915262
guuguagccagcauauuca

SEQ ID NO: 1915264 - RNA, 19 nt, Artificial Sequence
  Description of Artificial Sequence: Synthetic oligonucleotide
  Sense strand starting at position 3449 of SEQ ID NO: 1879546
guccuaugagauuacugua

SEQ ID NO: 1915265 - RNA, 19 nt, Artificial Sequence
  Description of Artificial Sequence: Synthetic oligonucleotide
  Antisense strand to SEQ ID NO: 1915264
uacaguaaucucauaggac

SEQ ID NO: 1915266 - RNA, 19 nt, Artificial Sequence
  Description of Artificial Sequence: Synthetic oligonucleotide
  Sense strand starting at position 3475 of SEQ ID NO: 1879546
gguaauagguaccauauuu

SEQ ID NO: 1915267 - RNA, 19 nt, Artificial Sequence
  Description of Artificial Sequence: Synthetic oligonucleotide
  Antisense strand to SEQ ID NO: 1915266
aaauaugguaccuauuacc

SEQ ID NO: 1915268 - RNA, 19 nt, Artificial Sequence
  Description of Artificial Sequence: Synthetic oligonucleotide
  Sense strand starting at position 3528 of SEQ ID NO: 1879546
auacguaaauacuuagcau

SEQ ID NO: 1915269 - RNA, 19 nt, Artificial Sequence
  Description of Artificial Sequence: Synthetic oligonucleotide
  Antisense strand to SEQ ID NO: 1915268
augcuaaguauuuacguau

SEQ ID NO: 1915270 - RNA, 19 nt, Artificial Sequence
  Description of Artificial Sequence: Synthetic oligonucleotide
  Sense strand starting at position 3664 of SEQ ID NO: 1879546
guguaaguacacugaugau

SEQ ID NO: 1915271 - RNA, 19 nt, Artificial Sequence
  Description of Artificial Sequence: Synthetic oligonucleotide
  Antisense strand to SEQ ID NO: 1915270
aucaucaguguacuuacac

SEQ ID NO: 1915272 - RNA, 19 nt, Artificial Sequence
  Description of Artificial Sequence: Synthetic oligonucleotide
  Sense strand starting at position 3822 of SEQ ID NO: 1879546
ucuauacuuagaggguaga

SEQ ID NO: 1915273 - RNA, 19 nt, Artificial Sequence
  Description of Artificial Sequence: Synthetic oligonucleotide
  Antisense strand to SEQ ID NO: 1915272
ucuacccucuaaguauaga

SEQ ID NO: 1915274 - RNA, 19 nt, Artificial Sequence
  Description of Artificial Sequence: Synthetic oligonucleotide
  Sense strand starting at position 3912 of SEQ ID NO: 1879546
ccaagucucauuggaggaa

SEQ ID NO: 1915275 - RNA, 19 nt, Artificial Sequence
  Description of Artificial Sequence: Synthetic oligonucleotide
  Antisense strand to SEQ ID NO: 1915274
uuccuccaaugagacuugg

SEQ ID NO: 1915276 - RNA, 19 nt, Artificial Sequence
  Description of Artificial Sequence: Synthetic oligonucleotide
  Sense strand starting at position 3913 of SEQ ID NO: 1879546
caagucucauuggaggaaa

SEQ ID NO: 1915277 - RNA, 19 nt, Artificial Sequence
  Description of Artificial Sequence: Synthetic oligonucleotide
  Antisense strand to SEQ ID NO: 1915276
uuuccuccaaugagacuug

SEQ ID NO: 1915278 - RNA, 19 nt, Artificial Sequence
  Description of Artificial Sequence: Synthetic oligonucleotide
  Sense strand starting at position 3981 of SEQ ID NO: 1879546
gguaacucagcuugguaca

SEQ ID NO: 1915279 - RNA, 19 nt, Artificial Sequence
  Description of Artificial Sequence: Synthetic oligonucleotide
  Antisense strand to SEQ ID NO: 1915278
uguaccaagcugaguuacc

SEQ ID NO: 1915280 - RNA, 19 nt, Artificial Sequence
  Description of Artificial Sequence: Synthetic oligonucleotide
  Sense strand starting at position 3982 of SEQ ID NO: 1879546
guaacucagcuugguacau

SEQ ID NO: 1915281 - RNA, 19 nt, Artificial Sequence
  Description of Artificial Sequence: Synthetic oligonucleotide
  Antisense strand to SEQ ID NO: 1915280
auguaccaagcugaguuac

SEQ ID NO: 1915282 - RNA, 19 nt, Artificial Sequence
  Description of Artificial Sequence: Synthetic oligonucleotide
  Sense strand starting at position 85 of SEQ ID NO: 1879547
ccaauuugcuaauagaagu

SEQ ID NO: 1915283 - RNA, 19 nt, Artificial Sequence
  Description of Artificial Sequence: Synthetic oligonucleotide
  Antisense strand to SEQ ID NO: 1915282
acuucuauuagcaaauugg

SEQ ID NO: 1915284 - RNA, 19 nt, Artificial Sequence
  Description of Artificial Sequence: Synthetic oligonucleotide
  Sense strand starting at position 166 of SEQ ID NO: 1879547
uugcucaaguguuuguaau

SEQ ID NO: 1915285 - RNA, 19 nt, Artificial Sequence
  Description of Artificial Sequence: Synthetic oligonucleotide
  Antisense strand to SEQ ID NO: 1915284
auuacaaacacuugagcaa

SEQ ID NO: 1915286 - RNA, 19 nt, Artificial Sequence
  Description of Artificial Sequence: Synthetic oligonucleotide
  Sense strand starting at position 172 of SEQ ID NO: 1879547
aaguguuuguaauccagaa

SEQ ID NO: 1915287 - RNA, 19 nt, Artificial Sequence
  Description of Artificial Sequence: Synthetic oligonucleotide
  Antisense strand to SEQ ID NO: 1915286
uucuggauuacaaacacuu

SEQ ID NO: 1915288 - RNA, 19 nt, Artificial Sequence
  Description of Artificial Sequence: Synthetic oligonucleotide
  Sense strand starting at position 248 of SEQ ID NO: 1879547
ucugaaaucuaaucauggu

SEQ ID NO: 1915289 - RNA, 19 nt, Artificial Sequence
  Description of Artificial Sequence: Synthetic oligonucleotide
  Antisense strand to SEQ ID NO: 1915288
accaugauuagauuucaga

SEQ ID NO: 1915290 - RNA, 19 nt, Artificial Sequence
  Description of Artificial Sequence: Synthetic oligonucleotide
  Sense strand starting at position 315 of SEQ ID NO: 1879547
guaagcuuuacacagugga

SEQ ID NO: 1915291 - RNA, 19 nt, Artificial Sequence
  Description of Artificial Sequence: Synthetic oligonucleotide
  Antisense strand to SEQ ID NO: 1915290
uccacuguguaaagcuuac

SEQ ID NO: 1915292 - RNA, 19 nt, Artificial Sequence
  Description of Artificial Sequence: Synthetic oligonucleotide
  Sense strand starting at position 361 of SEQ ID NO: 1879547
auauccauucuguguaugu

SEQ ID NO: 1915293 - RNA, 19 nt, Artificial Sequence
  Description of Artificial Sequence: Synthetic oligonucleotide
  Antisense strand to SEQ ID NO: 1915292
acauacacagaauggauau

SEQ ID NO: 1915294 - RNA, 19 nt, Artificial Sequence
  Description of Artificial Sequence: Synthetic oligonucleotide
  Sense strand starting at position 682 of SEQ ID NO: 1879547
ccauucuguguauguguga

SEQ ID NO: 1915295 - RNA, 19 nt, Artificial Sequence
  Description of Artificial Sequence: Synthetic oligonucleotide
  Antisense strand to SEQ ID NO: 1915294
ucacacauacacagaaugg

SEQ ID NO: 1915296 - RNA, 19 nt, Artificial Sequence
  Description of Artificial Sequence: Synthetic oligonucleotide
  Sense strand starting at position 683 of SEQ ID NO: 1879547
cauucuguguaugugugaa

SEQ ID NO: 1915297 - RNA, 19 nt, Artificial Sequence
  Description of Artificial Sequence: Synthetic oligonucleotide
  Antisense strand to SEQ ID NO: 1915296
uucacacauacacagaaug

SEQ ID NO: 1915298 - RNA, 19 nt, Artificial Sequence
  Description of Artificial Sequence: Synthetic oligonucleotide
  Sense strand starting at position 733 of SEQ ID NO: 1879547
gagguagcacacugagaaa

SEQ ID NO: 1915299 - RNA, 19 nt, Artificial Sequence
  Description of Artificial Sequence: Synthetic oligonucleotide
  Antisense strand to SEQ ID NO: 1915298
uuucucagugugcuaccuc

SEQ ID NO: 1915300 - RNA, 19 nt, Artificial Sequence
  Description of Artificial Sequence: Synthetic oligonucleotide
  Sense strand starting at position 783 of SEQ ID NO: 1879547
gucuacuugaaacgaugaa

SEQ ID NO: 1915301 - RNA, 19 nt, Artificial Sequence
  Description of Artificial Sequence: Synthetic oligonucleotide
  Antisense strand to SEQ ID NO: 1915300
uucaucguuucaaguagac

SEQ ID NO: 1915302 - RNA, 19 nt, Artificial Sequence
  Description of Artificial Sequence: Synthetic oligonucleotide
  Sense strand starting at position 851 of SEQ ID NO: 1879547
auagauggauuugagguaa

SEQ ID NO: 1915303 - RNA, 19 nt, Artificial Sequence
  Description of Artificial Sequence: Synthetic oligonucleotide
  Antisense strand to SEQ ID NO: 1915302
uuaccucaaauccaucuau

SEQ ID NO: 1915304 - RNA, 19 nt, Artificial Sequence
  Description of Artificial Sequence: Synthetic oligonucleotide
  Sense strand starting at position 944 of SEQ ID NO: 1879547
ggcauuguucuagagcaga

SEQ ID NO: 1915305 - RNA, 19 nt, Artificial Sequence
  Description of Artificial Sequence: Synthetic oligonucleotide
  Antisense strand to SEQ ID NO: 1915304
ucugcucuagaacaaugcc

SEQ ID NO: 1915306 - RNA, 19 nt, Artificial Sequence
  Description of Artificial Sequence: Synthetic oligonucleotide
  Sense strand starting at position 1182 of SEQ ID NO: 1879547
gguugcuuuccugcggcaa

SEQ ID NO: 1915307 - RNA, 19 nt, Artificial Sequence
  Description of Artificial Sequence: Synthetic oligonucleotide
  Antisense strand to SEQ ID NO: 1915306
uugccgcaggaaagcaacc

SEQ ID NO: 1915308 - RNA, 19 nt, Artificial Sequence
  Description of Artificial Sequence: Synthetic oligonucleotide
  Sense strand starting at position 1225 of SEQ ID NO: 1879547
gaccgugugaccuacaaag

SEQ ID NO: 1915309 - RNA, 19 nt, Artificial Sequence
  Description of Artificial Sequence: Synthetic oligonucleotide
  Antisense strand to SEQ ID NO: 1915308
cuuuguaggucacacgguc

SEQ ID NO: 1915310 - RNA, 19 nt, Artificial Sequence
  Description of Artificial Sequence: Synthetic oligonucleotide
  Sense strand starting at position 1300 of SEQ ID NO: 1879547
gagucuggaccuugaagga

SEQ ID NO: 1915311 - RNA, 19 nt, Artificial Sequence
  Description of Artificial Sequence: Synthetic oligonucleotide
  Antisense strand to SEQ ID NO: 1915310
uccuucaagguccagacuc

SEQ ID NO: 1915312 - RNA, 19 nt, Artificial Sequence
  Description of Artificial Sequence: Synthetic oligonucleotide
  Sense strand starting at position 1394 of SEQ ID NO: 1879547
aggaaagugugggcauguu

SEQ ID NO: 1915313 - RNA, 19 nt, Artificial Sequence
  Description of Artificial Sequence: Synthetic oligonucleotide
  Antisense strand to SEQ ID NO: 1915312
aacaugcccacacuuuccu

SEQ ID NO: 1915314 - RNA, 19 nt, Artificial Sequence
  Description of Artificial Sequence: Synthetic oligonucleotide
  Sense strand starting at position 1441 of SEQ ID NO: 1879547
guguuacccuaguuuauaa

SEQ ID NO: 1915315 - RNA, 19 nt, Artificial Sequence
  Description of Artificial Sequence: Synthetic oligonucleotide
  Antisense strand to SEQ ID NO: 1915314
uuauaaacuaggguaacac

SEQ ID NO: 1915316 - RNA, 19 nt, Artificial Sequence
  Description of Artificial Sequence: Synthetic oligonucleotide
  Sense strand starting at position 1651 of SEQ ID NO: 1879547
gcaggcaacgaauaugaau

SEQ ID NO: 1915317 - RNA, 19 nt, Artificial Sequence
  Description of Artificial Sequence: Synthetic oligonucleotide
  Antisense strand to SEQ ID NO: 1915316
auucauauucguugccugc

SEQ ID NO: 1915318 - RNA, 19 nt, Artificial Sequence
  Description of Artificial Sequence: Synthetic oligonucleotide
  Sense strand starting at position 1691 of SEQ ID NO: 1879547
ggaccauguugggaacaga

SEQ ID NO: 1915319 - RNA, 19 nt, Artificial Sequence
  Description of Artificial Sequence: Synthetic oligonucleotide
  Antisense strand to SEQ ID NO: 1915318
ucuguucccaacauggucc

SEQ ID NO: 1915320 - RNA, 19 nt, Artificial Sequence
  Description of Artificial Sequence: Synthetic oligonucleotide
  Sense strand starting at position 1837 of SEQ ID NO: 1879547
gaaugaguaugcuucgcca

SEQ ID NO: 1915321 - RNA, 19 nt, Artificial Sequence
  Description of Artificial Sequence: Synthetic oligonucleotide
  Antisense strand to SEQ ID NO: 1915320
uggcgaagcauacucauuc

SEQ ID NO: 1915322 - RNA, 19 nt, Artificial Sequence
  Description of Artificial Sequence: Synthetic oligonucleotide
  Sense strand starting at position 2068 of SEQ ID NO: 1879547
ggucguugugaacaauaag

SEQ ID NO: 1915323 - RNA, 19 nt, Artificial Sequence
  Description of Artificial Sequence: Synthetic oligonucleotide
  Antisense strand to SEQ ID NO: 1915322
cuuauuguucacaacgacc

SEQ ID NO: 1915324 - RNA, 19 nt, Artificial Sequence
  Description of Artificial Sequence: Synthetic oligonucleotide
  Sense strand starting at position 2117 of SEQ ID NO: 1879547
aacugagcucucggugacu

SEQ ID NO: 1915325 - RNA, 19 nt, Artificial Sequence
  Description of Artificial Sequence: Synthetic oligonucleotide
  Antisense strand to SEQ ID NO: 1915324
agucaccgagagcucaguu

SEQ ID NO: 1915326 - RNA, 19 nt, Artificial Sequence
  Description of Artificial Sequence: Synthetic oligonucleotide
  Sense strand starting at position 2128 of SEQ ID NO: 1879547
cggugacugguggucguua

SEQ ID NO: 1915327 - RNA, 19 nt, Artificial Sequence
  Description of Artificial Sequence: Synthetic oligonucleotide
  Antisense strand to SEQ ID NO: 1915326
uaacgaccaccagucaccg

SEQ ID NO: 1915328 - RNA, 19 nt, Artificial Sequence
  Description of Artificial Sequence: Synthetic oligonucleotide
  Sense strand starting at position 3111 of SEQ ID NO: 1879547
uggcaucugccguacuuua

SEQ ID NO: 1915329 - RNA, 19 nt, Artificial Sequence
  Description of Artificial Sequence: Synthetic oligonucleotide
  Antisense strand to SEQ ID NO: 1915328
uaaaguacggcagaugcca

SEQ ID NO: 1915330 - RNA, 19 nt, Artificial Sequence
  Description of Artificial Sequence: Synthetic oligonucleotide
  Sense strand starting at position 3113 of SEQ ID NO: 1879547
gcaucugccguacuuuauu

SEQ ID NO: 1915331 - RNA, 19 nt, Artificial Sequence
  Description of Artificial Sequence: Synthetic oligonucleotide
  Antisense strand to SEQ ID NO: 1915330
aauaaaguacggcagaugc

SEQ ID NO: 1915332 - RNA, 19 nt, Artificial Sequence
  Description of Artificial Sequence: Synthetic oligonucleotide
  Sense strand starting at position 3229 of SEQ ID NO: 1879547
gggacaagcuguucugugu

SEQ ID NO: 1915333 - RNA, 19 nt, Artificial Sequence
  Description of Artificial Sequence: Synthetic oligonucleotide
  Antisense strand to SEQ ID NO: 1915332
acacagaacagcuuguccc

SEQ ID NO: 1915334 - RNA, 19 nt, Artificial Sequence
  Description of Artificial Sequence: Synthetic oligonucleotide
  Sense strand starting at position 3310 of SEQ ID NO: 1879547
auuuguugcuucuuuacau

SEQ ID NO: 1915335 - RNA, 19 nt, Artificial Sequence
  Description of Artificial Sequence: Synthetic oligonucleotide
  Antisense strand to SEQ ID NO: 1915334
auguaaagaagcaacaaau

SEQ ID NO: 1915336 - RNA, 19 nt, Artificial Sequence
  Description of Artificial Sequence: Synthetic oligonucleotide
  Sense strand starting at position 3335 of SEQ ID NO: 1879547
cgggauuugugagauucug

SEQ ID NO: 1915337 - RNA, 19 nt, Artificial Sequence
  Description of Artificial Sequence: Synthetic oligonucleotide
  Antisense strand to SEQ ID NO: 1915336
cagaaucucacaaaucccg

SEQ ID NO: 1915338 - RNA, 19 nt, Artificial Sequence
  Description of Artificial Sequence: Synthetic oligonucleotide
  Sense strand starting at position 3520 of SEQ ID NO: 1879547
cacauacuuucgguucuga

SEQ ID NO: 1915339 - RNA, 19 nt, Artificial Sequence
  Description of Artificial Sequence: Synthetic oligonucleotide
  Antisense strand to SEQ ID NO: 1915338
ucagaaccgaaaguaugug

SEQ ID NO: 1915340 - RNA, 19 nt, Artificial Sequence
  Description of Artificial Sequence: Synthetic oligonucleotide
  Sense strand starting at position 3559 of SEQ ID NO: 1879547
acuccauaccuacgauaug

SEQ ID NO: 1915341 - RNA, 19 nt, Artificial Sequence
  Description of Artificial Sequence: Synthetic oligonucleotide
  Antisense strand to SEQ ID NO: 1915340
cauaucguagguauggagu

SEQ ID NO: 1915342 - RNA, 19 nt, Artificial Sequence
  Description of Artificial Sequence: Synthetic oligonucleotide
  Sense strand starting at position 3655 of SEQ ID NO: 1879547
ggauaucucccguguuuga

SEQ ID NO: 1915343 - RNA, 19 nt, Artificial Sequence
  Description of Artificial Sequence: Synthetic oligonucleotide
  Antisense strand to SEQ ID NO: 1915342
ucaaacacgggagauaucc

SEQ ID NO: 1915344 - RNA, 19 nt, Artificial Sequence
  Description of Artificial Sequence: Synthetic oligonucleotide
  Sense strand starting at position 3662 of SEQ ID NO: 1879547
ucccguguuugaucuuuaa

SEQ ID NO: 1915345 - RNA, 19 nt, Artificial Sequence
  Description of Artificial Sequence: Synthetic oligonucleotide
  Antisense strand to SEQ ID NO: 1915344
uuaaagaucaaacacggga

SEQ ID NO: 1915346 - RNA, 19 nt, Artificial Sequence
  Description of Artificial Sequence: Synthetic oligonucleotide
  Sense strand starting at position 3695 of SEQ ID NO: 1879547
gcauauugggcccagagga

SEQ ID NO: 1915347 - RNA, 19 nt, Artificial Sequence
  Description of Artificial Sequence: Synthetic oligonucleotide
  Antisense strand to SEQ ID NO: 1915346
uccucugggcccaauaugc

SEQ ID NO: 1915348 - RNA, 19 nt, Artificial Sequence
  Description of Artificial Sequence: Synthetic oligonucleotide
  Sense strand starting at position 3705 of SEQ ID NO: 1879547
cccagaggaucccuugcaa

SEQ ID NO: 1915349 - RNA, 19 nt, Artificial Sequence
  Description of Artificial Sequence: Synthetic oligonucleotide
  Antisense strand to SEQ ID NO: 1915348
uugcaagggauccucuggg

SEQ ID NO: 1915350 - RNA, 19 nt, Artificial Sequence
  Description of Artificial Sequence: Synthetic oligonucleotide
  Sense strand starting at position 3801 of SEQ ID NO: 1879547
uguccaucagccugaguau

SEQ ID NO: 1915351 - RNA, 19 nt, Artificial Sequence
  Description of Artificial Sequence: Synthetic oligonucleotide
  Antisense strand to SEQ ID NO: 1915350
auacucaggcugauggaca

SEQ ID NO: 1915352 - RNA, 19 nt, Artificial Sequence
  Description of Artificial Sequence: Synthetic oligonucleotide
  Sense strand starting at position 3884 of SEQ ID NO: 1879547
gccauuuggcucuggagca

SEQ ID NO: 1915353 - RNA, 19 nt, Artificial Sequence
  Description of Artificial Sequence: Synthetic oligonucleotide
  Antisense strand to SEQ ID NO: 1915352
ugcuccagagccaaauggc

SEQ ID NO: 1915354 - RNA, 19 nt, Artificial Sequence
  Description of Artificial Sequence: Synthetic oligonucleotide
  Sense strand starting at position 3896 of SEQ ID NO: 1879547
uggagcauaacuggguaau

SEQ ID NO: 1915355 - RNA, 19 nt, Artificial Sequence
  Description of Artificial Sequence: Synthetic oligonucleotide
  Antisense strand to SEQ ID NO: 1915354
auuacccaguuaugcucca

SEQ ID NO: 1915356 - RNA, 19 nt, Artificial Sequence
  Description of Artificial Sequence: Synthetic oligonucleotide
  Sense strand starting at position 3897 of SEQ ID NO: 1879547
ggagcauaacuggguaauc

SEQ ID NO: 1915357 - RNA, 19 nt, Artificial Sequence
  Description of Artificial Sequence: Synthetic oligonucleotide
  Antisense strand to SEQ ID NO: 1915356
gauuacccaguuaugcucc

SEQ ID NO: 1915358 - RNA, 19 nt, Artificial Sequence
  Description of Artificial Sequence: Synthetic oligonucleotide
  Sense strand starting at position 3899 of SEQ ID NO: 1879547
agcauaacuggguaaucca

SEQ ID NO: 1915359 - RNA, 19 nt, Artificial Sequence
  Description of Artificial Sequence: Synthetic oligonucleotide
  Antisense strand to SEQ ID NO: 1915358
uggauuacccaguuaugcu

SEQ ID NO: 1915360 - RNA, 19 nt, Artificial Sequence
  Description of Artificial Sequence: Synthetic oligonucleotide
  Sense strand starting at position 3902 of SEQ ID NO: 1879547
auaacuggguaauccaauu

SEQ ID NO: 1915361 - RNA, 19 nt, Artificial Sequence
  Description of Artificial Sequence: Synthetic oligonucleotide
  Antisense strand to SEQ ID NO: 1915360
aauuggauuacccaguuau

SEQ ID NO: 1915362 - RNA, 19 nt, Artificial Sequence
  Description of Artificial Sequence: Synthetic oligonucleotide
  Sense strand starting at position 336 of SEQ ID NO: 1879548
gagccauaccuugaauugu

SEQ ID NO: 1915363 - RNA, 19 nt, Artificial Sequence
  Description of Artificial Sequence: Synthetic oligonucleotide
  Antisense strand to SEQ ID NO: 1915362
acaauucaagguauggcuc

SEQ ID NO: 1915364 - RNA, 19 nt, Artificial Sequence
  Description of Artificial Sequence: Synthetic oligonucleotide
  Sense strand starting at position 405 of SEQ ID NO: 1879548
cccaucucauugguagaga

SEQ ID NO: 1915365 - RNA, 19 nt, Artificial Sequence
  Description of Artificial Sequence: Synthetic oligonucleotide
  Antisense strand to SEQ ID NO: 1915364
ucucuaccaaugagauggg

SEQ ID NO: 1915366 - RNA, 19 nt, Artificial Sequence
  Description of Artificial Sequence: Synthetic oligonucleotide
  Sense strand starting at position 408 of SEQ ID NO: 1879548
aucucauugguagagaguu

SEQ ID NO: 1915367 - RNA, 19 nt, Artificial Sequence
  Description of Artificial Sequence: Synthetic oligonucleotide
  Antisense strand to SEQ ID NO: 1915366
aacucucuaccaaugagau

SEQ ID NO: 1915368 - RNA, 19 nt, Artificial Sequence
  Description of Artificial Sequence: Synthetic oligonucleotide
  Sense strand starting at position 410 of SEQ ID NO: 1879548
cucauugguagagaguuau

SEQ ID NO: 1915369 - RNA, 19 nt, Artificial Sequence
  Description of Artificial Sequence: Synthetic oligonucleotide
  Antisense strand to SEQ ID NO: 1915368
auaacucucuaccaaugag

SEQ ID NO: 1915370 - RNA, 19 nt, Artificial Sequence
  Description of Artificial Sequence: Synthetic oligonucleotide
  Sense strand starting at position 421 of SEQ ID NO: 1879548
agaguuauggagugaugca

SEQ ID NO: 1915371 - RNA, 19 nt, Artificial Sequence
  Description of Artificial Sequence: Synthetic oligonucleotide
  Antisense strand to SEQ ID NO: 1915370
ugcaucacuccauaacucu

SEQ ID NO: 1915372 - RNA, 19 nt, Artificial Sequence
  Description of Artificial Sequence: Synthetic oligonucleotide
  Sense strand starting at position 422 of SEQ ID NO: 1879548
gaguuauggagugaugcac

SEQ ID NO: 1915373 - RNA, 19 nt, Artificial Sequence
  Description of Artificial Sequence: Synthetic oligonucleotide
  Antisense strand to SEQ ID NO: 1915372
gugcaucacuccauaacuc

SEQ ID NO: 1915374 - RNA, 19 nt, Artificial Sequence
  Description of Artificial Sequence: Synthetic oligonucleotide
  Sense strand starting at position 527 of SEQ ID NO: 1879548
agugaauaaccuugucuau

SEQ ID NO: 1915375 - RNA, 19 nt, Artificial Sequence
  Description of Artificial Sequence: Synthetic oligonucleotide
  Antisense strand to SEQ ID NO: 1915374
auagacaagguuauucacu

SEQ ID NO: 1915376 - RNA, 19 nt, Artificial Sequence
  Description of Artificial Sequence: Synthetic oligonucleotide
  Sense strand starting at position 631 of SEQ ID NO: 1879548
gaguauuucuuggaaauug

SEQ ID NO: 1915377 - RNA, 19 nt, Artificial Sequence
  Description of Artificial Sequence: Synthetic oligonucleotide
  Antisense strand to SEQ ID NO: 1915376
caauuuccaagaaauacuc

SEQ ID NO: 1915378 - RNA, 19 nt, Artificial Sequence
  Description of Artificial Sequence: Synthetic oligonucleotide
  Sense strand starting at position 699 of SEQ ID NO: 1879548
cuggucaucucauugaauu

SEQ ID NO: 1915379 - RNA, 19 nt, Artificial Sequence
  Description of Artificial Sequence: Synthetic oligonucleotide
  Antisense strand to SEQ ID NO: 1915378
aauucaaugagaugaccag

SEQ ID NO: 1915380 - RNA, 19 nt, Artificial Sequence
  Description of Artificial Sequence: Synthetic oligonucleotide
  Sense strand starting at position 700 of SEQ ID NO: 1879548
uggucaucucauugaauua

SEQ ID NO: 1915381 - RNA, 19 nt, Artificial Sequence
  Description of Artificial Sequence: Synthetic oligonucleotide
  Antisense strand to SEQ ID NO: 1915380
uaauucaaugagaugacca

SEQ ID NO: 1915382 - RNA, 19 nt, Artificial Sequence
  Description of Artificial Sequence: Synthetic oligonucleotide
  Sense strand starting at position 728 of SEQ ID NO: 1879548
gucauugguuaccugaaca

SEQ ID NO: 1915383 - RNA, 19 nt, Artificial Sequence
  Description of Artificial Sequence: Synthetic oligonucleotide
  Antisense strand to SEQ ID NO: 1915382
uguucagguaaccaaugac

SEQ ID NO: 1915384 - RNA, 19 nt, Artificial Sequence
  Description of Artificial Sequence: Synthetic oligonucleotide
  Sense strand starting at position 822 of SEQ ID NO: 1879548
caccgaggucuugaagcau

SEQ ID NO: 1915385 - RNA, 19 nt, Artificial Sequence
  Description of Artificial Sequence: Synthetic oligonucleotide
  Antisense strand to SEQ ID NO: 1915384
augcuucaagaccucggug

SEQ ID NO: 1915386 - RNA, 19 nt, Artificial Sequence
  Description of Artificial Sequence: Synthetic oligonucleotide
  Sense strand starting at position 887 of SEQ ID NO: 1879548
gugguuacccggaguagcu

SEQ ID NO: 1915387 - RNA, 19 nt, Artificial Sequence
  Description of Artificial Sequence: Synthetic oligonucleotide
  Antisense strand to SEQ ID NO: 1915386
agcuacuccggguaaccac

SEQ ID NO: 1915388 - RNA, 19 nt, Artificial Sequence
  Description of Artificial Sequence: Synthetic oligonucleotide
  Sense strand starting at position 900 of SEQ ID NO: 1879548
guagcuauccaccagguau

SEQ ID NO: 1915389 - RNA, 19 nt, Artificial Sequence
  Description of Artificial Sequence: Synthetic oligonucleotide
  Antisense strand to SEQ ID NO: 1915388
auaccugguggauagcuac

SEQ ID NO: 1915390 - RNA, 19 nt, Artificial Sequence
  Description of Artificial Sequence: Synthetic oligonucleotide
  Sense strand starting at position 919 of SEQ ID NO: 1879548
caggaaacaucuuugaguu

SEQ ID NO: 1915391 - RNA, 19 nt, Artificial Sequence
  Description of Artificial Sequence: Synthetic oligonucleotide
  Antisense strand to SEQ ID NO: 1915390
aacucaaagauguuuccug

SEQ ID NO: 1915392 - RNA, 19 nt, Artificial Sequence
  Description of Artificial Sequence: Synthetic oligonucleotide
  Sense strand starting at position 920 of SEQ ID NO: 1879548
aggaaacaucuuugaguuc

SEQ ID NO: 1915393 - RNA, 19 nt, Artificial Sequence
  Description of Artificial Sequence: Synthetic oligonucleotide
  Antisense strand to SEQ ID NO: 1915392
gaacucaaagauguuuccu

SEQ ID NO: 1915394 - RNA, 19 nt, Artificial Sequence
  Description of Artificial Sequence: Synthetic oligonucleotide
  Sense strand starting at position 1689 of SEQ ID NO: 1879548
guagguaaugcuggaggau

SEQ ID NO: 1915395 - RNA, 19 nt, Artificial Sequence
  Description of Artificial Sequence: Synthetic oligonucleotide
  Antisense strand to SEQ ID NO: 1915394
auccuccagcauuaccuac

SEQ ID NO: 1915396 - RNA, 19 nt, Artificial Sequence
  Description of Artificial Sequence: Synthetic oligonucleotide
  Sense strand starting at position 1872 of SEQ ID NO: 1879548
acgaguggcuggaaugaga

SEQ ID NO: 1915397 - RNA, 19 nt, Artificial Sequence
  Description of Artificial Sequence: Synthetic oligonucleotide
  Antisense strand to SEQ ID NO: 1915396
ucucauuccagccacucgu

SEQ ID NO: 1915398 - RNA, 19 nt, Artificial Sequence
  Description of Artificial Sequence: Synthetic oligonucleotide
  Sense strand starting at position 2049 of SEQ ID NO: 1879548
auuagaguucuagaauguc

SEQ ID NO: 1915399 - RNA, 19 nt, Artificial Sequence
  Description of Artificial Sequence: Synthetic oligonucleotide
  Antisense strand to SEQ ID NO: 1915398
gacauucuagaacucuaau

SEQ ID NO: 1915400 - RNA, 19 nt, Artificial Sequence
  Description of Artificial Sequence: Synthetic oligonucleotide
  Sense strand starting at position 2052 of SEQ ID NO: 1879548
agaguucuagaaugucaca

SEQ ID NO: 1915401 - RNA, 19 nt, Artificial Sequence
  Description of Artificial Sequence: Synthetic oligonucleotide
  Antisense strand to SEQ ID NO: 1915400
ugugacauucuagaacucu

SEQ ID NO: 1915402 - RNA, 19 nt, Artificial Sequence
  Description of Artificial Sequence: Synthetic oligonucleotide
  Sense strand starting at position 2168 of SEQ ID NO: 1879548
cccucagcucuugaauaga

SEQ ID NO: 1915403 - RNA, 19 nt, Artificial Sequence
  Description of Artificial Sequence: Synthetic oligonucleotide
  Antisense strand to SEQ ID NO: 1915402
ucuauucaagagcugaggg

SEQ ID NO: 1915404 - RNA, 19 nt, Artificial Sequence
  Description of Artificial Sequence: Synthetic oligonucleotide
  Sense strand starting at position 2216 of SEQ ID NO: 1879548
ugguuagugagaugagaug

SEQ ID NO: 1915405 - RNA, 19 nt, Artificial Sequence
  Description of Artificial Sequence: Synthetic oligonucleotide
  Antisense strand to SEQ ID NO: 1915404
caucucaucucacuaacca

SEQ ID NO: 1915406 - RNA, 19 nt, Artificial Sequence
  Description of Artificial Sequence: Synthetic oligonucleotide
  Sense strand starting at position 2233 of SEQ ID NO: 1879548
ugagauacuucucuaggau

SEQ ID NO: 1915407 - RNA, 19 nt, Artificial Sequence
  Description of Artificial Sequence: Synthetic oligonucleotide
  Antisense strand to SEQ ID NO: 1915406
auccuagagaaguaucuca

SEQ ID NO: 1915408 - RNA, 19 nt, Artificial Sequence
  Description of Artificial Sequence: Synthetic oligonucleotide
  Sense strand starting at position 2406 of SEQ ID NO: 1879548
auugacagcccaggauaua

SEQ ID NO: 1915409 - RNA, 19 nt, Artificial Sequence
  Description of Artificial Sequence: Synthetic oligonucleotide
  Antisense strand to SEQ ID NO: 1915408
uauauccugggcugucaau

SEQ ID NO: 1915410 - RNA, 19 nt, Artificial Sequence
  Description of Artificial Sequence: Synthetic oligonucleotide
  Sense strand starting at position 2654 of SEQ ID NO: 1879548
caaacuggccuuuagaagu

SEQ ID NO: 1915411 - RNA, 19 nt, Artificial Sequence
  Description of Artificial Sequence: Synthetic oligonucleotide
  Antisense strand to SEQ ID NO: 1915410
acuucuaaaggccaguuug

SEQ ID NO: 1915412 - RNA, 19 nt, Artificial Sequence
  Description of Artificial Sequence: Synthetic oligonucleotide
  Sense strand starting at position 2726 of SEQ ID NO: 1879548
guuuguugggcucgaauuu

SEQ ID NO: 1915413 - RNA, 19 nt, Artificial Sequence
  Description of Artificial Sequence: Synthetic oligonucleotide
  Antisense strand to SEQ ID NO: 1915412
aaauucgagcccaacaaac

SEQ ID NO: 1915414 - RNA, 19 nt, Artificial Sequence
  Description of Artificial Sequence: Synthetic oligonucleotide
  Sense strand starting at position 2873 of SEQ ID NO: 1879548
agguuaguuguagaaguuu

SEQ ID NO: 1915415 - RNA, 19 nt, Artificial Sequence
  Description of Artificial Sequence: Synthetic oligonucleotide
  Antisense strand to SEQ ID NO: 1915414
aaacuucuacaacuaaccu

SEQ ID NO: 1915416 - RNA, 19 nt, Artificial Sequence
  Description of Artificial Sequence: Synthetic oligonucleotide
  Sense strand starting at position 2974 of SEQ ID NO: 1879548
uguauuccaagauguggaa

SEQ ID NO: 1915417 - RNA, 19 nt, Artificial Sequence
  Description of Artificial Sequence: Synthetic oligonucleotide
  Antisense strand to SEQ ID NO: 1915416
uuccacaucuuggaauaca

SEQ ID NO: 1915418 - RNA, 19 nt, Artificial Sequence
  Description of Artificial Sequence: Synthetic oligonucleotide
  Sense strand starting at position 3044 of SEQ ID NO: 1879548
gugcaauguguugcguaaa

SEQ ID NO: 1915419 - RNA, 19 nt, Artificial Sequence
  Description of Artificial Sequence: Synthetic oligonucleotide
  Antisense strand to SEQ ID NO: 1915418
uuuacgcaacacauugcac

SEQ ID NO: 1915420 - RNA, 19 nt, Artificial Sequence
  Description of Artificial Sequence: Synthetic oligonucleotide
  Sense strand starting at position 3054 of SEQ ID NO: 1879548
uugcguaaacgugcuuuga

SEQ ID NO: 1915421 - RNA, 19 nt, Artificial Sequence
  Description of Artificial Sequence: Synthetic oligonucleotide
  Antisense strand to SEQ ID NO: 1915420
ucaaagcacguuuacgcaa

SEQ ID NO: 1915422 - RNA, 19 nt, Artificial Sequence
  Description of Artificial Sequence: Synthetic oligonucleotide
  Sense strand starting at position 3055 of SEQ ID NO: 1879548
ugcguaaacgugcuuugaa

SEQ ID NO: 1915423 - RNA, 19 nt, Artificial Sequence
  Description of Artificial Sequence: Synthetic oligonucleotide
  Antisense strand to SEQ ID NO: 1915422
uucaaagcacguuuacgca

SEQ ID NO: 1915424 - RNA, 19 nt, Artificial Sequence
  Description of Artificial Sequence: Synthetic oligonucleotide
  Sense strand starting at position 3070 of SEQ ID NO: 1879548
ugaaauuucuccuuccgug

SEQ ID NO: 1915425 - RNA, 19 nt, Artificial Sequence
  Description of Artificial Sequence: Synthetic oligonucleotide
  Antisense strand to SEQ ID NO: 1915424
cacggaaggagaaauuuca

SEQ ID NO: 1915426 - RNA, 19 nt, Artificial Sequence
  Description of Artificial Sequence: Synthetic oligonucleotide
  Sense strand starting at position 3280 of SEQ ID NO: 1879548
ggucuuugcccagacugau

SEQ ID NO: 1915427 - RNA, 19 nt, Artificial Sequence
  Description of Artificial Sequence: Synthetic oligonucleotide
  Antisense strand to SEQ ID NO: 1915426
aucagucugggcaaagacc

SEQ ID NO: 1915428 - RNA, 19 nt, Artificial Sequence
  Description of Artificial Sequence: Synthetic oligonucleotide
  Sense strand starting at position 3289 of SEQ ID NO: 1879548
ccagacugaugggcuuuaa

SEQ ID NO: 1915429 - RNA, 19 nt, Artificial Sequence
  Description of Artificial Sequence: Synthetic oligonucleotide
  Antisense strand to SEQ ID NO: 1915428
uuaaagcccaucagucugg

SEQ ID NO: 1915430 - RNA, 19 nt, Artificial Sequence
  Description of Artificial Sequence: Synthetic oligonucleotide
  Sense strand starting at position 3561 of SEQ ID NO: 1879548
cuguguuaugacgcuaugu

SEQ ID NO: 1915431 - RNA, 19 nt, Artificial Sequence
  Description of Artificial Sequence: Synthetic oligonucleotide
  Antisense strand to SEQ ID NO: 1915430
acauagcgucauaacacag

SEQ ID NO: 1915432 - RNA, 19 nt, Artificial Sequence
  Description of Artificial Sequence: Synthetic oligonucleotide
  Sense strand starting at position 3562 of SEQ ID NO: 1879548
uguguuaugacgcuauguu

SEQ ID NO: 1915433 - RNA, 19 nt, Artificial Sequence
  Description of Artificial Sequence: Synthetic oligonucleotide
  Antisense strand to SEQ ID NO: 1915432
aacauagcgucauaacaca

SEQ ID NO: 1915434 - RNA, 19 nt, Artificial Sequence
  Description of Artificial Sequence: Synthetic oligonucleotide
  Sense strand starting at position 3607 of SEQ ID NO: 1879548
ggcucacuagugggaaaga

SEQ ID NO: 1915435 - RNA, 19 nt, Artificial Sequence
  Description of Artificial Sequence: Synthetic oligonucleotide
  Antisense strand to SEQ ID NO: 1915434
ucuuucccacuagugagcc

SEQ ID NO: 1915436 - RNA, 19 nt, Artificial Sequence
  Description of Artificial Sequence: Synthetic oligonucleotide
  Sense strand starting at position 3788 of SEQ ID NO: 1879548
cugcaagaugauugguaca

SEQ ID NO: 1915437 - RNA, 19 nt, Artificial Sequence
  Description of Artificial Sequence: Synthetic oligonucleotide
  Antisense strand to SEQ ID NO: 1915436
uguaccaaucaucuugcag

SEQ ID NO: 1915438 - RNA, 19 nt, Artificial Sequence
  Description of Artificial Sequence: Synthetic oligonucleotide
  Sense strand starting at position 3790 of SEQ ID NO: 1879548
gcaagaugauugguacauu

SEQ ID NO: 1915439 - RNA, 19 nt, Artificial Sequence
  Description of Artificial Sequence: Synthetic oligonucleotide
  Antisense strand to SEQ ID NO: 1915438
aauguaccaaucaucuugc

SEQ ID NO: 1915440 - RNA, 19 nt, Artificial Sequence
  Description of Artificial Sequence: Synthetic oligonucleotide
  Sense strand starting at position 3974 of SEQ ID NO: 1879548
agcaauuugcuguggaggu

SEQ ID NO: 1915441 - RNA, 19 nt, Artificial Sequence
  Description of Artificial Sequence: Synthetic oligonucleotide
  Antisense strand to SEQ ID NO: 1915440
accuccacagcaaauugcu

SEQ ID NO: 1915442 - RNA, 19 nt, Artificial Sequence
  Description of Artificial Sequence: Synthetic oligonucleotide
  Sense strand starting at position 29 of SEQ ID NO: 1879549
cuucuuaguccauaagguu

SEQ ID NO: 1915443 - RNA, 19 nt, Artificial Sequence
  Description of Artificial Sequence: Synthetic oligonucleotide
  Antisense strand to SEQ ID NO: 1915442
aaccuuauggacuaagaag

SEQ ID NO: 1915444 - RNA, 19 nt, Artificial Sequence
  Description of Artificial Sequence: Synthetic oligonucleotide
  Sense strand starting at position 60 of SEQ ID NO: 1879549
cugggaacuuuguuaggga

SEQ ID NO: 1915445 - RNA, 19 nt, Artificial Sequence
  Description of Artificial Sequence: Synthetic oligonucleotide
  Antisense strand to SEQ ID NO: 1915444
ucccuaacaaaguucccag

SEQ ID NO: 1915446 - RNA, 19 nt, Artificial Sequence
  Description of Artificial Sequence: Synthetic oligonucleotide
  Sense strand starting at position 67 of SEQ ID NO: 1879549
cuuuguuagggaggagauu

SEQ ID NO: 1915447 - RNA, 19 nt, Artificial Sequence
  Description of Artificial Sequence: Synthetic oligonucleotide
  Antisense strand to SEQ ID NO: 1915446
aaucuccucccuaacaaag

SEQ ID NO: 1915448 - RNA, 19 nt, Artificial Sequence
  Description of Artificial Sequence: Synthetic oligonucleotide
  Sense strand starting at position 653 of SEQ ID NO: 1879549
uucuucucucagcagagau

SEQ ID NO: 1915449 - RNA, 19 nt, Artificial Sequence
  Description of Artificial Sequence: Synthetic oligonucleotide
  Antisense strand to SEQ ID NO: 1915448
aucucugcugagagaagaa

SEQ ID NO: 1915450 - RNA, 19 nt, Artificial Sequence
  Description of Artificial Sequence: Synthetic oligonucleotide
  Sense strand starting at position 766 of SEQ ID NO: 1879549
guucuuaugccuguguuac

SEQ ID NO: 1915451 - RNA, 19 nt, Artificial Sequence
  Description of Artificial Sequence: Synthetic oligonucleotide
  Antisense strand to SEQ ID NO: 1915450
guaacacaggcauaagaac

SEQ ID NO: 1915452 - RNA, 19 nt, Artificial Sequence
  Description of Artificial Sequence: Synthetic oligonucleotide
  Sense strand starting at position 831 of SEQ ID NO: 1879549
ggacuuggcacuggaaaca

SEQ ID NO: 1915453 - RNA, 19 nt, Artificial Sequence
  Description of Artificial Sequence: Synthetic oligonucleotide
  Antisense strand to SEQ ID NO: 1915452
uguuuccagugccaagucc

SEQ ID NO: 1915454 - RNA, 19 nt, Artificial Sequence
  Description of Artificial Sequence: Synthetic oligonucleotide
  Sense strand starting at position 869 of SEQ ID NO: 1879549
gcuggaaucuccucacaug

SEQ ID NO: 1915455 - RNA, 19 nt, Artificial Sequence
  Description of Artificial Sequence: Synthetic oligonucleotide
  Antisense strand to SEQ ID NO: 1915454
caugugaggagauuccagc

SEQ ID NO: 1915456 - RNA, 19 nt, Artificial Sequence
  Description of Artificial Sequence: Synthetic oligonucleotide
  Sense strand starting at position 903 of SEQ ID NO: 1879549
uucucaguucucuacagua

SEQ ID NO: 1915457 - RNA, 19 nt, Artificial Sequence
  Description of Artificial Sequence: Synthetic oligonucleotide
  Antisense strand to SEQ ID NO: 1915456
uacuguagagaacugagaa

SEQ ID NO: 1915458 - RNA, 19 nt, Artificial Sequence
  Description of Artificial Sequence: Synthetic oligonucleotide
  Sense strand starting at position 905 of SEQ ID NO: 1879549
cucaguucucuacaguaaa

SEQ ID NO: 1915459 - RNA, 19 nt, Artificial Sequence
  Description of Artificial Sequence: Synthetic oligonucleotide
  Antisense strand to SEQ ID NO: 1915458
uuuacuguagagaacugag

SEQ ID NO: 1915460 - RNA, 19 nt, Artificial Sequence
  Description of Artificial Sequence: Synthetic oligonucleotide
  Sense strand starting at position 1464 of SEQ ID NO: 1879549
acagguuggaucugaagua

SEQ ID NO: 1915461 - RNA, 19 nt, Artificial Sequence
  Description of Artificial Sequence: Synthetic oligonucleotide
  Antisense strand to SEQ ID NO: 1915460
uacuucagauccaaccugu

SEQ ID NO: 1915462 - RNA, 19 nt, Artificial Sequence
  Description of Artificial Sequence: Synthetic oligonucleotide
  Sense strand starting at position 1492 of SEQ ID NO: 1879549
ccguguucgaggguucuau

SEQ ID NO: 1915463 - RNA, 19 nt, Artificial Sequence
  Description of Artificial Sequence: Synthetic oligonucleotide
  Antisense strand to SEQ ID NO: 1915462
auagaacccucgaacacgg

SEQ ID NO: 1915464 - RNA, 19 nt, Artificial Sequence
  Description of Artificial Sequence: Synthetic oligonucleotide
  Sense strand starting at position 1574 of SEQ ID NO: 1879549
gugugacuuuaagucaaca

SEQ ID NO: 1915465 - RNA, 19 nt, Artificial Sequence
  Description of Artificial Sequence: Synthetic oligonucleotide
  Antisense strand to SEQ ID NO: 1915464
uguugacuuaaagucacac

SEQ ID NO: 1915466 - RNA, 19 nt, Artificial Sequence
  Description of Artificial Sequence: Synthetic oligonucleotide
  Sense strand starting at position 1579 of SEQ ID NO: 1879549
acuuuaagucaacauguuu

SEQ ID NO: 1915467 - RNA, 19 nt, Artificial Sequence
  Description of Artificial Sequence: Synthetic oligonucleotide
  Antisense strand to SEQ ID NO: 1915466
aaacauguugacuuaaagu

SEQ ID NO: 1915468 - RNA, 19 nt, Artificial Sequence
  Description of Artificial Sequence: Synthetic oligonucleotide
  Sense strand starting at position 1628 of SEQ ID NO: 1879549
cuuucucuccaguauggaa

SEQ ID NO: 1915469 - RNA, 19 nt, Artificial Sequence
  Description of Artificial Sequence: Synthetic oligonucleotide
  Antisense strand to SEQ ID NO: 1915468
uuccauacuggagagaaag

SEQ ID NO: 1915470 - RNA, 19 nt, Artificial Sequence
  Description of Artificial Sequence: Synthetic oligonucleotide
  Sense strand starting at position 1635 of SEQ ID NO: 1879549
uccaguauggaaugaaauu

SEQ ID NO: 1915471 - RNA, 19 nt, Artificial Sequence
  Description of Artificial Sequence: Synthetic oligonucleotide
  Antisense strand to SEQ ID NO: 1915470
aauuucauuccauacugga

SEQ ID NO: 1915472 - RNA, 19 nt, Artificial Sequence
  Description of Artificial Sequence: Synthetic oligonucleotide
  Sense strand starting at position 1728 of SEQ ID NO: 1879549
guagacauugccuacuaga

SEQ ID NO: 1915473 - RNA, 19 nt, Artificial Sequence
  Description of Artificial Sequence: Synthetic oligonucleotide
  Antisense strand to SEQ ID NO: 1915472
ucuaguaggcaaugucuac

SEQ ID NO: 1915474 - RNA, 19 nt, Artificial Sequence
  Description of Artificial Sequence: Synthetic oligonucleotide
  Sense strand starting at position 1873 of SEQ ID NO: 1879549
ggugcagaguuauucagaa

SEQ ID NO: 1915475 - RNA, 19 nt, Artificial Sequence
  Description of Artificial Sequence: Synthetic oligonucleotide
  Antisense strand to SEQ ID NO: 1915474
uucugaauaacucugcacc

SEQ ID NO: 1915476 - RNA, 19 nt, Artificial Sequence
  Description of Artificial Sequence: Synthetic oligonucleotide
  Sense strand starting at position 2051 of SEQ ID NO: 1879549
gggaguaugacucaccagu

SEQ ID NO: 1915477 - RNA, 19 nt, Artificial Sequence
  Description of Artificial Sequence: Synthetic oligonucleotide
  Antisense strand to SEQ ID NO: 1915476
acuggugagucauacuccc

SEQ ID NO: 1915478 - RNA, 19 nt, Artificial Sequence
  Description of Artificial Sequence: Synthetic oligonucleotide
  Sense strand starting at position 2053 of SEQ ID NO: 1879549
gaguaugacucaccaguau

SEQ ID NO: 1915479 - RNA, 19 nt, Artificial Sequence
  Description of Artificial Sequence: Synthetic oligonucleotide
  Antisense strand to SEQ ID NO: 1915478
auacuggugagucauacuc

SEQ ID NO: 1915480 - RNA, 19 nt, Artificial Sequence
  Description of Artificial Sequence: Synthetic oligonucleotide
  Sense strand starting at position 2064 of SEQ ID NO: 1879549
accaguauuggucaugacu

SEQ ID NO: 1915481 - RNA, 19 nt, Artificial Sequence
  Description of Artificial Sequence: Synthetic oligonucleotide
  Antisense strand to SEQ ID NO: 1915480
agucaugaccaauacuggu

SEQ ID NO: 1915482 - RNA, 19 nt, Artificial Sequence
  Description of Artificial Sequence: Synthetic oligonucleotide
  Sense strand starting at position 2209 of SEQ ID NO: 1879549
agagcuguagauuauuaca

SEQ ID NO: 1915483 - RNA, 19 nt, Artificial Sequence
  Description of Artificial Sequence: Synthetic oligonucleotide
  Antisense strand to SEQ ID NO: 1915482
uguaauaaucuacagcucu

SEQ ID NO: 1915484 - RNA, 19 nt, Artificial Sequence
  Description of Artificial Sequence: Synthetic oligonucleotide
  Sense strand starting at position 2282 of SEQ ID NO: 1879549
cucauucucuuucuggaga

SEQ ID NO: 1915485 - RNA, 19 nt, Artificial Sequence
  Description of Artificial Sequence: Synthetic oligonucleotide
  Antisense strand to SEQ ID NO: 1915484
ucuccagaaagagaaugag

SEQ ID NO: 1915486 - RNA, 19 nt, Artificial Sequence
  Description of Artificial Sequence: Synthetic oligonucleotide
  Sense strand starting at position 2952 of SEQ ID NO: 1879549
uuagcuucuguugagaaac

SEQ ID NO: 1915487 - RNA, 19 nt, Artificial Sequence
  Description of Artificial Sequence: Synthetic oligonucleotide
  Antisense strand to SEQ ID NO: 1915486
guuucucaacagaagcuaa

SEQ ID NO: 1915488 - RNA, 19 nt, Artificial Sequence
  Description of Artificial Sequence: Synthetic oligonucleotide
  Sense strand starting at position 2966 of SEQ ID NO: 1879549
gaaacuggugugggacuaa

SEQ ID NO: 1915489 - RNA, 19 nt, Artificial Sequence
  Description of Artificial Sequence: Synthetic oligonucleotide
  Antisense strand to SEQ ID NO: 1915488
uuagucccacaccaguuuc

SEQ ID NO: 1915490 - RNA, 19 nt, Artificial Sequence
  Description of Artificial Sequence: Synthetic oligonucleotide
  Sense strand starting at position 2978 of SEQ ID NO: 1879549
ggacuaagaugauuguugu

SEQ ID NO: 1915491 - RNA, 19 nt, Artificial Sequence
  Description of Artificial Sequence: Synthetic oligonucleotide
  Antisense strand to SEQ ID NO: 1915490
acaacaaucaucuuagucc

SEQ ID NO: 1915492 - RNA, 19 nt, Artificial Sequence
  Description of Artificial Sequence: Synthetic oligonucleotide
  Sense strand starting at position 2984 of SEQ ID NO: 1879549
agaugauuguuguccugau

SEQ ID NO: 1915493 - RNA, 19 nt, Artificial Sequence
  Description of Artificial Sequence: Synthetic oligonucleotide
  Antisense strand to SEQ ID NO: 1915492
aucaggacaacaaucaucu

SEQ ID NO: 1915494 - RNA, 19 nt, Artificial Sequence
  Description of Artificial Sequence: Synthetic oligonucleotide
  Sense strand starting at position 2996 of SEQ ID NO: 1879549
uccugauuugccuguuggu

SEQ ID NO: 1915495 - RNA, 19 nt, Artificial Sequence
  Description of Artificial Sequence: Synthetic oligonucleotide
  Antisense strand to SEQ ID NO: 1915494
accaacaggcaaaucagga

SEQ ID NO: 1915496 - RNA, 19 nt, Artificial Sequence
  Description of Artificial Sequence: Synthetic oligonucleotide
  Sense strand starting at position 3011 of SEQ ID NO: 1879549
uggugucauagucagaucu

SEQ ID NO: 1915497 - RNA, 19 nt, Artificial Sequence
  Description of Artificial Sequence: Synthetic oligonucleotide
  Antisense strand to SEQ ID NO: 1915496
agaucugacuaugacacca

SEQ ID NO: 1915498 - RNA, 19 nt, Artificial Sequence
  Description of Artificial Sequence: Synthetic oligonucleotide
  Sense strand starting at position 3057 of SEQ ID NO: 1879549
guaccauggcugggaacuu

SEQ ID NO: 1915499 - RNA, 19 nt, Artificial Sequence
  Description of Artificial Sequence: Synthetic oligonucleotide
  Antisense strand to SEQ ID NO: 1915498
aaguucccagccaugguac

SEQ ID NO: 1915500 - RNA, 19 nt, Artificial Sequence
  Description of Artificial Sequence: Synthetic oligonucleotide
  Sense strand starting at position 3094 of SEQ ID NO: 1879549
cccagagaugcugagcuua

SEQ ID NO: 1915501 - RNA, 19 nt, Artificial Sequence
  Description of Artificial Sequence: Synthetic oligonucleotide
  Antisense strand to SEQ ID NO: 1915500
uaagcucagcaucucuggg

SEQ ID NO: 1915502 - RNA, 19 nt, Artificial Sequence
  Description of Artificial Sequence: Synthetic oligonucleotide
  Sense strand starting at position 3099 of SEQ ID NO: 1879549
agaugcugagcuuaguaua

SEQ ID NO: 1915503 - RNA, 19 nt, Artificial Sequence
  Description of Artificial Sequence: Synthetic oligonucleotide
  Antisense strand to SEQ ID NO: 1915502
uauacuaagcucagcaucu

SEQ ID NO: 1915504 - RNA, 19 nt, Artificial Sequence
  Description of Artificial Sequence: Synthetic oligonucleotide
  Sense strand starting at position 3134 of SEQ ID NO: 1879549
gucaaacucgcucaaucua

SEQ ID NO: 1915505 - RNA, 19 nt, Artificial Sequence
  Description of Artificial Sequence: Synthetic oligonucleotide
  Antisense strand to SEQ ID NO: 1915504
uagauugagcgaguuugac

SEQ ID NO: 1915506 - RNA, 19 nt, Artificial Sequence
  Description of Artificial Sequence: Synthetic oligonucleotide
  Sense strand starting at position 3156 of SEQ ID NO: 1879549
ggagcuggguaaucaguga

SEQ ID NO: 1915507 - RNA, 19 nt, Artificial Sequence
  Description of Artificial Sequence: Synthetic oligonucleotide
  Antisense strand to SEQ ID NO: 1915506
ucacugauuacccagcucc

SEQ ID NO: 1915508 - RNA, 19 nt, Artificial Sequence
  Description of Artificial Sequence: Synthetic oligonucleotide
  Sense strand starting at position 3192 of SEQ ID NO: 1879549
uaaagaaucugucuacggu

SEQ ID NO: 1915509 - RNA, 19 nt, Artificial Sequence
  Description of Artificial Sequence: Synthetic oligonucleotide
  Antisense strand to SEQ ID NO: 1915508
accguagacagauucuuua

SEQ ID NO: 1915510 - RNA, 19 nt, Artificial Sequence
  Description of Artificial Sequence: Synthetic oligonucleotide
  Sense strand starting at position 3514 of SEQ ID NO: 1879549
ccuuacaagucuguuaaca

SEQ ID NO: 1915511 - RNA, 19 nt, Artificial Sequence
  Description of Artificial Sequence: Synthetic oligonucleotide
  Antisense strand to SEQ ID NO: 1915510
uguuaacagacuuguaagg

SEQ ID NO: 1915512 - RNA, 19 nt, Artificial Sequence
  Description of Artificial Sequence: Synthetic oligonucleotide
  Sense strand starting at position 3546 of SEQ ID NO: 1879549
cugucauuauuugcauguu

SEQ ID NO: 1915513 - RNA, 19 nt, Artificial Sequence
  Description of Artificial Sequence: Synthetic oligonucleotide
  Antisense strand to SEQ ID NO: 1915512
aacaugcaaauaaugacag

SEQ ID NO: 1915514 - RNA, 19 nt, Artificial Sequence
  Description of Artificial Sequence: Synthetic oligonucleotide
  Sense strand starting at position 3549 of SEQ ID NO: 1879549
ucauuauuugcauguuagu

SEQ ID NO: 1915515 - RNA, 19 nt, Artificial Sequence
  Description of Artificial Sequence: Synthetic oligonucleotide
  Antisense strand to SEQ ID NO: 1915514
acuaacaugcaaauaauga

SEQ ID NO: 1915516 - RNA, 19 nt, Artificial Sequence
  Description of Artificial Sequence: Synthetic oligonucleotide
  Sense strand starting at position 3560 of SEQ ID NO: 1879549
auguuaguuccuuaauagg

SEQ ID NO: 1915517 - RNA, 19 nt, Artificial Sequence
  Description of Artificial Sequence: Synthetic oligonucleotide
  Antisense strand to SEQ ID NO: 1915516
ccuauuaaggaacuaacau

SEQ ID NO: 1915518 - RNA, 19 nt, Artificial Sequence
  Description of Artificial Sequence: Synthetic oligonucleotide
  Sense strand starting at position 3926 of SEQ ID NO: 1879549
cuuccaggucuaugauucu

SEQ ID NO: 1915519 - RNA, 19 nt, Artificial Sequence
  Description of Artificial Sequence: Synthetic oligonucleotide
  Antisense strand to SEQ ID NO: 1915518
agaaucauagaccuggaag

SEQ ID NO: 1915520 - RNA, 19 nt, Artificial Sequence
  Description of Artificial Sequence: Synthetic oligonucleotide
  Sense strand starting at position 3929 of SEQ ID NO: 1879549
ccaggucuaugauucuaag

SEQ ID NO: 1915521 - RNA, 19 nt, Artificial Sequence
  Description of Artificial Sequence: Synthetic oligonucleotide
  Antisense strand to SEQ ID NO: 1915520
cuuagaaucauagaccugg

SEQ ID NO: 1915522 - RNA, 19 nt, Artificial Sequence
  Description of Artificial Sequence: Synthetic oligonucleotide
  Sense strand starting at position 86 of SEQ ID NO: 1879550
aauucugcuguugagaacu

SEQ ID NO: 1915523 - RNA, 19 nt, Artificial Sequence
  Description of Artificial Sequence: Synthetic oligonucleotide
  Antisense strand to SEQ ID NO: 1915522
aguucucaacagcagaauu

SEQ ID NO: 1915524 - RNA, 19 nt, Artificial Sequence
  Description of Artificial Sequence: Synthetic oligonucleotide
  Sense strand starting at position 109 of SEQ ID NO: 1879550
augugauuguuauccucug

SEQ ID NO: 1915525 - RNA, 19 nt, Artificial Sequence
  Description of Artificial Sequence: Synthetic oligonucleotide
  Antisense strand to SEQ ID NO: 1915524
cagaggauaacaaucacau

SEQ ID NO: 1915526 - RNA, 19 nt, Artificial Sequence
  Description of Artificial Sequence: Synthetic oligonucleotide
  Sense strand starting at position 202 of SEQ ID NO: 1879550
gugagugguguggacacua

SEQ ID NO: 1915527 - RNA, 19 nt, Artificial Sequence
  Description of Artificial Sequence: Synthetic oligonucleotide
  Antisense strand to SEQ ID NO: 1915526
uaguguccacaccacucac

SEQ ID NO: 1915528 - RNA, 19 nt, Artificial Sequence
  Description of Artificial Sequence: Synthetic oligonucleotide
  Sense strand starting at position 249 of SEQ ID NO: 1879550
caucacuucuggcuggauu

SEQ ID NO: 1915529 - RNA, 19 nt, Artificial Sequence
  Description of Artificial Sequence: Synthetic oligonucleotide
  Antisense strand to SEQ ID NO: 1915528
aauccagccagaagugaug

SEQ ID NO: 1915530 - RNA, 19 nt, Artificial Sequence
  Description of Artificial Sequence: Synthetic oligonucleotide
  Sense strand starting at position 666 of SEQ ID NO: 1879550
cuaaguguugaggaugcau

SEQ ID NO: 1915531 - RNA, 19 nt, Artificial Sequence
  Description of Artificial Sequence: Synthetic oligonucleotide
  Antisense strand to SEQ ID NO: 1915530
augcauccucaacacuuag

SEQ ID NO: 1915532 - RNA, 19 nt, Artificial Sequence
  Description of Artificial Sequence: Synthetic oligonucleotide
  Sense strand starting at position 668 of SEQ ID NO: 1879550
aaguguugaggaugcauaa

SEQ ID NO: 1915533 - RNA, 19 nt, Artificial Sequence
  Description of Artificial Sequence: Synthetic oligonucleotide
  Antisense strand to SEQ ID NO: 1915532
uuaugcauccucaacacuu

SEQ ID NO: 1915534 - RNA, 19 nt, Artificial Sequence
  Description of Artificial Sequence: Synthetic oligonucleotide
  Sense strand starting at position 708 of SEQ ID NO: 1879550
guggaaugaugugccugaa

SEQ ID NO: 1915535 - RNA, 19 nt, Artificial Sequence
  Description of Artificial Sequence: Synthetic oligonucleotide
  Antisense strand to SEQ ID NO: 1915534
uucaggcacaucauuccac

SEQ ID NO: 1915536 - RNA, 19 nt, Artificial Sequence
  Description of Artificial Sequence: Synthetic oligonucleotide
  Sense strand starting at position 711 of SEQ ID NO: 1879550
gaaugaugugccugaacua

SEQ ID NO: 1915537 - RNA, 19 nt, Artificial Sequence
  Description of Artificial Sequence: Synthetic oligonucleotide
  Antisense strand to SEQ ID NO: 1915536
uaguucaggcacaucauuc

SEQ ID NO: 1915538 - RNA, 19 nt, Artificial Sequence
  Description of Artificial Sequence: Synthetic oligonucleotide
  Sense strand starting at position 744 of SEQ ID NO: 1879550
gggcacauguaggaauuua

SEQ ID NO: 1915539 - RNA, 19 nt, Artificial Sequence
  Description of Artificial Sequence: Synthetic oligonucleotide
  Antisense strand to SEQ ID NO: 1915538
uaaauuccuacaugugccc

SEQ ID NO: 1915540 - RNA, 19 nt, Artificial Sequence
  Description of Artificial Sequence: Synthetic oligonucleotide
  Sense strand starting at position 806 of SEQ ID NO: 1879550
ggacucuauucugcaggua

SEQ ID NO: 1915541 - RNA, 19 nt, Artificial Sequence
  Description of Artificial Sequence: Synthetic oligonucleotide
  Antisense strand to SEQ ID NO: 1915540
uaccugcagaauagagucc

SEQ ID NO: 1915542 - RNA, 19 nt, Artificial Sequence
  Description of Artificial Sequence: Synthetic oligonucleotide
  Sense strand starting at position 807 of SEQ ID NO: 1879550
gacucuauucugcagguau

SEQ ID NO: 1915543 - RNA, 19 nt, Artificial Sequence
  Description of Artificial Sequence: Synthetic oligonucleotide
  Antisense strand to SEQ ID NO: 1915542
auaccugcagaauagaguc

SEQ ID NO: 1915544 - RNA, 19 nt, Artificial Sequence
  Description of Artificial Sequence: Synthetic oligonucleotide
  Sense strand starting at position 825 of SEQ ID NO: 1879550
uugggugguuccucaaaca

SEQ ID NO: 1915545 - RNA, 19 nt, Artificial Sequence
  Description of Artificial Sequence: Synthetic oligonucleotide
  Antisense strand to SEQ ID NO: 1915544
uguuugaggaaccacccaa

SEQ ID NO: 1915546 - RNA, 19 nt, Artificial Sequence
  Description of Artificial Sequence: Synthetic oligonucleotide
  Sense strand starting at position 889 of SEQ ID NO: 1879550
guuugaaagccgugaacua

SEQ ID NO: 1915547 - RNA, 19 nt, Artificial Sequence
  Description of Artificial Sequence: Synthetic oligonucleotide
  Antisense strand to SEQ ID NO: 1915546
uaguucacggcuuucaaac

SEQ ID NO: 1915548 - RNA, 19 nt, Artificial Sequence
  Description of Artificial Sequence: Synthetic oligonucleotide
  Sense strand starting at position 919 of SEQ ID NO: 1879550
cuuuguacacauugggaga

SEQ ID NO: 1915549 - RNA, 19 nt, Artificial Sequence
  Description of Artificial Sequence: Synthetic oligonucleotide
  Antisense strand to SEQ ID NO: 1915548
ucucccaauguguacaaag

SEQ ID NO: 1915550 - RNA, 19 nt, Artificial Sequence
  Description of Artificial Sequence: Synthetic oligonucleotide
  Sense strand starting at position 920 of SEQ ID NO: 1879550
uuuguacacauugggagaa

SEQ ID NO: 1915551 - RNA, 19 nt, Artificial Sequence
  Description of Artificial Sequence: Synthetic oligonucleotide
  Antisense strand to SEQ ID NO: 1915550
uucucccaauguguacaaa

SEQ ID NO: 1915552 - RNA, 19 nt, Artificial Sequence
  Description of Artificial Sequence: Synthetic oligonucleotide
  Sense strand starting at position 935 of SEQ ID NO: 1879550
agaaacgccaauugugaaa

SEQ ID NO: 1915553 - RNA, 19 nt, Artificial Sequence
  Description of Artificial Sequence: Synthetic oligonucleotide
  Antisense strand to SEQ ID NO: 1915552
uuucacaauuggcguuucu

SEQ ID NO: 1915554 - RNA, 19 nt, Artificial Sequence
  Description of Artificial Sequence: Synthetic oligonucleotide
  Sense strand starting at position 966 of SEQ ID NO: 1879550
ugaucuggagcuugacuau

SEQ ID NO: 1915555 - RNA, 19 nt, Artificial Sequence
  Description of Artificial Sequence: Synthetic oligonucleotide
  Antisense strand to SEQ ID NO: 1915554
auagucaagcuccagauca

SEQ ID NO: 1915556 - RNA, 19 nt, Artificial Sequence
  Description of Artificial Sequence: Synthetic oligonucleotide
  Sense strand starting at position 972 of SEQ ID NO: 1879550
ggagcuugacuaugugaga

SEQ ID NO: 1915557 - RNA, 19 nt, Artificial Sequence
  Description of Artificial Sequence: Synthetic oligonucleotide
  Antisense strand to SEQ ID NO: 1915556
ucucacauagucaagcucc

SEQ ID NO: 1915558 - RNA, 19 nt, Artificial Sequence
  Description of Artificial Sequence: Synthetic oligonucleotide
  Sense strand starting at position 973 of SEQ ID NO: 1879550
gagcuugacuaugugagaa

SEQ ID NO: 1915559 - RNA, 19 nt, Artificial Sequence
  Description of Artificial Sequence: Synthetic oligonucleotide
  Antisense strand to SEQ ID NO: 1915558
uucucacauagucaagcuc

SEQ ID NO: 1915560 - RNA, 19 nt, Artificial Sequence
  Description of Artificial Sequence: Synthetic oligonucleotide
  Sense strand starting at position 1132 of SEQ ID NO: 1879550
cugccaaauuuggaaucuu

SEQ ID NO: 1915561 - RNA, 19 nt, Artificial Sequence
  Description of Artificial Sequence: Synthetic oligonucleotide
  Antisense strand to SEQ ID NO: 1915560
aagauuccaaauuuggcag

SEQ ID NO: 1915562 - RNA, 19 nt, Artificial Sequence
  Description of Artificial Sequence: Synthetic oligonucleotide
  Sense strand starting at position 1141 of SEQ ID NO: 1879550
uuggaaucuucuguacaua

SEQ ID NO: 1915563 - RNA, 19 nt, Artificial Sequence
  Description of Artificial Sequence: Synthetic oligonucleotide
  Antisense strand to SEQ ID NO: 1915562
uauguacagaagauuccaa

SEQ ID NO: 1915564 - RNA, 19 nt, Artificial Sequence
  Description of Artificial Sequence: Synthetic oligonucleotide
  Sense strand starting at position 1167 of SEQ ID NO: 1879550
gguggcuucguuuaaauau

SEQ ID NO: 1915565 - RNA, 19 nt, Artificial Sequence
  Description of Artificial Sequence: Synthetic oligonucleotide
  Antisense strand to SEQ ID NO: 1915564
auauuuaaacgaagccacc

SEQ ID NO: 1915566 - RNA, 19 nt, Artificial Sequence
  Description of Artificial Sequence: Synthetic oligonucleotide
  Sense strand starting at position 1344 of SEQ ID NO: 1879550
caguccucguccuuaagaa

SEQ ID NO: 1915567 - RNA, 19 nt, Artificial Sequence
  Description of Artificial Sequence: Synthetic oligonucleotide
  Antisense strand to SEQ ID NO: 1915566
uucuuaaggacgaggacug

SEQ ID NO: 1915568 - RNA, 19 nt, Artificial Sequence
  Description of Artificial Sequence: Synthetic oligonucleotide
  Sense strand starting at position 1345 of SEQ ID NO: 1879550
aguccucguccuuaagaaa

SEQ ID NO: 1915569 - RNA, 19 nt, Artificial Sequence
  Description of Artificial Sequence: Synthetic oligonucleotide
  Antisense strand to SEQ ID NO: 1915568
uuucuuaaggacgaggacu

SEQ ID NO: 1915570 - RNA, 19 nt, Artificial Sequence
  Description of Artificial Sequence: Synthetic oligonucleotide
  Sense strand starting at position 1391 of SEQ ID NO: 1879550
aagagauuccgguaagagu

SEQ ID NO: 1915571 - RNA, 19 nt, Artificial Sequence
  Description of Artificial Sequence: Synthetic oligonucleotide
  Antisense strand to SEQ ID NO: 1915570
acucuuaccggaaucucuu

SEQ ID NO: 1915572 - RNA, 19 nt, Artificial Sequence
  Description of Artificial Sequence: Synthetic oligonucleotide
  Sense strand starting at position 1468 of SEQ ID NO: 1879550
ggaguaguugagggccuuu

SEQ ID NO: 1915573 - RNA, 19 nt, Artificial Sequence
  Description of Artificial Sequence: Synthetic oligonucleotide
  Antisense strand to SEQ ID NO: 1915572
aaaggcccucaacuacucc

SEQ ID NO: 1915574 - RNA, 19 nt, Artificial Sequence
  Description of Artificial Sequence: Synthetic oligonucleotide
  Sense strand starting at position 1608 of SEQ ID NO: 1879550
gagaguagcucucuggagu

SEQ ID NO: 1915575 - RNA, 19 nt, Artificial Sequence
  Description of Artificial Sequence: Synthetic oligonucleotide
  Antisense strand to SEQ ID NO: 1915574
acuccagagagcuacucuc

SEQ ID NO: 1915576 - RNA, 19 nt, Artificial Sequence
  Description of Artificial Sequence: Synthetic oligonucleotide
  Sense strand starting at position 1609 of SEQ ID NO: 1879550
agaguagcucucuggaguu

SEQ ID NO: 1915577 - RNA, 19 nt, Artificial Sequence
  Description of Artificial Sequence: Synthetic oligonucleotide
  Antisense strand to SEQ ID NO: 1915576
aacuccagagagcuacucu

SEQ ID NO: 1915578 - RNA, 19 nt, Artificial Sequence
  Description of Artificial Sequence: Synthetic oligonucleotide
  Sense strand starting at position 2073 of SEQ ID NO: 1879550
agcgauuugccgcauuugu

SEQ ID NO: 1915579 - RNA, 19 nt, Artificial Sequence
  Description of Artificial Sequence: Synthetic oligonucleotide
  Antisense strand to SEQ ID NO: 1915578
acaaaugcggcaaaucgcu

SEQ ID NO: 1915580 - RNA, 19 nt, Artificial Sequence
  Description of Artificial Sequence: Synthetic oligonucleotide
  Sense strand starting at position 2114 of SEQ ID NO: 1879550
cgccgucuucacuuacgau

SEQ ID NO: 1915581 - RNA, 19 nt, Artificial Sequence
  Description of Artificial Sequence: Synthetic oligonucleotide
  Antisense strand to SEQ ID NO: 1915580
aucguaagugaagacggcg

SEQ ID NO: 1915582 - RNA, 19 nt, Artificial Sequence
  Description of Artificial Sequence: Synthetic oligonucleotide
  Sense strand starting at position 3556 of SEQ ID NO: 1879550
cuaucuugcgucccgugaa

SEQ ID NO: 1915583 - RNA, 19 nt, Artificial Sequence
  Description of Artificial Sequence: Synthetic oligonucleotide
  Antisense strand to SEQ ID NO: 1915582
uucacgggacgcaagauag

SEQ ID NO: 1915584 - RNA, 19 nt, Artificial Sequence
  Description of Artificial Sequence: Synthetic oligonucleotide
  Sense strand starting at position 3561 of SEQ ID NO: 1879550
uugcgucccgugaaguaga

SEQ ID NO: 1915585 - RNA, 19 nt, Artificial Sequence
  Description of Artificial Sequence: Synthetic oligonucleotide
  Antisense strand to SEQ ID NO: 1915584
ucuacuucacgggacgcaa

SEQ ID NO: 1915586 - RNA, 19 nt, Artificial Sequence
  Description of Artificial Sequence: Synthetic oligonucleotide
  Sense strand starting at position 3713 of SEQ ID NO: 1879550
guuauaaagccgucugcac

SEQ ID NO: 1915587 - RNA, 19 nt, Artificial Sequence
  Description of Artificial Sequence: Synthetic oligonucleotide
  Antisense strand to SEQ ID NO: 1915586
gugcagacggcuuuauaac

SEQ ID NO: 1915588 - RNA, 19 nt, Artificial Sequence
  Description of Artificial Sequence: Synthetic oligonucleotide
  Sense strand starting at position 3798 of SEQ ID NO: 1879550
gcaaacaacgguuaagagu

SEQ ID NO: 1915589 - RNA, 19 nt, Artificial Sequence
  Description of Artificial Sequence: Synthetic oligonucleotide
  Antisense strand to SEQ ID NO: 1915588
acucuuaaccguuguuugc

SEQ ID NO: 1915590 - RNA, 19 nt, Artificial Sequence
  Description of Artificial Sequence: Synthetic oligonucleotide
  Sense strand starting at position 3882 of SEQ ID NO: 1879550
acaggaucguuagcuuuaa

SEQ ID NO: 1915591 - RNA, 19 nt, Artificial Sequence
  Description of Artificial Sequence: Synthetic oligonucleotide
  Antisense strand to SEQ ID NO: 1915590
uuaaagcuaacgauccugu

SEQ ID NO: 1915592 - RNA, 19 nt, Artificial Sequence
  Description of Artificial Sequence: Synthetic oligonucleotide
  Sense strand starting at position 3883 of SEQ ID NO: 1879550
caggaucguuagcuuuaaa

SEQ ID NO: 1915593 - RNA, 19 nt, Artificial Sequence
  Description of Artificial Sequence: Synthetic oligonucleotide
  Antisense strand to SEQ ID NO: 1915592
uuuaaagcuaacgauccug

SEQ ID NO: 1915594 - RNA, 19 nt, Artificial Sequence
  Description of Artificial Sequence: Synthetic oligonucleotide
  Sense strand starting at position 3886 of SEQ ID NO: 1879550
gaucguuagcuuuaaaugg

SEQ ID NO: 1915595 - RNA, 19 nt, Artificial Sequence
  Description of Artificial Sequence: Synthetic oligonucleotide
  Antisense strand to SEQ ID NO: 1915594
ccauuuaaagcuaacgauc

SEQ ID NO: 1915596 - RNA, 19 nt, Artificial Sequence
  Description of Artificial Sequence: Synthetic oligonucleotide
  Sense strand starting at position 3908 of SEQ ID NO: 1879550
ccuuuagcucaaggaauag

SEQ ID NO: 1915597 - RNA, 19 nt, Artificial Sequence
  Description of Artificial Sequence: Synthetic oligonucleotide
  Antisense strand to SEQ ID NO: 1915596
cuauuccuugagcuaaagg

SEQ ID NO: 1915598 - RNA, 19 nt, Artificial Sequence
  Description of Artificial Sequence: Synthetic oligonucleotide
  Sense strand starting at position 3950 of SEQ ID NO: 1879550
gccgauacacauggucuau

SEQ ID NO: 1915599 - RNA, 19 nt, Artificial Sequence
  Description of Artificial Sequence: Synthetic oligonucleotide
  Antisense strand to SEQ ID NO: 1915598
auagaccauguguaucggc

SEQ ID NO: 1915600 - RNA, 19 nt, Artificial Sequence
  Description of Artificial Sequence: Synthetic oligonucleotide
  Sense strand starting at position 3959 of SEQ ID NO: 1879550
cauggucuauuuggaaaua

SEQ ID NO: 1915601 - RNA, 19 nt, Artificial Sequence
  Description of Artificial Sequence: Synthetic oligonucleotide
  Antisense strand to SEQ ID NO: 1915600
uauuuccaaauagaccaug

SEQ ID NO: 1915602 - RNA, 19 nt, Artificial Sequence
  Description of Artificial Sequence: Synthetic oligonucleotide
  Sense strand starting at position 212 of SEQ ID NO: 1879551
uuguuugaaccuuguauuu

SEQ ID NO: 1915603 - RNA, 19 nt, Artificial Sequence
  Description of Artificial Sequence: Synthetic oligonucleotide
  Antisense strand to SEQ ID NO: 1915602
aaauacaagguucaaacaa

SEQ ID NO: 1915604 - RNA, 19 nt, Artificial Sequence
  Description of Artificial Sequence: Synthetic oligonucleotide
  Sense strand starting at position 727 of SEQ ID NO: 1879551
auacuuagugcuuaagaag

SEQ ID NO: 1915605 - RNA, 19 nt, Artificial Sequence
  Description of Artificial Sequence: Synthetic oligonucleotide
  Antisense strand to SEQ ID NO: 1915604
cuucuuaagcacuaaguau

SEQ ID NO: 1915606 - RNA, 19 nt, Artificial Sequence
  Description of Artificial Sequence: Synthetic oligonucleotide
  Sense strand starting at position 762 of SEQ ID NO: 1879551
aauucuuguugagugaauu

SEQ ID NO: 1915607 - RNA, 19 nt, Artificial Sequence
  Description of Artificial Sequence: Synthetic oligonucleotide
  Antisense strand to SEQ ID NO: 1915606
aauucacucaacaagaauu

SEQ ID NO: 1915608 - RNA, 19 nt, Artificial Sequence
  Description of Artificial Sequence: Synthetic oligonucleotide
  Sense strand starting at position 803 of SEQ ID NO: 1879551
ggugaauuauaaucagcag

SEQ ID NO: 1915609 - RNA, 19 nt, Artificial Sequence
  Description of Artificial Sequence: Synthetic oligonucleotide
  Antisense strand to SEQ ID NO: 1915608
cugcugauuauaauucacc

SEQ ID NO: 1915610 - RNA, 19 nt, Artificial Sequence
  Description of Artificial Sequence: Synthetic oligonucleotide
  Sense strand starting at position 1080 of SEQ ID NO: 1879551
cugguaacgauacaugauu

SEQ ID NO: 1915611 - RNA, 19 nt, Artificial Sequence
  Description of Artificial Sequence: Synthetic oligonucleotide
  Antisense strand to SEQ ID NO: 1915610
aaucauguaucguuaccag

SEQ ID NO: 1915612 - RNA, 19 nt, Artificial Sequence
  Description of Artificial Sequence: Synthetic oligonucleotide
  Sense strand starting at position 1085 of SEQ ID NO: 1879551
aacgauacaugauuccgau

SEQ ID NO: 1915613 - RNA, 19 nt, Artificial Sequence
  Description of Artificial Sequence: Synthetic oligonucleotide
  Antisense strand to SEQ ID NO: 1915612
aucggaaucauguaucguu

SEQ ID NO: 1915614 - RNA, 19 nt, Artificial Sequence
  Description of Artificial Sequence: Synthetic oligonucleotide
  Sense strand starting at position 1109 of SEQ ID NO: 1879551
uguguuagaugugcaauuu

SEQ ID NO: 1915615 - RNA, 19 nt, Artificial Sequence
  Description of Artificial Sequence: Synthetic oligonucleotide
  Antisense strand to SEQ ID NO: 1915614
aaauugcacaucuaacaca

SEQ ID NO: 1915616 - RNA, 19 nt, Artificial Sequence
  Description of Artificial Sequence: Synthetic oligonucleotide
  Sense strand starting at position 1110 of SEQ ID NO: 1879551
guguuagaugugcaauuuc

SEQ ID NO: 1915617 - RNA, 19 nt, Artificial Sequence
  Description of Artificial Sequence: Synthetic oligonucleotide
  Antisense strand to SEQ ID NO: 1915616
gaaauugcacaucuaacac

SEQ ID NO: 1915618 - RNA, 19 nt, Artificial Sequence
  Description of Artificial Sequence: Synthetic oligonucleotide
  Sense strand starting at position 1183 of SEQ ID NO: 1879551
uugccaugagauggaguaa

SEQ ID NO: 1915619 - RNA, 19 nt, Artificial Sequence
  Description of Artificial Sequence: Synthetic oligonucleotide
  Antisense strand to SEQ ID NO: 1915618
uuacuccaucucauggcaa

SEQ ID NO: 1915620 - RNA, 19 nt, Artificial Sequence
  Description of Artificial Sequence: Synthetic oligonucleotide
  Sense strand starting at position 1215 of SEQ ID NO: 1879551
ggaaauaaaugcucuauug

SEQ ID NO: 1915621 - RNA, 19 nt, Artificial Sequence
  Description of Artificial Sequence: Synthetic oligonucleotide
  Antisense strand to SEQ ID NO: 1915620
caauagagcauuuauuucc

SEQ ID NO: 1915622 - RNA, 19 nt, Artificial Sequence
  Description of Artificial Sequence: Synthetic oligonucleotide
  Sense strand starting at position 1306 of SEQ ID NO: 1879551
ugcugugagagcuagacua

SEQ ID NO: 1915623 - RNA, 19 nt, Artificial Sequence
  Description of Artificial Sequence: Synthetic oligonucleotide
  Antisense strand to SEQ ID NO: 1915622
uagucuagcucucacagca

SEQ ID NO: 1915624 - RNA, 19 nt, Artificial Sequence
  Description of Artificial Sequence: Synthetic oligonucleotide
  Sense strand starting at position 1558 of SEQ ID NO: 1879551
cugacuuugagucauguga

SEQ ID NO: 1915625 - RNA, 19 nt, Artificial Sequence
  Description of Artificial Sequence: Synthetic oligonucleotide
  Antisense strand to SEQ ID NO: 1915624
ucacaugacucaaagucag

SEQ ID NO: 1915626 - RNA, 19 nt, Artificial Sequence
  Description of Artificial Sequence: Synthetic oligonucleotide
  Sense strand starting at position 1562 of SEQ ID NO: 1879551
cuuugagucaugugauaga

SEQ ID NO: 1915627 - RNA, 19 nt, Artificial Sequence
  Description of Artificial Sequence: Synthetic oligonucleotide
  Antisense strand to SEQ ID NO: 1915626
ucuaucacaugacucaaag

SEQ ID NO: 1915628 - RNA, 19 nt, Artificial Sequence
  Description of Artificial Sequence: Synthetic oligonucleotide
  Sense strand starting at position 1657 of SEQ ID NO: 1879551
auucuacaucacugugaug

SEQ ID NO: 1915629 - RNA, 19 nt, Artificial Sequence
  Description of Artificial Sequence: Synthetic oligonucleotide
  Antisense strand to SEQ ID NO: 1915628
caucacagugauguagaau

SEQ ID NO: 1915630 - RNA, 19 nt, Artificial Sequence
  Description of Artificial Sequence: Synthetic oligonucleotide
  Sense strand starting at position 1898 of SEQ ID NO: 1879551
agcauucuccuggauucuu

SEQ ID NO: 1915631 - RNA, 19 nt, Artificial Sequence
  Description of Artificial Sequence: Synthetic oligonucleotide
  Antisense strand to SEQ ID NO: 1915630
aagaauccaggagaaugcu

SEQ ID NO: 1915632 - RNA, 19 nt, Artificial Sequence
  Description of Artificial Sequence: Synthetic oligonucleotide
  Sense strand starting at position 2090 of SEQ ID NO: 1879551
uucuuugagcaguauauac

SEQ ID NO: 1915633 - RNA, 19 nt, Artificial Sequence
  Description of Artificial Sequence: Synthetic oligonucleotide
  Antisense strand to SEQ ID NO: 1915632
guauauacugcucaaagaa

SEQ ID NO: 1915634 - RNA, 19 nt, Artificial Sequence
  Description of Artificial Sequence: Synthetic oligonucleotide
  Sense strand starting at position 2092 of SEQ ID NO: 1879551
cuuugagcaguauauacua

SEQ ID NO: 1915635 - RNA, 19 nt, Artificial Sequence
  Description of Artificial Sequence: Synthetic oligonucleotide
  Antisense strand to SEQ ID NO: 1915634
uaguauauacugcucaaag

SEQ ID NO: 1915636 - RNA, 19 nt, Artificial Sequence
  Description of Artificial Sequence: Synthetic oligonucleotide
  Sense strand starting at position 2447 of SEQ ID NO: 1879551
ucugguguugaucaugaua

SEQ ID NO: 1915637 - RNA, 19 nt, Artificial Sequence
  Description of Artificial Sequence: Synthetic oligonucleotide
  Antisense strand to SEQ ID NO: 1915636
uaucaugaucaacaccaga

SEQ ID NO: 1915638 - RNA, 19 nt, Artificial Sequence
  Description of Artificial Sequence: Synthetic oligonucleotide
  Sense strand starting at position 2450 of SEQ ID NO: 1879551
gguguugaucaugauacag

SEQ ID NO: 1915639 - RNA, 19 nt, Artificial Sequence
  Description of Artificial Sequence: Synthetic oligonucleotide
  Antisense strand to SEQ ID NO: 1915638
cuguaucaugaucaacacc

SEQ ID NO: 1915640 - RNA, 19 nt, Artificial Sequence
  Description of Artificial Sequence: Synthetic oligonucleotide
  Sense strand starting at position 2474 of SEQ ID NO: 1879551
ucucauuuauguguuuguu

SEQ ID NO: 1915641 - RNA, 19 nt, Artificial Sequence
  Description of Artificial Sequence: Synthetic oligonucleotide
  Antisense strand to SEQ ID NO: 1915640
aacaaacacauaaaugaga

SEQ ID NO: 1915642 - RNA, 19 nt, Artificial Sequence
  Description of Artificial Sequence: Synthetic oligonucleotide
  Sense strand starting at position 2787 of SEQ ID NO: 1879551
uuaagaacuuuagcagaua

SEQ ID NO: 1915643 - RNA, 19 nt, Artificial Sequence
  Description of Artificial Sequence: Synthetic oligonucleotide
  Antisense strand to SEQ ID NO: 1915642
uaucugcuaaaguucuuaa

SEQ ID NO: 1915644 - RNA, 19 nt, Artificial Sequence
  Description of Artificial Sequence: Synthetic oligonucleotide
  Sense strand starting at position 2819 of SEQ ID NO: 1879551
cgugaugucauagaaauau

SEQ ID NO: 1915645 - RNA, 19 nt, Artificial Sequence
  Description of Artificial Sequence: Synthetic oligonucleotide
  Antisense strand to SEQ ID NO: 1915644
auauuucuaugacaucacg

SEQ ID NO: 1915646 - RNA, 19 nt, Artificial Sequence
  Description of Artificial Sequence: Synthetic oligonucleotide
  Sense strand starting at position 2876 of SEQ ID NO: 1879551
augagcauccauggcauaa

SEQ ID NO: 1915647 - RNA, 19 nt, Artificial Sequence
  Description of Artificial Sequence: Synthetic oligonucleotide
  Antisense strand to SEQ ID NO: 1915646
uuaugccauggaugcucau

SEQ ID NO: 1915648 - RNA, 19 nt, Artificial Sequence
  Description of Artificial Sequence: Synthetic oligonucleotide
  Sense strand starting at position 2888 of SEQ ID NO: 1879551
ggcauaaucucauuaauga

SEQ ID NO: 1915649 - RNA, 19 nt, Artificial Sequence
  Description of Artificial Sequence: Synthetic oligonucleotide
  Antisense strand to SEQ ID NO: 1915648
ucauuaaugagauuaugcc

SEQ ID NO: 1915650 - RNA, 19 nt, Artificial Sequence
  Description of Artificial Sequence: Synthetic oligonucleotide
  Sense strand starting at position 2970 of SEQ ID NO: 1879551
aguaguuaacucugauaaa

SEQ ID NO: 1915651 - RNA, 19 nt, Artificial Sequence
  Description of Artificial Sequence: Synthetic oligonucleotide
  Antisense strand to SEQ ID NO: 1915650
uuuaucagaguuaacuacu

SEQ ID NO: 1915652 - RNA, 19 nt, Artificial Sequence
  Description of Artificial Sequence: Synthetic oligonucleotide
  Sense strand starting at position 3088 of SEQ ID NO: 1879551
uuauaucugcuuuaggaga

SEQ ID NO: 1915653 - RNA, 19 nt, Artificial Sequence
  Description of Artificial Sequence: Synthetic oligonucleotide
  Antisense strand to SEQ ID NO: 1915652
ucuccuaaagcagauauaa

SEQ ID NO: 1915654 - RNA, 19 nt, Artificial Sequence
  Description of Artificial Sequence: Synthetic oligonucleotide
  Sense strand starting at position 3183 of SEQ ID NO: 1879551
cugugaugagaaugauauu

SEQ ID NO: 1915655 - RNA, 19 nt, Artificial Sequence
  Description of Artificial Sequence: Synthetic oligonucleotide
  Antisense strand to SEQ ID NO: 1915654
aauaucauucucaucacag

SEQ ID NO: 1915656 - RNA, 19 nt, Artificial Sequence
  Description of Artificial Sequence: Synthetic oligonucleotide
  Sense strand starting at position 3271 of SEQ ID NO: 1879551
gggagauacuaaguugucu

SEQ ID NO: 1915657 - RNA, 19 nt, Artificial Sequence
  Description of Artificial Sequence: Synthetic oligonucleotide
  Antisense strand to SEQ ID NO: 1915656
agacaacuuaguaucuccc

SEQ ID NO: 1915658 - RNA, 19 nt, Artificial Sequence
  Description of Artificial Sequence: Synthetic oligonucleotide
  Sense strand starting at position 3326 of SEQ ID NO: 1879551
guuaauguagcucagacau

SEQ ID NO: 1915659 - RNA, 19 nt, Artificial Sequence
  Description of Artificial Sequence: Synthetic oligonucleotide
  Antisense strand to SEQ ID NO: 1915658
augucugagcuacauuaac

SEQ ID NO: 1915660 - RNA, 19 nt, Artificial Sequence
  Description of Artificial Sequence: Synthetic oligonucleotide
  Sense strand starting at position 3442 of SEQ ID NO: 1879551
auuagacaacuuugucaug

SEQ ID NO: 1915661 - RNA, 19 nt, Artificial Sequence
  Description of Artificial Sequence: Synthetic oligonucleotide
  Antisense strand to SEQ ID NO: 1915660
caugacaaaguugucuaau

SEQ ID NO: 1915662 - RNA, 19 nt, Artificial Sequence
  Description of Artificial Sequence: Synthetic oligonucleotide
  Sense strand starting at position 3443 of SEQ ID NO: 1879551
uuagacaacuuugucauga

SEQ ID NO: 1915663 - RNA, 19 nt, Artificial Sequence
  Description of Artificial Sequence: Synthetic oligonucleotide
  Antisense strand to SEQ ID NO: 1915662
ucaugacaaaguugucuaa

SEQ ID NO: 1915664 - RNA, 19 nt, Artificial Sequence
  Description of Artificial Sequence: Synthetic oligonucleotide
  Sense strand starting at position 3459 of SEQ ID NO: 1879551
ugaaguauccuagagugug

SEQ ID NO: 1915665 - RNA, 19 nt, Artificial Sequence
  Description of Artificial Sequence: Synthetic oligonucleotide
  Antisense strand to SEQ ID NO: 1915664
cacacucuaggauacuuca

SEQ ID NO: 1915666 - RNA, 19 nt, Artificial Sequence
  Description of Artificial Sequence: Synthetic oligonucleotide
  Sense strand starting at position 3634 of SEQ ID NO: 1879551
acaauugugaggugacauu

SEQ ID NO: 1915667 - RNA, 19 nt, Artificial Sequence
  Description of Artificial Sequence: Synthetic oligonucleotide
  Antisense strand to SEQ ID NO: 1915666
aaugucaccucacaauugu

SEQ ID NO: 1915668 - RNA, 19 nt, Artificial Sequence
  Description of Artificial Sequence: Synthetic oligonucleotide
  Sense strand starting at position 3685 of SEQ ID NO: 1879551
cugauaugcacguauacag

SEQ ID NO: 1915669 - RNA, 19 nt, Artificial Sequence
  Description of Artificial Sequence: Synthetic oligonucleotide
  Antisense strand to SEQ ID NO: 1915668
cuguauacgugcauaucag

SEQ ID NO: 1915670 - RNA, 19 nt, Artificial Sequence
  Description of Artificial Sequence: Synthetic oligonucleotide
  Sense strand starting at position 3717 of SEQ ID NO: 1879551
auuaguugccaagaucuaa

SEQ ID NO: 1915671 - RNA, 19 nt, Artificial Sequence
  Description of Artificial Sequence: Synthetic oligonucleotide
  Antisense strand to SEQ ID NO: 1915670
uuagaucuuggcaacuaau

SEQ ID NO: 1915672 - RNA, 19 nt, Artificial Sequence
  Description of Artificial Sequence: Synthetic oligonucleotide
  Sense strand starting at position 3760 of SEQ ID NO: 1879551
uggucuuccucaccacaga

SEQ ID NO: 1915673 - RNA, 19 nt, Artificial Sequence
  Description of Artificial Sequence: Synthetic oligonucleotide
  Antisense strand to SEQ ID NO: 1915672
ucuguggugaggaagacca

SEQ ID NO: 1915674 - RNA, 19 nt, Artificial Sequence
  Description of Artificial Sequence: Synthetic oligonucleotide
  Sense strand starting at position 3761 of SEQ ID NO: 1879551
ggucuuccucaccacagau

SEQ ID NO: 1915675 - RNA, 19 nt, Artificial Sequence
  Description of Artificial Sequence: Synthetic oligonucleotide
  Antisense strand to SEQ ID NO: 1915674
aucuguggugaggaagacc

SEQ ID NO: 1915676 - RNA, 19 nt, Artificial Sequence
  Description of Artificial Sequence: Synthetic oligonucleotide
  Sense strand starting at position 3831 of SEQ ID NO: 1879551
auguguuuacacugagaac

SEQ ID NO: 1915677 - RNA, 19 nt, Artificial Sequence
  Description of Artificial Sequence: Synthetic oligonucleotide
  Antisense strand to SEQ ID NO: 1915676
guucucaguguaaacacau

SEQ ID NO: 1915678 - RNA, 19 nt, Artificial Sequence
  Description of Artificial Sequence: Synthetic oligonucleotide
  Sense strand starting at position 3862 of SEQ ID NO: 1879551
aaaguuuagcaguagguua

SEQ ID NO: 1915679 - RNA, 19 nt, Artificial Sequence
  Description of Artificial Sequence: Synthetic oligonucleotide
  Antisense strand to SEQ ID NO: 1915678
uaaccuacugcuaaacuuu

SEQ ID NO: 1915680 - RNA, 19 nt, Artificial Sequence
  Description of Artificial Sequence: Synthetic oligonucleotide
  Sense strand starting at position 3867 of SEQ ID NO: 1879551
uuagcaguagguuaucuaa

SEQ ID NO: 1915681 - RNA, 19 nt, Artificial Sequence
  Description of Artificial Sequence: Synthetic oligonucleotide
  Antisense strand to SEQ ID NO: 1915680
uuagauaaccuacugcuaa

SEQ ID NO: 1915682 - RNA, 19 nt, Artificial Sequence
  Description of Artificial Sequence: Synthetic oligonucleotide
  Sense strand starting at position 202 of SEQ ID NO: 1879552
gccagaauucucugucuua

SEQ ID NO: 1915683 - RNA, 19 nt, Artificial Sequence
  Description of Artificial Sequence: Synthetic oligonucleotide
  Antisense strand to SEQ ID NO: 1915682
uaagacagagaauucuggc

SEQ ID NO: 1915684 - RNA, 19 nt, Artificial Sequence
  Description of Artificial Sequence: Synthetic oligonucleotide
  Sense strand starting at position 271 of SEQ ID NO: 1879552
gguugagugccugauacuc

SEQ ID NO: 1915685 - RNA, 19 nt, Artificial Sequence
  Description of Artificial Sequence: Synthetic oligonucleotide
  Antisense strand to SEQ ID NO: 1915684
gaguaucaggcacucaacc

SEQ ID NO: 1915686 - RNA, 19 nt, Artificial Sequence
  Description of Artificial Sequence: Synthetic oligonucleotide
  Sense strand starting at position 276 of SEQ ID NO: 1879552
agugccugauacucuuauu

SEQ ID NO: 1915687 - RNA, 19 nt, Artificial Sequence
  Description of Artificial Sequence: Synthetic oligonucleotide
  Antisense strand to SEQ ID NO: 1915686
aauaagaguaucaggcacu

SEQ ID NO: 1915688 - RNA, 19 nt, Artificial Sequence
  Description of Artificial Sequence: Synthetic oligonucleotide
  Sense strand starting at position 614 of SEQ ID NO: 1879552
uuucucauuuaguacgaua

SEQ ID NO: 1915689 - RNA, 19 nt, Artificial Sequence
  Description of Artificial Sequence: Synthetic oligonucleotide
  Antisense strand to SEQ ID NO: 1915688
uaucguacuaaaugagaaa

SEQ ID NO: 1915690 - RNA, 19 nt, Artificial Sequence
  Description of Artificial Sequence: Synthetic oligonucleotide
  Sense strand starting at position 617 of SEQ ID NO: 1879552
cucauuuaguacgauacca

SEQ ID NO: 1915691 - RNA, 19 nt, Artificial Sequence
  Description of Artificial Sequence: Synthetic oligonucleotide
  Antisense strand to SEQ ID NO: 1915690
ugguaucguacuaaaugag

SEQ ID NO: 1915692 - RNA, 19 nt, Artificial Sequence
  Description of Artificial Sequence: Synthetic oligonucleotide
  Sense strand starting at position 683 of SEQ ID NO: 1879552
cauuuaaaguggcugcaua

SEQ ID NO: 1915693 - RNA, 19 nt, Artificial Sequence
  Description of Artificial Sequence: Synthetic oligonucleotide
  Antisense strand to SEQ ID NO: 1915692
uaugcagccacuuuaaaug

SEQ ID NO: 1915694 - RNA, 19 nt, Artificial Sequence
  Description of Artificial Sequence: Synthetic oligonucleotide
  Sense strand starting at position 843 of SEQ ID NO: 1879552
uauugugaugucugucaga

SEQ ID NO: 1915695 - RNA, 19 nt, Artificial Sequence
  Description of Artificial Sequence: Synthetic oligonucleotide
  Antisense strand to SEQ ID NO: 1915694
ucugacagacaucacaaua

SEQ ID NO: 1915696 - RNA, 19 nt, Artificial Sequence
  Description of Artificial Sequence: Synthetic oligonucleotide
  Sense strand starting at position 891 of SEQ ID NO: 1879552
cucuguuaauaauuaguga

SEQ ID NO: 1915697 - RNA, 19 nt, Artificial Sequence
  Description of Artificial Sequence: Synthetic oligonucleotide
  Antisense strand to SEQ ID NO: 1915696
ucacuaauuauuaacagag

SEQ ID NO: 1915698 - RNA, 19 nt, Artificial Sequence
  Description of Artificial Sequence: Synthetic oligonucleotide
  Sense strand starting at position 894 of SEQ ID NO: 1879552
uguuaauaauuagugagga

SEQ ID NO: 1915699 - RNA, 19 nt, Artificial Sequence
  Description of Artificial Sequence: Synthetic oligonucleotide
  Antisense strand to SEQ ID NO: 1915698
uccucacuaauuauuaaca

SEQ ID NO: 1915700 - RNA, 19 nt, Artificial Sequence
  Description of Artificial Sequence: Synthetic oligonucleotide
  Sense strand starting at position 956 of SEQ ID NO: 1879552
uuauaagagauagggucuu

SEQ ID NO: 1915701 - RNA, 19 nt, Artificial Sequence
  Description of Artificial Sequence: Synthetic oligonucleotide
  Antisense strand to SEQ ID NO: 1915700
aagacccuaucucuuauaa

SEQ ID NO: 1915702 - RNA, 19 nt, Artificial Sequence
  Description of Artificial Sequence: Synthetic oligonucleotide
  Sense strand starting at position 1601 of SEQ ID NO: 1879552
gauguuucuugggugaauu

SEQ ID NO: 1915703 - RNA, 19 nt, Artificial Sequence
  Description of Artificial Sequence: Synthetic oligonucleotide
  Antisense strand to SEQ ID NO: 1915702
aauucacccaagaaacauc

SEQ ID NO: 1915704 - RNA, 19 nt, Artificial Sequence
  Description of Artificial Sequence: Synthetic oligonucleotide
  Sense strand starting at position 1602 of SEQ ID NO: 1879552
auguuucuugggugaauua

SEQ ID NO: 1915705 - RNA, 19 nt, Artificial Sequence
  Description of Artificial Sequence: Synthetic oligonucleotide
  Antisense strand to SEQ ID NO: 1915704
uaauucacccaagaaacau

SEQ ID NO: 1915706 - RNA, 19 nt, Artificial Sequence
  Description of Artificial Sequence: Synthetic oligonucleotide
  Sense strand starting at position 1603 of SEQ ID NO: 1879552
uguuucuugggugaauuau

SEQ ID NO: 1915707 - RNA, 19 nt, Artificial Sequence
  Description of Artificial Sequence: Synthetic oligonucleotide
  Antisense strand to SEQ ID NO: 1915706
auaauucacccaagaaaca

SEQ ID NO: 1915708 - RNA, 19 nt, Artificial Sequence
  Description of Artificial Sequence: Synthetic oligonucleotide
  Sense strand starting at position 1609 of SEQ ID NO: 1879552
uugggugaauuauuacuau

SEQ ID NO: 1915709 - RNA, 19 nt, Artificial Sequence
  Description of Artificial Sequence: Synthetic oligonucleotide
  Antisense strand to SEQ ID NO: 1915708
auaguaauaauucacccaa

SEQ ID NO: 1915710 - RNA, 19 nt, Artificial Sequence
  Description of Artificial Sequence: Synthetic oligonucleotide
  Sense strand starting at position 1624 of SEQ ID NO: 1879552
cuauaaugguuccuaaaug

SEQ ID NO: 1915711 - RNA, 19 nt, Artificial Sequence
  Description of Artificial Sequence: Synthetic oligonucleotide
  Antisense strand to SEQ ID NO: 1915710
cauuuaggaaccauuauag

SEQ ID NO: 1915712 - RNA, 19 nt, Artificial Sequence
  Description of Artificial Sequence: Synthetic oligonucleotide
  Sense strand starting at position 1629 of SEQ ID NO: 1879552
augguuccuaaauggugau

SEQ ID NO: 1915713 - RNA, 19 nt, Artificial Sequence
  Description of Artificial Sequence: Synthetic oligonucleotide
  Antisense strand to SEQ ID NO: 1915712
aucaccauuuaggaaccau

SEQ ID NO: 1915714 - RNA, 19 nt, Artificial Sequence
  Description of Artificial Sequence: Synthetic oligonucleotide
  Sense strand starting at position 1744 of SEQ ID NO: 1879552
cuguuauuaucagucuuua

SEQ ID NO: 1915715 - RNA, 19 nt, Artificial Sequence
  Description of Artificial Sequence: Synthetic oligonucleotide
  Antisense strand to SEQ ID NO: 1915714
uaaagacugauaauaacag

SEQ ID NO: 1915716 - RNA, 19 nt, Artificial Sequence
  Description of Artificial Sequence: Synthetic oligonucleotide
  Sense strand starting at position 1770 of SEQ ID NO: 1879552
gcugaauugcuccagaucu

SEQ ID NO: 1915717 - RNA, 19 nt, Artificial Sequence
  Description of Artificial Sequence: Synthetic oligonucleotide
  Antisense strand to SEQ ID NO: 1915716
agaucuggagcaauucagc

SEQ ID NO: 1915718 - RNA, 19 nt, Artificial Sequence
  Description of Artificial Sequence: Synthetic oligonucleotide
  Sense strand starting at position 1772 of SEQ ID NO: 1879552
ugaauugcuccagaucuga

SEQ ID NO: 1915719 - RNA, 19 nt, Artificial Sequence
  Description of Artificial Sequence: Synthetic oligonucleotide
  Antisense strand to SEQ ID NO: 1915718
ucagaucuggagcaauuca

SEQ ID NO: 1915720 - RNA, 19 nt, Artificial Sequence
  Description of Artificial Sequence: Synthetic oligonucleotide
  Sense strand starting at position 1983 of SEQ ID NO: 1879552
ugcuauaugcuauaagaug

SEQ ID NO: 1915721 - RNA, 19 nt, Artificial Sequence
  Description of Artificial Sequence: Synthetic oligonucleotide
  Antisense strand to SEQ ID NO: 1915720
caucuuauagcauauagca

SEQ ID NO: 1915722 - RNA, 19 nt, Artificial Sequence
  Description of Artificial Sequence: Synthetic oligonucleotide
  Sense strand starting at position 2048 of SEQ ID NO: 1879552
ggucgauauuaaucaagua

SEQ ID NO: 1915723 - RNA, 19 nt, Artificial Sequence
  Description of Artificial Sequence: Synthetic oligonucleotide
  Antisense strand to SEQ ID NO: 1915722
uacuugauuaauaucgacc

SEQ ID NO: 1915724 - RNA, 19 nt, Artificial Sequence
  Description of Artificial Sequence: Synthetic oligonucleotide
  Sense strand starting at position 2123 of SEQ ID NO: 1879552
gauucuaugguaggguaau

SEQ ID NO: 1915725 - RNA, 19 nt, Artificial Sequence
  Description of Artificial Sequence: Synthetic oligonucleotide
  Antisense strand to SEQ ID NO: 1915724
auuacccuaccauagaauc

SEQ ID NO: 1915726 - RNA, 19 nt, Artificial Sequence
  Description of Artificial Sequence: Synthetic oligonucleotide
  Sense strand starting at position 2165 of SEQ ID NO: 1879552
gcagcauaccaguaauuaa

SEQ ID NO: 1915727 - RNA, 19 nt, Artificial Sequence
  Description of Artificial Sequence: Synthetic oligonucleotide
  Antisense strand to SEQ ID NO: 1915726
uuaauuacugguaugcugc

SEQ ID NO: 1915728 - RNA, 19 nt, Artificial Sequence
  Description of Artificial Sequence: Synthetic oligonucleotide
  Sense strand starting at position 2176 of SEQ ID NO: 1879552
guaauuaacugaucugaag

SEQ ID NO: 1915729 - RNA, 19 nt, Artificial Sequence
  Description of Artificial Sequence: Synthetic oligonucleotide
  Antisense strand to SEQ ID NO: 1915728
cuucagaucaguuaauuac

SEQ ID NO: 1915730 - RNA, 19 nt, Artificial Sequence
  Description of Artificial Sequence: Synthetic oligonucleotide
  Sense strand starting at position 2199 of SEQ ID NO: 1879552
aguagaaauuaacuuggua

SEQ ID NO: 1915731 - RNA, 19 nt, Artificial Sequence
  Description of Artificial Sequence: Synthetic oligonucleotide
  Antisense strand to SEQ ID NO: 1915730
uaccaaguuaauuucuacu

SEQ ID NO: 1915732 - RNA, 19 nt, Artificial Sequence
  Description of Artificial Sequence: Synthetic oligonucleotide
  Sense strand starting at position 2495 of SEQ ID NO: 1879552
uucuaucuguguccuaaac

SEQ ID NO: 1915733 - RNA, 19 nt, Artificial Sequence
  Description of Artificial Sequence: Synthetic oligonucleotide
  Antisense strand to SEQ ID NO: 1915732
guuuaggacacagauagaa

SEQ ID NO: 1915734 - RNA, 19 nt, Artificial Sequence
  Description of Artificial Sequence: Synthetic oligonucleotide
  Sense strand starting at position 2626 of SEQ ID NO: 1879552
ccauguacucagcauagua

SEQ ID NO: 1915735 - RNA, 19 nt, Artificial Sequence
  Description of Artificial Sequence: Synthetic oligonucleotide
  Antisense strand to SEQ ID NO: 1915734
uacuaugcugaguacaugg

SEQ ID NO: 1915736 - RNA, 19 nt, Artificial Sequence
  Description of Artificial Sequence: Synthetic oligonucleotide
  Sense strand starting at position 2718 of SEQ ID NO: 1879552
gccaucuguguguccguaa

SEQ ID NO: 1915737 - RNA, 19 nt, Artificial Sequence
  Description of Artificial Sequence: Synthetic oligonucleotide
  Antisense strand to SEQ ID NO: 1915736
uuacggacacacagauggc

SEQ ID NO: 1915738 - RNA, 19 nt, Artificial Sequence
  Description of Artificial Sequence: Synthetic oligonucleotide
  Sense strand starting at position 2733 of SEQ ID NO: 1879552
guaaguacccaauguuuag

SEQ ID NO: 1915739 - RNA, 19 nt, Artificial Sequence
  Description of Artificial Sequence: Synthetic oligonucleotide
  Antisense strand to SEQ ID NO: 1915738
cuaaacauuggguacuuac

SEQ ID NO: 1915740 - RNA, 19 nt, Artificial Sequence
  Description of Artificial Sequence: Synthetic oligonucleotide
  Sense strand starting at position 2884 of SEQ ID NO: 1879552
ugcuucuuguuaguggaga

SEQ ID NO: 1915741 - RNA, 19 nt, Artificial Sequence
  Description of Artificial Sequence: Synthetic oligonucleotide
  Antisense strand to SEQ ID NO: 1915740
ucuccacuaacaagaagca

SEQ ID NO: 1915742 - RNA, 19 nt, Artificial Sequence
  Description of Artificial Sequence: Synthetic oligonucleotide
  Sense strand starting at position 2886 of SEQ ID NO: 1879552
cuucuuguuaguggagaau

SEQ ID NO: 1915743 - RNA, 19 nt, Artificial Sequence
  Description of Artificial Sequence: Synthetic oligonucleotide
  Antisense strand to SEQ ID NO: 1915742
auucuccacuaacaagaag

SEQ ID NO: 1915744 - RNA, 19 nt, Artificial Sequence
  Description of Artificial Sequence: Synthetic oligonucleotide
  Sense strand starting at position 2889 of SEQ ID NO: 1879552
cuuguuaguggagaauagu

SEQ ID NO: 1915745 - RNA, 19 nt, Artificial Sequence
  Description of Artificial Sequence: Synthetic oligonucleotide
  Antisense strand to SEQ ID NO: 1915744
acuauucuccacuaacaag

SEQ ID NO: 1915746 - RNA, 19 nt, Artificial Sequence
  Description of Artificial Sequence: Synthetic oligonucleotide
  Sense strand starting at position 2892 of SEQ ID NO: 1879552
guuaguggagaauaguauu

SEQ ID NO: 1915747 - RNA, 19 nt, Artificial Sequence
  Description of Artificial Sequence: Synthetic oligonucleotide
  Antisense strand to SEQ ID NO: 1915746
aauacuauucuccacuaac

SEQ ID NO: 1915748 - RNA, 19 nt, Artificial Sequence
  Description of Artificial Sequence: Synthetic oligonucleotide
  Sense strand starting at position 2928 of SEQ ID NO: 1879552
ggagguuaucgugagcuga

SEQ ID NO: 1915749 - RNA, 19 nt, Artificial Sequence
  Description of Artificial Sequence: Synthetic oligonucleotide
  Antisense strand to SEQ ID NO: 1915748
ucagcucacgauaaccucc

SEQ ID NO: 1915750 - RNA, 19 nt, Artificial Sequence
  Description of Artificial Sequence: Synthetic oligonucleotide
  Sense strand starting at position 2930 of SEQ ID NO: 1879552
agguuaucgugagcugaaa

SEQ ID NO: 1915751 - RNA, 19 nt, Artificial Sequence
  Description of Artificial Sequence: Synthetic oligonucleotide
  Antisense strand to SEQ ID NO: 1915750
uuucagcucacgauaaccu

SEQ ID NO: 1915752 - RNA, 19 nt, Artificial Sequence
  Description of Artificial Sequence: Synthetic oligonucleotide
  Sense strand starting at position 3092 of SEQ ID NO: 1879552
ggcagagcuaaagaguuau

SEQ ID NO: 1915753 - RNA, 19 nt, Artificial Sequence
  Description of Artificial Sequence: Synthetic oligonucleotide
  Antisense strand to SEQ ID NO: 1915752
auaacucuuuagcucugcc

SEQ ID NO: 1915754 - RNA, 19 nt, Artificial Sequence
  Description of Artificial Sequence: Synthetic oligonucleotide
  Sense strand starting at position 3368 of SEQ ID NO: 1879552
acugcacucuggucugaau

SEQ ID NO: 1915755 - RNA, 19 nt, Artificial Sequence
  Description of Artificial Sequence: Synthetic oligonucleotide
  Antisense strand to SEQ ID NO: 1915754
auucagaccagagugcagu

SEQ ID NO: 1915756 - RNA, 19 nt, Artificial Sequence
  Description of Artificial Sequence: Synthetic oligonucleotide
  Sense strand starting at position 3370 of SEQ ID NO: 1879552
ugcacucuggucugaauga

SEQ ID NO: 1915757 - RNA, 19 nt, Artificial Sequence
  Description of Artificial Sequence: Synthetic oligonucleotide
  Antisense strand to SEQ ID NO: 1915756
ucauucagaccagagugca

SEQ ID NO: 1915758 - RNA, 19 nt, Artificial Sequence
  Description of Artificial Sequence: Synthetic oligonucleotide
  Sense strand starting at position 3903 of SEQ ID NO: 1879552
cgcccagcuaucgagacaa

SEQ ID NO: 1915759 - RNA, 19 nt, Artificial Sequence
  Description of Artificial Sequence: Synthetic oligonucleotide
  Antisense strand to SEQ ID NO: 1915758
uugucucgauagcugggcg

SEQ ID NO: 1915760 - RNA, 19 nt, Artificial Sequence
  Description of Artificial Sequence: Synthetic oligonucleotide
  Sense strand starting at position 3905 of SEQ ID NO: 1879552
cccagcuaucgagacaauu

SEQ ID NO: 1915761 - RNA, 19 nt, Artificial Sequence
  Description of Artificial Sequence: Synthetic oligonucleotide
  Antisense strand to SEQ ID NO: 1915760
aauugucucgauagcuggg

SEQ ID NO: 1915762 - RNA, 19 nt, Artificial Sequence
  Description of Artificial Sequence: Synthetic oligonucleotide
  Sense strand starting at position 94 of SEQ ID NO: 1879553
agugcuuagagcugaauuu

SEQ ID NO: 1915763 - RNA, 19 nt, Artificial Sequence
  Description of Artificial Sequence: Synthetic oligonucleotide
  Antisense strand to SEQ ID NO: 1915762
aaauucagcucuaagcacu

SEQ ID NO: 1915764 - RNA, 19 nt, Artificial Sequence
  Description of Artificial Sequence: Synthetic oligonucleotide
  Sense strand starting at position 160 of SEQ ID NO: 1879553
ggacacccgagcuaacauu

SEQ ID NO: 1915765 - RNA, 19 nt, Artificial Sequence
  Description of Artificial Sequence: Synthetic oligonucleotide
  Antisense strand to SEQ ID NO: 1915764
aauguuagcucgggugucc

SEQ ID NO: 1915766 - RNA, 19 nt, Artificial Sequence
  Description of Artificial Sequence: Synthetic oligonucleotide
  Sense strand starting at position 303 of SEQ ID NO: 1879553
guuuaagcucaaggacuaa

SEQ ID NO: 1915767 - RNA, 19 nt, Artificial Sequence
  Description of Artificial Sequence: Synthetic oligonucleotide
  Antisense strand to SEQ ID NO: 1915766
uuaguccuugagcuuaaac

SEQ ID NO: 1915768 - RNA, 19 nt, Artificial Sequence
  Description of Artificial Sequence: Synthetic oligonucleotide
  Sense strand starting at position 360 of SEQ ID NO: 1879553
aucacuuauucucuggaga

SEQ ID NO: 1915769 - RNA, 19 nt, Artificial Sequence
  Description of Artificial Sequence: Synthetic oligonucleotide
  Antisense strand to SEQ ID NO: 1915768
ucuccagagaauaagugau

SEQ ID NO: 1915770 - RNA, 19 nt, Artificial Sequence
  Description of Artificial Sequence: Synthetic oligonucleotide
  Sense strand starting at position 361 of SEQ ID NO: 1879553
ucacuuauucucuggagau

SEQ ID NO: 1915771 - RNA, 19 nt, Artificial Sequence
  Description of Artificial Sequence: Synthetic oligonucleotide
  Antisense strand to SEQ ID NO: 1915770
aucuccagagaauaaguga

SEQ ID NO: 1915772 - RNA, 19 nt, Artificial Sequence
  Description of Artificial Sequence: Synthetic oligonucleotide
  Sense strand starting at position 543 of SEQ ID NO: 1879553
gauugcucuguguauuaga

SEQ ID NO: 1915773 - RNA, 19 nt, Artificial Sequence
  Description of Artificial Sequence: Synthetic oligonucleotide
  Antisense strand to SEQ ID NO: 1915772
ucuaauacacagagcaauc

SEQ ID NO: 1915774 - RNA, 19 nt, Artificial Sequence
  Description of Artificial Sequence: Synthetic oligonucleotide
  Sense strand starting at position 770 of SEQ ID NO: 1879553
cccagauaugcugaaguag

SEQ ID NO: 1915775 - RNA, 19 nt, Artificial Sequence
  Description of Artificial Sequence: Synthetic oligonucleotide
  Antisense strand to SEQ ID NO: 1915774
cuacuucagcauaucuggg

SEQ ID NO: 1915776 - RNA, 19 nt, Artificial Sequence
  Description of Artificial Sequence: Synthetic oligonucleotide
  Sense strand starting at position 815 of SEQ ID NO: 1879553
uagaguugaucuuccagua

SEQ ID NO: 1915777 - RNA, 19 nt, Artificial Sequence
  Description of Artificial Sequence: Synthetic oligonucleotide
  Antisense strand to SEQ ID NO: 1915776
uacuggaagaucaacucua

SEQ ID NO: 1915778 - RNA, 19 nt, Artificial Sequence
  Description of Artificial Sequence: Synthetic oligonucleotide
  Sense strand starting at position 1112 of SEQ ID NO: 1879553
gcaacucuuccauaggcga

SEQ ID NO: 1915779 - RNA, 19 nt, Artificial Sequence
  Description of Artificial Sequence: Synthetic oligonucleotide
  Antisense strand to SEQ ID NO: 1915778
ucgccuauggaagaguugc

SEQ ID NO: 1915780 - RNA, 19 nt, Artificial Sequence
  Description of Artificial Sequence: Synthetic oligonucleotide
  Sense strand starting at position 1126 of SEQ ID NO: 1879553
ggcgaaucaauauagcaga

SEQ ID NO: 1915781 - RNA, 19 nt, Artificial Sequence
  Description of Artificial Sequence: Synthetic oligonucleotide
  Antisense strand to SEQ ID NO: 1915780
ucugcuauauugauucgcc

SEQ ID NO: 1915782 - RNA, 19 nt, Artificial Sequence
  Description of Artificial Sequence: Synthetic oligonucleotide
  Sense strand starting at position 1139 of SEQ ID NO: 1879553
agcagacaugcucaaggua

SEQ ID NO: 1915783 - RNA, 19 nt, Artificial Sequence
  Description of Artificial Sequence: Synthetic oligonucleotide
  Antisense strand to SEQ ID NO: 1915782
uaccuugagcaugucugcu

SEQ ID NO: 1915784 - RNA, 19 nt, Artificial Sequence
  Description of Artificial Sequence: Synthetic oligonucleotide
  Sense strand starting at position 1164 of SEQ ID NO: 1879553
uuugcuagggcuuaaauca

SEQ ID NO: 1915785 - RNA, 19 nt, Artificial Sequence
  Description of Artificial Sequence: Synthetic oligonucleotide
  Antisense strand to SEQ ID NO: 1915784
ugauuuaagcccuagcaaa

SEQ ID NO: 1915786 - RNA, 19 nt, Artificial Sequence
  Description of Artificial Sequence: Synthetic oligonucleotide
  Sense strand starting at position 1211 of SEQ ID NO: 1879553
guuacuccuguguaaagag

SEQ ID NO: 1915787 - RNA, 19 nt, Artificial Sequence
  Description of Artificial Sequence: Synthetic oligonucleotide
  Antisense strand to SEQ ID NO: 1915786
cucuuuacacaggaguaac

SEQ ID NO: 1915788 - RNA, 19 nt, Artificial Sequence
  Description of Artificial Sequence: Synthetic oligonucleotide
  Sense strand starting at position 1250 of SEQ ID NO: 1879553
cuccucagacuguauugua

SEQ ID NO: 1915789 - RNA, 19 nt, Artificial Sequence
  Description of Artificial Sequence: Synthetic oligonucleotide
  Antisense strand to SEQ ID NO: 1915788
uacaauacagucugaggag

SEQ ID NO: 1915790 - RNA, 19 nt, Artificial Sequence
  Description of Artificial Sequence: Synthetic oligonucleotide
  Sense strand starting at position 1257 of SEQ ID NO: 1879553
gacuguauuguaggguaua

SEQ ID NO: 1915791 - RNA, 19 nt, Artificial Sequence
  Description of Artificial Sequence: Synthetic oligonucleotide
  Antisense strand to SEQ ID NO: 1915790
uauacccuacaauacaguc

SEQ ID NO: 1915792 - RNA, 19 nt, Artificial Sequence
  Description of Artificial Sequence: Synthetic oligonucleotide
  Sense strand starting at position 1359 of SEQ ID NO: 1879553
guuucugaaaugcauggaa

SEQ ID NO: 1915793 - RNA, 19 nt, Artificial Sequence
  Description of Artificial Sequence: Synthetic oligonucleotide
  Antisense strand to SEQ ID NO: 1915792
uuccaugcauuucagaaac

SEQ ID NO: 1915794 - RNA, 19 nt, Artificial Sequence
  Description of Artificial Sequence: Synthetic oligonucleotide
  Sense strand starting at position 1361 of SEQ ID NO: 1879553
uucugaaaugcauggaaau

SEQ ID NO: 1915795 - RNA, 19 nt, Artificial Sequence
  Description of Artificial Sequence: Synthetic oligonucleotide
  Antisense strand to SEQ ID NO: 1915794
auuuccaugcauuucagaa

SEQ ID NO: 1915796 - RNA, 19 nt, Artificial Sequence
  Description of Artificial Sequence: Synthetic oligonucleotide
  Sense strand starting at position 1362 of SEQ ID NO: 1879553
ucugaaaugcauggaaaua

SEQ ID NO: 1915797 - RNA, 19 nt, Artificial Sequence
  Description of Artificial Sequence: Synthetic oligonucleotide
  Antisense strand to SEQ ID NO: 1915796
uauuuccaugcauuucaga

SEQ ID NO: 1915798 - RNA, 19 nt, Artificial Sequence
  Description of Artificial Sequence: Synthetic oligonucleotide
  Sense strand starting at position 1428 of SEQ ID NO: 1879553
ggugggaaugaguauguga

SEQ ID NO: 1915799 - RNA, 19 nt, Artificial Sequence
  Description of Artificial Sequence: Synthetic oligonucleotide
  Antisense strand to SEQ ID NO: 1915798
ucacauacucauucccacc

SEQ ID NO: 1915800 - RNA, 19 nt, Artificial Sequence
  Description of Artificial Sequence: Synthetic oligonucleotide
  Sense strand starting at position 1452 of SEQ ID NO: 1879553
agggucugucagggaaaca

SEQ ID NO: 1915801 - RNA, 19 nt, Artificial Sequence
  Description of Artificial Sequence: Synthetic oligonucleotide
  Antisense strand to SEQ ID NO: 1915800
uguuucccugacagacccu

SEQ ID NO: 1915802 - RNA, 19 nt, Artificial Sequence
  Description of Artificial Sequence: Synthetic oligonucleotide
  Sense strand starting at position 1502 of SEQ ID NO: 1879553
accugugacuuaucuuaga

SEQ ID NO: 1915803 - RNA, 19 nt, Artificial Sequence
  Description of Artificial Sequence: Synthetic oligonucleotide
  Antisense strand to SEQ ID NO: 1915802
ucuaagauaagucacaggu

SEQ ID NO: 1915804 - RNA, 19 nt, Artificial Sequence
  Description of Artificial Sequence: Synthetic oligonucleotide
  Sense strand starting at position 1621 of SEQ ID NO: 1879553
gggaguuaccucuggguuc

SEQ ID NO: 1915805 - RNA, 19 nt, Artificial Sequence
  Description of Artificial Sequence: Synthetic oligonucleotide
  Antisense strand to SEQ ID NO: 1915804
gaacccagagguaacuccc

SEQ ID NO: 1915806 - RNA, 19 nt, Artificial Sequence
  Description of Artificial Sequence: Synthetic oligonucleotide
  Sense strand starting at position 1673 of SEQ ID NO: 1879553
cgaaaugccucccucagaa

SEQ ID NO: 1915807 - RNA, 19 nt, Artificial Sequence
  Description of Artificial Sequence: Synthetic oligonucleotide
  Antisense strand to SEQ ID NO: 1915806
uucugagggaggcauuucg

SEQ ID NO: 1915808 - RNA, 19 nt, Artificial Sequence
  Description of Artificial Sequence: Synthetic oligonucleotide
  Sense strand starting at position 1806 of SEQ ID NO: 1879553
ggaccauugcuuugacaac

SEQ ID NO: 1915809 - RNA, 19 nt, Artificial Sequence
  Description of Artificial Sequence: Synthetic oligonucleotide
  Antisense strand to SEQ ID NO: 1915808
guugucaaagcaauggucc

SEQ ID NO: 1915810 - RNA, 19 nt, Artificial Sequence
  Description of Artificial Sequence: Synthetic oligonucleotide
  Sense strand starting at position 1858 of SEQ ID NO: 1879553
ggugaagaggucuguagga

SEQ ID NO: 1915811 - RNA, 19 nt, Artificial Sequence
  Description of Artificial Sequence: Synthetic oligonucleotide
  Antisense strand to SEQ ID NO: 1915810
uccuacagaccucuucacc

SEQ ID NO: 1915812 - RNA, 19 nt, Artificial Sequence
  Description of Artificial Sequence: Synthetic oligonucleotide
  Sense strand starting at position 2183 of SEQ ID NO: 1879553
gccuuugucccgcuuagua

SEQ ID NO: 1915813 - RNA, 19 nt, Artificial Sequence
  Description of Artificial Sequence: Synthetic oligonucleotide
  Antisense strand to SEQ ID NO: 1915812
uacuaagcgggacaaaggc

SEQ ID NO: 1915814 - RNA, 19 nt, Artificial Sequence
  Description of Artificial Sequence: Synthetic oligonucleotide
  Sense strand starting at position 2199 of SEQ ID NO: 1879553
guaacugggcucugaccaa

SEQ ID NO: 1915815 - RNA, 19 nt, Artificial Sequence
  Description of Artificial Sequence: Synthetic oligonucleotide
  Antisense strand to SEQ ID NO: 1915814
uuggucagagcccaguuac

SEQ ID NO: 1915816 - RNA, 19 nt, Artificial Sequence
  Description of Artificial Sequence: Synthetic oligonucleotide
  Sense strand starting at position 3105 of SEQ ID NO: 1879553
gagagcgacuguguagaaa

SEQ ID NO: 1915817 - RNA, 19 nt, Artificial Sequence
  Description of Artificial Sequence: Synthetic oligonucleotide
  Antisense strand to SEQ ID NO: 1915816
uuucuacacagucgcucuc

SEQ ID NO: 1915818 - RNA, 19 nt, Artificial Sequence
  Description of Artificial Sequence: Synthetic oligonucleotide
  Sense strand starting at position 3177 of SEQ ID NO: 1879553
uguguaauccucugaggag

SEQ ID NO: 1915819 - RNA, 19 nt, Artificial Sequence
  Description of Artificial Sequence: Synthetic oligonucleotide
  Antisense strand to SEQ ID NO: 1915818
cuccucagaggauuacaca

SEQ ID NO: 1915820 - RNA, 19 nt, Artificial Sequence
  Description of Artificial Sequence: Synthetic oligonucleotide
  Sense strand starting at position 3199 of SEQ ID NO: 1879553
agcccauagcuugaaaguu

SEQ ID NO: 1915821 - RNA, 19 nt, Artificial Sequence
  Description of Artificial Sequence: Synthetic oligonucleotide
  Antisense strand to SEQ ID NO: 1915820
aacuuucaagcuaugggcu

SEQ ID NO: 1915822 - RNA, 19 nt, Artificial Sequence
  Description of Artificial Sequence: Synthetic oligonucleotide
  Sense strand starting at position 3229 of SEQ ID NO: 1879553
uguuguguucuguaggaga

SEQ ID NO: 1915823 - RNA, 19 nt, Artificial Sequence
  Description of Artificial Sequence: Synthetic oligonucleotide
  Antisense strand to SEQ ID NO: 1915822
ucuccuacagaacacaaca

SEQ ID NO: 1915824 - RNA, 19 nt, Artificial Sequence
  Description of Artificial Sequence: Synthetic oligonucleotide
  Sense strand starting at position 3231 of SEQ ID NO: 1879553
uuguguucuguaggagaga

SEQ ID NO: 1915825 - RNA, 19 nt, Artificial Sequence
  Description of Artificial Sequence: Synthetic oligonucleotide
  Antisense strand to SEQ ID NO: 1915824
ucucuccuacagaacacaa

SEQ ID NO: 1915826 - RNA, 19 nt, Artificial Sequence
  Description of Artificial Sequence: Synthetic oligonucleotide
  Sense strand starting at position 3309 of SEQ ID NO: 1879553
aguacauuuccguguggaa

SEQ ID NO: 1915827 - RNA, 19 nt, Artificial Sequence
  Description of Artificial Sequence: Synthetic oligonucleotide
  Antisense strand to SEQ ID NO: 1915826
uuccacacggaaauguacu

SEQ ID NO: 1915828 - RNA, 19 nt, Artificial Sequence
  Description of Artificial Sequence: Synthetic oligonucleotide
  Sense strand starting at position 3311 of SEQ ID NO: 1879553
uacauuuccguguggaacu

SEQ ID NO: 1915829 - RNA, 19 nt, Artificial Sequence
  Description of Artificial Sequence: Synthetic oligonucleotide
  Antisense strand to SEQ ID NO: 1915828
aguuccacacggaaaugua

SEQ ID NO: 1915830 - RNA, 19 nt, Artificial Sequence
  Description of Artificial Sequence: Synthetic oligonucleotide
  Sense strand starting at position 3478 of SEQ ID NO: 1879553
ugcccuauucgacagaacu

SEQ ID NO: 1915831 - RNA, 19 nt, Artificial Sequence
  Description of Artificial Sequence: Synthetic oligonucleotide
  Antisense strand to SEQ ID NO: 1915830
aguucugucgaauagggca

SEQ ID NO: 1915832 - RNA, 19 nt, Artificial Sequence
  Description of Artificial Sequence: Synthetic oligonucleotide
  Sense strand starting at position 3545 of SEQ ID NO: 1879553
aaagaaucucgugaugggu

SEQ ID NO: 1915833 - RNA, 19 nt, Artificial Sequence
  Description of Artificial Sequence: Synthetic oligonucleotide
  Antisense strand to SEQ ID NO: 1915832
acccaucacgagauucuuu

SEQ ID NO: 1915834 - RNA, 19 nt, Artificial Sequence
  Description of Artificial Sequence: Synthetic oligonucleotide
  Sense strand starting at position 3553 of SEQ ID NO: 1879553
ucgugaugggucugauuug

SEQ ID NO: 1915835 - RNA, 19 nt, Artificial Sequence
  Description of Artificial Sequence: Synthetic oligonucleotide
  Antisense strand to SEQ ID NO: 1915834
caaaucagacccaucacga

SEQ ID NO: 1915836 - RNA, 19 nt, Artificial Sequence
  Description of Artificial Sequence: Synthetic oligonucleotide
  Sense strand starting at position 3560 of SEQ ID NO: 1879553
gggucugauuuguauuuac

SEQ ID NO: 1915837 - RNA, 19 nt, Artificial Sequence
  Description of Artificial Sequence: Synthetic oligonucleotide
  Antisense strand to SEQ ID NO: 1915836
guaaauacaaaucagaccc

SEQ ID NO: 1915838 - RNA, 19 nt, Artificial Sequence
  Description of Artificial Sequence: Synthetic oligonucleotide
  Sense strand starting at position 3700 of SEQ ID NO: 1879553
uuaggacccugauccuauu

SEQ ID NO: 1915839 - RNA, 19 nt, Artificial Sequence
  Description of Artificial Sequence: Synthetic oligonucleotide
  Antisense strand to SEQ ID NO: 1915838
aauaggaucaggguccuaa

SEQ ID NO: 1915840 - RNA, 19 nt, Artificial Sequence
  Description of Artificial Sequence: Synthetic oligonucleotide
  Sense strand starting at position 3929 of SEQ ID NO: 1879553
gggcgaauucuugaaagcu

SEQ ID NO: 1915841 - RNA, 19 nt, Artificial Sequence
  Description of Artificial Sequence: Synthetic oligonucleotide
  Antisense strand to SEQ ID NO: 1915840
agcuuucaagaauucgccc

SEQ ID NO: 1915842 - RNA, 19 nt, Artificial Sequence
  Description of Artificial Sequence: Synthetic oligonucleotide
  Sense strand starting at position 145 of SEQ ID NO: 1879554
uugauaguguaacuacaua

SEQ ID NO: 1915843 - RNA, 19 nt, Artificial Sequence
  Description of Artificial Sequence: Synthetic oligonucleotide
  Antisense strand to SEQ ID NO: 1915842
uauguaguuacacuaucaa

SEQ ID NO: 1915844 - RNA, 19 nt, Artificial Sequence
  Description of Artificial Sequence: Synthetic oligonucleotide
  Sense strand starting at position 293 of SEQ ID NO: 1879554
ugguuucuaauguauguua

SEQ ID NO: 1915845 - RNA, 19 nt, Artificial Sequence
  Description of Artificial Sequence: Synthetic oligonucleotide
  Antisense strand to SEQ ID NO: 1915844
uaacauacauuagaaacca

SEQ ID NO: 1915846 - RNA, 19 nt, Artificial Sequence
  Description of Artificial Sequence: Synthetic oligonucleotide
  Sense strand starting at position 387 of SEQ ID NO: 1879554
cuaucaaaugcagguauua

SEQ ID NO: 1915847 - RNA, 19 nt, Artificial Sequence
  Description of Artificial Sequence: Synthetic oligonucleotide
  Antisense strand to SEQ ID NO: 1915846
uaauaccugcauuugauag

SEQ ID NO: 1915848 - RNA, 19 nt, Artificial Sequence
  Description of Artificial Sequence: Synthetic oligonucleotide
  Sense strand starting at position 441 of SEQ ID NO: 1879554
cuugaaugcuuucucgaau

SEQ ID NO: 1915849 - RNA, 19 nt, Artificial Sequence
  Description of Artificial Sequence: Synthetic oligonucleotide
  Antisense strand to SEQ ID NO: 1915848
auucgagaaagcauucaag

SEQ ID NO: 1915850 - RNA, 19 nt, Artificial Sequence
  Description of Artificial Sequence: Synthetic oligonucleotide
  Sense strand starting at position 442 of SEQ ID NO: 1879554
uugaaugcuuucucgaaua

SEQ ID NO: 1915851 - RNA, 19 nt, Artificial Sequence
  Description of Artificial Sequence: Synthetic oligonucleotide
  Antisense strand to SEQ ID NO: 1915850
uauucgagaaagcauucaa

SEQ ID NO: 1915852 - RNA, 19 nt, Artificial Sequence
  Description of Artificial Sequence: Synthetic oligonucleotide
  Sense strand starting at position 477 of SEQ ID NO: 1879554
cuagccauauuucuguuau

SEQ ID NO: 1915853 - RNA, 19 nt, Artificial Sequence
  Description of Artificial Sequence: Synthetic oligonucleotide
  Antisense strand to SEQ ID NO: 1915852
auaacagaaauauggcuag

SEQ ID NO: 1915854 - RNA, 19 nt, Artificial Sequence
  Description of Artificial Sequence: Synthetic oligonucleotide
  Sense strand starting at position 479 of SEQ ID NO: 1879554
agccauauuucuguuaugu

SEQ ID NO: 1915855 - RNA, 19 nt, Artificial Sequence
  Description of Artificial Sequence: Synthetic oligonucleotide
  Antisense strand to SEQ ID NO: 1915854
acauaacagaaauauggcu

SEQ ID NO: 1915856 - RNA, 19 nt, Artificial Sequence
  Description of Artificial Sequence: Synthetic oligonucleotide
  Sense strand starting at position 488 of SEQ ID NO: 1879554
ucuguuaugucucccagac

SEQ ID NO: 1915857 - RNA, 19 nt, Artificial Sequence
  Description of Artificial Sequence: Synthetic oligonucleotide
  Antisense strand to SEQ ID NO: 1915856
gucugggagacauaacaga

SEQ ID NO: 1915858 - RNA, 19 nt, Artificial Sequence
  Description of Artificial Sequence: Synthetic oligonucleotide
  Sense strand starting at position 492 of SEQ ID NO: 1879554
uuaugucucccagacauug

SEQ ID NO: 1915859 - RNA, 19 nt, Artificial Sequence
  Description of Artificial Sequence: Synthetic oligonucleotide
  Antisense strand to SEQ ID NO: 1915858
caaugucugggagacauaa

SEQ ID NO: 1915860 - RNA, 19 nt, Artificial Sequence
  Description of Artificial Sequence: Synthetic oligonucleotide
  Sense strand starting at position 510 of SEQ ID NO: 1879554
gcaaguuacauguagauag

SEQ ID NO: 1915861 - RNA, 19 nt, Artificial Sequence
  Description of Artificial Sequence: Synthetic oligonucleotide
  Antisense strand to SEQ ID NO: 1915860
cuaucuacauguaacuugc

SEQ ID NO: 1915862 - RNA, 19 nt, Artificial Sequence
  Description of Artificial Sequence: Synthetic oligonucleotide
  Sense strand starting at position 696 of SEQ ID NO: 1879554
ugccaagauuugucccuua

SEQ ID NO: 1915863 - RNA, 19 nt, Artificial Sequence
  Description of Artificial Sequence: Synthetic oligonucleotide
  Antisense strand to SEQ ID NO: 1915862
uaagggacaaaucuuggca

SEQ ID NO: 1915864 - RNA, 19 nt, Artificial Sequence
  Description of Artificial Sequence: Synthetic oligonucleotide
  Sense strand starting at position 721 of SEQ ID NO: 1879554
gagaacuucccaggagcuu

SEQ ID NO: 1915865 - RNA, 19 nt, Artificial Sequence
  Description of Artificial Sequence: Synthetic oligonucleotide
  Antisense strand to SEQ ID NO: 1915864
aagcuccugggaaguucuc

SEQ ID NO: 1915866 - RNA, 19 nt, Artificial Sequence
  Description of Artificial Sequence: Synthetic oligonucleotide
  Sense strand starting at position 2060 of SEQ ID NO: 1879554
cguggcaaucauuaucuuu

SEQ ID NO: 1915867 - RNA, 19 nt, Artificial Sequence
  Description of Artificial Sequence: Synthetic oligonucleotide
  Antisense strand to SEQ ID NO: 1915866
aaagauaaugauugccacg

SEQ ID NO: 1915868 - RNA, 19 nt, Artificial Sequence
  Description of Artificial Sequence: Synthetic oligonucleotide
  Sense strand starting at position 2063 of SEQ ID NO: 1879554
ggcaaucauuaucuuuguu

SEQ ID NO: 1915869 - RNA, 19 nt, Artificial Sequence
  Description of Artificial Sequence: Synthetic oligonucleotide
  Antisense strand to SEQ ID NO: 1915868
aacaaagauaaugauugcc

SEQ ID NO: 1915870 - RNA, 19 nt, Artificial Sequence
  Description of Artificial Sequence: Synthetic oligonucleotide
  Sense strand starting at position 2263 of SEQ ID NO: 1879554
agaguuuccucagucacau

SEQ ID NO: 1915871 - RNA, 19 nt, Artificial Sequence
  Description of Artificial Sequence: Synthetic oligonucleotide
  Antisense strand to SEQ ID NO: 1915870
augugacugaggaaacucu

SEQ ID NO: 1915872 - RNA, 19 nt, Artificial Sequence
  Description of Artificial Sequence: Synthetic oligonucleotide
  Sense strand starting at position 2286 of SEQ ID NO: 1879554
ccaacacuugugugcauuu

SEQ ID NO: 1915873 - RNA, 19 nt, Artificial Sequence
  Description of Artificial Sequence: Synthetic oligonucleotide
  Antisense strand to SEQ ID NO: 1915872
aaaugcacacaaguguugg

SEQ ID NO: 1915874 - RNA, 19 nt, Artificial Sequence
  Description of Artificial Sequence: Synthetic oligonucleotide
  Sense strand starting at position 2311 of SEQ ID NO: 1879554
caguaacgaugcuuaagau

SEQ ID NO: 1915875 - RNA, 19 nt, Artificial Sequence
  Description of Artificial Sequence: Synthetic oligonucleotide
  Antisense strand to SEQ ID NO: 1915874
aucuuaagcaucguuacug

SEQ ID NO: 1915876 - RNA, 19 nt, Artificial Sequence
  Description of Artificial Sequence: Synthetic oligonucleotide
  Sense strand starting at position 2312 of SEQ ID NO: 1879554
aguaacgaugcuuaagauu

SEQ ID NO: 1915877 - RNA, 19 nt, Artificial Sequence
  Description of Artificial Sequence: Synthetic oligonucleotide
  Antisense strand to SEQ ID NO: 1915876
aaucuuaagcaucguuacu

SEQ ID NO: 1915878 - RNA, 19 nt, Artificial Sequence
  Description of Artificial Sequence: Synthetic oligonucleotide
  Sense strand starting at position 2318 of SEQ ID NO: 1879554
gaugcuuaagauuguguaa

SEQ ID NO: 1915879 - RNA, 19 nt, Artificial Sequence
  Description of Artificial Sequence: Synthetic oligonucleotide
  Antisense strand to SEQ ID NO: 1915878
uuacacaaucuuaagcauc

SEQ ID NO: 1915880 - RNA, 19 nt, Artificial Sequence
  Description of Artificial Sequence: Synthetic oligonucleotide
  Sense strand starting at position 2321 of SEQ ID NO: 1879554
gcuuaagauuguguaacug

SEQ ID NO: 1915881 - RNA, 19 nt, Artificial Sequence
  Description of Artificial Sequence: Synthetic oligonucleotide
  Antisense strand to SEQ ID NO: 1915880
caguuacacaaucuuaagc

SEQ ID NO: 1915882 - RNA, 19 nt, Artificial Sequence
  Description of Artificial Sequence: Synthetic oligonucleotide
  Sense strand starting at position 2325 of SEQ ID NO: 1879554
aagauuguguaacugaaua

SEQ ID NO: 1915883 - RNA, 19 nt, Artificial Sequence
  Description of Artificial Sequence: Synthetic oligonucleotide
  Antisense strand to SEQ ID NO: 1915882
uauucaguuacacaaucuu

SEQ ID NO: 1915884 - RNA, 19 nt, Artificial Sequence
  Description of Artificial Sequence: Synthetic oligonucleotide
  Sense strand starting at position 2338 of SEQ ID NO: 1879554
ugaauaucgcaucagaaca

SEQ ID NO: 1915885 - RNA, 19 nt, Artificial Sequence
  Description of Artificial Sequence: Synthetic oligonucleotide
  Antisense strand to SEQ ID NO: 1915884
uguucugaugcgauauuca

SEQ ID NO: 1915886 - RNA, 19 nt, Artificial Sequence
  Description of Artificial Sequence: Synthetic oligonucleotide
  Sense strand starting at position 2457 of SEQ ID NO: 1879554
gccuuuauauuugagauac

SEQ ID NO: 1915887 - RNA, 19 nt, Artificial Sequence
  Description of Artificial Sequence: Synthetic oligonucleotide
  Antisense strand to SEQ ID NO: 1915886
guaucucaaauauaaaggc

SEQ ID NO: 1915888 - RNA, 19 nt, Artificial Sequence
  Description of Artificial Sequence: Synthetic oligonucleotide
  Sense strand starting at position 2467 of SEQ ID NO: 1879554
uugagauacucgcuuacuu

SEQ ID NO: 1915889 - RNA, 19 nt, Artificial Sequence
  Description of Artificial Sequence: Synthetic oligonucleotide
  Antisense strand to SEQ ID NO: 1915888
aaguaagcgaguaucucaa

SEQ ID NO: 1915890 - RNA, 19 nt, Artificial Sequence
  Description of Artificial Sequence: Synthetic oligonucleotide
  Sense strand starting at position 2530 of SEQ ID NO: 1879554
uuccuagaacuuugaguua

SEQ ID NO: 1915891 - RNA, 19 nt, Artificial Sequence
  Description of Artificial Sequence: Synthetic oligonucleotide
  Antisense strand to SEQ ID NO: 1915890
uaacucaaaguucuaggaa

SEQ ID NO: 1915892 - RNA, 19 nt, Artificial Sequence
  Description of Artificial Sequence: Synthetic oligonucleotide
  Sense strand starting at position 2615 of SEQ ID NO: 1879554
agguaaauuuguuauuggu

SEQ ID NO: 1915893 - RNA, 19 nt, Artificial Sequence
  Description of Artificial Sequence: Synthetic oligonucleotide
  Antisense strand to SEQ ID NO: 1915892
accaauaacaaauuuaccu

SEQ ID NO: 1915894 - RNA, 19 nt, Artificial Sequence
  Description of Artificial Sequence: Synthetic oligonucleotide
  Sense strand starting at position 2621 of SEQ ID NO: 1879554
auuuguuauuggugaaagg

SEQ ID NO: 1915895 - RNA, 19 nt, Artificial Sequence
  Description of Artificial Sequence: Synthetic oligonucleotide
  Antisense strand to SEQ ID NO: 1915894
ccuuucaccaauaacaaau

SEQ ID NO: 1915896 - RNA, 19 nt, Artificial Sequence
  Description of Artificial Sequence: Synthetic oligonucleotide
  Sense strand starting at position 2622 of SEQ ID NO: 1879554
uuuguuauuggugaaagga

SEQ ID NO: 1915897 - RNA, 19 nt, Artificial Sequence
  Description of Artificial Sequence: Synthetic oligonucleotide
  Antisense strand to SEQ ID NO: 1915896
uccuuucaccaauaacaaa

SEQ ID NO: 1915898 - RNA, 19 nt, Artificial Sequence
  Description of Artificial Sequence: Synthetic oligonucleotide
  Sense strand starting at position 2637 of SEQ ID NO: 1879554
aggagaggguuugcauaga

SEQ ID NO: 1915899 - RNA, 19 nt, Artificial Sequence
  Description of Artificial Sequence: Synthetic oligonucleotide
  Antisense strand to SEQ ID NO: 1915898
ucuaugcaaacccucuccu

SEQ ID NO: 1915900 - RNA, 19 nt, Artificial Sequence
  Description of Artificial Sequence: Synthetic oligonucleotide
  Sense strand starting at position 2666 of SEQ ID NO: 1879554
cuaucucuuggguauguuu

SEQ ID NO: 1915901 - RNA, 19 nt, Artificial Sequence
  Description of Artificial Sequence: Synthetic oligonucleotide
  Antisense strand to SEQ ID NO: 1915900
aaacauacccaagagauag

SEQ ID NO: 1915902 - RNA, 19 nt, Artificial Sequence
  Description of Artificial Sequence: Synthetic oligonucleotide
  Sense strand starting at position 2668 of SEQ ID NO: 1879554
aucucuuggguauguuuaa

SEQ ID NO: 1915903 - RNA, 19 nt, Artificial Sequence
  Description of Artificial Sequence: Synthetic oligonucleotide
  Antisense strand to SEQ ID NO: 1915902
uuaaacauacccaagagau

SEQ ID NO: 1915904 - RNA, 19 nt, Artificial Sequence
  Description of Artificial Sequence: Synthetic oligonucleotide
  Sense strand starting at position 2669 of SEQ ID NO: 1879554
ucucuuggguauguuuaau

SEQ ID NO: 1915905 - RNA, 19 nt, Artificial Sequence
  Description of Artificial Sequence: Synthetic oligonucleotide
  Antisense strand to SEQ ID NO: 1915904
auuaaacauacccaagaga

SEQ ID NO: 1915906 - RNA, 19 nt, Artificial Sequence
  Description of Artificial Sequence: Synthetic oligonucleotide
  Sense strand starting at position 3220 of SEQ ID NO: 1879554
ugaggaucaugcuccuaga

SEQ ID NO: 1915907 - RNA, 19 nt, Artificial Sequence
  Description of Artificial Sequence: Synthetic oligonucleotide
  Antisense strand to SEQ ID NO: 1915906
ucuaggagcaugauccuca

SEQ ID NO: 1915908 - RNA, 19 nt, Artificial Sequence
  Description of Artificial Sequence: Synthetic oligonucleotide
  Sense strand starting at position 3640 of SEQ ID NO: 1879554
ggauguucuuaaucauauc

SEQ ID NO: 1915909 - RNA, 19 nt, Artificial Sequence
  Description of Artificial Sequence: Synthetic oligonucleotide
  Antisense strand to SEQ ID NO: 1915908
gauaugauuaagaacaucc

SEQ ID NO: 1915910 - RNA, 19 nt, Artificial Sequence
  Description of Artificial Sequence: Synthetic oligonucleotide
  Sense strand starting at position 3701 of SEQ ID NO: 1879554
uuucuuuagugaucccuuu

SEQ ID NO: 1915911 - RNA, 19 nt, Artificial Sequence
  Description of Artificial Sequence: Synthetic oligonucleotide
  Antisense strand to SEQ ID NO: 1915910
aaagggaucacuaaagaaa

SEQ ID NO: 1915912 - RNA, 19 nt, Artificial Sequence
  Description of Artificial Sequence: Synthetic oligonucleotide
  Sense strand starting at position 3800 of SEQ ID NO: 1879554
acuguaaaccgucauugau

SEQ ID NO: 1915913 - RNA, 19 nt, Artificial Sequence
  Description of Artificial Sequence: Synthetic oligonucleotide
  Antisense strand to SEQ ID NO: 1915912
aucaaugacgguuuacagu

SEQ ID NO: 1915914 - RNA, 19 nt, Artificial Sequence
  Description of Artificial Sequence: Synthetic oligonucleotide
  Sense strand starting at position 3802 of SEQ ID NO: 1879554
uguaaaccgucauugauau

SEQ ID NO: 1915915 - RNA, 19 nt, Artificial Sequence
  Description of Artificial Sequence: Synthetic oligonucleotide
  Antisense strand to SEQ ID NO: 1915914
auaucaaugacgguuuaca

SEQ ID NO: 1915916 - RNA, 19 nt, Artificial Sequence
  Description of Artificial Sequence: Synthetic oligonucleotide
  Sense strand starting at position 3803 of SEQ ID NO: 1879554
guaaaccgucauugauaug

SEQ ID NO: 1915917 - RNA, 19 nt, Artificial Sequence
  Description of Artificial Sequence: Synthetic oligonucleotide
  Antisense strand to SEQ ID NO: 1915916
cauaucaaugacgguuuac

SEQ ID NO: 1915918 - RNA, 19 nt, Artificial Sequence
  Description of Artificial Sequence: Synthetic oligonucleotide
  Sense strand starting at position 3809 of SEQ ID NO: 1879554
cgucauugauauguaugua

SEQ ID NO: 1915919 - RNA, 19 nt, Artificial Sequence
  Description of Artificial Sequence: Synthetic oligonucleotide
  Antisense strand to SEQ ID NO: 1915918
uacauacauaucaaugacg

SEQ ID NO: 1915920 - RNA, 19 nt, Artificial Sequence
  Description of Artificial Sequence: Synthetic oligonucleotide
  Sense strand starting at position 3810 of SEQ ID NO: 1879554
gucauugauauguauguaa

SEQ ID NO: 1915921 - RNA, 19 nt, Artificial Sequence
  Description of Artificial Sequence: Synthetic oligonucleotide
  Antisense strand to SEQ ID NO: 1915920
uuacauacauaucaaugac

SEQ ID NO: 1915922 - RNA, 19 nt, Artificial Sequence
  Description of Artificial Sequence: Synthetic oligonucleotide
  Sense strand starting at position 236 of SEQ ID NO: 1879555
gcuccuuuccuuguuuagu

SEQ ID NO: 1915923 - RNA, 19 nt, Artificial Sequence
  Description of Artificial Sequence: Synthetic oligonucleotide
  Antisense strand to SEQ ID NO: 1915922
acuaaacaaggaaaggagc

SEQ ID NO: 1915924 - RNA, 19 nt, Artificial Sequence
  Description of Artificial Sequence: Synthetic oligonucleotide
  Sense strand starting at position 351 of SEQ ID NO: 1879555
gaucuuaguuuggcuggau

SEQ ID NO: 1915925 - RNA, 19 nt, Artificial Sequence
  Description of Artificial Sequence: Synthetic oligonucleotide
  Antisense strand to SEQ ID NO: 1915924
auccagccaaacuaagauc

SEQ ID NO: 1915926 - RNA, 19 nt, Artificial Sequence
  Description of Artificial Sequence: Synthetic oligonucleotide
  Sense strand starting at position 1939 of SEQ ID NO: 1879555
cuaggagaguccuaugcuc

SEQ ID NO: 1915927 - RNA, 19 nt, Artificial Sequence
  Description of Artificial Sequence: Synthetic oligonucleotide
  Antisense strand to SEQ ID NO: 1915926
gagcauaggacucuccuag

SEQ ID NO: 1915928 - RNA, 19 nt, Artificial Sequence
  Description of Artificial Sequence: Synthetic oligonucleotide
  Sense strand starting at position 1941 of SEQ ID NO: 1879555
aggagaguccuaugcucac

SEQ ID NO: 1915929 - RNA, 19 nt, Artificial Sequence
  Description of Artificial Sequence: Synthetic oligonucleotide
  Antisense strand to SEQ ID NO: 1915928
gugagcauaggacucuccu

SEQ ID NO: 1915930 - RNA, 19 nt, Artificial Sequence
  Description of Artificial Sequence: Synthetic oligonucleotide
  Sense strand starting at position 2480 of SEQ ID NO: 1879555
cagcuugguuuguuccaua

SEQ ID NO: 1915931 - RNA, 19 nt, Artificial Sequence
  Description of Artificial Sequence: Synthetic oligonucleotide
  Antisense strand to SEQ ID NO: 1915930
uauggaacaaaccaagcug

SEQ ID NO: 1915932 - RNA, 19 nt, Artificial Sequence
  Description of Artificial Sequence: Synthetic oligonucleotide
  Sense strand starting at position 2485 of SEQ ID NO: 1879555
ugguuuguuccauauggau

SEQ ID NO: 1915933 - RNA, 19 nt, Artificial Sequence
  Description of Artificial Sequence: Synthetic oligonucleotide
  Antisense strand to SEQ ID NO: 1915932
auccauauggaacaaacca

SEQ ID NO: 1915934 - RNA, 19 nt, Artificial Sequence
  Description of Artificial Sequence: Synthetic oligonucleotide
  Sense strand starting at position 2487 of SEQ ID NO: 1879555
guuuguuccauauggauga

SEQ ID NO: 1915935 - RNA, 19 nt, Artificial Sequence
  Description of Artificial Sequence: Synthetic oligonucleotide
  Antisense strand to SEQ ID NO: 1915934
ucauccauauggaacaaac

SEQ ID NO: 1915936 - RNA, 19 nt, Artificial Sequence
  Description of Artificial Sequence: Synthetic oligonucleotide
  Sense strand starting at position 2544 of SEQ ID NO: 1879555
ucaucugaucuacgauauu

SEQ ID NO: 1915937 - RNA, 19 nt, Artificial Sequence
  Description of Artificial Sequence: Synthetic oligonucleotide
  Antisense strand to SEQ ID NO: 1915936
aauaucguagaucagauga

SEQ ID NO: 1915938 - RNA, 19 nt, Artificial Sequence
  Description of Artificial Sequence: Synthetic oligonucleotide
  Sense strand starting at position 2547 of SEQ ID NO: 1879555
ucugaucuacgauauuguu

SEQ ID NO: 1915939 - RNA, 19 nt, Artificial Sequence
  Description of Artificial Sequence: Synthetic oligonucleotide
  Antisense strand to SEQ ID NO: 1915938
aacaauaucguagaucaga

SEQ ID NO: 1915940 - RNA, 19 nt, Artificial Sequence
  Description of Artificial Sequence: Synthetic oligonucleotide
  Sense strand starting at position 2568 of SEQ ID NO: 1879555
uaauauguauugcgucuau

SEQ ID NO: 1915941 - RNA, 19 nt, Artificial Sequence
  Description of Artificial Sequence: Synthetic oligonucleotide
  Antisense strand to SEQ ID NO: 1915940
auagacgcaauacauauua

SEQ ID NO: 1915942 - RNA, 19 nt, Artificial Sequence
  Description of Artificial Sequence: Synthetic oligonucleotide
  Sense strand starting at position 2580 of SEQ ID NO: 1879555
cgucuauucccaggcucuu

SEQ ID NO: 1915943 - RNA, 19 nt, Artificial Sequence
  Description of Artificial Sequence: Synthetic oligonucleotide
  Antisense strand to SEQ ID NO: 1915942
aagagccugggaauagacg

SEQ ID NO: 1915944 - RNA, 19 nt, Artificial Sequence
  Description of Artificial Sequence: Synthetic oligonucleotide
  Sense strand starting at position 2589 of SEQ ID NO: 1879555
ccaggcucuuuguugugau

SEQ ID NO: 1915945 - RNA, 19 nt, Artificial Sequence
  Description of Artificial Sequence: Synthetic oligonucleotide
  Antisense strand to SEQ ID NO: 1915944
aucacaacaaagagccugg

SEQ ID NO: 1915946 - RNA, 19 nt, Artificial Sequence
  Description of Artificial Sequence: Synthetic oligonucleotide
  Sense strand starting at position 2592 of SEQ ID NO: 1879555
ggcucuuuguugugaucca

SEQ ID NO: 1915947 - RNA, 19 nt, Artificial Sequence
  Description of Artificial Sequence: Synthetic oligonucleotide
  Antisense strand to SEQ ID NO: 1915946
uggaucacaacaaagagcc

SEQ ID NO: 1915948 - RNA, 19 nt, Artificial Sequence
  Description of Artificial Sequence: Synthetic oligonucleotide
  Sense strand starting at position 2593 of SEQ ID NO: 1879555
gcucuuuguugugauccau

SEQ ID NO: 1915949 - RNA, 19 nt, Artificial Sequence
  Description of Artificial Sequence: Synthetic oligonucleotide
  Antisense strand to SEQ ID NO: 1915948
auggaucacaacaaagagc

SEQ ID NO: 1915950 - RNA, 19 nt, Artificial Sequence
  Description of Artificial Sequence: Synthetic oligonucleotide
  Sense strand starting at position 2601 of SEQ ID NO: 1879555
uugugauccaucggucuag

SEQ ID NO: 1915951 - RNA, 19 nt, Artificial Sequence
  Description of Artificial Sequence: Synthetic oligonucleotide
  Antisense strand to SEQ ID NO: 1915950
cuagaccgauggaucacaa

SEQ ID NO: 1915952 - RNA, 19 nt, Artificial Sequence
  Description of Artificial Sequence: Synthetic oligonucleotide
  Sense strand starting at position 2605 of SEQ ID NO: 1879555
gauccaucggucuagcuau

SEQ ID NO: 1915953 - RNA, 19 nt, Artificial Sequence
  Description of Artificial Sequence: Synthetic oligonucleotide
  Antisense strand to SEQ ID NO: 1915952
auagcuagaccgauggauc

SEQ ID NO: 1915954 - RNA, 19 nt, Artificial Sequence
  Description of Artificial Sequence: Synthetic oligonucleotide
  Sense strand starting at position 2611 of SEQ ID NO: 1879555
ucggucuagcuauacaaau

SEQ ID NO: 1915955 - RNA, 19 nt, Artificial Sequence
  Description of Artificial Sequence: Synthetic oligonucleotide
  Antisense strand to SEQ ID NO: 1915954
auuuguauagcuagaccga

SEQ ID NO: 1915956 - RNA, 19 nt, Artificial Sequence
  Description of Artificial Sequence: Synthetic oligonucleotide
  Sense strand starting at position 2786 of SEQ ID NO: 1879555
agacacuuccaauggguuu

SEQ ID NO: 1915957 - RNA, 19 nt, Artificial Sequence
  Description of Artificial Sequence: Synthetic oligonucleotide
  Antisense strand to SEQ ID NO: 1915956
aaacccauuggaagugucu

SEQ ID NO: 1915958 - RNA, 19 nt, Artificial Sequence
  Description of Artificial Sequence: Synthetic oligonucleotide
  Sense strand starting at position 2834 of SEQ ID NO: 1879555
aucuucgaucuaugucuau

SEQ ID NO: 1915959 - RNA, 19 nt, Artificial Sequence
  Description of Artificial Sequence: Synthetic oligonucleotide
  Antisense strand to SEQ ID NO: 1915958
auagacauagaucgaagau

SEQ ID NO: 1915960 - RNA, 19 nt, Artificial Sequence
  Description of Artificial Sequence: Synthetic oligonucleotide
  Sense strand starting at position 2837 of SEQ ID NO: 1879555
uucgaucuaugucuaugau

SEQ ID NO: 1915961 - RNA, 19 nt, Artificial Sequence
  Description of Artificial Sequence: Synthetic oligonucleotide
  Antisense strand to SEQ ID NO: 1915960
aucauagacauagaucgaa

SEQ ID NO: 1915962 - RNA, 19 nt, Artificial Sequence
  Description of Artificial Sequence: Synthetic oligonucleotide
  Sense strand starting at position 2838 of SEQ ID NO: 1879555
ucgaucuaugucuaugaua

SEQ ID NO: 1915963 - RNA, 19 nt, Artificial Sequence
  Description of Artificial Sequence: Synthetic oligonucleotide
  Antisense strand to SEQ ID NO: 1915962
uaucauagacauagaucga

SEQ ID NO: 1915964 - RNA, 19 nt, Artificial Sequence
  Description of Artificial Sequence: Synthetic oligonucleotide
  Sense strand starting at position 2840 of SEQ ID NO: 1879555
gaucuaugucuaugauaga

SEQ ID NO: 1915965 - RNA, 19 nt, Artificial Sequence
  Description of Artificial Sequence: Synthetic oligonucleotide
  Antisense strand to SEQ ID NO: 1915964
ucuaucauagacauagauc

SEQ ID NO: 1915966 - RNA, 19 nt, Artificial Sequence
  Description of Artificial Sequence: Synthetic oligonucleotide
  Sense strand starting at position 2841 of SEQ ID NO: 1879555
aucuaugucuaugauagau

SEQ ID NO: 1915967 - RNA, 19 nt, Artificial Sequence
  Description of Artificial Sequence: Synthetic oligonucleotide
  Antisense strand to SEQ ID NO: 1915966
aucuaucauagacauagau

SEQ ID NO: 1915968 - RNA, 19 nt, Artificial Sequence
  Description of Artificial Sequence: Synthetic oligonucleotide
  Sense strand starting at position 2843 of SEQ ID NO: 1879555
cuaugucuaugauagauuu

SEQ ID NO: 1915969 - RNA, 19 nt, Artificial Sequence
  Description of Artificial Sequence: Synthetic oligonucleotide
  Antisense strand to SEQ ID NO: 1915968
aaaucuaucauagacauag

SEQ ID NO: 1915970 - RNA, 19 nt, Artificial Sequence
  Description of Artificial Sequence: Synthetic oligonucleotide
  Sense strand starting at position 2948 of SEQ ID NO: 1879555
auagguaucugauauuuga

SEQ ID NO: 1915971 - RNA, 19 nt, Artificial Sequence
  Description of Artificial Sequence: Synthetic oligonucleotide
  Antisense strand to SEQ ID NO: 1915970
ucaaauaucagauaccuau

SEQ ID NO: 1915972 - RNA, 19 nt, Artificial Sequence
  Description of Artificial Sequence: Synthetic oligonucleotide
  Sense strand starting at position 3004 of SEQ ID NO: 1879555
cuaauuguuuacuguuagu

SEQ ID NO: 1915973 - RNA, 19 nt, Artificial Sequence
  Description of Artificial Sequence: Synthetic oligonucleotide
  Antisense strand to SEQ ID NO: 1915972
acuaacaguaaacaauuag

SEQ ID NO: 1915974 - RNA, 19 nt, Artificial Sequence
  Description of Artificial Sequence: Synthetic oligonucleotide
  Sense strand starting at position 3047 of SEQ ID NO: 1879555
aguauugacuuuguaucaa

SEQ ID NO: 1915975 - RNA, 19 nt, Artificial Sequence
  Description of Artificial Sequence: Synthetic oligonucleotide
  Antisense strand to SEQ ID NO: 1915974
uugauacaaagucaauacu

SEQ ID NO: 1915976 - RNA, 19 nt, Artificial Sequence
  Description of Artificial Sequence: Synthetic oligonucleotide
  Sense strand starting at position 3124 of SEQ ID NO: 1879555
uuugguuguauaugugaug

SEQ ID NO: 1915977 - RNA, 19 nt, Artificial Sequence
  Description of Artificial Sequence: Synthetic oligonucleotide
  Antisense strand to SEQ ID NO: 1915976
caucacauauacaaccaaa

SEQ ID NO: 1915978 - RNA, 19 nt, Artificial Sequence
  Description of Artificial Sequence: Synthetic oligonucleotide
  Sense strand starting at position 3127 of SEQ ID NO: 1879555
gguuguauaugugauguuu

SEQ ID NO: 1915979 - RNA, 19 nt, Artificial Sequence
  Description of Artificial Sequence: Synthetic oligonucleotide
  Antisense strand to SEQ ID NO: 1915978
aaacaucacauauacaacc

SEQ ID NO: 1915980 - RNA, 19 nt, Artificial Sequence
  Description of Artificial Sequence: Synthetic oligonucleotide
  Sense strand starting at position 3178 of SEQ ID NO: 1879555
caggguaauuaagauauac

SEQ ID NO: 1915981 - RNA, 19 nt, Artificial Sequence
  Description of Artificial Sequence: Synthetic oligonucleotide
  Antisense strand to SEQ ID NO: 1915980
guauaucuuaauuacccug

SEQ ID NO: 1915982 - RNA, 19 nt, Artificial Sequence
  Description of Artificial Sequence: Synthetic oligonucleotide
  Sense strand starting at position 3265 of SEQ ID NO: 1879555
gauggauagaugugcaagu

SEQ ID NO: 1915983 - RNA, 19 nt, Artificial Sequence
  Description of Artificial Sequence: Synthetic oligonucleotide
  Antisense strand to SEQ ID NO: 1915982
acuugcacaucuauccauc

SEQ ID NO: 1915984 - RNA, 19 nt, Artificial Sequence
  Description of Artificial Sequence: Synthetic oligonucleotide
  Sense strand starting at position 3266 of SEQ ID NO: 1879555
auggauagaugugcaaguu

SEQ ID NO: 1915985 - RNA, 19 nt, Artificial Sequence
  Description of Artificial Sequence: Synthetic oligonucleotide
  Antisense strand to SEQ ID NO: 1915984
aacuugcacaucuauccau

SEQ ID NO: 1915986 - RNA, 19 nt, Artificial Sequence
  Description of Artificial Sequence: Synthetic oligonucleotide
  Sense strand starting at position 3267 of SEQ ID NO: 1879555
uggauagaugugcaaguuu

SEQ ID NO: 1915987 - RNA, 19 nt, Artificial Sequence
  Description of Artificial Sequence: Synthetic oligonucleotide
  Antisense strand to SEQ ID NO: 1915986
aaacuugcacaucuaucca

SEQ ID NO: 1915988 - RNA, 19 nt, Artificial Sequence
  Description of Artificial Sequence: Synthetic oligonucleotide
  Sense strand starting at position 3310 of SEQ ID NO: 1879555
gaggguuugcugcacagau

SEQ ID NO: 1915989 - RNA, 19 nt, Artificial Sequence
  Description of Artificial Sequence: Synthetic oligonucleotide
  Antisense strand to SEQ ID NO: 1915988
aucugugcagcaaacccuc

SEQ ID NO: 1915990 - RNA, 19 nt, Artificial Sequence
  Description of Artificial Sequence: Synthetic oligonucleotide
  Sense strand starting at position 3312 of SEQ ID NO: 1879555
ggguuugcugcacagauua

SEQ ID NO: 1915991 - RNA, 19 nt, Artificial Sequence
  Description of Artificial Sequence: Synthetic oligonucleotide
  Antisense strand to SEQ ID NO: 1915990
uaaucugugcagcaaaccc

SEQ ID NO: 1915992 - RNA, 19 nt, Artificial Sequence
  Description of Artificial Sequence: Synthetic oligonucleotide
  Sense strand starting at position 3437 of SEQ ID NO: 1879555
gugugaccauguguuauca

SEQ ID NO: 1915993 - RNA, 19 nt, Artificial Sequence
  Description of Artificial Sequence: Synthetic oligonucleotide
  Antisense strand to SEQ ID NO: 1915992
ugauaacacauggucacac

SEQ ID NO: 1915994 - RNA, 19 nt, Artificial Sequence
  Description of Artificial Sequence: Synthetic oligonucleotide
  Sense strand starting at position 3439 of SEQ ID NO: 1879555
gugaccauguguuaucauu

SEQ ID NO: 1915995 - RNA, 19 nt, Artificial Sequence
  Description of Artificial Sequence: Synthetic oligonucleotide
  Antisense strand to SEQ ID NO: 1915994
aaugauaacacauggucac

SEQ ID NO: 1915996 - RNA, 19 nt, Artificial Sequence
  Description of Artificial Sequence: Synthetic oligonucleotide
  Sense strand starting at position 3507 of SEQ ID NO: 1879555
acuuuaguuugcuaaggaa

SEQ ID NO: 1915997 - RNA, 19 nt, Artificial Sequence
  Description of Artificial Sequence: Synthetic oligonucleotide
  Antisense strand to SEQ ID NO: 1915996
uuccuuagcaaacuaaagu

SEQ ID NO: 1915998 - RNA, 19 nt, Artificial Sequence
  Description of Artificial Sequence: Synthetic oligonucleotide
  Sense strand starting at position 3778 of SEQ ID NO: 1879555
acauuucugucuuuagguu

SEQ ID NO: 1915999 - RNA, 19 nt, Artificial Sequence
  Description of Artificial Sequence: Synthetic oligonucleotide
  Antisense strand to SEQ ID NO: 1915998
aaccuaaagacagaaaugu

SEQ ID NO: 1916000 - RNA, 19 nt, Artificial Sequence
  Description of Artificial Sequence: Synthetic oligonucleotide
  Sense strand starting at position 66 of SEQ ID NO: 1879556
gauggaagccuuuggaaac

SEQ ID NO: 1916001 - RNA, 19 nt, Artificial Sequence
  Description of Artificial Sequence: Synthetic oligonucleotide
  Antisense strand to SEQ ID NO: 1916000
guuuccaaaggcuuccauc

SEQ ID NO: 1916002 - RNA, 19 nt, Artificial Sequence
  Description of Artificial Sequence: Synthetic oligonucleotide
  Sense strand starting at position 98 of SEQ ID NO: 1879556
aagagagaagcuuguuuau

SEQ ID NO: 1916003 - RNA, 19 nt, Artificial Sequence
  Description of Artificial Sequence: Synthetic oligonucleotide
  Antisense strand to SEQ ID NO: 1916002
auaaacaagcuucucucuu

SEQ ID NO: 1916004 - RNA, 19 nt, Artificial Sequence
  Description of Artificial Sequence: Synthetic oligonucleotide
  Sense strand starting at position 272 of SEQ ID NO: 1879556
ccuuuccucuagguauaga

SEQ ID NO: 1916005 - RNA, 19 nt, Artificial Sequence
  Description of Artificial Sequence: Synthetic oligonucleotide
  Antisense strand to SEQ ID NO: 1916004
ucuauaccuagaggaaagg

SEQ ID NO: 1916006 - RNA, 19 nt, Artificial Sequence
  Description of Artificial Sequence: Synthetic oligonucleotide
  Sense strand starting at position 845 of SEQ ID NO: 1879556
acugauugucucuagugac

SEQ ID NO: 1916007 - RNA, 19 nt, Artificial Sequence
  Description of Artificial Sequence: Synthetic oligonucleotide
  Antisense strand to SEQ ID NO: 1916006
gucacuagagacaaucagu

SEQ ID NO: 1916008 - RNA, 19 nt, Artificial Sequence
  Description of Artificial Sequence: Synthetic oligonucleotide
  Sense strand starting at position 1018 of SEQ ID NO: 1879556
ccaguacuccuagagacuc

SEQ ID NO: 1916009 - RNA, 19 nt, Artificial Sequence
  Description of Artificial Sequence: Synthetic oligonucleotide
  Antisense strand to SEQ ID NO: 1916008
gagucucuaggaguacugg

SEQ ID NO: 1916010 - RNA, 19 nt, Artificial Sequence
  Description of Artificial Sequence: Synthetic oligonucleotide
  Sense strand starting at position 1031 of SEQ ID NO: 1879556
agacucuaacauugugaga

SEQ ID NO: 1916011 - RNA, 19 nt, Artificial Sequence
  Description of Artificial Sequence: Synthetic oligonucleotide
  Antisense strand to SEQ ID NO: 1916010
ucucacaauguuagagucu

SEQ ID NO: 1916012 - RNA, 19 nt, Artificial Sequence
  Description of Artificial Sequence: Synthetic oligonucleotide
  Sense strand starting at position 1344 of SEQ ID NO: 1879556
gggucuuuccugucugugu

SEQ ID NO: 1916013 - RNA, 19 nt, Artificial Sequence
  Description of Artificial Sequence: Synthetic oligonucleotide
  Antisense strand to SEQ ID NO: 1916012
acacagacaggaaagaccc

SEQ ID NO: 1916014 - RNA, 19 nt, Artificial Sequence
  Description of Artificial Sequence: Synthetic oligonucleotide
  Sense strand starting at position 1364 of SEQ ID NO: 1879556
cucagugacucacccgaaa

SEQ ID NO: 1916015 - RNA, 19 nt, Artificial Sequence
  Description of Artificial Sequence: Synthetic oligonucleotide
  Antisense strand to SEQ ID NO: 1916014
uuucgggugagucacugag

SEQ ID NO: 1916016 - RNA, 19 nt, Artificial Sequence
  Description of Artificial Sequence: Synthetic oligonucleotide
  Sense strand starting at position 1384 of SEQ ID NO: 1879556
agauaauaacagugagguu

SEQ ID NO: 1916017 - RNA, 19 nt, Artificial Sequence
  Description of Artificial Sequence: Synthetic oligonucleotide
  Antisense strand to SEQ ID NO: 1916016
aaccucacuguuauuaucu

SEQ ID NO: 1916018 - RNA, 19 nt, Artificial Sequence
  Description of Artificial Sequence: Synthetic oligonucleotide
  Sense strand starting at position 1504 of SEQ ID NO: 1879556
gacacacuugagugguauc

SEQ ID NO: 1916019 - RNA, 19 nt, Artificial Sequence
  Description of Artificial Sequence: Synthetic oligonucleotide
  Antisense strand to SEQ ID NO: 1916018
gauaccacucaaguguguc

SEQ ID NO: 1916020 - RNA, 19 nt, Artificial Sequence
  Description of Artificial Sequence: Synthetic oligonucleotide
  Sense strand starting at position 1525 of SEQ ID NO: 1879556
cuuccuaucucucugggau

SEQ ID NO: 1916021 - RNA, 19 nt, Artificial Sequence
  Description of Artificial Sequence: Synthetic oligonucleotide
  Antisense strand to SEQ ID NO: 1916020
aucccagagagauaggaag

SEQ ID NO: 1916022 - RNA, 19 nt, Artificial Sequence
  Description of Artificial Sequence: Synthetic oligonucleotide
  Sense strand starting at position 1526 of SEQ ID NO: 1879556
uuccuaucucucugggaua

SEQ ID NO: 1916023 - RNA, 19 nt, Artificial Sequence
  Description of Artificial Sequence: Synthetic oligonucleotide
  Antisense strand to SEQ ID NO: 1916022
uaucccagagagauaggaa

SEQ ID NO: 1916024 - RNA, 19 nt, Artificial Sequence
  Description of Artificial Sequence: Synthetic oligonucleotide
  Sense strand starting at position 1528 of SEQ ID NO: 1879556
ccuaucucucugggauacu

SEQ ID NO: 1916025 - RNA, 19 nt, Artificial Sequence
  Description of Artificial Sequence: Synthetic oligonucleotide
  Antisense strand to SEQ ID NO: 1916024
aguaucccagagagauagg

SEQ ID NO: 1916026 - RNA, 19 nt, Artificial Sequence
  Description of Artificial Sequence: Synthetic oligonucleotide
  Sense strand starting at position 1538 of SEQ ID NO: 1879556
ugggauacuuggucaaggu

SEQ ID NO: 1916027 - RNA, 19 nt, Artificial Sequence
  Description of Artificial Sequence: Synthetic oligonucleotide
  Antisense strand to SEQ ID NO: 1916026
accuugaccaaguauccca

SEQ ID NO: 1916028 - RNA, 19 nt, Artificial Sequence
  Description of Artificial Sequence: Synthetic oligonucleotide
  Sense strand starting at position 1539 of SEQ ID NO: 1879556
gggauacuuggucaagguu

SEQ ID NO: 1916029 - RNA, 19 nt, Artificial Sequence
  Description of Artificial Sequence: Synthetic oligonucleotide
  Antisense strand to SEQ ID NO: 1916028
aaccuugaccaaguauccc

SEQ ID NO: 1916030 - RNA, 19 nt, Artificial Sequence
  Description of Artificial Sequence: Synthetic oligonucleotide
  Sense strand starting at position 1572 of SEQ ID NO: 1879556
augaccuucccuuguaaag

SEQ ID NO: 1916031 - RNA, 19 nt, Artificial Sequence
  Description of Artificial Sequence: Synthetic oligonucleotide
  Antisense strand to SEQ ID NO: 1916030
cuuuacaagggaaggucau

SEQ ID NO: 1916032 - RNA, 19 nt, Artificial Sequence
  Description of Artificial Sequence: Synthetic oligonucleotide
  Sense strand starting at position 1870 of SEQ ID NO: 1879556
cguguaucuuaaguauuug

SEQ ID NO: 1916033 - RNA, 19 nt, Artificial Sequence
  Description of Artificial Sequence: Synthetic oligonucleotide
  Antisense strand to SEQ ID NO: 1916032
caaauacuuaagauacacg

SEQ ID NO: 1916034 - RNA, 19 nt, Artificial Sequence
  Description of Artificial Sequence: Synthetic oligonucleotide
  Sense strand starting at position 1912 of SEQ ID NO: 1879556
guaacaugucagcauauga

SEQ ID NO: 1916035 - RNA, 19 nt, Artificial Sequence
  Description of Artificial Sequence: Synthetic oligonucleotide
  Antisense strand to SEQ ID NO: 1916034
ucauaugcugacauguuac

SEQ ID NO: 1916036 - RNA, 19 nt, Artificial Sequence
  Description of Artificial Sequence: Synthetic oligonucleotide
  Sense strand starting at position 1930 of SEQ ID NO: 1879556
acuuaaaggcuuggugaca

SEQ ID NO: 1916037 - RNA, 19 nt, Artificial Sequence
  Description of Artificial Sequence: Synthetic oligonucleotide
  Antisense strand to SEQ ID NO: 1916036
ugucaccaagccuuuaagu

SEQ ID NO: 1916038 - RNA, 19 nt, Artificial Sequence
  Description of Artificial Sequence: Synthetic oligonucleotide
  Sense strand starting at position 2059 of SEQ ID NO: 1879556
guugaaagccugcaggaua

SEQ ID NO: 1916039 - RNA, 19 nt, Artificial Sequence
  Description of Artificial Sequence: Synthetic oligonucleotide
  Antisense strand to SEQ ID NO: 1916038
uauccugcaggcuuucaac

SEQ ID NO: 1916040 - RNA, 19 nt, Artificial Sequence
  Description of Artificial Sequence: Synthetic oligonucleotide
  Sense strand starting at position 2102 of SEQ ID NO: 1879556
ugggauaguccagaggucu

SEQ ID NO: 1916041 - RNA, 19 nt, Artificial Sequence
  Description of Artificial Sequence: Synthetic oligonucleotide
  Antisense strand to SEQ ID NO: 1916040
agaccucuggacuauccca

SEQ ID NO: 1916042 - RNA, 19 nt, Artificial Sequence
  Description of Artificial Sequence: Synthetic oligonucleotide
  Sense strand starting at position 2287 of SEQ ID NO: 1879556
ggcagugaucugagugcug

SEQ ID NO: 1916043 - RNA, 19 nt, Artificial Sequence
  Description of Artificial Sequence: Synthetic oligonucleotide
  Antisense strand to SEQ ID NO: 1916042
cagcacucagaucacugcc

SEQ ID NO: 1916044 - RNA, 19 nt, Artificial Sequence
  Description of Artificial Sequence: Synthetic oligonucleotide
  Sense strand starting at position 2608 of SEQ ID NO: 1879556
aggagauaauauguguaau

SEQ ID NO: 1916045 - RNA, 19 nt, Artificial Sequence
  Description of Artificial Sequence: Synthetic oligonucleotide
  Antisense strand to SEQ ID NO: 1916044
auuacacauauuaucuccu

SEQ ID NO: 1916046 - RNA, 19 nt, Artificial Sequence
  Description of Artificial Sequence: Synthetic oligonucleotide
  Sense strand starting at position 2609 of SEQ ID NO: 1879556
ggagauaauauguguaauu

SEQ ID NO: 1916047 - RNA, 19 nt, Artificial Sequence
  Description of Artificial Sequence: Synthetic oligonucleotide
  Antisense strand to SEQ ID NO: 1916046
aauuacacauauuaucucc

SEQ ID NO: 1916048 - RNA, 19 nt, Artificial Sequence
  Description of Artificial Sequence: Synthetic oligonucleotide
  Sense strand starting at position 2610 of SEQ ID NO: 1879556
gagauaauauguguaauug

SEQ ID NO: 1916049 - RNA, 19 nt, Artificial Sequence
  Description of Artificial Sequence: Synthetic oligonucleotide
  Antisense strand to SEQ ID NO: 1916048
caauuacacauauuaucuc

SEQ ID NO: 1916050 - RNA, 19 nt, Artificial Sequence
  Description of Artificial Sequence: Synthetic oligonucleotide
  Sense strand starting at position 2619 of SEQ ID NO: 1879556
uguguaauugccuaggaga

SEQ ID NO: 1916051 - RNA, 19 nt, Artificial Sequence
  Description of Artificial Sequence: Synthetic oligonucleotide
  Antisense strand to SEQ ID NO: 1916050
ucuccuaggcaauuacaca

SEQ ID NO: 1916052 - RNA, 19 nt, Artificial Sequence
  Description of Artificial Sequence: Synthetic oligonucleotide
  Sense strand starting at position 2693 of SEQ ID NO: 1879556
cuagcugagaagugaauga

SEQ ID NO: 1916053 - RNA, 19 nt, Artificial Sequence
  Description of Artificial Sequence: Synthetic oligonucleotide
  Antisense strand to SEQ ID NO: 1916052
ucauucacuucucagcuag

SEQ ID NO: 1916054 - RNA, 19 nt, Artificial Sequence
  Description of Artificial Sequence: Synthetic oligonucleotide
  Sense strand starting at position 2697 of SEQ ID NO: 1879556
cugagaagugaaugagcaa

SEQ ID NO: 1916055 - RNA, 19 nt, Artificial Sequence
  Description of Artificial Sequence: Synthetic oligonucleotide
  Antisense strand to SEQ ID NO: 1916054
uugcucauucacuucucag

SEQ ID NO: 1916056 - RNA, 19 nt, Artificial Sequence
  Description of Artificial Sequence: Synthetic oligonucleotide
  Sense strand starting at position 2754 of SEQ ID NO: 1879556
cccaaaguucuguguauuu

SEQ ID NO: 1916057 - RNA, 19 nt, Artificial Sequence
  Description of Artificial Sequence: Synthetic oligonucleotide
  Antisense strand to SEQ ID NO: 1916056
aaauacacagaacuuuggg

SEQ ID NO: 1916058 - RNA, 19 nt, Artificial Sequence
  Description of Artificial Sequence: Synthetic oligonucleotide
  Sense strand starting at position 2759 of SEQ ID NO: 1879556
aguucuguguauuucucaa

SEQ ID NO: 1916059 - RNA, 19 nt, Artificial Sequence
  Description of Artificial Sequence: Synthetic oligonucleotide
  Antisense strand to SEQ ID NO: 1916058
uugagaaauacacagaacu

SEQ ID NO: 1916060 - RNA, 19 nt, Artificial Sequence
  Description of Artificial Sequence: Synthetic oligonucleotide
  Sense strand starting at position 2969 of SEQ ID NO: 1879556
gcugcaagucaugaacaca

SEQ ID NO: 1916061 - RNA, 19 nt, Artificial Sequence
  Description of Artificial Sequence: Synthetic oligonucleotide
  Antisense strand to SEQ ID NO: 1916060
uguguucaugacuugcagc

SEQ ID NO: 1916062 - RNA, 19 nt, Artificial Sequence
  Description of Artificial Sequence: Synthetic oligonucleotide
  Sense strand starting at position 3057 of SEQ ID NO: 1879556
uuguguuaacugcagaaac

SEQ ID NO: 1916063 - RNA, 19 nt, Artificial Sequence
  Description of Artificial Sequence: Synthetic oligonucleotide
  Antisense strand to SEQ ID NO: 1916062
guuucugcaguuaacacaa

SEQ ID NO: 1916064 - RNA, 19 nt, Artificial Sequence
  Description of Artificial Sequence: Synthetic oligonucleotide
  Sense strand starting at position 3220 of SEQ ID NO: 1879556
agcauaguaagugaguaaa

SEQ ID NO: 1916065 - RNA, 19 nt, Artificial Sequence
  Description of Artificial Sequence: Synthetic oligonucleotide
  Antisense strand to SEQ ID NO: 1916064
uuuacucacuuacuaugcu

SEQ ID NO: 1916066 - RNA, 19 nt, Artificial Sequence
  Description of Artificial Sequence: Synthetic oligonucleotide
  Sense strand starting at position 3423 of SEQ ID NO: 1879556
gaguguuccaggcagaaag

SEQ ID NO: 1916067 - RNA, 19 nt, Artificial Sequence
  Description of Artificial Sequence: Synthetic oligonucleotide
  Antisense strand to SEQ ID NO: 1916066
cuuucugccuggaacacuc

SEQ ID NO: 1916068 - RNA, 19 nt, Artificial Sequence
  Description of Artificial Sequence: Synthetic oligonucleotide
  Sense strand starting at position 3539 of SEQ ID NO: 1879556
auugauuaugaugguggau

SEQ ID NO: 1916069 - RNA, 19 nt, Artificial Sequence
  Description of Artificial Sequence: Synthetic oligonucleotide
  Antisense strand to SEQ ID NO: 1916068
auccaccaucauaaucaau

SEQ ID NO: 1916070 - RNA, 19 nt, Artificial Sequence
  Description of Artificial Sequence: Synthetic oligonucleotide
  Sense strand starting at position 3612 of SEQ ID NO: 1879556
aggcccuuccacugauaca

SEQ ID NO: 1916071 - RNA, 19 nt, Artificial Sequence
  Description of Artificial Sequence: Synthetic oligonucleotide
  Antisense strand to SEQ ID NO: 1916070
uguaucaguggaagggccu

SEQ ID NO: 1916072 - RNA, 19 nt, Artificial Sequence
  Description of Artificial Sequence: Synthetic oligonucleotide
  Sense strand starting at position 3651 of SEQ ID NO: 1879556
gggccaguacauugaauga

SEQ ID NO: 1916073 - RNA, 19 nt, Artificial Sequence
  Description of Artificial Sequence: Synthetic oligonucleotide
  Antisense strand to SEQ ID NO: 1916072
ucauucaauguacuggccc

SEQ ID NO: 1916074 - RNA, 19 nt, Artificial Sequence
  Description of Artificial Sequence: Synthetic oligonucleotide
  Sense strand starting at position 3774 of SEQ ID NO: 1879556
augucugacucugcagaaa

SEQ ID NO: 1916075 - RNA, 19 nt, Artificial Sequence
  Description of Artificial Sequence: Synthetic oligonucleotide
  Antisense strand to SEQ ID NO: 1916074
uuucugcagagucagacau

SEQ ID NO: 1916076 - RNA, 19 nt, Artificial Sequence
  Description of Artificial Sequence: Synthetic oligonucleotide
  Sense strand starting at position 3787 of SEQ ID NO: 1879556
cagaaaugacuugguggua

SEQ ID NO: 1916077 - RNA, 19 nt, Artificial Sequence
  Description of Artificial Sequence: Synthetic oligonucleotide
  Antisense strand to SEQ ID NO: 1916076
uaccaccaagucauuucug

SEQ ID NO: 1916078 - RNA, 19 nt, Artificial Sequence
  Description of Artificial Sequence: Synthetic oligonucleotide
  Sense strand starting at position 3788 of SEQ ID NO: 1879556
agaaaugacuuggugguau

SEQ ID NO: 1916079 - RNA, 19 nt, Artificial Sequence
  Description of Artificial Sequence: Synthetic oligonucleotide
  Antisense strand to SEQ ID NO: 1916078
auaccaccaagucauuucu

SEQ ID NO: 1916080 - RNA, 19 nt, Artificial Sequence
  Description of Artificial Sequence: Synthetic oligonucleotide
  Sense strand starting at position 190 of SEQ ID NO: 1879557
cagcuacaagagugacaaa

SEQ ID NO: 1916081 - RNA, 19 nt, Artificial Sequence
  Description of Artificial Sequence: Synthetic oligonucleotide
  Antisense strand to SEQ ID NO: 1916080
uuugucacucuuguagcug

SEQ ID NO: 1916082 - RNA, 19 nt, Artificial Sequence
  Description of Artificial Sequence: Synthetic oligonucleotide
  Sense strand starting at position 231 of SEQ ID NO: 1879557
ggugauagacgguaugguu

SEQ ID NO: 1916083 - RNA, 19 nt, Artificial Sequence
  Description of Artificial Sequence: Synthetic oligonucleotide
  Antisense strand to SEQ ID NO: 1916082
aaccauaccgucuaucacc

SEQ ID NO: 1916084 - RNA, 19 nt, Artificial Sequence
  Description of Artificial Sequence: Synthetic oligonucleotide
  Sense strand starting at position 314 of SEQ ID NO: 1879557
gguuaaucuguugaugaca

SEQ ID NO: 1916085 - RNA, 19 nt, Artificial Sequence
  Description of Artificial Sequence: Synthetic oligonucleotide
  Antisense strand to SEQ ID NO: 1916084
ugucaucaacagauuaacc

SEQ ID NO: 1916086 - RNA, 19 nt, Artificial Sequence
  Description of Artificial Sequence: Synthetic oligonucleotide
  Sense strand starting at position 421 of SEQ ID NO: 1879557
aaccuuggauguguugaau

SEQ ID NO: 1916087 - RNA, 19 nt, Artificial Sequence
  Description of Artificial Sequence: Synthetic oligonucleotide
  Antisense strand to SEQ ID NO: 1916086
auucaacacauccaagguu

SEQ ID NO: 1916088 - RNA, 19 nt, Artificial Sequence
  Description of Artificial Sequence: Synthetic oligonucleotide
  Sense strand starting at position 424 of SEQ ID NO: 1879557
cuuggauguguugaauaug

SEQ ID NO: 1916089 - RNA, 19 nt, Artificial Sequence
  Description of Artificial Sequence: Synthetic oligonucleotide
  Antisense strand to SEQ ID NO: 1916088
cauauucaacacauccaag

SEQ ID NO: 1916090 - RNA, 19 nt, Artificial Sequence
  Description of Artificial Sequence: Synthetic oligonucleotide
  Sense strand starting at position 427 of SEQ ID NO: 1879557
ggauguguugaauaugcuu

SEQ ID NO: 1916091 - RNA, 19 nt, Artificial Sequence
  Description of Artificial Sequence: Synthetic oligonucleotide
  Antisense strand to SEQ ID NO: 1916090
aagcauauucaacacaucc

SEQ ID NO: 1916092 - RNA, 19 nt, Artificial Sequence
  Description of Artificial Sequence: Synthetic oligonucleotide
  Sense strand starting at position 447 of SEQ ID NO: 1879557
cggguuaucuaggugaaga

SEQ ID NO: 1916093 - RNA, 19 nt, Artificial Sequence
  Description of Artificial Sequence: Synthetic oligonucleotide
  Antisense strand to SEQ ID NO: 1916092
ucuucaccuagauaacccg

SEQ ID NO: 1916094 - RNA, 19 nt, Artificial Sequence
  Description of Artificial Sequence: Synthetic oligonucleotide
  Sense strand starting at position 448 of SEQ ID NO: 1879557
ggguuaucuaggugaagau

SEQ ID NO: 1916095 - RNA, 19 nt, Artificial Sequence
  Description of Artificial Sequence: Synthetic oligonucleotide
  Antisense strand to SEQ ID NO: 1916094
aucuucaccuagauaaccc

SEQ ID NO: 1916096 - RNA, 19 nt, Artificial Sequence
  Description of Artificial Sequence: Synthetic oligonucleotide
  Sense strand starting at position 449 of SEQ ID NO: 1879557
gguuaucuaggugaagauu

SEQ ID NO: 1916097 - RNA, 19 nt, Artificial Sequence
  Description of Artificial Sequence: Synthetic oligonucleotide
  Antisense strand to SEQ ID NO: 1916096
aaucuucaccuagauaacc

SEQ ID NO: 1916098 - RNA, 19 nt, Artificial Sequence
  Description of Artificial Sequence: Synthetic oligonucleotide
  Sense strand starting at position 508 of SEQ ID NO: 1879557
uggauaggaggcugaaauu

SEQ ID NO: 1916099 - RNA, 19 nt, Artificial Sequence
  Description of Artificial Sequence: Synthetic oligonucleotide
  Antisense strand to SEQ ID NO: 1916098
aauuucagccuccuaucca

SEQ ID NO: 1916100 - RNA, 19 nt, Artificial Sequence
  Description of Artificial Sequence: Synthetic oligonucleotide
  Sense strand starting at position 665 of SEQ ID NO: 1879557
gucuaaugauguuuaggau

SEQ ID NO: 1916101 - RNA, 19 nt, Artificial Sequence
  Description of Artificial Sequence: Synthetic oligonucleotide
  Antisense strand to SEQ ID NO: 1916100
auccuaaacaucauuagac

SEQ ID NO: 1916102 - RNA, 19 nt, Artificial Sequence
  Description of Artificial Sequence: Synthetic oligonucleotide
  Sense strand starting at position 1078 of SEQ ID NO: 1879557
ggaauagaucaacguaaug

SEQ ID NO: 1916103 - RNA, 19 nt, Artificial Sequence
  Description of Artificial Sequence: Synthetic oligonucleotide
  Antisense strand to SEQ ID NO: 1916102
cauuacguugaucuauucc

SEQ ID NO: 1916104 - RNA, 19 nt, Artificial Sequence
  Description of Artificial Sequence: Synthetic oligonucleotide
  Sense strand starting at position 1289 of SEQ ID NO: 1879557
ugaggucaccuugggaaga

SEQ ID NO: 1916105 - RNA, 19 nt, Artificial Sequence
  Description of Artificial Sequence: Synthetic oligonucleotide
  Antisense strand to SEQ ID NO: 1916104
ucuucccaaggugaccuca

SEQ ID NO: 1916106 - RNA, 19 nt, Artificial Sequence
  Description of Artificial Sequence: Synthetic oligonucleotide
  Sense strand starting at position 1388 of SEQ ID NO: 1879557
acuugagaggucugaaauc

SEQ ID NO: 1916107 - RNA, 19 nt, Artificial Sequence
  Description of Artificial Sequence: Synthetic oligonucleotide
  Antisense strand to SEQ ID NO: 1916106
gauuucagaccucucaagu

SEQ ID NO: 1916108 - RNA, 19 nt, Artificial Sequence
  Description of Artificial Sequence: Synthetic oligonucleotide
  Sense strand starting at position 1400 of SEQ ID NO: 1879557
ugaaaucccugagcacuau

SEQ ID NO: 1916109 - RNA, 19 nt, Artificial Sequence
  Description of Artificial Sequence: Synthetic oligonucleotide
  Antisense strand to SEQ ID NO: 1916108
auagugcucagggauuuca

SEQ ID NO: 1916110 - RNA, 19 nt, Artificial Sequence
  Description of Artificial Sequence: Synthetic oligonucleotide
  Sense strand starting at position 1595 of SEQ ID NO: 1879557
gaagacaccuaguugaacu

SEQ ID NO: 1916111 - RNA, 19 nt, Artificial Sequence
  Description of Artificial Sequence: Synthetic oligonucleotide
  Antisense strand to SEQ ID NO: 1916110
aguucaacuaggugucuuc

SEQ ID NO: 1916112 - RNA, 19 nt, Artificial Sequence
  Description of Artificial Sequence: Synthetic oligonucleotide
  Sense strand starting at position 2303 of SEQ ID NO: 1879557
gguugucaucguguucauc

SEQ ID NO: 1916113 - RNA, 19 nt, Artificial Sequence
  Description of Artificial Sequence: Synthetic oligonucleotide
  Antisense strand to SEQ ID NO: 1916112
gaugaacacgaugacaacc

SEQ ID NO: 1916114 - RNA, 19 nt, Artificial Sequence
  Description of Artificial Sequence: Synthetic oligonucleotide
  Sense strand starting at position 2304 of SEQ ID NO: 1879557
guugucaucguguucauca

SEQ ID NO: 1916115 - RNA, 19 nt, Artificial Sequence
  Description of Artificial Sequence: Synthetic oligonucleotide
  Antisense strand to SEQ ID NO: 1916114
ugaugaacacgaugacaac

SEQ ID NO: 1916116 - RNA, 19 nt, Artificial Sequence
  Description of Artificial Sequence: Synthetic oligonucleotide
  Sense strand starting at position 2388 of SEQ ID NO: 1879557
ucuccucaaguuugaaaug

SEQ ID NO: 1916117 - RNA, 19 nt, Artificial Sequence
  Description of Artificial Sequence: Synthetic oligonucleotide
  Antisense strand to SEQ ID NO: 1916116
cauuucaaacuugaggaga

SEQ ID NO: 1916118 - RNA, 19 nt, Artificial Sequence
  Description of Artificial Sequence: Synthetic oligonucleotide
  Sense strand starting at position 2632 of SEQ ID NO: 1879557
guuuaaacccuuugaaacg

SEQ ID NO: 1916119 - RNA, 19 nt, Artificial Sequence
  Description of Artificial Sequence: Synthetic oligonucleotide
  Antisense strand to SEQ ID NO: 1916118
cguuucaaaggguuuaaac

SEQ ID NO: 1916120 - RNA, 19 nt, Artificial Sequence
  Description of Artificial Sequence: Synthetic oligonucleotide
  Sense strand starting at position 2762 of SEQ ID NO: 1879557
ggcuuucuccaguaaauag

SEQ ID NO: 1916121 - RNA, 19 nt, Artificial Sequence
  Description of Artificial Sequence: Synthetic oligonucleotide
  Antisense strand to SEQ ID NO: 1916120
cuauuuacuggagaaagcc

SEQ ID NO: 1916122 - RNA, 19 nt, Artificial Sequence
  Description of Artificial Sequence: Synthetic oligonucleotide
  Sense strand starting at position 2886 of SEQ ID NO: 1879557
cuuaaugaguugguuauau

SEQ ID NO: 1916123 - RNA, 19 nt, Artificial Sequence
  Description of Artificial Sequence: Synthetic oligonucleotide
  Antisense strand to SEQ ID NO: 1916122
auauaaccaacucauuaag

SEQ ID NO: 1916124 - RNA, 19 nt, Artificial Sequence
  Description of Artificial Sequence: Synthetic oligonucleotide
  Sense strand starting at position 2971 of SEQ ID NO: 1879557
uuuguauccuauccagaga

SEQ ID NO: 1916125 - RNA, 19 nt, Artificial Sequence
  Description of Artificial Sequence: Synthetic oligonucleotide
  Antisense strand to SEQ ID NO: 1916124
ucucuggauaggauacaaa

SEQ ID NO: 1916126 - RNA, 19 nt, Artificial Sequence
  Description of Artificial Sequence: Synthetic oligonucleotide
  Sense strand starting at position 3089 of SEQ ID NO: 1879557
acacuuacaugaguauaca

SEQ ID NO: 1916127 - RNA, 19 nt, Artificial Sequence
  Description of Artificial Sequence: Synthetic oligonucleotide
  Antisense strand to SEQ ID NO: 1916126
uguauacucauguaagugu

SEQ ID NO: 1916128 - RNA, 19 nt, Artificial Sequence
  Description of Artificial Sequence: Synthetic oligonucleotide
  Sense strand starting at position 3205 of SEQ ID NO: 1879557
gucaaacucuaaguagaau

SEQ ID NO: 1916129 - RNA, 19 nt, Artificial Sequence
  Description of Artificial Sequence: Synthetic oligonucleotide
  Antisense strand to SEQ ID NO: 1916128
auucuacuuagaguuugac

SEQ ID NO: 1916130 - RNA, 19 nt, Artificial Sequence
  Description of Artificial Sequence: Synthetic oligonucleotide
  Sense strand starting at position 3211 of SEQ ID NO: 1879557
cucuaaguagaauguaaau

SEQ ID NO: 1916131 - RNA, 19 nt, Artificial Sequence
  Description of Artificial Sequence: Synthetic oligonucleotide
  Antisense strand to SEQ ID NO: 1916130
auuuacauucuacuuagag

SEQ ID NO: 1916132 - RNA, 19 nt, Artificial Sequence
  Description of Artificial Sequence: Synthetic oligonucleotide
  Sense strand starting at position 3264 of SEQ ID NO: 1879557
gcagauuuauugucauguc

SEQ ID NO: 1916133 - RNA, 19 nt, Artificial Sequence
  Description of Artificial Sequence: Synthetic oligonucleotide
  Antisense strand to SEQ ID NO: 1916132
gacaugacaauaaaucugc

SEQ ID NO: 1916134 - RNA, 19 nt, Artificial Sequence
  Description of Artificial Sequence: Synthetic oligonucleotide
  Sense strand starting at position 3314 of SEQ ID NO: 1879557
ggccucagauuacuuuaaa

SEQ ID NO: 1916135 - RNA, 19 nt, Artificial Sequence
  Description of Artificial Sequence: Synthetic oligonucleotide
  Antisense strand to SEQ ID NO: 1916134
uuuaaaguaaucugaggcc

SEQ ID NO: 1916136 - RNA, 19 nt, Artificial Sequence
  Description of Artificial Sequence: Synthetic oligonucleotide
  Sense strand starting at position 3360 of SEQ ID NO: 1879557
acuugaauuggccaugcau

SEQ ID NO: 1916137 - RNA, 19 nt, Artificial Sequence
  Description of Artificial Sequence: Synthetic oligonucleotide
  Antisense strand to SEQ ID NO: 1916136
augcauggccaauucaagu

SEQ ID NO: 1916138 - RNA, 19 nt, Artificial Sequence
  Description of Artificial Sequence: Synthetic oligonucleotide
  Sense strand starting at position 3362 of SEQ ID NO: 1879557
uugaauuggccaugcauuu

SEQ ID NO: 1916139 - RNA, 19 nt, Artificial Sequence
  Description of Artificial Sequence: Synthetic oligonucleotide
  Antisense strand to SEQ ID NO: 1916138
aaaugcauggccaauucaa

SEQ ID NO: 1916140 - RNA, 19 nt, Artificial Sequence
  Description of Artificial Sequence: Synthetic oligonucleotide
  Sense strand starting at position 3392 of SEQ ID NO: 1879557
guguguaaagaccaacuuu

SEQ ID NO: 1916141 - RNA, 19 nt, Artificial Sequence
  Description of Artificial Sequence: Synthetic oligonucleotide
  Antisense strand to SEQ ID NO: 1916140
aaaguuggucuuuacacac

SEQ ID NO: 1916142 - RNA, 19 nt, Artificial Sequence
  Description of Artificial Sequence: Synthetic oligonucleotide
  Sense strand starting at position 3643 of SEQ ID NO: 1879557
guuccuggacucuagugau

SEQ ID NO: 1916143 - RNA, 19 nt, Artificial Sequence
  Description of Artificial Sequence: Synthetic oligonucleotide
  Antisense strand to SEQ ID NO: 1916142
aucacuagaguccaggaac

SEQ ID NO: 1916144 - RNA, 19 nt, Artificial Sequence
  Description of Artificial Sequence: Synthetic oligonucleotide
  Sense strand starting at position 3688 of SEQ ID NO: 1879557
ugggauuguauaggcacaa

SEQ ID NO: 1916145 - RNA, 19 nt, Artificial Sequence
  Description of Artificial Sequence: Synthetic oligonucleotide
  Antisense strand to SEQ ID NO: 1916144
uugugccuauacaauccca

SEQ ID NO: 1916146 - RNA, 19 nt, Artificial Sequence
  Description of Artificial Sequence: Synthetic oligonucleotide
  Sense strand starting at position 3789 of SEQ ID NO: 1879557
auaucuaagcucgaaauga

SEQ ID NO: 1916147 - RNA, 19 nt, Artificial Sequence
  Description of Artificial Sequence: Synthetic oligonucleotide
  Antisense strand to SEQ ID NO: 1916146
ucauuucgagcuuagauau

SEQ ID NO: 1916148 - RNA, 19 nt, Artificial Sequence
  Description of Artificial Sequence: Synthetic oligonucleotide
  Sense strand starting at position 3797 of SEQ ID NO: 1879557
gcucgaaaugauggaaaug

SEQ ID NO: 1916149 - RNA, 19 nt, Artificial Sequence
  Description of Artificial Sequence: Synthetic oligonucleotide
  Antisense strand to SEQ ID NO: 1916148
cauuuccaucauuucgagc

SEQ ID NO: 1916150 - RNA, 19 nt, Artificial Sequence
  Description of Artificial Sequence: Synthetic oligonucleotide
  Sense strand starting at position 3819 of SEQ ID NO: 1879557
gucucuaaucagugauuaa

SEQ ID NO: 1916151 - RNA, 19 nt, Artificial Sequence
  Description of Artificial Sequence: Synthetic oligonucleotide
  Antisense strand to SEQ ID NO: 1916150
uuaaucacugauuagagac

SEQ ID NO: 1916152 - RNA, 19 nt, Artificial Sequence
  Description of Artificial Sequence: Synthetic oligonucleotide
  Sense strand starting at position 3822 of SEQ ID NO: 1879557
ucuaaucagugauuaagga

SEQ ID NO: 1916153 - RNA, 19 nt, Artificial Sequence
  Description of Artificial Sequence: Synthetic oligonucleotide
  Antisense strand to SEQ ID NO: 1916152
uccuuaaucacugauuaga

SEQ ID NO: 1916154 - RNA, 19 nt, Artificial Sequence
  Description of Artificial Sequence: Synthetic oligonucleotide
  Sense strand starting at position 3963 of SEQ ID NO: 1879557
auguuaaugugaccuugga

SEQ ID NO: 1916155 - RNA, 19 nt, Artificial Sequence
  Description of Artificial Sequence: Synthetic oligonucleotide
  Antisense strand to SEQ ID NO: 1916154
uccaaggucacauuaacau

SEQ ID NO: 1916156 - RNA, 19 nt, Artificial Sequence
  Description of Artificial Sequence: Synthetic oligonucleotide
  Sense strand starting at position 3967 of SEQ ID NO: 1879557
uaaugugaccuuggacaag

SEQ ID NO: 1916157 - RNA, 19 nt, Artificial Sequence
  Description of Artificial Sequence: Synthetic oligonucleotide
  Antisense strand to SEQ ID NO: 1916156
cuuguccaaggucacauua

SEQ ID NO: 1916158 - RNA, 19 nt, Artificial Sequence
  Description of Artificial Sequence: Synthetic oligonucleotide
  Sense strand starting at position 3979 of SEQ ID NO: 1879557
ggacaaguccuuuaacuuu

SEQ ID NO: 1916159 - RNA, 19 nt, Artificial Sequence
  Description of Artificial Sequence: Synthetic oligonucleotide
  Antisense strand to SEQ ID NO: 1916158
aaaguuaaaggacuugucc

SEQ ID NO: 1916160 - RNA, 19 nt, Artificial Sequence
  Description of Artificial Sequence: Synthetic oligonucleotide
  Sense strand starting at position 32 of SEQ ID NO: 1879558
uucugcuaagauggauauu

SEQ ID NO: 1916161 - RNA, 19 nt, Artificial Sequence
  Description of Artificial Sequence: Synthetic oligonucleotide
  Antisense strand to SEQ ID NO: 1916160
aauauccaucuuagcagaa

SEQ ID NO: 1916162 - RNA, 19 nt, Artificial Sequence
  Description of Artificial Sequence: Synthetic oligonucleotide
  Sense strand starting at position 127 of SEQ ID NO: 1879558
gaagaauguuauguuaaca

SEQ ID NO: 1916163 - RNA, 19 nt, Artificial Sequence
  Description of Artificial Sequence: Synthetic oligonucleotide
  Antisense strand to SEQ ID NO: 1916162
uguuaacauaacauucuuc

SEQ ID NO: 1916164 - RNA, 19 nt, Artificial Sequence
  Description of Artificial Sequence: Synthetic oligonucleotide
  Sense strand starting at position 273 of SEQ ID NO: 1879558
aaauguuccugggauuuaa

SEQ ID NO: 1916165 - RNA, 19 nt, Artificial Sequence
  Description of Artificial Sequence: Synthetic oligonucleotide
  Antisense strand to SEQ ID NO: 1916164
uuaaaucccaggaacauuu

SEQ ID NO: 1916166 - RNA, 19 nt, Artificial Sequence
  Description of Artificial Sequence: Synthetic oligonucleotide
  Sense strand starting at position 299 of SEQ ID NO: 1879558
gaggacugcuucccuaaug

SEQ ID NO: 1916167 - RNA, 19 nt, Artificial Sequence
  Description of Artificial Sequence: Synthetic oligonucleotide
  Antisense strand to SEQ ID NO: 1916166
cauuagggaagcaguccuc

SEQ ID NO: 1916168 - RNA, 19 nt, Artificial Sequence
  Description of Artificial Sequence: Synthetic oligonucleotide
  Sense strand starting at position 384 of SEQ ID NO: 1879558
gcacuuagauccuugaaua

SEQ ID NO: 1916169 - RNA, 19 nt, Artificial Sequence
  Description of Artificial Sequence: Synthetic oligonucleotide
  Antisense strand to SEQ ID NO: 1916168
uauucaaggaucuaagugc

SEQ ID NO: 1916170 - RNA, 19 nt, Artificial Sequence
  Description of Artificial Sequence: Synthetic oligonucleotide
  Sense strand starting at position 461 of SEQ ID NO: 1879558
guguucccuuugucauuua

SEQ ID NO: 1916171 - RNA, 19 nt, Artificial Sequence
  Description of Artificial Sequence: Synthetic oligonucleotide
  Antisense strand to SEQ ID NO: 1916170
uaaaugacaaagggaacac

SEQ ID NO: 1916172 - RNA, 19 nt, Artificial Sequence
  Description of Artificial Sequence: Synthetic oligonucleotide
  Sense strand starting at position 816 of SEQ ID NO: 1879558
ucuggaauguuauugaucu

SEQ ID NO: 1916173 - RNA, 19 nt, Artificial Sequence
  Description of Artificial Sequence: Synthetic oligonucleotide
  Antisense strand to SEQ ID NO: 1916172
agaucaauaacauuccaga

SEQ ID NO: 1916174 - RNA, 19 nt, Artificial Sequence
  Description of Artificial Sequence: Synthetic oligonucleotide
  Sense strand starting at position 823 of SEQ ID NO: 1879558
uguuauugaucuuucuaga

SEQ ID NO: 1916175 - RNA, 19 nt, Artificial Sequence
  Description of Artificial Sequence: Synthetic oligonucleotide
  Antisense strand to SEQ ID NO: 1916174
ucuagaaagaucaauaaca

SEQ ID NO: 1916176 - RNA, 19 nt, Artificial Sequence
  Description of Artificial Sequence: Synthetic oligonucleotide
  Sense strand starting at position 852 of SEQ ID NO: 1879558
cucagaacagcagauguua

SEQ ID NO: 1916177 - RNA, 19 nt, Artificial Sequence
  Description of Artificial Sequence: Synthetic oligonucleotide
  Antisense strand to SEQ ID NO: 1916176
uaacaucugcuguucugag

SEQ ID NO: 1916178 - RNA, 19 nt, Artificial Sequence
  Description of Artificial Sequence: Synthetic oligonucleotide
  Sense strand starting at position 930 of SEQ ID NO: 1879558
auuaaaccacagugucaua

SEQ ID NO: 1916179 - RNA, 19 nt, Artificial Sequence
  Description of Artificial Sequence: Synthetic oligonucleotide
  Antisense strand to SEQ ID NO: 1916178
uaugacacugugguuuaau

SEQ ID NO: 1916180 - RNA, 19 nt, Artificial Sequence
  Description of Artificial Sequence: Synthetic oligonucleotide
  Sense strand starting at position 1098 of SEQ ID NO: 1879558
cgucuuugcaaugcaguaa

SEQ ID NO: 1916181 - RNA, 19 nt, Artificial Sequence
  Description of Artificial Sequence: Synthetic oligonucleotide
  Antisense strand to SEQ ID NO: 1916180
uuacugcauugcaaagacg

SEQ ID NO: 1916182 - RNA, 19 nt, Artificial Sequence
  Description of Artificial Sequence: Synthetic oligonucleotide
  Sense strand starting at position 1240 of SEQ ID NO: 1879558
uugacuaacugaucgaaau

SEQ ID NO: 1916183 - RNA, 19 nt, Artificial Sequence
  Description of Artificial Sequence: Synthetic oligonucleotide
  Antisense strand to SEQ ID NO: 1916182
auuucgaucaguuagucaa

SEQ ID NO: 1916184 - RNA, 19 nt, Artificial Sequence
  Description of Artificial Sequence: Synthetic oligonucleotide
  Sense strand starting at position 1241 of SEQ ID NO: 1879558
ugacuaacugaucgaaauu

SEQ ID NO: 1916185 - RNA, 19 nt, Artificial Sequence
  Description of Artificial Sequence: Synthetic oligonucleotide
  Antisense strand to SEQ ID NO: 1916184
aauuucgaucaguuaguca

SEQ ID NO: 1916186 - RNA, 19 nt, Artificial Sequence
  Description of Artificial Sequence: Synthetic oligonucleotide
  Sense strand starting at position 1261 of SEQ ID NO: 1879558
ugaaauaguguggagcauu

SEQ ID NO: 1916187 - RNA, 19 nt, Artificial Sequence
  Description of Artificial Sequence: Synthetic oligonucleotide
  Antisense strand to SEQ ID NO: 1916186
aaugcuccacacuauuuca

SEQ ID NO: 1916188 - RNA, 19 nt, Artificial Sequence
  Description of Artificial Sequence: Synthetic oligonucleotide
  Sense strand starting at position 1336 of SEQ ID NO: 1879558
uaaauaugguucuuaugag

SEQ ID NO: 1916189 - RNA, 19 nt, Artificial Sequence
  Description of Artificial Sequence: Synthetic oligonucleotide
  Antisense strand to SEQ ID NO: 1916188
cucauaagaaccauauuua

SEQ ID NO: 1916190 - RNA, 19 nt, Artificial Sequence
  Description of Artificial Sequence: Synthetic oligonucleotide
  Sense strand starting at position 1415 of SEQ ID NO: 1879558
acuugaguuuacccagaua

SEQ ID NO: 1916191 - RNA, 19 nt, Artificial Sequence
  Description of Artificial Sequence: Synthetic oligonucleotide
  Antisense strand to SEQ ID NO: 1916190
uaucuggguaaacucaagu

SEQ ID NO: 1916192 - RNA, 19 nt, Artificial Sequence
  Description of Artificial Sequence: Synthetic oligonucleotide
  Sense strand starting at position 1436 of SEQ ID NO: 1879558
cuugguaaaccaggauaca

SEQ ID NO: 1916193 - RNA, 19 nt, Artificial Sequence
  Description of Artificial Sequence: Synthetic oligonucleotide
  Antisense strand to SEQ ID NO: 1916192
uguauccugguuuaccaag

SEQ ID NO: 1916194 - RNA, 19 nt, Artificial Sequence
  Description of Artificial Sequence: Synthetic oligonucleotide
  Sense strand starting at position 1795 of SEQ ID NO: 1879558
cuauaugucuucuugaaug

SEQ ID NO: 1916195 - RNA, 19 nt, Artificial Sequence
  Description of Artificial Sequence: Synthetic oligonucleotide
  Antisense strand to SEQ ID NO: 1916194
cauucaagaagacauauag

SEQ ID NO: 1916196 - RNA, 19 nt, Artificial Sequence
  Description of Artificial Sequence: Synthetic oligonucleotide
  Sense strand starting at position 1996 of SEQ ID NO: 1879558
ucauguuaacuuggaaaua

SEQ ID NO: 1916197 - RNA, 19 nt, Artificial Sequence
  Description of Artificial Sequence: Synthetic oligonucleotide
  Antisense strand to SEQ ID NO: 1916196
uauuuccaaguuaacauga

SEQ ID NO: 1916198 - RNA, 19 nt, Artificial Sequence
  Description of Artificial Sequence: Synthetic oligonucleotide
  Sense strand starting at position 2137 of SEQ ID NO: 1879558
gcaaauggcuguuuauuuc

SEQ ID NO: 1916199 - RNA, 19 nt, Artificial Sequence
  Description of Artificial Sequence: Synthetic oligonucleotide
  Antisense strand to SEQ ID NO: 1916198
gaaauaaacagccauuugc

SEQ ID NO: 1916200 - RNA, 19 nt, Artificial Sequence
  Description of Artificial Sequence: Synthetic oligonucleotide
  Sense strand starting at position 2339 of SEQ ID NO: 1879558
ggcauuuauugccuaccuu

SEQ ID NO: 1916201 - RNA, 19 nt, Artificial Sequence
  Description of Artificial Sequence: Synthetic oligonucleotide
  Antisense strand to SEQ ID NO: 1916200
aagguaggcaauaaaugcc

SEQ ID NO: 1916202 - RNA, 19 nt, Artificial Sequence
  Description of Artificial Sequence: Synthetic oligonucleotide
  Sense strand starting at position 2959 of SEQ ID NO: 1879558
ccaggaacuucuuuagauu

SEQ ID NO: 1916203 - RNA, 19 nt, Artificial Sequence
  Description of Artificial Sequence: Synthetic oligonucleotide
  Antisense strand to SEQ ID NO: 1916202
aaucuaaagaaguuccugg

SEQ ID NO: 1916204 - RNA, 19 nt, Artificial Sequence
  Description of Artificial Sequence: Synthetic oligonucleotide
  Sense strand starting at position 3002 of SEQ ID NO: 1879558
ucuguuacccuugaaagua

SEQ ID NO: 1916205 - RNA, 19 nt, Artificial Sequence
  Description of Artificial Sequence: Synthetic oligonucleotide
  Antisense strand to SEQ ID NO: 1916204
uacuuucaaggguaacaga

SEQ ID NO: 1916206 - RNA, 19 nt, Artificial Sequence
  Description of Artificial Sequence: Synthetic oligonucleotide
  Sense strand starting at position 3174 of SEQ ID NO: 1879558
auuggaaaugggugaaguu

SEQ ID NO: 1916207 - RNA, 19 nt, Artificial Sequence
  Description of Artificial Sequence: Synthetic oligonucleotide
  Antisense strand to SEQ ID NO: 1916206
aacuucacccauuuccaau

SEQ ID NO: 1916208 - RNA, 19 nt, Artificial Sequence
  Description of Artificial Sequence: Synthetic oligonucleotide
  Sense strand starting at position 3210 of SEQ ID NO: 1879558
ucuacuauuggagagcuuu

SEQ ID NO: 1916209 - RNA, 19 nt, Artificial Sequence
  Description of Artificial Sequence: Synthetic oligonucleotide
  Antisense strand to SEQ ID NO: 1916208
aaagcucuccaauaguaga

SEQ ID NO: 1916210 - RNA, 19 nt, Artificial Sequence
  Description of Artificial Sequence: Synthetic oligonucleotide
  Sense strand starting at position 3216 of SEQ ID NO: 1879558
auuggagagcuuuaguagu

SEQ ID NO: 1916211 - RNA, 19 nt, Artificial Sequence
  Description of Artificial Sequence: Synthetic oligonucleotide
  Antisense strand to SEQ ID NO: 1916210
acuacuaaagcucuccaau

SEQ ID NO: 1916212 - RNA, 19 nt, Artificial Sequence
  Description of Artificial Sequence: Synthetic oligonucleotide
  Sense strand starting at position 3232 of SEQ ID NO: 1879558
agugccaagcuuuaaauaa

SEQ ID NO: 1916213 - RNA, 19 nt, Artificial Sequence
  Description of Artificial Sequence: Synthetic oligonucleotide
  Antisense strand to SEQ ID NO: 1916212
uuauuuaaagcuuggcacu

SEQ ID NO: 1916214 - RNA, 19 nt, Artificial Sequence
  Description of Artificial Sequence: Synthetic oligonucleotide
  Sense strand starting at position 3300 of SEQ ID NO: 1879558
auuagauuaccauguucua

SEQ ID NO: 1916215 - RNA, 19 nt, Artificial Sequence
  Description of Artificial Sequence: Synthetic oligonucleotide
  Antisense strand to SEQ ID NO: 1916214
uagaacaugguaaucuaau

SEQ ID NO: 1916216 - RNA, 19 nt, Artificial Sequence
  Description of Artificial Sequence: Synthetic oligonucleotide
  Sense strand starting at position 3303 of SEQ ID NO: 1879558
agauuaccauguucuacuu

SEQ ID NO: 1916217 - RNA, 19 nt, Artificial Sequence
  Description of Artificial Sequence: Synthetic oligonucleotide
  Antisense strand to SEQ ID NO: 1916216
aaguagaacaugguaaucu

SEQ ID NO: 1916218 - RNA, 19 nt, Artificial Sequence
  Description of Artificial Sequence: Synthetic oligonucleotide
  Sense strand starting at position 3411 of SEQ ID NO: 1879558
cucaguaauuguuugacaa

SEQ ID NO: 1916219 - RNA, 19 nt, Artificial Sequence
  Description of Artificial Sequence: Synthetic oligonucleotide
  Antisense strand to SEQ ID NO: 1916218
uugucaaacaauuacugag

SEQ ID NO: 1916220 - RNA, 19 nt, Artificial Sequence
  Description of Artificial Sequence: Synthetic oligonucleotide
  Sense strand starting at position 3412 of SEQ ID NO: 1879558
ucaguaauuguuugacaag

SEQ ID NO: 1916221 - RNA, 19 nt, Artificial Sequence
  Description of Artificial Sequence: Synthetic oligonucleotide
  Antisense strand to SEQ ID NO: 1916220
cuugucaaacaauuacuga

SEQ ID NO: 1916222 - RNA, 19 nt, Artificial Sequence
  Description of Artificial Sequence: Synthetic oligonucleotide
  Sense strand starting at position 3475 of SEQ ID NO: 1879558
aaggaccagugugauuuaa

SEQ ID NO: 1916223 - RNA, 19 nt, Artificial Sequence
  Description of Artificial Sequence: Synthetic oligonucleotide
  Antisense strand to SEQ ID NO: 1916222
uuaaaucacacugguccuu

SEQ ID NO: 1916224 - RNA, 19 nt, Artificial Sequence
  Description of Artificial Sequence: Synthetic oligonucleotide
  Sense strand starting at position 3534 of SEQ ID NO: 1879558
uccauuucuugggcuaguu

SEQ ID NO: 1916225 - RNA, 19 nt, Artificial Sequence
  Description of Artificial Sequence: Synthetic oligonucleotide
  Antisense strand to SEQ ID NO: 1916224
aacuagcccaagaaaugga

SEQ ID NO: 1916226 - RNA, 19 nt, Artificial Sequence
  Description of Artificial Sequence: Synthetic oligonucleotide
  Sense strand starting at position 3565 of SEQ ID NO: 1879558
ugagaaagcuaguugagaa

SEQ ID NO: 1916227 - RNA, 19 nt, Artificial Sequence
  Description of Artificial Sequence: Synthetic oligonucleotide
  Antisense strand to SEQ ID NO: 1916226
uucucaacuagcuuucuca

SEQ ID NO: 1916228 - RNA, 19 nt, Artificial Sequence
  Description of Artificial Sequence: Synthetic oligonucleotide
  Sense strand starting at position 3575 of SEQ ID NO: 1879558
aguugagaagcacaaguau

SEQ ID NO: 1916229 - RNA, 19 nt, Artificial Sequence
  Description of Artificial Sequence: Synthetic oligonucleotide
  Antisense strand to SEQ ID NO: 1916228
auacuugugcuucucaacu

SEQ ID NO: 1916230 - RNA, 19 nt, Artificial Sequence
  Description of Artificial Sequence: Synthetic oligonucleotide
  Sense strand starting at position 3589 of SEQ ID NO: 1879558
aguauuuccugacauuucu

SEQ ID NO: 1916231 - RNA, 19 nt, Artificial Sequence
  Description of Artificial Sequence: Synthetic oligonucleotide
  Antisense strand to SEQ ID NO: 1916230
agaaaugucaggaaauacu

SEQ ID NO: 1916232 - RNA, 19 nt, Artificial Sequence
  Description of Artificial Sequence: Synthetic oligonucleotide
  Sense strand starting at position 3686 of SEQ ID NO: 1879558
ggugcauauuuauccacuu

SEQ ID NO: 1916233 - RNA, 19 nt, Artificial Sequence
  Description of Artificial Sequence: Synthetic oligonucleotide
  Antisense strand to SEQ ID NO: 1916232
aaguggauaaauaugcacc

SEQ ID NO: 1916234 - RNA, 19 nt, Artificial Sequence
  Description of Artificial Sequence: Synthetic oligonucleotide
  Sense strand starting at position 3776 of SEQ ID NO: 1879558
ugacaagucacuugugaag

SEQ ID NO: 1916235 - RNA, 19 nt, Artificial Sequence
  Description of Artificial Sequence: Synthetic oligonucleotide
  Antisense strand to SEQ ID NO: 1916234
cuucacaagugacuuguca

SEQ ID NO: 1916236 - RNA, 19 nt, Artificial Sequence
  Description of Artificial Sequence: Synthetic oligonucleotide
  Sense strand starting at position 3821 of SEQ ID NO: 1879558
agcacuuaucaucagugga

SEQ ID NO: 1916237 - RNA, 19 nt, Artificial Sequence
  Description of Artificial Sequence: Synthetic oligonucleotide
  Antisense strand to SEQ ID NO: 1916236
uccacugaugauaagugcu

SEQ ID NO: 1916238 - RNA, 19 nt, Artificial Sequence
  Description of Artificial Sequence: Synthetic oligonucleotide
  Sense strand starting at position 3933 of SEQ ID NO: 1879558
gucacaaacuggucaugaa

SEQ ID NO: 1916239 - RNA, 19 nt, Artificial Sequence
  Description of Artificial Sequence: Synthetic oligonucleotide
  Antisense strand to SEQ ID NO: 1916238
uucaugaccaguuugugac

SEQ ID NO: 1916240 - RNA, 19 nt, Artificial Sequence
  Description of Artificial Sequence: Synthetic oligonucleotide
  Sense strand starting at position 40 of SEQ ID NO: 1879559
ccugcugcugugcuuuaau

SEQ ID NO: 1916241 - RNA, 19 nt, Artificial Sequence
  Description of Artificial Sequence: Synthetic oligonucleotide
  Antisense strand to SEQ ID NO: 1916240
auuaaagcacagcagcagg

SEQ ID NO: 1916242 - RNA, 19 nt, Artificial Sequence
  Description of Artificial Sequence: Synthetic oligonucleotide
  Sense strand starting at position 324 of SEQ ID NO: 1879559
aguggugaauacucuaaau

SEQ ID NO: 1916243 - RNA, 19 nt, Artificial Sequence
  Description of Artificial Sequence: Synthetic oligonucleotide
  Antisense strand to SEQ ID NO: 1916242
auuuagaguauucaccacu

SEQ ID NO: 1916244 - RNA, 19 nt, Artificial Sequence
  Description of Artificial Sequence: Synthetic oligonucleotide
  Sense strand starting at position 430 of SEQ ID NO: 1879559
augaaaucucaugguguug

SEQ ID NO: 1916245 - RNA, 19 nt, Artificial Sequence
  Description of Artificial Sequence: Synthetic oligonucleotide
  Antisense strand to SEQ ID NO: 1916244
caacaccaugagauuucau

SEQ ID NO: 1916246 - RNA, 19 nt, Artificial Sequence
  Description of Artificial Sequence: Synthetic oligonucleotide
  Sense strand starting at position 596 of SEQ ID NO: 1879559
auucuauaccucugaagug

SEQ ID NO: 1916247 - RNA, 19 nt, Artificial Sequence
  Description of Artificial Sequence: Synthetic oligonucleotide
  Antisense strand to SEQ ID NO: 1916246
cacuucagagguauagaau

SEQ ID NO: 1916248 - RNA, 19 nt, Artificial Sequence
  Description of Artificial Sequence: Synthetic oligonucleotide
  Sense strand starting at position 608 of SEQ ID NO: 1879559
ugaagugaucauuaugcca

SEQ ID NO: 1916249 - RNA, 19 nt, Artificial Sequence
  Description of Artificial Sequence: Synthetic oligonucleotide
  Antisense strand to SEQ ID NO: 1916248
uggcauaaugaucacuuca

SEQ ID NO: 1916250 - RNA, 19 nt, Artificial Sequence
  Description of Artificial Sequence: Synthetic oligonucleotide
  Sense strand starting at position 834 of SEQ ID NO: 1879559
auaugaaguugccuaaauu

SEQ ID NO: 1916251 - RNA, 19 nt, Artificial Sequence
  Description of Artificial Sequence: Synthetic oligonucleotide
  Antisense strand to SEQ ID NO: 1916250
aauuuaggcaacuucauau

SEQ ID NO: 1916252 - RNA, 19 nt, Artificial Sequence
  Description of Artificial Sequence: Synthetic oligonucleotide
  Sense strand starting at position 1130 of SEQ ID NO: 1879559
cccuuuaugcgauacuaau

SEQ ID NO: 1916253 - RNA, 19 nt, Artificial Sequence
  Description of Artificial Sequence: Synthetic oligonucleotide
  Antisense strand to SEQ ID NO: 1916252
auuaguaucgcauaaaggg

SEQ ID NO: 1916254 - RNA, 19 nt, Artificial Sequence
  Description of Artificial Sequence: Synthetic oligonucleotide
  Sense strand starting at position 1174 of SEQ ID NO: 1879559
gguugcaugaaggauguua

SEQ ID NO: 1916255 - RNA, 19 nt, Artificial Sequence
  Description of Artificial Sequence: Synthetic oligonucleotide
  Antisense strand to SEQ ID NO: 1916254
uaacauccuucaugcaacc

SEQ ID NO: 1916256 - RNA, 19 nt, Artificial Sequence
  Description of Artificial Sequence: Synthetic oligonucleotide
  Sense strand starting at position 1176 of SEQ ID NO: 1879559
uugcaugaaggauguuaaa

SEQ ID NO: 1916257 - RNA, 19 nt, Artificial Sequence
  Description of Artificial Sequence: Synthetic oligonucleotide
  Antisense strand to SEQ ID NO: 1916256
uuuaacauccuucaugcaa

SEQ ID NO: 1916258 - RNA, 19 nt, Artificial Sequence
  Description of Artificial Sequence: Synthetic oligonucleotide
  Sense strand starting at position 1255 of SEQ ID NO: 1879559
cuggauggaugccuaucaa

SEQ ID NO: 1916259 - RNA, 19 nt, Artificial Sequence
  Description of Artificial Sequence: Synthetic oligonucleotide
  Antisense strand to SEQ ID NO: 1916258
uugauaggcauccauccag

SEQ ID NO: 1916260 - RNA, 19 nt, Artificial Sequence
  Description of Artificial Sequence: Synthetic oligonucleotide
  Sense strand starting at position 1507 of SEQ ID NO: 1879559
ucgagugauagccucgcau

SEQ ID NO: 1916261 - RNA, 19 nt, Artificial Sequence
  Description of Artificial Sequence: Synthetic oligonucleotide
  Antisense strand to SEQ ID NO: 1916260
augcgaggcuaucacucga

SEQ ID NO: 1916262 - RNA, 19 nt, Artificial Sequence
  Description of Artificial Sequence: Synthetic oligonucleotide
  Sense strand starting at position 1537 of SEQ ID NO: 1879559
aguauauagugauuggagu

SEQ ID NO: 1916263 - RNA, 19 nt, Artificial Sequence
  Description of Artificial Sequence: Synthetic oligonucleotide
  Antisense strand to SEQ ID NO: 1916262
acuccaaucacuauauacu

SEQ ID NO: 1916264 - RNA, 19 nt, Artificial Sequence
  Description of Artificial Sequence: Synthetic oligonucleotide
  Sense strand starting at position 1650 of SEQ ID NO: 1879559
ggacuauuacccugaagca

SEQ ID NO: 1916265 - RNA, 19 nt, Artificial Sequence
  Description of Artificial Sequence: Synthetic oligonucleotide
  Antisense strand to SEQ ID NO: 1916264
ugcuucaggguaauagucc

SEQ ID NO: 1916266 - RNA, 19 nt, Artificial Sequence
  Description of Artificial Sequence: Synthetic oligonucleotide
  Sense strand starting at position 1834 of SEQ ID NO: 1879559
gguugucuuaaggauguaa

SEQ ID NO: 1916267 - RNA, 19 nt, Artificial Sequence
  Description of Artificial Sequence: Synthetic oligonucleotide
  Antisense strand to SEQ ID NO: 1916266
uuacauccuuaagacaacc

SEQ ID NO: 1916268 - RNA, 19 nt, Artificial Sequence
  Description of Artificial Sequence: Synthetic oligonucleotide
  Sense strand starting at position 1836 of SEQ ID NO: 1879559
uugucuuaaggauguaaua

SEQ ID NO: 1916269 - RNA, 19 nt, Artificial Sequence
  Description of Artificial Sequence: Synthetic oligonucleotide
  Antisense strand to SEQ ID NO: 1916268
uauuacauccuuaagacaa

SEQ ID NO: 1916270 - RNA, 19 nt, Artificial Sequence
  Description of Artificial Sequence: Synthetic oligonucleotide
  Sense strand starting at position 1934 of SEQ ID NO: 1879559
ggauuauccuuggcuggga

SEQ ID NO: 1916271 - RNA, 19 nt, Artificial Sequence
  Description of Artificial Sequence: Synthetic oligonucleotide
  Antisense strand to SEQ ID NO: 1916270
ucccagccaaggauaaucc

SEQ ID NO: 1916272 - RNA, 19 nt, Artificial Sequence
  Description of Artificial Sequence: Synthetic oligonucleotide
  Sense strand starting at position 2018 of SEQ ID NO: 1879559
ugucuaugacaucauugca

SEQ ID NO: 1916273 - RNA, 19 nt, Artificial Sequence
  Description of Artificial Sequence: Synthetic oligonucleotide
  Antisense strand to SEQ ID NO: 1916272
ugcaaugaugucauagaca

SEQ ID NO: 1916274 - RNA, 19 nt, Artificial Sequence
  Description of Artificial Sequence: Synthetic oligonucleotide
  Sense strand starting at position 2021 of SEQ ID NO: 1879559
cuaugacaucauugcagau

SEQ ID NO: 1916275 - RNA, 19 nt, Artificial Sequence
  Description of Artificial Sequence: Synthetic oligonucleotide
  Antisense strand to SEQ ID NO: 1916274
aucugcaaugaugucauag

SEQ ID NO: 1916276 - RNA, 19 nt, Artificial Sequence
  Description of Artificial Sequence: Synthetic oligonucleotide
  Sense strand starting at position 2025 of SEQ ID NO: 1879559
gacaucauugcagauguuu

SEQ ID NO: 1916277 - RNA, 19 nt, Artificial Sequence
  Description of Artificial Sequence: Synthetic oligonucleotide
  Antisense strand to SEQ ID NO: 1916276
aaacaucugcaaugauguc

SEQ ID NO: 1916278 - RNA, 19 nt, Artificial Sequence
  Description of Artificial Sequence: Synthetic oligonucleotide
  Sense strand starting at position 2095 of SEQ ID NO: 1879559
ugcugauugguuuaauaua

SEQ ID NO: 1916279 - RNA, 19 nt, Artificial Sequence
  Description of Artificial Sequence: Synthetic oligonucleotide
  Antisense strand to SEQ ID NO: 1916278
uauauuaaaccaaucagca

SEQ ID NO: 1916280 - RNA, 19 nt, Artificial Sequence
  Description of Artificial Sequence: Synthetic oligonucleotide
  Sense strand starting at position 2187 of SEQ ID NO: 1879559
acuucugacuggccacaaa

SEQ ID NO: 1916281 - RNA, 19 nt, Artificial Sequence
  Description of Artificial Sequence: Synthetic oligonucleotide
  Antisense strand to SEQ ID NO: 1916280
uuuguggccagucagaagu

SEQ ID NO: 1916282 - RNA, 19 nt, Artificial Sequence
  Description of Artificial Sequence: Synthetic oligonucleotide
  Sense strand starting at position 2285 of SEQ ID NO: 1879559
ucaaauauuugucaggaaa

SEQ ID NO: 1916283 - RNA, 19 nt, Artificial Sequence
  Description of Artificial Sequence: Synthetic oligonucleotide
  Antisense strand to SEQ ID NO: 1916282
uuuccugacaaauauuuga

SEQ ID NO: 1916284 - RNA, 19 nt, Artificial Sequence
  Description of Artificial Sequence: Synthetic oligonucleotide
  Sense strand starting at position 2315 of SEQ ID NO: 1879559
uccagaugauugccacuua

SEQ ID NO: 1916285 - RNA, 19 nt, Artificial Sequence
  Description of Artificial Sequence: Synthetic oligonucleotide
  Antisense strand to SEQ ID NO: 1916284
uaaguggcaaucaucugga

SEQ ID NO: 1916286 - RNA, 19 nt, Artificial Sequence
  Description of Artificial Sequence: Synthetic oligonucleotide
  Sense strand starting at position 2329 of SEQ ID NO: 1879559
acuuaugucucagcaagga

SEQ ID NO: 1916287 - RNA, 19 nt, Artificial Sequence
  Description of Artificial Sequence: Synthetic oligonucleotide
  Antisense strand to SEQ ID NO: 1916286
uccuugcugagacauaagu

SEQ ID NO: 1916288 - RNA, 19 nt, Artificial Sequence
  Description of Artificial Sequence: Synthetic oligonucleotide
  Sense strand starting at position 2409 of SEQ ID NO: 1879559
cuuaaucaacaguagguua

SEQ ID NO: 1916289 - RNA, 19 nt, Artificial Sequence
  Description of Artificial Sequence: Synthetic oligonucleotide
  Antisense strand to SEQ ID NO: 1916288
uaaccuacuguugauuaag

SEQ ID NO: 1916290 - RNA, 19 nt, Artificial Sequence
  Description of Artificial Sequence: Synthetic oligonucleotide
  Sense strand starting at position 2433 of SEQ ID NO: 1879559
ccaggcauccuuugaggaa

SEQ ID NO: 1916291 - RNA, 19 nt, Artificial Sequence
  Description of Artificial Sequence: Synthetic oligonucleotide
  Antisense strand to SEQ ID NO: 1916290
uuccucaaaggaugccugg

SEQ ID NO: 1916292 - RNA, 19 nt, Artificial Sequence
  Description of Artificial Sequence: Synthetic oligonucleotide
  Sense strand starting at position 2445 of SEQ ID NO: 1879559
ugaggaaucuucuuaaucu

SEQ ID NO: 1916293 - RNA, 19 nt, Artificial Sequence
  Description of Artificial Sequence: Synthetic oligonucleotide
  Antisense strand to SEQ ID NO: 1916292
agauuaagaagauuccuca

SEQ ID NO: 1916294 - RNA, 19 nt, Artificial Sequence
  Description of Artificial Sequence: Synthetic oligonucleotide
  Sense strand starting at position 2663 of SEQ ID NO: 1879559
acucacuuguuacugacau

SEQ ID NO: 1916295 - RNA, 19 nt, Artificial Sequence
  Description of Artificial Sequence: Synthetic oligonucleotide
  Antisense strand to SEQ ID NO: 1916294
augucaguaacaagugagu

SEQ ID NO: 1916296 - RNA, 19 nt, Artificial Sequence
  Description of Artificial Sequence: Synthetic oligonucleotide
  Sense strand starting at position 2926 of SEQ ID NO: 1879559
cucccaaggguuggagaau

SEQ ID NO: 1916297 - RNA, 19 nt, Artificial Sequence
  Description of Artificial Sequence: Synthetic oligonucleotide
  Antisense strand to SEQ ID NO: 1916296
auucuccaacccuugggag

SEQ ID NO: 1916298 - RNA, 19 nt, Artificial Sequence
  Description of Artificial Sequence: Synthetic oligonucleotide
  Sense strand starting at position 2935 of SEQ ID NO: 1879559
guuggagaauaauugcacu

SEQ ID NO: 1916299 - RNA, 19 nt, Artificial Sequence
  Description of Artificial Sequence: Synthetic oligonucleotide
  Antisense strand to SEQ ID NO: 1916298
agugcaauuauucuccaac

SEQ ID NO: 1916300 - RNA, 19 nt, Artificial Sequence
  Description of Artificial Sequence: Synthetic oligonucleotide
  Sense strand starting at position 3215 of SEQ ID NO: 1879559
acuuuauuggucuggacag

SEQ ID NO: 1916301 - RNA, 19 nt, Artificial Sequence
  Description of Artificial Sequence: Synthetic oligonucleotide
  Antisense strand to SEQ ID NO: 1916300
cuguccagaccaauaaagu

SEQ ID NO: 1916302 - RNA, 19 nt, Artificial Sequence
  Description of Artificial Sequence: Synthetic oligonucleotide
  Sense strand starting at position 3217 of SEQ ID NO: 1879559
uuuauuggucuggacagua

SEQ ID NO: 1916303 - RNA, 19 nt, Artificial Sequence
  Description of Artificial Sequence: Synthetic oligonucleotide
  Antisense strand to SEQ ID NO: 1916302
uacuguccagaccaauaaa

SEQ ID NO: 1916304 - RNA, 19 nt, Artificial Sequence
  Description of Artificial Sequence: Synthetic oligonucleotide
  Sense strand starting at position 3528 of SEQ ID NO: 1879559
uugaaauauucugcagaac

SEQ ID NO: 1916305 - RNA, 19 nt, Artificial Sequence
  Description of Artificial Sequence: Synthetic oligonucleotide
  Antisense strand to SEQ ID NO: 1916304
guucugcagaauauuucaa

SEQ ID NO: 1916306 - RNA, 19 nt, Artificial Sequence
  Description of Artificial Sequence: Synthetic oligonucleotide
  Sense strand starting at position 3643 of SEQ ID NO: 1879559
ucauaucugguagaacuuu

SEQ ID NO: 1916307 - RNA, 19 nt, Artificial Sequence
  Description of Artificial Sequence: Synthetic oligonucleotide
  Antisense strand to SEQ ID NO: 1916306
aaaguucuaccagauauga

SEQ ID NO: 1916308 - RNA, 19 nt, Artificial Sequence
  Description of Artificial Sequence: Synthetic oligonucleotide
  Sense strand starting at position 3753 of SEQ ID NO: 1879559
uggcuaauacaucgaagau

SEQ ID NO: 1916309 - RNA, 19 nt, Artificial Sequence
  Description of Artificial Sequence: Synthetic oligonucleotide
  Antisense strand to SEQ ID NO: 1916308
aucuucgauguauuagcca

SEQ ID NO: 1916310 - RNA, 19 nt, Artificial Sequence
  Description of Artificial Sequence: Synthetic oligonucleotide
  Sense strand starting at position 3780 of SEQ ID NO: 1879559
gucaaacuacuauguauaa

SEQ ID NO: 1916311 - RNA, 19 nt, Artificial Sequence
  Description of Artificial Sequence: Synthetic oligonucleotide
  Antisense strand to SEQ ID NO: 1916310
uuauacauaguaguuugac

SEQ ID NO: 1916312 - RNA, 19 nt, Artificial Sequence
  Description of Artificial Sequence: Synthetic oligonucleotide
  Sense strand starting at position 3893 of SEQ ID NO: 1879559
guuuaaacaugucugauac

SEQ ID NO: 1916313 - RNA, 19 nt, Artificial Sequence
  Description of Artificial Sequence: Synthetic oligonucleotide
  Antisense strand to SEQ ID NO: 1916312
guaucagacauguuuaaac

SEQ ID NO: 1916314 - RNA, 19 nt, Artificial Sequence
  Description of Artificial Sequence: Synthetic oligonucleotide
  Sense strand starting at position 3946 of SEQ ID NO: 1879559
aaagaauguuaugucgaug

SEQ ID NO: 1916315 - RNA, 19 nt, Artificial Sequence
  Description of Artificial Sequence: Synthetic oligonucleotide
  Antisense strand to SEQ ID NO: 1916314
caucgacauaacauucuuu

SEQ ID NO: 1916316 - RNA, 19 nt, Artificial Sequence
  Description of Artificial Sequence: Synthetic oligonucleotide
  Sense strand starting at position 3949 of SEQ ID NO: 1879559
gaauguuaugucgauggag

SEQ ID NO: 1916317 - RNA, 19 nt, Artificial Sequence
  Description of Artificial Sequence: Synthetic oligonucleotide
  Antisense strand to SEQ ID NO: 1916316
cuccaucgacauaacauuc

SEQ ID NO: 1916318 - RNA, 19 nt, Artificial Sequence
  Description of Artificial Sequence: Synthetic oligonucleotide
  Sense strand starting at position 3980 of SEQ ID NO: 1879559
ugaaauaucgcuuaaacug

SEQ ID NO: 1916319 - RNA, 19 nt, Artificial Sequence
  Description of Artificial Sequence: Synthetic oligonucleotide
  Antisense strand to SEQ ID NO: 1916318
caguuuaagcgauauuuca

SEQ ID NO: 1916320 - RNA, 19 nt, Artificial Sequence
  Description of Artificial Sequence: Synthetic oligonucleotide
  Sense strand starting at position 520 of SEQ ID NO: 1879560
gugugugcuugaguacguu

SEQ ID NO: 1916321 - RNA, 19 nt, Artificial Sequence
  Description of Artificial Sequence: Synthetic oligonucleotide
  Antisense strand to SEQ ID NO: 1916320
aacguacucaagcacacac

SEQ ID NO: 1916322 - RNA, 19 nt, Artificial Sequence
  Description of Artificial Sequence: Synthetic oligonucleotide
  Sense strand starting at position 528 of SEQ ID NO: 1879560
uugaguacguuugugagau

SEQ ID NO: 1916323 - RNA, 19 nt, Artificial Sequence
  Description of Artificial Sequence: Synthetic oligonucleotide
  Antisense strand to SEQ ID NO: 1916322
aucucacaaacguacucaa

SEQ ID NO: 1916324 - RNA, 19 nt, Artificial Sequence
  Description of Artificial Sequence: Synthetic oligonucleotide
  Sense strand starting at position 529 of SEQ ID NO: 1879560
ugaguacguuugugagaua

SEQ ID NO: 1916325 - RNA, 19 nt, Artificial Sequence
  Description of Artificial Sequence: Synthetic oligonucleotide
  Antisense strand to SEQ ID NO: 1916324
uaucucacaaacguacuca

SEQ ID NO: 1916326 - RNA, 19 nt, Artificial Sequence
  Description of Artificial Sequence: Synthetic oligonucleotide
  Sense strand starting at position 530 of SEQ ID NO: 1879560
gaguacguuugugagauac

SEQ ID NO: 1916327 - RNA, 19 nt, Artificial Sequence
  Description of Artificial Sequence: Synthetic oligonucleotide
  Antisense strand to SEQ ID NO: 1916326
guaucucacaaacguacuc

SEQ ID NO: 1916328 - RNA, 19 nt, Artificial Sequence
  Description of Artificial Sequence: Synthetic oligonucleotide
  Sense strand starting at position 532 of SEQ ID NO: 1879560
guacguuugugagauacgu

SEQ ID NO: 1916329 - RNA, 19 nt, Artificial Sequence
  Description of Artificial Sequence: Synthetic oligonucleotide
  Antisense strand to SEQ ID NO: 1916328
acguaucucacaaacguac

SEQ ID NO: 1916330 - RNA, 19 nt, Artificial Sequence
  Description of Artificial Sequence: Synthetic oligonucleotide
  Sense strand starting at position 534 of SEQ ID NO: 1879560
acguuugugagauacguga

SEQ ID NO: 1916331 - RNA, 19 nt, Artificial Sequence
  Description of Artificial Sequence: Synthetic oligonucleotide
  Antisense strand to SEQ ID NO: 1916330
ucacguaucucacaaacgu

SEQ ID NO: 1916332 - RNA, 19 nt, Artificial Sequence
  Description of Artificial Sequence: Synthetic oligonucleotide
  Sense strand starting at position 536 of SEQ ID NO: 1879560
guuugugagauacgugaaa

SEQ ID NO: 1916333 - RNA, 19 nt, Artificial Sequence
  Description of Artificial Sequence: Synthetic oligonucleotide
  Antisense strand to SEQ ID NO: 1916332
uuucacguaucucacaaac

SEQ ID NO: 1916334 - RNA, 19 nt, Artificial Sequence
  Description of Artificial Sequence: Synthetic oligonucleotide
  Sense strand starting at position 1049 of SEQ ID NO: 1879560
gcccuucucccuggagagu

SEQ ID NO: 1916335 - RNA, 19 nt, Artificial Sequence
  Description of Artificial Sequence: Synthetic oligonucleotide
  Antisense strand to SEQ ID NO: 1916334
acucuccagggagaagggc

SEQ ID NO: 1916336 - RNA, 19 nt, Artificial Sequence
  Description of Artificial Sequence: Synthetic oligonucleotide
  Sense strand starting at position 1069 of SEQ ID NO: 1879560
gaggguuccggcuguuaua

SEQ ID NO: 1916337 - RNA, 19 nt, Artificial Sequence
  Description of Artificial Sequence: Synthetic oligonucleotide
  Antisense strand to SEQ ID NO: 1916336
uauaacagccggaacccuc

SEQ ID NO: 1916338 - RNA, 19 nt, Artificial Sequence
  Description of Artificial Sequence: Synthetic oligonucleotide
  Sense strand starting at position 1072 of SEQ ID NO: 1879560
gguuccggcuguuauauuu

SEQ ID NO: 1916339 - RNA, 19 nt, Artificial Sequence
  Description of Artificial Sequence: Synthetic oligonucleotide
  Antisense strand to SEQ ID NO: 1916338
aaauauaacagccggaacc

SEQ ID NO: 1916340 - RNA, 19 nt, Artificial Sequence
  Description of Artificial Sequence: Synthetic oligonucleotide
  Sense strand starting at position 1078 of SEQ ID NO: 1879560
ggcuguuauauuugugcuu

SEQ ID NO: 1916341 - RNA, 19 nt, Artificial Sequence
  Description of Artificial Sequence: Synthetic oligonucleotide
  Antisense strand to SEQ ID NO: 1916340
aagcacaaauauaacagcc

SEQ ID NO: 1916342 - RNA, 19 nt, Artificial Sequence
  Description of Artificial Sequence: Synthetic oligonucleotide
  Sense strand starting at position 1224 of SEQ ID NO: 1879560
aagaaugaguccugaagac

SEQ ID NO: 1916343 - RNA, 19 nt, Artificial Sequence
  Description of Artificial Sequence: Synthetic oligonucleotide
  Antisense strand to SEQ ID NO: 1916342
gucuucaggacucauucuu

SEQ ID NO: 1916344 - RNA, 19 nt, Artificial Sequence
  Description of Artificial Sequence: Synthetic oligonucleotide
  Sense strand starting at position 2560 of SEQ ID NO: 1879560
gccacuguguccuuguaag

SEQ ID NO: 1916345 - RNA, 19 nt, Artificial Sequence
  Description of Artificial Sequence: Synthetic oligonucleotide
  Antisense strand to SEQ ID NO: 1916344
cuuacaaggacacaguggc

SEQ ID NO: 1916346 - RNA, 19 nt, Artificial Sequence
  Description of Artificial Sequence: Synthetic oligonucleotide
  Sense strand starting at position 2607 of SEQ ID NO: 1879560
cuggucagucccugggaua

SEQ ID NO: 1916347 - RNA, 19 nt, Artificial Sequence
  Description of Artificial Sequence: Synthetic oligonucleotide
  Antisense strand to SEQ ID NO: 1916346
uaucccagggacugaccag

SEQ ID NO: 1916348 - RNA, 19 nt, Artificial Sequence
  Description of Artificial Sequence: Synthetic oligonucleotide
  Sense strand starting at position 2610 of SEQ ID NO: 1879560
gucagucccugggauacau

SEQ ID NO: 1916349 - RNA, 19 nt, Artificial Sequence
  Description of Artificial Sequence: Synthetic oligonucleotide
  Antisense strand to SEQ ID NO: 1916348
auguaucccagggacugac

SEQ ID NO: 1916350 - RNA, 19 nt, Artificial Sequence
  Description of Artificial Sequence: Synthetic oligonucleotide
  Sense strand starting at position 2619 of SEQ ID NO: 1879560
ugggauacauguccuguua

SEQ ID NO: 1916351 - RNA, 19 nt, Artificial Sequence
  Description of Artificial Sequence: Synthetic oligonucleotide
  Antisense strand to SEQ ID NO: 1916350
uaacaggacauguauccca

SEQ ID NO: 1916352 - RNA, 19 nt, Artificial Sequence
  Description of Artificial Sequence: Synthetic oligonucleotide
  Sense strand starting at position 2621 of SEQ ID NO: 1879560
ggauacauguccuguuacu

SEQ ID NO: 1916353 - RNA, 19 nt, Artificial Sequence
  Description of Artificial Sequence: Synthetic oligonucleotide
  Antisense strand to SEQ ID NO: 1916352
aguaacaggacauguaucc

SEQ ID NO: 1916354 - RNA, 19 nt, Artificial Sequence
  Description of Artificial Sequence: Synthetic oligonucleotide
  Sense strand starting at position 3511 of SEQ ID NO: 1879560
gagggagaugucugucaag

SEQ ID NO: 1916355 - RNA, 19 nt, Artificial Sequence
  Description of Artificial Sequence: Synthetic oligonucleotide
  Antisense strand to SEQ ID NO: 1916354
cuugacagacaucucccuc

SEQ ID NO: 1916356 - RNA, 19 nt, Artificial Sequence
  Description of Artificial Sequence: Synthetic oligonucleotide
  Sense strand starting at position 3769 of SEQ ID NO: 1879560
gguuauaucuuguugugug

SEQ ID NO: 1916357 - RNA, 19 nt, Artificial Sequence
  Description of Artificial Sequence: Synthetic oligonucleotide
  Antisense strand to SEQ ID NO: 1916356
cacacaacaagauauaacc

SEQ ID NO: 1916358 - RNA, 19 nt, Artificial Sequence
  Description of Artificial Sequence: Synthetic oligonucleotide
  Sense strand starting at position 3770 of SEQ ID NO: 1879560
guuauaucuuguuguguga

SEQ ID NO: 1916359 - RNA, 19 nt, Artificial Sequence
  Description of Artificial Sequence: Synthetic oligonucleotide
  Antisense strand to SEQ ID NO: 1916358
ucacacaacaagauauaac

SEQ ID NO: 1916360 - RNA, 19 nt, Artificial Sequence
  Description of Artificial Sequence: Synthetic oligonucleotide
  Sense strand starting at position 3772 of SEQ ID NO: 1879560
uauaucuuguugugugagu

SEQ ID NO: 1916361 - RNA, 19 nt, Artificial Sequence
  Description of Artificial Sequence: Synthetic oligonucleotide
  Antisense strand to SEQ ID NO: 1916360
acucacacaacaagauaua

SEQ ID NO: 1916362 - RNA, 19 nt, Artificial Sequence
  Description of Artificial Sequence: Synthetic oligonucleotide
  Sense strand starting at position 3968 of SEQ ID NO: 1879560
ucaggcugcuccucugaaa

SEQ ID NO: 1916363 - RNA, 19 nt, Artificial Sequence
  Description of Artificial Sequence: Synthetic oligonucleotide
  Antisense strand to SEQ ID NO: 1916362
uuucagaggagcagccuga

SEQ ID NO: 1916364 - RNA, 19 nt, Artificial Sequence
  Description of Artificial Sequence: Synthetic oligonucleotide
  Sense strand starting at position 150 of SEQ ID NO: 1879561
cuacuacugucauuaugau

SEQ ID NO: 1916365 - RNA, 19 nt, Artificial Sequence
  Description of Artificial Sequence: Synthetic oligonucleotide
  Antisense strand to SEQ ID NO: 1916364
aucauaaugacaguaguag

SEQ ID NO: 1916366 - RNA, 19 nt, Artificial Sequence
  Description of Artificial Sequence: Synthetic oligonucleotide
  Sense strand starting at position 523 of SEQ ID NO: 1879561
gcuaguuucucucuagaau

SEQ ID NO: 1916367 - RNA, 19 nt, Artificial Sequence
  Description of Artificial Sequence: Synthetic oligonucleotide
  Antisense strand to SEQ ID NO: 1916366
auucuagagagaaacuagc

SEQ ID NO: 1916368 - RNA, 19 nt, Artificial Sequence
  Description of Artificial Sequence: Synthetic oligonucleotide
  Sense strand starting at position 991 of SEQ ID NO: 1879561
auaugaucacgcggcgaca

SEQ ID NO: 1916369 - RNA, 19 nt, Artificial Sequence
  Description of Artificial Sequence: Synthetic oligonucleotide
  Antisense strand to SEQ ID NO: 1916368
ugucgccgcgugaucauau

SEQ ID NO: 1916370 - RNA, 19 nt, Artificial Sequence
  Description of Artificial Sequence: Synthetic oligonucleotide
  Sense strand starting at position 1048 of SEQ ID NO: 1879561
gcucaaauaucuccgagcu

SEQ ID NO: 1916371 - RNA, 19 nt, Artificial Sequence
  Description of Artificial Sequence: Synthetic oligonucleotide
  Antisense strand to SEQ ID NO: 1916370
agcucggagauauuugagc

SEQ ID NO: 1916372 - RNA, 19 nt, Artificial Sequence
  Description of Artificial Sequence: Synthetic oligonucleotide
  Sense strand starting at position 1049 of SEQ ID NO: 1879561
cucaaauaucuccgagcuu

SEQ ID NO: 1916373 - RNA, 19 nt, Artificial Sequence
  Description of Artificial Sequence: Synthetic oligonucleotide
  Antisense strand to SEQ ID NO: 1916372
aagcucggagauauuugag

SEQ ID NO: 1916374 - RNA, 19 nt, Artificial Sequence
  Description of Artificial Sequence: Synthetic oligonucleotide
  Sense strand starting at position 1050 of SEQ ID NO: 1879561
ucaaauaucuccgagcuuu

SEQ ID NO: 1916375 - RNA, 19 nt, Artificial Sequence
  Description of Artificial Sequence: Synthetic oligonucleotide
  Antisense strand to SEQ ID NO: 1916374
aaagcucggagauauuuga

SEQ ID NO: 1916376 - RNA, 19 nt, Artificial Sequence
  Description of Artificial Sequence: Synthetic oligonucleotide
  Sense strand starting at position 1068 of SEQ ID NO: 1879561
uuucuaagccuuuauugag

SEQ ID NO: 1916377 - RNA, 19 nt, Artificial Sequence
  Description of Artificial Sequence: Synthetic oligonucleotide
  Antisense strand to SEQ ID NO: 1916376
cucaauaaaggcuuagaaa

SEQ ID NO: 1916378 - RNA, 19 nt, Artificial Sequence
  Description of Artificial Sequence: Synthetic oligonucleotide
  Sense strand starting at position 1075 of SEQ ID NO: 1879561
gccuuuauugagcacuacu

SEQ ID NO: 1916379 - RNA, 19 nt, Artificial Sequence
  Description of Artificial Sequence: Synthetic oligonucleotide
  Antisense strand to SEQ ID NO: 1916378
aguagugcucaauaaaggc

SEQ ID NO: 1916380 - RNA, 19 nt, Artificial Sequence
  Description of Artificial Sequence: Synthetic oligonucleotide
  Sense strand starting at position 1107 of SEQ ID NO: 1879561
ugggcuugacuuuguaauc

SEQ ID NO: 1916381 - RNA, 19 nt, Artificial Sequence
  Description of Artificial Sequence: Synthetic oligonucleotide
  Antisense strand to SEQ ID NO: 1916380
gauuacaaagucaagccca

SEQ ID NO: 1916382 - RNA, 19 nt, Artificial Sequence
  Description of Artificial Sequence: Synthetic oligonucleotide
  Sense strand starting at position 1113 of SEQ ID NO: 1879561
ugacuuuguaaucgcaaga

SEQ ID NO: 1916383 - RNA, 19 nt, Artificial Sequence
  Description of Artificial Sequence: Synthetic oligonucleotide
  Antisense strand to SEQ ID NO: 1916382
ucuugcgauuacaaaguca

SEQ ID NO: 1916384 - RNA, 19 nt, Artificial Sequence
  Description of Artificial Sequence: Synthetic oligonucleotide
  Sense strand starting at position 1177 of SEQ ID NO: 1879561
ggagaaagcucacugauca

SEQ ID NO: 1916385 - RNA, 19 nt, Artificial Sequence
  Description of Artificial Sequence: Synthetic oligonucleotide
  Antisense strand to SEQ ID NO: 1916384
ugaucagugagcuuucucc

SEQ ID NO: 1916386 - RNA, 19 nt, Artificial Sequence
  Description of Artificial Sequence: Synthetic oligonucleotide
  Sense strand starting at position 1187 of SEQ ID NO: 1879561
cacugaucacgucgaccua

SEQ ID NO: 1916387 - RNA, 19 nt, Artificial Sequence
  Description of Artificial Sequence: Synthetic oligonucleotide
  Antisense strand to SEQ ID NO: 1916386
uaggucgacgugaucagug

SEQ ID NO: 1916388 - RNA, 19 nt, Artificial Sequence
  Description of Artificial Sequence: Synthetic oligonucleotide
  Sense strand starting at position 1388 of SEQ ID NO: 1879561
auguguauuucacgugcgu

SEQ ID NO: 1916389 - RNA, 19 nt, Artificial Sequence
  Description of Artificial Sequence: Synthetic oligonucleotide
  Antisense strand to SEQ ID NO: 1916388
acgcacgugaaauacacau

SEQ ID NO: 1916390 - RNA, 19 nt, Artificial Sequence
  Description of Artificial Sequence: Synthetic oligonucleotide
  Sense strand starting at position 1392 of SEQ ID NO: 1879561
guauuucacgugcguuauu

SEQ ID NO: 1916391 - RNA, 19 nt, Artificial Sequence
  Description of Artificial Sequence: Synthetic oligonucleotide
  Antisense strand to SEQ ID NO: 1916390
aauaacgcacgugaaauac

SEQ ID NO: 1916392 - RNA, 19 nt, Artificial Sequence
  Description of Artificial Sequence: Synthetic oligonucleotide
  Sense strand starting at position 2751 of SEQ ID NO: 1879561
ugcagaugucgggagcuau

SEQ ID NO: 1916393 - RNA, 19 nt, Artificial Sequence
  Description of Artificial Sequence: Synthetic oligonucleotide
  Antisense strand to SEQ ID NO: 1916392
auagcucccgacaucugca

SEQ ID NO: 1916394 - RNA, 19 nt, Artificial Sequence
  Description of Artificial Sequence: Synthetic oligonucleotide
  Sense strand starting at position 2943 of SEQ ID NO: 1879561
gccaguaagugucccaaag

SEQ ID NO: 1916395 - RNA, 19 nt, Artificial Sequence
  Description of Artificial Sequence: Synthetic oligonucleotide
  Antisense strand to SEQ ID NO: 1916394
cuuugggacacuuacuggc

SEQ ID NO: 1916396 - RNA, 19 nt, Artificial Sequence
  Description of Artificial Sequence: Synthetic oligonucleotide
  Sense strand starting at position 2945 of SEQ ID NO: 1879561
caguaagugucccaaaguu

SEQ ID NO: 1916397 - RNA, 19 nt, Artificial Sequence
  Description of Artificial Sequence: Synthetic oligonucleotide
  Antisense strand to SEQ ID NO: 1916396
aacuuugggacacuuacug

SEQ ID NO: 1916398 - RNA, 19 nt, Artificial Sequence
  Description of Artificial Sequence: Synthetic oligonucleotide
  Sense strand starting at position 3057 of SEQ ID NO: 1879561
gcagaacgacugggagaua

SEQ ID NO: 1916399 - RNA, 19 nt, Artificial Sequence
  Description of Artificial Sequence: Synthetic oligonucleotide
  Antisense strand to SEQ ID NO: 1916398
uaucucccagucguucugc

SEQ ID NO: 1916400 - RNA, 19 nt, Artificial Sequence
  Description of Artificial Sequence: Synthetic oligonucleotide
  Sense strand starting at position 3140 of SEQ ID NO: 1879561
uuaacugaagccuggagau

SEQ ID NO: 1916401 - RNA, 19 nt, Artificial Sequence
  Description of Artificial Sequence: Synthetic oligonucleotide
  Antisense strand to SEQ ID NO: 1916400
aucuccaggcuucaguuaa

SEQ ID NO: 1916402 - RNA, 19 nt, Artificial Sequence
  Description of Artificial Sequence: Synthetic oligonucleotide
  Sense strand starting at position 3286 of SEQ ID NO: 1879561
ucaguuaugugggcucaag

SEQ ID NO: 1916403 - RNA, 19 nt, Artificial Sequence
  Description of Artificial Sequence: Synthetic oligonucleotide
  Antisense strand to SEQ ID NO: 1916402
cuugagcccacauaacuga

SEQ ID NO: 1916404 - RNA, 19 nt, Artificial Sequence
  Description of Artificial Sequence: Synthetic oligonucleotide
  Sense strand starting at position 3328 of SEQ ID NO: 1879561
gcccaaugccgugagaaga

SEQ ID NO: 1916405 - RNA, 19 nt, Artificial Sequence
  Description of Artificial Sequence: Synthetic oligonucleotide
  Antisense strand to SEQ ID NO: 1916404
ucuucucacggcauugggc

SEQ ID NO: 1916406 - RNA, 19 nt, Artificial Sequence
  Description of Artificial Sequence: Synthetic oligonucleotide
  Sense strand starting at position 3440 of SEQ ID NO: 1879561
ggugagugcuggcugugau

SEQ ID NO: 1916407 - RNA, 19 nt, Artificial Sequence
  Description of Artificial Sequence: Synthetic oligonucleotide
  Antisense strand to SEQ ID NO: 1916406
aucacagccagcacucacc

SEQ ID NO: 1916408 - RNA, 19 nt, Artificial Sequence
  Description of Artificial Sequence: Synthetic oligonucleotide
  Sense strand starting at position 3441 of SEQ ID NO: 1879561
gugagugcuggcugugaua

SEQ ID NO: 1916409 - RNA, 19 nt, Artificial Sequence
  Description of Artificial Sequence: Synthetic oligonucleotide
  Antisense strand to SEQ ID NO: 1916408
uaucacagccagcacucac

SEQ ID NO: 1916410 - RNA, 19 nt, Artificial Sequence
  Description of Artificial Sequence: Synthetic oligonucleotide
  Sense strand starting at position 3443 of SEQ ID NO: 1879561
gagugcuggcugugauauu

SEQ ID NO: 1916411 - RNA, 19 nt, Artificial Sequence
  Description of Artificial Sequence: Synthetic oligonucleotide
  Antisense strand to SEQ ID NO: 1916410
aauaucacagccagcacuc

SEQ ID NO: 1916412 - RNA, 19 nt, Artificial Sequence
  Description of Artificial Sequence: Synthetic oligonucleotide
  Sense strand starting at position 3444 of SEQ ID NO: 1879561
agugcuggcugugauauuu

SEQ ID NO: 1916413 - RNA, 19 nt, Artificial Sequence
  Description of Artificial Sequence: Synthetic oligonucleotide
  Antisense strand to SEQ ID NO: 1916412
aaauaucacagccagcacu

SEQ ID NO: 1916414 - RNA, 19 nt, Artificial Sequence
  Description of Artificial Sequence: Synthetic oligonucleotide
  Sense strand starting at position 3452 of SEQ ID NO: 1879561
cugugauauuuauagcaga

SEQ ID NO: 1916415 - RNA, 19 nt, Artificial Sequence
  Description of Artificial Sequence: Synthetic oligonucleotide
  Antisense strand to SEQ ID NO: 1916414
ucugcuauaaauaucacag

SEQ ID NO: 1916416 - RNA, 19 nt, Artificial Sequence
  Description of Artificial Sequence: Synthetic oligonucleotide
  Sense strand starting at position 3583 of SEQ ID NO: 1879561
cugggcuucucugcagaca

SEQ ID NO: 1916417 - RNA, 19 nt, Artificial Sequence
  Description of Artificial Sequence: Synthetic oligonucleotide
  Antisense strand to SEQ ID NO: 1916416
ugucugcagagaagcccag

SEQ ID NO: 1916418 - RNA, 19 nt, Artificial Sequence
  Description of Artificial Sequence: Synthetic oligonucleotide
  Sense strand starting at position 21 of SEQ ID NO: 1879562
gguuucucuaaggguuaaa

SEQ ID NO: 1916419 - RNA, 19 nt, Artificial Sequence
  Description of Artificial Sequence: Synthetic oligonucleotide
  Antisense strand to SEQ ID NO: 1916418
uuuaacccuuagagaaacc

SEQ ID NO: 1916420 - RNA, 19 nt, Artificial Sequence
  Description of Artificial Sequence: Synthetic oligonucleotide
  Sense strand starting at position 32 of SEQ ID NO: 1879562
ggguuaaauccaugaccuc

SEQ ID NO: 1916421 - RNA, 19 nt, Artificial Sequence
  Description of Artificial Sequence: Synthetic oligonucleotide
  Antisense strand to SEQ ID NO: 1916420
gaggucauggauuuaaccc

SEQ ID NO: 1916422 - RNA, 19 nt, Artificial Sequence
  Description of Artificial Sequence: Synthetic oligonucleotide
  Sense strand starting at position 57 of SEQ ID NO: 1879562
aacugagcgugagauacuu

SEQ ID NO: 1916423 - RNA, 19 nt, Artificial Sequence
  Description of Artificial Sequence: Synthetic oligonucleotide
  Antisense strand to SEQ ID NO: 1916422
aaguaucucacgcucaguu

SEQ ID NO: 1916424 - RNA, 19 nt, Artificial Sequence
  Description of Artificial Sequence: Synthetic oligonucleotide
  Sense strand starting at position 63 of SEQ ID NO: 1879562
gcgugagauacuuacugag

SEQ ID NO: 1916425 - RNA, 19 nt, Artificial Sequence
  Description of Artificial Sequence: Synthetic oligonucleotide
  Antisense strand to SEQ ID NO: 1916424
cucaguaaguaucucacgc

SEQ ID NO: 1916426 - RNA, 19 nt, Artificial Sequence
  Description of Artificial Sequence: Synthetic oligonucleotide
  Sense strand starting at position 65 of SEQ ID NO: 1879562
gugagauacuuacugaguc

SEQ ID NO: 1916427 - RNA, 19 nt, Artificial Sequence
  Description of Artificial Sequence: Synthetic oligonucleotide
  Antisense strand to SEQ ID NO: 1916426
gacucaguaaguaucucac

SEQ ID NO: 1916428 - RNA, 19 nt, Artificial Sequence
  Description of Artificial Sequence: Synthetic oligonucleotide
  Sense strand starting at position 382 of SEQ ID NO: 1879562
cgagaccaaucugagcaau

SEQ ID NO: 1916429 - RNA, 19 nt, Artificial Sequence
  Description of Artificial Sequence: Synthetic oligonucleotide
  Antisense strand to SEQ ID NO: 1916428
auugcucagauuggucucg

SEQ ID NO: 1916430 - RNA, 19 nt, Artificial Sequence
  Description of Artificial Sequence: Synthetic oligonucleotide
  Sense strand starting at position 523 of SEQ ID NO: 1879562
ugcauugagccgugauguc

SEQ ID NO: 1916431 - RNA, 19 nt, Artificial Sequence
  Description of Artificial Sequence: Synthetic oligonucleotide
  Antisense strand to SEQ ID NO: 1916430
gacaucacggcucaaugca

SEQ ID NO: 1916432 - RNA, 19 nt, Artificial Sequence
  Description of Artificial Sequence: Synthetic oligonucleotide
  Sense strand starting at position 573 of SEQ ID NO: 1879562
aggugaagaccuuagcuca

SEQ ID NO: 1916433 - RNA, 19 nt, Artificial Sequence
  Description of Artificial Sequence: Synthetic oligonucleotide
  Antisense strand to SEQ ID NO: 1916432
ugagcuaaggucuucaccu

SEQ ID NO: 1916434 - RNA, 19 nt, Artificial Sequence
  Description of Artificial Sequence: Synthetic oligonucleotide
  Sense strand starting at position 576 of SEQ ID NO: 1879562
ugaagaccuuagcucaaau

SEQ ID NO: 1916435 - RNA, 19 nt, Artificial Sequence
  Description of Artificial Sequence: Synthetic oligonucleotide
  Antisense strand to SEQ ID NO: 1916434
auuugagcuaaggucuuca

SEQ ID NO: 1916436 - RNA, 19 nt, Artificial Sequence
  Description of Artificial Sequence: Synthetic oligonucleotide
  Sense strand starting at position 649 of SEQ ID NO: 1879562
ugagaauucuuccagauac

SEQ ID NO: 1916437 - RNA, 19 nt, Artificial Sequence
  Description of Artificial Sequence: Synthetic oligonucleotide
  Antisense strand to SEQ ID NO: 1916436
guaucuggaagaauucuca

SEQ ID NO: 1916438 - RNA, 19 nt, Artificial Sequence
  Description of Artificial Sequence: Synthetic oligonucleotide
  Sense strand starting at position 814 of SEQ ID NO: 1879562
guuucuuucugguagagac

SEQ ID NO: 1916439 - RNA, 19 nt, Artificial Sequence
  Description of Artificial Sequence: Synthetic oligonucleotide
  Antisense strand to SEQ ID NO: 1916438
gucucuaccagaaagaaac

SEQ ID NO: 1916440 - RNA, 19 nt, Artificial Sequence
  Description of Artificial Sequence: Synthetic oligonucleotide
  Sense strand starting at position 1094 of SEQ ID NO: 1879562
ggguuuaauucucugcaau

SEQ ID NO: 1916441 - RNA, 19 nt, Artificial Sequence
  Description of Artificial Sequence: Synthetic oligonucleotide
  Antisense strand to SEQ ID NO: 1916440
auugcagagaauuaaaccc

SEQ ID NO: 1916442 - RNA, 19 nt, Artificial Sequence
  Description of Artificial Sequence: Synthetic oligonucleotide
  Sense strand starting at position 1095 of SEQ ID NO: 1879562
gguuuaauucucugcaauu

SEQ ID NO: 1916443 - RNA, 19 nt, Artificial Sequence
  Description of Artificial Sequence: Synthetic oligonucleotide
  Antisense strand to SEQ ID NO: 1916442
aauugcagagaauuaaacc

SEQ ID NO: 1916444 - RNA, 19 nt, Artificial Sequence
  Description of Artificial Sequence: Synthetic oligonucleotide
  Sense strand starting at position 1096 of SEQ ID NO: 1879562
guuuaauucucugcaauug

SEQ ID NO: 1916445 - RNA, 19 nt, Artificial Sequence
  Description of Artificial Sequence: Synthetic oligonucleotide
  Antisense strand to SEQ ID NO: 1916444
caauugcagagaauuaaac

SEQ ID NO: 1916446 - RNA, 19 nt, Artificial Sequence
  Description of Artificial Sequence: Synthetic oligonucleotide
  Sense strand starting at position 1447 of SEQ ID NO: 1879562
gacuuugugguuuguaaau

SEQ ID NO: 1916447 - RNA, 19 nt, Artificial Sequence
  Description of Artificial Sequence: Synthetic oligonucleotide
  Antisense strand to SEQ ID NO: 1916446
auuuacaaaccacaaaguc

SEQ ID NO: 1916448 - RNA, 19 nt, Artificial Sequence
  Description of Artificial Sequence: Synthetic oligonucleotide
  Sense strand starting at position 1453 of SEQ ID NO: 1879562
gugguuuguaaaugaaauc

SEQ ID NO: 1916449 - RNA, 19 nt, Artificial Sequence
  Description of Artificial Sequence: Synthetic oligonucleotide
  Antisense strand to SEQ ID NO: 1916448
gauuucauuuacaaaccac

SEQ ID NO: 1916450 - RNA, 19 nt, Artificial Sequence
  Description of Artificial Sequence: Synthetic oligonucleotide
  Sense strand starting at position 1578 of SEQ ID NO: 1879562
cugugagacucccagagau

SEQ ID NO: 1916451 - RNA, 19 nt, Artificial Sequence
  Description of Artificial Sequence: Synthetic oligonucleotide
  Antisense strand to SEQ ID NO: 1916450
aucucugggagucucacag

SEQ ID NO: 1916452 - RNA, 19 nt, Artificial Sequence
  Description of Artificial Sequence: Synthetic oligonucleotide
  Sense strand starting at position 1590 of SEQ ID NO: 1879562
cagagaugucuuugagaac

SEQ ID NO: 1916453 - RNA, 19 nt, Artificial Sequence
  Description of Artificial Sequence: Synthetic oligonucleotide
  Antisense strand to SEQ ID NO: 1916452
guucucaaagacaucucug

SEQ ID NO: 1916454 - RNA, 19 nt, Artificial Sequence
  Description of Artificial Sequence: Synthetic oligonucleotide
  Sense strand starting at position 1591 of SEQ ID NO: 1879562
agagaugucuuugagaacc

SEQ ID NO: 1916455 - RNA, 19 nt, Artificial Sequence
  Description of Artificial Sequence: Synthetic oligonucleotide
  Antisense strand to SEQ ID NO: 1916454
gguucucaaagacaucucu

SEQ ID NO: 1916456 - RNA, 19 nt, Artificial Sequence
  Description of Artificial Sequence: Synthetic oligonucleotide
  Sense strand starting at position 1704 of SEQ ID NO: 1879562
ccaggagucccguguuguc

SEQ ID NO: 1916457 - RNA, 19 nt, Artificial Sequence
  Description of Artificial Sequence: Synthetic oligonucleotide
  Antisense strand to SEQ ID NO: 1916456
gacaacacgggacuccugg

SEQ ID NO: 1916458 - RNA, 19 nt, Artificial Sequence
  Description of Artificial Sequence: Synthetic oligonucleotide
  Sense strand starting at position 2049 of SEQ ID NO: 1879562
uggcucuacgaauaucuga

SEQ ID NO: 1916459 - RNA, 19 nt, Artificial Sequence
  Description of Artificial Sequence: Synthetic oligonucleotide
  Antisense strand to SEQ ID NO: 1916458
ucagauauucguagagcca

SEQ ID NO: 1916460 - RNA, 19 nt, Artificial Sequence
  Description of Artificial Sequence: Synthetic oligonucleotide
  Sense strand starting at position 2054 of SEQ ID NO: 1879562
cuacgaauaucugacgauu

SEQ ID NO: 1916461 - RNA, 19 nt, Artificial Sequence
  Description of Artificial Sequence: Synthetic oligonucleotide
  Antisense strand to SEQ ID NO: 1916460
aaucgucagauauucguag

SEQ ID NO: 1916462 - RNA, 19 nt, Artificial Sequence
  Description of Artificial Sequence: Synthetic oligonucleotide
  Sense strand starting at position 2066 of SEQ ID NO: 1879562
gacgauuccgaguacacga

SEQ ID NO: 1916463 - RNA, 19 nt, Artificial Sequence
  Description of Artificial Sequence: Synthetic oligonucleotide
  Antisense strand to SEQ ID NO: 1916462
ucguguacucggaaucguc

SEQ ID NO: 1916464 - RNA, 19 nt, Artificial Sequence
  Description of Artificial Sequence: Synthetic oligonucleotide
  Sense strand starting at position 2155 of SEQ ID NO: 1879562
agccuagggaaaugauguu

SEQ ID NO: 1916465 - RNA, 19 nt, Artificial Sequence
  Description of Artificial Sequence: Synthetic oligonucleotide
  Antisense strand to SEQ ID NO: 1916464
aacaucauuucccuaggcu

SEQ ID NO: 1916466 - RNA, 19 nt, Artificial Sequence
  Description of Artificial Sequence: Synthetic oligonucleotide
  Sense strand starting at position 2421 of SEQ ID NO: 1879562
aguagugauugugccacua

SEQ ID NO: 1916467 - RNA, 19 nt, Artificial Sequence
  Description of Artificial Sequence: Synthetic oligonucleotide
  Antisense strand to SEQ ID NO: 1916466
uaguggcacaaucacuacu

SEQ ID NO: 1916468 - RNA, 19 nt, Artificial Sequence
  Description of Artificial Sequence: Synthetic oligonucleotide
  Sense strand starting at position 2518 of SEQ ID NO: 1879562
augcaaagguuccuauguu

SEQ ID NO: 1916469 - RNA, 19 nt, Artificial Sequence
  Description of Artificial Sequence: Synthetic oligonucleotide
  Antisense strand to SEQ ID NO: 1916468
aacauaggaaccuuugcau

SEQ ID NO: 1916470 - RNA, 19 nt, Artificial Sequence
  Description of Artificial Sequence: Synthetic oligonucleotide
  Sense strand starting at position 2556 of SEQ ID NO: 1879562
ccagauuuauuguaggaga

SEQ ID NO: 1916471 - RNA, 19 nt, Artificial Sequence
  Description of Artificial Sequence: Synthetic oligonucleotide
  Antisense strand to SEQ ID NO: 1916470
ucuccuacaauaaaucugg

SEQ ID NO: 1916472 - RNA, 19 nt, Artificial Sequence
  Description of Artificial Sequence: Synthetic oligonucleotide
  Sense strand starting at position 2559 of SEQ ID NO: 1879562
gauuuauuguaggagaaau

SEQ ID NO: 1916473 - RNA, 19 nt, Artificial Sequence
  Description of Artificial Sequence: Synthetic oligonucleotide
  Antisense strand to SEQ ID NO: 1916472
auuucuccuacaauaaauc

SEQ ID NO: 1916474 - RNA, 19 nt, Artificial Sequence
  Description of Artificial Sequence: Synthetic oligonucleotide
  Sense strand starting at position 2724 of SEQ ID NO: 1879562
gugacaaugggccauaauu

SEQ ID NO: 1916475 - RNA, 19 nt, Artificial Sequence
  Description of Artificial Sequence: Synthetic oligonucleotide
  Antisense strand to SEQ ID NO: 1916474
aauuauggcccauugucac

SEQ ID NO: 1916476 - RNA, 19 nt, Artificial Sequence
  Description of Artificial Sequence: Synthetic oligonucleotide
  Sense strand starting at position 3520 of SEQ ID NO: 1879562
acuggcucuuauguuaaca

SEQ ID NO: 1916477 - RNA, 19 nt, Artificial Sequence
  Description of Artificial Sequence: Synthetic oligonucleotide
  Antisense strand to SEQ ID NO: 1916476
uguuaacauaagagccagu

SEQ ID NO: 1916478 - RNA, 19 nt, Artificial Sequence
  Description of Artificial Sequence: Synthetic oligonucleotide
  Sense strand starting at position 3580 of SEQ ID NO: 1879562
acagauuggcagcagaagu

SEQ ID NO: 1916479 - RNA, 19 nt, Artificial Sequence
  Description of Artificial Sequence: Synthetic oligonucleotide
  Antisense strand to SEQ ID NO: 1916478
acuucugcugccaaucugu

SEQ ID NO: 1916480 - RNA, 19 nt, Artificial Sequence
  Description of Artificial Sequence: Synthetic oligonucleotide
  Sense strand starting at position 3591 of SEQ ID NO: 1879562
gcagaagucucugcuucug

SEQ ID NO: 1916481 - RNA, 19 nt, Artificial Sequence
  Description of Artificial Sequence: Synthetic oligonucleotide
  Antisense strand to SEQ ID NO: 1916480
cagaagcagagacuucugc

SEQ ID NO: 1916482 - RNA, 19 nt, Artificial Sequence
  Description of Artificial Sequence: Synthetic oligonucleotide
  Sense strand starting at position 3593 of SEQ ID NO: 1879562
agaagucucugcuucugga

SEQ ID NO: 1916483 - RNA, 19 nt, Artificial Sequence
  Description of Artificial Sequence: Synthetic oligonucleotide
  Antisense strand to SEQ ID NO: 1916482
uccagaagcagagacuucu

SEQ ID NO: 1916484 - RNA, 19 nt, Artificial Sequence
  Description of Artificial Sequence: Synthetic oligonucleotide
  Sense strand starting at position 3603 of SEQ ID NO: 1879562
gcuucuggaucauuauguu

SEQ ID NO: 1916485 - RNA, 19 nt, Artificial Sequence
  Description of Artificial Sequence: Synthetic oligonucleotide
  Antisense strand to SEQ ID NO: 1916484
aacauaaugauccagaagc

SEQ ID NO: 1916486 - RNA, 19 nt, Artificial Sequence
  Description of Artificial Sequence: Synthetic oligonucleotide
  Sense strand starting at position 3606 of SEQ ID NO: 1879562
ucuggaucauuauguuaag

SEQ ID NO: 1916487 - RNA, 19 nt, Artificial Sequence
  Description of Artificial Sequence: Synthetic oligonucleotide
  Antisense strand to SEQ ID NO: 1916486
cuuaacauaaugauccaga

SEQ ID NO: 1916488 - RNA, 19 nt, Artificial Sequence
  Description of Artificial Sequence: Synthetic oligonucleotide
  Sense strand starting at position 3609 of SEQ ID NO: 1879562
ggaucauuauguuaagucu

SEQ ID NO: 1916489 - RNA, 19 nt, Artificial Sequence
  Description of Artificial Sequence: Synthetic oligonucleotide
  Antisense strand to SEQ ID NO: 1916488
agacuuaacauaaugaucc

SEQ ID NO: 1916490 - RNA, 19 nt, Artificial Sequence
  Description of Artificial Sequence: Synthetic oligonucleotide
  Sense strand starting at position 3615 of SEQ ID NO: 1879562
uuauguuaagucuaaagac

SEQ ID NO: 1916491 - RNA, 19 nt, Artificial Sequence
  Description of Artificial Sequence: Synthetic oligonucleotide
  Antisense strand to SEQ ID NO: 1916490
gucuuuagacuuaacauaa

SEQ ID NO: 1916492 - RNA, 19 nt, Artificial Sequence
  Description of Artificial Sequence: Synthetic oligonucleotide
  Sense strand starting at position 3686 of SEQ ID NO: 1879562
cauggagcucgucagauga

SEQ ID NO: 1916493 - RNA, 19 nt, Artificial Sequence
  Description of Artificial Sequence: Synthetic oligonucleotide
  Antisense strand to SEQ ID NO: 1916492
ucaucugacgagcuccaug

SEQ ID NO: 1916494 - RNA, 19 nt, Artificial Sequence
  Description of Artificial Sequence: Synthetic oligonucleotide
  Sense strand starting at position 3688 of SEQ ID NO: 1879562
uggagcucgucagaugaca

SEQ ID NO: 1916495 - RNA, 19 nt, Artificial Sequence
  Description of Artificial Sequence: Synthetic oligonucleotide
  Antisense strand to SEQ ID NO: 1916494
ugucaucugacgagcucca

SEQ ID NO: 1916496 - RNA, 19 nt, Artificial Sequence
  Description of Artificial Sequence: Synthetic oligonucleotide
  Sense strand starting at position 3696 of SEQ ID NO: 1879562
gucagaugacacugcaauc

SEQ ID NO: 1916497 - RNA, 19 nt, Artificial Sequence
  Description of Artificial Sequence: Synthetic oligonucleotide
  Antisense strand to SEQ ID NO: 1916496
gauugcagugucaucugac

SEQ ID NO: 1916498 - RNA, 19 nt, Artificial Sequence
  Description of Artificial Sequence: Synthetic oligonucleotide
  Sense strand starting at position 86 of SEQ ID NO: 1879563
ugguuaauagccuaguuau

SEQ ID NO: 1916499 - RNA, 19 nt, Artificial Sequence
  Description of Artificial Sequence: Synthetic oligonucleotide
  Antisense strand to SEQ ID NO: 1916498
auaacuaggcuauuaacca

SEQ ID NO: 1916500 - RNA, 19 nt, Artificial Sequence
  Description of Artificial Sequence: Synthetic oligonucleotide
  Sense strand starting at position 89 of SEQ ID NO: 1879563
uuaauagccuaguuauuag

SEQ ID NO: 1916501 - RNA, 19 nt, Artificial Sequence
  Description of Artificial Sequence: Synthetic oligonucleotide
  Antisense strand to SEQ ID NO: 1916500
cuaauaacuaggcuauuaa

SEQ ID NO: 1916502 - RNA, 19 nt, Artificial Sequence
  Description of Artificial Sequence: Synthetic oligonucleotide
  Sense strand starting at position 92 of SEQ ID NO: 1879563
auagccuaguuauuaggaa

SEQ ID NO: 1916503 - RNA, 19 nt, Artificial Sequence
  Description of Artificial Sequence: Synthetic oligonucleotide
  Antisense strand to SEQ ID NO: 1916502
uuccuaauaacuaggcuau

SEQ ID NO: 1916504 - RNA, 19 nt, Artificial Sequence
  Description of Artificial Sequence: Synthetic oligonucleotide
  Sense strand starting at position 499 of SEQ ID NO: 1879563
ugaggacuuuaugauuuga

SEQ ID NO: 1916505 - RNA, 19 nt, Artificial Sequence
  Description of Artificial Sequence: Synthetic oligonucleotide
  Antisense strand to SEQ ID NO: 1916504
ucaaaucauaaaguccuca

SEQ ID NO: 1916506 - RNA, 19 nt, Artificial Sequence
  Description of Artificial Sequence: Synthetic oligonucleotide
  Sense strand starting at position 652 of SEQ ID NO: 1879563
uuugucucugaggaguuga

SEQ ID NO: 1916507 - RNA, 19 nt, Artificial Sequence
  Description of Artificial Sequence: Synthetic oligonucleotide
  Antisense strand to SEQ ID NO: 1916506
ucaacuccucagagacaaa

SEQ ID NO: 1916508 - RNA, 19 nt, Artificial Sequence
  Description of Artificial Sequence: Synthetic oligonucleotide
  Sense strand starting at position 769 of SEQ ID NO: 1879563
aggcuccuggcauauagua

SEQ ID NO: 1916509 - RNA, 19 nt, Artificial Sequence
  Description of Artificial Sequence: Synthetic oligonucleotide
  Antisense strand to SEQ ID NO: 1916508
uacuauaugccaggagccu

SEQ ID NO: 1916510 - RNA, 19 nt, Artificial Sequence
  Description of Artificial Sequence: Synthetic oligonucleotide
  Sense strand starting at position 781 of SEQ ID NO: 1879563
uauaguagguacuuaguaa

SEQ ID NO: 1916511 - RNA, 19 nt, Artificial Sequence
  Description of Artificial Sequence: Synthetic oligonucleotide
  Antisense strand to SEQ ID NO: 1916510
uuacuaaguaccuacuaua

SEQ ID NO: 1916512 - RNA, 19 nt, Artificial Sequence
  Description of Artificial Sequence: Synthetic oligonucleotide
  Sense strand starting at position 794 of SEQ ID NO: 1879563
uaguaacuauugguugaau

SEQ ID NO: 1916513 - RNA, 19 nt, Artificial Sequence
  Description of Artificial Sequence: Synthetic oligonucleotide
  Antisense strand to SEQ ID NO: 1916512
auucaaccaauaguuacua

SEQ ID NO: 1916514 - RNA, 19 nt, Artificial Sequence
  Description of Artificial Sequence: Synthetic oligonucleotide
  Sense strand starting at position 892 of SEQ ID NO: 1879563
ccugauguuccagagucag

SEQ ID NO: 1916515 - RNA, 19 nt, Artificial Sequence
  Description of Artificial Sequence: Synthetic oligonucleotide
  Antisense strand to SEQ ID NO: 1916514
cugacucuggaacaucagg

SEQ ID NO: 1916516 - RNA, 19 nt, Artificial Sequence
  Description of Artificial Sequence: Synthetic oligonucleotide
  Sense strand starting at position 953 of SEQ ID NO: 1879563
ggaccuguuagaugucacu

SEQ ID NO: 1916517 - RNA, 19 nt, Artificial Sequence
  Description of Artificial Sequence: Synthetic oligonucleotide
  Antisense strand to SEQ ID NO: 1916516
agugacaucuaacaggucc

SEQ ID NO: 1916518 - RNA, 19 nt, Artificial Sequence
  Description of Artificial Sequence: Synthetic oligonucleotide
  Sense strand starting at position 962 of SEQ ID NO: 1879563
agaugucacuugguaucaa

SEQ ID NO: 1916519 - RNA, 19 nt, Artificial Sequence
  Description of Artificial Sequence: Synthetic oligonucleotide
  Antisense strand to SEQ ID NO: 1916518
uugauaccaagugacaucu

SEQ ID NO: 1916520 - RNA, 19 nt, Artificial Sequence
  Description of Artificial Sequence: Synthetic oligonucleotide
  Sense strand starting at position 1269 of SEQ ID NO: 1879563
uaugcuuggccagaugaca

SEQ ID NO: 1916521 - RNA, 19 nt, Artificial Sequence
  Description of Artificial Sequence: Synthetic oligonucleotide
  Antisense strand to SEQ ID NO: 1916520
ugucaucuggccaagcaua

SEQ ID NO: 1916522 - RNA, 19 nt, Artificial Sequence
  Description of Artificial Sequence: Synthetic oligonucleotide
  Sense strand starting at position 1287 of SEQ ID NO: 1879563
aucucagaauguucuguaa

SEQ ID NO: 1916523 - RNA, 19 nt, Artificial Sequence
  Description of Artificial Sequence: Synthetic oligonucleotide
  Antisense strand to SEQ ID NO: 1916522
uuacagaacauucugagau

SEQ ID NO: 1916524 - RNA, 19 nt, Artificial Sequence
  Description of Artificial Sequence: Synthetic oligonucleotide
  Sense strand starting at position 1290 of SEQ ID NO: 1879563
ucagaauguucuguaauga

SEQ ID NO: 1916525 - RNA, 19 nt, Artificial Sequence
  Description of Artificial Sequence: Synthetic oligonucleotide
  Antisense strand to SEQ ID NO: 1916524
ucauuacagaacauucuga

SEQ ID NO: 1916526 - RNA, 19 nt, Artificial Sequence
  Description of Artificial Sequence: Synthetic oligonucleotide
  Sense strand starting at position 1291 of SEQ ID NO: 1879563
cagaauguucuguaaugac

SEQ ID NO: 1916527 - RNA, 19 nt, Artificial Sequence
  Description of Artificial Sequence: Synthetic oligonucleotide
  Antisense strand to SEQ ID NO: 1916526
gucauuacagaacauucug

SEQ ID NO: 1916528 - RNA, 19 nt, Artificial Sequence
  Description of Artificial Sequence: Synthetic oligonucleotide
  Sense strand starting at position 1396 of SEQ ID NO: 1879563
cagcuaggugcucaguaaa

SEQ ID NO: 1916529 - RNA, 19 nt, Artificial Sequence
  Description of Artificial Sequence: Synthetic oligonucleotide
  Antisense strand to SEQ ID NO: 1916528
uuuacugagcaccuagcug

SEQ ID NO: 1916530 - RNA, 19 nt, Artificial Sequence
  Description of Artificial Sequence: Synthetic oligonucleotide
  Sense strand starting at position 1434 of SEQ ID NO: 1879563
uggauuaagcggcaggaau

SEQ ID NO: 1916531 - RNA, 19 nt, Artificial Sequence
  Description of Artificial Sequence: Synthetic oligonucleotide
  Antisense strand to SEQ ID NO: 1916530
auuccugccgcuuaaucca

SEQ ID NO: 1916532 - RNA, 19 nt, Artificial Sequence
  Description of Artificial Sequence: Synthetic oligonucleotide
  Sense strand starting at position 1481 of SEQ ID NO: 1879563
aguugagguccucaucuca

SEQ ID NO: 1916533 - RNA, 19 nt, Artificial Sequence
  Description of Artificial Sequence: Synthetic oligonucleotide
  Antisense strand to SEQ ID NO: 1916532
ugagaugaggaccucaacu

SEQ ID NO: 1916534 - RNA, 19 nt, Artificial Sequence
  Description of Artificial Sequence: Synthetic oligonucleotide
  Sense strand starting at position 1529 of SEQ ID NO: 1879563
cuggucugucccuaaucua

SEQ ID NO: 1916535 - RNA, 19 nt, Artificial Sequence
  Description of Artificial Sequence: Synthetic oligonucleotide
  Antisense strand to SEQ ID NO: 1916534
uagauuagggacagaccag

SEQ ID NO: 1916536 - RNA, 19 nt, Artificial Sequence
  Description of Artificial Sequence: Synthetic oligonucleotide
  Sense strand starting at position 2011 of SEQ ID NO: 1879563
cggugauaugcugugugca

SEQ ID NO: 1916537 - RNA, 19 nt, Artificial Sequence
  Description of Artificial Sequence: Synthetic oligonucleotide
  Antisense strand to SEQ ID NO: 1916536
ugcacacagcauaucaccg

SEQ ID NO: 1916538 - RNA, 19 nt, Artificial Sequence
  Description of Artificial Sequence: Synthetic oligonucleotide
  Sense strand starting at position 2040 of SEQ ID NO: 1879563
gaugccuguugaucauaua

SEQ ID NO: 1916539 - RNA, 19 nt, Artificial Sequence
  Description of Artificial Sequence: Synthetic oligonucleotide
  Antisense strand to SEQ ID NO: 1916538
uauaugaucaacaggcauc

SEQ ID NO: 1916540 - RNA, 19 nt, Artificial Sequence
  Description of Artificial Sequence: Synthetic oligonucleotide
  Sense strand starting at position 2041 of SEQ ID NO: 1879563
augccuguugaucauauaa

SEQ ID NO: 1916541 - RNA, 19 nt, Artificial Sequence
  Description of Artificial Sequence: Synthetic oligonucleotide
  Antisense strand to SEQ ID NO: 1916540
uuauaugaucaacaggcau

SEQ ID NO: 1916542 - RNA, 19 nt, Artificial Sequence
  Description of Artificial Sequence: Synthetic oligonucleotide
  Sense strand starting at position 2140 of SEQ ID NO: 1879563
cccuucgaacuguaugaau

SEQ ID NO: 1916543 - RNA, 19 nt, Artificial Sequence
  Description of Artificial Sequence: Synthetic oligonucleotide
  Antisense strand to SEQ ID NO: 1916542
auucauacaguucgaaggg

SEQ ID NO: 1916544 - RNA, 19 nt, Artificial Sequence
  Description of Artificial Sequence: Synthetic oligonucleotide
  Sense strand starting at position 2142 of SEQ ID NO: 1879563
cuucgaacuguaugaauua

SEQ ID NO: 1916545 - RNA, 19 nt, Artificial Sequence
  Description of Artificial Sequence: Synthetic oligonucleotide
  Antisense strand to SEQ ID NO: 1916544
uaauucauacaguucgaag

SEQ ID NO: 1916546 - RNA, 19 nt, Artificial Sequence
  Description of Artificial Sequence: Synthetic oligonucleotide
  Sense strand starting at position 2171 of SEQ ID NO: 1879563
ugacaaugaugagucauau

SEQ ID NO: 1916547 - RNA, 19 nt, Artificial Sequence
  Description of Artificial Sequence: Synthetic oligonucleotide
  Antisense strand to SEQ ID NO: 1916546
auaugacucaucauuguca

SEQ ID NO: 1916548 - RNA, 19 nt, Artificial Sequence
  Description of Artificial Sequence: Synthetic oligonucleotide
  Sense strand starting at position 2183 of SEQ ID NO: 1879563
gucauaucucagcaagggu

SEQ ID NO: 1916549 - RNA, 19 nt, Artificial Sequence
  Description of Artificial Sequence: Synthetic oligonucleotide
  Antisense strand to SEQ ID NO: 1916548
acccuugcugagauaugac

SEQ ID NO: 1916550 - RNA, 19 nt, Artificial Sequence
  Description of Artificial Sequence: Synthetic oligonucleotide
  Sense strand starting at position 2360 of SEQ ID NO: 1879563
aagcuuccgcggugauuua

SEQ ID NO: 1916551 - RNA, 19 nt, Artificial Sequence
  Description of Artificial Sequence: Synthetic oligonucleotide
  Antisense strand to SEQ ID NO: 1916550
uaaaucaccgcggaagcuu

SEQ ID NO: 1916552 - RNA, 19 nt, Artificial Sequence
  Description of Artificial Sequence: Synthetic oligonucleotide
  Sense strand starting at position 2369 of SEQ ID NO: 1879563
cggugauuuaguugugaag

SEQ ID NO: 1916553 - RNA, 19 nt, Artificial Sequence
  Description of Artificial Sequence: Synthetic oligonucleotide
  Antisense strand to SEQ ID NO: 1916552
cuucacaacuaaaucaccg

SEQ ID NO: 1916554 - RNA, 19 nt, Artificial Sequence
  Description of Artificial Sequence: Synthetic oligonucleotide
  Sense strand starting at position 2648 of SEQ ID NO: 1879563
ugugcuuuaccgccuugau

SEQ ID NO: 1916555 - RNA, 19 nt, Artificial Sequence
  Description of Artificial Sequence: Synthetic oligonucleotide
  Antisense strand to SEQ ID NO: 1916554
aucaaggcgguaaagcaca

SEQ ID NO: 1916556 - RNA, 19 nt, Artificial Sequence
  Description of Artificial Sequence: Synthetic oligonucleotide
  Sense strand starting at position 3352 of SEQ ID NO: 1879563
ccuggcaaauucuuuggau

SEQ ID NO: 1916557 - RNA, 19 nt, Artificial Sequence
  Description of Artificial Sequence: Synthetic oligonucleotide
  Antisense strand to SEQ ID NO: 1916556
auccaaagaauuugccagg

SEQ ID NO: 1916558 - RNA, 19 nt, Artificial Sequence
  Description of Artificial Sequence: Synthetic oligonucleotide
  Sense strand starting at position 3353 of SEQ ID NO: 1879563
cuggcaaauucuuuggauu

SEQ ID NO: 1916559 - RNA, 19 nt, Artificial Sequence
  Description of Artificial Sequence: Synthetic oligonucleotide
  Antisense strand to SEQ ID NO: 1916558
aauccaaagaauuugccag

SEQ ID NO: 1916560 - RNA, 19 nt, Artificial Sequence
  Description of Artificial Sequence: Synthetic oligonucleotide
  Sense strand starting at position 3354 of SEQ ID NO: 1879563
uggcaaauucuuuggauua

SEQ ID NO: 1916561 - RNA, 19 nt, Artificial Sequence
  Description of Artificial Sequence: Synthetic oligonucleotide
  Antisense strand to SEQ ID NO: 1916560
uaauccaaagaauuugcca

SEQ ID NO: 1916562 - RNA, 19 nt, Artificial Sequence
  Description of Artificial Sequence: Synthetic oligonucleotide
  Sense strand starting at position 3410 of SEQ ID NO: 1879563
ggagaagagucaccggguu

SEQ ID NO: 1916563 - RNA, 19 nt, Artificial Sequence
  Description of Artificial Sequence: Synthetic oligonucleotide
  Antisense strand to SEQ ID NO: 1916562
aacccggugacucuucucc

SEQ ID NO: 1916564 - RNA, 19 nt, Artificial Sequence
  Description of Artificial Sequence: Synthetic oligonucleotide
  Sense strand starting at position 3460 of SEQ ID NO: 1879563
cugggaagcuugguucuca

SEQ ID NO: 1916565 - RNA, 19 nt, Artificial Sequence
  Description of Artificial Sequence: Synthetic oligonucleotide
  Antisense strand to SEQ ID NO: 1916564
ugagaaccaagcuucccag

SEQ ID NO: 1916566 - RNA, 19 nt, Artificial Sequence
  Description of Artificial Sequence: Synthetic oligonucleotide
  Sense strand starting at position 3469 of SEQ ID NO: 1879563
uugguucucaggugggaaa

SEQ ID NO: 1916567 - RNA, 19 nt, Artificial Sequence
  Description of Artificial Sequence: Synthetic oligonucleotide
  Antisense strand to SEQ ID NO: 1916566
uuucccaccugagaaccaa

SEQ ID NO: 1916568 - RNA, 19 nt, Artificial Sequence
  Description of Artificial Sequence: Synthetic oligonucleotide
  Sense strand starting at position 3561 of SEQ ID NO: 1879563
gggacagauugcuucuuag

SEQ ID NO: 1916569 - RNA, 19 nt, Artificial Sequence
  Description of Artificial Sequence: Synthetic oligonucleotide
  Antisense strand to SEQ ID NO: 1916568
cuaagaagcaaucuguccc

SEQ ID NO: 1916570 - RNA, 19 nt, Artificial Sequence
  Description of Artificial Sequence: Synthetic oligonucleotide
  Sense strand starting at position 3894 of SEQ ID NO: 1879563
aggagcugcuucccaauaa

SEQ ID NO: 1916571 - RNA, 19 nt, Artificial Sequence
  Description of Artificial Sequence: Synthetic oligonucleotide
  Antisense strand to SEQ ID NO: 1916570
uuauugggaagcagcuccu

SEQ ID NO: 1916572 - RNA, 19 nt, Artificial Sequence
  Description of Artificial Sequence: Synthetic oligonucleotide
  Sense strand starting at position 3898 of SEQ ID NO: 1879563
gcugcuucccaauaaggaa

SEQ ID NO: 1916573 - RNA, 19 nt, Artificial Sequence
  Description of Artificial Sequence: Synthetic oligonucleotide
  Antisense strand to SEQ ID NO: 1916572
uuccuuauugggaagcagc

SEQ ID NO: 1916574 - RNA, 19 nt, Artificial Sequence
  Description of Artificial Sequence: Synthetic oligonucleotide
  Sense strand starting at position 3920 of SEQ ID NO: 1879563
gugaguacaauuggacuuu

SEQ ID NO: 1916575 - RNA, 19 nt, Artificial Sequence
  Description of Artificial Sequence: Synthetic oligonucleotide
  Antisense strand to SEQ ID NO: 1916574
aaaguccaauuguacucac

SEQ ID NO: 1916576 - RNA, 19 nt, Artificial Sequence
  Description of Artificial Sequence: Synthetic oligonucleotide
  Sense strand starting at position 3929 of SEQ ID NO: 1879563
auuggacuuuauguaacuu

SEQ ID NO: 1916577 - RNA, 19 nt, Artificial Sequence
  Description of Artificial Sequence: Synthetic oligonucleotide
  Antisense strand to SEQ ID NO: 1916576
aaguuacauaaaguccaau

SEQ ID NO: 1916578 - RNA, 19 nt, Artificial Sequence
  Description of Artificial Sequence: Synthetic oligonucleotide
  Sense strand starting at position 176 of SEQ ID NO: 1879564
auucuauucuaguuagaug

SEQ ID NO: 1916579 - RNA, 19 nt, Artificial Sequence
  Description of Artificial Sequence: Synthetic oligonucleotide
  Antisense strand to SEQ ID NO: 1916578
caucuaacuagaauagaau

SEQ ID NO: 1916580 - RNA, 19 nt, Artificial Sequence
  Description of Artificial Sequence: Synthetic oligonucleotide
  Sense strand starting at position 179 of SEQ ID NO: 1879564
cuauucuaguuagaugcua

SEQ ID NO: 1916581 - RNA, 19 nt, Artificial Sequence
  Description of Artificial Sequence: Synthetic oligonucleotide
  Antisense strand to SEQ ID NO: 1916580
uagcaucuaacuagaauag

SEQ ID NO: 1916582 - RNA, 19 nt, Artificial Sequence
  Description of Artificial Sequence: Synthetic oligonucleotide
  Sense strand starting at position 184 of SEQ ID NO: 1879564
cuaguuagaugcuaggaua

SEQ ID NO: 1916583 - RNA, 19 nt, Artificial Sequence
  Description of Artificial Sequence: Synthetic oligonucleotide
  Antisense strand to SEQ ID NO: 1916582
uauccuagcaucuaacuag

SEQ ID NO: 1916584 - RNA, 19 nt, Artificial Sequence
  Description of Artificial Sequence: Synthetic oligonucleotide
  Sense strand starting at position 198 of SEQ ID NO: 1879564
ggauauuacuccucuagcu

SEQ ID NO: 1916585 - RNA, 19 nt, Artificial Sequence
  Description of Artificial Sequence: Synthetic oligonucleotide
  Antisense strand to SEQ ID NO: 1916584
agcuagaggaguaauaucc

SEQ ID NO: 1916586 - RNA, 19 nt, Artificial Sequence
  Description of Artificial Sequence: Synthetic oligonucleotide
  Sense strand starting at position 235 of SEQ ID NO: 1879564
gccauuucccuuugucuga

SEQ ID NO: 1916587 - RNA, 19 nt, Artificial Sequence
  Description of Artificial Sequence: Synthetic oligonucleotide
  Antisense strand to SEQ ID NO: 1916586
ucagacaaagggaaauggc

SEQ ID NO: 1916588 - RNA, 19 nt, Artificial Sequence
  Description of Artificial Sequence: Synthetic oligonucleotide
  Sense strand starting at position 239 of SEQ ID NO: 1879564
uuucccuuugucugauauc

SEQ ID NO: 1916589 - RNA, 19 nt, Artificial Sequence
  Description of Artificial Sequence: Synthetic oligonucleotide
  Antisense strand to SEQ ID NO: 1916588
gauaucagacaaagggaaa

SEQ ID NO: 1916590 - RNA, 19 nt, Artificial Sequence
  Description of Artificial Sequence: Synthetic oligonucleotide
  Sense strand starting at position 242 of SEQ ID NO: 1879564
cccuuugucugauauccau

SEQ ID NO: 1916591 - RNA, 19 nt, Artificial Sequence
  Description of Artificial Sequence: Synthetic oligonucleotide
  Antisense strand to SEQ ID NO: 1916590
auggauaucagacaaaggg

SEQ ID NO: 1916592 - RNA, 19 nt, Artificial Sequence
  Description of Artificial Sequence: Synthetic oligonucleotide
  Sense strand starting at position 283 of SEQ ID NO: 1879564
uuacaauaagccugguaca

SEQ ID NO: 1916593 - RNA, 19 nt, Artificial Sequence
  Description of Artificial Sequence: Synthetic oligonucleotide
  Antisense strand to SEQ ID NO: 1916592
uguaccaggcuuauuguaa

SEQ ID NO: 1916594 - RNA, 19 nt, Artificial Sequence
  Description of Artificial Sequence: Synthetic oligonucleotide
  Sense strand starting at position 568 of SEQ ID NO: 1879564
acucuaucuguccauguau

SEQ ID NO: 1916595 - RNA, 19 nt, Artificial Sequence
  Description of Artificial Sequence: Synthetic oligonucleotide
  Antisense strand to SEQ ID NO: 1916594
auacauggacagauagagu

SEQ ID NO: 1916596 - RNA, 19 nt, Artificial Sequence
  Description of Artificial Sequence: Synthetic oligonucleotide
  Sense strand starting at position 682 of SEQ ID NO: 1879564
cagucuaguucuucuguga

SEQ ID NO: 1916597 - RNA, 19 nt, Artificial Sequence
  Description of Artificial Sequence: Synthetic oligonucleotide
  Antisense strand to SEQ ID NO: 1916596
ucacagaagaacuagacug

SEQ ID NO: 1916598 - RNA, 19 nt, Artificial Sequence
  Description of Artificial Sequence: Synthetic oligonucleotide
  Sense strand starting at position 685 of SEQ ID NO: 1879564
ucuaguucuucugugagau

SEQ ID NO: 1916599 - RNA, 19 nt, Artificial Sequence
  Description of Artificial Sequence: Synthetic oligonucleotide
  Antisense strand to SEQ ID NO: 1916598
aucucacagaagaacuaga

SEQ ID NO: 1916600 - RNA, 19 nt, Artificial Sequence
  Description of Artificial Sequence: Synthetic oligonucleotide
  Sense strand starting at position 686 of SEQ ID NO: 1879564
cuaguucuucugugagauc

SEQ ID NO: 1916601 - RNA, 19 nt, Artificial Sequence
  Description of Artificial Sequence: Synthetic oligonucleotide
  Antisense strand to SEQ ID NO: 1916600
gaucucacagaagaacuag

SEQ ID NO: 1916602 - RNA, 19 nt, Artificial Sequence
  Description of Artificial Sequence: Synthetic oligonucleotide
  Sense strand starting at position 687 of SEQ ID NO: 1879564
uaguucuucugugagaucu

SEQ ID NO: 1916603 - RNA, 19 nt, Artificial Sequence
  Description of Artificial Sequence: Synthetic oligonucleotide
  Antisense strand to SEQ ID NO: 1916602
agaucucacagaagaacua

SEQ ID NO: 1916604 - RNA, 19 nt, Artificial Sequence
  Description of Artificial Sequence: Synthetic oligonucleotide
  Sense strand starting at position 689 of SEQ ID NO: 1879564
guucuucugugagaucuua

SEQ ID NO: 1916605 - RNA, 19 nt, Artificial Sequence
  Description of Artificial Sequence: Synthetic oligonucleotide
  Antisense strand to SEQ ID NO: 1916604
uaagaucucacagaagaac

SEQ ID NO: 1916606 - RNA, 19 nt, Artificial Sequence
  Description of Artificial Sequence: Synthetic oligonucleotide
  Sense strand starting at position 1988 of SEQ ID NO: 1879564
gguugucuugugccugagu

SEQ ID NO: 1916607 - RNA, 19 nt, Artificial Sequence
  Description of Artificial Sequence: Synthetic oligonucleotide
  Antisense strand to SEQ ID NO: 1916606
acucaggcacaagacaacc

SEQ ID NO: 1916608 - RNA, 19 nt, Artificial Sequence
  Description of Artificial Sequence: Synthetic oligonucleotide
  Sense strand starting at position 1991 of SEQ ID NO: 1879564
ugucuugugccugagugca

SEQ ID NO: 1916609 - RNA, 19 nt, Artificial Sequence
  Description of Artificial Sequence: Synthetic oligonucleotide
  Antisense strand to SEQ ID NO: 1916608
ugcacucaggcacaagaca

SEQ ID NO: 1916610 - RNA, 19 nt, Artificial Sequence
  Description of Artificial Sequence: Synthetic oligonucleotide
  Sense strand starting at position 1996 of SEQ ID NO: 1879564
ugugccugagugcaagaau

SEQ ID NO: 1916611 - RNA, 19 nt, Artificial Sequence
  Description of Artificial Sequence: Synthetic oligonucleotide
  Antisense strand to SEQ ID NO: 1916610
auucuugcacucaggcaca

SEQ ID NO: 1916612 - RNA, 19 nt, Artificial Sequence
  Description of Artificial Sequence: Synthetic oligonucleotide
  Sense strand starting at position 2028 of SEQ ID NO: 1879564
agucacuucuggugcgaua

SEQ ID NO: 1916613 - RNA, 19 nt, Artificial Sequence
  Description of Artificial Sequence: Synthetic oligonucleotide
  Antisense strand to SEQ ID NO: 1916612
uaucgcaccagaagugacu

SEQ ID NO: 1916614 - RNA, 19 nt, Artificial Sequence
  Description of Artificial Sequence: Synthetic oligonucleotide
  Sense strand starting at position 2030 of SEQ ID NO: 1879564
ucacuucuggugcgauaaa

SEQ ID NO: 1916615 - RNA, 19 nt, Artificial Sequence
  Description of Artificial Sequence: Synthetic oligonucleotide
  Antisense strand to SEQ ID NO: 1916614
uuuaucgcaccagaaguga

SEQ ID NO: 1916616 - RNA, 19 nt, Artificial Sequence
  Description of Artificial Sequence: Synthetic oligonucleotide
  Sense strand starting at position 2065 of SEQ ID NO: 1879564
cuuauaggcuuggauggau

SEQ ID NO: 1916617 - RNA, 19 nt, Artificial Sequence
  Description of Artificial Sequence: Synthetic oligonucleotide
  Antisense strand to SEQ ID NO: 1916616
auccauccaagccuauaag

SEQ ID NO: 1916618 - RNA, 19 nt, Artificial Sequence
  Description of Artificial Sequence: Synthetic oligonucleotide
  Sense strand starting at position 2121 of SEQ ID NO: 1879564
ggccuagagagguguccua

SEQ ID NO: 1916619 - RNA, 19 nt, Artificial Sequence
  Description of Artificial Sequence: Synthetic oligonucleotide
  Antisense strand to SEQ ID NO: 1916618
uaggacaccucucuaggcc

SEQ ID NO: 1916620 - RNA, 19 nt, Artificial Sequence
  Description of Artificial Sequence: Synthetic oligonucleotide
  Sense strand starting at position 2159 of SEQ ID NO: 1879564
uuuagugauugcucaauca

SEQ ID NO: 1916621 - RNA, 19 nt, Artificial Sequence
  Description of Artificial Sequence: Synthetic oligonucleotide
  Antisense strand to SEQ ID NO: 1916620
ugauugagcaaucacuaaa

SEQ ID NO: 1916622 - RNA, 19 nt, Artificial Sequence
  Description of Artificial Sequence: Synthetic oligonucleotide
  Sense strand starting at position 2350 of SEQ ID NO: 1879564
guacauauaucuuugacca

SEQ ID NO: 1916623 - RNA, 19 nt, Artificial Sequence
  Description of Artificial Sequence: Synthetic oligonucleotide
  Antisense strand to SEQ ID NO: 1916622
uggucaaagauauauguac

SEQ ID NO: 1916624 - RNA, 19 nt, Artificial Sequence
  Description of Artificial Sequence: Synthetic oligonucleotide
  Sense strand starting at position 2600 of SEQ ID NO: 1879564
uuguauguucuguagagaa

SEQ ID NO: 1916625 - RNA, 19 nt, Artificial Sequence
  Description of Artificial Sequence: Synthetic oligonucleotide
  Antisense strand to SEQ ID NO: 1916624
uucucuacagaacauacaa

SEQ ID NO: 1916626 - RNA, 19 nt, Artificial Sequence
  Description of Artificial Sequence: Synthetic oligonucleotide
  Sense strand starting at position 2602 of SEQ ID NO: 1879564
guauguucuguagagaagg

SEQ ID NO: 1916627 - RNA, 19 nt, Artificial Sequence
  Description of Artificial Sequence: Synthetic oligonucleotide
  Antisense strand to SEQ ID NO: 1916626
ccuucucuacagaacauac

SEQ ID NO: 1916628 - RNA, 19 nt, Artificial Sequence
  Description of Artificial Sequence: Synthetic oligonucleotide
  Sense strand starting at position 2760 of SEQ ID NO: 1879564
cauuuauccucugcacgag

SEQ ID NO: 1916629 - RNA, 19 nt, Artificial Sequence
  Description of Artificial Sequence: Synthetic oligonucleotide
  Antisense strand to SEQ ID NO: 1916628
cucgugcagaggauaaaug

SEQ ID NO: 1916630 - RNA, 19 nt, Artificial Sequence
  Description of Artificial Sequence: Synthetic oligonucleotide
  Sense strand starting at position 3068 of SEQ ID NO: 1879564
uugcuaugucgccgagguu

SEQ ID NO: 1916631 - RNA, 19 nt, Artificial Sequence
  Description of Artificial Sequence: Synthetic oligonucleotide
  Antisense strand to SEQ ID NO: 1916630
aaccucggcgacauagcaa

SEQ ID NO: 1916632 - RNA, 19 nt, Artificial Sequence
  Description of Artificial Sequence: Synthetic oligonucleotide
  Sense strand starting at position 3167 of SEQ ID NO: 1879564
uugccaugugcccaugaua

SEQ ID NO: 1916633 - RNA, 19 nt, Artificial Sequence
  Description of Artificial Sequence: Synthetic oligonucleotide
  Antisense strand to SEQ ID NO: 1916632
uaucaugggcacauggcaa

SEQ ID NO: 1916634 - RNA, 19 nt, Artificial Sequence
  Description of Artificial Sequence: Synthetic oligonucleotide
  Sense strand starting at position 3170 of SEQ ID NO: 1879564
ccaugugcccaugauauuc

SEQ ID NO: 1916635 - RNA, 19 nt, Artificial Sequence
  Description of Artificial Sequence: Synthetic oligonucleotide
  Antisense strand to SEQ ID NO: 1916634
gaauaucaugggcacaugg

SEQ ID NO: 1916636 - RNA, 19 nt, Artificial Sequence
  Description of Artificial Sequence: Synthetic oligonucleotide
  Sense strand starting at position 3263 of SEQ ID NO: 1879564
cagauauucuguugcauag

SEQ ID NO: 1916637 - RNA, 19 nt, Artificial Sequence
  Description of Artificial Sequence: Synthetic oligonucleotide
  Antisense strand to SEQ ID NO: 1916636
cuaugcaacagaauaucug

SEQ ID NO: 1916638 - RNA, 19 nt, Artificial Sequence
  Description of Artificial Sequence: Synthetic oligonucleotide
  Sense strand starting at position 3265 of SEQ ID NO: 1879564
gauauucuguugcauagga

SEQ ID NO: 1916639 - RNA, 19 nt, Artificial Sequence
  Description of Artificial Sequence: Synthetic oligonucleotide
  Antisense strand to SEQ ID NO: 1916638
uccuaugcaacagaauauc

SEQ ID NO: 1916640 - RNA, 19 nt, Artificial Sequence
  Description of Artificial Sequence: Synthetic oligonucleotide
  Sense strand starting at position 3465 of SEQ ID NO: 1879564
auggguaugcaccaucaua

SEQ ID NO: 1916641 - RNA, 19 nt, Artificial Sequence
  Description of Artificial Sequence: Synthetic oligonucleotide
  Antisense strand to SEQ ID NO: 1916640
uaugauggugcauacccau

SEQ ID NO: 1916642 - RNA, 19 nt, Artificial Sequence
  Description of Artificial Sequence: Synthetic oligonucleotide
  Sense strand starting at position 3477 of SEQ ID NO: 1879564
caucauagguggcuauuaa

SEQ ID NO: 1916643 - RNA, 19 nt, Artificial Sequence
  Description of Artificial Sequence: Synthetic oligonucleotide
  Antisense strand to SEQ ID NO: 1916642
uuaauagccaccuaugaug

SEQ ID NO: 1916644 - RNA, 19 nt, Artificial Sequence
  Description of Artificial Sequence: Synthetic oligonucleotide
  Sense strand starting at position 3478 of SEQ ID NO: 1879564
aucauagguggcuauuaaa

SEQ ID NO: 1916645 - RNA, 19 nt, Artificial Sequence
  Description of Artificial Sequence: Synthetic oligonucleotide
  Antisense strand to SEQ ID NO: 1916644
uuuaauagccaccuaugau

SEQ ID NO: 1916646 - RNA, 19 nt, Artificial Sequence
  Description of Artificial Sequence: Synthetic oligonucleotide
  Sense strand starting at position 3500 of SEQ ID NO: 1879564
ugauaauaauucuguagag

SEQ ID NO: 1916647 - RNA, 19 nt, Artificial Sequence
  Description of Artificial Sequence: Synthetic oligonucleotide
  Antisense strand to SEQ ID NO: 1916646
cucuacagaauuauuauca

SEQ ID NO: 1916648 - RNA, 19 nt, Artificial Sequence
  Description of Artificial Sequence: Synthetic oligonucleotide
  Sense strand starting at position 3913 of SEQ ID NO: 1879564
ugguauuacagucgugagu

SEQ ID NO: 1916649 - RNA, 19 nt, Artificial Sequence
  Description of Artificial Sequence: Synthetic oligonucleotide
  Antisense strand to SEQ ID NO: 1916648
acucacgacuguaauacca

SEQ ID NO: 1916650 - RNA, 19 nt, Artificial Sequence
  Description of Artificial Sequence: Synthetic oligonucleotide
  Sense strand starting at position 3915 of SEQ ID NO: 1879564
guauuacagucgugaguca

SEQ ID NO: 1916651 - RNA, 19 nt, Artificial Sequence
  Description of Artificial Sequence: Synthetic oligonucleotide
  Antisense strand to SEQ ID NO: 1916650
ugacucacgacuguaauac

SEQ ID NO: 1916652 - RNA, 19 nt, Artificial Sequence
  Description of Artificial Sequence: Synthetic oligonucleotide
  Sense strand starting at position 3949 of SEQ ID NO: 1879564
cauuguuuccuguggugac

SEQ ID NO: 1916653 - RNA, 19 nt, Artificial Sequence
  Description of Artificial Sequence: Synthetic oligonucleotide
  Antisense strand to SEQ ID NO: 1916652
gucaccacaggaaacaaug

SEQ ID NO: 1916654 - RNA, 19 nt, Artificial Sequence
  Description of Artificial Sequence: Synthetic oligonucleotide
  Sense strand starting at position 39 of SEQ ID NO: 1879565
augaaucaugcuggaguau

SEQ ID NO: 1916655 - RNA, 19 nt, Artificial Sequence
  Description of Artificial Sequence: Synthetic oligonucleotide
  Antisense strand to SEQ ID NO: 1916654
auacuccagcaugauucau

SEQ ID NO: 1916656 - RNA, 19 nt, Artificial Sequence
  Description of Artificial Sequence: Synthetic oligonucleotide
  Sense strand starting at position 40 of SEQ ID NO: 1879565
ugaaucaugcuggaguauu

SEQ ID NO: 1916657 - RNA, 19 nt, Artificial Sequence
  Description of Artificial Sequence: Synthetic oligonucleotide
  Antisense strand to SEQ ID NO: 1916656
aauacuccagcaugauuca

SEQ ID NO: 1916658 - RNA, 19 nt, Artificial Sequence
  Description of Artificial Sequence: Synthetic oligonucleotide
  Sense strand starting at position 173 of SEQ ID NO: 1879565
caugaagaaugcuuuguua

SEQ ID NO: 1916659 - RNA, 19 nt, Artificial Sequence
  Description of Artificial Sequence: Synthetic oligonucleotide
  Antisense strand to SEQ ID NO: 1916658
uaacaaagcauucuucaug

SEQ ID NO: 1916660 - RNA, 19 nt, Artificial Sequence
  Description of Artificial Sequence: Synthetic oligonucleotide
  Sense strand starting at position 176 of SEQ ID NO: 1879565
gaagaaugcuuuguuauua

SEQ ID NO: 1916661 - RNA, 19 nt, Artificial Sequence
  Description of Artificial Sequence: Synthetic oligonucleotide
  Antisense strand to SEQ ID NO: 1916660
uaauaacaaagcauucuuc

SEQ ID NO: 1916662 - RNA, 19 nt, Artificial Sequence
  Description of Artificial Sequence: Synthetic oligonucleotide
  Sense strand starting at position 227 of SEQ ID NO: 1879565
gccugaagaucuguuaaua

SEQ ID NO: 1916663 - RNA, 19 nt, Artificial Sequence
  Description of Artificial Sequence: Synthetic oligonucleotide
  Antisense strand to SEQ ID NO: 1916662
uauuaacagaucuucaggc

SEQ ID NO: 1916664 - RNA, 19 nt, Artificial Sequence
  Description of Artificial Sequence: Synthetic oligonucleotide
  Sense strand starting at position 283 of SEQ ID NO: 1879565
uaaggaugaguuugcauca

SEQ ID NO: 1916665 - RNA, 19 nt, Artificial Sequence
  Description of Artificial Sequence: Synthetic oligonucleotide
  Antisense strand to SEQ ID NO: 1916664
ugaugcaaacucauccuua

SEQ ID NO: 1916666 - RNA, 19 nt, Artificial Sequence
  Description of Artificial Sequence: Synthetic oligonucleotide
  Sense strand starting at position 288 of SEQ ID NO: 1879565
augaguuugcaucagauca

SEQ ID NO: 1916667 - RNA, 19 nt, Artificial Sequence
  Description of Artificial Sequence: Synthetic oligonucleotide
  Antisense strand to SEQ ID NO: 1916666
ugaucugaugcaaacucau

SEQ ID NO: 1916668 - RNA, 19 nt, Artificial Sequence
  Description of Artificial Sequence: Synthetic oligonucleotide
  Sense strand starting at position 768 of SEQ ID NO: 1879565
uuaguagaggcuuaguacu

SEQ ID NO: 1916669 - RNA, 19 nt, Artificial Sequence
  Description of Artificial Sequence: Synthetic oligonucleotide
  Antisense strand to SEQ ID NO: 1916668
aguacuaagccucuacuaa

SEQ ID NO: 1916670 - RNA, 19 nt, Artificial Sequence
  Description of Artificial Sequence: Synthetic oligonucleotide
  Sense strand starting at position 921 of SEQ ID NO: 1879565
gcuccugagauacagaagu

SEQ ID NO: 1916671 - RNA, 19 nt, Artificial Sequence
  Description of Artificial Sequence: Synthetic oligonucleotide
  Antisense strand to SEQ ID NO: 1916670
acuucuguaucucaggagc

SEQ ID NO: 1916672 - RNA, 19 nt, Artificial Sequence
  Description of Artificial Sequence: Synthetic oligonucleotide
  Sense strand starting at position 1051 of SEQ ID NO: 1879565
gaaggaauuugucagggag

SEQ ID NO: 1916673 - RNA, 19 nt, Artificial Sequence
  Description of Artificial Sequence: Synthetic oligonucleotide
  Antisense strand to SEQ ID NO: 1916672
cucccugacaaauuccuuc

SEQ ID NO: 1916674 - RNA, 19 nt, Artificial Sequence
  Description of Artificial Sequence: Synthetic oligonucleotide
  Sense strand starting at position 1069 of SEQ ID NO: 1879565
gggcccuuuggacaaaugu

SEQ ID NO: 1916675 - RNA, 19 nt, Artificial Sequence
  Description of Artificial Sequence: Synthetic oligonucleotide
  Antisense strand to SEQ ID NO: 1916674
acauuuguccaaagggccc

SEQ ID NO: 1916676 - RNA, 19 nt, Artificial Sequence
  Description of Artificial Sequence: Synthetic oligonucleotide
  Sense strand starting at position 1188 of SEQ ID NO: 1879565
cugcaaucacuggacacua

SEQ ID NO: 1916677 - RNA, 19 nt, Artificial Sequence
  Description of Artificial Sequence: Synthetic oligonucleotide
  Antisense strand to SEQ ID NO: 1916676
uaguguccagugauugcag

SEQ ID NO: 1916678 - RNA, 19 nt, Artificial Sequence
  Description of Artificial Sequence: Synthetic oligonucleotide
  Sense strand starting at position 1260 of SEQ ID NO: 1879565
gggugcacaguguaagaua

SEQ ID NO: 1916679 - RNA, 19 nt, Artificial Sequence
  Description of Artificial Sequence: Synthetic oligonucleotide
  Antisense strand to SEQ ID NO: 1916678
uaucuuacacugugcaccc

SEQ ID NO: 1916680 - RNA, 19 nt, Artificial Sequence
  Description of Artificial Sequence: Synthetic oligonucleotide
  Sense strand starting at position 1339 of SEQ ID NO: 1879565
ccuggauaagccugacaug

SEQ ID NO: 1916681 - RNA, 19 nt, Artificial Sequence
  Description of Artificial Sequence: Synthetic oligonucleotide
  Antisense strand to SEQ ID NO: 1916680
caugucaggcuuauccagg

SEQ ID NO: 1916682 - RNA, 19 nt, Artificial Sequence
  Description of Artificial Sequence: Synthetic oligonucleotide
  Sense strand starting at position 1340 of SEQ ID NO: 1879565
cuggauaagccugacaugu

SEQ ID NO: 1916683 - RNA, 19 nt, Artificial Sequence
  Description of Artificial Sequence: Synthetic oligonucleotide
  Antisense strand to SEQ ID NO: 1916682
acaugucaggcuuauccag

SEQ ID NO: 1916684 - RNA, 19 nt, Artificial Sequence
  Description of Artificial Sequence: Synthetic oligonucleotide
  Sense strand starting at position 1413 of SEQ ID NO: 1879565
gucauuucugguugcagga

SEQ ID NO: 1916685 - RNA, 19 nt, Artificial Sequence
  Description of Artificial Sequence: Synthetic oligonucleotide
  Antisense strand to SEQ ID NO: 1916684
uccugcaaccagaaaugac

SEQ ID NO: 1916686 - RNA, 19 nt, Artificial Sequence
  Description of Artificial Sequence: Synthetic oligonucleotide
  Sense strand starting at position 1716 of SEQ ID NO: 1879565
gcagaagaguacuugguga

SEQ ID NO: 1916687 - RNA, 19 nt, Artificial Sequence
  Description of Artificial Sequence: Synthetic oligonucleotide
  Antisense strand to SEQ ID NO: 1916686
ucaccaaguacucuucugc

SEQ ID NO: 1916688 - RNA, 19 nt, Artificial Sequence
  Description of Artificial Sequence: Synthetic oligonucleotide
  Sense strand starting at position 1747 of SEQ ID NO: 1879565
ucaggugacuuuccuuaag

SEQ ID NO: 1916689 - RNA, 19 nt, Artificial Sequence
  Description of Artificial Sequence: Synthetic oligonucleotide
  Antisense strand to SEQ ID NO: 1916688
cuuaaggaaagucaccuga

SEQ ID NO: 1916690 - RNA, 19 nt, Artificial Sequence
  Description of Artificial Sequence: Synthetic oligonucleotide
  Sense strand starting at position 1749 of SEQ ID NO: 1879565
aggugacuuuccuuaagau

SEQ ID NO: 1916691 - RNA, 19 nt, Artificial Sequence
  Description of Artificial Sequence: Synthetic oligonucleotide
  Antisense strand to SEQ ID NO: 1916690
aucuuaaggaaagucaccu

SEQ ID NO: 1916692 - RNA, 19 nt, Artificial Sequence
  Description of Artificial Sequence: Synthetic oligonucleotide
  Sense strand starting at position 1750 of SEQ ID NO: 1879565
ggugacuuuccuuaagauu

SEQ ID NO: 1916693 - RNA, 19 nt, Artificial Sequence
  Description of Artificial Sequence: Synthetic oligonucleotide
  Antisense strand to SEQ ID NO: 1916692
aaucuuaaggaaagucacc

SEQ ID NO: 1916694 - RNA, 19 nt, Artificial Sequence
  Description of Artificial Sequence: Synthetic oligonucleotide
  Sense strand starting at position 1799 of SEQ ID NO: 1879565
cagguuuacgagcaagaaa

SEQ ID NO: 1916695 - RNA, 19 nt, Artificial Sequence
  Description of Artificial Sequence: Synthetic oligonucleotide
  Antisense strand to SEQ ID NO: 1916694
uuucuugcucguaaaccug

SEQ ID NO: 1916696 - RNA, 19 nt, Artificial Sequence
  Description of Artificial Sequence: Synthetic oligonucleotide
  Sense strand starting at position 1834 of SEQ ID NO: 1879565
cagaguuaaucuuccgaac

SEQ ID NO: 1916697 - RNA, 19 nt, Artificial Sequence
  Description of Artificial Sequence: Synthetic oligonucleotide
  Antisense strand to SEQ ID NO: 1916696
guucggaagauuaacucug

SEQ ID NO: 1916698 - RNA, 19 nt, Artificial Sequence
  Description of Artificial Sequence: Synthetic oligonucleotide
  Sense strand starting at position 2765 of SEQ ID NO: 1879565
gggcgagugguuaggguau

SEQ ID NO: 1916699 - RNA, 19 nt, Artificial Sequence
  Description of Artificial Sequence: Synthetic oligonucleotide
  Antisense strand to SEQ ID NO: 1916698
auacccuaaccacucgccc

SEQ ID NO: 1916700 - RNA, 19 nt, Artificial Sequence
  Description of Artificial Sequence: Synthetic oligonucleotide
  Sense strand starting at position 2959 of SEQ ID NO: 1879565
ccuccugagccaugacaaa

SEQ ID NO: 1916701 - RNA, 19 nt, Artificial Sequence
  Description of Artificial Sequence: Synthetic oligonucleotide
  Antisense strand to SEQ ID NO: 1916700
uuugucauggcucaggagg

SEQ ID NO: 1916702 - RNA, 19 nt, Artificial Sequence
  Description of Artificial Sequence: Synthetic oligonucleotide
  Sense strand starting at position 3020 of SEQ ID NO: 1879565
ccugauaacugagucaaag

SEQ ID NO: 1916703 - RNA, 19 nt, Artificial Sequence
  Description of Artificial Sequence: Synthetic oligonucleotide
  Antisense strand to SEQ ID NO: 1916702
cuuugacucaguuaucagg

SEQ ID NO: 1916704 - RNA, 19 nt, Artificial Sequence
  Description of Artificial Sequence: Synthetic oligonucleotide
  Sense strand starting at position 3030 of SEQ ID NO: 1879565
gagucaaaguuucugagac

SEQ ID NO: 1916705 - RNA, 19 nt, Artificial Sequence
  Description of Artificial Sequence: Synthetic oligonucleotide
  Antisense strand to SEQ ID NO: 1916704
gucucagaaacuuugacuc

SEQ ID NO: 1916706 - RNA, 19 nt, Artificial Sequence
  Description of Artificial Sequence: Synthetic oligonucleotide
  Sense strand starting at position 3192 of SEQ ID NO: 1879565
guccuuggaucucucagau

SEQ ID NO: 1916707 - RNA, 19 nt, Artificial Sequence
  Description of Artificial Sequence: Synthetic oligonucleotide
  Antisense strand to SEQ ID NO: 1916706
aucugagagauccaaggac

SEQ ID NO: 1916708 - RNA, 19 nt, Artificial Sequence
  Description of Artificial Sequence: Synthetic oligonucleotide
  Sense strand starting at position 3289 of SEQ ID NO: 1879565
gccuuauuacacuaauggu

SEQ ID NO: 1916709 - RNA, 19 nt, Artificial Sequence
  Description of Artificial Sequence: Synthetic oligonucleotide
  Antisense strand to SEQ ID NO: 1916708
accauuaguguaauaaggc

SEQ ID NO: 1916710 - RNA, 19 nt, Artificial Sequence
  Description of Artificial Sequence: Synthetic oligonucleotide
  Sense strand starting at position 3409 of SEQ ID NO: 1879565
uuuaaauuuccucgugcau

SEQ ID NO: 1916711 - RNA, 19 nt, Artificial Sequence
  Description of Artificial Sequence: Synthetic oligonucleotide
  Antisense strand to SEQ ID NO: 1916710
augcacgaggaaauuuaaa

SEQ ID NO: 1916712 - RNA, 19 nt, Artificial Sequence
  Description of Artificial Sequence: Synthetic oligonucleotide
  Sense strand starting at position 3502 of SEQ ID NO: 1879565
uaguguuuauauuuggcau

SEQ ID NO: 1916713 - RNA, 19 nt, Artificial Sequence
  Description of Artificial Sequence: Synthetic oligonucleotide
  Antisense strand to SEQ ID NO: 1916712
augccaaauauaaacacua

SEQ ID NO: 1916714 - RNA, 19 nt, Artificial Sequence
  Description of Artificial Sequence: Synthetic oligonucleotide
  Sense strand starting at position 3554 of SEQ ID NO: 1879565
aagauacggaugugaaguu

SEQ ID NO: 1916715 - RNA, 19 nt, Artificial Sequence
  Description of Artificial Sequence: Synthetic oligonucleotide
  Antisense strand to SEQ ID NO: 1916714
aacuucacauccguaucuu

SEQ ID NO: 1916716 - RNA, 19 nt, Artificial Sequence
  Description of Artificial Sequence: Synthetic oligonucleotide
  Sense strand starting at position 3579 of SEQ ID NO: 1879565
uugugaucacauuggaagu

SEQ ID NO: 1916717 - RNA, 19 nt, Artificial Sequence
  Description of Artificial Sequence: Synthetic oligonucleotide
  Antisense strand to SEQ ID NO: 1916716
acuuccaaugugaucacaa

SEQ ID NO: 1916718 - RNA, 19 nt, Artificial Sequence
  Description of Artificial Sequence: Synthetic oligonucleotide
  Sense strand starting at position 3672 of SEQ ID NO: 1879565
uagagcgucccuuaugaaa

SEQ ID NO: 1916719 - RNA, 19 nt, Artificial Sequence
  Description of Artificial Sequence: Synthetic oligonucleotide
  Antisense strand to SEQ ID NO: 1916718
uuucauaagggacgcucua

SEQ ID NO: 1916720 - RNA, 19 nt, Artificial Sequence
  Description of Artificial Sequence: Synthetic oligonucleotide
  Sense strand starting at position 3698 of SEQ ID NO: 1879565
ugagauuucuaaggagaaa

SEQ ID NO: 1916721 - RNA, 19 nt, Artificial Sequence
  Description of Artificial Sequence: Synthetic oligonucleotide
  Antisense strand to SEQ ID NO: 1916720
uuucuccuuagaaaucuca

SEQ ID NO: 1916722 - RNA, 19 nt, Artificial Sequence
  Description of Artificial Sequence: Synthetic oligonucleotide
  Sense strand starting at position 3719 of SEQ ID NO: 1879565
cuaguugaacuuuauguau

SEQ ID NO: 1916723 - RNA, 19 nt, Artificial Sequence
  Description of Artificial Sequence: Synthetic oligonucleotide
  Antisense strand to SEQ ID NO: 1916722
auacauaaaguucaacuag

SEQ ID NO: 1916724 - RNA, 19 nt, Artificial Sequence
  Description of Artificial Sequence: Synthetic oligonucleotide
  Sense strand starting at position 3722 of SEQ ID NO: 1879565
guugaacuuuauguauaca

SEQ ID NO: 1916725 - RNA, 19 nt, Artificial Sequence
  Description of Artificial Sequence: Synthetic oligonucleotide
  Antisense strand to SEQ ID NO: 1916724
uguauacauaaaguucaac

SEQ ID NO: 1916726 - RNA, 19 nt, Artificial Sequence
  Description of Artificial Sequence: Synthetic oligonucleotide
  Sense strand starting at position 3778 of SEQ ID NO: 1879565
ggguuagcucuagacuuug

SEQ ID NO: 1916727 - RNA, 19 nt, Artificial Sequence
  Description of Artificial Sequence: Synthetic oligonucleotide
  Antisense strand to SEQ ID NO: 1916726
caaagucuagagcuaaccc

SEQ ID NO: 1916728 - RNA, 19 nt, Artificial Sequence
  Description of Artificial Sequence: Synthetic oligonucleotide
  Sense strand starting at position 3786 of SEQ ID NO: 1879565
ucuagacuuugaguuagac

SEQ ID NO: 1916729 - RNA, 19 nt, Artificial Sequence
  Description of Artificial Sequence: Synthetic oligonucleotide
  Antisense strand to SEQ ID NO: 1916728
gucuaacucaaagucuaga

SEQ ID NO: 1916730 - RNA, 19 nt, Artificial Sequence
  Description of Artificial Sequence: Synthetic oligonucleotide
  Sense strand starting at position 3800 of SEQ ID NO: 1879565
uagacuggugucuauacua

SEQ ID NO: 1916731 - RNA, 19 nt, Artificial Sequence
  Description of Artificial Sequence: Synthetic oligonucleotide
  Antisense strand to SEQ ID NO: 1916730
uaguauagacaccagucua

SEQ ID NO: 1916732 - RNA, 19 nt, Artificial Sequence
  Description of Artificial Sequence: Synthetic oligonucleotide
  Sense strand starting at position 3914 of SEQ ID NO: 1879565
cuacauuugcucugaugug

SEQ ID NO: 1916733 - RNA, 19 nt, Artificial Sequence
  Description of Artificial Sequence: Synthetic oligonucleotide
  Antisense strand to SEQ ID NO: 1916732
cacaucagagcaaauguag

SEQ ID NO: 1916734 - RNA, 19 nt, Artificial Sequence
  Description of Artificial Sequence: Synthetic oligonucleotide
  Sense strand starting at position 41 of SEQ ID NO: 1879566
ggaauucuguccuugaaag

SEQ ID NO: 1916735 - RNA, 19 nt, Artificial Sequence
  Description of Artificial Sequence: Synthetic oligonucleotide
  Antisense strand to SEQ ID NO: 1916734
cuuucaaggacagaauucc

SEQ ID NO: 1916736 - RNA, 19 nt, Artificial Sequence
  Description of Artificial Sequence: Synthetic oligonucleotide
  Sense strand starting at position 42 of SEQ ID NO: 1879566
gaauucuguccuugaaagc

SEQ ID NO: 1916737 - RNA, 19 nt, Artificial Sequence
  Description of Artificial Sequence: Synthetic oligonucleotide
  Antisense strand to SEQ ID NO: 1916736
gcuuucaaggacagaauuc

SEQ ID NO: 1916738 - RNA, 19 nt, Artificial Sequence
  Description of Artificial Sequence: Synthetic oligonucleotide
  Sense strand starting at position 337 of SEQ ID NO: 1879566
ggcucagcuuucuuaucuu

SEQ ID NO: 1916739 - RNA, 19 nt, Artificial Sequence
  Description of Artificial Sequence: Synthetic oligonucleotide
  Antisense strand to SEQ ID NO: 1916738
aagauaagaaagcugagcc

SEQ ID NO: 1916740 - RNA, 19 nt, Artificial Sequence
  Description of Artificial Sequence: Synthetic oligonucleotide
  Sense strand starting at position 854 of SEQ ID NO: 1879566
cagugauuccagcaugcag

SEQ ID NO: 1916741 - RNA, 19 nt, Artificial Sequence
  Description of Artificial Sequence: Synthetic oligonucleotide
  Antisense strand to SEQ ID NO: 1916740
cugcaugcuggaaucacug

SEQ ID NO: 1916742 - RNA, 19 nt, Artificial Sequence
  Description of Artificial Sequence: Synthetic oligonucleotide
  Sense strand starting at position 1652 of SEQ ID NO: 1879566
acuguuccucuuggagauu

SEQ ID NO: 1916743 - RNA, 19 nt, Artificial Sequence
  Description of Artificial Sequence: Synthetic oligonucleotide
  Antisense strand to SEQ ID NO: 1916742
aaucuccaagaggaacagu

SEQ ID NO: 1916744 - RNA, 19 nt, Artificial Sequence
  Description of Artificial Sequence: Synthetic oligonucleotide
  Sense strand starting at position 1653 of SEQ ID NO: 1879566
cuguuccucuuggagauuu

SEQ ID NO: 1916745 - RNA, 19 nt, Artificial Sequence
  Description of Artificial Sequence: Synthetic oligonucleotide
  Antisense strand to SEQ ID NO: 1916744
aaaucuccaagaggaacag

SEQ ID NO: 1916746 - RNA, 19 nt, Artificial Sequence
  Description of Artificial Sequence: Synthetic oligonucleotide
  Sense strand starting at position 1703 of SEQ ID NO: 1879566
uagcacaaugcauaagagu

SEQ ID NO: 1916747 - RNA, 19 nt, Artificial Sequence
  Description of Artificial Sequence: Synthetic oligonucleotide
  Antisense strand to SEQ ID NO: 1916746
acucuuaugcauugugcua

SEQ ID NO: 1916748 - RNA, 19 nt, Artificial Sequence
  Description of Artificial Sequence: Synthetic oligonucleotide
  Sense strand starting at position 1754 of SEQ ID NO: 1879566
ccucauuggcugugugauc

SEQ ID NO: 1916749 - RNA, 19 nt, Artificial Sequence
  Description of Artificial Sequence: Synthetic oligonucleotide
  Antisense strand to SEQ ID NO: 1916748
gaucacacagccaaugagg

SEQ ID NO: 1916750 - RNA, 19 nt, Artificial Sequence
  Description of Artificial Sequence: Synthetic oligonucleotide
  Sense strand starting at position 1775 of SEQ ID NO: 1879566
gggcaaguugcauaacuuc

SEQ ID NO: 1916751 - RNA, 19 nt, Artificial Sequence
  Description of Artificial Sequence: Synthetic oligonucleotide
  Antisense strand to SEQ ID NO: 1916750
gaaguuaugcaacuugccc

SEQ ID NO: 1916752 - RNA, 19 nt, Artificial Sequence
  Description of Artificial Sequence: Synthetic oligonucleotide
  Sense strand starting at position 1799 of SEQ ID NO: 1879566
gcccuauuugccuaucugu

SEQ ID NO: 1916753 - RNA, 19 nt, Artificial Sequence
  Description of Artificial Sequence: Synthetic oligonucleotide
  Antisense strand to SEQ ID NO: 1916752
acagauaggcaaauagggc

SEQ ID NO: 1916754 - RNA, 19 nt, Artificial Sequence
  Description of Artificial Sequence: Synthetic oligonucleotide
  Sense strand starting at position 1903 of SEQ ID NO: 1879566
gagugcucaguccauagca

SEQ ID NO: 1916755 - RNA, 19 nt, Artificial Sequence
  Description of Artificial Sequence: Synthetic oligonucleotide
  Antisense strand to SEQ ID NO: 1916754
ugcuauggacugagcacuc

SEQ ID NO: 1916756 - RNA, 19 nt, Artificial Sequence
  Description of Artificial Sequence: Synthetic oligonucleotide
  Sense strand starting at position 1905 of SEQ ID NO: 1879566
gugcucaguccauagcaau

SEQ ID NO: 1916757 - RNA, 19 nt, Artificial Sequence
  Description of Artificial Sequence: Synthetic oligonucleotide
  Antisense strand to SEQ ID NO: 1916756
auugcuauggacugagcac

SEQ ID NO: 1916758 - RNA, 19 nt, Artificial Sequence
  Description of Artificial Sequence: Synthetic oligonucleotide
  Sense strand starting at position 1911 of SEQ ID NO: 1879566
aguccauagcaauguuuau

SEQ ID NO: 1916759 - RNA, 19 nt, Artificial Sequence
  Description of Artificial Sequence: Synthetic oligonucleotide
  Antisense strand to SEQ ID NO: 1916758
auaaacauugcuauggacu

SEQ ID NO: 1916760 - RNA, 19 nt, Artificial Sequence
  Description of Artificial Sequence: Synthetic oligonucleotide
  Sense strand starting at position 2577 of SEQ ID NO: 1879566
acuaauaaguacuugggua

SEQ ID NO: 1916761 - RNA, 19 nt, Artificial Sequence
  Description of Artificial Sequence: Synthetic oligonucleotide
  Antisense strand to SEQ ID NO: 1916760
uacccaaguacuuauuagu

SEQ ID NO: 1916762 - RNA, 19 nt, Artificial Sequence
  Description of Artificial Sequence: Synthetic oligonucleotide
  Sense strand starting at position 2579 of SEQ ID NO: 1879566
uaauaaguacuuggguaau

SEQ ID NO: 1916763 - RNA, 19 nt, Artificial Sequence
  Description of Artificial Sequence: Synthetic oligonucleotide
  Antisense strand to SEQ ID NO: 1916762
auuacccaaguacuuauua

SEQ ID NO: 1916764 - RNA, 19 nt, Artificial Sequence
  Description of Artificial Sequence: Synthetic oligonucleotide
  Sense strand starting at position 2620 of SEQ ID NO: 1879566
aaaugcaguugaucagaga

SEQ ID NO: 1916765 - RNA, 19 nt, Artificial Sequence
  Description of Artificial Sequence: Synthetic oligonucleotide
  Antisense strand to SEQ ID NO: 1916764
ucucugaucaacugcauuu

SEQ ID NO: 1916766 - RNA, 19 nt, Artificial Sequence
  Description of Artificial Sequence: Synthetic oligonucleotide
  Sense strand starting at position 2694 of SEQ ID NO: 1879566
acucuuacacauugugcua

SEQ ID NO: 1916767 - RNA, 19 nt, Artificial Sequence
  Description of Artificial Sequence: Synthetic oligonucleotide
  Antisense strand to SEQ ID NO: 1916766
uagcacaauguguaagagu

SEQ ID NO: 1916768 - RNA, 19 nt, Artificial Sequence
  Description of Artificial Sequence: Synthetic oligonucleotide
  Sense strand starting at position 2701 of SEQ ID NO: 1879566
cacauugugcuaugaauga

SEQ ID NO: 1916769 - RNA, 19 nt, Artificial Sequence
  Description of Artificial Sequence: Synthetic oligonucleotide
  Antisense strand to SEQ ID NO: 1916768
ucauucauagcacaaugug

SEQ ID NO: 1916770 - RNA, 19 nt, Artificial Sequence
  Description of Artificial Sequence: Synthetic oligonucleotide
  Sense strand starting at position 2705 of SEQ ID NO: 1879566
uugugcuaugaaugagcaa

SEQ ID NO: 1916771 - RNA, 19 nt, Artificial Sequence
  Description of Artificial Sequence: Synthetic oligonucleotide
  Antisense strand to SEQ ID NO: 1916770
uugcucauucauagcacaa

SEQ ID NO: 1916772 - RNA, 19 nt, Artificial Sequence
  Description of Artificial Sequence: Synthetic oligonucleotide
  Sense strand starting at position 2706 of SEQ ID NO: 1879566
ugugcuaugaaugagcaaa

SEQ ID NO: 1916773 - RNA, 19 nt, Artificial Sequence
  Description of Artificial Sequence: Synthetic oligonucleotide
  Antisense strand to SEQ ID NO: 1916772
uuugcucauucauagcaca

SEQ ID NO: 1916774 - RNA, 19 nt, Artificial Sequence
  Description of Artificial Sequence: Synthetic oligonucleotide
  Sense strand starting at position 2730 of SEQ ID NO: 1879566
agaccucagcugugaaauu

SEQ ID NO: 1916775 - RNA, 19 nt, Artificial Sequence
  Description of Artificial Sequence: Synthetic oligonucleotide
  Antisense strand to SEQ ID NO: 1916774
aauuucacagcugaggucu

SEQ ID NO: 1916776 - RNA, 19 nt, Artificial Sequence
  Description of Artificial Sequence: Synthetic oligonucleotide
  Sense strand starting at position 2731 of SEQ ID NO: 1879566
gaccucagcugugaaauuu

SEQ ID NO: 1916777 - RNA, 19 nt, Artificial Sequence
  Description of Artificial Sequence: Synthetic oligonucleotide
  Antisense strand to SEQ ID NO: 1916776
aaauuucacagcugagguc

SEQ ID NO: 1916778 - RNA, 19 nt, Artificial Sequence
  Description of Artificial Sequence: Synthetic oligonucleotide
  Sense strand starting at position 2739 of SEQ ID NO: 1879566
cugugaaauuuccaagagg

SEQ ID NO: 1916779 - RNA, 19 nt, Artificial Sequence
  Description of Artificial Sequence: Synthetic oligonucleotide
  Antisense strand to SEQ ID NO: 1916778
ccucuuggaaauuucacag

SEQ ID NO: 1916780 - RNA, 19 nt, Artificial Sequence
  Description of Artificial Sequence: Synthetic oligonucleotide
  Sense strand starting at position 2949 of SEQ ID NO: 1879566
aguuaaccucccugagucu

SEQ ID NO: 1916781 - RNA, 19 nt, Artificial Sequence
  Description of Artificial Sequence: Synthetic oligonucleotide
  Antisense strand to SEQ ID NO: 1916780
agacucagggagguuaacu

SEQ ID NO: 1916782 - RNA, 19 nt, Artificial Sequence
  Description of Artificial Sequence: Synthetic oligonucleotide
  Sense strand starting at position 2961 of SEQ ID NO: 1879566
ugagucucagcuuacacau

SEQ ID NO: 1916783 - RNA, 19 nt, Artificial Sequence
  Description of Artificial Sequence: Synthetic oligonucleotide
  Antisense strand to SEQ ID NO: 1916782
auguguaagcugagacuca

SEQ ID NO: 1916784 - RNA, 19 nt, Artificial Sequence
  Description of Artificial Sequence: Synthetic oligonucleotide
  Sense strand starting at position 2990 of SEQ ID NO: 1879566
gggauaauguagucccuau

SEQ ID NO: 1916785 - RNA, 19 nt, Artificial Sequence
  Description of Artificial Sequence: Synthetic oligonucleotide
  Antisense strand to SEQ ID NO: 1916784
auagggacuacauuauccc

SEQ ID NO: 1916786 - RNA, 19 nt, Artificial Sequence
  Description of Artificial Sequence: Synthetic oligonucleotide
  Sense strand starting at position 3001 of SEQ ID NO: 1879566
gucccuaugucaucaccuu

SEQ ID NO: 1916787 - RNA, 19 nt, Artificial Sequence
  Description of Artificial Sequence: Synthetic oligonucleotide
  Antisense strand to SEQ ID NO: 1916786
aaggugaugacauagggac

SEQ ID NO: 1916788 - RNA, 19 nt, Artificial Sequence
  Description of Artificial Sequence: Synthetic oligonucleotide
  Sense strand starting at position 3119 of SEQ ID NO: 1879566
agaguuagucagggagggu

SEQ ID NO: 1916789 - RNA, 19 nt, Artificial Sequence
  Description of Artificial Sequence: Synthetic oligonucleotide
  Antisense strand to SEQ ID NO: 1916788
acccucccugacuaacucu

SEQ ID NO: 1916790 - RNA, 19 nt, Artificial Sequence
  Description of Artificial Sequence: Synthetic oligonucleotide
  Sense strand starting at position 3253 of SEQ ID NO: 1879566
gagggugcaguguguuaga

SEQ ID NO: 1916791 - RNA, 19 nt, Artificial Sequence
  Description of Artificial Sequence: Synthetic oligonucleotide
  Antisense strand to SEQ ID NO: 1916790
ucuaacacacugcacccuc

SEQ ID NO: 1916792 - RNA, 19 nt, Artificial Sequence
  Description of Artificial Sequence: Synthetic oligonucleotide
  Sense strand starting at position 3277 of SEQ ID NO: 1879566
ugaggaauguggccaguga

SEQ ID NO: 1916793 - RNA, 19 nt, Artificial Sequence
  Description of Artificial Sequence: Synthetic oligonucleotide
  Antisense strand to SEQ ID NO: 1916792
ucacuggccacauuccuca

SEQ ID NO: 1916794 - RNA, 19 nt, Artificial Sequence
  Description of Artificial Sequence: Synthetic oligonucleotide
  Sense strand starting at position 3278 of SEQ ID NO: 1879566
gaggaauguggccagugaa

SEQ ID NO: 1916795 - RNA, 19 nt, Artificial Sequence
  Description of Artificial Sequence: Synthetic oligonucleotide
  Antisense strand to SEQ ID NO: 1916794
uucacuggccacauuccuc

SEQ ID NO: 1916796 - RNA, 19 nt, Artificial Sequence
  Description of Artificial Sequence: Synthetic oligonucleotide
  Sense strand starting at position 3728 of SEQ ID NO: 1879566
cugccaaauucugucuguu

SEQ ID NO: 1916797 - RNA, 19 nt, Artificial Sequence
  Description of Artificial Sequence: Synthetic oligonucleotide
  Antisense strand to SEQ ID NO: 1916796
aacagacagaauuuggcag

SEQ ID NO: 1916798 - RNA, 19 nt, Artificial Sequence
  Description of Artificial Sequence: Synthetic oligonucleotide
  Sense strand starting at position 3730 of SEQ ID NO: 1879566
gccaaauucugucuguuaa

SEQ ID NO: 1916799 - RNA, 19 nt, Artificial Sequence
  Description of Artificial Sequence: Synthetic oligonucleotide
  Antisense strand to SEQ ID NO: 1916798
uuaacagacagaauuuggc

SEQ ID NO: 1916800 - RNA, 19 nt, Artificial Sequence
  Description of Artificial Sequence: Synthetic oligonucleotide
  Sense strand starting at position 3731 of SEQ ID NO: 1879566
ccaaauucugucuguuaaa

SEQ ID NO: 1916801 - RNA, 19 nt, Artificial Sequence
  Description of Artificial Sequence: Synthetic oligonucleotide
  Antisense strand to SEQ ID NO: 1916800
uuuaacagacagaauuugg

SEQ ID NO: 1916802 - RNA, 19 nt, Artificial Sequence
  Description of Artificial Sequence: Synthetic oligonucleotide
  Sense strand starting at position 3840 of SEQ ID NO: 1879566
gacauaucgcauuaaugag

SEQ ID NO: 1916803 - RNA, 19 nt, Artificial Sequence
  Description of Artificial Sequence: Synthetic oligonucleotide
  Antisense strand to SEQ ID NO: 1916802
cucauuaaugcgauauguc

SEQ ID NO: 1916804 - RNA, 19 nt, Artificial Sequence
  Description of Artificial Sequence: Synthetic oligonucleotide
  Sense strand starting at position 3869 of SEQ ID NO: 1879566
gggcuguggugguucuaga

SEQ ID NO: 1916805 - RNA, 19 nt, Artificial Sequence
  Description of Artificial Sequence: Synthetic oligonucleotide
  Antisense strand to SEQ ID NO: 1916804
ucuagaaccaccacagccc

SEQ ID NO: 1916806 - RNA, 19 nt, Artificial Sequence
  Description of Artificial Sequence: Synthetic oligonucleotide
  Sense strand starting at position 3873 of SEQ ID NO: 1879566
uguggugguucuagaaagu

SEQ ID NO: 1916807 - RNA, 19 nt, Artificial Sequence
  Description of Artificial Sequence: Synthetic oligonucleotide
  Antisense strand to SEQ ID NO: 1916806
acuuucuagaaccaccaca

SEQ ID NO: 1916808 - RNA, 19 nt, Artificial Sequence
  Description of Artificial Sequence: Synthetic oligonucleotide
  Sense strand starting at position 3904 of SEQ ID NO: 1879566
gcuggagacagcugcuuau

SEQ ID NO: 1916809 - RNA, 19 nt, Artificial Sequence
  Description of Artificial Sequence: Synthetic oligonucleotide
  Antisense strand to SEQ ID NO: 1916808
auaagcagcugucuccagc

SEQ ID NO: 1916810 - RNA, 19 nt, Artificial Sequence
  Description of Artificial Sequence: Synthetic oligonucleotide
  Sense strand starting at position 3917 of SEQ ID NO: 1879566
gcuuaugcagcccaaucau

SEQ ID NO: 1916811 - RNA, 19 nt, Artificial Sequence
  Description of Artificial Sequence: Synthetic oligonucleotide
  Antisense strand to SEQ ID NO: 1916810
augauugggcugcauaagc

SEQ ID NO: 1916812 - RNA, 19 nt, Artificial Sequence
  Description of Artificial Sequence: Synthetic oligonucleotide
  Sense strand starting at position 3953 of SEQ ID NO: 1879566
gagccaguguuuccagaac

SEQ ID NO: 1916813 - RNA, 19 nt, Artificial Sequence
  Description of Artificial Sequence: Synthetic oligonucleotide
  Antisense strand to SEQ ID NO: 1916812
guucuggaaacacuggcuc

SEQ ID NO: 1916814 - RNA, 19 nt, Artificial Sequence
  Description of Artificial Sequence: Synthetic oligonucleotide
  Sense strand starting at position 20 of SEQ ID NO: 1879567
ggaucagucgcuucugcuu

SEQ ID NO: 1916815 - RNA, 19 nt, Artificial Sequence
  Description of Artificial Sequence: Synthetic oligonucleotide
  Antisense strand to SEQ ID NO: 1916814
aagcagaagcgacugaucc

SEQ ID NO: 1916816 - RNA, 19 nt, Artificial Sequence
  Description of Artificial Sequence: Synthetic oligonucleotide
  Sense strand starting at position 451 of SEQ ID NO: 1879567
ucaaguuguccugaaagua

SEQ ID NO: 1916817 - RNA, 19 nt, Artificial Sequence
  Description of Artificial Sequence: Synthetic oligonucleotide
  Antisense strand to SEQ ID NO: 1916816
uacuuucaggacaacuuga

SEQ ID NO: 1916818 - RNA, 19 nt, Artificial Sequence
  Description of Artificial Sequence: Synthetic oligonucleotide
  Sense strand starting at position 540 of SEQ ID NO: 1879567
ccacaucacucuccgaaga

SEQ ID NO: 1916819 - RNA, 19 nt, Artificial Sequence
  Description of Artificial Sequence: Synthetic oligonucleotide
  Antisense strand to SEQ ID NO: 1916818
ucuucggagagugaugugg

SEQ ID NO: 1916820 - RNA, 19 nt, Artificial Sequence
  Description of Artificial Sequence: Synthetic oligonucleotide
  Sense strand starting at position 597 of SEQ ID NO: 1879567
ccaucauuugcaugcaguu

SEQ ID NO: 1916821 - RNA, 19 nt, Artificial Sequence
  Description of Artificial Sequence: Synthetic oligonucleotide
  Antisense strand to SEQ ID NO: 1916820
aacugcaugcaaaugaugg

SEQ ID NO: 1916822 - RNA, 19 nt, Artificial Sequence
  Description of Artificial Sequence: Synthetic oligonucleotide
  Sense strand starting at position 674 of SEQ ID NO: 1879567
cucucuagcccuuagcaga

SEQ ID NO: 1916823 - RNA, 19 nt, Artificial Sequence
  Description of Artificial Sequence: Synthetic oligonucleotide
  Antisense strand to SEQ ID NO: 1916822
ucugcuaagggcuagagag

SEQ ID NO: 1916824 - RNA, 19 nt, Artificial Sequence
  Description of Artificial Sequence: Synthetic oligonucleotide
  Sense strand starting at position 688 of SEQ ID NO: 1879567
gcagaaugucuagagcaua

SEQ ID NO: 1916825 - RNA, 19 nt, Artificial Sequence
  Description of Artificial Sequence: Synthetic oligonucleotide
  Antisense strand to SEQ ID NO: 1916824
uaugcucuagacauucugc

SEQ ID NO: 1916826 - RNA, 19 nt, Artificial Sequence
  Description of Artificial Sequence: Synthetic oligonucleotide
  Sense strand starting at position 691 of SEQ ID NO: 1879567
gaaugucuagagcauauua

SEQ ID NO: 1916827 - RNA, 19 nt, Artificial Sequence
  Description of Artificial Sequence: Synthetic oligonucleotide
  Antisense strand to SEQ ID NO: 1916826
uaauaugcucuagacauuc

SEQ ID NO: 1916828 - RNA, 19 nt, Artificial Sequence
  Description of Artificial Sequence: Synthetic oligonucleotide
  Sense strand starting at position 693 of SEQ ID NO: 1879567
augucuagagcauauuaga

SEQ ID NO: 1916829 - RNA, 19 nt, Artificial Sequence
  Description of Artificial Sequence: Synthetic oligonucleotide
  Antisense strand to SEQ ID NO: 1916828
ucuaauaugcucuagacau

SEQ ID NO: 1916830 - RNA, 19 nt, Artificial Sequence
  Description of Artificial Sequence: Synthetic oligonucleotide
  Sense strand starting at position 696 of SEQ ID NO: 1879567
ucuagagcauauuagauuu

SEQ ID NO: 1916831 - RNA, 19 nt, Artificial Sequence
  Description of Artificial Sequence: Synthetic oligonucleotide
  Antisense strand to SEQ ID NO: 1916830
aaaucuaauaugcucuaga

SEQ ID NO: 1916832 - RNA, 19 nt, Artificial Sequence
  Description of Artificial Sequence: Synthetic oligonucleotide
  Sense strand starting at position 816 of SEQ ID NO: 1879567
ggacaauuaucugcccuca

SEQ ID NO: 1916833 - RNA, 19 nt, Artificial Sequence
  Description of Artificial Sequence: Synthetic oligonucleotide
  Antisense strand to SEQ ID NO: 1916832
ugagggcagauaauugucc

SEQ ID NO: 1916834 - RNA, 19 nt, Artificial Sequence
  Description of Artificial Sequence: Synthetic oligonucleotide
  Sense strand starting at position 896 of SEQ ID NO: 1879567
guguuacccagugaugagu

SEQ ID NO: 1916835 - RNA, 19 nt, Artificial Sequence
  Description of Artificial Sequence: Synthetic oligonucleotide
  Antisense strand to SEQ ID NO: 1916834
acucaucacuggguaacac

SEQ ID NO: 1916836 - RNA, 19 nt, Artificial Sequence
  Description of Artificial Sequence: Synthetic oligonucleotide
  Sense strand starting at position 957 of SEQ ID NO: 1879567
gaaauacgugcugaguaaa

SEQ ID NO: 1916837 - RNA, 19 nt, Artificial Sequence
  Description of Artificial Sequence: Synthetic oligonucleotide
  Antisense strand to SEQ ID NO: 1916836
uuuacucagcacguauuuc

SEQ ID NO: 1916838 - RNA, 19 nt, Artificial Sequence
  Description of Artificial Sequence: Synthetic oligonucleotide
  Sense strand starting at position 960 of SEQ ID NO: 1879567
auacgugcugaguaaauga

SEQ ID NO: 1916839 - RNA, 19 nt, Artificial Sequence
  Description of Artificial Sequence: Synthetic oligonucleotide
  Antisense strand to SEQ ID NO: 1916838
ucauuuacucagcacguau

SEQ ID NO: 1916840 - RNA, 19 nt, Artificial Sequence
  Description of Artificial Sequence: Synthetic oligonucleotide
  Sense strand starting at position 1142 of SEQ ID NO: 1879567
auggucugugagcaauaga

SEQ ID NO: 1916841 - RNA, 19 nt, Artificial Sequence
  Description of Artificial Sequence: Synthetic oligonucleotide
  Antisense strand to SEQ ID NO: 1916840
ucuauugcucacagaccau

SEQ ID NO: 1916842 - RNA, 19 nt, Artificial Sequence
  Description of Artificial Sequence: Synthetic oligonucleotide
  Sense strand starting at position 1145 of SEQ ID NO: 1879567
gucugugagcaauagaaug

SEQ ID NO: 1916843 - RNA, 19 nt, Artificial Sequence
  Description of Artificial Sequence: Synthetic oligonucleotide
  Antisense strand to SEQ ID NO: 1916842
cauucuauugcucacagac

SEQ ID NO: 1916844 - RNA, 19 nt, Artificial Sequence
  Description of Artificial Sequence: Synthetic oligonucleotide
  Sense strand starting at position 1150 of SEQ ID NO: 1879567
ugagcaauagaaugagcaa

SEQ ID NO: 1916845 - RNA, 19 nt, Artificial Sequence
  Description of Artificial Sequence: Synthetic oligonucleotide
  Antisense strand to SEQ ID NO: 1916844
uugcucauucuauugcuca

SEQ ID NO: 1916846 - RNA, 19 nt, Artificial Sequence
  Description of Artificial Sequence: Synthetic oligonucleotide
  Sense strand starting at position 1161 of SEQ ID NO: 1879567
augagcaaauguuuaucua

SEQ ID NO: 1916847 - RNA, 19 nt, Artificial Sequence
  Description of Artificial Sequence: Synthetic oligonucleotide
  Antisense strand to SEQ ID NO: 1916846
uagauaaacauuugcucau

SEQ ID NO: 1916848 - RNA, 19 nt, Artificial Sequence
  Description of Artificial Sequence: Synthetic oligonucleotide
  Sense strand starting at position 1254 of SEQ ID NO: 1879567
gugcauuucuuucccuuga

SEQ ID NO: 1916849 - RNA, 19 nt, Artificial Sequence
  Description of Artificial Sequence: Synthetic oligonucleotide
  Antisense strand to SEQ ID NO: 1916848
ucaagggaaagaaaugcac

SEQ ID NO: 1916850 - RNA, 19 nt, Artificial Sequence
  Description of Artificial Sequence: Synthetic oligonucleotide
  Sense strand starting at position 2103 of SEQ ID NO: 1879567
guccaagaacucuagguuu

SEQ ID NO: 1916851 - RNA, 19 nt, Artificial Sequence
  Description of Artificial Sequence: Synthetic oligonucleotide
  Antisense strand to SEQ ID NO: 1916850
aaaccuagaguucuuggac

SEQ ID NO: 1916852 - RNA, 19 nt, Artificial Sequence
  Description of Artificial Sequence: Synthetic oligonucleotide
  Sense strand starting at position 2255 of SEQ ID NO: 1879567
gagacacagucuguaaaga

SEQ ID NO: 1916853 - RNA, 19 nt, Artificial Sequence
  Description of Artificial Sequence: Synthetic oligonucleotide
  Antisense strand to SEQ ID NO: 1916852
ucuuuacagacugugucuc

SEQ ID NO: 1916854 - RNA, 19 nt, Artificial Sequence
  Description of Artificial Sequence: Synthetic oligonucleotide
  Sense strand starting at position 2320 of SEQ ID NO: 1879567
auggcuggguccuuauaaa

SEQ ID NO: 1916855 - RNA, 19 nt, Artificial Sequence
  Description of Artificial Sequence: Synthetic oligonucleotide
  Antisense strand to SEQ ID NO: 1916854
uuuauaaggacccagccau

SEQ ID NO: 1916856 - RNA, 19 nt, Artificial Sequence
  Description of Artificial Sequence: Synthetic oligonucleotide
  Sense strand starting at position 2542 of SEQ ID NO: 1879567
ugacuaacacagugacauu

SEQ ID NO: 1916857 - RNA, 19 nt, Artificial Sequence
  Description of Artificial Sequence: Synthetic oligonucleotide
  Antisense strand to SEQ ID NO: 1916856
aaugucacuguguuaguca

SEQ ID NO: 1916858 - RNA, 19 nt, Artificial Sequence
  Description of Artificial Sequence: Synthetic oligonucleotide
  Sense strand starting at position 2769 of SEQ ID NO: 1879567
ucuauucuccuugagugga

SEQ ID NO: 1916859 - RNA, 19 nt, Artificial Sequence
  Description of Artificial Sequence: Synthetic oligonucleotide
  Antisense strand to SEQ ID NO: 1916858
uccacucaaggagaauaga

SEQ ID NO: 1916860 - RNA, 19 nt, Artificial Sequence
  Description of Artificial Sequence: Synthetic oligonucleotide
  Sense strand starting at position 2857 of SEQ ID NO: 1879567
gcaagaacuucuuugaucu

SEQ ID NO: 1916861 - RNA, 19 nt, Artificial Sequence
  Description of Artificial Sequence: Synthetic oligonucleotide
  Antisense strand to SEQ ID NO: 1916860
agaucaaagaaguucuugc

SEQ ID NO: 1916862 - RNA, 19 nt, Artificial Sequence
  Description of Artificial Sequence: Synthetic oligonucleotide
  Sense strand starting at position 2924 of SEQ ID NO: 1879567
acauguuauugaccaguca

SEQ ID NO: 1916863 - RNA, 19 nt, Artificial Sequence
  Description of Artificial Sequence: Synthetic oligonucleotide
  Antisense strand to SEQ ID NO: 1916862
ugacuggucaauaacaugu

SEQ ID NO: 1916864 - RNA, 19 nt, Artificial Sequence
  Description of Artificial Sequence: Synthetic oligonucleotide
  Sense strand starting at position 3187 of SEQ ID NO: 1879567
gcagauucugcugagaaca

SEQ ID NO: 1916865 - RNA, 19 nt, Artificial Sequence
  Description of Artificial Sequence: Synthetic oligonucleotide
  Antisense strand to SEQ ID NO: 1916864
uguucucagcagaaucugc

SEQ ID NO: 1916866 - RNA, 19 nt, Artificial Sequence
  Description of Artificial Sequence: Synthetic oligonucleotide
  Sense strand starting at position 3258 of SEQ ID NO: 1879567
ggcaaauccucuccacaga

SEQ ID NO: 1916867 - RNA, 19 nt, Artificial Sequence
  Description of Artificial Sequence: Synthetic oligonucleotide
  Antisense strand to SEQ ID NO: 1916866
ucuguggagaggauuugcc

SEQ ID NO: 1916868 - RNA, 19 nt, Artificial Sequence
  Description of Artificial Sequence: Synthetic oligonucleotide
  Sense strand starting at position 3495 of SEQ ID NO: 1879567
cagauaaagucucugcaag

SEQ ID NO: 1916869 - RNA, 19 nt, Artificial Sequence
  Description of Artificial Sequence: Synthetic oligonucleotide
  Antisense strand to SEQ ID NO: 1916868
cuugcagagacuuuaucug

SEQ ID NO: 1916870 - RNA, 19 nt, Artificial Sequence
  Description of Artificial Sequence: Synthetic oligonucleotide
  Sense strand starting at position 3496 of SEQ ID NO: 1879567
agauaaagucucugcaaga

SEQ ID NO: 1916871 - RNA, 19 nt, Artificial Sequence
  Description of Artificial Sequence: Synthetic oligonucleotide
  Antisense strand to SEQ ID NO: 1916870
ucuugcagagacuuuaucu

SEQ ID NO: 1916872 - RNA, 19 nt, Artificial Sequence
  Description of Artificial Sequence: Synthetic oligonucleotide
  Sense strand starting at position 3497 of SEQ ID NO: 1879567
gauaaagucucugcaagag

SEQ ID NO: 1916873 - RNA, 19 nt, Artificial Sequence
  Description of Artificial Sequence: Synthetic oligonucleotide
  Antisense strand to SEQ ID NO: 1916872
cucuugcagagacuuuauc

SEQ ID NO: 1916874 - RNA, 19 nt, Artificial Sequence
  Description of Artificial Sequence: Synthetic oligonucleotide
  Sense strand starting at position 3532 of SEQ ID NO: 1879567
agcuucuauuugucaguca

SEQ ID NO: 1916875 - RNA, 19 nt, Artificial Sequence
  Description of Artificial Sequence: Synthetic oligonucleotide
  Antisense strand to SEQ ID NO: 1916874
ugacugacaaauagaagcu

SEQ ID NO: 1916876 - RNA, 19 nt, Artificial Sequence
  Description of Artificial Sequence: Synthetic oligonucleotide
  Sense strand starting at position 3582 of SEQ ID NO: 1879567
auucuaagauggucugcaa

SEQ ID NO: 1916877 - RNA, 19 nt, Artificial Sequence
  Description of Artificial Sequence: Synthetic oligonucleotide
  Antisense strand to SEQ ID NO: 1916876
uugcagaccaucuuagaau

SEQ ID NO: 1916878 - RNA, 19 nt, Artificial Sequence
  Description of Artificial Sequence: Synthetic oligonucleotide
  Sense strand starting at position 3585 of SEQ ID NO: 1879567
cuaagauggucugcaagau

SEQ ID NO: 1916879 - RNA, 19 nt, Artificial Sequence
  Description of Artificial Sequence: Synthetic oligonucleotide
  Antisense strand to SEQ ID NO: 1916878
aucuugcagaccaucuuag

SEQ ID NO: 1916880 - RNA, 19 nt, Artificial Sequence
  Description of Artificial Sequence: Synthetic oligonucleotide
  Sense strand starting at position 3586 of SEQ ID NO: 1879567
uaagauggucugcaagauu

SEQ ID NO: 1916881 - RNA, 19 nt, Artificial Sequence
  Description of Artificial Sequence: Synthetic oligonucleotide
  Antisense strand to SEQ ID NO: 1916880
aaucuugcagaccaucuua

SEQ ID NO: 1916882 - RNA, 19 nt, Artificial Sequence
  Description of Artificial Sequence: Synthetic oligonucleotide
  Sense strand starting at position 3645 of SEQ ID NO: 1879567
ggcaaauacuaaucuaggu

SEQ ID NO: 1916883 - RNA, 19 nt, Artificial Sequence
  Description of Artificial Sequence: Synthetic oligonucleotide
  Antisense strand to SEQ ID NO: 1916882
accuagauuaguauuugcc

SEQ ID NO: 1916884 - RNA, 19 nt, Artificial Sequence
  Description of Artificial Sequence: Synthetic oligonucleotide
  Sense strand starting at position 3699 of SEQ ID NO: 1879567
gccaaaucaguugacuuua

SEQ ID NO: 1916885 - RNA, 19 nt, Artificial Sequence
  Description of Artificial Sequence: Synthetic oligonucleotide
  Antisense strand to SEQ ID NO: 1916884
uaaagucaacugauuuggc

SEQ ID NO: 1916886 - RNA, 19 nt, Artificial Sequence
  Description of Artificial Sequence: Synthetic oligonucleotide
  Sense strand starting at position 3719 of SEQ ID NO: 1879567
ggagaauauccuggcugag

SEQ ID NO: 1916887 - RNA, 19 nt, Artificial Sequence
  Description of Artificial Sequence: Synthetic oligonucleotide
  Antisense strand to SEQ ID NO: 1916886
cucagccaggauauucucc

SEQ ID NO: 1916888 - RNA, 19 nt, Artificial Sequence
  Description of Artificial Sequence: Synthetic oligonucleotide
  Sense strand starting at position 3775 of SEQ ID NO: 1879567
uucuuccugaagugugaga

SEQ ID NO: 1916889 - RNA, 19 nt, Artificial Sequence
  Description of Artificial Sequence: Synthetic oligonucleotide
  Antisense strand to SEQ ID NO: 1916888
ucucacacuucaggaagaa

SEQ ID NO: 1916890 - RNA, 19 nt, Artificial Sequence
  Description of Artificial Sequence: Synthetic oligonucleotide
  Sense strand starting at position 3826 of SEQ ID NO: 1879567
ggcuuuggagauggaagau

SEQ ID NO: 1916891 - RNA, 19 nt, Artificial Sequence
  Description of Artificial Sequence: Synthetic oligonucleotide
  Antisense strand to SEQ ID NO: 1916890
aucuuccaucuccaaagcc

SEQ ID NO: 1916892 - RNA, 19 nt, Artificial Sequence
  Description of Artificial Sequence: Synthetic oligonucleotide
  Sense strand starting at position 3854 of SEQ ID NO: 1879567
gagagauaugggugacuuc

SEQ ID NO: 1916893 - RNA, 19 nt, Artificial Sequence
  Description of Artificial Sequence: Synthetic oligonucleotide
  Antisense strand to SEQ ID NO: 1916892
gaagucacccauaucucuc

SEQ ID NO: 1916894 - RNA, 19 nt, Artificial Sequence
  Description of Artificial Sequence: Synthetic oligonucleotide
  Sense strand starting at position 30 of SEQ ID NO: 1879568
gucaaccuucucuagggau

SEQ ID NO: 1916895 - RNA, 19 nt, Artificial Sequence
  Description of Artificial Sequence: Synthetic oligonucleotide
  Antisense strand to SEQ ID NO: 1916894
aucccuagagaagguugac

SEQ ID NO: 1916896 - RNA, 19 nt, Artificial Sequence
  Description of Artificial Sequence: Synthetic oligonucleotide
  Sense strand starting at position 171 of SEQ ID NO: 1879568
auugaaugcugauuaccaa

SEQ ID NO: 1916897 - RNA, 19 nt, Artificial Sequence
  Description of Artificial Sequence: Synthetic oligonucleotide
  Antisense strand to SEQ ID NO: 1916896
uugguaaucagcauucaau

SEQ ID NO: 1916898 - RNA, 19 nt, Artificial Sequence
  Description of Artificial Sequence: Synthetic oligonucleotide
  Sense strand starting at position 172 of SEQ ID NO: 1879568
uugaaugcugauuaccaau

SEQ ID NO: 1916899 - RNA, 19 nt, Artificial Sequence
  Description of Artificial Sequence: Synthetic oligonucleotide
  Antisense strand to SEQ ID NO: 1916898
auugguaaucagcauucaa

SEQ ID NO: 1916900 - RNA, 19 nt, Artificial Sequence
  Description of Artificial Sequence: Synthetic oligonucleotide
  Sense strand starting at position 469 of SEQ ID NO: 1879568
gccucuaaccaguagauac

SEQ ID NO: 1916901 - RNA, 19 nt, Artificial Sequence
  Description of Artificial Sequence: Synthetic oligonucleotide
  Antisense strand to SEQ ID NO: 1916900
guaucuacugguuagaggc

SEQ ID NO: 1916902 - RNA, 19 nt, Artificial Sequence
  Description of Artificial Sequence: Synthetic oligonucleotide
  Sense strand starting at position 541 of SEQ ID NO: 1879568
gacuguccucuggaaggua

SEQ ID NO: 1916903 - RNA, 19 nt, Artificial Sequence
  Description of Artificial Sequence: Synthetic oligonucleotide
  Antisense strand to SEQ ID NO: 1916902
uaccuuccagaggacaguc

SEQ ID NO: 1916904 - RNA, 19 nt, Artificial Sequence
  Description of Artificial Sequence: Synthetic oligonucleotide
  Sense strand starting at position 879 of SEQ ID NO: 1879568
gcucuucuugaugaccuau

SEQ ID NO: 1916905 - RNA, 19 nt, Artificial Sequence
  Description of Artificial Sequence: Synthetic oligonucleotide
  Antisense strand to SEQ ID NO: 1916904
auaggucaucaagaagagc

SEQ ID NO: 1916906 - RNA, 19 nt, Artificial Sequence
  Description of Artificial Sequence: Synthetic oligonucleotide
  Sense strand starting at position 881 of SEQ ID NO: 1879568
ucuucuugaugaccuauga

SEQ ID NO: 1916907 - RNA, 19 nt, Artificial Sequence
  Description of Artificial Sequence: Synthetic oligonucleotide
  Antisense strand to SEQ ID NO: 1916906
ucauaggucaucaagaaga

SEQ ID NO: 1916908 - RNA, 19 nt, Artificial Sequence
  Description of Artificial Sequence: Synthetic oligonucleotide
  Sense strand starting at position 890 of SEQ ID NO: 1879568
ugaccuaugacuuguggga

SEQ ID NO: 1916909 - RNA, 19 nt, Artificial Sequence
  Description of Artificial Sequence: Synthetic oligonucleotide
  Antisense strand to SEQ ID NO: 1916908
ucccacaagucauagguca

SEQ ID NO: 1916910 - RNA, 19 nt, Artificial Sequence
  Description of Artificial Sequence: Synthetic oligonucleotide
  Sense strand starting at position 894 of SEQ ID NO: 1879568
cuaugacuugugggaguga

SEQ ID NO: 1916911 - RNA, 19 nt, Artificial Sequence
  Description of Artificial Sequence: Synthetic oligonucleotide
  Antisense strand to SEQ ID NO: 1916910
ucacucccacaagucauag

SEQ ID NO: 1916912 - RNA, 19 nt, Artificial Sequence
  Description of Artificial Sequence: Synthetic oligonucleotide
  Sense strand starting at position 911 of SEQ ID NO: 1879568
gaaguagcucuguacagaa

SEQ ID NO: 1916913 - RNA, 19 nt, Artificial Sequence
  Description of Artificial Sequence: Synthetic oligonucleotide
  Antisense strand to SEQ ID NO: 1916912
uucuguacagagcuacuuc

SEQ ID NO: 1916914 - RNA, 19 nt, Artificial Sequence
  Description of Artificial Sequence: Synthetic oligonucleotide
  Sense strand starting at position 986 of SEQ ID NO: 1879568
agcagcauuucucuaguca

SEQ ID NO: 1916915 - RNA, 19 nt, Artificial Sequence
  Description of Artificial Sequence: Synthetic oligonucleotide
  Antisense strand to SEQ ID NO: 1916914
ugacuagagaaaugcugcu

SEQ ID NO: 1916916 - RNA, 19 nt, Artificial Sequence
  Description of Artificial Sequence: Synthetic oligonucleotide
  Sense strand starting at position 1012 of SEQ ID NO: 1879568
aaaguuuggucucuaacug

SEQ ID NO: 1916917 - RNA, 19 nt, Artificial Sequence
  Description of Artificial Sequence: Synthetic oligonucleotide
  Antisense strand to SEQ ID NO: 1916916
caguuagagaccaaacuuu

SEQ ID NO: 1916918 - RNA, 19 nt, Artificial Sequence
  Description of Artificial Sequence: Synthetic oligonucleotide
  Sense strand starting at position 1019 of SEQ ID NO: 1879568
ggucucuaacuggaaguuu

SEQ ID NO: 1916919 - RNA, 19 nt, Artificial Sequence
  Description of Artificial Sequence: Synthetic oligonucleotide
  Antisense strand to SEQ ID NO: 1916918
aaacuuccaguuagagacc

SEQ ID NO: 1916920 - RNA, 19 nt, Artificial Sequence
  Description of Artificial Sequence: Synthetic oligonucleotide
  Sense strand starting at position 1093 of SEQ ID NO: 1879568
auaugcaggcucuaugaca

SEQ ID NO: 1916921 - RNA, 19 nt, Artificial Sequence
  Description of Artificial Sequence: Synthetic oligonucleotide
  Antisense strand to SEQ ID NO: 1916920
ugucauagagccugcauau

SEQ ID NO: 1916922 - RNA, 19 nt, Artificial Sequence
  Description of Artificial Sequence: Synthetic oligonucleotide
  Sense strand starting at position 1339 of SEQ ID NO: 1879568
guaccucaugaauaaguua

SEQ ID NO: 1916923 - RNA, 19 nt, Artificial Sequence
  Description of Artificial Sequence: Synthetic oligonucleotide
  Antisense strand to SEQ ID NO: 1916922
uaacuuauucaugagguac

SEQ ID NO: 1916924 - RNA, 19 nt, Artificial Sequence
  Description of Artificial Sequence: Synthetic oligonucleotide
  Sense strand starting at position 1342 of SEQ ID NO: 1879568
ccucaugaauaaguuagau

SEQ ID NO: 1916925 - RNA, 19 nt, Artificial Sequence
  Description of Artificial Sequence: Synthetic oligonucleotide
  Antisense strand to SEQ ID NO: 1916924
aucuaacuuauucaugagg

SEQ ID NO: 1916926 - RNA, 19 nt, Artificial Sequence
  Description of Artificial Sequence: Synthetic oligonucleotide
  Sense strand starting at position 1439 of SEQ ID NO: 1879568
uaauccaugcuguggaaua

SEQ ID NO: 1916927 - RNA, 19 nt, Artificial Sequence
  Description of Artificial Sequence: Synthetic oligonucleotide
  Antisense strand to SEQ ID NO: 1916926
uauuccacagcauggauua

SEQ ID NO: 1916928 - RNA, 19 nt, Artificial Sequence
  Description of Artificial Sequence: Synthetic oligonucleotide
  Sense strand starting at position 1547 of SEQ ID NO: 1879568
agacacaauugcucuauga

SEQ ID NO: 1916929 - RNA, 19 nt, Artificial Sequence
  Description of Artificial Sequence: Synthetic oligonucleotide
  Antisense strand to SEQ ID NO: 1916928
ucauagagcaauugugucu

SEQ ID NO: 1916930 - RNA, 19 nt, Artificial Sequence
  Description of Artificial Sequence: Synthetic oligonucleotide
  Sense strand starting at position 1551 of SEQ ID NO: 1879568
acaauugcucuaugaggua

SEQ ID NO: 1916931 - RNA, 19 nt, Artificial Sequence
  Description of Artificial Sequence: Synthetic oligonucleotide
  Antisense strand to SEQ ID NO: 1916930
uaccucauagagcaauugu

SEQ ID NO: 1916932 - RNA, 19 nt, Artificial Sequence
  Description of Artificial Sequence: Synthetic oligonucleotide
  Sense strand starting at position 1558 of SEQ ID NO: 1879568
cucuaugagguagguagaa

SEQ ID NO: 1916933 - RNA, 19 nt, Artificial Sequence
  Description of Artificial Sequence: Synthetic oligonucleotide
  Antisense strand to SEQ ID NO: 1916932
uucuaccuaccucauagag

SEQ ID NO: 1916934 - RNA, 19 nt, Artificial Sequence
  Description of Artificial Sequence: Synthetic oligonucleotide
  Sense strand starting at position 1588 of SEQ ID NO: 1879568
auauguccuccucaaggau

SEQ ID NO: 1916935 - RNA, 19 nt, Artificial Sequence
  Description of Artificial Sequence: Synthetic oligonucleotide
  Antisense strand to SEQ ID NO: 1916934
auccuugaggaggacauau

SEQ ID NO: 1916936 - RNA, 19 nt, Artificial Sequence
  Description of Artificial Sequence: Synthetic oligonucleotide
  Sense strand starting at position 1631 of SEQ ID NO: 1879568
agcugacuaguccagguua

SEQ ID NO: 1916937 - RNA, 19 nt, Artificial Sequence
  Description of Artificial Sequence: Synthetic oligonucleotide
  Antisense strand to SEQ ID NO: 1916936
uaaccuggacuagucagcu

SEQ ID NO: 1916938 - RNA, 19 nt, Artificial Sequence
  Description of Artificial Sequence: Synthetic oligonucleotide
  Sense strand starting at position 1633 of SEQ ID NO: 1879568
cugacuaguccagguuaug

SEQ ID NO: 1916939 - RNA, 19 nt, Artificial Sequence
  Description of Artificial Sequence: Synthetic oligonucleotide
  Antisense strand to SEQ ID NO: 1916938
cauaaccuggacuagucag

SEQ ID NO: 1916940 - RNA, 19 nt, Artificial Sequence
  Description of Artificial Sequence: Synthetic oligonucleotide
  Sense strand starting at position 1739 of SEQ ID NO: 1879568
ggcaaucaucaaugcaaag

SEQ ID NO: 1916941 - RNA, 19 nt, Artificial Sequence
  Description of Artificial Sequence: Synthetic oligonucleotide
  Antisense strand to SEQ ID NO: 1916940
cuuugcauugaugauugcc

SEQ ID NO: 1916942 - RNA, 19 nt, Artificial Sequence
  Description of Artificial Sequence: Synthetic oligonucleotide
  Sense strand starting at position 1826 of SEQ ID NO: 1879568
uauaucgauucugcaggaa

SEQ ID NO: 1916943 - RNA, 19 nt, Artificial Sequence
  Description of Artificial Sequence: Synthetic oligonucleotide
  Antisense strand to SEQ ID NO: 1916942
uuccugcagaaucgauaua

SEQ ID NO: 1916944 - RNA, 19 nt, Artificial Sequence
  Description of Artificial Sequence: Synthetic oligonucleotide
  Sense strand starting at position 1881 of SEQ ID NO: 1879568
cagagaaagcuucgguuaa

SEQ ID NO: 1916945 - RNA, 19 nt, Artificial Sequence
  Description of Artificial Sequence: Synthetic oligonucleotide
  Antisense strand to SEQ ID NO: 1916944
uuaaccgaagcuuucucug

SEQ ID NO: 1916946 - RNA, 19 nt, Artificial Sequence
  Description of Artificial Sequence: Synthetic oligonucleotide
  Sense strand starting at position 1894 of SEQ ID NO: 1879568
gguuaaguuccacaacucu

SEQ ID NO: 1916947 - RNA, 19 nt, Artificial Sequence
  Description of Artificial Sequence: Synthetic oligonucleotide
  Antisense strand to SEQ ID NO: 1916946
agaguuguggaacuuaacc

SEQ ID NO: 1916948 - RNA, 19 nt, Artificial Sequence
  Description of Artificial Sequence: Synthetic oligonucleotide
  Sense strand starting at position 1959 of SEQ ID NO: 1879568
aguauaagguaaucucagu

SEQ ID NO: 1916949 - RNA, 19 nt, Artificial Sequence
  Description of Artificial Sequence: Synthetic oligonucleotide
  Antisense strand to SEQ ID NO: 1916948
acugagauuaccuuauacu

SEQ ID NO: 1916950 - RNA, 19 nt, Artificial Sequence
  Description of Artificial Sequence: Synthetic oligonucleotide
  Sense strand starting at position 2376 of SEQ ID NO: 1879568
gaacuuuccggguaacuug

SEQ ID NO: 1916951 - RNA, 19 nt, Artificial Sequence
  Description of Artificial Sequence: Synthetic oligonucleotide
  Antisense strand to SEQ ID NO: 1916950
caaguuacccggaaaguuc

SEQ ID NO: 1916952 - RNA, 19 nt, Artificial Sequence
  Description of Artificial Sequence: Synthetic oligonucleotide
  Sense strand starting at position 2411 of SEQ ID NO: 1879568
auaauaaacuguguaaguc

SEQ ID NO: 1916953 - RNA, 19 nt, Artificial Sequence
  Description of Artificial Sequence: Synthetic oligonucleotide
  Antisense strand to SEQ ID NO: 1916952
gacuuacacaguuuauuau

SEQ ID NO: 1916954 - RNA, 19 nt, Artificial Sequence
  Description of Artificial Sequence: Synthetic oligonucleotide
  Sense strand starting at position 2421 of SEQ ID NO: 1879568
guguaagucccacagaagu

SEQ ID NO: 1916955 - RNA, 19 nt, Artificial Sequence
  Description of Artificial Sequence: Synthetic oligonucleotide
  Antisense strand to SEQ ID NO: 1916954
acuucugugggacuuacac

SEQ ID NO: 1916956 - RNA, 19 nt, Artificial Sequence
  Description of Artificial Sequence: Synthetic oligonucleotide
  Sense strand starting at position 2446 of SEQ ID NO: 1879568
gaauaaggccauggcucua

SEQ ID NO: 1916957 - RNA, 19 nt, Artificial Sequence
  Description of Artificial Sequence: Synthetic oligonucleotide
  Antisense strand to SEQ ID NO: 1916956
uagagccauggccuuauuc

SEQ ID NO: 1916958 - RNA, 19 nt, Artificial Sequence
  Description of Artificial Sequence: Synthetic oligonucleotide
  Sense strand starting at position 2451 of SEQ ID NO: 1879568
aggccauggcucuacauua

SEQ ID NO: 1916959 - RNA, 19 nt, Artificial Sequence
  Description of Artificial Sequence: Synthetic oligonucleotide
  Antisense strand to SEQ ID NO: 1916958
uaauguagagccauggccu

SEQ ID NO: 1916960 - RNA, 19 nt, Artificial Sequence
  Description of Artificial Sequence: Synthetic oligonucleotide
  Sense strand starting at position 2636 of SEQ ID NO: 1879568
uuuggcuuucucugaagga

SEQ ID NO: 1916961 - RNA, 19 nt, Artificial Sequence
  Description of Artificial Sequence: Synthetic oligonucleotide
  Antisense strand to SEQ ID NO: 1916960
uccuucagagaaagccaaa

SEQ ID NO: 1916962 - RNA, 19 nt, Artificial Sequence
  Description of Artificial Sequence: Synthetic oligonucleotide
  Sense strand starting at position 2699 of SEQ ID NO: 1879568
uuuccaguuccagaguaag

SEQ ID NO: 1916963 - RNA, 19 nt, Artificial Sequence
  Description of Artificial Sequence: Synthetic oligonucleotide
  Antisense strand to SEQ ID NO: 1916962
cuuacucuggaacuggaaa

SEQ ID NO: 1916964 - RNA, 19 nt, Artificial Sequence
  Description of Artificial Sequence: Synthetic oligonucleotide
  Sense strand starting at position 3048 of SEQ ID NO: 1879568
guaccacuaggaugaucua

SEQ ID NO: 1916965 - RNA, 19 nt, Artificial Sequence
  Description of Artificial Sequence: Synthetic oligonucleotide
  Antisense strand to SEQ ID NO: 1916964
uagaucauccuagugguac

SEQ ID NO: 1916966 - RNA, 19 nt, Artificial Sequence
  Description of Artificial Sequence: Synthetic oligonucleotide
  Sense strand starting at position 3144 of SEQ ID NO: 1879568
guggcaauccaccaucaga

SEQ ID NO: 1916967 - RNA, 19 nt, Artificial Sequence
  Description of Artificial Sequence: Synthetic oligonucleotide
  Antisense strand to SEQ ID NO: 1916966
ucugaugguggauugccac

SEQ ID NO: 1916968 - RNA, 19 nt, Artificial Sequence
  Description of Artificial Sequence: Synthetic oligonucleotide
  Sense strand starting at position 3178 of SEQ ID NO: 1879568
cuuugaaccuuugcuagau

SEQ ID NO: 1916969 - RNA, 19 nt, Artificial Sequence
  Description of Artificial Sequence: Synthetic oligonucleotide
  Antisense strand to SEQ ID NO: 1916968
aucuagcaaagguucaaag

SEQ ID NO: 1916970 - RNA, 19 nt, Artificial Sequence
  Description of Artificial Sequence: Synthetic oligonucleotide
  Sense strand starting at position 3184 of SEQ ID NO: 1879568
accuuugcuagaucgcgua

SEQ ID NO: 1916971 - RNA, 19 nt, Artificial Sequence
  Description of Artificial Sequence: Synthetic oligonucleotide
  Antisense strand to SEQ ID NO: 1916970
uacgcgaucuagcaaaggu

SEQ ID NO: 1916972 - RNA, 19 nt, Artificial Sequence
  Description of Artificial Sequence: Synthetic oligonucleotide
  Sense strand starting at position 3938 of SEQ ID NO: 1879568
guuuccaacuaaguuaaga

SEQ ID NO: 1916973 - RNA, 19 nt, Artificial Sequence
  Description of Artificial Sequence: Synthetic oligonucleotide
  Antisense strand to SEQ ID NO: 1916972
ucuuaacuuaguuggaaac

SEQ ID NO: 1916974 - RNA, 19 nt, Artificial Sequence
  Description of Artificial Sequence: Synthetic oligonucleotide
  Sense strand starting at position 103 of SEQ ID NO: 1879569
gagggagccucacuuuaua

SEQ ID NO: 1916975 - RNA, 19 nt, Artificial Sequence
  Description of Artificial Sequence: Synthetic oligonucleotide
  Antisense strand to SEQ ID NO: 1916974
uauaaagugaggcucccuc

SEQ ID NO: 1916976 - RNA, 19 nt, Artificial Sequence
  Description of Artificial Sequence: Synthetic oligonucleotide
  Sense strand starting at position 106 of SEQ ID NO: 1879569
ggagccucacuuuauaaau

SEQ ID NO: 1916977 - RNA, 19 nt, Artificial Sequence
  Description of Artificial Sequence: Synthetic oligonucleotide
  Antisense strand to SEQ ID NO: 1916976
auuuauaaagugaggcucc

SEQ ID NO: 1916978 - RNA, 19 nt, Artificial Sequence
  Description of Artificial Sequence: Synthetic oligonucleotide
  Sense strand starting at position 290 of SEQ ID NO: 1879569
uguggugacccagaacuua

SEQ ID NO: 1916979 - RNA, 19 nt, Artificial Sequence
  Description of Artificial Sequence: Synthetic oligonucleotide
  Antisense strand to SEQ ID NO: 1916978
uaaguucugggucaccaca

SEQ ID NO: 1916980 - RNA, 19 nt, Artificial Sequence
  Description of Artificial Sequence: Synthetic oligonucleotide
  Sense strand starting at position 524 of SEQ ID NO: 1879569
aggaguugaucacucauug

SEQ ID NO: 1916981 - RNA, 19 nt, Artificial Sequence
  Description of Artificial Sequence: Synthetic oligonucleotide
  Antisense strand to SEQ ID NO: 1916980
caaugagugaucaacuccu

SEQ ID NO: 1916982 - RNA, 19 nt, Artificial Sequence
  Description of Artificial Sequence: Synthetic oligonucleotide
  Sense strand starting at position 623 of SEQ ID NO: 1879569
aagagaaaguuugcuaagu

SEQ ID NO: 1916983 - RNA, 19 nt, Artificial Sequence
  Description of Artificial Sequence: Synthetic oligonucleotide
  Antisense strand to SEQ ID NO: 1916982
acuuagcaaacuuucucuu

SEQ ID NO: 1916984 - RNA, 19 nt, Artificial Sequence
  Description of Artificial Sequence: Synthetic oligonucleotide
  Sense strand starting at position 624 of SEQ ID NO: 1879569
agagaaaguuugcuaaguu

SEQ ID NO: 1916985 - RNA, 19 nt, Artificial Sequence
  Description of Artificial Sequence: Synthetic oligonucleotide
  Antisense strand to SEQ ID NO: 1916984
aacuuagcaaacuuucucu

SEQ ID NO: 1916986 - RNA, 19 nt, Artificial Sequence
  Description of Artificial Sequence: Synthetic oligonucleotide
  Sense strand starting at position 746 of SEQ ID NO: 1879569
acauuaagcuguuuguaca

SEQ ID NO: 1916987 - RNA, 19 nt, Artificial Sequence
  Description of Artificial Sequence: Synthetic oligonucleotide
  Antisense strand to SEQ ID NO: 1916986
uguacaaacagcuuaaugu

SEQ ID NO: 1916988 - RNA, 19 nt, Artificial Sequence
  Description of Artificial Sequence: Synthetic oligonucleotide
  Sense strand starting at position 830 of SEQ ID NO: 1879569
agauuauuuagacgugcuu

SEQ ID NO: 1916989 - RNA, 19 nt, Artificial Sequence
  Description of Artificial Sequence: Synthetic oligonucleotide
  Antisense strand to SEQ ID NO: 1916988
aagcacgucuaaauaaucu

SEQ ID NO: 1916990 - RNA, 19 nt, Artificial Sequence
  Description of Artificial Sequence: Synthetic oligonucleotide
  Sense strand starting at position 933 of SEQ ID NO: 1879569
aagagcauucucuguauga

SEQ ID NO: 1916991 - RNA, 19 nt, Artificial Sequence
  Description of Artificial Sequence: Synthetic oligonucleotide
  Antisense strand to SEQ ID NO: 1916990
ucauacagagaaugcucuu

SEQ ID NO: 1916992 - RNA, 19 nt, Artificial Sequence
  Description of Artificial Sequence: Synthetic oligonucleotide
  Sense strand starting at position 934 of SEQ ID NO: 1879569
agagcauucucuguaugau

SEQ ID NO: 1916993 - RNA, 19 nt, Artificial Sequence
  Description of Artificial Sequence: Synthetic oligonucleotide
  Antisense strand to SEQ ID NO: 1916992
aucauacagagaaugcucu

SEQ ID NO: 1916994 - RNA, 19 nt, Artificial Sequence
  Description of Artificial Sequence: Synthetic oligonucleotide
  Sense strand starting at position 935 of SEQ ID NO: 1879569
gagcauucucuguaugaug

SEQ ID NO: 1916995 - RNA, 19 nt, Artificial Sequence
  Description of Artificial Sequence: Synthetic oligonucleotide
  Antisense strand to SEQ ID NO: 1916994
caucauacagagaaugcuc

SEQ ID NO: 1916996 - RNA, 19 nt, Artificial Sequence
  Description of Artificial Sequence: Synthetic oligonucleotide
  Sense strand starting at position 937 of SEQ ID NO: 1879569
gcauucucuguaugaugga

SEQ ID NO: 1916997 - RNA, 19 nt, Artificial Sequence
  Description of Artificial Sequence: Synthetic oligonucleotide
  Antisense strand to SEQ ID NO: 1916996
uccaucauacagagaaugc

SEQ ID NO: 1916998 - RNA, 19 nt, Artificial Sequence
  Description of Artificial Sequence: Synthetic oligonucleotide
  Sense strand starting at position 1102 of SEQ ID NO: 1879569
cauuaauugggcgauuccu

SEQ ID NO: 1916999 - RNA, 19 nt, Artificial Sequence
  Description of Artificial Sequence: Synthetic oligonucleotide
  Antisense strand to SEQ ID NO: 1916998
aggaaucgcccaauuaaug

SEQ ID NO: 1917000 - RNA, 19 nt, Artificial Sequence
  Description of Artificial Sequence: Synthetic oligonucleotide
  Sense strand starting at position 1111 of SEQ ID NO: 1879569
ggcgauuccuuuccuggga

SEQ ID NO: 1917001 - RNA, 19 nt, Artificial Sequence
  Description of Artificial Sequence: Synthetic oligonucleotide
  Antisense strand to SEQ ID NO: 1917000
ucccaggaaaggaaucgcc

SEQ ID NO: 1917002 - RNA, 19 nt, Artificial Sequence
  Description of Artificial Sequence: Synthetic oligonucleotide
  Sense strand starting at position 1112 of SEQ ID NO: 1879569
gcgauuccuuuccugggaa

SEQ ID NO: 1917003 - RNA, 19 nt, Artificial Sequence
  Description of Artificial Sequence: Synthetic oligonucleotide
  Antisense strand to SEQ ID NO: 1917002
uucccaggaaaggaaucgc

SEQ ID NO: 1917004 - RNA, 19 nt, Artificial Sequence
  Description of Artificial Sequence: Synthetic oligonucleotide
  Sense strand starting at position 1115 of SEQ ID NO: 1879569
auuccuuuccugggaagcu

SEQ ID NO: 1917005 - RNA, 19 nt, Artificial Sequence
  Description of Artificial Sequence: Synthetic oligonucleotide
  Antisense strand to SEQ ID NO: 1917004
agcuucccaggaaaggaau

SEQ ID NO: 1917006 - RNA, 19 nt, Artificial Sequence
  Description of Artificial Sequence: Synthetic oligonucleotide
  Sense strand starting at position 1193 of SEQ ID NO: 1879569
gcuaaagcuccagggagua

SEQ ID NO: 1917007 - RNA, 19 nt, Artificial Sequence
  Description of Artificial Sequence: Synthetic oligonucleotide
  Antisense strand to SEQ ID NO: 1917006
uacucccuggagcuuuagc

SEQ ID NO: 1917008 - RNA, 19 nt, Artificial Sequence
  Description of Artificial Sequence: Synthetic oligonucleotide
  Sense strand starting at position 1281 of SEQ ID NO: 1879569
ggagucaugcuagagugag

SEQ ID NO: 1917009 - RNA, 19 nt, Artificial Sequence
  Description of Artificial Sequence: Synthetic oligonucleotide
  Antisense strand to SEQ ID NO: 1917008
cucacucuagcaugacucc

SEQ ID NO: 1917010 - RNA, 19 nt, Artificial Sequence
  Description of Artificial Sequence: Synthetic oligonucleotide
  Sense strand starting at position 1425 of SEQ ID NO: 1879569
gccugaagcucuuugaaca

SEQ ID NO: 1917011 - RNA, 19 nt, Artificial Sequence
  Description of Artificial Sequence: Synthetic oligonucleotide
  Antisense strand to SEQ ID NO: 1917010
uguucaaagagcuucaggc

SEQ ID NO: 1917012 - RNA, 19 nt, Artificial Sequence
  Description of Artificial Sequence: Synthetic oligonucleotide
  Sense strand starting at position 1426 of SEQ ID NO: 1879569
ccugaagcucuuugaacaa

SEQ ID NO: 1917013 - RNA, 19 nt, Artificial Sequence
  Description of Artificial Sequence: Synthetic oligonucleotide
  Antisense strand to SEQ ID NO: 1917012
uuguucaaagagcuucagg

SEQ ID NO: 1917014 - RNA, 19 nt, Artificial Sequence
  Description of Artificial Sequence: Synthetic oligonucleotide
  Sense strand starting at position 1433 of SEQ ID NO: 1879569
cucuuugaacaaggucauu

SEQ ID NO: 1917015 - RNA, 19 nt, Artificial Sequence
  Description of Artificial Sequence: Synthetic oligonucleotide
  Antisense strand to SEQ ID NO: 1917014
aaugaccuuguucaaagag

SEQ ID NO: 1917016 - RNA, 19 nt, Artificial Sequence
  Description of Artificial Sequence: Synthetic oligonucleotide
  Sense strand starting at position 1989 of SEQ ID NO: 1879569
agugaugacuccuucggac

SEQ ID NO: 1917017 - RNA, 19 nt, Artificial Sequence
  Description of Artificial Sequence: Synthetic oligonucleotide
  Antisense strand to SEQ ID NO: 1917016
guccgaaggagucaucacu

SEQ ID NO: 1917018 - RNA, 19 nt, Artificial Sequence
  Description of Artificial Sequence: Synthetic oligonucleotide
  Sense strand starting at position 1991 of SEQ ID NO: 1879569
ugaugacuccuucggacuu

SEQ ID NO: 1917019 - RNA, 19 nt, Artificial Sequence
  Description of Artificial Sequence: Synthetic oligonucleotide
  Antisense strand to SEQ ID NO: 1917018
aaguccgaaggagucauca

SEQ ID NO: 1917020 - RNA, 19 nt, Artificial Sequence
  Description of Artificial Sequence: Synthetic oligonucleotide
  Sense strand starting at position 2033 of SEQ ID NO: 1879569
cucuauuuguccuuugcca

SEQ ID NO: 1917021 - RNA, 19 nt, Artificial Sequence
  Description of Artificial Sequence: Synthetic oligonucleotide
  Antisense strand to SEQ ID NO: 1917020
uggcaaaggacaaauagag

SEQ ID NO: 1917022 - RNA, 19 nt, Artificial Sequence
  Description of Artificial Sequence: Synthetic oligonucleotide
  Sense strand starting at position 2035 of SEQ ID NO: 1879569
cuauuuguccuuugccaga

SEQ ID NO: 1917023 - RNA, 19 nt, Artificial Sequence
  Description of Artificial Sequence: Synthetic oligonucleotide
  Antisense strand to SEQ ID NO: 1917022
ucuggcaaaggacaaauag

SEQ ID NO: 1917024 - RNA, 19 nt, Artificial Sequence
  Description of Artificial Sequence: Synthetic oligonucleotide
  Sense strand starting at position 2129 of SEQ ID NO: 1879569
cagugugucccauaggaaa

SEQ ID NO: 1917025 - RNA, 19 nt, Artificial Sequence
  Description of Artificial Sequence: Synthetic oligonucleotide
  Antisense strand to SEQ ID NO: 1917024
uuuccuaugggacacacug

SEQ ID NO: 1917026 - RNA, 19 nt, Artificial Sequence
  Description of Artificial Sequence: Synthetic oligonucleotide
  Sense strand starting at position 2403 of SEQ ID NO: 1879569
augguauuaucaguuccac

SEQ ID NO: 1917027 - RNA, 19 nt, Artificial Sequence
  Description of Artificial Sequence: Synthetic oligonucleotide
  Antisense strand to SEQ ID NO: 1917026
guggaacugauaauaccau

SEQ ID NO: 1917028 - RNA, 19 nt, Artificial Sequence
  Description of Artificial Sequence: Synthetic oligonucleotide
  Sense strand starting at position 2422 of SEQ ID NO: 1879569
ugcuuaauaugagcucagu

SEQ ID NO: 1917029 - RNA, 19 nt, Artificial Sequence
  Description of Artificial Sequence: Synthetic oligonucleotide
  Antisense strand to SEQ ID NO: 1917028
acugagcucauauuaagca

SEQ ID NO: 1917030 - RNA, 19 nt, Artificial Sequence
  Description of Artificial Sequence: Synthetic oligonucleotide
  Sense strand starting at position 2425 of SEQ ID NO: 1879569
uuaauaugagcucaguaag

SEQ ID NO: 1917031 - RNA, 19 nt, Artificial Sequence
  Description of Artificial Sequence: Synthetic oligonucleotide
  Antisense strand to SEQ ID NO: 1917030
cuuacugagcucauauuaa

SEQ ID NO: 1917032 - RNA, 19 nt, Artificial Sequence
  Description of Artificial Sequence: Synthetic oligonucleotide
  Sense strand starting at position 2727 of SEQ ID NO: 1879569
agggaugagucuucuacag

SEQ ID NO: 1917033 - RNA, 19 nt, Artificial Sequence
  Description of Artificial Sequence: Synthetic oligonucleotide
  Antisense strand to SEQ ID NO: 1917032
cuguagaagacucaucccu

SEQ ID NO: 1917034 - RNA, 19 nt, Artificial Sequence
  Description of Artificial Sequence: Synthetic oligonucleotide
  Sense strand starting at position 2734 of SEQ ID NO: 1879569
agucuucuacagugacacu

SEQ ID NO: 1917035 - RNA, 19 nt, Artificial Sequence
  Description of Artificial Sequence: Synthetic oligonucleotide
  Antisense strand to SEQ ID NO: 1917034
agugucacuguagaagacu

SEQ ID NO: 1917036 - RNA, 19 nt, Artificial Sequence
  Description of Artificial Sequence: Synthetic oligonucleotide
  Sense strand starting at position 2810 of SEQ ID NO: 1879569
cguuucagagaguaucuga

SEQ ID NO: 1917037 - RNA, 19 nt, Artificial Sequence
  Description of Artificial Sequence: Synthetic oligonucleotide
  Antisense strand to SEQ ID NO: 1917036
ucagauacucucugaaacg

SEQ ID NO: 1917038 - RNA, 19 nt, Artificial Sequence
  Description of Artificial Sequence: Synthetic oligonucleotide
  Sense strand starting at position 2874 of SEQ ID NO: 1879569
caugucaugugugccagaa

SEQ ID NO: 1917039 - RNA, 19 nt, Artificial Sequence
  Description of Artificial Sequence: Synthetic oligonucleotide
  Antisense strand to SEQ ID NO: 1917038
uucuggcacacaugacaug

SEQ ID NO: 1917040 - RNA, 19 nt, Artificial Sequence
  Description of Artificial Sequence: Synthetic oligonucleotide
  Sense strand starting at position 3039 of SEQ ID NO: 1879569
accugaauuucuugggaua

SEQ ID NO: 1917041 - RNA, 19 nt, Artificial Sequence
  Description of Artificial Sequence: Synthetic oligonucleotide
  Antisense strand to SEQ ID NO: 1917040
uaucccaagaaauucaggu

SEQ ID NO: 1917042 - RNA, 19 nt, Artificial Sequence
  Description of Artificial Sequence: Synthetic oligonucleotide
  Sense strand starting at position 3041 of SEQ ID NO: 1879569
cugaauuucuugggauaag

SEQ ID NO: 1917043 - RNA, 19 nt, Artificial Sequence
  Description of Artificial Sequence: Synthetic oligonucleotide
  Antisense strand to SEQ ID NO: 1917042
cuuaucccaagaaauucag

SEQ ID NO: 1917044 - RNA, 19 nt, Artificial Sequence
  Description of Artificial Sequence: Synthetic oligonucleotide
  Sense strand starting at position 3042 of SEQ ID NO: 1879569
ugaauuucuugggauaagg

SEQ ID NO: 1917045 - RNA, 19 nt, Artificial Sequence
  Description of Artificial Sequence: Synthetic oligonucleotide
  Antisense strand to SEQ ID NO: 1917044
ccuuaucccaagaaauuca

SEQ ID NO: 1917046 - RNA, 19 nt, Artificial Sequence
  Description of Artificial Sequence: Synthetic oligonucleotide
  Sense strand starting at position 3124 of SEQ ID NO: 1879569
accuaacugugguuaagau

SEQ ID NO: 1917047 - RNA, 19 nt, Artificial Sequence
  Description of Artificial Sequence: Synthetic oligonucleotide
  Antisense strand to SEQ ID NO: 1917046
aucuuaaccacaguuaggu

SEQ ID NO: 1917048 - RNA, 19 nt, Artificial Sequence
  Description of Artificial Sequence: Synthetic oligonucleotide
  Sense strand starting at position 3672 of SEQ ID NO: 1879569
acagauaaacuugggcaua

SEQ ID NO: 1917049 - RNA, 19 nt, Artificial Sequence
  Description of Artificial Sequence: Synthetic oligonucleotide
  Antisense strand to SEQ ID NO: 1917048
uaugcccaaguuuaucugu

SEQ ID NO: 1917050 - RNA, 19 nt, Artificial Sequence
  Description of Artificial Sequence: Synthetic oligonucleotide
  Sense strand starting at position 3674 of SEQ ID NO: 1879569
agauaaacuugggcauagu

SEQ ID NO: 1917051 - RNA, 19 nt, Artificial Sequence
  Description of Artificial Sequence: Synthetic oligonucleotide
  Antisense strand to SEQ ID NO: 1917050
acuaugcccaaguuuaucu

SEQ ID NO: 1917052 - RNA, 19 nt, Artificial Sequence
  Description of Artificial Sequence: Synthetic oligonucleotide
  Sense strand starting at position 3805 of SEQ ID NO: 1879569
ucgagaucagcccagacaa

SEQ ID NO: 1917053 - RNA, 19 nt, Artificial Sequence
  Description of Artificial Sequence: Synthetic oligonucleotide
  Antisense strand to SEQ ID NO: 1917052
uugucugggcugaucucga

SEQ ID NO: 1917054 - RNA, 19 nt, Artificial Sequence
  Description of Artificial Sequence: Synthetic oligonucleotide
  Sense strand starting at position 102 of SEQ ID NO: 1879571
gugagauaugucuguuacu

SEQ ID NO: 1917055 - RNA, 19 nt, Artificial Sequence
  Description of Artificial Sequence: Synthetic oligonucleotide
  Antisense strand to SEQ ID NO: 1917054
aguaacagacauaucucac

SEQ ID NO: 1917056 - RNA, 19 nt, Artificial Sequence
  Description of Artificial Sequence: Synthetic oligonucleotide
  Sense strand starting at position 103 of SEQ ID NO: 1879571
ugagauaugucuguuacuc

SEQ ID NO: 1917057 - RNA, 19 nt, Artificial Sequence
  Description of Artificial Sequence: Synthetic oligonucleotide
  Antisense strand to SEQ ID NO: 1917056
gaguaacagacauaucuca

SEQ ID NO: 1917058 - RNA, 19 nt, Artificial Sequence
  Description of Artificial Sequence: Synthetic oligonucleotide
  Sense strand starting at position 741 of SEQ ID NO: 1879571
ggaaaccuguuggugaagu

SEQ ID NO: 1917059 - RNA, 19 nt, Artificial Sequence
  Description of Artificial Sequence: Synthetic oligonucleotide
  Antisense strand to SEQ ID NO: 1917058
acuucaccaacagguuucc

SEQ ID NO: 1917060 - RNA, 19 nt, Artificial Sequence
  Description of Artificial Sequence: Synthetic oligonucleotide
  Sense strand starting at position 752 of SEQ ID NO: 1879571
ggugaaguucuagaugucu

SEQ ID NO: 1917061 - RNA, 19 nt, Artificial Sequence
  Description of Artificial Sequence: Synthetic oligonucleotide
  Antisense strand to SEQ ID NO: 1917060
agacaucuagaacuucacc

SEQ ID NO: 1917062 - RNA, 19 nt, Artificial Sequence
  Description of Artificial Sequence: Synthetic oligonucleotide
  Sense strand starting at position 761 of SEQ ID NO: 1879571
cuagaugucuuauccaaga

SEQ ID NO: 1917063 - RNA, 19 nt, Artificial Sequence
  Description of Artificial Sequence: Synthetic oligonucleotide
  Antisense strand to SEQ ID NO: 1917062
ucuuggauaagacaucuag

SEQ ID NO: 1917064 - RNA, 19 nt, Artificial Sequence
  Description of Artificial Sequence: Synthetic oligonucleotide
  Sense strand starting at position 766 of SEQ ID NO: 1879571
ugucuuauccaagaagggu

SEQ ID NO: 1917065 - RNA, 19 nt, Artificial Sequence
  Description of Artificial Sequence: Synthetic oligonucleotide
  Antisense strand to SEQ ID NO: 1917064
acccuucuuggauaagaca

SEQ ID NO: 1917066 - RNA, 19 nt, Artificial Sequence
  Description of Artificial Sequence: Synthetic oligonucleotide
  Sense strand starting at position 775 of SEQ ID NO: 1879571
caagaaggguccucuugag

SEQ ID NO: 1917067 - RNA, 19 nt, Artificial Sequence
  Description of Artificial Sequence: Synthetic oligonucleotide
  Antisense strand to SEQ ID NO: 1917066
cucaagaggacccuucuug

SEQ ID NO: 1917068 - RNA, 19 nt, Artificial Sequence
  Description of Artificial Sequence: Synthetic oligonucleotide
  Sense strand starting at position 869 of SEQ ID NO: 1879571
gccuuucugccagggaaac

SEQ ID NO: 1917069 - RNA, 19 nt, Artificial Sequence
  Description of Artificial Sequence: Synthetic oligonucleotide
  Antisense strand to SEQ ID NO: 1917068
guuucccuggcagaaaggc

SEQ ID NO: 1917070 - RNA, 19 nt, Artificial Sequence
  Description of Artificial Sequence: Synthetic oligonucleotide
  Sense strand starting at position 870 of SEQ ID NO: 1879571
ccuuucugccagggaaacu

SEQ ID NO: 1917071 - RNA, 19 nt, Artificial Sequence
  Description of Artificial Sequence: Synthetic oligonucleotide
  Antisense strand to SEQ ID NO: 1917070
aguuucccuggcagaaagg

SEQ ID NO: 1917072 - RNA, 19 nt, Artificial Sequence
  Description of Artificial Sequence: Synthetic oligonucleotide
  Sense strand starting at position 1074 of SEQ ID NO: 1879571
gggugagucuaugcaucau

SEQ ID NO: 1917073 - RNA, 19 nt, Artificial Sequence
  Description of Artificial Sequence: Synthetic oligonucleotide
  Antisense strand to SEQ ID NO: 1917072
augaugcauagacucaccc

SEQ ID NO: 1917074 - RNA, 19 nt, Artificial Sequence
  Description of Artificial Sequence: Synthetic oligonucleotide
  Sense strand starting at position 1078 of SEQ ID NO: 1879571
gagucuaugcaucaucagu

SEQ ID NO: 1917075 - RNA, 19 nt, Artificial Sequence
  Description of Artificial Sequence: Synthetic oligonucleotide
  Antisense strand to SEQ ID NO: 1917074
acugaugaugcauagacuc

SEQ ID NO: 1917076 - RNA, 19 nt, Artificial Sequence
  Description of Artificial Sequence: Synthetic oligonucleotide
  Sense strand starting at position 1557 of SEQ ID NO: 1879571
gguucugaaugaugaauuu

SEQ ID NO: 1917077 - RNA, 19 nt, Artificial Sequence
  Description of Artificial Sequence: Synthetic oligonucleotide
  Antisense strand to SEQ ID NO: 1917076
aaauucaucauucagaacc

SEQ ID NO: 1917078 - RNA, 19 nt, Artificial Sequence
  Description of Artificial Sequence: Synthetic oligonucleotide
  Sense strand starting at position 1566 of SEQ ID NO: 1879571
ugaugaauuuaagauccua

SEQ ID NO: 1917079 - RNA, 19 nt, Artificial Sequence
  Description of Artificial Sequence: Synthetic oligonucleotide
  Antisense strand to SEQ ID NO: 1917078
uaggaucuuaaauucauca

SEQ ID NO: 1917080 - RNA, 19 nt, Artificial Sequence
  Description of Artificial Sequence: Synthetic oligonucleotide
  Sense strand starting at position 1717 of SEQ ID NO: 1879571
uuuguuaaggcaugguaga

SEQ ID NO: 1917081 - RNA, 19 nt, Artificial Sequence
  Description of Artificial Sequence: Synthetic oligonucleotide
  Antisense strand to SEQ ID NO: 1917080
ucuaccaugccuuaacaaa

SEQ ID NO: 1917082 - RNA, 19 nt, Artificial Sequence
  Description of Artificial Sequence: Synthetic oligonucleotide
  Sense strand starting at position 1718 of SEQ ID NO: 1879571
uuguuaaggcaugguagau

SEQ ID NO: 1917083 - RNA, 19 nt, Artificial Sequence
  Description of Artificial Sequence: Synthetic oligonucleotide
  Antisense strand to SEQ ID NO: 1917082
aucuaccaugccuuaacaa

SEQ ID NO: 1917084 - RNA, 19 nt, Artificial Sequence
  Description of Artificial Sequence: Synthetic oligonucleotide
  Sense strand starting at position 1986 of SEQ ID NO: 1879571
augcgaugguggguaugaa

SEQ ID NO: 1917085 - RNA, 19 nt, Artificial Sequence
  Description of Artificial Sequence: Synthetic oligonucleotide
  Antisense strand to SEQ ID NO: 1917084
uucauacccaccaucgcau

SEQ ID NO: 1917086 - RNA, 19 nt, Artificial Sequence
  Description of Artificial Sequence: Synthetic oligonucleotide
  Sense strand starting at position 1987 of SEQ ID NO: 1879571
ugcgaugguggguaugaaa

SEQ ID NO: 1917087 - RNA, 19 nt, Artificial Sequence
  Description of Artificial Sequence: Synthetic oligonucleotide
  Antisense strand to SEQ ID NO: 1917086
uuucauacccaccaucgca

SEQ ID NO: 1917088 - RNA, 19 nt, Artificial Sequence
  Description of Artificial Sequence: Synthetic oligonucleotide
  Sense strand starting at position 2245 of SEQ ID NO: 1879571
cccacuugaguuuguacua

SEQ ID NO: 1917089 - RNA, 19 nt, Artificial Sequence
  Description of Artificial Sequence: Synthetic oligonucleotide
  Antisense strand to SEQ ID NO: 1917088
uaguacaaacucaaguggg

SEQ ID NO: 1917090 - RNA, 19 nt, Artificial Sequence
  Description of Artificial Sequence: Synthetic oligonucleotide
  Sense strand starting at position 2246 of SEQ ID NO: 1879571
ccacuugaguuuguacuaa

SEQ ID NO: 1917091 - RNA, 19 nt, Artificial Sequence
  Description of Artificial Sequence: Synthetic oligonucleotide
  Antisense strand to SEQ ID NO: 1917090
uuaguacaaacucaagugg

SEQ ID NO: 1917092 - RNA, 19 nt, Artificial Sequence
  Description of Artificial Sequence: Synthetic oligonucleotide
  Sense strand starting at position 2298 of SEQ ID NO: 1879571
cuccauuucugcccaguua

SEQ ID NO: 1917093 - RNA, 19 nt, Artificial Sequence
  Description of Artificial Sequence: Synthetic oligonucleotide
  Antisense strand to SEQ ID NO: 1917092
uaacugggcagaaauggag

SEQ ID NO: 1917094 - RNA, 19 nt, Artificial Sequence
  Description of Artificial Sequence: Synthetic oligonucleotide
  Sense strand starting at position 2365 of SEQ ID NO: 1879571
cuuugugcccaagacuuua

SEQ ID NO: 1917095 - RNA, 19 nt, Artificial Sequence
  Description of Artificial Sequence: Synthetic oligonucleotide
  Antisense strand to SEQ ID NO: 1917094
uaaagucuugggcacaaag

SEQ ID NO: 1917096 - RNA, 19 nt, Artificial Sequence
  Description of Artificial Sequence: Synthetic oligonucleotide
  Sense strand starting at position 2401 of SEQ ID NO: 1879571
augagaagaucugcuauug

SEQ ID NO: 1917097 - RNA, 19 nt, Artificial Sequence
  Description of Artificial Sequence: Synthetic oligonucleotide
  Antisense strand to SEQ ID NO: 1917096
caauagcagaucuucucau

SEQ ID NO: 1917098 - RNA, 19 nt, Artificial Sequence
  Description of Artificial Sequence: Synthetic oligonucleotide
  Sense strand starting at position 2444 of SEQ ID NO: 1879571
gcuguaaagggauauagca

SEQ ID NO: 1917099 - RNA, 19 nt, Artificial Sequence
  Description of Artificial Sequence: Synthetic oligonucleotide
  Antisense strand to SEQ ID NO: 1917098
ugcuauaucccuuuacagc

SEQ ID NO: 1917100 - RNA, 19 nt, Artificial Sequence
  Description of Artificial Sequence: Synthetic oligonucleotide
  Sense strand starting at position 2486 of SEQ ID NO: 1879571
gcaugagagccuugaacag

SEQ ID NO: 1917101 - RNA, 19 nt, Artificial Sequence
  Description of Artificial Sequence: Synthetic oligonucleotide
  Antisense strand to SEQ ID NO: 1917100
cuguucaaggcucucaugc

SEQ ID NO: 1917102 - RNA, 19 nt, Artificial Sequence
  Description of Artificial Sequence: Synthetic oligonucleotide
  Sense strand starting at position 2784 of SEQ ID NO: 1879571
caagcaaggcuuuagaguu

SEQ ID NO: 1917103 - RNA, 19 nt, Artificial Sequence
  Description of Artificial Sequence: Synthetic oligonucleotide
  Antisense strand to SEQ ID NO: 1917102
aacucuaaagccuugcuug

SEQ ID NO: 1917104 - RNA, 19 nt, Artificial Sequence
  Description of Artificial Sequence: Synthetic oligonucleotide
  Sense strand starting at position 2916 of SEQ ID NO: 1879571
cuuggaguguuaguuggaa

SEQ ID NO: 1917105 - RNA, 19 nt, Artificial Sequence
  Description of Artificial Sequence: Synthetic oligonucleotide
  Antisense strand to SEQ ID NO: 1917104
uuccaacuaacacuccaag

SEQ ID NO: 1917106 - RNA, 19 nt, Artificial Sequence
  Description of Artificial Sequence: Synthetic oligonucleotide
  Sense strand starting at position 2918 of SEQ ID NO: 1879571
uggaguguuaguuggaaga

SEQ ID NO: 1917107 - RNA, 19 nt, Artificial Sequence
  Description of Artificial Sequence: Synthetic oligonucleotide
  Antisense strand to SEQ ID NO: 1917106
ucuuccaacuaacacucca

SEQ ID NO: 1917108 - RNA, 19 nt, Artificial Sequence
  Description of Artificial Sequence: Synthetic oligonucleotide
  Sense strand starting at position 2919 of SEQ ID NO: 1879571
ggaguguuaguuggaagag

SEQ ID NO: 1917109 - RNA, 19 nt, Artificial Sequence
  Description of Artificial Sequence: Synthetic oligonucleotide
  Antisense strand to SEQ ID NO: 1917108
cucuuccaacuaacacucc

SEQ ID NO: 1917110 - RNA, 19 nt, Artificial Sequence
  Description of Artificial Sequence: Synthetic oligonucleotide
  Sense strand starting at position 3011 of SEQ ID NO: 1879571
ccgagugucagggaaacua

SEQ ID NO: 1917111 - RNA, 19 nt, Artificial Sequence
  Description of Artificial Sequence: Synthetic oligonucleotide
  Antisense strand to SEQ ID NO: 1917110
uaguuucccugacacucgg

SEQ ID NO: 1917112 - RNA, 19 nt, Artificial Sequence
  Description of Artificial Sequence: Synthetic oligonucleotide
  Sense strand starting at position 3021 of SEQ ID NO: 1879571
gggaaacuauuguugagca

SEQ ID NO: 1917113 - RNA, 19 nt, Artificial Sequence
  Description of Artificial Sequence: Synthetic oligonucleotide
  Antisense strand to SEQ ID NO: 1917112
ugcucaacaauaguuuccc

SEQ ID NO: 1917114 - RNA, 19 nt, Artificial Sequence
  Description of Artificial Sequence: Synthetic oligonucleotide
  Sense strand starting at position 3029 of SEQ ID NO: 1879571
auuguugagcaagagcaaa

SEQ ID NO: 1917115 - RNA, 19 nt, Artificial Sequence
  Description of Artificial Sequence: Synthetic oligonucleotide
  Antisense strand to SEQ ID NO: 1917114
uuugcucuugcucaacaau

SEQ ID NO: 1917116 - RNA, 19 nt, Artificial Sequence
  Description of Artificial Sequence: Synthetic oligonucleotide
  Sense strand starting at position 3094 of SEQ ID NO: 1879571
gccagugagucaccaaaug

SEQ ID NO: 1917117 - RNA, 19 nt, Artificial Sequence
  Description of Artificial Sequence: Synthetic oligonucleotide
  Antisense strand to SEQ ID NO: 1917116
cauuuggugacucacuggc

SEQ ID NO: 1917118 - RNA, 19 nt, Artificial Sequence
  Description of Artificial Sequence: Synthetic oligonucleotide
  Sense strand starting at position 3106 of SEQ ID NO: 1879571
ccaaaugggcccuaaguau

SEQ ID NO: 1917119 - RNA, 19 nt, Artificial Sequence
  Description of Artificial Sequence: Synthetic oligonucleotide
  Antisense strand to SEQ ID NO: 1917118
auacuuagggcccauuugg

SEQ ID NO: 1917120 - RNA, 19 nt, Artificial Sequence
  Description of Artificial Sequence: Synthetic oligonucleotide
  Sense strand starting at position 3113 of SEQ ID NO: 1879571
ggcccuaaguauuugaguu

SEQ ID NO: 1917121 - RNA, 19 nt, Artificial Sequence
  Description of Artificial Sequence: Synthetic oligonucleotide
  Antisense strand to SEQ ID NO: 1917120
aacucaaauacuuagggcc

SEQ ID NO: 1917122 - RNA, 19 nt, Artificial Sequence
  Description of Artificial Sequence: Synthetic oligonucleotide
  Sense strand starting at position 3348 of SEQ ID NO: 1879571
gagaaagaacuccgguauu

SEQ ID NO: 1917123 - RNA, 19 nt, Artificial Sequence
  Description of Artificial Sequence: Synthetic oligonucleotide
  Antisense strand to SEQ ID NO: 1917122
aauaccggaguucuuucuc

SEQ ID NO: 1917124 - RNA, 19 nt, Artificial Sequence
  Description of Artificial Sequence: Synthetic oligonucleotide
  Sense strand starting at position 3360 of SEQ ID NO: 1879571
cgguauuggaguuaccaca

SEQ ID NO: 1917125 - RNA, 19 nt, Artificial Sequence
  Description of Artificial Sequence: Synthetic oligonucleotide
  Antisense strand to SEQ ID NO: 1917124
ugugguaacuccaauaccg

SEQ ID NO: 1917126 - RNA, 19 nt, Artificial Sequence
  Description of Artificial Sequence: Synthetic oligonucleotide
  Sense strand starting at position 3386 of SEQ ID NO: 1879571
gauagugagucagcagagu

SEQ ID NO: 1917127 - RNA, 19 nt, Artificial Sequence
  Description of Artificial Sequence: Synthetic oligonucleotide
  Antisense strand to SEQ ID NO: 1917126
acucugcugacucacuauc

SEQ ID NO: 1917128 - RNA, 19 nt, Artificial Sequence
  Description of Artificial Sequence: Synthetic oligonucleotide
  Sense strand starting at position 3532 of SEQ ID NO: 1879571
caaggcucgagguguacaa

SEQ ID NO: 1917129 - RNA, 19 nt, Artificial Sequence
  Description of Artificial Sequence: Synthetic oligonucleotide
  Antisense strand to SEQ ID NO: 1917128
uuguacaccucgagccuug

SEQ ID NO: 1917130 - RNA, 19 nt, Artificial Sequence
  Description of Artificial Sequence: Synthetic oligonucleotide
  Sense strand starting at position 3536 of SEQ ID NO: 1879571
gcucgagguguacaaagau

SEQ ID NO: 1917131 - RNA, 19 nt, Artificial Sequence
  Description of Artificial Sequence: Synthetic oligonucleotide
  Antisense strand to SEQ ID NO: 1917130
aucuuuguacaccucgagc

SEQ ID NO: 1917132 - RNA, 19 nt, Artificial Sequence
  Description of Artificial Sequence: Synthetic oligonucleotide
  Sense strand starting at position 3711 of SEQ ID NO: 1879571
aggagacuuucccagagaa

SEQ ID NO: 1917133 - RNA, 19 nt, Artificial Sequence
  Description of Artificial Sequence: Synthetic oligonucleotide
  Antisense strand to SEQ ID NO: 1917132
uucucugggaaagucuccu

SEQ ID NO: 1917134 - RNA, 19 nt, Artificial Sequence
  Description of Artificial Sequence: Synthetic oligonucleotide
  Sense strand starting at position 526 of SEQ ID NO: 1879570
ggaaaccuguuggugaagu

SEQ ID NO: 1917135 - RNA, 19 nt, Artificial Sequence
  Description of Artificial Sequence: Synthetic oligonucleotide
  Antisense strand to SEQ ID NO: 1917134
acuucaccaacagguuucc

SEQ ID NO: 1917136 - RNA, 19 nt, Artificial Sequence
  Description of Artificial Sequence: Synthetic oligonucleotide
  Sense strand starting at position 537 of SEQ ID NO: 1879570
ggugaaguucuagaugucu

SEQ ID NO: 1917137 - RNA, 19 nt, Artificial Sequence
  Description of Artificial Sequence: Synthetic oligonucleotide
  Antisense strand to SEQ ID NO: 1917136
agacaucuagaacuucacc

SEQ ID NO: 1917138 - RNA, 19 nt, Artificial Sequence
  Description of Artificial Sequence: Synthetic oligonucleotide
  Sense strand starting at position 546 of SEQ ID NO: 1879570
cuagaugucuuauccaaga

SEQ ID NO: 1917139 - RNA, 19 nt, Artificial Sequence
  Description of Artificial Sequence: Synthetic oligonucleotide
  Antisense strand to SEQ ID NO: 1917138
ucuuggauaagacaucuag

SEQ ID NO: 1917140 - RNA, 19 nt, Artificial Sequence
  Description of Artificial Sequence: Synthetic oligonucleotide
  Sense strand starting at position 551 of SEQ ID NO: 1879570
ugucuuauccaagaagggu

SEQ ID NO: 1917141 - RNA, 19 nt, Artificial Sequence
  Description of Artificial Sequence: Synthetic oligonucleotide
  Antisense strand to SEQ ID NO: 1917140
acccuucuuggauaagaca

SEQ ID NO: 1917142 - RNA, 19 nt, Artificial Sequence
  Description of Artificial Sequence: Synthetic oligonucleotide
  Sense strand starting at position 560 of SEQ ID NO: 1879570
caagaaggguccucuugag

SEQ ID NO: 1917143 - RNA, 19 nt, Artificial Sequence
  Description of Artificial Sequence: Synthetic oligonucleotide
  Antisense strand to SEQ ID NO: 1917142
cucaagaggacccuucuug

SEQ ID NO: 1917144 - RNA, 19 nt, Artificial Sequence
  Description of Artificial Sequence: Synthetic oligonucleotide
  Sense strand starting at position 654 of SEQ ID NO: 1879570
gccuuucugccagggaaac

SEQ ID NO: 1917145 - RNA, 19 nt, Artificial Sequence
  Description of Artificial Sequence: Synthetic oligonucleotide
  Antisense strand to SEQ ID NO: 1917144
guuucccuggcagaaaggc

SEQ ID NO: 1917146 - RNA, 19 nt, Artificial Sequence
  Description of Artificial Sequence: Synthetic oligonucleotide
  Sense strand starting at position 655 of SEQ ID NO: 1879570
ccuuucugccagggaaacu

SEQ ID NO: 1917147 - RNA, 19 nt, Artificial Sequence
  Description of Artificial Sequence: Synthetic oligonucleotide
  Antisense strand to SEQ ID NO: 1917146
aguuucccuggcagaaagg

SEQ ID NO: 1917148 - RNA, 19 nt, Artificial Sequence
  Description of Artificial Sequence: Synthetic oligonucleotide
  Sense strand starting at position 859 of SEQ ID NO: 1879570
gggugagucuaugcaucau

SEQ ID NO: 1917149 - RNA, 19 nt, Artificial Sequence
  Description of Artificial Sequence: Synthetic oligonucleotide
  Antisense strand to SEQ ID NO: 1917148
augaugcauagacucaccc

SEQ ID NO: 1917150 - RNA, 19 nt, Artificial Sequence
  Description of Artificial Sequence: Synthetic oligonucleotide
  Sense strand starting at position 863 of SEQ ID NO: 1879570
gagucuaugcaucaucagu

SEQ ID NO: 1917151 - RNA, 19 nt, Artificial Sequence
  Description of Artificial Sequence: Synthetic oligonucleotide
  Antisense strand to SEQ ID NO: 1917150
acugaugaugcauagacuc

SEQ ID NO: 1917152 - RNA, 19 nt, Artificial Sequence
  Description of Artificial Sequence: Synthetic oligonucleotide
  Sense strand starting at position 1342 of SEQ ID NO: 1879570
gguucugaaugaugaauuu

SEQ ID NO: 1917153 - RNA, 19 nt, Artificial Sequence
  Description of Artificial Sequence: Synthetic oligonucleotide
  Antisense strand to SEQ ID NO: 1917152
aaauucaucauucagaacc

SEQ ID NO: 1917154 - RNA, 19 nt, Artificial Sequence
  Description of Artificial Sequence: Synthetic oligonucleotide
  Sense strand starting at position 1351 of SEQ ID NO: 1879570
ugaugaauuuaagauccua

SEQ ID NO: 1917155 - RNA, 19 nt, Artificial Sequence
  Description of Artificial Sequence: Synthetic oligonucleotide
  Antisense strand to SEQ ID NO: 1917154
uaggaucuuaaauucauca

SEQ ID NO: 1917156 - RNA, 19 nt, Artificial Sequence
  Description of Artificial Sequence: Synthetic oligonucleotide
  Sense strand starting at position 1502 of SEQ ID NO: 1879570
uuuguuaaggcaugguaga

SEQ ID NO: 1917157 - RNA, 19 nt, Artificial Sequence
  Description of Artificial Sequence: Synthetic oligonucleotide
  Antisense strand to SEQ ID NO: 1917156
ucuaccaugccuuaacaaa

SEQ ID NO: 1917158 - RNA, 19 nt, Artificial Sequence
  Description of Artificial Sequence: Synthetic oligonucleotide
  Sense strand starting at position 1503 of SEQ ID NO: 1879570
uuguuaaggcaugguagau

SEQ ID NO: 1917159 - RNA, 19 nt, Artificial Sequence
  Description of Artificial Sequence: Synthetic oligonucleotide
  Antisense strand to SEQ ID NO: 1917158
aucuaccaugccuuaacaa

SEQ ID NO: 1917160 - RNA, 19 nt, Artificial Sequence
  Description of Artificial Sequence: Synthetic oligonucleotide
  Sense strand starting at position 1771 of SEQ ID NO: 1879570
augcgaugguggguaugaa

SEQ ID NO: 1917161 - RNA, 19 nt, Artificial Sequence
  Description of Artificial Sequence: Synthetic oligonucleotide
  Antisense strand to SEQ ID NO: 1917160
uucauacccaccaucgcau

SEQ ID NO: 1917162 - RNA, 19 nt, Artificial Sequence
  Description of Artificial Sequence: Synthetic oligonucleotide
  Sense strand starting at position 1772 of SEQ ID NO: 1879570
ugcgaugguggguaugaaa

SEQ ID NO: 1917163 - RNA, 19 nt, Artificial Sequence
  Description of Artificial Sequence: Synthetic oligonucleotide
  Antisense strand to SEQ ID NO: 1917162
uuucauacccaccaucgca

SEQ ID NO: 1917164 - RNA, 19 nt, Artificial Sequence
  Description of Artificial Sequence: Synthetic oligonucleotide
  Sense strand starting at position 2030 of SEQ ID NO: 1879570
cccacuugaguuuguacua

SEQ ID NO: 1917165 - RNA, 19 nt, Artificial Sequence
  Description of Artificial Sequence: Synthetic oligonucleotide
  Antisense strand to SEQ ID NO: 1917164
uaguacaaacucaaguggg

SEQ ID NO: 1917166 - RNA, 19 nt, Artificial Sequence
  Description of Artificial Sequence: Synthetic oligonucleotide
  Sense strand starting at position 2031 of SEQ ID NO: 1879570
ccacuugaguuuguacuaa

SEQ ID NO: 1917167 - RNA, 19 nt, Artificial Sequence
  Description of Artificial Sequence: Synthetic oligonucleotide
  Antisense strand to SEQ ID NO: 1917166
uuaguacaaacucaagugg

SEQ ID NO: 1917168 - RNA, 19 nt, Artificial Sequence
  Description of Artificial Sequence: Synthetic oligonucleotide
  Sense strand starting at position 2083 of SEQ ID NO: 1879570
cuccauuucugcccaguua

SEQ ID NO: 1917169 - RNA, 19 nt, Artificial Sequence
  Description of Artificial Sequence: Synthetic oligonucleotide
  Antisense strand to SEQ ID NO: 1917168
uaacugggcagaaauggag

SEQ ID NO: 1917170 - RNA, 19 nt, Artificial Sequence
  Description of Artificial Sequence: Synthetic oligonucleotide
  Sense strand starting at position 2150 of SEQ ID NO: 1879570
cuuugugcccaagacuuua

SEQ ID NO: 1917171 - RNA, 19 nt, Artificial Sequence
  Description of Artificial Sequence: Synthetic oligonucleotide
  Antisense strand to SEQ ID NO: 1917170
uaaagucuugggcacaaag

SEQ ID NO: 1917172 - RNA, 19 nt, Artificial Sequence
  Description of Artificial Sequence: Synthetic oligonucleotide
  Sense strand starting at position 2186 of SEQ ID NO: 1879570
augagaagaucugcuauug

SEQ ID NO: 1917173 - RNA, 19 nt, Artificial Sequence
  Description of Artificial Sequence: Synthetic oligonucleotide
  Antisense strand to SEQ ID NO: 1917172
caauagcagaucuucucau

SEQ ID NO: 1917174 - RNA, 19 nt, Artificial Sequence
  Description of Artificial Sequence: Synthetic oligonucleotide
  Sense strand starting at position 2229 of SEQ ID NO: 1879570
gcuguaaagggauauagca

SEQ ID NO: 1917175 - RNA, 19 nt, Artificial Sequence
  Description of Artificial Sequence: Synthetic oligonucleotide
  Antisense strand to SEQ ID NO: 1917174
ugcuauaucccuuuacagc

SEQ ID NO: 1917176 - RNA, 19 nt, Artificial Sequence
  Description of Artificial Sequence: Synthetic oligonucleotide
  Sense strand starting at position 2271 of SEQ ID NO: 1879570
gcaugagagccuugaacag

SEQ ID NO: 1917177 - RNA, 19 nt, Artificial Sequence
  Description of Artificial Sequence: Synthetic oligonucleotide
  Antisense strand to SEQ ID NO: 1917176
cuguucaaggcucucaugc

SEQ ID NO: 1917178 - RNA, 19 nt, Artificial Sequence
  Description of Artificial Sequence: Synthetic oligonucleotide
  Sense strand starting at position 2569 of SEQ ID NO: 1879570
caagcaaggcuuuagaguu

SEQ ID NO: 1917179 - RNA, 19 nt, Artificial Sequence
  Description of Artificial Sequence: Synthetic oligonucleotide
  Antisense strand to SEQ ID NO: 1917178
aacucuaaagccuugcuug

SEQ ID NO: 1917180 - RNA, 19 nt, Artificial Sequence
  Description of Artificial Sequence: Synthetic oligonucleotide
  Sense strand starting at position 2701 of SEQ ID NO: 1879570
cuuggaguguuaguuggaa

SEQ ID NO: 1917181 - RNA, 19 nt, Artificial Sequence
  Description of Artificial Sequence: Synthetic oligonucleotide
  Antisense strand to SEQ ID NO: 1917180
uuccaacuaacacuccaag

SEQ ID NO: 1917182 - RNA, 19 nt, Artificial Sequence
  Description of Artificial Sequence: Synthetic oligonucleotide
  Sense strand starting at position 2703 of SEQ ID NO: 1879570
uggaguguuaguuggaaga

SEQ ID NO: 1917183 - RNA, 19 nt, Artificial Sequence
  Description of Artificial Sequence: Synthetic oligonucleotide
  Antisense strand to SEQ ID NO: 1917182
ucuuccaacuaacacucca

SEQ ID NO: 1917184 - RNA, 19 nt, Artificial Sequence
  Description of Artificial Sequence: Synthetic oligonucleotide
  Sense strand starting at position 2704 of SEQ ID NO: 1879570
ggaguguuaguuggaagag

SEQ ID NO: 1917185 - RNA, 19 nt, Artificial Sequence
  Description of Artificial Sequence: Synthetic oligonucleotide
  Antisense strand to SEQ ID NO: 1917184
cucuuccaacuaacacucc

SEQ ID NO: 1917186 - RNA, 19 nt, Artificial Sequence
  Description of Artificial Sequence: Synthetic oligonucleotide
  Sense strand starting at position 2796 of SEQ ID NO: 1879570
ccgagugucagggaaacua

SEQ ID NO: 1917187 - RNA, 19 nt, Artificial Sequence
  Description of Artificial Sequence: Synthetic oligonucleotide
  Antisense strand to SEQ ID NO: 1917186
uaguuucccugacacucgg

SEQ ID NO: 1917188 - RNA, 19 nt, Artificial Sequence
  Description of Artificial Sequence: Synthetic oligonucleotide
  Sense strand starting at position 2806 of SEQ ID NO: 1879570
gggaaacuauuguugagca

SEQ ID NO: 1917189 - RNA, 19 nt, Artificial Sequence
  Description of Artificial Sequence: Synthetic oligonucleotide
  Antisense strand to SEQ ID NO: 1917188
ugcucaacaauaguuuccc

SEQ ID NO: 1917190 - RNA, 19 nt, Artificial Sequence
  Description of Artificial Sequence: Synthetic oligonucleotide
  Sense strand starting at position 2814 of SEQ ID NO: 1879570
auuguugagcaagagcaaa

SEQ ID NO: 1917191 - RNA, 19 nt, Artificial Sequence
  Description of Artificial Sequence: Synthetic oligonucleotide
  Antisense strand to SEQ ID NO: 1917190
uuugcucuugcucaacaau

SEQ ID NO: 1917192 - RNA, 19 nt, Artificial Sequence
  Description of Artificial Sequence: Synthetic oligonucleotide
  Sense strand starting at position 2879 of SEQ ID NO: 1879570
gccagugagucaccaaaug

SEQ ID NO: 1917193 - RNA, 19 nt, Artificial Sequence
  Description of Artificial Sequence: Synthetic oligonucleotide
  Antisense strand to SEQ ID NO: 1917192
cauuuggugacucacuggc

SEQ ID NO: 1917194 - RNA, 19 nt, Artificial Sequence
  Description of Artificial Sequence: Synthetic oligonucleotide
  Sense strand starting at position 2891 of SEQ ID NO: 1879570
ccaaaugggcccuaaguau

SEQ ID NO: 1917195 - RNA, 19 nt, Artificial Sequence
  Description of Artificial Sequence: Synthetic oligonucleotide
  Antisense strand to SEQ ID NO: 1917194
auacuuagggcccauuugg

SEQ ID NO: 1917196 - RNA, 19 nt, Artificial Sequence
  Description of Artificial Sequence: Synthetic oligonucleotide
  Sense strand starting at position 2898 of SEQ ID NO: 1879570
ggcccuaaguauuugaguu

SEQ ID NO: 1917197 - RNA, 19 nt, Artificial Sequence
  Description of Artificial Sequence: Synthetic oligonucleotide
  Antisense strand to SEQ ID NO: 1917196
aacucaaauacuuagggcc

SEQ ID NO: 1917198 - RNA, 19 nt, Artificial Sequence
  Description of Artificial Sequence: Synthetic oligonucleotide
  Sense strand starting at position 3133 of SEQ ID NO: 1879570
gagaaagaacuccgguauu

SEQ ID NO: 1917199 - RNA, 19 nt, Artificial Sequence
  Description of Artificial Sequence: Synthetic oligonucleotide
  Antisense strand to SEQ ID NO: 1917198
aauaccggaguucuuucuc

SEQ ID NO: 1917200 - RNA, 19 nt, Artificial Sequence
  Description of Artificial Sequence: Synthetic oligonucleotide
  Sense strand starting at position 3145 of SEQ ID NO: 1879570
cgguauuggaguuaccaca

SEQ ID NO: 1917201 - RNA, 19 nt, Artificial Sequence
  Description of Artificial Sequence: Synthetic oligonucleotide
  Antisense strand to SEQ ID NO: 1917200
ugugguaacuccaauaccg

SEQ ID NO: 1917202 - RNA, 19 nt, Artificial Sequence
  Description of Artificial Sequence: Synthetic oligonucleotide
  Sense strand starting at position 3171 of SEQ ID NO: 1879570
gauagugagucagcagagu

SEQ ID NO: 1917203 - RNA, 19 nt, Artificial Sequence
  Description of Artificial Sequence: Synthetic oligonucleotide
  Antisense strand to SEQ ID NO: 1917202
acucugcugacucacuauc

SEQ ID NO: 1917204 - RNA, 19 nt, Artificial Sequence
  Description of Artificial Sequence: Synthetic oligonucleotide
  Sense strand starting at position 3321 of SEQ ID NO: 1879570
gcucgagguguacaaagau

SEQ ID NO: 1917205 - RNA, 19 nt, Artificial Sequence
  Description of Artificial Sequence: Synthetic oligonucleotide
  Antisense strand to SEQ ID NO: 1917204
aucuuuguacaccucgagc

SEQ ID NO: 1917206 - RNA, 19 nt, Artificial Sequence
  Description of Artificial Sequence: Synthetic oligonucleotide
  Sense strand starting at position 3496 of SEQ ID NO: 1879570
aggagacuuucccagagaa

SEQ ID NO: 1917207 - RNA, 19 nt, Artificial Sequence
  Description of Artificial Sequence: Synthetic oligonucleotide
  Antisense strand to SEQ ID NO: 1917206
uucucugggaaagucuccu

SEQ ID NO: 1917208 - RNA, 19 nt, Artificial Sequence
  Description of Artificial Sequence: Synthetic oligonucleotide
  Sense strand starting at position 3825 of SEQ ID NO: 1879570
uccagauguuccucagcca

SEQ ID NO: 1917209 - RNA, 19 nt, Artificial Sequence
  Description of Artificial Sequence: Synthetic oligonucleotide
  Antisense strand to SEQ ID NO: 1917208
uggcugaggaacaucugga

SEQ ID NO: 1917210 - RNA, 19 nt, Artificial Sequence
  Description of Artificial Sequence: Synthetic oligonucleotide
  Sense strand starting at position 3826 of SEQ ID NO: 1879570
ccagauguuccucagccaa

SEQ ID NO: 1917211 - RNA, 19 nt, Artificial Sequence
  Description of Artificial Sequence: Synthetic oligonucleotide
  Antisense strand to SEQ ID NO: 1917210
uuggcugaggaacaucugg

SEQ ID NO: 1917212 - RNA, 19 nt, Artificial Sequence
  Description of Artificial Sequence: Synthetic oligonucleotide
  Sense strand starting at position 3828 of SEQ ID NO: 1879570
agauguuccucagccaaga

SEQ ID NO: 1917213 - RNA, 19 nt, Artificial Sequence
  Description of Artificial Sequence: Synthetic oligonucleotide
  Antisense strand to SEQ ID NO: 1917212
ucuuggcugaggaacaucu

SEQ ID NO: 1917214 - RNA, 19 nt, Artificial Sequence
  Description of Artificial Sequence: Synthetic oligonucleotide
  Sense strand starting at position 398 of SEQ ID NO: 1879572
guggcauggucuucgaaac

SEQ ID NO: 1917215 - RNA, 19 nt, Artificial Sequence
  Description of Artificial Sequence: Synthetic oligonucleotide
  Antisense strand to SEQ ID NO: 1917214
guuucgaagaccaugccac

SEQ ID NO: 1917216 - RNA, 19 nt, Artificial Sequence
  Description of Artificial Sequence: Synthetic oligonucleotide
  Sense strand starting at position 399 of SEQ ID NO: 1879572
uggcauggucuucgaaaca

SEQ ID NO: 1917217 - RNA, 19 nt, Artificial Sequence
  Description of Artificial Sequence: Synthetic oligonucleotide
  Antisense strand to SEQ ID NO: 1917216
uguuucgaagaccaugcca

SEQ ID NO: 1917218 - RNA, 19 nt, Artificial Sequence
  Description of Artificial Sequence: Synthetic oligonucleotide
  Sense strand starting at position 642 of SEQ ID NO: 1879572
gagucugaguaccugaaau

SEQ ID NO: 1917219 - RNA, 19 nt, Artificial Sequence
  Description of Artificial Sequence: Synthetic oligonucleotide
  Antisense strand to SEQ ID NO: 1917218
auuucagguacucagacuc

SEQ ID NO: 1917220 - RNA, 19 nt, Artificial Sequence
  Description of Artificial Sequence: Synthetic oligonucleotide
  Sense strand starting at position 644 of SEQ ID NO: 1879572
gucugaguaccugaaaucu

SEQ ID NO: 1917221 - RNA, 19 nt, Artificial Sequence
  Description of Artificial Sequence: Synthetic oligonucleotide
  Antisense strand to SEQ ID NO: 1917220
agauuucagguacucagac

SEQ ID NO: 1917222 - RNA, 19 nt, Artificial Sequence
  Description of Artificial Sequence: Synthetic oligonucleotide
  Sense strand starting at position 3206 of SEQ ID NO: 1879572
ucugauucucaccgugaca

SEQ ID NO: 1917223 - RNA, 19 nt, Artificial Sequence
  Description of Artificial Sequence: Synthetic oligonucleotide
  Antisense strand to SEQ ID NO: 1917222
ugucacggugagaaucaga

SEQ ID NO: 1917224 - RNA, 19 nt, Artificial Sequence
  Description of Artificial Sequence: Synthetic oligonucleotide
  Sense strand starting at position 3208 of SEQ ID NO: 1879572
ugauucucaccgugacaac

SEQ ID NO: 1917225 - RNA, 19 nt, Artificial Sequence
  Description of Artificial Sequence: Synthetic oligonucleotide
  Antisense strand to SEQ ID NO: 1917224
guugucacggugagaauca

SEQ ID NO: 1917226 - RNA, 19 nt, Artificial Sequence
  Description of Artificial Sequence: Synthetic oligonucleotide
  Sense strand starting at position 3209 of SEQ ID NO: 1879572
gauucucaccgugacaaca

SEQ ID NO: 1917227 - RNA, 19 nt, Artificial Sequence
  Description of Artificial Sequence: Synthetic oligonucleotide
  Antisense strand to SEQ ID NO: 1917226
uguugucacggugagaauc

SEQ ID NO: 1917228 - RNA, 19 nt, Artificial Sequence
  Description of Artificial Sequence: Synthetic oligonucleotide
  Sense strand starting at position 3279 of SEQ ID NO: 1879572
ucuguagaaucagugaaag

SEQ ID NO: 1917229 - RNA, 19 nt, Artificial Sequence
  Description of Artificial Sequence: Synthetic oligonucleotide
  Antisense strand to SEQ ID NO: 1917228
cuuucacugauucuacaga

SEQ ID NO: 1917230 - RNA, 19 nt, Artificial Sequence
  Description of Artificial Sequence: Synthetic oligonucleotide
  Sense strand starting at position 3290 of SEQ ID NO: 1879572
agugaaagauucuauguuc

SEQ ID NO: 1917231 - RNA, 19 nt, Artificial Sequence
  Description of Artificial Sequence: Synthetic oligonucleotide
  Antisense strand to SEQ ID NO: 1917230
gaacauagaaucuuucacu

SEQ ID NO: 1917232 - RNA, 19 nt, Artificial Sequence
  Description of Artificial Sequence: Synthetic oligonucleotide
  Sense strand starting at position 745 of SEQ ID NO: 1879573
cgagguuccaugugaugca

SEQ ID NO: 1917233 - RNA, 19 nt, Artificial Sequence
  Description of Artificial Sequence: Synthetic oligonucleotide
  Antisense strand to SEQ ID NO: 1917232
ugcaucacauggaaccucg

SEQ ID NO: 1917234 - RNA, 19 nt, Artificial Sequence
  Description of Artificial Sequence: Synthetic oligonucleotide
  Sense strand starting at position 1073 of SEQ ID NO: 1879573
gugggucuaugacugaaau

SEQ ID NO: 1917235 - RNA, 19 nt, Artificial Sequence
  Description of Artificial Sequence: Synthetic oligonucleotide
  Antisense strand to SEQ ID NO: 1917234
auuucagucauagacccac

SEQ ID NO: 1917236 - RNA, 19 nt, Artificial Sequence
  Description of Artificial Sequence: Synthetic oligonucleotide
  Sense strand starting at position 1074 of SEQ ID NO: 1879573
ugggucuaugacugaaauu

SEQ ID NO: 1917237 - RNA, 19 nt, Artificial Sequence
  Description of Artificial Sequence: Synthetic oligonucleotide
  Antisense strand to SEQ ID NO: 1917236
aauuucagucauagaccca

SEQ ID NO: 1917238 - RNA, 19 nt, Artificial Sequence
  Description of Artificial Sequence: Synthetic oligonucleotide
  Sense strand starting at position 2094 of SEQ ID NO: 1879573
cuuggugacaggugauaag

SEQ ID NO: 1917239 - RNA, 19 nt, Artificial Sequence
  Description of Artificial Sequence: Synthetic oligonucleotide
  Antisense strand to SEQ ID NO: 1917238
cuuaucaccugucaccaag

SEQ ID NO: 1917240 - RNA, 19 nt, Artificial Sequence
  Description of Artificial Sequence: Synthetic oligonucleotide
  Sense strand starting at position 2105 of SEQ ID NO: 1879573
gugauaagaucagugugca

SEQ ID NO: 1917241 - RNA, 19 nt, Artificial Sequence
  Description of Artificial Sequence: Synthetic oligonucleotide
  Antisense strand to SEQ ID NO: 1917240
ugcacacugaucuuaucac

SEQ ID NO: 1917242 - RNA, 19 nt, Artificial Sequence
  Description of Artificial Sequence: Synthetic oligonucleotide
  Sense strand starting at position 2106 of SEQ ID NO: 1879573
ugauaagaucagugugcag

SEQ ID NO: 1917243 - RNA, 19 nt, Artificial Sequence
  Description of Artificial Sequence: Synthetic oligonucleotide
  Antisense strand to SEQ ID NO: 1917242
cugcacacugaucuuauca

SEQ ID NO: 1917244 - RNA, 19 nt, Artificial Sequence
  Description of Artificial Sequence: Synthetic oligonucleotide
  Sense strand starting at position 2155 of SEQ ID NO: 1879573
ggauacucuccaugcucau

SEQ ID NO: 1917245 - RNA, 19 nt, Artificial Sequence
  Description of Artificial Sequence: Synthetic oligonucleotide
  Antisense strand to SEQ ID NO: 1917244
augagcauggagaguaucc

SEQ ID NO: 1917246 - RNA, 19 nt, Artificial Sequence
  Description of Artificial Sequence: Synthetic oligonucleotide
  Sense strand starting at position 2413 of SEQ ID NO: 1879573
gcucaaugcucccaggugu

SEQ ID NO: 1917247 - RNA, 19 nt, Artificial Sequence
  Description of Artificial Sequence: Synthetic oligonucleotide
  Antisense strand to SEQ ID NO: 1917246
acaccugggagcauugagc

SEQ ID NO: 1917248 - RNA, 19 nt, Artificial Sequence
  Description of Artificial Sequence: Synthetic oligonucleotide
  Sense strand starting at position 2548 of SEQ ID NO: 1879573
cggcaagguuguuccauga

SEQ ID NO: 1917249 - RNA, 19 nt, Artificial Sequence
  Description of Artificial Sequence: Synthetic oligonucleotide
  Antisense strand to SEQ ID NO: 1917248
ucauggaacaaccuugccg

SEQ ID NO: 1917250 - RNA, 19 nt, Artificial Sequence
  Description of Artificial Sequence: Synthetic oligonucleotide
  Sense strand starting at position 2552 of SEQ ID NO: 1879573
aagguuguuccaugagccu

SEQ ID NO: 1917251 - RNA, 19 nt, Artificial Sequence
  Description of Artificial Sequence: Synthetic oligonucleotide
  Antisense strand to SEQ ID NO: 1917250
aggcucauggaacaaccuu

SEQ ID NO: 1917252 - RNA, 19 nt, Artificial Sequence
  Description of Artificial Sequence: Synthetic oligonucleotide
  Sense strand starting at position 2918 of SEQ ID NO: 1879573
cagccaugggugugaugaa

SEQ ID NO: 1917253 - RNA, 19 nt, Artificial Sequence
  Description of Artificial Sequence: Synthetic oligonucleotide
  Antisense strand to SEQ ID NO: 1917252
uucaucacacccauggcug

SEQ ID NO: 1917254 - RNA, 19 nt, Artificial Sequence
  Description of Artificial Sequence: Synthetic oligonucleotide
  Sense strand starting at position 3327 of SEQ ID NO: 1879573
ggcagguuaucgugugaag

SEQ ID NO: 1917255 - RNA, 19 nt, Artificial Sequence
  Description of Artificial Sequence: Synthetic oligonucleotide
  Antisense strand to SEQ ID NO: 1917254
cuucacacgauaaccugcc

SEQ ID NO: 1917256 - RNA, 19 nt, Artificial Sequence
  Description of Artificial Sequence: Synthetic oligonucleotide
  Sense strand starting at position 3445 of SEQ ID NO: 1879573
augugugacccagguaaga

SEQ ID NO: 1917257 - RNA, 19 nt, Artificial Sequence
  Description of Artificial Sequence: Synthetic oligonucleotide
  Antisense strand to SEQ ID NO: 1917256
ucuuaccugggucacacau

SEQ ID NO: 1917258 - RNA, 19 nt, Artificial Sequence
  Description of Artificial Sequence: Synthetic oligonucleotide
  Sense strand starting at position 3853 of SEQ ID NO: 1879573
gucccuuucuccuccagau

SEQ ID NO: 1917259 - RNA, 19 nt, Artificial Sequence
  Description of Artificial Sequence: Synthetic oligonucleotide
  Antisense strand to SEQ ID NO: 1917258
aucuggaggagaaagggac

SEQ ID NO: 1917260 - RNA, 19 nt, Artificial Sequence
  Description of Artificial Sequence: Synthetic oligonucleotide
  Sense strand starting at position 3961 of SEQ ID NO: 1879573
agagguggccuuugaguca

SEQ ID NO: 1917261 - RNA, 19 nt, Artificial Sequence
  Description of Artificial Sequence: Synthetic oligonucleotide
  Antisense strand to SEQ ID NO: 1917260
ugacucaaaggccaccucu

SEQ ID NO: 1917262 - RNA, 19 nt, Artificial Sequence
  Description of Artificial Sequence: Synthetic oligonucleotide
  Sense strand starting at position 943 of SEQ ID NO: 1879574
ugaguaaagcuguaaccau

SEQ ID NO: 1917263 - RNA, 19 nt, Artificial Sequence
  Description of Artificial Sequence: Synthetic oligonucleotide
  Antisense strand to SEQ ID NO: 1917262
augguuacagcuuuacuca

SEQ ID NO: 1917264 - RNA, 19 nt, Artificial Sequence
  Description of Artificial Sequence: Synthetic oligonucleotide
  Sense strand starting at position 999 of SEQ ID NO: 1879574
uuugguuggcacuguuuga

SEQ ID NO: 1917265 - RNA, 19 nt, Artificial Sequence
  Description of Artificial Sequence: Synthetic oligonucleotide
  Antisense strand to SEQ ID NO: 1917264
ucaaacagugccaaccaaa

SEQ ID NO: 1917266 - RNA, 19 nt, Artificial Sequence
  Description of Artificial Sequence: Synthetic oligonucleotide
  Sense strand starting at position 1021 of SEQ ID NO: 1879574
gcaguaucaagucauggca

SEQ ID NO: 1917267 - RNA, 19 nt, Artificial Sequence
  Description of Artificial Sequence: Synthetic oligonucleotide
  Antisense strand to SEQ ID NO: 1917266
ugccaugacuugauacugc

SEQ ID NO: 1917268 - RNA, 19 nt, Artificial Sequence
  Description of Artificial Sequence: Synthetic oligonucleotide
  Sense strand starting at position 1092 of SEQ ID NO: 1879574
ugaauuugagcccgucuga

SEQ ID NO: 1917269 - RNA, 19 nt, Artificial Sequence
  Description of Artificial Sequence: Synthetic oligonucleotide
  Antisense strand to SEQ ID NO: 1917268
ucagacgggcucaaauuca

SEQ ID NO: 1917270 - RNA, 19 nt, Artificial Sequence
  Description of Artificial Sequence: Synthetic oligonucleotide
  Sense strand starting at position 1380 of SEQ ID NO: 1879574
gaggaucagcgaugucaag

SEQ ID NO: 1917271 - RNA, 19 nt, Artificial Sequence
  Description of Artificial Sequence: Synthetic oligonucleotide
  Antisense strand to SEQ ID NO: 1917270
cuugacaucgcugauccuc

SEQ ID NO: 1917272 - RNA, 19 nt, Artificial Sequence
  Description of Artificial Sequence: Synthetic oligonucleotide
  Sense strand starting at position 1386 of SEQ ID NO: 1879574
cagcgaugucaagacguua

SEQ ID NO: 1917273 - RNA, 19 nt, Artificial Sequence
  Description of Artificial Sequence: Synthetic oligonucleotide
  Antisense strand to SEQ ID NO: 1917272
uaacgucuugacaucgcug

SEQ ID NO: 1917274 - RNA, 19 nt, Artificial Sequence
  Description of Artificial Sequence: Synthetic oligonucleotide
  Sense strand starting at position 1507 of SEQ ID NO: 1879574
gggccugaaccuugaggua

SEQ ID NO: 1917275 - RNA, 19 nt, Artificial Sequence
  Description of Artificial Sequence: Synthetic oligonucleotide
  Antisense strand to SEQ ID NO: 1917274
uaccucaagguucaggccc

SEQ ID NO: 1917276 - RNA, 19 nt, Artificial Sequence
  Description of Artificial Sequence: Synthetic oligonucleotide
  Sense strand starting at position 1609 of SEQ ID NO: 1879574
ggcugaguguugaaggcaa

SEQ ID NO: 1917277 - RNA, 19 nt, Artificial Sequence
  Description of Artificial Sequence: Synthetic oligonucleotide
  Antisense strand to SEQ ID NO: 1917276
uugccuucaacacucagcc

SEQ ID NO: 1917278 - RNA, 19 nt, Artificial Sequence
  Description of Artificial Sequence: Synthetic oligonucleotide
  Sense strand starting at position 1611 of SEQ ID NO: 1879574
cugaguguugaaggcaaga

SEQ ID NO: 1917279 - RNA, 19 nt, Artificial Sequence
  Description of Artificial Sequence: Synthetic oligonucleotide
  Antisense strand to SEQ ID NO: 1917278
ucuugccuucaacacucag

SEQ ID NO: 1917280 - RNA, 19 nt, Artificial Sequence
  Description of Artificial Sequence: Synthetic oligonucleotide
  Sense strand starting at position 1613 of SEQ ID NO: 1879574
gaguguugaaggcaagacu

SEQ ID NO: 1917281 - RNA, 19 nt, Artificial Sequence
  Description of Artificial Sequence: Synthetic oligonucleotide
  Antisense strand to SEQ ID NO: 1917280
agucuugccuucaacacuc

SEQ ID NO: 1917282 - RNA, 19 nt, Artificial Sequence
  Description of Artificial Sequence: Synthetic oligonucleotide
  Sense strand starting at position 2358 of SEQ ID NO: 1879574
ugcucaucaccuuggagaa

SEQ ID NO: 1917283 - RNA, 19 nt, Artificial Sequence
  Description of Artificial Sequence: Synthetic oligonucleotide
  Antisense strand to SEQ ID NO: 1917282
uucuccaaggugaugagca

SEQ ID NO: 1917284 - RNA, 19 nt, Artificial Sequence
  Description of Artificial Sequence: Synthetic oligonucleotide
  Sense strand starting at position 2743 of SEQ ID NO: 1879574
gugggaagcguuucagugu

SEQ ID NO: 1917285 - RNA, 19 nt, Artificial Sequence
  Description of Artificial Sequence: Synthetic oligonucleotide
  Antisense strand to SEQ ID NO: 1917284
acacugaaacgcuucccac

SEQ ID NO: 1917286 - RNA, 19 nt, Artificial Sequence
  Description of Artificial Sequence: Synthetic oligonucleotide
  Sense strand starting at position 2749 of SEQ ID NO: 1879574
agcguuucaguguuugguu

SEQ ID NO: 1917287 - RNA, 19 nt, Artificial Sequence
  Description of Artificial Sequence: Synthetic oligonucleotide
  Antisense strand to SEQ ID NO: 1917286
aaccaaacacugaaacgcu

SEQ ID NO: 1917288 - RNA, 19 nt, Artificial Sequence
  Description of Artificial Sequence: Synthetic oligonucleotide
  Sense strand starting at position 2783 of SEQ ID NO: 1879574
cacguuacucgaugacuuu

SEQ ID NO: 1917289 - RNA, 19 nt, Artificial Sequence
  Description of Artificial Sequence: Synthetic oligonucleotide
  Antisense strand to SEQ ID NO: 1917288
aaagucaucgaguaacgug

SEQ ID NO: 1917290 - RNA, 19 nt, Artificial Sequence
  Description of Artificial Sequence: Synthetic oligonucleotide
  Sense strand starting at position 2814 of SEQ ID NO: 1879574
cuuugaauggugcguuuga

SEQ ID NO: 1917291 - RNA, 19 nt, Artificial Sequence
  Description of Artificial Sequence: Synthetic oligonucleotide
  Antisense strand to SEQ ID NO: 1917290
ucaaacgcaccauucaaag

SEQ ID NO: 1917292 - RNA, 19 nt, Artificial Sequence
  Description of Artificial Sequence: Synthetic oligonucleotide
  Sense strand starting at position 2815 of SEQ ID NO: 1879574
uuugaauggugcguuugaa

SEQ ID NO: 1917293 - RNA, 19 nt, Artificial Sequence
  Description of Artificial Sequence: Synthetic oligonucleotide
  Antisense strand to SEQ ID NO: 1917292
uucaaacgcaccauucaaa

SEQ ID NO: 1917294 - RNA, 19 nt, Artificial Sequence
  Description of Artificial Sequence: Synthetic oligonucleotide
  Sense strand starting at position 2837 of SEQ ID NO: 1879574
acggaaacuuucuucuacu

SEQ ID NO: 1917295 - RNA, 19 nt, Artificial Sequence
  Description of Artificial Sequence: Synthetic oligonucleotide
  Antisense strand to SEQ ID NO: 1917294
aguagaagaaaguuuccgu

SEQ ID NO: 1917296 - RNA, 19 nt, Artificial Sequence
  Description of Artificial Sequence: Synthetic oligonucleotide
  Sense strand starting at position 2838 of SEQ ID NO: 1879574
cggaaacuuucuucuacuc

SEQ ID NO: 1917297 - RNA, 19 nt, Artificial Sequence
  Description of Artificial Sequence: Synthetic oligonucleotide
  Antisense strand to SEQ ID NO: 1917296
gaguagaagaaaguuuccg

SEQ ID NO: 1917298 - RNA, 19 nt, Artificial Sequence
  Description of Artificial Sequence: Synthetic oligonucleotide
  Sense strand starting at position 2904 of SEQ ID NO: 1879574
uaccaaguccuucgugaag

SEQ ID NO: 1917299 - RNA, 19 nt, Artificial Sequence
  Description of Artificial Sequence: Synthetic oligonucleotide
  Antisense strand to SEQ ID NO: 1917298
cuucacgaaggacuuggua

SEQ ID NO: 1917300 - RNA, 19 nt, Artificial Sequence
  Description of Artificial Sequence: Synthetic oligonucleotide
  Sense strand starting at position 2964 of SEQ ID NO: 1879574
gcgaaguauguugagggua

SEQ ID NO: 1917301 - RNA, 19 nt, Artificial Sequence
  Description of Artificial Sequence: Synthetic oligonucleotide
  Antisense strand to SEQ ID NO: 1917300
uacccucaacauacuucgc

SEQ ID NO: 1917302 - RNA, 19 nt, Artificial Sequence
  Description of Artificial Sequence: Synthetic oligonucleotide
  Sense strand starting at position 2965 of SEQ ID NO: 1879574
cgaaguauguugaggguaa

SEQ ID NO: 1917303 - RNA, 19 nt, Artificial Sequence
  Description of Artificial Sequence: Synthetic oligonucleotide
  Antisense strand to SEQ ID NO: 1917302
uuacccucaacauacuucg

SEQ ID NO: 1917304 - RNA, 19 nt, Artificial Sequence
  Description of Artificial Sequence: Synthetic oligonucleotide
  Sense strand starting at position 3054 of SEQ ID NO: 1879574
ggguucuguuucuugacuu

SEQ ID NO: 1917305 - RNA, 19 nt, Artificial Sequence
  Description of Artificial Sequence: Synthetic oligonucleotide
  Antisense strand to SEQ ID NO: 1917304
aagucaagaaacagaaccc

SEQ ID NO: 1917306 - RNA, 19 nt, Artificial Sequence
  Description of Artificial Sequence: Synthetic oligonucleotide
  Sense strand starting at position 3251 of SEQ ID NO: 1879574
ggacgucaucaauguguuu

SEQ ID NO: 1917307 - RNA, 19 nt, Artificial Sequence
  Description of Artificial Sequence: Synthetic oligonucleotide
  Antisense strand to SEQ ID NO: 1917306
aaacacauugaugacgucc

SEQ ID NO: 1917308 - RNA, 19 nt, Artificial Sequence
  Description of Artificial Sequence: Synthetic oligonucleotide
  Sense strand starting at position 3274 of SEQ ID NO: 1879574
gccuucgacagcugagaga

SEQ ID NO: 1917309 - RNA, 19 nt, Artificial Sequence
  Description of Artificial Sequence: Synthetic oligonucleotide
  Antisense strand to SEQ ID NO: 1917308
ucucucagcugucgaaggc

SEQ ID NO: 1917310 - RNA, 19 nt, Artificial Sequence
  Description of Artificial Sequence: Synthetic oligonucleotide
  Sense strand starting at position 3307 of SEQ ID NO: 1879574
gucagagcugucuagucua

SEQ ID NO: 1917311 - RNA, 19 nt, Artificial Sequence
  Description of Artificial Sequence: Synthetic oligonucleotide
  Antisense strand to SEQ ID NO: 1917310
uagacuagacagcucugac

SEQ ID NO: 1917312 - RNA, 19 nt, Artificial Sequence
  Description of Artificial Sequence: Synthetic oligonucleotide
  Sense strand starting at position 3310 of SEQ ID NO: 1879574
agagcugucuagucuauca

SEQ ID NO: 1917313 - RNA, 19 nt, Artificial Sequence
  Description of Artificial Sequence: Synthetic oligonucleotide
  Antisense strand to SEQ ID NO: 1917312
ugauagacuagacagcucu

SEQ ID NO: 1917314 - RNA, 19 nt, Artificial Sequence
  Description of Artificial Sequence: Synthetic oligonucleotide
  Sense strand starting at position 3312 of SEQ ID NO: 1879574
agcugucuagucuaucaua

SEQ ID NO: 1917315 - RNA, 19 nt, Artificial Sequence
  Description of Artificial Sequence: Synthetic oligonucleotide
  Antisense strand to SEQ ID NO: 1917314
uaugauagacuagacagcu

SEQ ID NO: 1917316 - RNA, 19 nt, Artificial Sequence
  Description of Artificial Sequence: Synthetic oligonucleotide
  Sense strand starting at position 3361 of SEQ ID NO: 1879574
uacaguaaggcuuguauaa

SEQ ID NO: 1917317 - RNA, 19 nt, Artificial Sequence
  Description of Artificial Sequence: Synthetic oligonucleotide
  Antisense strand to SEQ ID NO: 1917316
uuauacaagccuuacugua

SEQ ID NO: 1917318 - RNA, 19 nt, Artificial Sequence
  Description of Artificial Sequence: Synthetic oligonucleotide
  Sense strand starting at position 3397 of SEQ ID NO: 1879574
gcucuaaaccugugggaua

SEQ ID NO: 1917319 - RNA, 19 nt, Artificial Sequence
  Description of Artificial Sequence: Synthetic oligonucleotide
  Antisense strand to SEQ ID NO: 1917318
uaucccacagguuuagagc

SEQ ID NO: 1917320 - RNA, 19 nt, Artificial Sequence
  Description of Artificial Sequence: Synthetic oligonucleotide
  Sense strand starting at position 3399 of SEQ ID NO: 1879574
ucuaaaccugugggauauu

SEQ ID NO: 1917321 - RNA, 19 nt, Artificial Sequence
  Description of Artificial Sequence: Synthetic oligonucleotide
  Antisense strand to SEQ ID NO: 1917320
aauaucccacagguuuaga

SEQ ID NO: 1917322 - RNA, 19 nt, Artificial Sequence
  Description of Artificial Sequence: Synthetic oligonucleotide
  Sense strand starting at position 3409 of SEQ ID NO: 1879574
ugggauauucaugagcgca

SEQ ID NO: 1917323 - RNA, 19 nt, Artificial Sequence
  Description of Artificial Sequence: Synthetic oligonucleotide
  Antisense strand to SEQ ID NO: 1917322
ugcgcucaugaauauccca

SEQ ID NO: 1917324 - RNA, 19 nt, Artificial Sequence
  Description of Artificial Sequence: Synthetic oligonucleotide
  Sense strand starting at position 3411 of SEQ ID NO: 1879574
ggauauucaugagcgcagu

SEQ ID NO: 1917325 - RNA, 19 nt, Artificial Sequence
  Description of Artificial Sequence: Synthetic oligonucleotide
  Antisense strand to SEQ ID NO: 1917324
acugcgcucaugaauaucc

SEQ ID NO: 1917326 - RNA, 19 nt, Artificial Sequence
  Description of Artificial Sequence: Synthetic oligonucleotide
  Sense strand starting at position 3467 of SEQ ID NO: 1879574
guagaugcgguuuaguaag

SEQ ID NO: 1917327 - RNA, 19 nt, Artificial Sequence
  Description of Artificial Sequence: Synthetic oligonucleotide
  Antisense strand to SEQ ID NO: 1917326
cuuacuaaaccgcaucuac

SEQ ID NO: 1917328 - RNA, 19 nt, Artificial Sequence
  Description of Artificial Sequence: Synthetic oligonucleotide
  Sense strand starting at position 3542 of SEQ ID NO: 1879574
cugcuuuacccaugucagu

SEQ ID NO: 1917329 - RNA, 19 nt, Artificial Sequence
  Description of Artificial Sequence: Synthetic oligonucleotide
  Antisense strand to SEQ ID NO: 1917328
acugacauggguaaagcag

SEQ ID NO: 1917330 - RNA, 19 nt, Artificial Sequence
  Description of Artificial Sequence: Synthetic oligonucleotide
  Sense strand starting at position 3588 of SEQ ID NO: 1879574
acaaguuucugagugcucu

SEQ ID NO: 1917331 - RNA, 19 nt, Artificial Sequence
  Description of Artificial Sequence: Synthetic oligonucleotide
  Antisense strand to SEQ ID NO: 1917330
agagcacucagaaacuugu

SEQ ID NO: 1917332 - RNA, 19 nt, Artificial Sequence
  Description of Artificial Sequence: Synthetic oligonucleotide
  Sense strand starting at position 3594 of SEQ ID NO: 1879574
uucugagugcucuggagca

SEQ ID NO: 1917333 - RNA, 19 nt, Artificial Sequence
  Description of Artificial Sequence: Synthetic oligonucleotide
  Antisense strand to SEQ ID NO: 1917332
ugcuccagagcacucagaa

SEQ ID NO: 1917334 - RNA, 19 nt, Artificial Sequence
  Description of Artificial Sequence: Synthetic oligonucleotide
  Sense strand starting at position 3681 of SEQ ID NO: 1879574
uccuguuguccagggcaga

SEQ ID NO: 1917335 - RNA, 19 nt, Artificial Sequence
  Description of Artificial Sequence: Synthetic oligonucleotide
  Antisense strand to SEQ ID NO: 1917334
ucugcccuggacaacagga

SEQ ID NO: 1917336 - RNA, 19 nt, Artificial Sequence
  Description of Artificial Sequence: Synthetic oligonucleotide
  Sense strand starting at position 3950 of SEQ ID NO: 1879574
cuggguaaucuuuaguugu

SEQ ID NO: 1917337 - RNA, 19 nt, Artificial Sequence
  Description of Artificial Sequence: Synthetic oligonucleotide
  Antisense strand to SEQ ID NO: 1917336
acaacuaaagauuacccag

SEQ ID NO: 1917338 - RNA, 19 nt, Artificial Sequence
  Description of Artificial Sequence: Synthetic oligonucleotide
  Sense strand starting at position 3952 of SEQ ID NO: 1879574
ggguaaucuuuaguuguag

SEQ ID NO: 1917339 - RNA, 19 nt, Artificial Sequence
  Description of Artificial Sequence: Synthetic oligonucleotide
  Antisense strand to SEQ ID NO: 1917338
cuacaacuaaagauuaccc

SEQ ID NO: 1917340 - RNA, 19 nt, Artificial Sequence
  Description of Artificial Sequence: Synthetic oligonucleotide
  Sense strand starting at position 3978 of SEQ ID NO: 1879574
uccugugugcugcaggauu

SEQ ID NO: 1917341 - RNA, 19 nt, Artificial Sequence
  Description of Artificial Sequence: Synthetic oligonucleotide
  Antisense strand to SEQ ID NO: 1917340
aauccugcagcacacagga

SEQ ID NO: 1917342 - RNA, 19 nt, Artificial Sequence
  Description of Artificial Sequence: Synthetic oligonucleotide
  Sense strand starting at position 2119 of SEQ ID NO: 1879575
ccuucuugcgaccgagaga

SEQ ID NO: 1917343 - RNA, 19 nt, Artificial Sequence
  Description of Artificial Sequence: Synthetic oligonucleotide
  Antisense strand to SEQ ID NO: 1917342
ucucucggucgcaagaagg

SEQ ID NO: 1917344 - RNA, 19 nt, Artificial Sequence
  Description of Artificial Sequence: Synthetic oligonucleotide
  Sense strand starting at position 2307 of SEQ ID NO: 1879575
caugcuuucccgcggauga

SEQ ID NO: 1917345 - RNA, 19 nt, Artificial Sequence
  Description of Artificial Sequence: Synthetic oligonucleotide
  Antisense strand to SEQ ID NO: 1917344
ucauccgcgggaaagcaug

SEQ ID NO: 1917346 - RNA, 19 nt, Artificial Sequence
  Description of Artificial Sequence: Synthetic oligonucleotide
  Sense strand starting at position 2308 of SEQ ID NO: 1879575
augcuuucccgcggaugau

SEQ ID NO: 1917347 - RNA, 19 nt, Artificial Sequence
  Description of Artificial Sequence: Synthetic oligonucleotide
  Antisense strand to SEQ ID NO: 1917346
aucauccgcgggaaagcau

SEQ ID NO: 1917348 - RNA, 19 nt, Artificial Sequence
  Description of Artificial Sequence: Synthetic oligonucleotide
  Sense strand starting at position 2323 of SEQ ID NO: 1879575
ugaugcuagcagugacauu

SEQ ID NO: 1917349 - RNA, 19 nt, Artificial Sequence
  Description of Artificial Sequence: Synthetic oligonucleotide
  Antisense strand to SEQ ID NO: 1917348
aaugucacugcuagcauca

SEQ ID NO: 1917350 - RNA, 19 nt, Artificial Sequence
  Description of Artificial Sequence: Synthetic oligonucleotide
  Sense strand starting at position 2393 of SEQ ID NO: 1879575
ugggaucucugguaggagu

SEQ ID NO: 1917351 - RNA, 19 nt, Artificial Sequence
  Description of Artificial Sequence: Synthetic oligonucleotide
  Antisense strand to SEQ ID NO: 1917350
acuccuaccagagauccca

SEQ ID NO: 1917352 - RNA, 19 nt, Artificial Sequence
  Description of Artificial Sequence: Synthetic oligonucleotide
  Sense strand starting at position 2445 of SEQ ID NO: 1879575
ggagaugugaccgagguca

SEQ ID NO: 1917353 - RNA, 19 nt, Artificial Sequence
  Description of Artificial Sequence: Synthetic oligonucleotide
  Antisense strand to SEQ ID NO: 1917352
ugaccucggucacaucucc

SEQ ID NO: 1917354 - RNA, 19 nt, Artificial Sequence
  Description of Artificial Sequence: Synthetic oligonucleotide
  Sense strand starting at position 2447 of SEQ ID NO: 1879575
agaugugaccgaggucaca

SEQ ID NO: 1917355 - RNA, 19 nt, Artificial Sequence
  Description of Artificial Sequence: Synthetic oligonucleotide
  Antisense strand to SEQ ID NO: 1917354
ugugaccucggucacaucu

SEQ ID NO: 1917356 - RNA, 19 nt, Artificial Sequence
  Description of Artificial Sequence: Synthetic oligonucleotide
  Sense strand starting at position 2457 of SEQ ID NO: 1879575
gaggucacaugagagaguu

SEQ ID NO: 1917357 - RNA, 19 nt, Artificial Sequence
  Description of Artificial Sequence: Synthetic oligonucleotide
  Antisense strand to SEQ ID NO: 1917356
aacucucucaugugaccuc

SEQ ID NO: 1917358 - RNA, 19 nt, Artificial Sequence
  Description of Artificial Sequence: Synthetic oligonucleotide
  Sense strand starting at position 2631 of SEQ ID NO: 1879575
ugucccaagcuguguauau

SEQ ID NO: 1917359 - RNA, 19 nt, Artificial Sequence
  Description of Artificial Sequence: Synthetic oligonucleotide
  Antisense strand to SEQ ID NO: 1917358
auauacacagcuugggaca

SEQ ID NO: 1917360 - RNA, 19 nt, Artificial Sequence
  Description of Artificial Sequence: Synthetic oligonucleotide
  Sense strand starting at position 2633 of SEQ ID NO: 1879575
ucccaagcuguguauauga

SEQ ID NO: 1917361 - RNA, 19 nt, Artificial Sequence
  Description of Artificial Sequence: Synthetic oligonucleotide
  Antisense strand to SEQ ID NO: 1917360
ucauauacacagcuuggga

SEQ ID NO: 1917362 - RNA, 19 nt, Artificial Sequence
  Description of Artificial Sequence: Synthetic oligonucleotide
  Sense strand starting at position 2635 of SEQ ID NO: 1879575
ccaagcuguguauaugaua

SEQ ID NO: 1917363 - RNA, 19 nt, Artificial Sequence
  Description of Artificial Sequence: Synthetic oligonucleotide
  Antisense strand to SEQ ID NO: 1917362
uaucauauacacagcuugg

SEQ ID NO: 1917364 - RNA, 19 nt, Artificial Sequence
  Description of Artificial Sequence: Synthetic oligonucleotide
  Sense strand starting at position 2638 of SEQ ID NO: 1879575
agcuguguauaugauaaga

SEQ ID NO: 1917365 - RNA, 19 nt, Artificial Sequence
  Description of Artificial Sequence: Synthetic oligonucleotide
  Antisense strand to SEQ ID NO: 1917364
ucuuaucauauacacagcu

SEQ ID NO: 1917366 - RNA, 19 nt, Artificial Sequence
  Description of Artificial Sequence: Synthetic oligonucleotide
  Sense strand starting at position 2704 of SEQ ID NO: 1879575
uucugaaagaggugguaaa

SEQ ID NO: 1917367 - RNA, 19 nt, Artificial Sequence
  Description of Artificial Sequence: Synthetic oligonucleotide
  Antisense strand to SEQ ID NO: 1917366
uuuaccaccucuuucagaa

SEQ ID NO: 1917368 - RNA, 19 nt, Artificial Sequence
  Description of Artificial Sequence: Synthetic oligonucleotide
  Sense strand starting at position 2761 of SEQ ID NO: 1879575
ggccuuucuccaggacaua

SEQ ID NO: 1917369 - RNA, 19 nt, Artificial Sequence
  Description of Artificial Sequence: Synthetic oligonucleotide
  Antisense strand to SEQ ID NO: 1917368
uauguccuggagaaaggcc

SEQ ID NO: 1917370 - RNA, 19 nt, Artificial Sequence
  Description of Artificial Sequence: Synthetic oligonucleotide
  Sense strand starting at position 2773 of SEQ ID NO: 1879575
ggacauaggucccauguca

SEQ ID NO: 1917371 - RNA, 19 nt, Artificial Sequence
  Description of Artificial Sequence: Synthetic oligonucleotide
  Antisense strand to SEQ ID NO: 1917370
ugacaugggaccuaugucc

SEQ ID NO: 1917372 - RNA, 19 nt, Artificial Sequence
  Description of Artificial Sequence: Synthetic oligonucleotide
  Sense strand starting at position 2809 of SEQ ID NO: 1879575
uugcgucuuucauuggaug

SEQ ID NO: 1917373 - RNA, 19 nt, Artificial Sequence
  Description of Artificial Sequence: Synthetic oligonucleotide
  Antisense strand to SEQ ID NO: 1917372
cauccaaugaaagacgcaa

SEQ ID NO: 1917374 - RNA, 19 nt, Artificial Sequence
  Description of Artificial Sequence: Synthetic oligonucleotide
  Sense strand starting at position 2980 of SEQ ID NO: 1879575
ugcagcuugcucugugagu

SEQ ID NO: 1917375 - RNA, 19 nt, Artificial Sequence
  Description of Artificial Sequence: Synthetic oligonucleotide
  Antisense strand to SEQ ID NO: 1917374
acucacagagcaagcugca

SEQ ID NO: 1917376 - RNA, 19 nt, Artificial Sequence
  Description of Artificial Sequence: Synthetic oligonucleotide
  Sense strand starting at position 3049 of SEQ ID NO: 1879575
gccggagacagccgucaua

SEQ ID NO: 1917377 - RNA, 19 nt, Artificial Sequence
  Description of Artificial Sequence: Synthetic oligonucleotide
  Antisense strand to SEQ ID NO: 1917376
uaugacggcugucuccggc

SEQ ID NO: 1917378 - RNA, 19 nt, Artificial Sequence
  Description of Artificial Sequence: Synthetic oligonucleotide
  Sense strand starting at position 3059 of SEQ ID NO: 1879575
gccgucauacugccggaua

SEQ ID NO: 1917379 - RNA, 19 nt, Artificial Sequence
  Description of Artificial Sequence: Synthetic oligonucleotide
  Antisense strand to SEQ ID NO: 1917378
uauccggcaguaugacggc

SEQ ID NO: 1917380 - RNA, 19 nt, Artificial Sequence
  Description of Artificial Sequence: Synthetic oligonucleotide
  Sense strand starting at position 3061 of SEQ ID NO: 1879575
cgucauacugccggauaga

SEQ ID NO: 1917381 - RNA, 19 nt, Artificial Sequence
  Description of Artificial Sequence: Synthetic oligonucleotide
  Antisense strand to SEQ ID NO: 1917380
ucuauccggcaguaugacg

SEQ ID NO: 1917382 - RNA, 19 nt, Artificial Sequence
  Description of Artificial Sequence: Synthetic oligonucleotide
  Sense strand starting at position 3062 of SEQ ID NO: 1879575
gucauacugccggauagag

SEQ ID NO: 1917383 - RNA, 19 nt, Artificial Sequence
  Description of Artificial Sequence: Synthetic oligonucleotide
  Antisense strand to SEQ ID NO: 1917382
cucuauccggcaguaugac

SEQ ID NO: 1917384 - RNA, 19 nt, Artificial Sequence
  Description of Artificial Sequence: Synthetic oligonucleotide
  Sense strand starting at position 3082 of SEQ ID NO: 1879575
ggcucacuugcauguauuu

SEQ ID NO: 1917385 - RNA, 19 nt, Artificial Sequence
  Description of Artificial Sequence: Synthetic oligonucleotide
  Antisense strand to SEQ ID NO: 1917384
aaauacaugcaagugagcc

SEQ ID NO: 1917386 - RNA, 19 nt, Artificial Sequence
  Description of Artificial Sequence: Synthetic oligonucleotide
  Sense strand starting at position 3089 of SEQ ID NO: 1879575
uugcauguauuuggaacaa

SEQ ID NO: 1917387 - RNA, 19 nt, Artificial Sequence
  Description of Artificial Sequence: Synthetic oligonucleotide
  Antisense strand to SEQ ID NO: 1917386
uuguuccaaauacaugcaa

SEQ ID NO: 1917388 - RNA, 19 nt, Artificial Sequence
  Description of Artificial Sequence: Synthetic oligonucleotide
  Sense strand starting at position 3130 of SEQ ID NO: 1879575
ccgcucucugcaguaagua

SEQ ID NO: 1917389 - RNA, 19 nt, Artificial Sequence
  Description of Artificial Sequence: Synthetic oligonucleotide
  Antisense strand to SEQ ID NO: 1917388
uacuuacugcagagagcgg

SEQ ID NO: 1917390 - RNA, 19 nt, Artificial Sequence
  Description of Artificial Sequence: Synthetic oligonucleotide
  Sense strand starting at position 3131 of SEQ ID NO: 1879575
cgcucucugcaguaaguau

SEQ ID NO: 1917391 - RNA, 19 nt, Artificial Sequence
  Description of Artificial Sequence: Synthetic oligonucleotide
  Antisense strand to SEQ ID NO: 1917390
auacuuacugcagagagcg

SEQ ID NO: 1917392 - RNA, 19 nt, Artificial Sequence
  Description of Artificial Sequence: Synthetic oligonucleotide
  Sense strand starting at position 3195 of SEQ ID NO: 1879575
auggguagauguuuauuga

SEQ ID NO: 1917393 - RNA, 19 nt, Artificial Sequence
  Description of Artificial Sequence: Synthetic oligonucleotide
  Antisense strand to SEQ ID NO: 1917392
ucaauaaacaucuacccau

SEQ ID NO: 1917394 - RNA, 19 nt, Artificial Sequence
  Description of Artificial Sequence: Synthetic oligonucleotide
  Sense strand starting at position 3261 of SEQ ID NO: 1879575
cccuuaguccuccagaaga

SEQ ID NO: 1917395 - RNA, 19 nt, Artificial Sequence
  Description of Artificial Sequence: Synthetic oligonucleotide
  Antisense strand to SEQ ID NO: 1917394
ucuucuggaggacuaaggg

SEQ ID NO: 1917396 - RNA, 19 nt, Artificial Sequence
  Description of Artificial Sequence: Synthetic oligonucleotide
  Sense strand starting at position 3358 of SEQ ID NO: 1879575
ccucacauuugggagaagu

SEQ ID NO: 1917397 - RNA, 19 nt, Artificial Sequence
  Description of Artificial Sequence: Synthetic oligonucleotide
  Antisense strand to SEQ ID NO: 1917396
acuucucccaaaugugagg

SEQ ID NO: 1917398 - RNA, 19 nt, Artificial Sequence
  Description of Artificial Sequence: Synthetic oligonucleotide
  Sense strand starting at position 3413 of SEQ ID NO: 1879575
cucaguguggaguguuaau

SEQ ID NO: 1917399 - RNA, 19 nt, Artificial Sequence
  Description of Artificial Sequence: Synthetic oligonucleotide
  Antisense strand to SEQ ID NO: 1917398
auuaacacuccacacugag

SEQ ID NO: 1917400 - RNA, 19 nt, Artificial Sequence
  Description of Artificial Sequence: Synthetic oligonucleotide
  Sense strand starting at position 3529 of SEQ ID NO: 1879575
uagcaugguucucugccaa

SEQ ID NO: 1917401 - RNA, 19 nt, Artificial Sequence
  Description of Artificial Sequence: Synthetic oligonucleotide
  Antisense strand to SEQ ID NO: 1917400
uuggcagagaaccaugcua

SEQ ID NO: 1917402 - RNA, 19 nt, Artificial Sequence
  Description of Artificial Sequence: Synthetic oligonucleotide
  Sense strand starting at position 3606 of SEQ ID NO: 1879575
agcaauucuuaucagacgu

SEQ ID NO: 1917403 - RNA, 19 nt, Artificial Sequence
  Description of Artificial Sequence: Synthetic oligonucleotide
  Antisense strand to SEQ ID NO: 1917402
acgucugauaagaauugcu

SEQ ID NO: 1917404 - RNA, 19 nt, Artificial Sequence
  Description of Artificial Sequence: Synthetic oligonucleotide
  Sense strand starting at position 3786 of SEQ ID NO: 1879575
ugcuuacuuuccuccugua

SEQ ID NO: 1917405 - RNA, 19 nt, Artificial Sequence
  Description of Artificial Sequence: Synthetic oligonucleotide
  Antisense strand to SEQ ID NO: 1917404
uacaggaggaaaguaagca

SEQ ID NO: 1917406 - RNA, 19 nt, Artificial Sequence
  Description of Artificial Sequence: Synthetic oligonucleotide
  Sense strand starting at position 3800 of SEQ ID NO: 1879575
cuguauugcagaugcugau

SEQ ID NO: 1917407 - RNA, 19 nt, Artificial Sequence
  Description of Artificial Sequence: Synthetic oligonucleotide
  Antisense strand to SEQ ID NO: 1917406
aucagcaucugcaauacag

SEQ ID NO: 1917408 - RNA, 19 nt, Artificial Sequence
  Description of Artificial Sequence: Synthetic oligonucleotide
  Sense strand starting at position 3804 of SEQ ID NO: 1879575
auugcagaugcugauagau

SEQ ID NO: 1917409 - RNA, 19 nt, Artificial Sequence
  Description of Artificial Sequence: Synthetic oligonucleotide
  Antisense strand to SEQ ID NO: 1917408
aucuaucagcaucugcaau

SEQ ID NO: 1917410 - RNA, 19 nt, Artificial Sequence
  Description of Artificial Sequence: Synthetic oligonucleotide
  Sense strand starting at position 3806 of SEQ ID NO: 1879575
ugcagaugcugauagauug

SEQ ID NO: 1917411 - RNA, 19 nt, Artificial Sequence
  Description of Artificial Sequence: Synthetic oligonucleotide
  Antisense strand to SEQ ID NO: 1917410
caaucuaucagcaucugca

SEQ ID NO: 1917412 - RNA, 19 nt, Artificial Sequence
  Description of Artificial Sequence: Synthetic oligonucleotide
  Sense strand starting at position 3873 of SEQ ID NO: 1879575
ggcuaauagcucugcgaug

SEQ ID NO: 1917413 - RNA, 19 nt, Artificial Sequence
  Description of Artificial Sequence: Synthetic oligonucleotide
  Antisense strand to SEQ ID NO: 1917412
caucgcagagcuauuagcc

SEQ ID NO: 1917414 - RNA, 19 nt, Artificial Sequence
  Description of Artificial Sequence: Synthetic oligonucleotide
  Sense strand starting at position 3875 of SEQ ID NO: 1879575
cuaauagcucugcgaugga

SEQ ID NO: 1917415 - RNA, 19 nt, Artificial Sequence
  Description of Artificial Sequence: Synthetic oligonucleotide
  Antisense strand to SEQ ID NO: 1917414
uccaucgcagagcuauuag

SEQ ID NO: 1917416 - RNA, 19 nt, Artificial Sequence
  Description of Artificial Sequence: Synthetic oligonucleotide
  Sense strand starting at position 3878 of SEQ ID NO: 1879575
auagcucugcgauggauau

SEQ ID NO: 1917417 - RNA, 19 nt, Artificial Sequence
  Description of Artificial Sequence: Synthetic oligonucleotide
  Antisense strand to SEQ ID NO: 1917416
auauccaucgcagagcuau

SEQ ID NO: 1917418 - RNA, 19 nt, Artificial Sequence
  Description of Artificial Sequence: Synthetic oligonucleotide
  Sense strand starting at position 3879 of SEQ ID NO: 1879575
uagcucugcgauggauauu

SEQ ID NO: 1917419 - RNA, 19 nt, Artificial Sequence
  Description of Artificial Sequence: Synthetic oligonucleotide
  Antisense strand to SEQ ID NO: 1917418
aauauccaucgcagagcua

SEQ ID NO: 1917420 - RNA, 19 nt, Artificial Sequence
  Description of Artificial Sequence: Synthetic oligonucleotide
  Sense strand starting at position 3888 of SEQ ID NO: 1879575
gauggauauugagcuuaga

SEQ ID NO: 1917421 - RNA, 19 nt, Artificial Sequence
  Description of Artificial Sequence: Synthetic oligonucleotide
  Antisense strand to SEQ ID NO: 1917420
ucuaagcucaauauccauc

SEQ ID NO: 1917422 - RNA, 19 nt, Artificial Sequence
  Description of Artificial Sequence: Synthetic oligonucleotide
  Sense strand starting at position 17 of SEQ ID NO: 1879576
aggacaccuuacucuguaa

SEQ ID NO: 1917423 - RNA, 19 nt, Artificial Sequence
  Description of Artificial Sequence: Synthetic oligonucleotide
  Antisense strand to SEQ ID NO: 1917422
uuacagaguaagguguccu

SEQ ID NO: 1917424 - RNA, 19 nt, Artificial Sequence
  Description of Artificial Sequence: Synthetic oligonucleotide
  Sense strand starting at position 192 of SEQ ID NO: 1879576
ccugaagagguaugugaaa

SEQ ID NO: 1917425 - RNA, 19 nt, Artificial Sequence
  Description of Artificial Sequence: Synthetic oligonucleotide
  Antisense strand to SEQ ID NO: 1917424
uuucacauaccucuucagg

SEQ ID NO: 1917426 - RNA, 19 nt, Artificial Sequence
  Description of Artificial Sequence: Synthetic oligonucleotide
  Sense strand starting at position 221 of SEQ ID NO: 1879576
uguaauggcaaaggaguua

SEQ ID NO: 1917427 - RNA, 19 nt, Artificial Sequence
  Description of Artificial Sequence: Synthetic oligonucleotide
  Antisense strand to SEQ ID NO: 1917426
uaacuccuuugccauuaca

SEQ ID NO: 1917428 - RNA, 19 nt, Artificial Sequence
  Description of Artificial Sequence: Synthetic oligonucleotide
  Sense strand starting at position 232 of SEQ ID NO: 1879576
aggaguuaaguagggugau

SEQ ID NO: 1917429 - RNA, 19 nt, Artificial Sequence
  Description of Artificial Sequence: Synthetic oligonucleotide
  Antisense strand to SEQ ID NO: 1917428
aucacccuacuuaacuccu

SEQ ID NO: 1917430 - RNA, 19 nt, Artificial Sequence
  Description of Artificial Sequence: Synthetic oligonucleotide
  Sense strand starting at position 235 of SEQ ID NO: 1879576
aguuaaguagggugauaua

SEQ ID NO: 1917431 - RNA, 19 nt, Artificial Sequence
  Description of Artificial Sequence: Synthetic oligonucleotide
  Antisense strand to SEQ ID NO: 1917430
uauaucacccuacuuaacu

SEQ ID NO: 1917432 - RNA, 19 nt, Artificial Sequence
  Description of Artificial Sequence: Synthetic oligonucleotide
  Sense strand starting at position 447 of SEQ ID NO: 1879576
uuuauaaucccuggguuag

SEQ ID NO: 1917433 - RNA, 19 nt, Artificial Sequence
  Description of Artificial Sequence: Synthetic oligonucleotide
  Antisense strand to SEQ ID NO: 1917432
cuaacccagggauuauaaa

SEQ ID NO: 1917434 - RNA, 19 nt, Artificial Sequence
  Description of Artificial Sequence: Synthetic oligonucleotide
  Sense strand starting at position 448 of SEQ ID NO: 1879576
uuauaaucccuggguuaga

SEQ ID NO: 1917435 - RNA, 19 nt, Artificial Sequence
  Description of Artificial Sequence: Synthetic oligonucleotide
  Antisense strand to SEQ ID NO: 1917434
ucuaacccagggauuauaa

SEQ ID NO: 1917436 - RNA, 19 nt, Artificial Sequence
  Description of Artificial Sequence: Synthetic oligonucleotide
  Sense strand starting at position 457 of SEQ ID NO: 1879576
cuggguuagagucaacuca

SEQ ID NO: 1917437 - RNA, 19 nt, Artificial Sequence
  Description of Artificial Sequence: Synthetic oligonucleotide
  Antisense strand to SEQ ID NO: 1917436
ugaguugacucuaacccag

SEQ ID NO: 1917438 - RNA, 19 nt, Artificial Sequence
  Description of Artificial Sequence: Synthetic oligonucleotide
  Sense strand starting at position 518 of SEQ ID NO: 1879576
uggaaugagugcuucauga

SEQ ID NO: 1917439 - RNA, 19 nt, Artificial Sequence
  Description of Artificial Sequence: Synthetic oligonucleotide
  Antisense strand to SEQ ID NO: 1917438
ucaugaagcacucauucca

SEQ ID NO: 1917440 - RNA, 19 nt, Artificial Sequence
  Description of Artificial Sequence: Synthetic oligonucleotide
  Sense strand starting at position 543 of SEQ ID NO: 1879576
gcaagcaagagaugauagu

SEQ ID NO: 1917441 - RNA, 19 nt, Artificial Sequence
  Description of Artificial Sequence: Synthetic oligonucleotide
  Antisense strand to SEQ ID NO: 1917440
acuaucaucucuugcuugc

SEQ ID NO: 1917442 - RNA, 19 nt, Artificial Sequence
  Description of Artificial Sequence: Synthetic oligonucleotide
  Sense strand starting at position 553 of SEQ ID NO: 1879576
gaugauaguguugaguuua

SEQ ID NO: 1917443 - RNA, 19 nt, Artificial Sequence
  Description of Artificial Sequence: Synthetic oligonucleotide
  Antisense strand to SEQ ID NO: 1917442
uaaacucaacacuaucauc

SEQ ID NO: 1917444 - RNA, 19 nt, Artificial Sequence
  Description of Artificial Sequence: Synthetic oligonucleotide
  Sense strand starting at position 558 of SEQ ID NO: 1879576
uaguguugaguuuaugaug

SEQ ID NO: 1917445 - RNA, 19 nt, Artificial Sequence
  Description of Artificial Sequence: Synthetic oligonucleotide
  Antisense strand to SEQ ID NO: 1917444
caucauaaacucaacacua

SEQ ID NO: 1917446 - RNA, 19 nt, Artificial Sequence
  Description of Artificial Sequence: Synthetic oligonucleotide
  Sense strand starting at position 579 of SEQ ID NO: 1879576
uugaguuuauuacuaggua

SEQ ID NO: 1917447 - RNA, 19 nt, Artificial Sequence
  Description of Artificial Sequence: Synthetic oligonucleotide
  Antisense strand to SEQ ID NO: 1917446
uaccuaguaauaaacucaa

SEQ ID NO: 1917448 - RNA, 19 nt, Artificial Sequence
  Description of Artificial Sequence: Synthetic oligonucleotide
  Sense strand starting at position 651 of SEQ ID NO: 1879576
ugcaacauuugaguuguuu

SEQ ID NO: 1917449 - RNA, 19 nt, Artificial Sequence
  Description of Artificial Sequence: Synthetic oligonucleotide
  Antisense strand to SEQ ID NO: 1917448
aaacaacucaaauguugca

SEQ ID NO: 1917450 - RNA, 19 nt, Artificial Sequence
  Description of Artificial Sequence: Synthetic oligonucleotide
  Sense strand starting at position 677 of SEQ ID NO: 1879576
gguagugacagccaaugaa

SEQ ID NO: 1917451 - RNA, 19 nt, Artificial Sequence
  Description of Artificial Sequence: Synthetic oligonucleotide
  Antisense strand to SEQ ID NO: 1917450
uucauuggcugucacuacc

SEQ ID NO: 1917452 - RNA, 19 nt, Artificial Sequence
  Description of Artificial Sequence: Synthetic oligonucleotide
  Sense strand starting at position 701 of SEQ ID NO: 1879576
gugucuuaacucuauauac

SEQ ID NO: 1917453 - RNA, 19 nt, Artificial Sequence
  Description of Artificial Sequence: Synthetic oligonucleotide
  Antisense strand to SEQ ID NO: 1917452
guauauagaguuaagacac

SEQ ID NO: 1917454 - RNA, 19 nt, Artificial Sequence
  Description of Artificial Sequence: Synthetic oligonucleotide
  Sense strand starting at position 710 of SEQ ID NO: 1879576
cucuauauacaugagguuu

SEQ ID NO: 1917455 - RNA, 19 nt, Artificial Sequence
  Description of Artificial Sequence: Synthetic oligonucleotide
  Antisense strand to SEQ ID NO: 1917454
aaaccucauguauauagag

SEQ ID NO: 1917456 - RNA, 19 nt, Artificial Sequence
  Description of Artificial Sequence: Synthetic oligonucleotide
  Sense strand starting at position 778 of SEQ ID NO: 1879576
accagaggcgucuacuuua

SEQ ID NO: 1917457 - RNA, 19 nt, Artificial Sequence
  Description of Artificial Sequence: Synthetic oligonucleotide
  Antisense strand to SEQ ID NO: 1917456
uaaaguagacgccucuggu

SEQ ID NO: 1917458 - RNA, 19 nt, Artificial Sequence
  Description of Artificial Sequence: Synthetic oligonucleotide
  Sense strand starting at position 816 of SEQ ID NO: 1879576
gcccauuaacaaggauuga

SEQ ID NO: 1917459 - RNA, 19 nt, Artificial Sequence
  Description of Artificial Sequence: Synthetic oligonucleotide
  Antisense strand to SEQ ID NO: 1917458
ucaauccuuguuaaugggc

SEQ ID NO: 1917460 - RNA, 19 nt, Artificial Sequence
  Description of Artificial Sequence: Synthetic oligonucleotide
  Sense strand starting at position 847 of SEQ ID NO: 1879576
cuuuacagacuuugaaguu

SEQ ID NO: 1917461 - RNA, 19 nt, Artificial Sequence
  Description of Artificial Sequence: Synthetic oligonucleotide
  Antisense strand to SEQ ID NO: 1917460
aacuucaaagucuguaaag

SEQ ID NO: 1917462 - RNA, 19 nt, Artificial Sequence
  Description of Artificial Sequence: Synthetic oligonucleotide
  Sense strand starting at position 941 of SEQ ID NO: 1879576
uuugaaugacauggcuaga

SEQ ID NO: 1917463 - RNA, 19 nt, Artificial Sequence
  Description of Artificial Sequence: Synthetic oligonucleotide
  Antisense strand to SEQ ID NO: 1917462
ucuagccaugucauucaaa

SEQ ID NO: 1917464 - RNA, 19 nt, Artificial Sequence
  Description of Artificial Sequence: Synthetic oligonucleotide
  Sense strand starting at position 1025 of SEQ ID NO: 1879576
cagggucuuccugaguucu

SEQ ID NO: 1917465 - RNA, 19 nt, Artificial Sequence
  Description of Artificial Sequence: Synthetic oligonucleotide
  Antisense strand to SEQ ID NO: 1917464
agaacucaggaagacccug

SEQ ID NO: 1917466 - RNA, 19 nt, Artificial Sequence
  Description of Artificial Sequence: Synthetic oligonucleotide
  Sense strand starting at position 1036 of SEQ ID NO: 1879576
ugaguucuaucagcagaaa

SEQ ID NO: 1917467 - RNA, 19 nt, Artificial Sequence
  Description of Artificial Sequence: Synthetic oligonucleotide
  Antisense strand to SEQ ID NO: 1917466
uuucugcugauagaacuca

SEQ ID NO: 1917468 - RNA, 19 nt, Artificial Sequence
  Description of Artificial Sequence: Synthetic oligonucleotide
  Sense strand starting at position 1039 of SEQ ID NO: 1879576
guucuaucagcagaaaguc

SEQ ID NO: 1917469 - RNA, 19 nt, Artificial Sequence
  Description of Artificial Sequence: Synthetic oligonucleotide
  Antisense strand to SEQ ID NO: 1917468
gacuuucugcugauagaac

SEQ ID NO: 1917470 - RNA, 19 nt, Artificial Sequence
  Description of Artificial Sequence: Synthetic oligonucleotide
  Sense strand starting at position 1091 of SEQ ID NO: 1879576
gucuccaagccugauucua

SEQ ID NO: 1917471 - RNA, 19 nt, Artificial Sequence
  Description of Artificial Sequence: Synthetic oligonucleotide
  Antisense strand to SEQ ID NO: 1917470
uagaaucaggcuuggagac

SEQ ID NO: 1917472 - RNA, 19 nt, Artificial Sequence
  Description of Artificial Sequence: Synthetic oligonucleotide
  Sense strand starting at position 1183 of SEQ ID NO: 1879576
cggaaugugccucacaaau

SEQ ID NO: 1917473 - RNA, 19 nt, Artificial Sequence
  Description of Artificial Sequence: Synthetic oligonucleotide
  Antisense strand to SEQ ID NO: 1917472
auuugugaggcacauuccg

SEQ ID NO: 1917474 - RNA, 19 nt, Artificial Sequence
  Description of Artificial Sequence: Synthetic oligonucleotide
  Sense strand starting at position 1227 of SEQ ID NO: 1879576
ggccaaucauuugauaaac

SEQ ID NO: 1917475 - RNA, 19 nt, Artificial Sequence
  Description of Artificial Sequence: Synthetic oligonucleotide
  Antisense strand to SEQ ID NO: 1917474
guuuaucaaaugauuggcc

SEQ ID NO: 1917476 - RNA, 19 nt, Artificial Sequence
  Description of Artificial Sequence: Synthetic oligonucleotide
  Sense strand starting at position 1420 of SEQ ID NO: 1879576
cuaaguacugcucagaaug

SEQ ID NO: 1917477 - RNA, 19 nt, Artificial Sequence
  Description of Artificial Sequence: Synthetic oligonucleotide
  Antisense strand to SEQ ID NO: 1917476
cauucugagcaguacuuag

SEQ ID NO: 1917478 - RNA, 19 nt, Artificial Sequence
  Description of Artificial Sequence: Synthetic oligonucleotide
  Sense strand starting at position 1430 of SEQ ID NO: 1879576
cucagaaugcugcagugau

SEQ ID NO: 1917479 - RNA, 19 nt, Artificial Sequence
  Description of Artificial Sequence: Synthetic oligonucleotide
  Antisense strand to SEQ ID NO: 1917478
aucacugcagcauucugag

SEQ ID NO: 1917480 - RNA, 19 nt, Artificial Sequence
  Description of Artificial Sequence: Synthetic oligonucleotide
  Sense strand starting at position 1488 of SEQ ID NO: 1879576
auuauaugccagggaaauu

SEQ ID NO: 1917481 - RNA, 19 nt, Artificial Sequence
  Description of Artificial Sequence: Synthetic oligonucleotide
  Antisense strand to SEQ ID NO: 1917480
aauuucccuggcauauaau

SEQ ID NO: 1917482 - RNA, 19 nt, Artificial Sequence
  Description of Artificial Sequence: Synthetic oligonucleotide
  Sense strand starting at position 1499 of SEQ ID NO: 1879576
gggaaauuauaugcaagcu

SEQ ID NO: 1917483 - RNA, 19 nt, Artificial Sequence
  Description of Artificial Sequence: Synthetic oligonucleotide
  Antisense strand to SEQ ID NO: 1917482
agcuugcauauaauuuccc

SEQ ID NO: 1917484 - RNA, 19 nt, Artificial Sequence
  Description of Artificial Sequence: Synthetic oligonucleotide
  Sense strand starting at position 1800 of SEQ ID NO: 1879576
gguugcugaacuuaaguau

SEQ ID NO: 1917485 - RNA, 19 nt, Artificial Sequence
  Description of Artificial Sequence: Synthetic oligonucleotide
  Antisense strand to SEQ ID NO: 1917484
auacuuaaguucagcaacc

SEQ ID NO: 1917486 - RNA, 19 nt, Artificial Sequence
  Description of Artificial Sequence: Synthetic oligonucleotide
  Sense strand starting at position 2294 of SEQ ID NO: 1879576
cuggaucaaccauggugaa

SEQ ID NO: 1917487 - RNA, 19 nt, Artificial Sequence
  Description of Artificial Sequence: Synthetic oligonucleotide
  Antisense strand to SEQ ID NO: 1917486
uucaccaugguugauccag

SEQ ID NO: 1917488 - RNA, 19 nt, Artificial Sequence
  Description of Artificial Sequence: Synthetic oligonucleotide
  Sense strand starting at position 2960 of SEQ ID NO: 1879576
uagggauuccuguaagcuc

SEQ ID NO: 1917489 - RNA, 19 nt, Artificial Sequence
  Description of Artificial Sequence: Synthetic oligonucleotide
  Antisense strand to SEQ ID NO: 1917488
gagcuuacaggaaucccua

SEQ ID NO: 1917490 - RNA, 19 nt, Artificial Sequence
  Description of Artificial Sequence: Synthetic oligonucleotide
  Sense strand starting at position 3497 of SEQ ID NO: 1879576
aguuccuaagacuguuaaa

SEQ ID NO: 1917491 - RNA, 19 nt, Artificial Sequence
  Description of Artificial Sequence: Synthetic oligonucleotide
  Antisense strand to SEQ ID NO: 1917490
uuuaacagucuuaggaacu

SEQ ID NO: 1917492 - RNA, 19 nt, Artificial Sequence
  Description of Artificial Sequence: Synthetic oligonucleotide
  Sense strand starting at position 3641 of SEQ ID NO: 1879576
auaggaguuaccugaguga

SEQ ID NO: 1917493 - RNA, 19 nt, Artificial Sequence
  Description of Artificial Sequence: Synthetic oligonucleotide
  Antisense strand to SEQ ID NO: 1917492
ucacucagguaacuccuau

SEQ ID NO: 1917494 - RNA, 19 nt, Artificial Sequence
  Description of Artificial Sequence: Synthetic oligonucleotide
  Sense strand starting at position 3714 of SEQ ID NO: 1879576
ggaguacugacuuggauua

SEQ ID NO: 1917495 - RNA, 19 nt, Artificial Sequence
  Description of Artificial Sequence: Synthetic oligonucleotide
  Antisense strand to SEQ ID NO: 1917494
uaauccaagucaguacucc

SEQ ID NO: 1917496 - RNA, 19 nt, Artificial Sequence
  Description of Artificial Sequence: Synthetic oligonucleotide
  Sense strand starting at position 3756 of SEQ ID NO: 1879576
gggacaggugucuagagua

SEQ ID NO: 1917497 - RNA, 19 nt, Artificial Sequence
  Description of Artificial Sequence: Synthetic oligonucleotide
  Antisense strand to SEQ ID NO: 1917496
uacucuagacaccuguccc

SEQ ID NO: 1917498 - RNA, 19 nt, Artificial Sequence
  Description of Artificial Sequence: Synthetic oligonucleotide
  Sense strand starting at position 3851 of SEQ ID NO: 1879576
aguugauccacaggucuga

SEQ ID NO: 1917499 - RNA, 19 nt, Artificial Sequence
  Description of Artificial Sequence: Synthetic oligonucleotide
  Antisense strand to SEQ ID NO: 1917498
ucagaccuguggaucaacu

SEQ ID NO: 1917500 - RNA, 19 nt, Artificial Sequence
  Description of Artificial Sequence: Synthetic oligonucleotide
  Sense strand starting at position 3855 of SEQ ID NO: 1879576
gauccacaggucugaacuu

SEQ ID NO: 1917501 - RNA, 19 nt, Artificial Sequence
  Description of Artificial Sequence: Synthetic oligonucleotide
  Antisense strand to SEQ ID NO: 1917500
aaguucagaccuguggauc

SEQ ID NO: 1917502 - RNA, 19 nt, Artificial Sequence
  Description of Artificial Sequence: Synthetic oligonucleotide
  Sense strand starting at position 94 of SEQ ID NO: 1879577
gggugaggcauccaaggua

SEQ ID NO: 1917503 - RNA, 19 nt, Artificial Sequence
  Description of Artificial Sequence: Synthetic oligonucleotide
  Antisense strand to SEQ ID NO: 1917502
uaccuuggaugccucaccc

SEQ ID NO: 1917504 - RNA, 19 nt, Artificial Sequence
  Description of Artificial Sequence: Synthetic oligonucleotide
  Sense strand starting at position 235 of SEQ ID NO: 1879577
ugcucauacuugguaauga

SEQ ID NO: 1917505 - RNA, 19 nt, Artificial Sequence
  Description of Artificial Sequence: Synthetic oligonucleotide
  Antisense strand to SEQ ID NO: 1917504
ucauuaccaaguaugagca

SEQ ID NO: 1917506 - RNA, 19 nt, Artificial Sequence
  Description of Artificial Sequence: Synthetic oligonucleotide
  Sense strand starting at position 296 of SEQ ID NO: 1879577
ccauguccaucccaugaga

SEQ ID NO: 1917507 - RNA, 19 nt, Artificial Sequence
  Description of Artificial Sequence: Synthetic oligonucleotide
  Antisense strand to SEQ ID NO: 1917506
ucucaugggauggacaugg

SEQ ID NO: 1917508 - RNA, 19 nt, Artificial Sequence
  Description of Artificial Sequence: Synthetic oligonucleotide
  Sense strand starting at position 298 of SEQ ID NO: 1879577
auguccaucccaugagaca

SEQ ID NO: 1917509 - RNA, 19 nt, Artificial Sequence
  Description of Artificial Sequence: Synthetic oligonucleotide
  Antisense strand to SEQ ID NO: 1917508
ugucucaugggauggacau

SEQ ID NO: 1917510 - RNA, 19 nt, Artificial Sequence
  Description of Artificial Sequence: Synthetic oligonucleotide
  Sense strand starting at position 310 of SEQ ID NO: 1879577
ugagacaaaucguccaaag

SEQ ID NO: 1917511 - RNA, 19 nt, Artificial Sequence
  Description of Artificial Sequence: Synthetic oligonucleotide
  Antisense strand to SEQ ID NO: 1917510
cuuuggacgauuugucuca

SEQ ID NO: 1917512 - RNA, 19 nt, Artificial Sequence
  Description of Artificial Sequence: Synthetic oligonucleotide
  Sense strand starting at position 312 of SEQ ID NO: 1879577
agacaaaucguccaaaggu

SEQ ID NO: 1917513 - RNA, 19 nt, Artificial Sequence
  Description of Artificial Sequence: Synthetic oligonucleotide
  Antisense strand to SEQ ID NO: 1917512
accuuuggacgauuugucu

SEQ ID NO: 1917514 - RNA, 19 nt, Artificial Sequence
  Description of Artificial Sequence: Synthetic oligonucleotide
  Sense strand starting at position 492 of SEQ ID NO: 1879577
aggagugccuccuuccuaa

SEQ ID NO: 1917515 - RNA, 19 nt, Artificial Sequence
  Description of Artificial Sequence: Synthetic oligonucleotide
  Antisense strand to SEQ ID NO: 1917514
uuaggaaggaggcacuccu

SEQ ID NO: 1917516 - RNA, 19 nt, Artificial Sequence
  Description of Artificial Sequence: Synthetic oligonucleotide
  Sense strand starting at position 615 of SEQ ID NO: 1879577
gggugaagagccugugauu

SEQ ID NO: 1917517 - RNA, 19 nt, Artificial Sequence
  Description of Artificial Sequence: Synthetic oligonucleotide
  Antisense strand to SEQ ID NO: 1917516
aaucacaggcucuucaccc

SEQ ID NO: 1917518 - RNA, 19 nt, Artificial Sequence
  Description of Artificial Sequence: Synthetic oligonucleotide
  Sense strand starting at position 665 of SEQ ID NO: 1879577
accagaggucucuguauga

SEQ ID NO: 1917519 - RNA, 19 nt, Artificial Sequence
  Description of Artificial Sequence: Synthetic oligonucleotide
  Antisense strand to SEQ ID NO: 1917518
ucauacagagaccucuggu

SEQ ID NO: 1917520 - RNA, 19 nt, Artificial Sequence
  Description of Artificial Sequence: Synthetic oligonucleotide
  Sense strand starting at position 841 of SEQ ID NO: 1879577
gcaggaagguguuugcuuu

SEQ ID NO: 1917521 - RNA, 19 nt, Artificial Sequence
  Description of Artificial Sequence: Synthetic oligonucleotide
  Antisense strand to SEQ ID NO: 1917520
aaagcaaacaccuuccugc

SEQ ID NO: 1917522 - RNA, 19 nt, Artificial Sequence
  Description of Artificial Sequence: Synthetic oligonucleotide
  Sense strand starting at position 987 of SEQ ID NO: 1879577
ccgggucacugagaaagaa

SEQ ID NO: 1917523 - RNA, 19 nt, Artificial Sequence
  Description of Artificial Sequence: Synthetic oligonucleotide
  Antisense strand to SEQ ID NO: 1917522
uucuuucucagugacccgg

SEQ ID NO: 1917524 - RNA, 19 nt, Artificial Sequence
  Description of Artificial Sequence: Synthetic oligonucleotide
  Sense strand starting at position 1007 of SEQ ID NO: 1879577
aggagaacucuggguucuu

SEQ ID NO: 1917525 - RNA, 19 nt, Artificial Sequence
  Description of Artificial Sequence: Synthetic oligonucleotide
  Antisense strand to SEQ ID NO: 1917524
aagaacccagaguucuccu

SEQ ID NO: 1917526 - RNA, 19 nt, Artificial Sequence
  Description of Artificial Sequence: Synthetic oligonucleotide
  Sense strand starting at position 1008 of SEQ ID NO: 1879577
ggagaacucuggguucuug

SEQ ID NO: 1917527 - RNA, 19 nt, Artificial Sequence
  Description of Artificial Sequence: Synthetic oligonucleotide
  Antisense strand to SEQ ID NO: 1917526
caagaacccagaguucucc

SEQ ID NO: 1917528 - RNA, 19 nt, Artificial Sequence
  Description of Artificial Sequence: Synthetic oligonucleotide
  Sense strand starting at position 1020 of SEQ ID NO: 1879577
guucuugguccuggagaac

SEQ ID NO: 1917529 - RNA, 19 nt, Artificial Sequence
  Description of Artificial Sequence: Synthetic oligonucleotide
  Antisense strand to SEQ ID NO: 1917528
guucuccaggaccaagaac

SEQ ID NO: 1917530 - RNA, 19 nt, Artificial Sequence
  Description of Artificial Sequence: Synthetic oligonucleotide
  Sense strand starting at position 1049 of SEQ ID NO: 1879577
acgauuccuccugggacca

SEQ ID NO: 1917531 - RNA, 19 nt, Artificial Sequence
  Description of Artificial Sequence: Synthetic oligonucleotide
  Antisense strand to SEQ ID NO: 1917530
uggucccaggaggaaucgu

SEQ ID NO: 1917532 - RNA, 19 nt, Artificial Sequence
  Description of Artificial Sequence: Synthetic oligonucleotide
  Sense strand starting at position 1099 of SEQ ID NO: 1879577
ggaccaaacugagaaagaa

SEQ ID NO: 1917533 - RNA, 19 nt, Artificial Sequence
  Description of Artificial Sequence: Synthetic oligonucleotide
  Antisense strand to SEQ ID NO: 1917532
uucuuucucaguuuggucc

SEQ ID NO: 1917534 - RNA, 19 nt, Artificial Sequence
  Description of Artificial Sequence: Synthetic oligonucleotide
  Sense strand starting at position 1162 of SEQ ID NO: 1879577
ggaagauagucuccaucca

SEQ ID NO: 1917535 - RNA, 19 nt, Artificial Sequence
  Description of Artificial Sequence: Synthetic oligonucleotide
  Antisense strand to SEQ ID NO: 1917534
uggauggagacuaucuucc

SEQ ID NO: 1917536 - RNA, 19 nt, Artificial Sequence
  Description of Artificial Sequence: Synthetic oligonucleotide
  Sense strand starting at position 1499 of SEQ ID NO: 1879577
gggucacaucuggauucuu

SEQ ID NO: 1917537 - RNA, 19 nt, Artificial Sequence
  Description of Artificial Sequence: Synthetic oligonucleotide
  Antisense strand to SEQ ID NO: 1917536
aagaauccagaugugaccc

SEQ ID NO: 1917538 - RNA, 19 nt, Artificial Sequence
  Description of Artificial Sequence: Synthetic oligonucleotide
  Sense strand starting at position 1682 of SEQ ID NO: 1879577
cugaaacggucauuaggua

SEQ ID NO: 1917539 - RNA, 19 nt, Artificial Sequence
  Description of Artificial Sequence: Synthetic oligonucleotide
  Antisense strand to SEQ ID NO: 1917538
uaccuaaugaccguuucag

SEQ ID NO: 1917540 - RNA, 19 nt, Artificial Sequence
  Description of Artificial Sequence: Synthetic oligonucleotide
  Sense strand starting at position 1683 of SEQ ID NO: 1879577
ugaaacggucauuagguaa

SEQ ID NO: 1917541 - RNA, 19 nt, Artificial Sequence
  Description of Artificial Sequence: Synthetic oligonucleotide
  Antisense strand to SEQ ID NO: 1917540
uuaccuaaugaccguuuca

SEQ ID NO: 1917542 - RNA, 19 nt, Artificial Sequence
  Description of Artificial Sequence: Synthetic oligonucleotide
  Sense strand starting at position 1687 of SEQ ID NO: 1879577
acggucauuagguaauagu

SEQ ID NO: 1917543 - RNA, 19 nt, Artificial Sequence
  Description of Artificial Sequence: Synthetic oligonucleotide
  Antisense strand to SEQ ID NO: 1917542
acuauuaccuaaugaccgu

SEQ ID NO: 1917544 - RNA, 19 nt, Artificial Sequence
  Description of Artificial Sequence: Synthetic oligonucleotide
  Sense strand starting at position 1897 of SEQ ID NO: 1879577
augucacacucaccugauu

SEQ ID NO: 1917545 - RNA, 19 nt, Artificial Sequence
  Description of Artificial Sequence: Synthetic oligonucleotide
  Antisense strand to SEQ ID NO: 1917544
aaucaggugagugugacau

SEQ ID NO: 1917546 - RNA, 19 nt, Artificial Sequence
  Description of Artificial Sequence: Synthetic oligonucleotide
  Sense strand starting at position 1908 of SEQ ID NO: 1879577
accugauucugaugaauug

SEQ ID NO: 1917547 - RNA, 19 nt, Artificial Sequence
  Description of Artificial Sequence: Synthetic oligonucleotide
  Antisense strand to SEQ ID NO: 1917546
caauucaucagaaucaggu

SEQ ID NO: 1917548 - RNA, 19 nt, Artificial Sequence
  Description of Artificial Sequence: Synthetic oligonucleotide
  Sense strand starting at position 1918 of SEQ ID NO: 1879577
gaugaauuggcugggcuga

SEQ ID NO: 1917549 - RNA, 19 nt, Artificial Sequence
  Description of Artificial Sequence: Synthetic oligonucleotide
  Antisense strand to SEQ ID NO: 1917548
ucagcccagccaauucauc

SEQ ID NO: 1917550 - RNA, 19 nt, Artificial Sequence
  Description of Artificial Sequence: Synthetic oligonucleotide
  Sense strand starting at position 1998 of SEQ ID NO: 1879577
gugugcaacugcucuggaa

SEQ ID NO: 1917551 - RNA, 19 nt, Artificial Sequence
  Description of Artificial Sequence: Synthetic oligonucleotide
  Antisense strand to SEQ ID NO: 1917550
uuccagagcaguugcacac

SEQ ID NO: 1917552 - RNA, 19 nt, Artificial Sequence
  Description of Artificial Sequence: Synthetic oligonucleotide
  Sense strand starting at position 2000 of SEQ ID NO: 1879577
gugcaacugcucuggaaca

SEQ ID NO: 1917553 - RNA, 19 nt, Artificial Sequence
  Description of Artificial Sequence: Synthetic oligonucleotide
  Antisense strand to SEQ ID NO: 1917552
uguuccagagcaguugcac

SEQ ID NO: 1917554 - RNA, 19 nt, Artificial Sequence
  Description of Artificial Sequence: Synthetic oligonucleotide
  Sense strand starting at position 2002 of SEQ ID NO: 1879577
gcaacugcucuggaacaca

SEQ ID NO: 1917555 - RNA, 19 nt, Artificial Sequence
  Description of Artificial Sequence: Synthetic oligonucleotide
  Antisense strand to SEQ ID NO: 1917554
uguguuccagagcaguugc

SEQ ID NO: 1917556 - RNA, 19 nt, Artificial Sequence
  Description of Artificial Sequence: Synthetic oligonucleotide
  Sense strand starting at position 2392 of SEQ ID NO: 1879577
guugcuguugaauaucaga

SEQ ID NO: 1917557 - RNA, 19 nt, Artificial Sequence
  Description of Artificial Sequence: Synthetic oligonucleotide
  Antisense strand to SEQ ID NO: 1917556
ucugauauucaacagcaac

SEQ ID NO: 1917558 - RNA, 19 nt, Artificial Sequence
  Description of Artificial Sequence: Synthetic oligonucleotide
  Sense strand starting at position 2395 of SEQ ID NO: 1879577
gcuguugaauaucagaaua

SEQ ID NO: 1917559 - RNA, 19 nt, Artificial Sequence
  Description of Artificial Sequence: Synthetic oligonucleotide
  Antisense strand to SEQ ID NO: 1917558
uauucugauauucaacagc

SEQ ID NO: 1917560 - RNA, 19 nt, Artificial Sequence
  Description of Artificial Sequence: Synthetic oligonucleotide
  Sense strand starting at position 2499 of SEQ ID NO: 1879577
ugauauguuucucuccaug

SEQ ID NO: 1917561 - RNA, 19 nt, Artificial Sequence
  Description of Artificial Sequence: Synthetic oligonucleotide
  Antisense strand to SEQ ID NO: 1917560
cauggagagaaacauauca

SEQ ID NO: 1917562 - RNA, 19 nt, Artificial Sequence
  Description of Artificial Sequence: Synthetic oligonucleotide
  Sense strand starting at position 2501 of SEQ ID NO: 1879577
auauguuucucuccaugac

SEQ ID NO: 1917563 - RNA, 19 nt, Artificial Sequence
  Description of Artificial Sequence: Synthetic oligonucleotide
  Antisense strand to SEQ ID NO: 1917562
gucauggagagaaacauau

SEQ ID NO: 1917564 - RNA, 19 nt, Artificial Sequence
  Description of Artificial Sequence: Synthetic oligonucleotide
  Sense strand starting at position 2511 of SEQ ID NO: 1879577
cuccaugacccuugguuau

SEQ ID NO: 1917565 - RNA, 19 nt, Artificial Sequence
  Description of Artificial Sequence: Synthetic oligonucleotide
  Antisense strand to SEQ ID NO: 1917564
auaaccaagggucauggag

SEQ ID NO: 1917566 - RNA, 19 nt, Artificial Sequence
  Description of Artificial Sequence: Synthetic oligonucleotide
  Sense strand starting at position 2522 of SEQ ID NO: 1879577
uugguuauucuagguagag

SEQ ID NO: 1917567 - RNA, 19 nt, Artificial Sequence
  Description of Artificial Sequence: Synthetic oligonucleotide
  Antisense strand to SEQ ID NO: 1917566
cucuaccuagaauaaccaa

SEQ ID NO: 1917568 - RNA, 19 nt, Artificial Sequence
  Description of Artificial Sequence: Synthetic oligonucleotide
  Sense strand starting at position 2523 of SEQ ID NO: 1879577
ugguuauucuagguagagg

SEQ ID NO: 1917569 - RNA, 19 nt, Artificial Sequence
  Description of Artificial Sequence: Synthetic oligonucleotide
  Antisense strand to SEQ ID NO: 1917568
ccucuaccuagaauaacca

SEQ ID NO: 1917570 - RNA, 19 nt, Artificial Sequence
  Description of Artificial Sequence: Synthetic oligonucleotide
  Sense strand starting at position 2598 of SEQ ID NO: 1879577
ucugaaaucuggcucaccu

SEQ ID NO: 1917571 - RNA, 19 nt, Artificial Sequence
  Description of Artificial Sequence: Synthetic oligonucleotide
  Antisense strand to SEQ ID NO: 1917570
aggugagccagauuucaga

SEQ ID NO: 1917572 - RNA, 19 nt, Artificial Sequence
  Description of Artificial Sequence: Synthetic oligonucleotide
  Sense strand starting at position 2644 of SEQ ID NO: 1879577
ccgaguuccggagaccaga

SEQ ID NO: 1917573 - RNA, 19 nt, Artificial Sequence
  Description of Artificial Sequence: Synthetic oligonucleotide
  Antisense strand to SEQ ID NO: 1917572
ucuggucuccggaacucgg

SEQ ID NO: 1917574 - RNA, 19 nt, Artificial Sequence
  Description of Artificial Sequence: Synthetic oligonucleotide
  Sense strand starting at position 2809 of SEQ ID NO: 1879577
cccuguacucauuaguaac

SEQ ID NO: 1917575 - RNA, 19 nt, Artificial Sequence
  Description of Artificial Sequence: Synthetic oligonucleotide
  Antisense strand to SEQ ID NO: 1917574
guuacuaaugaguacaggg

SEQ ID NO: 1917576 - RNA, 19 nt, Artificial Sequence
  Description of Artificial Sequence: Synthetic oligonucleotide
  Sense strand starting at position 2935 of SEQ ID NO: 1879577
uggcuaugucucugcugaa

SEQ ID NO: 1917577 - RNA, 19 nt, Artificial Sequence
  Description of Artificial Sequence: Synthetic oligonucleotide
  Antisense strand to SEQ ID NO: 1917576
uucagcagagacauagcca

SEQ ID NO: 1917578 - RNA, 19 nt, Artificial Sequence
  Description of Artificial Sequence: Synthetic oligonucleotide
  Sense strand starting at position 2936 of SEQ ID NO: 1879577
ggcuaugucucugcugaac

SEQ ID NO: 1917579 - RNA, 19 nt, Artificial Sequence
  Description of Artificial Sequence: Synthetic oligonucleotide
  Antisense strand to SEQ ID NO: 1917578
guucagcagagacauagcc

SEQ ID NO: 1917580 - RNA, 19 nt, Artificial Sequence
  Description of Artificial Sequence: Synthetic oligonucleotide
  Sense strand starting at position 3540 of SEQ ID NO: 1879577
uuggccauuccucagggau

SEQ ID NO: 1917581 - RNA, 19 nt, Artificial Sequence
  Description of Artificial Sequence: Synthetic oligonucleotide
  Antisense strand to SEQ ID NO: 1917580
aucccugaggaauggccaa

SEQ ID NO: 1917582 - RNA, 19 nt, Artificial Sequence
  Description of Artificial Sequence: Synthetic oligonucleotide
  Sense strand starting at position 218 of SEQ ID NO: 1879578
auuaguagugauggucaca

SEQ ID NO: 1917583 - RNA, 19 nt, Artificial Sequence
  Description of Artificial Sequence: Synthetic oligonucleotide
  Antisense strand to SEQ ID NO: 1917582
ugugaccaucacuacuaau

SEQ ID NO: 1917584 - RNA, 19 nt, Artificial Sequence
  Description of Artificial Sequence: Synthetic oligonucleotide
  Sense strand starting at position 434 of SEQ ID NO: 1879578
cauaguucugugggcuaua

SEQ ID NO: 1917585 - RNA, 19 nt, Artificial Sequence
  Description of Artificial Sequence: Synthetic oligonucleotide
  Antisense strand to SEQ ID NO: 1917584
uauagcccacagaacuaug

SEQ ID NO: 1917586 - RNA, 19 nt, Artificial Sequence
  Description of Artificial Sequence: Synthetic oligonucleotide
  Sense strand starting at position 600 of SEQ ID NO: 1879578
acucauuauugagagaaca

SEQ ID NO: 1917587 - RNA, 19 nt, Artificial Sequence
  Description of Artificial Sequence: Synthetic oligonucleotide
  Antisense strand to SEQ ID NO: 1917586
uguucucucaauaaugagu

SEQ ID NO: 1917588 - RNA, 19 nt, Artificial Sequence
  Description of Artificial Sequence: Synthetic oligonucleotide
  Sense strand starting at position 800 of SEQ ID NO: 1879578
aaauucuuuguaggugaua

SEQ ID NO: 1917589 - RNA, 19 nt, Artificial Sequence
  Description of Artificial Sequence: Synthetic oligonucleotide
  Antisense strand to SEQ ID NO: 1917588
uaucaccuacaaagaauuu

SEQ ID NO: 1917590 - RNA, 19 nt, Artificial Sequence
  Description of Artificial Sequence: Synthetic oligonucleotide
  Sense strand starting at position 801 of SEQ ID NO: 1879578
aauucuuuguaggugauaa

SEQ ID NO: 1917591 - RNA, 19 nt, Artificial Sequence
  Description of Artificial Sequence: Synthetic oligonucleotide
  Antisense strand to SEQ ID NO: 1917590
uuaucaccuacaaagaauu

SEQ ID NO: 1917592 - RNA, 19 nt, Artificial Sequence
  Description of Artificial Sequence: Synthetic oligonucleotide
  Sense strand starting at position 803 of SEQ ID NO: 1879578
uucuuuguaggugauaaag

SEQ ID NO: 1917593 - RNA, 19 nt, Artificial Sequence
  Description of Artificial Sequence: Synthetic oligonucleotide
  Antisense strand to SEQ ID NO: 1917592
cuuuaucaccuacaaagaa

SEQ ID NO: 1917594 - RNA, 19 nt, Artificial Sequence
  Description of Artificial Sequence: Synthetic oligonucleotide
  Sense strand starting at position 831 of SEQ ID NO: 1879578
ggcuuugaucuugagcuuu

SEQ ID NO: 1917595 - RNA, 19 nt, Artificial Sequence
  Description of Artificial Sequence: Synthetic oligonucleotide
  Antisense strand to SEQ ID NO: 1917594
aaagcucaagaucaaagcc

SEQ ID NO: 1917596 - RNA, 19 nt, Artificial Sequence
  Description of Artificial Sequence: Synthetic oligonucleotide
  Sense strand starting at position 892 of SEQ ID NO: 1879578
auuccuggaauccguaaga

SEQ ID NO: 1917597 - RNA, 19 nt, Artificial Sequence
  Description of Artificial Sequence: Synthetic oligonucleotide
  Antisense strand to SEQ ID NO: 1917596
ucuuacggauuccaggaau

SEQ ID NO: 1917598 - RNA, 19 nt, Artificial Sequence
  Description of Artificial Sequence: Synthetic oligonucleotide
  Sense strand starting at position 1023 of SEQ ID NO: 1879578
ccauaucuccggugacaag

SEQ ID NO: 1917599 - RNA, 19 nt, Artificial Sequence
  Description of Artificial Sequence: Synthetic oligonucleotide
  Antisense strand to SEQ ID NO: 1917598
cuugucaccggagauaugg

SEQ ID NO: 1917600 - RNA, 19 nt, Artificial Sequence
  Description of Artificial Sequence: Synthetic oligonucleotide
  Sense strand starting at position 1037 of SEQ ID NO: 1879578
acaagagucgcacaguuau

SEQ ID NO: 1917601 - RNA, 19 nt, Artificial Sequence
  Description of Artificial Sequence: Synthetic oligonucleotide
  Antisense strand to SEQ ID NO: 1917600
auaacugugcgacucuugu

SEQ ID NO: 1917602 - RNA, 19 nt, Artificial Sequence
  Description of Artificial Sequence: Synthetic oligonucleotide
  Sense strand starting at position 1208 of SEQ ID NO: 1879578
uuaggaaguccugggaacu

SEQ ID NO: 1917603 - RNA, 19 nt, Artificial Sequence
  Description of Artificial Sequence: Synthetic oligonucleotide
  Antisense strand to SEQ ID NO: 1917602
aguucccaggacuuccuaa

SEQ ID NO: 1917604 - RNA, 19 nt, Artificial Sequence
  Description of Artificial Sequence: Synthetic oligonucleotide
  Sense strand starting at position 1209 of SEQ ID NO: 1879578
uaggaaguccugggaacuu

SEQ ID NO: 1917605 - RNA, 19 nt, Artificial Sequence
  Description of Artificial Sequence: Synthetic oligonucleotide
  Antisense strand to SEQ ID NO: 1917604
aaguucccaggacuuccua

SEQ ID NO: 1917606 - RNA, 19 nt, Artificial Sequence
  Description of Artificial Sequence: Synthetic oligonucleotide
  Sense strand starting at position 1314 of SEQ ID NO: 1879578
gagaacugaugagaucgau

SEQ ID NO: 1917607 - RNA, 19 nt, Artificial Sequence
  Description of Artificial Sequence: Synthetic oligonucleotide
  Antisense strand to SEQ ID NO: 1917606
aucgaucucaucaguucuc

SEQ ID NO: 1917608 - RNA, 19 nt, Artificial Sequence
  Description of Artificial Sequence: Synthetic oligonucleotide
  Sense strand starting at position 1466 of SEQ ID NO: 1879578
ggugcugugcucuaagaua

SEQ ID NO: 1917609 - RNA, 19 nt, Artificial Sequence
  Description of Artificial Sequence: Synthetic oligonucleotide
  Antisense strand to SEQ ID NO: 1917608
uaucuuagagcacagcacc

SEQ ID NO: 1917610 - RNA, 19 nt, Artificial Sequence
  Description of Artificial Sequence: Synthetic oligonucleotide
  Sense strand starting at position 1487 of SEQ ID NO: 1879578
aggauaauugugugaccca

SEQ ID NO: 1917611 - RNA, 19 nt, Artificial Sequence
  Description of Artificial Sequence: Synthetic oligonucleotide
  Antisense strand to SEQ ID NO: 1917610
ugggucacacaauuauccu

SEQ ID NO: 1917612 - RNA, 19 nt, Artificial Sequence
  Description of Artificial Sequence: Synthetic oligonucleotide
  Sense strand starting at position 1490 of SEQ ID NO: 1879578
auaauugugugacccaauc

SEQ ID NO: 1917613 - RNA, 19 nt, Artificial Sequence
  Description of Artificial Sequence: Synthetic oligonucleotide
  Antisense strand to SEQ ID NO: 1917612
gauugggucacacaauuau

SEQ ID NO: 1917614 - RNA, 19 nt, Artificial Sequence
  Description of Artificial Sequence: Synthetic oligonucleotide
  Sense strand starting at position 1529 of SEQ ID NO: 1879578
ccaguauugauucggguua

SEQ ID NO: 1917615 - RNA, 19 nt, Artificial Sequence
  Description of Artificial Sequence: Synthetic oligonucleotide
  Antisense strand to SEQ ID NO: 1917614
uaacccgaaucaauacugg

SEQ ID NO: 1917616 - RNA, 19 nt, Artificial Sequence
  Description of Artificial Sequence: Synthetic oligonucleotide
  Sense strand starting at position 1713 of SEQ ID NO: 1879578
gguacauuguggucaauau

SEQ ID NO: 1917617 - RNA, 19 nt, Artificial Sequence
  Description of Artificial Sequence: Synthetic oligonucleotide
  Antisense strand to SEQ ID NO: 1917616
auauugaccacaauguacc

SEQ ID NO: 1917618 - RNA, 19 nt, Artificial Sequence
  Description of Artificial Sequence: Synthetic oligonucleotide
  Sense strand starting at position 1714 of SEQ ID NO: 1879578
guacauuguggucaauauu

SEQ ID NO: 1917619 - RNA, 19 nt, Artificial Sequence
  Description of Artificial Sequence: Synthetic oligonucleotide
  Antisense strand to SEQ ID NO: 1917618
aauauugaccacaauguac

SEQ ID NO: 1917620 - RNA, 19 nt, Artificial Sequence
  Description of Artificial Sequence: Synthetic oligonucleotide
  Sense strand starting at position 1747 of SEQ ID NO: 1879578
ggaugacuauuaguaacca

SEQ ID NO: 1917621 - RNA, 19 nt, Artificial Sequence
  Description of Artificial Sequence: Synthetic oligonucleotide
  Antisense strand to SEQ ID NO: 1917620
ugguuacuaauagucaucc

SEQ ID NO: 1917622 - RNA, 19 nt, Artificial Sequence
  Description of Artificial Sequence: Synthetic oligonucleotide
  Sense strand starting at position 1783 of SEQ ID NO: 1879578
gugccaugcuuacucaaga

SEQ ID NO: 1917623 - RNA, 19 nt, Artificial Sequence
  Description of Artificial Sequence: Synthetic oligonucleotide
  Antisense strand to SEQ ID NO: 1917622
ucuugaguaagcauggcac

SEQ ID NO: 1917624 - RNA, 19 nt, Artificial Sequence
  Description of Artificial Sequence: Synthetic oligonucleotide
  Sense strand starting at position 1784 of SEQ ID NO: 1879578
ugccaugcuuacucaagaa

SEQ ID NO: 1917625 - RNA, 19 nt, Artificial Sequence
  Description of Artificial Sequence: Synthetic oligonucleotide
  Antisense strand to SEQ ID NO: 1917624
uucuugaguaagcauggca

SEQ ID NO: 1917626 - RNA, 19 nt, Artificial Sequence
  Description of Artificial Sequence: Synthetic oligonucleotide
  Sense strand starting at position 1942 of SEQ ID NO: 1879578
aguguucuaccagaggcuu

SEQ ID NO: 1917627 - RNA, 19 nt, Artificial Sequence
  Description of Artificial Sequence: Synthetic oligonucleotide
  Antisense strand to SEQ ID NO: 1917626
aagccucugguagaacacu

SEQ ID NO: 1917628 - RNA, 19 nt, Artificial Sequence
  Description of Artificial Sequence: Synthetic oligonucleotide
  Sense strand starting at position 1968 of SEQ ID NO: 1879578
guuaucauguaauccuaca

SEQ ID NO: 1917629 - RNA, 19 nt, Artificial Sequence
  Description of Artificial Sequence: Synthetic oligonucleotide
  Antisense strand to SEQ ID NO: 1917628
uguaggauuacaugauaac

SEQ ID NO: 1917630 - RNA, 19 nt, Artificial Sequence
  Description of Artificial Sequence: Synthetic oligonucleotide
  Sense strand starting at position 1976 of SEQ ID NO: 1879578
guaauccuacaucgacauu

SEQ ID NO: 1917631 - RNA, 19 nt, Artificial Sequence
  Description of Artificial Sequence: Synthetic oligonucleotide
  Antisense strand to SEQ ID NO: 1917630
aaugucgauguaggauuac

SEQ ID NO: 1917632 - RNA, 19 nt, Artificial Sequence
  Description of Artificial Sequence: Synthetic oligonucleotide
  Sense strand starting at position 2111 of SEQ ID NO: 1879578
ucuguuauuccacauguau

SEQ ID NO: 1917633 - RNA, 19 nt, Artificial Sequence
  Description of Artificial Sequence: Synthetic oligonucleotide
  Antisense strand to SEQ ID NO: 1917632
auacauguggaauaacaga

SEQ ID NO: 1917634 - RNA, 19 nt, Artificial Sequence
  Description of Artificial Sequence: Synthetic oligonucleotide
  Sense strand starting at position 2159 of SEQ ID NO: 1879578
agaaucagcugcucauaga

SEQ ID NO: 1917635 - RNA, 19 nt, Artificial Sequence
  Description of Artificial Sequence: Synthetic oligonucleotide
  Antisense strand to SEQ ID NO: 1917634
ucuaugagcagcugauucu

SEQ ID NO: 1917636 - RNA, 19 nt, Artificial Sequence
  Description of Artificial Sequence: Synthetic oligonucleotide
  Sense strand starting at position 2252 of SEQ ID NO: 1879578
cuuagauguguguauugga

SEQ ID NO: 1917637 - RNA, 19 nt, Artificial Sequence
  Description of Artificial Sequence: Synthetic oligonucleotide
  Antisense strand to SEQ ID NO: 1917636
uccaauacacacaucuaag

SEQ ID NO: 1917638 - RNA, 19 nt, Artificial Sequence
  Description of Artificial Sequence: Synthetic oligonucleotide
  Sense strand starting at position 2261 of SEQ ID NO: 1879578
guguauuggaguugaaugu

SEQ ID NO: 1917639 - RNA, 19 nt, Artificial Sequence
  Description of Artificial Sequence: Synthetic oligonucleotide
  Antisense strand to SEQ ID NO: 1917638
acauucaacuccaauacac

SEQ ID NO: 1917640 - RNA, 19 nt, Artificial Sequence
  Description of Artificial Sequence: Synthetic oligonucleotide
  Sense strand starting at position 2265 of SEQ ID NO: 1879578
auuggaguugaaugugaga

SEQ ID NO: 1917641 - RNA, 19 nt, Artificial Sequence
  Description of Artificial Sequence: Synthetic oligonucleotide
  Antisense strand to SEQ ID NO: 1917640
ucucacauucaacuccaau

SEQ ID NO: 1917642 - RNA, 19 nt, Artificial Sequence
  Description of Artificial Sequence: Synthetic oligonucleotide
  Sense strand starting at position 2289 of SEQ ID NO: 1879578
acauucucaugggaaggau

SEQ ID NO: 1917643 - RNA, 19 nt, Artificial Sequence
  Description of Artificial Sequence: Synthetic oligonucleotide
  Antisense strand to SEQ ID NO: 1917642
auccuucccaugagaaugu

SEQ ID NO: 1917644 - RNA, 19 nt, Artificial Sequence
  Description of Artificial Sequence: Synthetic oligonucleotide
  Sense strand starting at position 2469 of SEQ ID NO: 1879578
aauguauaugcauggaaca

SEQ ID NO: 1917645 - RNA, 19 nt, Artificial Sequence
  Description of Artificial Sequence: Synthetic oligonucleotide
  Antisense strand to SEQ ID NO: 1917644
uguuccaugcauauacauu

SEQ ID NO: 1917646 - RNA, 19 nt, Artificial Sequence
  Description of Artificial Sequence: Synthetic oligonucleotide
  Sense strand starting at position 2470 of SEQ ID NO: 1879578
auguauaugcauggaacau

SEQ ID NO: 1917647 - RNA, 19 nt, Artificial Sequence
  Description of Artificial Sequence: Synthetic oligonucleotide
  Antisense strand to SEQ ID NO: 1917646
auguuccaugcauauacau

SEQ ID NO: 1917648 - RNA, 19 nt, Artificial Sequence
  Description of Artificial Sequence: Synthetic oligonucleotide
  Sense strand starting at position 3212 of SEQ ID NO: 1879578
aagcaauacuaggagagau

SEQ ID NO: 1917649 - RNA, 19 nt, Artificial Sequence
  Description of Artificial Sequence: Synthetic oligonucleotide
  Antisense strand to SEQ ID NO: 1917648
aucucuccuaguauugcuu

SEQ ID NO: 1917650 - RNA, 19 nt, Artificial Sequence
  Description of Artificial Sequence: Synthetic oligonucleotide
  Sense strand starting at position 3230 of SEQ ID NO: 1879578
uguuuauagcgauaaauac

SEQ ID NO: 1917651 - RNA, 19 nt, Artificial Sequence
  Description of Artificial Sequence: Synthetic oligonucleotide
  Antisense strand to SEQ ID NO: 1917650
guauuuaucgcuauaaaca

SEQ ID NO: 1917652 - RNA, 19 nt, Artificial Sequence
  Description of Artificial Sequence: Synthetic oligonucleotide
  Sense strand starting at position 3237 of SEQ ID NO: 1879578
agcgauaaauacuuauauc

SEQ ID NO: 1917653 - RNA, 19 nt, Artificial Sequence
  Description of Artificial Sequence: Synthetic oligonucleotide
  Antisense strand to SEQ ID NO: 1917652
gauauaaguauuuaucgcu

SEQ ID NO: 1917654 - RNA, 19 nt, Artificial Sequence
  Description of Artificial Sequence: Synthetic oligonucleotide
  Sense strand starting at position 3521 of SEQ ID NO: 1879578
guggcacauaccuagaguu

SEQ ID NO: 1917655 - RNA, 19 nt, Artificial Sequence
  Description of Artificial Sequence: Synthetic oligonucleotide
  Antisense strand to SEQ ID NO: 1917654
aacucuagguaugugccac

SEQ ID NO: 1917656 - RNA, 19 nt, Artificial Sequence
  Description of Artificial Sequence: Synthetic oligonucleotide
  Sense strand starting at position 3543 of SEQ ID NO: 1879578
gcaacuuuguaggcugaga

SEQ ID NO: 1917657 - RNA, 19 nt, Artificial Sequence
  Description of Artificial Sequence: Synthetic oligonucleotide
  Antisense strand to SEQ ID NO: 1917656
ucucagccuacaaaguugc

SEQ ID NO: 1917658 - RNA, 19 nt, Artificial Sequence
  Description of Artificial Sequence: Synthetic oligonucleotide
  Sense strand starting at position 3545 of SEQ ID NO: 1879578
aacuuuguaggcugagaca

SEQ ID NO: 1917659 - RNA, 19 nt, Artificial Sequence
  Description of Artificial Sequence: Synthetic oligonucleotide
  Antisense strand to SEQ ID NO: 1917658
ugucucagccuacaaaguu

SEQ ID NO: 1917660 - RNA, 19 nt, Artificial Sequence
  Description of Artificial Sequence: Synthetic oligonucleotide
  Sense strand starting at position 3592 of SEQ ID NO: 1879578
ggcuacaguguaugaugau

SEQ ID NO: 1917661 - RNA, 19 nt, Artificial Sequence
  Description of Artificial Sequence: Synthetic oligonucleotide
  Antisense strand to SEQ ID NO: 1917660
aucaucauacacuguagcc

SEQ ID NO: 1917662 - RNA, 19 nt, Artificial Sequence
  Description of Artificial Sequence: Synthetic oligonucleotide
  Sense strand starting at position 37 of SEQ ID NO: 1879579
gcugcuaauccgucuguag

SEQ ID NO: 1917663 - RNA, 19 nt, Artificial Sequence
  Description of Artificial Sequence: Synthetic oligonucleotide
  Antisense strand to SEQ ID NO: 1917662
cuacagacggauuagcagc

SEQ ID NO: 1917664 - RNA, 19 nt, Artificial Sequence
  Description of Artificial Sequence: Synthetic oligonucleotide
  Sense strand starting at position 88 of SEQ ID NO: 1879579
gucagauguaucugagagg

SEQ ID NO: 1917665 - RNA, 19 nt, Artificial Sequence
  Description of Artificial Sequence: Synthetic oligonucleotide
  Antisense strand to SEQ ID NO: 1917664
ccucucagauacaucugac

SEQ ID NO: 1917666 - RNA, 19 nt, Artificial Sequence
  Description of Artificial Sequence: Synthetic oligonucleotide
  Sense strand starting at position 93 of SEQ ID NO: 1879579
auguaucugagaggcuuga

SEQ ID NO: 1917667 - RNA, 19 nt, Artificial Sequence
  Description of Artificial Sequence: Synthetic oligonucleotide
  Antisense strand to SEQ ID NO: 1917666
ucaagccucucagauacau

SEQ ID NO: 1917668 - RNA, 19 nt, Artificial Sequence
  Description of Artificial Sequence: Synthetic oligonucleotide
  Sense strand starting at position 97 of SEQ ID NO: 1879579
aucugagaggcuugaaaua

SEQ ID NO: 1917669 - RNA, 19 nt, Artificial Sequence
  Description of Artificial Sequence: Synthetic oligonucleotide
  Antisense strand to SEQ ID NO: 1917668
uauuucaagccucucagau

SEQ ID NO: 1917670 - RNA, 19 nt, Artificial Sequence
  Description of Artificial Sequence: Synthetic oligonucleotide
  Sense strand starting at position 303 of SEQ ID NO: 1879579
cauuacaguuuguuggaga

SEQ ID NO: 1917671 - RNA, 19 nt, Artificial Sequence
  Description of Artificial Sequence: Synthetic oligonucleotide
  Antisense strand to SEQ ID NO: 1917670
ucuccaacaaacuguaaug

SEQ ID NO: 1917672 - RNA, 19 nt, Artificial Sequence
  Description of Artificial Sequence: Synthetic oligonucleotide
  Sense strand starting at position 360 of SEQ ID NO: 1879579
uugguaauuccacagcaga

SEQ ID NO: 1917673 - RNA, 19 nt, Artificial Sequence
  Description of Artificial Sequence: Synthetic oligonucleotide
  Antisense strand to SEQ ID NO: 1917672
ucugcuguggaauuaccaa

SEQ ID NO: 1917674 - RNA, 19 nt, Artificial Sequence
  Description of Artificial Sequence: Synthetic oligonucleotide
  Sense strand starting at position 363 of SEQ ID NO: 1879579
guaauuccacagcagagua

SEQ ID NO: 1917675 - RNA, 19 nt, Artificial Sequence
  Description of Artificial Sequence: Synthetic oligonucleotide
  Antisense strand to SEQ ID NO: 1917674
uacucugcuguggaauuac

SEQ ID NO: 1917676 - RNA, 19 nt, Artificial Sequence
  Description of Artificial Sequence: Synthetic oligonucleotide
  Sense strand starting at position 583 of SEQ ID NO: 1879579
ugggaaagcuucucaggua

SEQ ID NO: 1917677 - RNA, 19 nt, Artificial Sequence
  Description of Artificial Sequence: Synthetic oligonucleotide
  Antisense strand to SEQ ID NO: 1917676
uaccugagaagcuuuccca

SEQ ID NO: 1917678 - RNA, 19 nt, Artificial Sequence
  Description of Artificial Sequence: Synthetic oligonucleotide
  Sense strand starting at position 634 of SEQ ID NO: 1879579
auagaaugaucaguguuau

SEQ ID NO: 1917679 - RNA, 19 nt, Artificial Sequence
  Description of Artificial Sequence: Synthetic oligonucleotide
  Antisense strand to SEQ ID NO: 1917678
auaacacugaucauucuau

SEQ ID NO: 1917680 - RNA, 19 nt, Artificial Sequence
  Description of Artificial Sequence: Synthetic oligonucleotide
  Sense strand starting at position 635 of SEQ ID NO: 1879579
uagaaugaucaguguuaua

SEQ ID NO: 1917681 - RNA, 19 nt, Artificial Sequence
  Description of Artificial Sequence: Synthetic oligonucleotide
  Antisense strand to SEQ ID NO: 1917680
uauaacacugaucauucua

SEQ ID NO: 1917682 - RNA, 19 nt, Artificial Sequence
  Description of Artificial Sequence: Synthetic oligonucleotide
  Sense strand starting at position 767 of SEQ ID NO: 1879579
cuguauccagacugaauca

SEQ ID NO: 1917683 - RNA, 19 nt, Artificial Sequence
  Description of Artificial Sequence: Synthetic oligonucleotide
  Antisense strand to SEQ ID NO: 1917682
ugauucagucuggauacag

SEQ ID NO: 1917684 - RNA, 19 nt, Artificial Sequence
  Description of Artificial Sequence: Synthetic oligonucleotide
  Sense strand starting at position 813 of SEQ ID NO: 1879579
ggauuauauuggguuggcu

SEQ ID NO: 1917685 - RNA, 19 nt, Artificial Sequence
  Description of Artificial Sequence: Synthetic oligonucleotide
  Antisense strand to SEQ ID NO: 1917684
agccaacccaauauaaucc

SEQ ID NO: 1917686 - RNA, 19 nt, Artificial Sequence
  Description of Artificial Sequence: Synthetic oligonucleotide
  Sense strand starting at position 1028 of SEQ ID NO: 1879579
ggugaccauuacuuacaga

SEQ ID NO: 1917687 - RNA, 19 nt, Artificial Sequence
  Description of Artificial Sequence: Synthetic oligonucleotide
  Antisense strand to SEQ ID NO: 1917686
ucuguaaguaauggucacc

SEQ ID NO: 1917688 - RNA, 19 nt, Artificial Sequence
  Description of Artificial Sequence: Synthetic oligonucleotide
  Sense strand starting at position 1176 of SEQ ID NO: 1879579
ccaugucuaguccacuuua

SEQ ID NO: 1917689 - RNA, 19 nt, Artificial Sequence
  Description of Artificial Sequence: Synthetic oligonucleotide
  Antisense strand to SEQ ID NO: 1917688
uaaaguggacuagacaugg

SEQ ID NO: 1917690 - RNA, 19 nt, Artificial Sequence
  Description of Artificial Sequence: Synthetic oligonucleotide
  Sense strand starting at position 1181 of SEQ ID NO: 1879579
ucuaguccacuuuacagau

SEQ ID NO: 1917691 - RNA, 19 nt, Artificial Sequence
  Description of Artificial Sequence: Synthetic oligonucleotide
  Antisense strand to SEQ ID NO: 1917690
aucuguaaaguggacuaga

SEQ ID NO: 1917692 - RNA, 19 nt, Artificial Sequence
  Description of Artificial Sequence: Synthetic oligonucleotide
  Sense strand starting at position 1201 of SEQ ID NO: 1879579
gguuucugagggugguaaa

SEQ ID NO: 1917693 - RNA, 19 nt, Artificial Sequence
  Description of Artificial Sequence: Synthetic oligonucleotide
  Antisense strand to SEQ ID NO: 1917692
uuuaccacccucagaaacc

SEQ ID NO: 1917694 - RNA, 19 nt, Artificial Sequence
  Description of Artificial Sequence: Synthetic oligonucleotide
  Sense strand starting at position 1225 of SEQ ID NO: 1879579
guuacagaagcauaaucau

SEQ ID NO: 1917695 - RNA, 19 nt, Artificial Sequence
  Description of Artificial Sequence: Synthetic oligonucleotide
  Antisense strand to SEQ ID NO: 1917694
augauuaugcuucuguaac

SEQ ID NO: 1917696 - RNA, 19 nt, Artificial Sequence
  Description of Artificial Sequence: Synthetic oligonucleotide
  Sense strand starting at position 1232 of SEQ ID NO: 1879579
aagcauaaucauggugaua

SEQ ID NO: 1917697 - RNA, 19 nt, Artificial Sequence
  Description of Artificial Sequence: Synthetic oligonucleotide
  Antisense strand to SEQ ID NO: 1917696
uaucaccaugauuaugcuu

SEQ ID NO: 1917698 - RNA, 19 nt, Artificial Sequence
  Description of Artificial Sequence: Synthetic oligonucleotide
  Sense strand starting at position 1278 of SEQ ID NO: 1879579
uugugcuauggagauguua

SEQ ID NO: 1917699 - RNA, 19 nt, Artificial Sequence
  Description of Artificial Sequence: Synthetic oligonucleotide
  Antisense strand to SEQ ID NO: 1917698
uaacaucuccauagcacaa

SEQ ID NO: 1917700 - RNA, 19 nt, Artificial Sequence
  Description of Artificial Sequence: Synthetic oligonucleotide
  Sense strand starting at position 1337 of SEQ ID NO: 1879579
gugaacacccauuagcuuu

SEQ ID NO: 1917701 - RNA, 19 nt, Artificial Sequence
  Description of Artificial Sequence: Synthetic oligonucleotide
  Antisense strand to SEQ ID NO: 1917700
aaagcuaauggguguucac

SEQ ID NO: 1917702 - RNA, 19 nt, Artificial Sequence
  Description of Artificial Sequence: Synthetic oligonucleotide
  Sense strand starting at position 1366 of SEQ ID NO: 1879579
auagguaaaugcuuaaauc

SEQ ID NO: 1917703 - RNA, 19 nt, Artificial Sequence
  Description of Artificial Sequence: Synthetic oligonucleotide
  Antisense strand to SEQ ID NO: 1917702
gauuuaagcauuuaccuau

SEQ ID NO: 1917704 - RNA, 19 nt, Artificial Sequence
  Description of Artificial Sequence: Synthetic oligonucleotide
  Sense strand starting at position 1430 of SEQ ID NO: 1879579
ggccucuaucaucaguaga

SEQ ID NO: 1917705 - RNA, 19 nt, Artificial Sequence
  Description of Artificial Sequence: Synthetic oligonucleotide
  Antisense strand to SEQ ID NO: 1917704
ucuacugaugauagaggcc

SEQ ID NO: 1917706 - RNA, 19 nt, Artificial Sequence
  Description of Artificial Sequence: Synthetic oligonucleotide
  Sense strand starting at position 1473 of SEQ ID NO: 1879579
aguguauaccuccauuggu

SEQ ID NO: 1917707 - RNA, 19 nt, Artificial Sequence
  Description of Artificial Sequence: Synthetic oligonucleotide
  Antisense strand to SEQ ID NO: 1917706
accaauggagguauacacu

SEQ ID NO: 1917708 - RNA, 19 nt, Artificial Sequence
  Description of Artificial Sequence: Synthetic oligonucleotide
  Sense strand starting at position 2061 of SEQ ID NO: 1879579
agcaauauccaugauguca

SEQ ID NO: 1917709 - RNA, 19 nt, Artificial Sequence
  Description of Artificial Sequence: Synthetic oligonucleotide
  Antisense strand to SEQ ID NO: 1917708
ugacaucauggauauugcu

SEQ ID NO: 1917710 - RNA, 19 nt, Artificial Sequence
  Description of Artificial Sequence: Synthetic oligonucleotide
  Sense strand starting at position 2184 of SEQ ID NO: 1879579
ugaauuuguuguuugucua

SEQ ID NO: 1917711 - RNA, 19 nt, Artificial Sequence
  Description of Artificial Sequence: Synthetic oligonucleotide
  Antisense strand to SEQ ID NO: 1917710
uagacaaacaacaaauuca

SEQ ID NO: 1917712 - RNA, 19 nt, Artificial Sequence
  Description of Artificial Sequence: Synthetic oligonucleotide
  Sense strand starting at position 2185 of SEQ ID NO: 1879579
gaauuuguuguuugucuaa

SEQ ID NO: 1917713 - RNA, 19 nt, Artificial Sequence
  Description of Artificial Sequence: Synthetic oligonucleotide
  Antisense strand to SEQ ID NO: 1917712
uuagacaaacaacaaauuc

SEQ ID NO: 1917714 - RNA, 19 nt, Artificial Sequence
  Description of Artificial Sequence: Synthetic oligonucleotide
  Sense strand starting at position 2187 of SEQ ID NO: 1879579
auuuguuguuugucuaaug

SEQ ID NO: 1917715 - RNA, 19 nt, Artificial Sequence
  Description of Artificial Sequence: Synthetic oligonucleotide
  Antisense strand to SEQ ID NO: 1917714
cauuagacaaacaacaaau

SEQ ID NO: 1917716 - RNA, 19 nt, Artificial Sequence
  Description of Artificial Sequence: Synthetic oligonucleotide
  Sense strand starting at position 2356 of SEQ ID NO: 1879579
auaacaccuguuggugaau

SEQ ID NO: 1917717 - RNA, 19 nt, Artificial Sequence
  Description of Artificial Sequence: Synthetic oligonucleotide
  Antisense strand to SEQ ID NO: 1917716
auucaccaacagguguuau

SEQ ID NO: 1917718 - RNA, 19 nt, Artificial Sequence
  Description of Artificial Sequence: Synthetic oligonucleotide
  Sense strand starting at position 2359 of SEQ ID NO: 1879579
acaccuguuggugaauguu

SEQ ID NO: 1917719 - RNA, 19 nt, Artificial Sequence
  Description of Artificial Sequence: Synthetic oligonucleotide
  Antisense strand to SEQ ID NO: 1917718
aacauucaccaacaggugu

SEQ ID NO: 1917720 - RNA, 19 nt, Artificial Sequence
  Description of Artificial Sequence: Synthetic oligonucleotide
  Sense strand starting at position 2405 of SEQ ID NO: 1879579
gcugcauaggguuaauuag

SEQ ID NO: 1917721 - RNA, 19 nt, Artificial Sequence
  Description of Artificial Sequence: Synthetic oligonucleotide
  Antisense strand to SEQ ID NO: 1917720
cuaauuaacccuaugcagc

SEQ ID NO: 1917722 - RNA, 19 nt, Artificial Sequence
  Description of Artificial Sequence: Synthetic oligonucleotide
  Sense strand starting at position 2415 of SEQ ID NO: 1879579
guuaauuagagucacuugu

SEQ ID NO: 1917723 - RNA, 19 nt, Artificial Sequence
  Description of Artificial Sequence: Synthetic oligonucleotide
  Antisense strand to SEQ ID NO: 1917722
acaagugacucuaauuaac

SEQ ID NO: 1917724 - RNA, 19 nt, Artificial Sequence
  Description of Artificial Sequence: Synthetic oligonucleotide
  Sense strand starting at position 2470 of SEQ ID NO: 1879579
ucuaaugccucuuuggaca

SEQ ID NO: 1917725 - RNA, 19 nt, Artificial Sequence
  Description of Artificial Sequence: Synthetic oligonucleotide
  Antisense strand to SEQ ID NO: 1917724
uguccaaagaggcauuaga

SEQ ID NO: 1917726 - RNA, 19 nt, Artificial Sequence
  Description of Artificial Sequence: Synthetic oligonucleotide
  Sense strand starting at position 2498 of SEQ ID NO: 1879579
ugcaguuaagaucagaauc

SEQ ID NO: 1917727 - RNA, 19 nt, Artificial Sequence
  Description of Artificial Sequence: Synthetic oligonucleotide
  Antisense strand to SEQ ID NO: 1917726
gauucugaucuuaacugca

SEQ ID NO: 1917728 - RNA, 19 nt, Artificial Sequence
  Description of Artificial Sequence: Synthetic oligonucleotide
  Sense strand starting at position 2822 of SEQ ID NO: 1879579
ccauguaauguaugauaua

SEQ ID NO: 1917729 - RNA, 19 nt, Artificial Sequence
  Description of Artificial Sequence: Synthetic oligonucleotide
  Antisense strand to SEQ ID NO: 1917728
uauaucauacauuacaugg

SEQ ID NO: 1917730 - RNA, 19 nt, Artificial Sequence
  Description of Artificial Sequence: Synthetic oligonucleotide
  Sense strand starting at position 2998 of SEQ ID NO: 1879579
ucauaaucuugggcaacua

SEQ ID NO: 1917731 - RNA, 19 nt, Artificial Sequence
  Description of Artificial Sequence: Synthetic oligonucleotide
  Antisense strand to SEQ ID NO: 1917730
uaguugcccaagauuauga

SEQ ID NO: 1917732 - RNA, 19 nt, Artificial Sequence
  Description of Artificial Sequence: Synthetic oligonucleotide
  Sense strand starting at position 3122 of SEQ ID NO: 1879579
gaauuacagcauugacagu

SEQ ID NO: 1917733 - RNA, 19 nt, Artificial Sequence
  Description of Artificial Sequence: Synthetic oligonucleotide
  Antisense strand to SEQ ID NO: 1917732
acugucaaugcuguaauuc

SEQ ID NO: 1917734 - RNA, 19 nt, Artificial Sequence
  Description of Artificial Sequence: Synthetic oligonucleotide
  Sense strand starting at position 3492 of SEQ ID NO: 1879579
ugauuacuguuaucacuau

SEQ ID NO: 1917735 - RNA, 19 nt, Artificial Sequence
  Description of Artificial Sequence: Synthetic oligonucleotide
  Antisense strand to SEQ ID NO: 1917734
auagugauaacaguaauca

SEQ ID NO: 1917736 - RNA, 19 nt, Artificial Sequence
  Description of Artificial Sequence: Synthetic oligonucleotide
  Sense strand starting at position 3498 of SEQ ID NO: 1879579
cuguuaucacuauacugau

SEQ ID NO: 1917737 - RNA, 19 nt, Artificial Sequence
  Description of Artificial Sequence: Synthetic oligonucleotide
  Antisense strand to SEQ ID NO: 1917736
aucaguauagugauaacag

SEQ ID NO: 1917738 - RNA, 19 nt, Artificial Sequence
  Description of Artificial Sequence: Synthetic oligonucleotide
  Sense strand starting at position 3565 of SEQ ID NO: 1879579
cccauagauuuacaggaau

SEQ ID NO: 1917739 - RNA, 19 nt, Artificial Sequence
  Description of Artificial Sequence: Synthetic oligonucleotide
  Antisense strand to SEQ ID NO: 1917738
auuccuguaaaucuauggg

SEQ ID NO: 1917740 - RNA, 19 nt, Artificial Sequence
  Description of Artificial Sequence: Synthetic oligonucleotide
  Sense strand starting at position 3906 of SEQ ID NO: 1879579
ccuagcuuuguauaaggua

SEQ ID NO: 1917741 - RNA, 19 nt, Artificial Sequence
  Description of Artificial Sequence: Synthetic oligonucleotide
  Antisense strand to SEQ ID NO: 1917740
uaccuuauacaaagcuagg

SEQ ID NO: 1917742 - RNA, 19 nt, Artificial Sequence
  Description of Artificial Sequence: Synthetic oligonucleotide
  Sense strand starting at position 34 of SEQ ID NO: 1879580
gguccugcguguugugaga

SEQ ID NO: 1917743 - RNA, 19 nt, Artificial Sequence
  Description of Artificial Sequence: Synthetic oligonucleotide
  Antisense strand to SEQ ID NO: 1917742
ucucacaacacgcaggacc

SEQ ID NO: 1917744 - RNA, 19 nt, Artificial Sequence
  Description of Artificial Sequence: Synthetic oligonucleotide
  Sense strand starting at position 96 of SEQ ID NO: 1879580
aagaacuaagcaggaguua

SEQ ID NO: 1917745 - RNA, 19 nt, Artificial Sequence
  Description of Artificial Sequence: Synthetic oligonucleotide
  Antisense strand to SEQ ID NO: 1917744
uaacuccugcuuaguucuu

SEQ ID NO: 1917746 - RNA, 19 nt, Artificial Sequence
  Description of Artificial Sequence: Synthetic oligonucleotide
  Sense strand starting at position 160 of SEQ ID NO: 1879580
uggaaacagcaauguucuu

SEQ ID NO: 1917747 - RNA, 19 nt, Artificial Sequence
  Description of Artificial Sequence: Synthetic oligonucleotide
  Antisense strand to SEQ ID NO: 1917746
aagaacauugcuguuucca

SEQ ID NO: 1917748 - RNA, 19 nt, Artificial Sequence
  Description of Artificial Sequence: Synthetic oligonucleotide
  Sense strand starting at position 167 of SEQ ID NO: 1879580
agcaauguucuuuaauagu

SEQ ID NO: 1917749 - RNA, 19 nt, Artificial Sequence
  Description of Artificial Sequence: Synthetic oligonucleotide
  Antisense strand to SEQ ID NO: 1917748
acuauuaaagaacauugcu

SEQ ID NO: 1917750 - RNA, 19 nt, Artificial Sequence
  Description of Artificial Sequence: Synthetic oligonucleotide
  Sense strand starting at position 173 of SEQ ID NO: 1879580
guucuuuaauagucccauu

SEQ ID NO: 1917751 - RNA, 19 nt, Artificial Sequence
  Description of Artificial Sequence: Synthetic oligonucleotide
  Antisense strand to SEQ ID NO: 1917750
aaugggacuauuaaagaac

SEQ ID NO: 1917752 - RNA, 19 nt, Artificial Sequence
  Description of Artificial Sequence: Synthetic oligonucleotide
  Sense strand starting at position 262 of SEQ ID NO: 1879580
gcucaaauguagcuacaau

SEQ ID NO: 1917753 - RNA, 19 nt, Artificial Sequence
  Description of Artificial Sequence: Synthetic oligonucleotide
  Antisense strand to SEQ ID NO: 1917752
auuguagcuacauuugagc

SEQ ID NO: 1917754 - RNA, 19 nt, Artificial Sequence
  Description of Artificial Sequence: Synthetic oligonucleotide
  Sense strand starting at position 296 of SEQ ID NO: 1879580
ugggcaguguagucuaaca

SEQ ID NO: 1917755 - RNA, 19 nt, Artificial Sequence
  Description of Artificial Sequence: Synthetic oligonucleotide
  Antisense strand to SEQ ID NO: 1917754
uguuagacuacacugccca

SEQ ID NO: 1917756 - RNA, 19 nt, Artificial Sequence
  Description of Artificial Sequence: Synthetic oligonucleotide
  Sense strand starting at position 301 of SEQ ID NO: 1879580
aguguagucuaacagggaa

SEQ ID NO: 1917757 - RNA, 19 nt, Artificial Sequence
  Description of Artificial Sequence: Synthetic oligonucleotide
  Antisense strand to SEQ ID NO: 1917756
uucccuguuagacuacacu

SEQ ID NO: 1917758 - RNA, 19 nt, Artificial Sequence
  Description of Artificial Sequence: Synthetic oligonucleotide
  Sense strand starting at position 354 of SEQ ID NO: 1879580
ugcugaauuccugacugaa

SEQ ID NO: 1917759 - RNA, 19 nt, Artificial Sequence
  Description of Artificial Sequence: Synthetic oligonucleotide
  Antisense strand to SEQ ID NO: 1917758
uucagucaggaauucagca

SEQ ID NO: 1917760 - RNA, 19 nt, Artificial Sequence
  Description of Artificial Sequence: Synthetic oligonucleotide
  Sense strand starting at position 1025 of SEQ ID NO: 1879580
auuauuccuuaugggaaau

SEQ ID NO: 1917761 - RNA, 19 nt, Artificial Sequence
  Description of Artificial Sequence: Synthetic oligonucleotide
  Antisense strand to SEQ ID NO: 1917760
auuucccauaaggaauaau

SEQ ID NO: 1917762 - RNA, 19 nt, Artificial Sequence
  Description of Artificial Sequence: Synthetic oligonucleotide
  Sense strand starting at position 1506 of SEQ ID NO: 1879580
auaauagaaugcuagaugu

SEQ ID NO: 1917763 - RNA, 19 nt, Artificial Sequence
  Description of Artificial Sequence: Synthetic oligonucleotide
  Antisense strand to SEQ ID NO: 1917762
acaucuagcauucuauuau

SEQ ID NO: 1917764 - RNA, 19 nt, Artificial Sequence
  Description of Artificial Sequence: Synthetic oligonucleotide
  Sense strand starting at position 1519 of SEQ ID NO: 1879580
agauguaaguacucaccua

SEQ ID NO: 1917765 - RNA, 19 nt, Artificial Sequence
  Description of Artificial Sequence: Synthetic oligonucleotide
  Antisense strand to SEQ ID NO: 1917764
uaggugaguacuuacaucu

SEQ ID NO: 1917766 - RNA, 19 nt, Artificial Sequence
  Description of Artificial Sequence: Synthetic oligonucleotide
  Sense strand starting at position 2020 of SEQ ID NO: 1879580
cuggucauguacucaggaa

SEQ ID NO: 1917767 - RNA, 19 nt, Artificial Sequence
  Description of Artificial Sequence: Synthetic oligonucleotide
  Antisense strand to SEQ ID NO: 1917766
uuccugaguacaugaccag

SEQ ID NO: 1917768 - RNA, 19 nt, Artificial Sequence
  Description of Artificial Sequence: Synthetic oligonucleotide
  Sense strand starting at position 2024 of SEQ ID NO: 1879580
ucauguacucaggaaggca

SEQ ID NO: 1917769 - RNA, 19 nt, Artificial Sequence
  Description of Artificial Sequence: Synthetic oligonucleotide
  Antisense strand to SEQ ID NO: 1917768
ugccuuccugaguacauga

SEQ ID NO: 1917770 - RNA, 19 nt, Artificial Sequence
  Description of Artificial Sequence: Synthetic oligonucleotide
  Sense strand starting at position 2099 of SEQ ID NO: 1879580
uccauuggcgucugauauc

SEQ ID NO: 1917771 - RNA, 19 nt, Artificial Sequence
  Description of Artificial Sequence: Synthetic oligonucleotide
  Antisense strand to SEQ ID NO: 1917770
gauaucagacgccaaugga

SEQ ID NO: 1917772 - RNA, 19 nt, Artificial Sequence
  Description of Artificial Sequence: Synthetic oligonucleotide
  Sense strand starting at position 2789 of SEQ ID NO: 1879580
cccaaucuggcuuacaguu

SEQ ID NO: 1917773 - RNA, 19 nt, Artificial Sequence
  Description of Artificial Sequence: Synthetic oligonucleotide
  Antisense strand to SEQ ID NO: 1917772
aacuguaagccagauuggg

SEQ ID NO: 1917774 - RNA, 19 nt, Artificial Sequence
  Description of Artificial Sequence: Synthetic oligonucleotide
  Sense strand starting at position 3016 of SEQ ID NO: 1879580
gggccagaaggcuaucuua

SEQ ID NO: 1917775 - RNA, 19 nt, Artificial Sequence
  Description of Artificial Sequence: Synthetic oligonucleotide
  Antisense strand to SEQ ID NO: 1917774
uaagauagccuucuggccc

SEQ ID NO: 1917776 - RNA, 19 nt, Artificial Sequence
  Description of Artificial Sequence: Synthetic oligonucleotide
  Sense strand starting at position 3141 of SEQ ID NO: 1879580
caagguguaugauaauaga

SEQ ID NO: 1917777 - RNA, 19 nt, Artificial Sequence
  Description of Artificial Sequence: Synthetic oligonucleotide
  Antisense strand to SEQ ID NO: 1917776
ucuauuaucauacaccuug

SEQ ID NO: 1917778 - RNA, 19 nt, Artificial Sequence
  Description of Artificial Sequence: Synthetic oligonucleotide
  Sense strand starting at position 3144 of SEQ ID NO: 1879580
gguguaugauaauagagaa

SEQ ID NO: 1917779 - RNA, 19 nt, Artificial Sequence
  Description of Artificial Sequence: Synthetic oligonucleotide
  Antisense strand to SEQ ID NO: 1917778
uucucuauuaucauacacc

SEQ ID NO: 1917780 - RNA, 19 nt, Artificial Sequence
  Description of Artificial Sequence: Synthetic oligonucleotide
  Sense strand starting at position 3286 of SEQ ID NO: 1879580
ugcuuuaagugcuggaagu

SEQ ID NO: 1917781 - RNA, 19 nt, Artificial Sequence
  Description of Artificial Sequence: Synthetic oligonucleotide
  Antisense strand to SEQ ID NO: 1917780
acuuccagcacuuaaagca

SEQ ID NO: 1917782 - RNA, 19 nt, Artificial Sequence
  Description of Artificial Sequence: Synthetic oligonucleotide
  Sense strand starting at position 3287 of SEQ ID NO: 1879580
gcuuuaagugcuggaaguc

SEQ ID NO: 1917783 - RNA, 19 nt, Artificial Sequence
  Description of Artificial Sequence: Synthetic oligonucleotide
  Antisense strand to SEQ ID NO: 1917782
gacuuccagcacuuaaagc

SEQ ID NO: 1917784 - RNA, 19 nt, Artificial Sequence
  Description of Artificial Sequence: Synthetic oligonucleotide
  Sense strand starting at position 3613 of SEQ ID NO: 1879580
aacuguugugcguauugau

SEQ ID NO: 1917785 - RNA, 19 nt, Artificial Sequence
  Description of Artificial Sequence: Synthetic oligonucleotide
  Antisense strand to SEQ ID NO: 1917784
aucaauacgcacaacaguu

SEQ ID NO: 1917786 - RNA, 19 nt, Artificial Sequence
  Description of Artificial Sequence: Synthetic oligonucleotide
  Sense strand starting at position 3631 of SEQ ID NO: 1879580
uggccaggcuucuaaacau

SEQ ID NO: 1917787 - RNA, 19 nt, Artificial Sequence
  Description of Artificial Sequence: Synthetic oligonucleotide
  Antisense strand to SEQ ID NO: 1917786
auguuuagaagccuggcca

SEQ ID NO: 1917788 - RNA, 19 nt, Artificial Sequence
  Description of Artificial Sequence: Synthetic oligonucleotide
  Sense strand starting at position 3680 of SEQ ID NO: 1879580
ggacaauauucuuuaaugu

SEQ ID NO: 1917789 - RNA, 19 nt, Artificial Sequence
  Description of Artificial Sequence: Synthetic oligonucleotide
  Antisense strand to SEQ ID NO: 1917788
acauuaaagaauauugucc

SEQ ID NO: 1917790 - RNA, 19 nt, Artificial Sequence
  Description of Artificial Sequence: Synthetic oligonucleotide
  Sense strand starting at position 57 of SEQ ID NO: 1879581
gagccaagagcuugguuua

SEQ ID NO: 1917791 - RNA, 19 nt, Artificial Sequence
  Description of Artificial Sequence: Synthetic oligonucleotide
  Antisense strand to SEQ ID NO: 1917790
uaaaccaagcucuuggcuc

SEQ ID NO: 1917792 - RNA, 19 nt, Artificial Sequence
  Description of Artificial Sequence: Synthetic oligonucleotide
  Sense strand starting at position 58 of SEQ ID NO: 1879581
agccaagagcuugguuuau

SEQ ID NO: 1917793 - RNA, 19 nt, Artificial Sequence
  Description of Artificial Sequence: Synthetic oligonucleotide
  Antisense strand to SEQ ID NO: 1917792
auaaaccaagcucuuggcu

SEQ ID NO: 1917794 - RNA, 19 nt, Artificial Sequence
  Description of Artificial Sequence: Synthetic oligonucleotide
  Sense strand starting at position 60 of SEQ ID NO: 1879581
ccaagagcuugguuuauug

SEQ ID NO: 1917795 - RNA, 19 nt, Artificial Sequence
  Description of Artificial Sequence: Synthetic oligonucleotide
  Antisense strand to SEQ ID NO: 1917794
caauaaaccaagcucuugg

SEQ ID NO: 1917796 - RNA, 19 nt, Artificial Sequence
  Description of Artificial Sequence: Synthetic oligonucleotide
  Sense strand starting at position 62 of SEQ ID NO: 1879581
aagagcuugguuuauugua

SEQ ID NO: 1917797 - RNA, 19 nt, Artificial Sequence
  Description of Artificial Sequence: Synthetic oligonucleotide
  Antisense strand to SEQ ID NO: 1917796
uacaauaaaccaagcucuu

SEQ ID NO: 1917798 - RNA, 19 nt, Artificial Sequence
  Description of Artificial Sequence: Synthetic oligonucleotide
  Sense strand starting at position 72 of SEQ ID NO: 1879581
uuuauuguaccaggaagaa

SEQ ID NO: 1917799 - RNA, 19 nt, Artificial Sequence
  Description of Artificial Sequence: Synthetic oligonucleotide
  Antisense strand to SEQ ID NO: 1917798
uucuuccugguacaauaaa

SEQ ID NO: 1917800 - RNA, 19 nt, Artificial Sequence
  Description of Artificial Sequence: Synthetic oligonucleotide
  Sense strand starting at position 109 of SEQ ID NO: 1879581
gggcaaucaucagagaaca

SEQ ID NO: 1917801 - RNA, 19 nt, Artificial Sequence
  Description of Artificial Sequence: Synthetic oligonucleotide
  Antisense strand to SEQ ID NO: 1917800
uguucucugaugauugccc

SEQ ID NO: 1917802 - RNA, 19 nt, Artificial Sequence
  Description of Artificial Sequence: Synthetic oligonucleotide
  Sense strand starting at position 160 of SEQ ID NO: 1879581
gaccucugugggcaauaga

SEQ ID NO: 1917803 - RNA, 19 nt, Artificial Sequence
  Description of Artificial Sequence: Synthetic oligonucleotide
  Antisense strand to SEQ ID NO: 1917802
ucuauugcccacagagguc

SEQ ID NO: 1917804 - RNA, 19 nt, Artificial Sequence
  Description of Artificial Sequence: Synthetic oligonucleotide
  Sense strand starting at position 171 of SEQ ID NO: 1879581
gcaauagagaaguacaugu

SEQ ID NO: 1917805 - RNA, 19 nt, Artificial Sequence
  Description of Artificial Sequence: Synthetic oligonucleotide
  Antisense strand to SEQ ID NO: 1917804
acauguacuucucuauugc

SEQ ID NO: 1917806 - RNA, 19 nt, Artificial Sequence
  Description of Artificial Sequence: Synthetic oligonucleotide
  Sense strand starting at position 249 of SEQ ID NO: 1879581
gaauguaagacggauguau

SEQ ID NO: 1917807 - RNA, 19 nt, Artificial Sequence
  Description of Artificial Sequence: Synthetic oligonucleotide
  Antisense strand to SEQ ID NO: 1917806
auacauccgucuuacauuc

SEQ ID NO: 1917808 - RNA, 19 nt, Artificial Sequence
  Description of Artificial Sequence: Synthetic oligonucleotide
  Sense strand starting at position 251 of SEQ ID NO: 1879581
auguaagacggauguaucu

SEQ ID NO: 1917809 - RNA, 19 nt, Artificial Sequence
  Description of Artificial Sequence: Synthetic oligonucleotide
  Antisense strand to SEQ ID NO: 1917808
agauacauccgucuuacau

SEQ ID NO: 1917810 - RNA, 19 nt, Artificial Sequence
  Description of Artificial Sequence: Synthetic oligonucleotide
  Sense strand starting at position 257 of SEQ ID NO: 1879581
gacggauguaucuggaaug

SEQ ID NO: 1917811 - RNA, 19 nt, Artificial Sequence
  Description of Artificial Sequence: Synthetic oligonucleotide
  Antisense strand to SEQ ID NO: 1917810
cauuccagauacauccguc

SEQ ID NO: 1917812 - RNA, 19 nt, Artificial Sequence
  Description of Artificial Sequence: Synthetic oligonucleotide
  Sense strand starting at position 370 of SEQ ID NO: 1879581
uuuauuggaugaucucaau

SEQ ID NO: 1917813 - RNA, 19 nt, Artificial Sequence
  Description of Artificial Sequence: Synthetic oligonucleotide
  Antisense strand to SEQ ID NO: 1917812
auugagaucauccaauaaa

SEQ ID NO: 1917814 - RNA, 19 nt, Artificial Sequence
  Description of Artificial Sequence: Synthetic oligonucleotide
  Sense strand starting at position 861 of SEQ ID NO: 1879581
cgcauucuuggguaucuca

SEQ ID NO: 1917815 - RNA, 19 nt, Artificial Sequence
  Description of Artificial Sequence: Synthetic oligonucleotide
  Antisense strand to SEQ ID NO: 1917814
ugagauacccaagaaugcg

SEQ ID NO: 1917816 - RNA, 19 nt, Artificial Sequence
  Description of Artificial Sequence: Synthetic oligonucleotide
  Sense strand starting at position 967 of SEQ ID NO: 1879581
uccugagugcugugaugaa

SEQ ID NO: 1917817 - RNA, 19 nt, Artificial Sequence
  Description of Artificial Sequence: Synthetic oligonucleotide
  Antisense strand to SEQ ID NO: 1917816
uucaucacagcacucagga

SEQ ID NO: 1917818 - RNA, 19 nt, Artificial Sequence
  Description of Artificial Sequence: Synthetic oligonucleotide
  Sense strand starting at position 979 of SEQ ID NO: 1879581
ugaugaauuugugauaucu

SEQ ID NO: 1917819 - RNA, 19 nt, Artificial Sequence
  Description of Artificial Sequence: Synthetic oligonucleotide
  Antisense strand to SEQ ID NO: 1917818
agauaucacaaauucauca

SEQ ID NO: 1917820 - RNA, 19 nt, Artificial Sequence
  Description of Artificial Sequence: Synthetic oligonucleotide
  Sense strand starting at position 1071 of SEQ ID NO: 1879581
uguauacugugauccuuau

SEQ ID NO: 1917821 - RNA, 19 nt, Artificial Sequence
  Description of Artificial Sequence: Synthetic oligonucleotide
  Antisense strand to SEQ ID NO: 1917820
auaaggaucacaguauaca

SEQ ID NO: 1917822 - RNA, 19 nt, Artificial Sequence
  Description of Artificial Sequence: Synthetic oligonucleotide
  Sense strand starting at position 1422 of SEQ ID NO: 1879581
ugaccucugucuuuacuca

SEQ ID NO: 1917823 - RNA, 19 nt, Artificial Sequence
  Description of Artificial Sequence: Synthetic oligonucleotide
  Antisense strand to SEQ ID NO: 1917822
ugaguaaagacagagguca

SEQ ID NO: 1917824 - RNA, 19 nt, Artificial Sequence
  Description of Artificial Sequence: Synthetic oligonucleotide
  Sense strand starting at position 1438 of SEQ ID NO: 1879581
ucaaucacucggugaccua

SEQ ID NO: 1917825 - RNA, 19 nt, Artificial Sequence
  Description of Artificial Sequence: Synthetic oligonucleotide
  Antisense strand to SEQ ID NO: 1917824
uaggucaccgagugauuga

SEQ ID NO: 1917826 - RNA, 19 nt, Artificial Sequence
  Description of Artificial Sequence: Synthetic oligonucleotide
  Sense strand starting at position 1439 of SEQ ID NO: 1879581
caaucacucggugaccuaa

SEQ ID NO: 1917827 - RNA, 19 nt, Artificial Sequence
  Description of Artificial Sequence: Synthetic oligonucleotide
  Antisense strand to SEQ ID NO: 1917826
uuaggucaccgagugauug

SEQ ID NO: 1917828 - RNA, 19 nt, Artificial Sequence
  Description of Artificial Sequence: Synthetic oligonucleotide
  Sense strand starting at position 1466 of SEQ ID NO: 1879581
ucaaauguagcaugucuaa

SEQ ID NO: 1917829 - RNA, 19 nt, Artificial Sequence
  Description of Artificial Sequence: Synthetic oligonucleotide
  Antisense strand to SEQ ID NO: 1917828
uuagacaugcuacauuuga

SEQ ID NO: 1917830 - RNA, 19 nt, Artificial Sequence
  Description of Artificial Sequence: Synthetic oligonucleotide
  Sense strand starting at position 1556 of SEQ ID NO: 1879581
agucuuuguuggcucaaga

SEQ ID NO: 1917831 - RNA, 19 nt, Artificial Sequence
  Description of Artificial Sequence: Synthetic oligonucleotide
  Antisense strand to SEQ ID NO: 1917830
ucuugagccaacaaagacu

SEQ ID NO: 1917832 - RNA, 19 nt, Artificial Sequence
  Description of Artificial Sequence: Synthetic oligonucleotide
  Sense strand starting at position 1581 of SEQ ID NO: 1879581
gccuuaguaucacccuuga

SEQ ID NO: 1917833 - RNA, 19 nt, Artificial Sequence
  Description of Artificial Sequence: Synthetic oligonucleotide
  Antisense strand to SEQ ID NO: 1917832
ucaagggugauacuaaggc

SEQ ID NO: 1917834 - RNA, 19 nt, Artificial Sequence
  Description of Artificial Sequence: Synthetic oligonucleotide
  Sense strand starting at position 1714 of SEQ ID NO: 1879581
auugucuucccuggacuaa

SEQ ID NO: 1917835 - RNA, 19 nt, Artificial Sequence
  Description of Artificial Sequence: Synthetic oligonucleotide
  Antisense strand to SEQ ID NO: 1917834
uuaguccagggaagacaau

SEQ ID NO: 1917836 - RNA, 19 nt, Artificial Sequence
  Description of Artificial Sequence: Synthetic oligonucleotide
  Sense strand starting at position 1715 of SEQ ID NO: 1879581
uugucuucccuggacuaau

SEQ ID NO: 1917837 - RNA, 19 nt, Artificial Sequence
  Description of Artificial Sequence: Synthetic oligonucleotide
  Antisense strand to SEQ ID NO: 1917836
auuaguccagggaagacaa

SEQ ID NO: 1917838 - RNA, 19 nt, Artificial Sequence
  Description of Artificial Sequence: Synthetic oligonucleotide
  Sense strand starting at position 2145 of SEQ ID NO: 1879581
gucucaacucagcagacau

SEQ ID NO: 1917839 - RNA, 19 nt, Artificial Sequence
  Description of Artificial Sequence: Synthetic oligonucleotide
  Antisense strand to SEQ ID NO: 1917838
augucugcugaguugagac

SEQ ID NO: 1917840 - RNA, 19 nt, Artificial Sequence
  Description of Artificial Sequence: Synthetic oligonucleotide
  Sense strand starting at position 2363 of SEQ ID NO: 1879581
agcacuuuggcauaaguua

SEQ ID NO: 1917841 - RNA, 19 nt, Artificial Sequence
  Description of Artificial Sequence: Synthetic oligonucleotide
  Antisense strand to SEQ ID NO: 1917840
uaacuuaugccaaagugcu

SEQ ID NO: 1917842 - RNA, 19 nt, Artificial Sequence
  Description of Artificial Sequence: Synthetic oligonucleotide
  Sense strand starting at position 2436 of SEQ ID NO: 1879581
aggaaauugucacucccau

SEQ ID NO: 1917843 - RNA, 19 nt, Artificial Sequence
  Description of Artificial Sequence: Synthetic oligonucleotide
  Antisense strand to SEQ ID NO: 1917842
augggagugacaauuuccu

SEQ ID NO: 1917844 - RNA, 19 nt, Artificial Sequence
  Description of Artificial Sequence: Synthetic oligonucleotide
  Sense strand starting at position 2719 of SEQ ID NO: 1879581
guuaucucuuuggucuaau

SEQ ID NO: 1917845 - RNA, 19 nt, Artificial Sequence
  Description of Artificial Sequence: Synthetic oligonucleotide
  Antisense strand to SEQ ID NO: 1917844
auuagaccaaagagauaac

SEQ ID NO: 1917846 - RNA, 19 nt, Artificial Sequence
  Description of Artificial Sequence: Synthetic oligonucleotide
  Sense strand starting at position 2755 of SEQ ID NO: 1879581
ggaccacuuuccuuuggua

SEQ ID NO: 1917847 - RNA, 19 nt, Artificial Sequence
  Description of Artificial Sequence: Synthetic oligonucleotide
  Antisense strand to SEQ ID NO: 1917846
uaccaaaggaaaguggucc

SEQ ID NO: 1917848 - RNA, 19 nt, Artificial Sequence
  Description of Artificial Sequence: Synthetic oligonucleotide
  Sense strand starting at position 2800 of SEQ ID NO: 1879581
aggaaaugcagcugguuau

SEQ ID NO: 1917849 - RNA, 19 nt, Artificial Sequence
  Description of Artificial Sequence: Synthetic oligonucleotide
  Antisense strand to SEQ ID NO: 1917848
auaaccagcugcauuuccu

SEQ ID NO: 1917850 - RNA, 19 nt, Artificial Sequence
  Description of Artificial Sequence: Synthetic oligonucleotide
  Sense strand starting at position 2803 of SEQ ID NO: 1879581
aaaugcagcugguuaucua

SEQ ID NO: 1917851 - RNA, 19 nt, Artificial Sequence
  Description of Artificial Sequence: Synthetic oligonucleotide
  Antisense strand to SEQ ID NO: 1917850
uagauaaccagcugcauuu

SEQ ID NO: 1917852 - RNA, 19 nt, Artificial Sequence
  Description of Artificial Sequence: Synthetic oligonucleotide
  Sense strand starting at position 2804 of SEQ ID NO: 1879581
aaugcagcugguuaucuaa

SEQ ID NO: 1917853 - RNA, 19 nt, Artificial Sequence
  Description of Artificial Sequence: Synthetic oligonucleotide
  Antisense strand to SEQ ID NO: 1917852
uuagauaaccagcugcauu

SEQ ID NO: 1917854 - RNA, 19 nt, Artificial Sequence
  Description of Artificial Sequence: Synthetic oligonucleotide
  Sense strand starting at position 2811 of SEQ ID NO: 1879581
cugguuaucuaagcuuuag

SEQ ID NO: 1917855 - RNA, 19 nt, Artificial Sequence
  Description of Artificial Sequence: Synthetic oligonucleotide
  Antisense strand to SEQ ID NO: 1917854
cuaaagcuuagauaaccag

SEQ ID NO: 1917856 - RNA, 19 nt, Artificial Sequence
  Description of Artificial Sequence: Synthetic oligonucleotide
  Sense strand starting at position 3455 of SEQ ID NO: 1879581
aauacuuagccggguguga

SEQ ID NO: 1917857 - RNA, 19 nt, Artificial Sequence
  Description of Artificial Sequence: Synthetic oligonucleotide
  Antisense strand to SEQ ID NO: 1917856
ucacacccggcuaaguauu

SEQ ID NO: 1917858 - RNA, 19 nt, Artificial Sequence
  Description of Artificial Sequence: Synthetic oligonucleotide
  Sense strand starting at position 3661 of SEQ ID NO: 1879581
gauauaaugugagcuacua

SEQ ID NO: 1917859 - RNA, 19 nt, Artificial Sequence
  Description of Artificial Sequence: Synthetic oligonucleotide
  Antisense strand to SEQ ID NO: 1917858
uaguagcucacauuauauc

SEQ ID NO: 1917860 - RNA, 19 nt, Artificial Sequence
  Description of Artificial Sequence: Synthetic oligonucleotide
  Sense strand starting at position 3727 of SEQ ID NO: 1879581
caaugagucucucugcaga

SEQ ID NO: 1917861 - RNA, 19 nt, Artificial Sequence
  Description of Artificial Sequence: Synthetic oligonucleotide
  Antisense strand to SEQ ID NO: 1917860
ucugcagagagacucauug

SEQ ID NO: 1917862 - RNA, 19 nt, Artificial Sequence
  Description of Artificial Sequence: Synthetic oligonucleotide
  Sense strand starting at position 3729 of SEQ ID NO: 1879581
augagucucucugcagagu

SEQ ID NO: 1917863 - RNA, 19 nt, Artificial Sequence
  Description of Artificial Sequence: Synthetic oligonucleotide
  Antisense strand to SEQ ID NO: 1917862
acucugcagagagacucau

SEQ ID NO: 1917864 - RNA, 19 nt, Artificial Sequence
  Description of Artificial Sequence: Synthetic oligonucleotide
  Sense strand starting at position 3735 of SEQ ID NO: 1879581
cucucugcagagugagauu

SEQ ID NO: 1917865 - RNA, 19 nt, Artificial Sequence
  Description of Artificial Sequence: Synthetic oligonucleotide
  Antisense strand to SEQ ID NO: 1917864
aaucucacucugcagagag

SEQ ID NO: 1917866 - RNA, 19 nt, Artificial Sequence
  Description of Artificial Sequence: Synthetic oligonucleotide
  Sense strand starting at position 3896 of SEQ ID NO: 1879581
cuguaugcuggucagaaca

SEQ ID NO: 1917867 - RNA, 19 nt, Artificial Sequence
  Description of Artificial Sequence: Synthetic oligonucleotide
  Antisense strand to SEQ ID NO: 1917866
uguucugaccagcauacag

SEQ ID NO: 1917868 - RNA, 19 nt, Artificial Sequence
  Description of Artificial Sequence: Synthetic oligonucleotide
  Sense strand starting at position 3968 of SEQ ID NO: 1879581
ugagaacacgugugcauua

SEQ ID NO: 1917869 - RNA, 19 nt, Artificial Sequence
  Description of Artificial Sequence: Synthetic oligonucleotide
  Antisense strand to SEQ ID NO: 1917868
uaaugcacacguguucuca

SEQ ID NO: 1917870 - RNA, 19 nt, Artificial Sequence
  Description of Artificial Sequence: Synthetic oligonucleotide
  Sense strand starting at position 124 of SEQ ID NO: 1879582
gcugcaguggucaggguau

SEQ ID NO: 1917871 - RNA, 19 nt, Artificial Sequence
  Description of Artificial Sequence: Synthetic oligonucleotide
  Antisense strand to SEQ ID NO: 1917870
auacccugaccacugcagc

SEQ ID NO: 1917872 - RNA, 19 nt, Artificial Sequence
  Description of Artificial Sequence: Synthetic oligonucleotide
  Sense strand starting at position 182 of SEQ ID NO: 1879582
uagagaccguggucauaaa

SEQ ID NO: 1917873 - RNA, 19 nt, Artificial Sequence
  Description of Artificial Sequence: Synthetic oligonucleotide
  Antisense strand to SEQ ID NO: 1917872
uuuaugaccacggucucua

SEQ ID NO: 1917874 - RNA, 19 nt, Artificial Sequence
  Description of Artificial Sequence: Synthetic oligonucleotide
  Sense strand starting at position 183 of SEQ ID NO: 1879582
agagaccguggucauaaau

SEQ ID NO: 1917875 - RNA, 19 nt, Artificial Sequence
  Description of Artificial Sequence: Synthetic oligonucleotide
  Antisense strand to SEQ ID NO: 1917874
auuuaugaccacggucucu

SEQ ID NO: 1917876 - RNA, 19 nt, Artificial Sequence
  Description of Artificial Sequence: Synthetic oligonucleotide
  Sense strand starting at position 226 of SEQ ID NO: 1879582
acaugucauggcugggauu

SEQ ID NO: 1917877 - RNA, 19 nt, Artificial Sequence
  Description of Artificial Sequence: Synthetic oligonucleotide
  Antisense strand to SEQ ID NO: 1917876
aaucccagccaugacaugu

SEQ ID NO: 1917878 - RNA, 19 nt, Artificial Sequence
  Description of Artificial Sequence: Synthetic oligonucleotide
  Sense strand starting at position 253 of SEQ ID NO: 1879582
gggaucacuucugugcuga

SEQ ID NO: 1917879 - RNA, 19 nt, Artificial Sequence
  Description of Artificial Sequence: Synthetic oligonucleotide
  Antisense strand to SEQ ID NO: 1917878
ucagcacagaagugauccc

SEQ ID NO: 1917880 - RNA, 19 nt, Artificial Sequence
  Description of Artificial Sequence: Synthetic oligonucleotide
  Sense strand starting at position 254 of SEQ ID NO: 1879582
ggaucacuucugugcugau

SEQ ID NO: 1917881 - RNA, 19 nt, Artificial Sequence
  Description of Artificial Sequence: Synthetic oligonucleotide
  Antisense strand to SEQ ID NO: 1917880
aucagcacagaagugaucc

SEQ ID NO: 1917882 - RNA, 19 nt, Artificial Sequence
  Description of Artificial Sequence: Synthetic oligonucleotide
  Sense strand starting at position 255 of SEQ ID NO: 1879582
gaucacuucugugcugaua

SEQ ID NO: 1917883 - RNA, 19 nt, Artificial Sequence
  Description of Artificial Sequence: Synthetic oligonucleotide
  Antisense strand to SEQ ID NO: 1917882
uaucagcacagaagugauc

SEQ ID NO: 1917884 - RNA, 19 nt, Artificial Sequence
  Description of Artificial Sequence: Synthetic oligonucleotide
  Sense strand starting at position 351 of SEQ ID NO: 1879582
cccuucuuacaccggagaa

SEQ ID NO: 1917885 - RNA, 19 nt, Artificial Sequence
  Description of Artificial Sequence: Synthetic oligonucleotide
  Antisense strand to SEQ ID NO: 1917884
uucuccgguguaagaaggg

SEQ ID NO: 1917886 - RNA, 19 nt, Artificial Sequence
  Description of Artificial Sequence: Synthetic oligonucleotide
  Sense strand starting at position 446 of SEQ ID NO: 1879582
aagggcuagccucagaaau

SEQ ID NO: 1917887 - RNA, 19 nt, Artificial Sequence
  Description of Artificial Sequence: Synthetic oligonucleotide
  Antisense strand to SEQ ID NO: 1917886
auuucugaggcuagcccuu

SEQ ID NO: 1917888 - RNA, 19 nt, Artificial Sequence
  Description of Artificial Sequence: Synthetic oligonucleotide
  Sense strand starting at position 456 of SEQ ID NO: 1879582
cucagaaaugaaggcuuau

SEQ ID NO: 1917889 - RNA, 19 nt, Artificial Sequence
  Description of Artificial Sequence: Synthetic oligonucleotide
  Antisense strand to SEQ ID NO: 1917888
auaagccuucauuucugag

SEQ ID NO: 1917890 - RNA, 19 nt, Artificial Sequence
  Description of Artificial Sequence: Synthetic oligonucleotide
  Sense strand starting at position 467 of SEQ ID NO: 1879582
aggcuuauuucugugguag

SEQ ID NO: 1917891 - RNA, 19 nt, Artificial Sequence
  Description of Artificial Sequence: Synthetic oligonucleotide
  Antisense strand to SEQ ID NO: 1917890
cuaccacagaaauaagccu

SEQ ID NO: 1917892 - RNA, 19 nt, Artificial Sequence
  Description of Artificial Sequence: Synthetic oligonucleotide
  Sense strand starting at position 2134 of SEQ ID NO: 1879582
gucuguuuccgagcaguug

SEQ ID NO: 1917893 - RNA, 19 nt, Artificial Sequence
  Description of Artificial Sequence: Synthetic oligonucleotide
  Antisense strand to SEQ ID NO: 1917892
caacugcucggaaacagac

SEQ ID NO: 1917894 - RNA, 19 nt, Artificial Sequence
  Description of Artificial Sequence: Synthetic oligonucleotide
  Sense strand starting at position 2220 of SEQ ID NO: 1879582
cuuccagcuggguggaaau

SEQ ID NO: 1917895 - RNA, 19 nt, Artificial Sequence
  Description of Artificial Sequence: Synthetic oligonucleotide
  Antisense strand to SEQ ID NO: 1917894
auuuccacccagcuggaag

SEQ ID NO: 1917896 - RNA, 19 nt, Artificial Sequence
  Description of Artificial Sequence: Synthetic oligonucleotide
  Sense strand starting at position 2237 of SEQ ID NO: 1879582
auucccaucccucggagaa

SEQ ID NO: 1917897 - RNA, 19 nt, Artificial Sequence
  Description of Artificial Sequence: Synthetic oligonucleotide
  Antisense strand to SEQ ID NO: 1917896
uucuccgagggaugggaau

SEQ ID NO: 1917898 - RNA, 19 nt, Artificial Sequence
  Description of Artificial Sequence: Synthetic oligonucleotide
  Sense strand starting at position 2340 of SEQ ID NO: 1879582
gggcaagucucgcucauuu

SEQ ID NO: 1917899 - RNA, 19 nt, Artificial Sequence
  Description of Artificial Sequence: Synthetic oligonucleotide
  Antisense strand to SEQ ID NO: 1917898
aaaugagcgagacuugccc

SEQ ID NO: 1917900 - RNA, 19 nt, Artificial Sequence
  Description of Artificial Sequence: Synthetic oligonucleotide
  Sense strand starting at position 2373 of SEQ ID NO: 1879582
aggauaaugccgcacuauu

SEQ ID NO: 1917901 - RNA, 19 nt, Artificial Sequence
  Description of Artificial Sequence: Synthetic oligonucleotide
  Antisense strand to SEQ ID NO: 1917900
aauagugcggcauuauccu

SEQ ID NO: 1917902 - RNA, 19 nt, Artificial Sequence
  Description of Artificial Sequence: Synthetic oligonucleotide
  Sense strand starting at position 2384 of SEQ ID NO: 1879582
gcacuauuugcacagcauc

SEQ ID NO: 1917903 - RNA, 19 nt, Artificial Sequence
  Description of Artificial Sequence: Synthetic oligonucleotide
  Antisense strand to SEQ ID NO: 1917902
gaugcugugcaaauagugc

SEQ ID NO: 1917904 - RNA, 19 nt, Artificial Sequence
  Description of Artificial Sequence: Synthetic oligonucleotide
  Sense strand starting at position 2677 of SEQ ID NO: 1879582
uguugaacucuggagcuca

SEQ ID NO: 1917905 - RNA, 19 nt, Artificial Sequence
  Description of Artificial Sequence: Synthetic oligonucleotide
  Antisense strand to SEQ ID NO: 1917904
ugagcuccagaguucaaca

SEQ ID NO: 1917906 - RNA, 19 nt, Artificial Sequence
  Description of Artificial Sequence: Synthetic oligonucleotide
  Sense strand starting at position 2776 of SEQ ID NO: 1879582
ccacuuauuggccaagaca

SEQ ID NO: 1917907 - RNA, 19 nt, Artificial Sequence
  Description of Artificial Sequence: Synthetic oligonucleotide
  Antisense strand to SEQ ID NO: 1917906
ugucuuggccaauaagugg

SEQ ID NO: 1917908 - RNA, 19 nt, Artificial Sequence
  Description of Artificial Sequence: Synthetic oligonucleotide
  Sense strand starting at position 2779 of SEQ ID NO: 1879582
cuuauuggccaagacacau

SEQ ID NO: 1917909 - RNA, 19 nt, Artificial Sequence
  Description of Artificial Sequence: Synthetic oligonucleotide
  Antisense strand to SEQ ID NO: 1917908
augugucuuggccaauaag

SEQ ID NO: 1917910 - RNA, 19 nt, Artificial Sequence
  Description of Artificial Sequence: Synthetic oligonucleotide
  Sense strand starting at position 2806 of SEQ ID NO: 1879582
ccuguuugcaagugagaaa

SEQ ID NO: 1917911 - RNA, 19 nt, Artificial Sequence
  Description of Artificial Sequence: Synthetic oligonucleotide
  Antisense strand to SEQ ID NO: 1917910
uuucucacuugcaaacagg

SEQ ID NO: 1917912 - RNA, 19 nt, Artificial Sequence
  Description of Artificial Sequence: Synthetic oligonucleotide
  Sense strand starting at position 2837 of SEQ ID NO: 1879582
agagguuaguguuuggaca

SEQ ID NO: 1917913 - RNA, 19 nt, Artificial Sequence
  Description of Artificial Sequence: Synthetic oligonucleotide
  Antisense strand to SEQ ID NO: 1917912
uguccaaacacuaaccucu

SEQ ID NO: 1917914 - RNA, 19 nt, Artificial Sequence
  Description of Artificial Sequence: Synthetic oligonucleotide
  Sense strand starting at position 2838 of SEQ ID NO: 1879582
gagguuaguguuuggacau

SEQ ID NO: 1917915 - RNA, 19 nt, Artificial Sequence
  Description of Artificial Sequence: Synthetic oligonucleotide
  Antisense strand to SEQ ID NO: 1917914
auguccaaacacuaaccuc

SEQ ID NO: 1917916 - RNA, 19 nt, Artificial Sequence
  Description of Artificial Sequence: Synthetic oligonucleotide
  Sense strand starting at position 2845 of SEQ ID NO: 1879582
guguuuggacauggucaca

SEQ ID NO: 1917917 - RNA, 19 nt, Artificial Sequence
  Description of Artificial Sequence: Synthetic oligonucleotide
  Antisense strand to SEQ ID NO: 1917916
ugugaccauguccaaacac

SEQ ID NO: 1917918 - RNA, 19 nt, Artificial Sequence
  Description of Artificial Sequence: Synthetic oligonucleotide
  Sense strand starting at position 2981 of SEQ ID NO: 1879582
gcucaugagcuucuguguu

SEQ ID NO: 1917919 - RNA, 19 nt, Artificial Sequence
  Description of Artificial Sequence: Synthetic oligonucleotide
  Antisense strand to SEQ ID NO: 1917918
aacacagaagcucaugagc

SEQ ID NO: 1917920 - RNA, 19 nt, Artificial Sequence
  Description of Artificial Sequence: Synthetic oligonucleotide
  Sense strand starting at position 2996 of SEQ ID NO: 1879582
uguuaugaagaaugaagca

SEQ ID NO: 1917921 - RNA, 19 nt, Artificial Sequence
  Description of Artificial Sequence: Synthetic oligonucleotide
  Antisense strand to SEQ ID NO: 1917920
ugcuucauucuucauaaca

SEQ ID NO: 1917922 - RNA, 19 nt, Artificial Sequence
  Description of Artificial Sequence: Synthetic oligonucleotide
  Sense strand starting at position 3018 of SEQ ID NO: 1879582
aaggguaguguaugguuaa

SEQ ID NO: 1917923 - RNA, 19 nt, Artificial Sequence
  Description of Artificial Sequence: Synthetic oligonucleotide
  Antisense strand to SEQ ID NO: 1917922
uuaaccauacacuacccuu

SEQ ID NO: 1917924 - RNA, 19 nt, Artificial Sequence
  Description of Artificial Sequence: Synthetic oligonucleotide
  Sense strand starting at position 3058 of SEQ ID NO: 1879582
guggcuuauuaauucucaa

SEQ ID NO: 1917925 - RNA, 19 nt, Artificial Sequence
  Description of Artificial Sequence: Synthetic oligonucleotide
  Antisense strand to SEQ ID NO: 1917924
uugagaauuaauaagccac

SEQ ID NO: 1917926 - RNA, 19 nt, Artificial Sequence
  Description of Artificial Sequence: Synthetic oligonucleotide
  Sense strand starting at position 3061 of SEQ ID NO: 1879582
gcuuauuaauucucaagga

SEQ ID NO: 1917927 - RNA, 19 nt, Artificial Sequence
  Description of Artificial Sequence: Synthetic oligonucleotide
  Antisense strand to SEQ ID NO: 1917926
uccuugagaauuaauaagc

SEQ ID NO: 1917928 - RNA, 19 nt, Artificial Sequence
  Description of Artificial Sequence: Synthetic oligonucleotide
  Sense strand starting at position 3165 of SEQ ID NO: 1879582
gggagaaaguuucuuagca

SEQ ID NO: 1917929 - RNA, 19 nt, Artificial Sequence
  Description of Artificial Sequence: Synthetic oligonucleotide
  Antisense strand to SEQ ID NO: 1917928
ugcuaagaaacuuucuccc

SEQ ID NO: 1917930 - RNA, 19 nt, Artificial Sequence
  Description of Artificial Sequence: Synthetic oligonucleotide
  Sense strand starting at position 3166 of SEQ ID NO: 1879582
ggagaaaguuucuuagcac

SEQ ID NO: 1917931 - RNA, 19 nt, Artificial Sequence
  Description of Artificial Sequence: Synthetic oligonucleotide
  Antisense strand to SEQ ID NO: 1917930
gugcuaagaaacuuucucc

SEQ ID NO: 1917932 - RNA, 19 nt, Artificial Sequence
  Description of Artificial Sequence: Synthetic oligonucleotide
  Sense strand starting at position 3199 of SEQ ID NO: 1879582
augugauuaaguuguugau

SEQ ID NO: 1917933 - RNA, 19 nt, Artificial Sequence
  Description of Artificial Sequence: Synthetic oligonucleotide
  Antisense strand to SEQ ID NO: 1917932
aucaacaacuuaaucacau

SEQ ID NO: 1917934 - RNA, 19 nt, Artificial Sequence
  Description of Artificial Sequence: Synthetic oligonucleotide
  Sense strand starting at position 3212 of SEQ ID NO: 1879582
guugauaaugcacaauauu

SEQ ID NO: 1917935 - RNA, 19 nt, Artificial Sequence
  Description of Artificial Sequence: Synthetic oligonucleotide
  Antisense strand to SEQ ID NO: 1917934
aauauugugcauuaucaac

SEQ ID NO: 1917936 - RNA, 19 nt, Artificial Sequence
  Description of Artificial Sequence: Synthetic oligonucleotide
  Sense strand starting at position 3245 of SEQ ID NO: 1879582
agagguaauccauguuguc

SEQ ID NO: 1917937 - RNA, 19 nt, Artificial Sequence
  Description of Artificial Sequence: Synthetic oligonucleotide
  Antisense strand to SEQ ID NO: 1917936
gacaacauggauuaccucu

SEQ ID NO: 1917938 - RNA, 19 nt, Artificial Sequence
  Description of Artificial Sequence: Synthetic oligonucleotide
  Sense strand starting at position 3840 of SEQ ID NO: 1879582
gccaucugucugucagcua

SEQ ID NO: 1917939 - RNA, 19 nt, Artificial Sequence
  Description of Artificial Sequence: Synthetic oligonucleotide
  Antisense strand to SEQ ID NO: 1917938
uagcugacagacagauggc

SEQ ID NO: 1917940 - RNA, 19 nt, Artificial Sequence
  Description of Artificial Sequence: Synthetic oligonucleotide
  Sense strand starting at position 3858 of SEQ ID NO: 1879582
accugugaccuggaaggua

SEQ ID NO: 1917941 - RNA, 19 nt, Artificial Sequence
  Description of Artificial Sequence: Synthetic oligonucleotide
  Antisense strand to SEQ ID NO: 1917940
uaccuuccaggucacaggu

SEQ ID NO: 1917942 - RNA, 19 nt, Artificial Sequence
  Description of Artificial Sequence: Synthetic oligonucleotide
  Sense strand starting at position 3888 of SEQ ID NO: 1879582
uugaguugucuccaucuuu

SEQ ID NO: 1917943 - RNA, 19 nt, Artificial Sequence
  Description of Artificial Sequence: Synthetic oligonucleotide
  Antisense strand to SEQ ID NO: 1917942
aaagauggagacaacucaa

SEQ ID NO: 1917944 - RNA, 19 nt, Artificial Sequence
  Description of Artificial Sequence: Synthetic oligonucleotide
  Sense strand starting at position 3895 of SEQ ID NO: 1879582
gucuccaucuuucuggaua

SEQ ID NO: 1917945 - RNA, 19 nt, Artificial Sequence
  Description of Artificial Sequence: Synthetic oligonucleotide
  Antisense strand to SEQ ID NO: 1917944
uauccagaaagauggagac

SEQ ID NO: 1917946 - RNA, 19 nt, Artificial Sequence
  Description of Artificial Sequence: Synthetic oligonucleotide
  Sense strand starting at position 3900 of SEQ ID NO: 1879582
caucuuucuggauagagcu

SEQ ID NO: 1917947 - RNA, 19 nt, Artificial Sequence
  Description of Artificial Sequence: Synthetic oligonucleotide
  Antisense strand to SEQ ID NO: 1917946
agcucuauccagaaagaug

SEQ ID NO: 1917948 - RNA, 19 nt, Artificial Sequence
  Description of Artificial Sequence: Synthetic oligonucleotide
  Sense strand starting at position 3906 of SEQ ID NO: 1879582
ucuggauagagcuaaugua

SEQ ID NO: 1917949 - RNA, 19 nt, Artificial Sequence
  Description of Artificial Sequence: Synthetic oligonucleotide
  Antisense strand to SEQ ID NO: 1917948
uacauuagcucuauccaga

SEQ ID NO: 1917950 - RNA, 19 nt, Artificial Sequence
  Description of Artificial Sequence: Synthetic oligonucleotide
  Sense strand starting at position 22 of SEQ ID NO: 1879583
uuugaugcacccugugaaa

SEQ ID NO: 1917951 - RNA, 19 nt, Artificial Sequence
  Description of Artificial Sequence: Synthetic oligonucleotide
  Antisense strand to SEQ ID NO: 1917950
uuucacagggugcaucaaa

SEQ ID NO: 1917952 - RNA, 19 nt, Artificial Sequence
  Description of Artificial Sequence: Synthetic oligonucleotide
  Sense strand starting at position 122 of SEQ ID NO: 1879583
gaugguugcagagaaagcu

SEQ ID NO: 1917953 - RNA, 19 nt, Artificial Sequence
  Description of Artificial Sequence: Synthetic oligonucleotide
  Antisense strand to SEQ ID NO: 1917952
agcuuucucugcaaccauc

SEQ ID NO: 1917954 - RNA, 19 nt, Artificial Sequence
  Description of Artificial Sequence: Synthetic oligonucleotide
  Sense strand starting at position 145 of SEQ ID NO: 1879583
agggauauauuccaacaag

SEQ ID NO: 1917955 - RNA, 19 nt, Artificial Sequence
  Description of Artificial Sequence: Synthetic oligonucleotide
  Antisense strand to SEQ ID NO: 1917954
cuuguuggaauauaucccu

SEQ ID NO: 1917956 - RNA, 19 nt, Artificial Sequence
  Description of Artificial Sequence: Synthetic oligonucleotide
  Sense strand starting at position 182 of SEQ ID NO: 1879583
gggaaggaguggucugcua

SEQ ID NO: 1917957 - RNA, 19 nt, Artificial Sequence
  Description of Artificial Sequence: Synthetic oligonucleotide
  Antisense strand to SEQ ID NO: 1917956
uagcagaccacuccuuccc

SEQ ID NO: 1917958 - RNA, 19 nt, Artificial Sequence
  Description of Artificial Sequence: Synthetic oligonucleotide
  Sense strand starting at position 184 of SEQ ID NO: 1879583
gaaggaguggucugcuaaa

SEQ ID NO: 1917959 - RNA, 19 nt, Artificial Sequence
  Description of Artificial Sequence: Synthetic oligonucleotide
  Antisense strand to SEQ ID NO: 1917958
uuuagcagaccacuccuuc

SEQ ID NO: 1917960 - RNA, 19 nt, Artificial Sequence
  Description of Artificial Sequence: Synthetic oligonucleotide
  Sense strand starting at position 241 of SEQ ID NO: 1879583
gcugaaugcguuuaaccac

SEQ ID NO: 1917961 - RNA, 19 nt, Artificial Sequence
  Description of Artificial Sequence: Synthetic oligonucleotide
  Antisense strand to SEQ ID NO: 1917960
gugguuaaacgcauucagc

SEQ ID NO: 1917962 - RNA, 19 nt, Artificial Sequence
  Description of Artificial Sequence: Synthetic oligonucleotide
  Sense strand starting at position 352 of SEQ ID NO: 1879583
acuuuagacuuuguuagaa

SEQ ID NO: 1917963 - RNA, 19 nt, Artificial Sequence
  Description of Artificial Sequence: Synthetic oligonucleotide
  Antisense strand to SEQ ID NO: 1917962
uucuaacaaagucuaaagu

SEQ ID NO: 1917964 - RNA, 19 nt, Artificial Sequence
  Description of Artificial Sequence: Synthetic oligonucleotide
  Sense strand starting at position 513 of SEQ ID NO: 1879583
agaagcuaguaucuauaaa

SEQ ID NO: 1917965 - RNA, 19 nt, Artificial Sequence
  Description of Artificial Sequence: Synthetic oligonucleotide
  Antisense strand to SEQ ID NO: 1917964
uuuauagauacuagcuucu

SEQ ID NO: 1917966 - RNA, 19 nt, Artificial Sequence
  Description of Artificial Sequence: Synthetic oligonucleotide
  Sense strand starting at position 585 of SEQ ID NO: 1879583
auuaccuaucacggacaga

SEQ ID NO: 1917967 - RNA, 19 nt, Artificial Sequence
  Description of Artificial Sequence: Synthetic oligonucleotide
  Antisense strand to SEQ ID NO: 1917966
ucuguccgugauagguaau

SEQ ID NO: 1917968 - RNA, 19 nt, Artificial Sequence
  Description of Artificial Sequence: Synthetic oligonucleotide
  Sense strand starting at position 601 of SEQ ID NO: 1879583
agagacuaauuagauaacu

SEQ ID NO: 1917969 - RNA, 19 nt, Artificial Sequence
  Description of Artificial Sequence: Synthetic oligonucleotide
  Antisense strand to SEQ ID NO: 1917968
aguuaucuaauuagucucu

SEQ ID NO: 1917970 - RNA, 19 nt, Artificial Sequence
  Description of Artificial Sequence: Synthetic oligonucleotide
  Sense strand starting at position 1020 of SEQ ID NO: 1879583
agauauuucuuuggaaacu

SEQ ID NO: 1917971 - RNA, 19 nt, Artificial Sequence
  Description of Artificial Sequence: Synthetic oligonucleotide
  Antisense strand to SEQ ID NO: 1917970
aguuuccaaagaaauaucu

SEQ ID NO: 1917972 - RNA, 19 nt, Artificial Sequence
  Description of Artificial Sequence: Synthetic oligonucleotide
  Sense strand starting at position 1029 of SEQ ID NO: 1879583
uuuggaaacuaaugaaaga

SEQ ID NO: 1917973 - RNA, 19 nt, Artificial Sequence
  Description of Artificial Sequence: Synthetic oligonucleotide
  Antisense strand to SEQ ID NO: 1917972
ucuuucauuaguuuccaaa

SEQ ID NO: 1917974 - RNA, 19 nt, Artificial Sequence
  Description of Artificial Sequence: Synthetic oligonucleotide
  Sense strand starting at position 1144 of SEQ ID NO: 1879583
auaggacuaucaugaacaa

SEQ ID NO: 1917975 - RNA, 19 nt, Artificial Sequence
  Description of Artificial Sequence: Synthetic oligonucleotide
  Antisense strand to SEQ ID NO: 1917974
uuguucaugauaguccuau

SEQ ID NO: 1917976 - RNA, 19 nt, Artificial Sequence
  Description of Artificial Sequence: Synthetic oligonucleotide
  Sense strand starting at position 1349 of SEQ ID NO: 1879583
uucugaugccaguauaauu

SEQ ID NO: 1917977 - RNA, 19 nt, Artificial Sequence
  Description of Artificial Sequence: Synthetic oligonucleotide
  Antisense strand to SEQ ID NO: 1917976
aauuauacuggcaucagaa

SEQ ID NO: 1917978 - RNA, 19 nt, Artificial Sequence
  Description of Artificial Sequence: Synthetic oligonucleotide
  Sense strand starting at position 1386 of SEQ ID NO: 1879583
aggacaugaugagaaauga

SEQ ID NO: 1917979 - RNA, 19 nt, Artificial Sequence
  Description of Artificial Sequence: Synthetic oligonucleotide
  Antisense strand to SEQ ID NO: 1917978
ucauuucucaucauguccu

SEQ ID NO: 1917980 - RNA, 19 nt, Artificial Sequence
  Description of Artificial Sequence: Synthetic oligonucleotide
  Sense strand starting at position 2327 of SEQ ID NO: 1879583
gcugcagaacuguacagau

SEQ ID NO: 1917981 - RNA, 19 nt, Artificial Sequence
  Description of Artificial Sequence: Synthetic oligonucleotide
  Antisense strand to SEQ ID NO: 1917980
aucuguacaguucugcagc

SEQ ID NO: 1917982 - RNA, 19 nt, Artificial Sequence
  Description of Artificial Sequence: Synthetic oligonucleotide
  Sense strand starting at position 2342 of SEQ ID NO: 1879583
agauuugcggccgguaaga

SEQ ID NO: 1917983 - RNA, 19 nt, Artificial Sequence
  Description of Artificial Sequence: Synthetic oligonucleotide
  Antisense strand to SEQ ID NO: 1917982
ucuuaccggccgcaaaucu

SEQ ID NO: 1917984 - RNA, 19 nt, Artificial Sequence
  Description of Artificial Sequence: Synthetic oligonucleotide
  Sense strand starting at position 2389 of SEQ ID NO: 1879583
ccagaaaccuccuaggaaa

SEQ ID NO: 1917985 - RNA, 19 nt, Artificial Sequence
  Description of Artificial Sequence: Synthetic oligonucleotide
  Antisense strand to SEQ ID NO: 1917984
uuuccuaggagguuucugg

SEQ ID NO: 1917986 - RNA, 19 nt, Artificial Sequence
  Description of Artificial Sequence: Synthetic oligonucleotide
  Sense strand starting at position 2437 of SEQ ID NO: 1879583
uccuuuauuugauaaagag

SEQ ID NO: 1917987 - RNA, 19 nt, Artificial Sequence
  Description of Artificial Sequence: Synthetic oligonucleotide
  Antisense strand to SEQ ID NO: 1917986
cucuuuaucaaauaaagga

SEQ ID NO: 1917988 - RNA, 19 nt, Artificial Sequence
  Description of Artificial Sequence: Synthetic oligonucleotide
  Sense strand starting at position 2570 of SEQ ID NO: 1879583
ucaggaacuuucuagaaua

SEQ ID NO: 1917989 - RNA, 19 nt, Artificial Sequence
  Description of Artificial Sequence: Synthetic oligonucleotide
  Antisense strand to SEQ ID NO: 1917988
uauucuagaaaguuccuga

SEQ ID NO: 1917990 - RNA, 19 nt, Artificial Sequence
  Description of Artificial Sequence: Synthetic oligonucleotide
  Sense strand starting at position 2693 of SEQ ID NO: 1879583
gugguuugcagaugaauag

SEQ ID NO: 1917991 - RNA, 19 nt, Artificial Sequence
  Description of Artificial Sequence: Synthetic oligonucleotide
  Antisense strand to SEQ ID NO: 1917990
cuauucaucugcaaaccac

SEQ ID NO: 1917992 - RNA, 19 nt, Artificial Sequence
  Description of Artificial Sequence: Synthetic oligonucleotide
  Sense strand starting at position 2705 of SEQ ID NO: 1879583
ugaauagacugucaacaga

SEQ ID NO: 1917993 - RNA, 19 nt, Artificial Sequence
  Description of Artificial Sequence: Synthetic oligonucleotide
  Antisense strand to SEQ ID NO: 1917992
ucuguugacagucuauuca

SEQ ID NO: 1917994 - RNA, 19 nt, Artificial Sequence
  Description of Artificial Sequence: Synthetic oligonucleotide
  Sense strand starting at position 2799 of SEQ ID NO: 1879583
gaagucguucuguauguua

SEQ ID NO: 1917995 - RNA, 19 nt, Artificial Sequence
  Description of Artificial Sequence: Synthetic oligonucleotide
  Antisense strand to SEQ ID NO: 1917994
uaacauacagaacgacuuc

SEQ ID NO: 1917996 - RNA, 19 nt, Artificial Sequence
  Description of Artificial Sequence: Synthetic oligonucleotide
  Sense strand starting at position 2802 of SEQ ID NO: 1879583
gucguucuguauguuaaga

SEQ ID NO: 1917997 - RNA, 19 nt, Artificial Sequence
  Description of Artificial Sequence: Synthetic oligonucleotide
  Antisense strand to SEQ ID NO: 1917996
ucuuaacauacagaacgac

SEQ ID NO: 1917998 - RNA, 19 nt, Artificial Sequence
  Description of Artificial Sequence: Synthetic oligonucleotide
  Sense strand starting at position 2878 of SEQ ID NO: 1879583
acuguaaguuacccaggaa

SEQ ID NO: 1917999 - RNA, 19 nt, Artificial Sequence
  Description of Artificial Sequence: Synthetic oligonucleotide
  Antisense strand to SEQ ID NO: 1917998
uuccuggguaacuuacagu

SEQ ID NO: 1918000 - RNA, 19 nt, Artificial Sequence
  Description of Artificial Sequence: Synthetic oligonucleotide
  Sense strand starting at position 2881 of SEQ ID NO: 1879583
guaaguuacccaggaauaa

SEQ ID NO: 1918001 - RNA, 19 nt, Artificial Sequence
  Description of Artificial Sequence: Synthetic oligonucleotide
  Antisense strand to SEQ ID NO: 1918000
uuauuccuggguaacuuac

SEQ ID NO: 1918002 - RNA, 19 nt, Artificial Sequence
  Description of Artificial Sequence: Synthetic oligonucleotide
  Sense strand starting at position 3084 of SEQ ID NO: 1879583
ugcugucguacuugauaca

SEQ ID NO: 1918003 - RNA, 19 nt, Artificial Sequence
  Description of Artificial Sequence: Synthetic oligonucleotide
  Antisense strand to SEQ ID NO: 1918002
uguaucaaguacgacagca

SEQ ID NO: 1918004 - RNA, 19 nt, Artificial Sequence
  Description of Artificial Sequence: Synthetic oligonucleotide
  Sense strand starting at position 3169 of SEQ ID NO: 1879583
gaaagugguagaugcucau

SEQ ID NO: 1918005 - RNA, 19 nt, Artificial Sequence
  Description of Artificial Sequence: Synthetic oligonucleotide
  Antisense strand to SEQ ID NO: 1918004
augagcaucuaccacuuuc

SEQ ID NO: 1918006 - RNA, 19 nt, Artificial Sequence
  Description of Artificial Sequence: Synthetic oligonucleotide
  Sense strand starting at position 3598 of SEQ ID NO: 1879583
gauagauugcucuaucugu

SEQ ID NO: 1918007 - RNA, 19 nt, Artificial Sequence
  Description of Artificial Sequence: Synthetic oligonucleotide
  Antisense strand to SEQ ID NO: 1918006
acagauagagcaaucuauc

SEQ ID NO: 1918008 - RNA, 19 nt, Artificial Sequence
  Description of Artificial Sequence: Synthetic oligonucleotide
  Sense strand starting at position 3603 of SEQ ID NO: 1879583
auugcucuaucugucaaga

SEQ ID NO: 1918009 - RNA, 19 nt, Artificial Sequence
  Description of Artificial Sequence: Synthetic oligonucleotide
  Antisense strand to SEQ ID NO: 1918008
ucuugacagauagagcaau

SEQ ID NO: 1918010 - RNA, 19 nt, Artificial Sequence
  Description of Artificial Sequence: Synthetic oligonucleotide
  Sense strand starting at position 3608 of SEQ ID NO: 1879583
ucuaucugucaagauguau

SEQ ID NO: 1918011 - RNA, 19 nt, Artificial Sequence
  Description of Artificial Sequence: Synthetic oligonucleotide
  Antisense strand to SEQ ID NO: 1918010
auacaucuugacagauaga

SEQ ID NO: 1918012 - RNA, 19 nt, Artificial Sequence
  Description of Artificial Sequence: Synthetic oligonucleotide
  Sense strand starting at position 3619 of SEQ ID NO: 1879583
agauguauccaugguaauu

SEQ ID NO: 1918013 - RNA, 19 nt, Artificial Sequence
  Description of Artificial Sequence: Synthetic oligonucleotide
  Antisense strand to SEQ ID NO: 1918012
aauuaccauggauacaucu

SEQ ID NO: 1918014 - RNA, 19 nt, Artificial Sequence
  Description of Artificial Sequence: Synthetic oligonucleotide
  Sense strand starting at position 3632 of SEQ ID NO: 1879583
guaauuaagggcuaucgua

SEQ ID NO: 1918015 - RNA, 19 nt, Artificial Sequence
  Description of Artificial Sequence: Synthetic oligonucleotide
  Antisense strand to SEQ ID NO: 1918014
uacgauagcccuuaauuac

SEQ ID NO: 1918016 - RNA, 19 nt, Artificial Sequence
  Description of Artificial Sequence: Synthetic oligonucleotide
  Sense strand starting at position 3713 of SEQ ID NO: 1879583
auauaacuuuggcauaaga

SEQ ID NO: 1918017 - RNA, 19 nt, Artificial Sequence
  Description of Artificial Sequence: Synthetic oligonucleotide
  Antisense strand to SEQ ID NO: 1918016
ucuuaugccaaaguuauau

SEQ ID NO: 1918018 - RNA, 19 nt, Artificial Sequence
  Description of Artificial Sequence: Synthetic oligonucleotide
  Sense strand starting at position 3757 of SEQ ID NO: 1879583
ggauguccacucuaagucu

SEQ ID NO: 1918019 - RNA, 19 nt, Artificial Sequence
  Description of Artificial Sequence: Synthetic oligonucleotide
  Antisense strand to SEQ ID NO: 1918018
agacuuagaguggacaucc

SEQ ID NO: 1918020 - RNA, 19 nt, Artificial Sequence
  Description of Artificial Sequence: Synthetic oligonucleotide
  Sense strand starting at position 3763 of SEQ ID NO: 1879583
ccacucuaagucugagaau

SEQ ID NO: 1918021 - RNA, 19 nt, Artificial Sequence
  Description of Artificial Sequence: Synthetic oligonucleotide
  Antisense strand to SEQ ID NO: 1918020
auucucagacuuagagugg

SEQ ID NO: 1918022 - RNA, 19 nt, Artificial Sequence
  Description of Artificial Sequence: Synthetic oligonucleotide
  Sense strand starting at position 3764 of SEQ ID NO: 1879583
cacucuaagucugagaaug

SEQ ID NO: 1918023 - RNA, 19 nt, Artificial Sequence
  Description of Artificial Sequence: Synthetic oligonucleotide
  Antisense strand to SEQ ID NO: 1918022
cauucucagacuuagagug

SEQ ID NO: 1918024 - RNA, 19 nt, Artificial Sequence
  Description of Artificial Sequence: Synthetic oligonucleotide
  Sense strand starting at position 3913 of SEQ ID NO: 1879583
ccaugaugcuaccuggaaa

SEQ ID NO: 1918025 - RNA, 19 nt, Artificial Sequence
  Description of Artificial Sequence: Synthetic oligonucleotide
  Antisense strand to SEQ ID NO: 1918024
uuuccagguagcaucaugg

SEQ ID NO: 1918026 - RNA, 19 nt, Artificial Sequence
  Description of Artificial Sequence: Synthetic oligonucleotide
  Sense strand starting at position 3973 of SEQ ID NO: 1879583
ccagucaugcccuaggaau

SEQ ID NO: 1918027 - RNA, 19 nt, Artificial Sequence
  Description of Artificial Sequence: Synthetic oligonucleotide
  Antisense strand to SEQ ID NO: 1918026
auuccuagggcaugacugg

SEQ ID NO: 1918028 - RNA, 19 nt, Artificial Sequence
  Description of Artificial Sequence: Synthetic oligonucleotide
  Sense strand starting at position 3975 of SEQ ID NO: 1879583
agucaugcccuaggaauua

SEQ ID NO: 1918029 - RNA, 19 nt, Artificial Sequence
  Description of Artificial Sequence: Synthetic oligonucleotide
  Antisense strand to SEQ ID NO: 1918028
uaauuccuagggcaugacu

SEQ ID NO: 1918030 - RNA, 19 nt, Artificial Sequence
  Description of Artificial Sequence: Synthetic oligonucleotide
  Sense strand starting at position 106 of SEQ ID NO: 1879584
gguaaauaauucuuacuug

SEQ ID NO: 1918031 - RNA, 19 nt, Artificial Sequence
  Description of Artificial Sequence: Synthetic oligonucleotide
  Antisense strand to SEQ ID NO: 1918030
caaguaagaauuauuuacc

SEQ ID NO: 1918032 - RNA, 19 nt, Artificial Sequence
  Description of Artificial Sequence: Synthetic oligonucleotide
  Sense strand starting at position 189 of SEQ ID NO: 1879584
ggcguugagucuuuauuua

SEQ ID NO: 1918033 - RNA, 19 nt, Artificial Sequence
  Description of Artificial Sequence: Synthetic oligonucleotide
  Antisense strand to SEQ ID NO: 1918032
uaaauaaagacucaacgcc

SEQ ID NO: 1918034 - RNA, 19 nt, Artificial Sequence
  Description of Artificial Sequence: Synthetic oligonucleotide
  Sense strand starting at position 244 of SEQ ID NO: 1879584
auaagaacuugcuuguuua

SEQ ID NO: 1918035 - RNA, 19 nt, Artificial Sequence
  Description of Artificial Sequence: Synthetic oligonucleotide
  Antisense strand to SEQ ID NO: 1918034
uaaacaagcaaguucuuau

SEQ ID NO: 1918036 - RNA, 19 nt, Artificial Sequence
  Description of Artificial Sequence: Synthetic oligonucleotide
  Sense strand starting at position 382 of SEQ ID NO: 1879584
ugauuccuacuaggguaau

SEQ ID NO: 1918037 - RNA, 19 nt, Artificial Sequence
  Description of Artificial Sequence: Synthetic oligonucleotide
  Antisense strand to SEQ ID NO: 1918036
auuacccuaguaggaauca

SEQ ID NO: 1918038 - RNA, 19 nt, Artificial Sequence
  Description of Artificial Sequence: Synthetic oligonucleotide
  Sense strand starting at position 437 of SEQ ID NO: 1879584
aguaaaggcuuucuacaca

SEQ ID NO: 1918039 - RNA, 19 nt, Artificial Sequence
  Description of Artificial Sequence: Synthetic oligonucleotide
  Antisense strand to SEQ ID NO: 1918038
uguguagaaagccuuuacu

SEQ ID NO: 1918040 - RNA, 19 nt, Artificial Sequence
  Description of Artificial Sequence: Synthetic oligonucleotide
  Sense strand starting at position 483 of SEQ ID NO: 1879584
ucuggagacgaaugguuua

SEQ ID NO: 1918041 - RNA, 19 nt, Artificial Sequence
  Description of Artificial Sequence: Synthetic oligonucleotide
  Antisense strand to SEQ ID NO: 1918040
uaaaccauucgucuccaga

SEQ ID NO: 1918042 - RNA, 19 nt, Artificial Sequence
  Description of Artificial Sequence: Synthetic oligonucleotide
  Sense strand starting at position 486 of SEQ ID NO: 1879584
ggagacgaaugguuuaaca

SEQ ID NO: 1918043 - RNA, 19 nt, Artificial Sequence
  Description of Artificial Sequence: Synthetic oligonucleotide
  Antisense strand to SEQ ID NO: 1918042
uguuaaaccauucgucucc

SEQ ID NO: 1918044 - RNA, 19 nt, Artificial Sequence
  Description of Artificial Sequence: Synthetic oligonucleotide
  Sense strand starting at position 641 of SEQ ID NO: 1879584
cagcgaagucgcuuguuaa

SEQ ID NO: 1918045 - RNA, 19 nt, Artificial Sequence
  Description of Artificial Sequence: Synthetic oligonucleotide
  Antisense strand to SEQ ID NO: 1918044
uuaacaagcgacuucgcug

SEQ ID NO: 1918046 - RNA, 19 nt, Artificial Sequence
  Description of Artificial Sequence: Synthetic oligonucleotide
  Sense strand starting at position 675 of SEQ ID NO: 1879584
ccuaccuucgaagauucua

SEQ ID NO: 1918047 - RNA, 19 nt, Artificial Sequence
  Description of Artificial Sequence: Synthetic oligonucleotide
  Antisense strand to SEQ ID NO: 1918046
uagaaucuucgaagguagg

SEQ ID NO: 1918048 - RNA, 19 nt, Artificial Sequence
  Description of Artificial Sequence: Synthetic oligonucleotide
  Sense strand starting at position 688 of SEQ ID NO: 1879584
auucuauuauaacucggua

SEQ ID NO: 1918049 - RNA, 19 nt, Artificial Sequence
  Description of Artificial Sequence: Synthetic oligonucleotide
  Antisense strand to SEQ ID NO: 1918048
uaccgaguuauaauagaau

SEQ ID NO: 1918050 - RNA, 19 nt, Artificial Sequence
  Description of Artificial Sequence: Synthetic oligonucleotide
  Sense strand starting at position 691 of SEQ ID NO: 1879584
cuauuauaacucgguagag

SEQ ID NO: 1918051 - RNA, 19 nt, Artificial Sequence
  Description of Artificial Sequence: Synthetic oligonucleotide
  Antisense strand to SEQ ID NO: 1918050
cucuaccgaguuauaauag

SEQ ID NO: 1918052 - RNA, 19 nt, Artificial Sequence
  Description of Artificial Sequence: Synthetic oligonucleotide
  Sense strand starting at position 1025 of SEQ ID NO: 1879584
augguuguggacugaauca

SEQ ID NO: 1918053 - RNA, 19 nt, Artificial Sequence
  Description of Artificial Sequence: Synthetic oligonucleotide
  Antisense strand to SEQ ID NO: 1918052
ugauucaguccacaaccau

SEQ ID NO: 1918054 - RNA, 19 nt, Artificial Sequence
  Description of Artificial Sequence: Synthetic oligonucleotide
  Sense strand starting at position 1136 of SEQ ID NO: 1879584
guuggaacccucuaauguu

SEQ ID NO: 1918055 - RNA, 19 nt, Artificial Sequence
  Description of Artificial Sequence: Synthetic oligonucleotide
  Antisense strand to SEQ ID NO: 1918054
aacauuagaggguuccaac

SEQ ID NO: 1918056 - RNA, 19 nt, Artificial Sequence
  Description of Artificial Sequence: Synthetic oligonucleotide
  Sense strand starting at position 1256 of SEQ ID NO: 1879584
ggaugcuuucgcuuuccuu

SEQ ID NO: 1918057 - RNA, 19 nt, Artificial Sequence
  Description of Artificial Sequence: Synthetic oligonucleotide
  Antisense strand to SEQ ID NO: 1918056
aaggaaagcgaaagcaucc

SEQ ID NO: 1918058 - RNA, 19 nt, Artificial Sequence
  Description of Artificial Sequence: Synthetic oligonucleotide
  Sense strand starting at position 1267 of SEQ ID NO: 1879584
cuuuccuuugacuaggagu

SEQ ID NO: 1918059 - RNA, 19 nt, Artificial Sequence
  Description of Artificial Sequence: Synthetic oligonucleotide
  Antisense strand to SEQ ID NO: 1918058
acuccuagucaaaggaaag

SEQ ID NO: 1918060 - RNA, 19 nt, Artificial Sequence
  Description of Artificial Sequence: Synthetic oligonucleotide
  Sense strand starting at position 1274 of SEQ ID NO: 1879584
uugacuaggaguggaguua

SEQ ID NO: 1918061 - RNA, 19 nt, Artificial Sequence
  Description of Artificial Sequence: Synthetic oligonucleotide
  Antisense strand to SEQ ID NO: 1918060
uaacuccacuccuagucaa

SEQ ID NO: 1918062 - RNA, 19 nt, Artificial Sequence
  Description of Artificial Sequence: Synthetic oligonucleotide
  Sense strand starting at position 1319 of SEQ ID NO: 1879584
cguuuaauugcacaaauug

SEQ ID NO: 1918063 - RNA, 19 nt, Artificial Sequence
  Description of Artificial Sequence: Synthetic oligonucleotide
  Antisense strand to SEQ ID NO: 1918062
caauuugugcaauuaaacg

SEQ ID NO: 1918064 - RNA, 19 nt, Artificial Sequence
  Description of Artificial Sequence: Synthetic oligonucleotide
  Sense strand starting at position 1364 of SEQ ID NO: 1879584
agcaucgaauuugaaugaa

SEQ ID NO: 1918065 - RNA, 19 nt, Artificial Sequence
  Description of Artificial Sequence: Synthetic oligonucleotide
  Antisense strand to SEQ ID NO: 1918064
uucauucaaauucgaugcu

SEQ ID NO: 1918066 - RNA, 19 nt, Artificial Sequence
  Description of Artificial Sequence: Synthetic oligonucleotide
  Sense strand starting at position 1405 of SEQ ID NO: 1879584
ggagaauucugaguacauu

SEQ ID NO: 1918067 - RNA, 19 nt, Artificial Sequence
  Description of Artificial Sequence: Synthetic oligonucleotide
  Antisense strand to SEQ ID NO: 1918066
aauguacucagaauucucc

SEQ ID NO: 1918068 - RNA, 19 nt, Artificial Sequence
  Description of Artificial Sequence: Synthetic oligonucleotide
  Sense strand starting at position 1494 of SEQ ID NO: 1879584
agaauuaacucuucgauua

SEQ ID NO: 1918069 - RNA, 19 nt, Artificial Sequence
  Description of Artificial Sequence: Synthetic oligonucleotide
  Antisense strand to SEQ ID NO: 1918068
uaaucgaagaguuaauucu

SEQ ID NO: 1918070 - RNA, 19 nt, Artificial Sequence
  Description of Artificial Sequence: Synthetic oligonucleotide
  Sense strand starting at position 1499 of SEQ ID NO: 1879584
uaacucuucgauuagacgu

SEQ ID NO: 1918071 - RNA, 19 nt, Artificial Sequence
  Description of Artificial Sequence: Synthetic oligonucleotide
  Antisense strand to SEQ ID NO: 1918070
acgucuaaucgaagaguua

SEQ ID NO: 1918072 - RNA, 19 nt, Artificial Sequence
  Description of Artificial Sequence: Synthetic oligonucleotide
  Sense strand starting at position 1509 of SEQ ID NO: 1879584
auuagacgugucuggacaa

SEQ ID NO: 1918073 - RNA, 19 nt, Artificial Sequence
  Description of Artificial Sequence: Synthetic oligonucleotide
  Antisense strand to SEQ ID NO: 1918072
uuguccagacacgucuaau

SEQ ID NO: 1918074 - RNA, 19 nt, Artificial Sequence
  Description of Artificial Sequence: Synthetic oligonucleotide
  Sense strand starting at position 1738 of SEQ ID NO: 1879584
ggaaugccugcgucgugau

SEQ ID NO: 1918075 - RNA, 19 nt, Artificial Sequence
  Description of Artificial Sequence: Synthetic oligonucleotide
  Antisense strand to SEQ ID NO: 1918074
aucacgacgcaggcauucc

SEQ ID NO: 1918076 - RNA, 19 nt, Artificial Sequence
  Description of Artificial Sequence: Synthetic oligonucleotide
  Sense strand starting at position 1745 of SEQ ID NO: 1879584
cugcgucgugaugcuuauu

SEQ ID NO: 1918077 - RNA, 19 nt, Artificial Sequence
  Description of Artificial Sequence: Synthetic oligonucleotide
  Antisense strand to SEQ ID NO: 1918076
aauaagcaucacgacgcag

SEQ ID NO: 1918078 - RNA, 19 nt, Artificial Sequence
  Description of Artificial Sequence: Synthetic oligonucleotide
  Sense strand starting at position 1787 of SEQ ID NO: 1879584
gcugccuacgcguucacaa

SEQ ID NO: 1918079 - RNA, 19 nt, Artificial Sequence
  Description of Artificial Sequence: Synthetic oligonucleotide
  Antisense strand to SEQ ID NO: 1918078
uugugaacgcguaggcagc

SEQ ID NO: 1918080 - RNA, 19 nt, Artificial Sequence
  Description of Artificial Sequence: Synthetic oligonucleotide
  Sense strand starting at position 2386 of SEQ ID NO: 1879584
uuguaaagacucugugaag

SEQ ID NO: 1918081 - RNA, 19 nt, Artificial Sequence
  Description of Artificial Sequence: Synthetic oligonucleotide
  Antisense strand to SEQ ID NO: 1918080
cuucacagagucuuuacaa

SEQ ID NO: 1918082 - RNA, 19 nt, Artificial Sequence
  Description of Artificial Sequence: Synthetic oligonucleotide
  Sense strand starting at position 2387 of SEQ ID NO: 1879584
uguaaagacucugugaagu

SEQ ID NO: 1918083 - RNA, 19 nt, Artificial Sequence
  Description of Artificial Sequence: Synthetic oligonucleotide
  Antisense strand to SEQ ID NO: 1918082
acuucacagagucuuuaca

SEQ ID NO: 1918084 - RNA, 19 nt, Artificial Sequence
  Description of Artificial Sequence: Synthetic oligonucleotide
  Sense strand starting at position 2592 of SEQ ID NO: 1879584
gccucauuuagcgagagca

SEQ ID NO: 1918085 - RNA, 19 nt, Artificial Sequence
  Description of Artificial Sequence: Synthetic oligonucleotide
  Antisense strand to SEQ ID NO: 1918084
ugcucucgcuaaaugaggc

SEQ ID NO: 1918086 - RNA, 19 nt, Artificial Sequence
  Description of Artificial Sequence: Synthetic oligonucleotide
  Sense strand starting at position 2621 of SEQ ID NO: 1879584
acgccagucaaauggagaa

SEQ ID NO: 1918087 - RNA, 19 nt, Artificial Sequence
  Description of Artificial Sequence: Synthetic oligonucleotide
  Antisense strand to SEQ ID NO: 1918086
uucuccauuugacuggcgu

SEQ ID NO: 1918088 - RNA, 19 nt, Artificial Sequence
  Description of Artificial Sequence: Synthetic oligonucleotide
  Sense strand starting at position 2864 of SEQ ID NO: 1879584
gacaaaugaucuccuuggu

SEQ ID NO: 1918089 - RNA, 19 nt, Artificial Sequence
  Description of Artificial Sequence: Synthetic oligonucleotide
  Antisense strand to SEQ ID NO: 1918088
accaaggagaucauuuguc

SEQ ID NO: 1918090 - RNA, 19 nt, Artificial Sequence
  Description of Artificial Sequence: Synthetic oligonucleotide
  Sense strand starting at position 2873 of SEQ ID NO: 1879584
ucuccuugguauucuggaa

SEQ ID NO: 1918091 - RNA, 19 nt, Artificial Sequence
  Description of Artificial Sequence: Synthetic oligonucleotide
  Antisense strand to SEQ ID NO: 1918090
uuccagaauaccaaggaga

SEQ ID NO: 1918092 - RNA, 19 nt, Artificial Sequence
  Description of Artificial Sequence: Synthetic oligonucleotide
  Sense strand starting at position 2909 of SEQ ID NO: 1879584
gcugcauaccugggaauaa

SEQ ID NO: 1918093 - RNA, 19 nt, Artificial Sequence
  Description of Artificial Sequence: Synthetic oligonucleotide
  Antisense strand to SEQ ID NO: 1918092
uuauucccagguaugcagc

SEQ ID NO: 1918094 - RNA, 19 nt, Artificial Sequence
  Description of Artificial Sequence: Synthetic oligonucleotide
  Sense strand starting at position 2967 of SEQ ID NO: 1879584
cggaaaguucagggagauu

SEQ ID NO: 1918095 - RNA, 19 nt, Artificial Sequence
  Description of Artificial Sequence: Synthetic oligonucleotide
  Antisense strand to SEQ ID NO: 1918094
aaucucccugaacuuuccg

SEQ ID NO: 1918096 - RNA, 19 nt, Artificial Sequence
  Description of Artificial Sequence: Synthetic oligonucleotide
  Sense strand starting at position 2976 of SEQ ID NO: 1879584
cagggagauuuguaaagau

SEQ ID NO: 1918097 - RNA, 19 nt, Artificial Sequence
  Description of Artificial Sequence: Synthetic oligonucleotide
  Antisense strand to SEQ ID NO: 1918096
aucuuuacaaaucucccug

SEQ ID NO: 1918098 - RNA, 19 nt, Artificial Sequence
  Description of Artificial Sequence: Synthetic oligonucleotide
  Sense strand starting at position 3177 of SEQ ID NO: 1879584
gugcacuuaagagaugauu

SEQ ID NO: 1918099 - RNA, 19 nt, Artificial Sequence
  Description of Artificial Sequence: Synthetic oligonucleotide
  Antisense strand to SEQ ID NO: 1918098
aaucaucucuuaagugcac

SEQ ID NO: 1918100 - RNA, 19 nt, Artificial Sequence
  Description of Artificial Sequence: Synthetic oligonucleotide
  Sense strand starting at position 3185 of SEQ ID NO: 1879584
aagagaugauuuggaaaua

SEQ ID NO: 1918101 - RNA, 19 nt, Artificial Sequence
  Description of Artificial Sequence: Synthetic oligonucleotide
  Antisense strand to SEQ ID NO: 1918100
uauuuccaaaucaucucuu

SEQ ID NO: 1918102 - RNA, 19 nt, Artificial Sequence
  Description of Artificial Sequence: Synthetic oligonucleotide
  Sense strand starting at position 3289 of SEQ ID NO: 1879584
gccagauaacuuggauaga

SEQ ID NO: 1918103 - RNA, 19 nt, Artificial Sequence
  Description of Artificial Sequence: Synthetic oligonucleotide
  Antisense strand to SEQ ID NO: 1918102
ucuauccaaguuaucuggc

SEQ ID NO: 1918104 - RNA, 19 nt, Artificial Sequence
  Description of Artificial Sequence: Synthetic oligonucleotide
  Sense strand starting at position 3533 of SEQ ID NO: 1879584
aaaggcugugaaugaguuu

SEQ ID NO: 1918105 - RNA, 19 nt, Artificial Sequence
  Description of Artificial Sequence: Synthetic oligonucleotide
  Antisense strand to SEQ ID NO: 1918104
aaacucauucacagccuuu

SEQ ID NO: 1918106 - RNA, 19 nt, Artificial Sequence
  Description of Artificial Sequence: Synthetic oligonucleotide
  Sense strand starting at position 3763 of SEQ ID NO: 1879584
augagaaucuugccacaug

SEQ ID NO: 1918107 - RNA, 19 nt, Artificial Sequence
  Description of Artificial Sequence: Synthetic oligonucleotide
  Antisense strand to SEQ ID NO: 1918106
cauguggcaagauucucau

SEQ ID NO: 1918108 - RNA, 19 nt, Artificial Sequence
  Description of Artificial Sequence: Synthetic oligonucleotide
  Sense strand starting at position 3896 of SEQ ID NO: 1879584
augccuauccaagagaagu

SEQ ID NO: 1918109 - RNA, 19 nt, Artificial Sequence
  Description of Artificial Sequence: Synthetic oligonucleotide
  Antisense strand to SEQ ID NO: 1918108
acuucucuuggauaggcau

SEQ ID NO: 1918110 - RNA, 19 nt, Artificial Sequence
  Description of Artificial Sequence: Synthetic oligonucleotide
  Sense strand starting at position 35 of SEQ ID NO: 1879585
acaauaguggaauguuauc

SEQ ID NO: 1918111 - RNA, 19 nt, Artificial Sequence
  Description of Artificial Sequence: Synthetic oligonucleotide
  Antisense strand to SEQ ID NO: 1918110
gauaacauuccacuauugu

SEQ ID NO: 1918112 - RNA, 19 nt, Artificial Sequence
  Description of Artificial Sequence: Synthetic oligonucleotide
  Sense strand starting at position 40 of SEQ ID NO: 1879585
aguggaauguuaucaguua

SEQ ID NO: 1918113 - RNA, 19 nt, Artificial Sequence
  Description of Artificial Sequence: Synthetic oligonucleotide
  Antisense strand to SEQ ID NO: 1918112
uaacugauaacauuccacu

SEQ ID NO: 1918114 - RNA, 19 nt, Artificial Sequence
  Description of Artificial Sequence: Synthetic oligonucleotide
  Sense strand starting at position 182 of SEQ ID NO: 1879585
gucuuccuccacuguuuaa

SEQ ID NO: 1918115 - RNA, 19 nt, Artificial Sequence
  Description of Artificial Sequence: Synthetic oligonucleotide
  Antisense strand to SEQ ID NO: 1918114
uuaaacaguggaggaagac

SEQ ID NO: 1918116 - RNA, 19 nt, Artificial Sequence
  Description of Artificial Sequence: Synthetic oligonucleotide
  Sense strand starting at position 195 of SEQ ID NO: 1879585
guuuaagaguuacccaaag

SEQ ID NO: 1918117 - RNA, 19 nt, Artificial Sequence
  Description of Artificial Sequence: Synthetic oligonucleotide
  Antisense strand to SEQ ID NO: 1918116
cuuuggguaacucuuaaac

SEQ ID NO: 1918118 - RNA, 19 nt, Artificial Sequence
  Description of Artificial Sequence: Synthetic oligonucleotide
  Sense strand starting at position 271 of SEQ ID NO: 1879585
agcuguuaagcccaggaga

SEQ ID NO: 1918119 - RNA, 19 nt, Artificial Sequence
  Description of Artificial Sequence: Synthetic oligonucleotide
  Antisense strand to SEQ ID NO: 1918118
ucuccugggcuuaacagcu

SEQ ID NO: 1918120 - RNA, 19 nt, Artificial Sequence
  Description of Artificial Sequence: Synthetic oligonucleotide
  Sense strand starting at position 273 of SEQ ID NO: 1879585
cuguuaagcccaggagauc

SEQ ID NO: 1918121 - RNA, 19 nt, Artificial Sequence
  Description of Artificial Sequence: Synthetic oligonucleotide
  Antisense strand to SEQ ID NO: 1918120
gaucuccugggcuuaacag

SEQ ID NO: 1918122 - RNA, 19 nt, Artificial Sequence
  Description of Artificial Sequence: Synthetic oligonucleotide
  Sense strand starting at position 344 of SEQ ID NO: 1879585
gcagcuuuaaucugaguug

SEQ ID NO: 1918123 - RNA, 19 nt, Artificial Sequence
  Description of Artificial Sequence: Synthetic oligonucleotide
  Antisense strand to SEQ ID NO: 1918122
caacucagauuaaagcugc

SEQ ID NO: 1918124 - RNA, 19 nt, Artificial Sequence
  Description of Artificial Sequence: Synthetic oligonucleotide
  Sense strand starting at position 347 of SEQ ID NO: 1879585
gcuuuaaucugaguuggac

SEQ ID NO: 1918125 - RNA, 19 nt, Artificial Sequence
  Description of Artificial Sequence: Synthetic oligonucleotide
  Antisense strand to SEQ ID NO: 1918124
guccaacucagauuaaagc

SEQ ID NO: 1918126 - RNA, 19 nt, Artificial Sequence
  Description of Artificial Sequence: Synthetic oligonucleotide
  Sense strand starting at position 590 of SEQ ID NO: 1879585
ucugaaauacguugucacu

SEQ ID NO: 1918127 - RNA, 19 nt, Artificial Sequence
  Description of Artificial Sequence: Synthetic oligonucleotide
  Antisense strand to SEQ ID NO: 1918126
agugacaacguauuucaga

SEQ ID NO: 1918128 - RNA, 19 nt, Artificial Sequence
  Description of Artificial Sequence: Synthetic oligonucleotide
  Sense strand starting at position 592 of SEQ ID NO: 1879585
ugaaauacguugucacuug

SEQ ID NO: 1918129 - RNA, 19 nt, Artificial Sequence
  Description of Artificial Sequence: Synthetic oligonucleotide
  Antisense strand to SEQ ID NO: 1918128
caagugacaacguauuuca

SEQ ID NO: 1918130 - RNA, 19 nt, Artificial Sequence
  Description of Artificial Sequence: Synthetic oligonucleotide
  Sense strand starting at position 612 of SEQ ID NO: 1879585
cugucucuucucuauuguu

SEQ ID NO: 1918131 - RNA, 19 nt, Artificial Sequence
  Description of Artificial Sequence: Synthetic oligonucleotide
  Antisense strand to SEQ ID NO: 1918130
aacaauagagaagagacag

SEQ ID NO: 1918132 - RNA, 19 nt, Artificial Sequence
  Description of Artificial Sequence: Synthetic oligonucleotide
  Sense strand starting at position 855 of SEQ ID NO: 1879585
cuucuuuagguuugucaua

SEQ ID NO: 1918133 - RNA, 19 nt, Artificial Sequence
  Description of Artificial Sequence: Synthetic oligonucleotide
  Antisense strand to SEQ ID NO: 1918132
uaugacaaaccuaaagaag

SEQ ID NO: 1918134 - RNA, 19 nt, Artificial Sequence
  Description of Artificial Sequence: Synthetic oligonucleotide
  Sense strand starting at position 856 of SEQ ID NO: 1879585
uucuuuagguuugucauaa

SEQ ID NO: 1918135 - RNA, 19 nt, Artificial Sequence
  Description of Artificial Sequence: Synthetic oligonucleotide
  Antisense strand to SEQ ID NO: 1918134
uuaugacaaaccuaaagaa

SEQ ID NO: 1918136 - RNA, 19 nt, Artificial Sequence
  Description of Artificial Sequence: Synthetic oligonucleotide
  Sense strand starting at position 857 of SEQ ID NO: 1879585
ucuuuagguuugucauaau

SEQ ID NO: 1918137 - RNA, 19 nt, Artificial Sequence
  Description of Artificial Sequence: Synthetic oligonucleotide
  Antisense strand to SEQ ID NO: 1918136
auuaugacaaaccuaaaga

SEQ ID NO: 1918138 - RNA, 19 nt, Artificial Sequence
  Description of Artificial Sequence: Synthetic oligonucleotide
  Sense strand starting at position 1032 of SEQ ID NO: 1879585
ggcagucaucagcaugaga

SEQ ID NO: 1918139 - RNA, 19 nt, Artificial Sequence
  Description of Artificial Sequence: Synthetic oligonucleotide
  Antisense strand to SEQ ID NO: 1918138
ucucaugcugaugacugcc

SEQ ID NO: 1918140 - RNA, 19 nt, Artificial Sequence
  Description of Artificial Sequence: Synthetic oligonucleotide
  Sense strand starting at position 1034 of SEQ ID NO: 1879585
cagucaucagcaugagauu

SEQ ID NO: 1918141 - RNA, 19 nt, Artificial Sequence
  Description of Artificial Sequence: Synthetic oligonucleotide
  Antisense strand to SEQ ID NO: 1918140
aaucucaugcugaugacug

SEQ ID NO: 1918142 - RNA, 19 nt, Artificial Sequence
  Description of Artificial Sequence: Synthetic oligonucleotide
  Sense strand starting at position 1198 of SEQ ID NO: 1879585
ugcugacugaucugggaga

SEQ ID NO: 1918143 - RNA, 19 nt, Artificial Sequence
  Description of Artificial Sequence: Synthetic oligonucleotide
  Antisense strand to SEQ ID NO: 1918142
ucucccagaucagucagca

SEQ ID NO: 1918144 - RNA, 19 nt, Artificial Sequence
  Description of Artificial Sequence: Synthetic oligonucleotide
  Sense strand starting at position 1353 of SEQ ID NO: 1879585
gguguaauagaaggguuau

SEQ ID NO: 1918145 - RNA, 19 nt, Artificial Sequence
  Description of Artificial Sequence: Synthetic oligonucleotide
  Antisense strand to SEQ ID NO: 1918144
auaacccuucuauuacacc

SEQ ID NO: 1918146 - RNA, 19 nt, Artificial Sequence
  Description of Artificial Sequence: Synthetic oligonucleotide
  Sense strand starting at position 1354 of SEQ ID NO: 1879585
guguaauagaaggguuaua

SEQ ID NO: 1918147 - RNA, 19 nt, Artificial Sequence
  Description of Artificial Sequence: Synthetic oligonucleotide
  Antisense strand to SEQ ID NO: 1918146
uauaacccuucuauuacac

SEQ ID NO: 1918148 - RNA, 19 nt, Artificial Sequence
  Description of Artificial Sequence: Synthetic oligonucleotide
  Sense strand starting at position 1478 of SEQ ID NO: 1879585
uuuggaggacucugaacuu

SEQ ID NO: 1918149 - RNA, 19 nt, Artificial Sequence
  Description of Artificial Sequence: Synthetic oligonucleotide
  Antisense strand to SEQ ID NO: 1918148
aaguucagaguccuccaaa

SEQ ID NO: 1918150 - RNA, 19 nt, Artificial Sequence
  Description of Artificial Sequence: Synthetic oligonucleotide
  Sense strand starting at position 2184 of SEQ ID NO: 1879585
auccaugaccgaugucaga

SEQ ID NO: 1918151 - RNA, 19 nt, Artificial Sequence
  Description of Artificial Sequence: Synthetic oligonucleotide
  Antisense strand to SEQ ID NO: 1918150
ucugacaucggucauggau

SEQ ID NO: 1918152 - RNA, 19 nt, Artificial Sequence
  Description of Artificial Sequence: Synthetic oligonucleotide
  Sense strand starting at position 2322 of SEQ ID NO: 1879585
gaccgcuuaccugaguuga

SEQ ID NO: 1918153 - RNA, 19 nt, Artificial Sequence
  Description of Artificial Sequence: Synthetic oligonucleotide
  Antisense strand to SEQ ID NO: 1918152
ucaacucagguaagcgguc

SEQ ID NO: 1918154 - RNA, 19 nt, Artificial Sequence
  Description of Artificial Sequence: Synthetic oligonucleotide
  Sense strand starting at position 2324 of SEQ ID NO: 1879585
ccgcuuaccugaguugaaa

SEQ ID NO: 1918155 - RNA, 19 nt, Artificial Sequence
  Description of Artificial Sequence: Synthetic oligonucleotide
  Antisense strand to SEQ ID NO: 1918154
uuucaacucagguaagcgg

SEQ ID NO: 1918156 - RNA, 19 nt, Artificial Sequence
  Description of Artificial Sequence: Synthetic oligonucleotide
  Sense strand starting at position 2333 of SEQ ID NO: 1879585
ugaguugaaauuggugaga

SEQ ID NO: 1918157 - RNA, 19 nt, Artificial Sequence
  Description of Artificial Sequence: Synthetic oligonucleotide
  Antisense strand to SEQ ID NO: 1918156
ucucaccaauuucaacuca

SEQ ID NO: 1918158 - RNA, 19 nt, Artificial Sequence
  Description of Artificial Sequence: Synthetic oligonucleotide
  Sense strand starting at position 2452 of SEQ ID NO: 1879585
ccggguucuuuggcaucaa

SEQ ID NO: 1918159 - RNA, 19 nt, Artificial Sequence
  Description of Artificial Sequence: Synthetic oligonucleotide
  Antisense strand to SEQ ID NO: 1918158
uugaugccaaagaacccgg

SEQ ID NO: 1918160 - RNA, 19 nt, Artificial Sequence
  Description of Artificial Sequence: Synthetic oligonucleotide
  Sense strand starting at position 2456 of SEQ ID NO: 1879585
guucuuuggcaucaaacgu

SEQ ID NO: 1918161 - RNA, 19 nt, Artificial Sequence
  Description of Artificial Sequence: Synthetic oligonucleotide
  Antisense strand to SEQ ID NO: 1918160
acguuugaugccaaagaac

SEQ ID NO: 1918162 - RNA, 19 nt, Artificial Sequence
  Description of Artificial Sequence: Synthetic oligonucleotide
  Sense strand starting at position 2633 of SEQ ID NO: 1879585
auuaguuaaaggugguuau

SEQ ID NO: 1918163 - RNA, 19 nt, Artificial Sequence
  Description of Artificial Sequence: Synthetic oligonucleotide
  Antisense strand to SEQ ID NO: 1918162
auaaccaccuuuaacuaau

SEQ ID NO: 1918164 - RNA, 19 nt, Artificial Sequence
  Description of Artificial Sequence: Synthetic oligonucleotide
  Sense strand starting at position 2912 of SEQ ID NO: 1879585
gugagaccaucucuaacaa

SEQ ID NO: 1918165 - RNA, 19 nt, Artificial Sequence
  Description of Artificial Sequence: Synthetic oligonucleotide
  Antisense strand to SEQ ID NO: 1918164
uuguuagagauggucucac

SEQ ID NO: 1918166 - RNA, 19 nt, Artificial Sequence
  Description of Artificial Sequence: Synthetic oligonucleotide
  Sense strand starting at position 3219 of SEQ ID NO: 1879585
cucaaucucuaggaaggau

SEQ ID NO: 1918167 - RNA, 19 nt, Artificial Sequence
  Description of Artificial Sequence: Synthetic oligonucleotide
  Antisense strand to SEQ ID NO: 1918166
auccuuccuagagauugag

SEQ ID NO: 1918168 - RNA, 19 nt, Artificial Sequence
  Description of Artificial Sequence: Synthetic oligonucleotide
  Sense strand starting at position 3255 of SEQ ID NO: 1879585
agcugaguucugugacagg

SEQ ID NO: 1918169 - RNA, 19 nt, Artificial Sequence
  Description of Artificial Sequence: Synthetic oligonucleotide
  Antisense strand to SEQ ID NO: 1918168
ccugucacagaacucagcu

SEQ ID NO: 1918170 - RNA, 19 nt, Artificial Sequence
  Description of Artificial Sequence: Synthetic oligonucleotide
  Sense strand starting at position 3260 of SEQ ID NO: 1879585
aguucugugacaggacuaa

SEQ ID NO: 1918171 - RNA, 19 nt, Artificial Sequence
  Description of Artificial Sequence: Synthetic oligonucleotide
  Antisense strand to SEQ ID NO: 1918170
uuaguccugucacagaacu

SEQ ID NO: 1918172 - RNA, 19 nt, Artificial Sequence
  Description of Artificial Sequence: Synthetic oligonucleotide
  Sense strand starting at position 3358 of SEQ ID NO: 1879585
ugcagaaauuguguggaaa

SEQ ID NO: 1918173 - RNA, 19 nt, Artificial Sequence
  Description of Artificial Sequence: Synthetic oligonucleotide
  Antisense strand to SEQ ID NO: 1918172
uuuccacacaauuucugca

SEQ ID NO: 1918174 - RNA, 19 nt, Artificial Sequence
  Description of Artificial Sequence: Synthetic oligonucleotide
  Sense strand starting at position 3359 of SEQ ID NO: 1879585
gcagaaauuguguggaaag

SEQ ID NO: 1918175 - RNA, 19 nt, Artificial Sequence
  Description of Artificial Sequence: Synthetic oligonucleotide
  Antisense strand to SEQ ID NO: 1918174
cuuuccacacaauuucugc

SEQ ID NO: 1918176 - RNA, 19 nt, Artificial Sequence
  Description of Artificial Sequence: Synthetic oligonucleotide
  Sense strand starting at position 3361 of SEQ ID NO: 1879585
agaaauuguguggaaaguu

SEQ ID NO: 1918177 - RNA, 19 nt, Artificial Sequence
  Description of Artificial Sequence: Synthetic oligonucleotide
  Antisense strand to SEQ ID NO: 1918176
aacuuuccacacaauuucu

SEQ ID NO: 1918178 - RNA, 19 nt, Artificial Sequence
  Description of Artificial Sequence: Synthetic oligonucleotide
  Sense strand starting at position 3425 of SEQ ID NO: 1879585
uacagaacucucuguggau

SEQ ID NO: 1918179 - RNA, 19 nt, Artificial Sequence
  Description of Artificial Sequence: Synthetic oligonucleotide
  Antisense strand to SEQ ID NO: 1918178
auccacagagaguucugua

SEQ ID NO: 1918180 - RNA, 19 nt, Artificial Sequence
  Description of Artificial Sequence: Synthetic oligonucleotide
  Sense strand starting at position 3426 of SEQ ID NO: 1879585
acagaacucucuguggauc

SEQ ID NO: 1918181 - RNA, 19 nt, Artificial Sequence
  Description of Artificial Sequence: Synthetic oligonucleotide
  Antisense strand to SEQ ID NO: 1918180
gauccacagagaguucugu

SEQ ID NO: 1918182 - RNA, 19 nt, Artificial Sequence
  Description of Artificial Sequence: Synthetic oligonucleotide
  Sense strand starting at position 3427 of SEQ ID NO: 1879585
cagaacucucuguggauca

SEQ ID NO: 1918183 - RNA, 19 nt, Artificial Sequence
  Description of Artificial Sequence: Synthetic oligonucleotide
  Antisense strand to SEQ ID NO: 1918182
ugauccacagagaguucug

SEQ ID NO: 1918184 - RNA, 19 nt, Artificial Sequence
  Description of Artificial Sequence: Synthetic oligonucleotide
  Sense strand starting at position 3550 of SEQ ID NO: 1879585
aagagugaauauuaucaug

SEQ ID NO: 1918185 - RNA, 19 nt, Artificial Sequence
  Description of Artificial Sequence: Synthetic oligonucleotide
  Antisense strand to SEQ ID NO: 1918184
caugauaauauucacucuu

SEQ ID NO: 1918186 - RNA, 19 nt, Artificial Sequence
  Description of Artificial Sequence: Synthetic oligonucleotide
  Sense strand starting at position 3552 of SEQ ID NO: 1879585
gagugaauauuaucauguc

SEQ ID NO: 1918187 - RNA, 19 nt, Artificial Sequence
  Description of Artificial Sequence: Synthetic oligonucleotide
  Antisense strand to SEQ ID NO: 1918186
gacaugauaauauucacuc

SEQ ID NO: 1918188 - RNA, 19 nt, Artificial Sequence
  Description of Artificial Sequence: Synthetic oligonucleotide
  Sense strand starting at position 3882 of SEQ ID NO: 1879585
caggaaggacuaugucuuu

SEQ ID NO: 1918189 - RNA, 19 nt, Artificial Sequence
  Description of Artificial Sequence: Synthetic oligonucleotide
  Antisense strand to SEQ ID NO: 1918188
aaagacauaguccuuccug

SEQ ID NO: 1918190 - RNA, 19 nt, Artificial Sequence
  Description of Artificial Sequence: Synthetic oligonucleotide
  Sense strand starting at position 90 of SEQ ID NO: 1879586
guguguacacugugucuaa

SEQ ID NO: 1918191 - RNA, 19 nt, Artificial Sequence
  Description of Artificial Sequence: Synthetic oligonucleotide
  Antisense strand to SEQ ID NO: 1918190
uuagacacaguguacacac

SEQ ID NO: 1918192 - RNA, 19 nt, Artificial Sequence
  Description of Artificial Sequence: Synthetic oligonucleotide
  Sense strand starting at position 91 of SEQ ID NO: 1879586
uguguacacugugucuaau

SEQ ID NO: 1918193 - RNA, 19 nt, Artificial Sequence
  Description of Artificial Sequence: Synthetic oligonucleotide
  Antisense strand to SEQ ID NO: 1918192
auuagacacaguguacaca

SEQ ID NO: 1918194 - RNA, 19 nt, Artificial Sequence
  Description of Artificial Sequence: Synthetic oligonucleotide
  Sense strand starting at position 644 of SEQ ID NO: 1879586
acuugacuuuagggagacu

SEQ ID NO: 1918195 - RNA, 19 nt, Artificial Sequence
  Description of Artificial Sequence: Synthetic oligonucleotide
  Antisense strand to SEQ ID NO: 1918194
agucucccuaaagucaagu

SEQ ID NO: 1918196 - RNA, 19 nt, Artificial Sequence
  Description of Artificial Sequence: Synthetic oligonucleotide
  Sense strand starting at position 772 of SEQ ID NO: 1879586
ugugauugauggccucuuu

SEQ ID NO: 1918197 - RNA, 19 nt, Artificial Sequence
  Description of Artificial Sequence: Synthetic oligonucleotide
  Antisense strand to SEQ ID NO: 1918196
aaagaggccaucaaucaca

SEQ ID NO: 1918198 - RNA, 19 nt, Artificial Sequence
  Description of Artificial Sequence: Synthetic oligonucleotide
  Sense strand starting at position 1391 of SEQ ID NO: 1879586
uugguuggcucagggacau

SEQ ID NO: 1918199 - RNA, 19 nt, Artificial Sequence
  Description of Artificial Sequence: Synthetic oligonucleotide
  Antisense strand to SEQ ID NO: 1918198
augucccugagccaaccaa

SEQ ID NO: 1918200 - RNA, 19 nt, Artificial Sequence
  Description of Artificial Sequence: Synthetic oligonucleotide
  Sense strand starting at position 1401 of SEQ ID NO: 1879586
cagggacaucuguggguaa

SEQ ID NO: 1918201 - RNA, 19 nt, Artificial Sequence
  Description of Artificial Sequence: Synthetic oligonucleotide
  Antisense strand to SEQ ID NO: 1918200
uuacccacagaugucccug

SEQ ID NO: 1918202 - RNA, 19 nt, Artificial Sequence
  Description of Artificial Sequence: Synthetic oligonucleotide
  Sense strand starting at position 2217 of SEQ ID NO: 1879586
acugaaugagagugaaguu

SEQ ID NO: 1918203 - RNA, 19 nt, Artificial Sequence
  Description of Artificial Sequence: Synthetic oligonucleotide
  Antisense strand to SEQ ID NO: 1918202
aacuucacucucauucagu

SEQ ID NO: 1918204 - RNA, 19 nt, Artificial Sequence
  Description of Artificial Sequence: Synthetic oligonucleotide
  Sense strand starting at position 2400 of SEQ ID NO: 1879586
gggaccucaucccauuagu

SEQ ID NO: 1918205 - RNA, 19 nt, Artificial Sequence
  Description of Artificial Sequence: Synthetic oligonucleotide
  Antisense strand to SEQ ID NO: 1918204
acuaaugggaugagguccc

SEQ ID NO: 1918206 - RNA, 19 nt, Artificial Sequence
  Description of Artificial Sequence: Synthetic oligonucleotide
  Sense strand starting at position 2477 of SEQ ID NO: 1879586
cucuauucuuauugggaca

SEQ ID NO: 1918207 - RNA, 19 nt, Artificial Sequence
  Description of Artificial Sequence: Synthetic oligonucleotide
  Antisense strand to SEQ ID NO: 1918206
ugucccaauaagaauagag

SEQ ID NO: 1918208 - RNA, 19 nt, Artificial Sequence
  Description of Artificial Sequence: Synthetic oligonucleotide
  Sense strand starting at position 2479 of SEQ ID NO: 1879586
cuauucuuauugggacaau

SEQ ID NO: 1918209 - RNA, 19 nt, Artificial Sequence
  Description of Artificial Sequence: Synthetic oligonucleotide
  Antisense strand to SEQ ID NO: 1918208
auugucccaauaagaauag

SEQ ID NO: 1918210 - RNA, 19 nt, Artificial Sequence
  Description of Artificial Sequence: Synthetic oligonucleotide
  Sense strand starting at position 2668 of SEQ ID NO: 1879586
aagagcugacuuugagacu

SEQ ID NO: 1918211 - RNA, 19 nt, Artificial Sequence
  Description of Artificial Sequence: Synthetic oligonucleotide
  Antisense strand to SEQ ID NO: 1918210
agucucaaagucagcucuu

SEQ ID NO: 1918212 - RNA, 19 nt, Artificial Sequence
  Description of Artificial Sequence: Synthetic oligonucleotide
  Sense strand starting at position 2684 of SEQ ID NO: 1879586
acuugcuauuucuggagga

SEQ ID NO: 1918213 - RNA, 19 nt, Artificial Sequence
  Description of Artificial Sequence: Synthetic oligonucleotide
  Antisense strand to SEQ ID NO: 1918212
uccuccagaaauagcaagu

SEQ ID NO: 1918214 - RNA, 19 nt, Artificial Sequence
  Description of Artificial Sequence: Synthetic oligonucleotide
  Sense strand starting at position 2685 of SEQ ID NO: 1879586
cuugcuauuucuggaggau

SEQ ID NO: 1918215 - RNA, 19 nt, Artificial Sequence
  Description of Artificial Sequence: Synthetic oligonucleotide
  Antisense strand to SEQ ID NO: 1918214
auccuccagaaauagcaag

SEQ ID NO: 1918216 - RNA, 19 nt, Artificial Sequence
  Description of Artificial Sequence: Synthetic oligonucleotide
  Sense strand starting at position 2735 of SEQ ID NO: 1879586
gagcauagcuuaggaaaga

SEQ ID NO: 1918217 - RNA, 19 nt, Artificial Sequence
  Description of Artificial Sequence: Synthetic oligonucleotide
  Antisense strand to SEQ ID NO: 1918216
ucuuuccuaagcuaugcuc

SEQ ID NO: 1918218 - RNA, 19 nt, Artificial Sequence
  Description of Artificial Sequence: Synthetic oligonucleotide
  Sense strand starting at position 2736 of SEQ ID NO: 1879586
agcauagcuuaggaaagau

SEQ ID NO: 1918219 - RNA, 19 nt, Artificial Sequence
  Description of Artificial Sequence: Synthetic oligonucleotide
  Antisense strand to SEQ ID NO: 1918218
aucuuuccuaagcuaugcu

SEQ ID NO: 1918220 - RNA, 19 nt, Artificial Sequence
  Description of Artificial Sequence: Synthetic oligonucleotide
  Sense strand starting at position 2766 of SEQ ID NO: 1879586
cagggauguaugggaguau

SEQ ID NO: 1918221 - RNA, 19 nt, Artificial Sequence
  Description of Artificial Sequence: Synthetic oligonucleotide
  Antisense strand to SEQ ID NO: 1918220
auacucccauacaucccug

SEQ ID NO: 1918222 - RNA, 19 nt, Artificial Sequence
  Description of Artificial Sequence: Synthetic oligonucleotide
  Sense strand starting at position 2770 of SEQ ID NO: 1879586
gauguaugggaguaucugu

SEQ ID NO: 1918223 - RNA, 19 nt, Artificial Sequence
  Description of Artificial Sequence: Synthetic oligonucleotide
  Antisense strand to SEQ ID NO: 1918222
acagauacucccauacauc

SEQ ID NO: 1918224 - RNA, 19 nt, Artificial Sequence
  Description of Artificial Sequence: Synthetic oligonucleotide
  Sense strand starting at position 2777 of SEQ ID NO: 1879586
gggaguaucugugagagac

SEQ ID NO: 1918225 - RNA, 19 nt, Artificial Sequence
  Description of Artificial Sequence: Synthetic oligonucleotide
  Antisense strand to SEQ ID NO: 1918224
gucucucacagauacuccc

SEQ ID NO: 1918226 - RNA, 19 nt, Artificial Sequence
  Description of Artificial Sequence: Synthetic oligonucleotide
  Sense strand starting at position 2779 of SEQ ID NO: 1879586
gaguaucugugagagacaa

SEQ ID NO: 1918227 - RNA, 19 nt, Artificial Sequence
  Description of Artificial Sequence: Synthetic oligonucleotide
  Antisense strand to SEQ ID NO: 1918226
uugucucucacagauacuc

SEQ ID NO: 1918228 - RNA, 19 nt, Artificial Sequence
  Description of Artificial Sequence: Synthetic oligonucleotide
  Sense strand starting at position 2819 of SEQ ID NO: 1879586
gggagucucguguggcaga

SEQ ID NO: 1918229 - RNA, 19 nt, Artificial Sequence
  Description of Artificial Sequence: Synthetic oligonucleotide
  Antisense strand to SEQ ID NO: 1918228
ucugccacacgagacuccc

SEQ ID NO: 1918230 - RNA, 19 nt, Artificial Sequence
  Description of Artificial Sequence: Synthetic oligonucleotide
  Sense strand starting at position 3359 of SEQ ID NO: 1879586
agcugcguguccuugcaua

SEQ ID NO: 1918231 - RNA, 19 nt, Artificial Sequence
  Description of Artificial Sequence: Synthetic oligonucleotide
  Antisense strand to SEQ ID NO: 1918230
uaugcaaggacacgcagcu

SEQ ID NO: 1918232 - RNA, 19 nt, Artificial Sequence
  Description of Artificial Sequence: Synthetic oligonucleotide
  Sense strand starting at position 3711 of SEQ ID NO: 1879586
cuggauuagugaccuuaua

SEQ ID NO: 1918233 - RNA, 19 nt, Artificial Sequence
  Description of Artificial Sequence: Synthetic oligonucleotide
  Antisense strand to SEQ ID NO: 1918232
uauaaggucacuaauccag

SEQ ID NO: 1918234 - RNA, 19 nt, Artificial Sequence
  Description of Artificial Sequence: Synthetic oligonucleotide
  Sense strand starting at position 3901 of SEQ ID NO: 1879586
uuguuuaagccauguagug

SEQ ID NO: 1918235 - RNA, 19 nt, Artificial Sequence
  Description of Artificial Sequence: Synthetic oligonucleotide
  Antisense strand to SEQ ID NO: 1918234
cacuacauggcuuaaacaa

SEQ ID NO: 1918236 - RNA, 19 nt, Artificial Sequence
  Description of Artificial Sequence: Synthetic oligonucleotide
  Sense strand starting at position 225 of SEQ ID NO: 1879589
cauuaagagcgauguuaag

SEQ ID NO: 1918237 - RNA, 19 nt, Artificial Sequence
  Description of Artificial Sequence: Synthetic oligonucleotide
  Antisense strand to SEQ ID NO: 1918236
cuuaacaucgcucuuaaug

SEQ ID NO: 1918238 - RNA, 19 nt, Artificial Sequence
  Description of Artificial Sequence: Synthetic oligonucleotide
  Sense strand starting at position 231 of SEQ ID NO: 1879589
gagcgauguuaagugugaa

SEQ ID NO: 1918239 - RNA, 19 nt, Artificial Sequence
  Description of Artificial Sequence: Synthetic oligonucleotide
  Antisense strand to SEQ ID NO: 1918238
uucacacuuaacaucgcuc

SEQ ID NO: 1918240 - RNA, 19 nt, Artificial Sequence
  Description of Artificial Sequence: Synthetic oligonucleotide
  Sense strand starting at position 232 of SEQ ID NO: 1879589
agcgauguuaagugugaac

SEQ ID NO: 1918241 - RNA, 19 nt, Artificial Sequence
  Description of Artificial Sequence: Synthetic oligonucleotide
  Antisense strand to SEQ ID NO: 1918240
guucacacuuaacaucgcu

SEQ ID NO: 1918242 - RNA, 19 nt, Artificial Sequence
  Description of Artificial Sequence: Synthetic oligonucleotide
  Sense strand starting at position 234 of SEQ ID NO: 1879589
cgauguuaagugugaacca

SEQ ID NO: 1918243 - RNA, 19 nt, Artificial Sequence
  Description of Artificial Sequence: Synthetic oligonucleotide
  Antisense strand to SEQ ID NO: 1918242
ugguucacacuuaacaucg

SEQ ID NO: 1918244 - RNA, 19 nt, Artificial Sequence
  Description of Artificial Sequence: Synthetic oligonucleotide
  Sense strand starting at position 241 of SEQ ID NO: 1879589
aagugugaaccauguacca

SEQ ID NO: 1918245 - RNA, 19 nt, Artificial Sequence
  Description of Artificial Sequence: Synthetic oligonucleotide
  Antisense strand to SEQ ID NO: 1918244
ugguacaugguucacacuu

SEQ ID NO: 1918246 - RNA, 19 nt, Artificial Sequence
  Description of Artificial Sequence: Synthetic oligonucleotide
  Sense strand starting at position 243 of SEQ ID NO: 1879589
gugugaaccauguaccauc

SEQ ID NO: 1918247 - RNA, 19 nt, Artificial Sequence
  Description of Artificial Sequence: Synthetic oligonucleotide
  Antisense strand to SEQ ID NO: 1918246
gaugguacaugguucacac

SEQ ID NO: 1918248 - RNA, 19 nt, Artificial Sequence
  Description of Artificial Sequence: Synthetic oligonucleotide
  Sense strand starting at position 503 of SEQ ID NO: 1879589
agucccaagucaucagaua

SEQ ID NO: 1918249 - RNA, 19 nt, Artificial Sequence
  Description of Artificial Sequence: Synthetic oligonucleotide
  Antisense strand to SEQ ID NO: 1918248
uaucugaugacuugggacu

SEQ ID NO: 1918250 - RNA, 19 nt, Artificial Sequence
  Description of Artificial Sequence: Synthetic oligonucleotide
  Sense strand starting at position 504 of SEQ ID NO: 1879589
gucccaagucaucagauaa

SEQ ID NO: 1918251 - RNA, 19 nt, Artificial Sequence
  Description of Artificial Sequence: Synthetic oligonucleotide
  Antisense strand to SEQ ID NO: 1918250
uuaucugaugacuugggac

SEQ ID NO: 1918252 - RNA, 19 nt, Artificial Sequence
  Description of Artificial Sequence: Synthetic oligonucleotide
  Sense strand starting at position 539 of SEQ ID NO: 1879589
acaauuugucgugggcuuu

SEQ ID NO: 1918253 - RNA, 19 nt, Artificial Sequence
  Description of Artificial Sequence: Synthetic oligonucleotide
  Antisense strand to SEQ ID NO: 1918252
aaagcccacgacaaauugu

SEQ ID NO: 1918254 - RNA, 19 nt, Artificial Sequence
  Description of Artificial Sequence: Synthetic oligonucleotide
  Sense strand starting at position 849 of SEQ ID NO: 1879589
cuguaacugugccuaugaa

SEQ ID NO: 1918255 - RNA, 19 nt, Artificial Sequence
  Description of Artificial Sequence: Synthetic oligonucleotide
  Antisense strand to SEQ ID NO: 1918254
uucauaggcacaguuacag

SEQ ID NO: 1918256 - RNA, 19 nt, Artificial Sequence
  Description of Artificial Sequence: Synthetic oligonucleotide
  Sense strand starting at position 850 of SEQ ID NO: 1879589
uguaacugugccuaugaau

SEQ ID NO: 1918257 - RNA, 19 nt, Artificial Sequence
  Description of Artificial Sequence: Synthetic oligonucleotide
  Antisense strand to SEQ ID NO: 1918256
auucauaggcacaguuaca

SEQ ID NO: 1918258 - RNA, 19 nt, Artificial Sequence
  Description of Artificial Sequence: Synthetic oligonucleotide
  Sense strand starting at position 926 of SEQ ID NO: 1879589
ccagacaucuuagaaagau

SEQ ID NO: 1918259 - RNA, 19 nt, Artificial Sequence
  Description of Artificial Sequence: Synthetic oligonucleotide
  Antisense strand to SEQ ID NO: 1918258
aucuuucuaagaugucugg

SEQ ID NO: 1918260 - RNA, 19 nt, Artificial Sequence
  Description of Artificial Sequence: Synthetic oligonucleotide
  Sense strand starting at position 994 of SEQ ID NO: 1879589
agacuugacuaauggagaa

SEQ ID NO: 1918261 - RNA, 19 nt, Artificial Sequence
  Description of Artificial Sequence: Synthetic oligonucleotide
  Antisense strand to SEQ ID NO: 1918260
uucuccauuagucaagucu

SEQ ID NO: 1918262 - RNA, 19 nt, Artificial Sequence
  Description of Artificial Sequence: Synthetic oligonucleotide
  Sense strand starting at position 1056 of SEQ ID NO: 1879589
ucagaacauucugcugaca

SEQ ID NO: 1918263 - RNA, 19 nt, Artificial Sequence
  Description of Artificial Sequence: Synthetic oligonucleotide
  Antisense strand to SEQ ID NO: 1918262
ugucagcagaauguucuga

SEQ ID NO: 1918264 - RNA, 19 nt, Artificial Sequence
  Description of Artificial Sequence: Synthetic oligonucleotide
  Sense strand starting at position 1097 of SEQ ID NO: 1879589
acaugcaugucuuucuuua

SEQ ID NO: 1918265 - RNA, 19 nt, Artificial Sequence
  Description of Artificial Sequence: Synthetic oligonucleotide
  Antisense strand to SEQ ID NO: 1918264
uaaagaaagacaugcaugu

SEQ ID NO: 1918266 - RNA, 19 nt, Artificial Sequence
  Description of Artificial Sequence: Synthetic oligonucleotide
  Sense strand starting at position 1101 of SEQ ID NO: 1879589
gcaugucuuucuuuaugaa

SEQ ID NO: 1918267 - RNA, 19 nt, Artificial Sequence
  Description of Artificial Sequence: Synthetic oligonucleotide
  Antisense strand to SEQ ID NO: 1918266
uucauaaagaaagacaugc

SEQ ID NO: 1918268 - RNA, 19 nt, Artificial Sequence
  Description of Artificial Sequence: Synthetic oligonucleotide
  Sense strand starting at position 1311 of SEQ ID NO: 1879589
cacugugaugacugaucuu

SEQ ID NO: 1918269 - RNA, 19 nt, Artificial Sequence
  Description of Artificial Sequence: Synthetic oligonucleotide
  Antisense strand to SEQ ID NO: 1918268
aagaucagucaucacagug

SEQ ID NO: 1918270 - RNA, 19 nt, Artificial Sequence
  Description of Artificial Sequence: Synthetic oligonucleotide
  Sense strand starting at position 1317 of SEQ ID NO: 1879589
gaugacugaucuucugguu

SEQ ID NO: 1918271 - RNA, 19 nt, Artificial Sequence
  Description of Artificial Sequence: Synthetic oligonucleotide
  Antisense strand to SEQ ID NO: 1918270
aaccagaagaucagucauc

SEQ ID NO: 1918272 - RNA, 19 nt, Artificial Sequence
  Description of Artificial Sequence: Synthetic oligonucleotide
  Sense strand starting at position 1421 of SEQ ID NO: 1879589
acaauuuguugcguuaaua

SEQ ID NO: 1918273 - RNA, 19 nt, Artificial Sequence
  Description of Artificial Sequence: Synthetic oligonucleotide
  Antisense strand to SEQ ID NO: 1918272
uauuaacgcaacaaauugu

SEQ ID NO: 1918274 - RNA, 19 nt, Artificial Sequence
  Description of Artificial Sequence: Synthetic oligonucleotide
  Sense strand starting at position 1431 of SEQ ID NO: 1879589
gcguuaauauauuccacau

SEQ ID NO: 1918275 - RNA, 19 nt, Artificial Sequence
  Description of Artificial Sequence: Synthetic oligonucleotide
  Antisense strand to SEQ ID NO: 1918274
auguggaauauauuaacgc

SEQ ID NO: 1918276 - RNA, 19 nt, Artificial Sequence
  Description of Artificial Sequence: Synthetic oligonucleotide
  Sense strand starting at position 1450 of SEQ ID NO: 1879589
guagcuucuucuccgagaa

SEQ ID NO: 1918277 - RNA, 19 nt, Artificial Sequence
  Description of Artificial Sequence: Synthetic oligonucleotide
  Antisense strand to SEQ ID NO: 1918276
uucucggagaagaagcuac

SEQ ID NO: 1918278 - RNA, 19 nt, Artificial Sequence
  Description of Artificial Sequence: Synthetic oligonucleotide
  Sense strand starting at position 2578 of SEQ ID NO: 1879589
auacguauaugugucuaua

SEQ ID NO: 1918279 - RNA, 19 nt, Artificial Sequence
  Description of Artificial Sequence: Synthetic oligonucleotide
  Antisense strand to SEQ ID NO: 1918278
uauagacacauauacguau

SEQ ID NO: 1918280 - RNA, 19 nt, Artificial Sequence
  Description of Artificial Sequence: Synthetic oligonucleotide
  Sense strand starting at position 2580 of SEQ ID NO: 1879589
acguauaugugucuauaua

SEQ ID NO: 1918281 - RNA, 19 nt, Artificial Sequence
  Description of Artificial Sequence: Synthetic oligonucleotide
  Antisense strand to SEQ ID NO: 1918280
uauauagacacauauacgu

SEQ ID NO: 1918282 - RNA, 19 nt, Artificial Sequence
  Description of Artificial Sequence: Synthetic oligonucleotide
  Sense strand starting at position 2581 of SEQ ID NO: 1879589
cguauaugugucuauauac

SEQ ID NO: 1918283 - RNA, 19 nt, Artificial Sequence
  Description of Artificial Sequence: Synthetic oligonucleotide
  Antisense strand to SEQ ID NO: 1918282
guauauagacacauauacg

SEQ ID NO: 1918284 - RNA, 19 nt, Artificial Sequence
  Description of Artificial Sequence: Synthetic oligonucleotide
  Sense strand starting at position 2693 of SEQ ID NO: 1879589
uguguauacaucuauacgu

SEQ ID NO: 1918285 - RNA, 19 nt, Artificial Sequence
  Description of Artificial Sequence: Synthetic oligonucleotide
  Antisense strand to SEQ ID NO: 1918284
acguauagauguauacaca

SEQ ID NO: 1918286 - RNA, 19 nt, Artificial Sequence
  Description of Artificial Sequence: Synthetic oligonucleotide
  Sense strand starting at position 2695 of SEQ ID NO: 1879589
uguauacaucuauacguau

SEQ ID NO: 1918287 - RNA, 19 nt, Artificial Sequence
  Description of Artificial Sequence: Synthetic oligonucleotide
  Antisense strand to SEQ ID NO: 1918286
auacguauagauguauaca

SEQ ID NO: 1918288 - RNA, 19 nt, Artificial Sequence
  Description of Artificial Sequence: Synthetic oligonucleotide
  Sense strand starting at position 2698 of SEQ ID NO: 1879589
auacaucuauacguaugua

SEQ ID NO: 1918289 - RNA, 19 nt, Artificial Sequence
  Description of Artificial Sequence: Synthetic oligonucleotide
  Antisense strand to SEQ ID NO: 1918288
uacauacguauagauguau

SEQ ID NO: 1918290 - RNA, 19 nt, Artificial Sequence
  Description of Artificial Sequence: Synthetic oligonucleotide
  Sense strand starting at position 2763 of SEQ ID NO: 1879589
cguguauacguauacacau

SEQ ID NO: 1918291 - RNA, 19 nt, Artificial Sequence
  Description of Artificial Sequence: Synthetic oligonucleotide
  Antisense strand to SEQ ID NO: 1918290
auguguauacguauacacg

SEQ ID NO: 1918292 - RNA, 19 nt, Artificial Sequence
  Description of Artificial Sequence: Synthetic oligonucleotide
  Sense strand starting at position 3502 of SEQ ID NO: 1879589
ucagaauuacuuggcuuua

SEQ ID NO: 1918293 - RNA, 19 nt, Artificial Sequence
  Description of Artificial Sequence: Synthetic oligonucleotide
  Antisense strand to SEQ ID NO: 1918292
uaaagccaaguaauucuga

SEQ ID NO: 1918294 - RNA, 19 nt, Artificial Sequence
  Description of Artificial Sequence: Synthetic oligonucleotide
  Sense strand starting at position 3504 of SEQ ID NO: 1879589
agaauuacuuggcuuuauc

SEQ ID NO: 1918295 - RNA, 19 nt, Artificial Sequence
  Description of Artificial Sequence: Synthetic oligonucleotide
  Antisense strand to SEQ ID NO: 1918294
gauaaagccaaguaauucu

SEQ ID NO: 1918296 - RNA, 19 nt, Artificial Sequence
  Description of Artificial Sequence: Synthetic oligonucleotide
  Sense strand starting at position 3543 of SEQ ID NO: 1879589
guggcucugaauuguagaa

SEQ ID NO: 1918297 - RNA, 19 nt, Artificial Sequence
  Description of Artificial Sequence: Synthetic oligonucleotide
  Antisense strand to SEQ ID NO: 1918296
uucuacaauucagagccac

SEQ ID NO: 1918298 - RNA, 19 nt, Artificial Sequence
  Description of Artificial Sequence: Synthetic oligonucleotide
  Sense strand starting at position 3565 of SEQ ID NO: 1879589
accucauaagcggaagauu

SEQ ID NO: 1918299 - RNA, 19 nt, Artificial Sequence
  Description of Artificial Sequence: Synthetic oligonucleotide
  Antisense strand to SEQ ID NO: 1918298
aaucuuccgcuuaugaggu

SEQ ID NO: 1918300 - RNA, 19 nt, Artificial Sequence
  Description of Artificial Sequence: Synthetic oligonucleotide
  Sense strand starting at position 3574 of SEQ ID NO: 1879589
gcggaagauuugccgccau

SEQ ID NO: 1918301 - RNA, 19 nt, Artificial Sequence
  Description of Artificial Sequence: Synthetic oligonucleotide
  Antisense strand to SEQ ID NO: 1918300
auggcggcaaaucuuccgc

SEQ ID NO: 1918302 - RNA, 19 nt, Artificial Sequence
  Description of Artificial Sequence: Synthetic oligonucleotide
  Sense strand starting at position 3718 of SEQ ID NO: 1879589
agagcucuccuccaaaggu

SEQ ID NO: 1918303 - RNA, 19 nt, Artificial Sequence
  Description of Artificial Sequence: Synthetic oligonucleotide
  Antisense strand to SEQ ID NO: 1918302
accuuuggaggagagcucu

SEQ ID NO: 1918304 - RNA, 19 nt, Artificial Sequence
  Description of Artificial Sequence: Synthetic oligonucleotide
  Sense strand starting at position 3817 of SEQ ID NO: 1879589
gaguaagagucccauuucu

SEQ ID NO: 1918305 - RNA, 19 nt, Artificial Sequence
  Description of Artificial Sequence: Synthetic oligonucleotide
  Antisense strand to SEQ ID NO: 1918304
agaaaugggacucuuacuc

SEQ ID NO: 1918306 - RNA, 19 nt, Artificial Sequence
  Description of Artificial Sequence: Synthetic oligonucleotide
  Sense strand starting at position 3875 of SEQ ID NO: 1879589
cccaaagugucuccuuuau

SEQ ID NO: 1918307 - RNA, 19 nt, Artificial Sequence
  Description of Artificial Sequence: Synthetic oligonucleotide
  Antisense strand to SEQ ID NO: 1918306
auaaaggagacacuuuggg

SEQ ID NO: 1918308 - RNA, 19 nt, Artificial Sequence
  Description of Artificial Sequence: Synthetic oligonucleotide
  Sense strand starting at position 3879 of SEQ ID NO: 1879589
aagugucuccuuuauggau

SEQ ID NO: 1918309 - RNA, 19 nt, Artificial Sequence
  Description of Artificial Sequence: Synthetic oligonucleotide
  Antisense strand to SEQ ID NO: 1918308
auccauaaaggagacacuu

SEQ ID NO: 1918310 - RNA, 19 nt, Artificial Sequence
  Description of Artificial Sequence: Synthetic oligonucleotide
  Sense strand starting at position 3920 of SEQ ID NO: 1879589
gccugaguuuagcuuuaca

SEQ ID NO: 1918311 - RNA, 19 nt, Artificial Sequence
  Description of Artificial Sequence: Synthetic oligonucleotide
  Antisense strand to SEQ ID NO: 1918310
uguaaagcuaaacucaggc

SEQ ID NO: 1918312 - RNA, 19 nt, Artificial Sequence
  Description of Artificial Sequence: Synthetic oligonucleotide
  Sense strand starting at position 3923 of SEQ ID NO: 1879589
ugaguuuagcuuuacauuc

SEQ ID NO: 1918313 - RNA, 19 nt, Artificial Sequence
  Description of Artificial Sequence: Synthetic oligonucleotide
  Antisense strand to SEQ ID NO: 1918312
gaauguaaagcuaaacuca

SEQ ID NO: 1918314 - RNA, 19 nt, Artificial Sequence
  Description of Artificial Sequence: Synthetic oligonucleotide
  Sense strand starting at position 3941 of SEQ ID NO: 1879589
caagccauugaugguaauu

SEQ ID NO: 1918315 - RNA, 19 nt, Artificial Sequence
  Description of Artificial Sequence: Synthetic oligonucleotide
  Antisense strand to SEQ ID NO: 1918314
aauuaccaucaauggcuug

SEQ ID NO: 1918316 - RNA, 19 nt, Artificial Sequence
  Description of Artificial Sequence: Synthetic oligonucleotide
  Sense strand starting at position 13 of SEQ ID NO: 1879590
gaguaauagcgcccuuugu

SEQ ID NO: 1918317 - RNA, 19 nt, Artificial Sequence
  Description of Artificial Sequence: Synthetic oligonucleotide
  Antisense strand to SEQ ID NO: 1918316
acaaagggcgcuauuacuc

SEQ ID NO: 1918318 - RNA, 19 nt, Artificial Sequence
  Description of Artificial Sequence: Synthetic oligonucleotide
  Sense strand starting at position 14 of SEQ ID NO: 1879590
aguaauagcgcccuuugua

SEQ ID NO: 1918319 - RNA, 19 nt, Artificial Sequence
  Description of Artificial Sequence: Synthetic oligonucleotide
  Antisense strand to SEQ ID NO: 1918318
uacaaagggcgcuauuacu

SEQ ID NO: 1918320 - RNA, 19 nt, Artificial Sequence
  Description of Artificial Sequence: Synthetic oligonucleotide
  Sense strand starting at position 17 of SEQ ID NO: 1879590
aauagcgcccuuuguagaa

SEQ ID NO: 1918321 - RNA, 19 nt, Artificial Sequence
  Description of Artificial Sequence: Synthetic oligonucleotide
  Antisense strand to SEQ ID NO: 1918320
uucuacaaagggcgcuauu

SEQ ID NO: 1918322 - RNA, 19 nt, Artificial Sequence
  Description of Artificial Sequence: Synthetic oligonucleotide
  Sense strand starting at position 21 of SEQ ID NO: 1879590
gcgcccuuuguagaaacaa

SEQ ID NO: 1918323 - RNA, 19 nt, Artificial Sequence
  Description of Artificial Sequence: Synthetic oligonucleotide
  Antisense strand to SEQ ID NO: 1918322
uuguuucuacaaagggcgc

SEQ ID NO: 1918324 - RNA, 19 nt, Artificial Sequence
  Description of Artificial Sequence: Synthetic oligonucleotide
  Sense strand starting at position 101 of SEQ ID NO: 1879590
gggcaauccuaguaacaau

SEQ ID NO: 1918325 - RNA, 19 nt, Artificial Sequence
  Description of Artificial Sequence: Synthetic oligonucleotide
  Antisense strand to SEQ ID NO: 1918324
auuguuacuaggauugccc

SEQ ID NO: 1918326 - RNA, 19 nt, Artificial Sequence
  Description of Artificial Sequence: Synthetic oligonucleotide
  Sense strand starting at position 111 of SEQ ID NO: 1879590
aguaacaauuucccgugua

SEQ ID NO: 1918327 - RNA, 19 nt, Artificial Sequence
  Description of Artificial Sequence: Synthetic oligonucleotide
  Antisense strand to SEQ ID NO: 1918326
uacacgggaaauuguuacu

SEQ ID NO: 1918328 - RNA, 19 nt, Artificial Sequence
  Description of Artificial Sequence: Synthetic oligonucleotide
  Sense strand starting at position 112 of SEQ ID NO: 1879590
guaacaauuucccguguau

SEQ ID NO: 1918329 - RNA, 19 nt, Artificial Sequence
  Description of Artificial Sequence: Synthetic oligonucleotide
  Antisense strand to SEQ ID NO: 1918328
auacacgggaaauuguuac

SEQ ID NO: 1918330 - RNA, 19 nt, Artificial Sequence
  Description of Artificial Sequence: Synthetic oligonucleotide
  Sense strand starting at position 121 of SEQ ID NO: 1879590
ucccguguauuugucaaga

SEQ ID NO: 1918331 - RNA, 19 nt, Artificial Sequence
  Description of Artificial Sequence: Synthetic oligonucleotide
  Antisense strand to SEQ ID NO: 1918330
ucuugacaaauacacggga

SEQ ID NO: 1918332 - RNA, 19 nt, Artificial Sequence
  Description of Artificial Sequence: Synthetic oligonucleotide
  Sense strand starting at position 123 of SEQ ID NO: 1879590
ccguguauuugucaagaaa

SEQ ID NO: 1918333 - RNA, 19 nt, Artificial Sequence
  Description of Artificial Sequence: Synthetic oligonucleotide
  Antisense strand to SEQ ID NO: 1918332
uuucuugacaaauacacgg

SEQ ID NO: 1918334 - RNA, 19 nt, Artificial Sequence
  Description of Artificial Sequence: Synthetic oligonucleotide
  Sense strand starting at position 318 of SEQ ID NO: 1879590
ugagcuucuuccuucgagu

SEQ ID NO: 1918335 - RNA, 19 nt, Artificial Sequence
  Description of Artificial Sequence: Synthetic oligonucleotide
  Antisense strand to SEQ ID NO: 1918334
acucgaaggaagaagcuca

SEQ ID NO: 1918336 - RNA, 19 nt, Artificial Sequence
  Description of Artificial Sequence: Synthetic oligonucleotide
  Sense strand starting at position 320 of SEQ ID NO: 1879590
agcuucuuccuucgaguuu

SEQ ID NO: 1918337 - RNA, 19 nt, Artificial Sequence
  Description of Artificial Sequence: Synthetic oligonucleotide
  Antisense strand to SEQ ID NO: 1918336
aaacucgaaggaagaagcu

SEQ ID NO: 1918338 - RNA, 19 nt, Artificial Sequence
  Description of Artificial Sequence: Synthetic oligonucleotide
  Sense strand starting at position 327 of SEQ ID NO: 1879590
uccuucgaguuucuuugau

SEQ ID NO: 1918339 - RNA, 19 nt, Artificial Sequence
  Description of Artificial Sequence: Synthetic oligonucleotide
  Antisense strand to SEQ ID NO: 1918338
aucaaagaaacucgaagga

SEQ ID NO: 1918340 - RNA, 19 nt, Artificial Sequence
  Description of Artificial Sequence: Synthetic oligonucleotide
  Sense strand starting at position 329 of SEQ ID NO: 1879590
cuucgaguuucuuugaucu

SEQ ID NO: 1918341 - RNA, 19 nt, Artificial Sequence
  Description of Artificial Sequence: Synthetic oligonucleotide
  Antisense strand to SEQ ID NO: 1918340
agaucaaagaaacucgaag

SEQ ID NO: 1918342 - RNA, 19 nt, Artificial Sequence
  Description of Artificial Sequence: Synthetic oligonucleotide
  Sense strand starting at position 331 of SEQ ID NO: 1879590
ucgaguuucuuugaucuaa

SEQ ID NO: 1918343 - RNA, 19 nt, Artificial Sequence
  Description of Artificial Sequence: Synthetic oligonucleotide
  Antisense strand to SEQ ID NO: 1918342
uuagaucaaagaaacucga

SEQ ID NO: 1918344 - RNA, 19 nt, Artificial Sequence
  Description of Artificial Sequence: Synthetic oligonucleotide
  Sense strand starting at position 419 of SEQ ID NO: 1879590
aggcuaaauuuagguuaca

SEQ ID NO: 1918345 - RNA, 19 nt, Artificial Sequence
  Description of Artificial Sequence: Synthetic oligonucleotide
  Antisense strand to SEQ ID NO: 1918344
uguaaccuaaauuuagccu

SEQ ID NO: 1918346 - RNA, 19 nt, Artificial Sequence
  Description of Artificial Sequence: Synthetic oligonucleotide
  Sense strand starting at position 431 of SEQ ID NO: 1879590
gguuacagucccuaaucuu

SEQ ID NO: 1918347 - RNA, 19 nt, Artificial Sequence
  Description of Artificial Sequence: Synthetic oligonucleotide
  Antisense strand to SEQ ID NO: 1918346
aagauuagggacuguaacc

SEQ ID NO: 1918348 - RNA, 19 nt, Artificial Sequence
  Description of Artificial Sequence: Synthetic oligonucleotide
  Sense strand starting at position 482 of SEQ ID NO: 1879590
gggauauuauuguuaccuu

SEQ ID NO: 1918349 - RNA, 19 nt, Artificial Sequence
  Description of Artificial Sequence: Synthetic oligonucleotide
  Antisense strand to SEQ ID NO: 1918348
aagguaacaauaauauccc

SEQ ID NO: 1918350 - RNA, 19 nt, Artificial Sequence
  Description of Artificial Sequence: Synthetic oligonucleotide
  Sense strand starting at position 541 of SEQ ID NO: 1879590
uagauuggaucuugggaaa

SEQ ID NO: 1918351 - RNA, 19 nt, Artificial Sequence
  Description of Artificial Sequence: Synthetic oligonucleotide
  Antisense strand to SEQ ID NO: 1918350
uuucccaagauccaaucua

SEQ ID NO: 1918352 - RNA, 19 nt, Artificial Sequence
  Description of Artificial Sequence: Synthetic oligonucleotide
  Sense strand starting at position 544 of SEQ ID NO: 1879590
auuggaucuugggaaauag

SEQ ID NO: 1918353 - RNA, 19 nt, Artificial Sequence
  Description of Artificial Sequence: Synthetic oligonucleotide
  Antisense strand to SEQ ID NO: 1918352
cuauuucccaagauccaau

SEQ ID NO: 1918354 - RNA, 19 nt, Artificial Sequence
  Description of Artificial Sequence: Synthetic oligonucleotide
  Sense strand starting at position 927 of SEQ ID NO: 1879590
gccuaaauuucgcuuggug

SEQ ID NO: 1918355 - RNA, 19 nt, Artificial Sequence
  Description of Artificial Sequence: Synthetic oligonucleotide
  Antisense strand to SEQ ID NO: 1918354
caccaagcgaaauuuaggc

SEQ ID NO: 1918356 - RNA, 19 nt, Artificial Sequence
  Description of Artificial Sequence: Synthetic oligonucleotide
  Sense strand starting at position 929 of SEQ ID NO: 1879590
cuaaauuucgcuuggugau

SEQ ID NO: 1918357 - RNA, 19 nt, Artificial Sequence
  Description of Artificial Sequence: Synthetic oligonucleotide
  Antisense strand to SEQ ID NO: 1918356
aucaccaagcgaaauuuag

SEQ ID NO: 1918358 - RNA, 19 nt, Artificial Sequence
  Description of Artificial Sequence: Synthetic oligonucleotide
  Sense strand starting at position 930 of SEQ ID NO: 1879590
uaaauuucgcuuggugauu

SEQ ID NO: 1918359 - RNA, 19 nt, Artificial Sequence
  Description of Artificial Sequence: Synthetic oligonucleotide
  Antisense strand to SEQ ID NO: 1918358
aaucaccaagcgaaauuua

SEQ ID NO: 1918360 - RNA, 19 nt, Artificial Sequence
  Description of Artificial Sequence: Synthetic oligonucleotide
  Sense strand starting at position 955 of SEQ ID NO: 1879590
guagaagcauuacauauua

SEQ ID NO: 1918361 - RNA, 19 nt, Artificial Sequence
  Description of Artificial Sequence: Synthetic oligonucleotide
  Antisense strand to SEQ ID NO: 1918360
uaauauguaaugcuucuac

SEQ ID NO: 1918362 - RNA, 19 nt, Artificial Sequence
  Description of Artificial Sequence: Synthetic oligonucleotide
  Sense strand starting at position 1121 of SEQ ID NO: 1879590
cucgguuacccggaguacu

SEQ ID NO: 1918363 - RNA, 19 nt, Artificial Sequence
  Description of Artificial Sequence: Synthetic oligonucleotide
  Antisense strand to SEQ ID NO: 1918362
aguacuccggguaaccgag

SEQ ID NO: 1918364 - RNA, 19 nt, Artificial Sequence
  Description of Artificial Sequence: Synthetic oligonucleotide
  Sense strand starting at position 1181 of SEQ ID NO: 1879590
gcgagggcugcgucuuagu

SEQ ID NO: 1918365 - RNA, 19 nt, Artificial Sequence
  Description of Artificial Sequence: Synthetic oligonucleotide
  Antisense strand to SEQ ID NO: 1918364
acuaagacgcagcccucgc

SEQ ID NO: 1918366 - RNA, 19 nt, Artificial Sequence
  Description of Artificial Sequence: Synthetic oligonucleotide
  Sense strand starting at position 1206 of SEQ ID NO: 1879590
gcuucuuagcucucgaggu

SEQ ID NO: 1918367 - RNA, 19 nt, Artificial Sequence
  Description of Artificial Sequence: Synthetic oligonucleotide
  Antisense strand to SEQ ID NO: 1918366
accucgagagcuaagaagc

SEQ ID NO: 1918368 - RNA, 19 nt, Artificial Sequence
  Description of Artificial Sequence: Synthetic oligonucleotide
  Sense strand starting at position 1228 of SEQ ID NO: 1879590
gcguguuacguguuagcac

SEQ ID NO: 1918369 - RNA, 19 nt, Artificial Sequence
  Description of Artificial Sequence: Synthetic oligonucleotide
  Antisense strand to SEQ ID NO: 1918368
gugcuaacacguaacacgc

SEQ ID NO: 1918370 - RNA, 19 nt, Artificial Sequence
  Description of Artificial Sequence: Synthetic oligonucleotide
  Sense strand starting at position 1612 of SEQ ID NO: 1879590
acccucucgcgacaucuaa

SEQ ID NO: 1918371 - RNA, 19 nt, Artificial Sequence
  Description of Artificial Sequence: Synthetic oligonucleotide
  Antisense strand to SEQ ID NO: 1918370
uuagaugucgcgagagggu

SEQ ID NO: 1918372 - RNA, 19 nt, Artificial Sequence
  Description of Artificial Sequence: Synthetic oligonucleotide
  Sense strand starting at position 1616 of SEQ ID NO: 1879590
ucucgcgacaucuaaguga

SEQ ID NO: 1918373 - RNA, 19 nt, Artificial Sequence
  Description of Artificial Sequence: Synthetic oligonucleotide
  Antisense strand to SEQ ID NO: 1918372
ucacuuagaugucgcgaga

SEQ ID NO: 1918374 - RNA, 19 nt, Artificial Sequence
  Description of Artificial Sequence: Synthetic oligonucleotide
  Sense strand starting at position 1641 of SEQ ID NO: 1879590
acagcaagcacguguucua

SEQ ID NO: 1918375 - RNA, 19 nt, Artificial Sequence
  Description of Artificial Sequence: Synthetic oligonucleotide
  Antisense strand to SEQ ID NO: 1918374
uagaacacgugcuugcugu

SEQ ID NO: 1918376 - RNA, 19 nt, Artificial Sequence
  Description of Artificial Sequence: Synthetic oligonucleotide
  Sense strand starting at position 1674 of SEQ ID NO: 1879590
gucagccuccuccguuaua

SEQ ID NO: 1918377 - RNA, 19 nt, Artificial Sequence
  Description of Artificial Sequence: Synthetic oligonucleotide
  Antisense strand to SEQ ID NO: 1918376
uauaacggaggaggcugac

SEQ ID NO: 1918378 - RNA, 19 nt, Artificial Sequence
  Description of Artificial Sequence: Synthetic oligonucleotide
  Sense strand starting at position 1703 of SEQ ID NO: 1879590
ccuuuaagcgagugaugga

SEQ ID NO: 1918379 - RNA, 19 nt, Artificial Sequence
  Description of Artificial Sequence: Synthetic oligonucleotide
  Antisense strand to SEQ ID NO: 1918378
uccaucacucgcuuaaagg

SEQ ID NO: 1918380 - RNA, 19 nt, Artificial Sequence
  Description of Artificial Sequence: Synthetic oligonucleotide
  Sense strand starting at position 1710 of SEQ ID NO: 1879590
gcgagugauggacaguuau

SEQ ID NO: 1918381 - RNA, 19 nt, Artificial Sequence
  Description of Artificial Sequence: Synthetic oligonucleotide
  Antisense strand to SEQ ID NO: 1918380
auaacuguccaucacucgc

SEQ ID NO: 1918382 - RNA, 19 nt, Artificial Sequence
  Description of Artificial Sequence: Synthetic oligonucleotide
  Sense strand starting at position 1834 of SEQ ID NO: 1879590
gcgauaucgcugugagccu

SEQ ID NO: 1918383 - RNA, 19 nt, Artificial Sequence
  Description of Artificial Sequence: Synthetic oligonucleotide
  Antisense strand to SEQ ID NO: 1918382
aggcucacagcgauaucgc

SEQ ID NO: 1918384 - RNA, 19 nt, Artificial Sequence
  Description of Artificial Sequence: Synthetic oligonucleotide
  Sense strand starting at position 1847 of SEQ ID NO: 1879590
gagccugccucucuggaaa

SEQ ID NO: 1918385 - RNA, 19 nt, Artificial Sequence
  Description of Artificial Sequence: Synthetic oligonucleotide
  Antisense strand to SEQ ID NO: 1918384
uuuccagagaggcaggcuc

SEQ ID NO: 1918386 - RNA, 19 nt, Artificial Sequence
  Description of Artificial Sequence: Synthetic oligonucleotide
  Sense strand starting at position 1892 of SEQ ID NO: 1879590
cccaaauagugguuuaaag

SEQ ID NO: 1918387 - RNA, 19 nt, Artificial Sequence
  Description of Artificial Sequence: Synthetic oligonucleotide
  Antisense strand to SEQ ID NO: 1918386
cuuuaaaccacuauuuggg

SEQ ID NO: 1918388 - RNA, 19 nt, Artificial Sequence
  Description of Artificial Sequence: Synthetic oligonucleotide
  Sense strand starting at position 1902 of SEQ ID NO: 1879590
gguuuaaaggacggguuua

SEQ ID NO: 1918389 - RNA, 19 nt, Artificial Sequence
  Description of Artificial Sequence: Synthetic oligonucleotide
  Antisense strand to SEQ ID NO: 1918388
uaaacccguccuuuaaacc

SEQ ID NO: 1918390 - RNA, 19 nt, Artificial Sequence
  Description of Artificial Sequence: Synthetic oligonucleotide
  Sense strand starting at position 1903 of SEQ ID NO: 1879590
guuuaaaggacggguuuau

SEQ ID NO: 1918391 - RNA, 19 nt, Artificial Sequence
  Description of Artificial Sequence: Synthetic oligonucleotide
  Antisense strand to SEQ ID NO: 1918390
auaaacccguccuuuaaac

SEQ ID NO: 1918392 - RNA, 19 nt, Artificial Sequence
  Description of Artificial Sequence: Synthetic oligonucleotide
  Sense strand starting at position 1951 of SEQ ID NO: 1879590
ugcugcugucacugagcaa

SEQ ID NO: 1918393 - RNA, 19 nt, Artificial Sequence
  Description of Artificial Sequence: Synthetic oligonucleotide
  Antisense strand to SEQ ID NO: 1918392
uugcucagugacagcagca

SEQ ID NO: 1918394 - RNA, 19 nt, Artificial Sequence
  Description of Artificial Sequence: Synthetic oligonucleotide
  Sense strand starting at position 1954 of SEQ ID NO: 1879590
ugcugucacugagcaagaa

SEQ ID NO: 1918395 - RNA, 19 nt, Artificial Sequence
  Description of Artificial Sequence: Synthetic oligonucleotide
  Antisense strand to SEQ ID NO: 1918394
uucuugcucagugacagca

SEQ ID NO: 1918396 - RNA, 19 nt, Artificial Sequence
  Description of Artificial Sequence: Synthetic oligonucleotide
  Sense strand starting at position 559 of SEQ ID NO: 1879591
auauucuaccugugcuuua

SEQ ID NO: 1918397 - RNA, 19 nt, Artificial Sequence
  Description of Artificial Sequence: Synthetic oligonucleotide
  Antisense strand to SEQ ID NO: 1918396
uaaagcacagguagaauau

SEQ ID NO: 1918398 - RNA, 19 nt, Artificial Sequence
  Description of Artificial Sequence: Synthetic oligonucleotide
  Sense strand starting at position 564 of SEQ ID NO: 1879591
cuaccugugcuuuaugaac

SEQ ID NO: 1918399 - RNA, 19 nt, Artificial Sequence
  Description of Artificial Sequence: Synthetic oligonucleotide
  Antisense strand to SEQ ID NO: 1918398
guucauaaagcacagguag

SEQ ID NO: 1918400 - RNA, 19 nt, Artificial Sequence
  Description of Artificial Sequence: Synthetic oligonucleotide
  Sense strand starting at position 621 of SEQ ID NO: 1879591
ggcgcugugcugaacgauu

SEQ ID NO: 1918401 - RNA, 19 nt, Artificial Sequence
  Description of Artificial Sequence: Synthetic oligonucleotide
  Antisense strand to SEQ ID NO: 1918400
aaucguucagcacagcgcc

SEQ ID NO: 1918402 - RNA, 19 nt, Artificial Sequence
  Description of Artificial Sequence: Synthetic oligonucleotide
  Sense strand starting at position 635 of SEQ ID NO: 1879591
cgauuauaugacugucuca

SEQ ID NO: 1918403 - RNA, 19 nt, Artificial Sequence
  Description of Artificial Sequence: Synthetic oligonucleotide
  Antisense strand to SEQ ID NO: 1918402
ugagacagucauauaaucg

SEQ ID NO: 1918404 - RNA, 19 nt, Artificial Sequence
  Description of Artificial Sequence: Synthetic oligonucleotide
  Sense strand starting at position 640 of SEQ ID NO: 1879591
auaugacugucucauuuau

SEQ ID NO: 1918405 - RNA, 19 nt, Artificial Sequence
  Description of Artificial Sequence: Synthetic oligonucleotide
  Antisense strand to SEQ ID NO: 1918404
auaaaugagacagucauau

SEQ ID NO: 1918406 - RNA, 19 nt, Artificial Sequence
  Description of Artificial Sequence: Synthetic oligonucleotide
  Sense strand starting at position 708 of SEQ ID NO: 1879591
auggacuaacauugaguuu

SEQ ID NO: 1918407 - RNA, 19 nt, Artificial Sequence
  Description of Artificial Sequence: Synthetic oligonucleotide
  Antisense strand to SEQ ID NO: 1918406
aaacucaauguuaguccau

SEQ ID NO: 1918408 - RNA, 19 nt, Artificial Sequence
  Description of Artificial Sequence: Synthetic oligonucleotide
  Sense strand starting at position 711 of SEQ ID NO: 1879591
gacuaacauugaguuugaa

SEQ ID NO: 1918409 - RNA, 19 nt, Artificial Sequence
  Description of Artificial Sequence: Synthetic oligonucleotide
  Antisense strand to SEQ ID NO: 1918408
uucaaacucaauguuaguc

SEQ ID NO: 1918410 - RNA, 19 nt, Artificial Sequence
  Description of Artificial Sequence: Synthetic oligonucleotide
  Sense strand starting at position 813 of SEQ ID NO: 1879591
uuggguaacuugcuggaga

SEQ ID NO: 1918411 - RNA, 19 nt, Artificial Sequence
  Description of Artificial Sequence: Synthetic oligonucleotide
  Antisense strand to SEQ ID NO: 1918410
ucuccagcaaguuacccaa

SEQ ID NO: 1918412 - RNA, 19 nt, Artificial Sequence
  Description of Artificial Sequence: Synthetic oligonucleotide
  Sense strand starting at position 815 of SEQ ID NO: 1879591
ggguaacuugcuggagaca

SEQ ID NO: 1918413 - RNA, 19 nt, Artificial Sequence
  Description of Artificial Sequence: Synthetic oligonucleotide
  Antisense strand to SEQ ID NO: 1918412
ugucuccagcaaguuaccc

SEQ ID NO: 1918414 - RNA, 19 nt, Artificial Sequence
  Description of Artificial Sequence: Synthetic oligonucleotide
  Sense strand starting at position 903 of SEQ ID NO: 1879591
cuccuuaaugugggugaau

SEQ ID NO: 1918415 - RNA, 19 nt, Artificial Sequence
  Description of Artificial Sequence: Synthetic oligonucleotide
  Antisense strand to SEQ ID NO: 1918414
auucacccacauuaaggag

SEQ ID NO: 1918416 - RNA, 19 nt, Artificial Sequence
  Description of Artificial Sequence: Synthetic oligonucleotide
  Sense strand starting at position 904 of SEQ ID NO: 1879591
uccuuaaugugggugaauu

SEQ ID NO: 1918417 - RNA, 19 nt, Artificial Sequence
  Description of Artificial Sequence: Synthetic oligonucleotide
  Antisense strand to SEQ ID NO: 1918416
aauucacccacauuaagga

SEQ ID NO: 1918418 - RNA, 19 nt, Artificial Sequence
  Description of Artificial Sequence: Synthetic oligonucleotide
  Sense strand starting at position 912 of SEQ ID NO: 1879591
gugggugaauuuguuguuu

SEQ ID NO: 1918419 - RNA, 19 nt, Artificial Sequence
  Description of Artificial Sequence: Synthetic oligonucleotide
  Antisense strand to SEQ ID NO: 1918418
aaacaacaaauucacccac

SEQ ID NO: 1918420 - RNA, 19 nt, Artificial Sequence
  Description of Artificial Sequence: Synthetic oligonucleotide
  Sense strand starting at position 932 of SEQ ID NO: 1879591
auugaaguuucugucccau

SEQ ID NO: 1918421 - RNA, 19 nt, Artificial Sequence
  Description of Artificial Sequence: Synthetic oligonucleotide
  Antisense strand to SEQ ID NO: 1918420
augggacagaaacuucaau

SEQ ID NO: 1918422 - RNA, 19 nt, Artificial Sequence
  Description of Artificial Sequence: Synthetic oligonucleotide
  Sense strand starting at position 938 of SEQ ID NO: 1879591
guuucugucccauggaaag

SEQ ID NO: 1918423 - RNA, 19 nt, Artificial Sequence
  Description of Artificial Sequence: Synthetic oligonucleotide
  Antisense strand to SEQ ID NO: 1918422
cuuuccaugggacagaaac

SEQ ID NO: 1918424 - RNA, 19 nt, Artificial Sequence
  Description of Artificial Sequence: Synthetic oligonucleotide
  Sense strand starting at position 1151 of SEQ ID NO: 1879591
cuugcauaccuuuggaagu

SEQ ID NO: 1918425 - RNA, 19 nt, Artificial Sequence
  Description of Artificial Sequence: Synthetic oligonucleotide
  Antisense strand to SEQ ID NO: 1918424
acuuccaaagguaugcaag

SEQ ID NO: 1918426 - RNA, 19 nt, Artificial Sequence
  Description of Artificial Sequence: Synthetic oligonucleotide
  Sense strand starting at position 1162 of SEQ ID NO: 1879591
uuggaagugucaucauuga

SEQ ID NO: 1918427 - RNA, 19 nt, Artificial Sequence
  Description of Artificial Sequence: Synthetic oligonucleotide
  Antisense strand to SEQ ID NO: 1918426
ucaaugaugacacuuccaa

SEQ ID NO: 1918428 - RNA, 19 nt, Artificial Sequence
  Description of Artificial Sequence: Synthetic oligonucleotide
  Sense strand starting at position 1708 of SEQ ID NO: 1879591
guugaugacagcuaugacu

SEQ ID NO: 1918429 - RNA, 19 nt, Artificial Sequence
  Description of Artificial Sequence: Synthetic oligonucleotide
  Antisense strand to SEQ ID NO: 1918428
agucauagcugucaucaac

SEQ ID NO: 1918430 - RNA, 19 nt, Artificial Sequence
  Description of Artificial Sequence: Synthetic oligonucleotide
  Sense strand starting at position 1710 of SEQ ID NO: 1879591
ugaugacagcuaugacucu

SEQ ID NO: 1918431 - RNA, 19 nt, Artificial Sequence
  Description of Artificial Sequence: Synthetic oligonucleotide
  Antisense strand to SEQ ID NO: 1918430
agagucauagcugucauca

SEQ ID NO: 1918432 - RNA, 19 nt, Artificial Sequence
  Description of Artificial Sequence: Synthetic oligonucleotide
  Sense strand starting at position 1902 of SEQ ID NO: 1879591
uugguucuuuaguuugaca

SEQ ID NO: 1918433 - RNA, 19 nt, Artificial Sequence
  Description of Artificial Sequence: Synthetic oligonucleotide
  Antisense strand to SEQ ID NO: 1918432
ugucaaacuaaagaaccaa

SEQ ID NO: 1918434 - RNA, 19 nt, Artificial Sequence
  Description of Artificial Sequence: Synthetic oligonucleotide
  Sense strand starting at position 1904 of SEQ ID NO: 1879591
gguucuuuaguuugacauc

SEQ ID NO: 1918435 - RNA, 19 nt, Artificial Sequence
  Description of Artificial Sequence: Synthetic oligonucleotide
  Antisense strand to SEQ ID NO: 1918434
gaugucaaacuaaagaacc

SEQ ID NO: 1918436 - RNA, 19 nt, Artificial Sequence
  Description of Artificial Sequence: Synthetic oligonucleotide
  Sense strand starting at position 2114 of SEQ ID NO: 1879591
ggugauaagaagugguaug

SEQ ID NO: 1918437 - RNA, 19 nt, Artificial Sequence
  Description of Artificial Sequence: Synthetic oligonucleotide
  Antisense strand to SEQ ID NO: 1918436
cauaccacuucuuaucacc

SEQ ID NO: 1918438 - RNA, 19 nt, Artificial Sequence
  Description of Artificial Sequence: Synthetic oligonucleotide
  Sense strand starting at position 2567 of SEQ ID NO: 1879591
gugauccuagauuauguca

SEQ ID NO: 1918439 - RNA, 19 nt, Artificial Sequence
  Description of Artificial Sequence: Synthetic oligonucleotide
  Antisense strand to SEQ ID NO: 1918438
ugacauaaucuaggaucac

SEQ ID NO: 1918440 - RNA, 19 nt, Artificial Sequence
  Description of Artificial Sequence: Synthetic oligonucleotide
  Sense strand starting at position 2633 of SEQ ID NO: 1879591
aauacuuguuuaucuggga

SEQ ID NO: 1918441 - RNA, 19 nt, Artificial Sequence
  Description of Artificial Sequence: Synthetic oligonucleotide
  Antisense strand to SEQ ID NO: 1918440
ucccagauaaacaaguauu

SEQ ID NO: 1918442 - RNA, 19 nt, Artificial Sequence
  Description of Artificial Sequence: Synthetic oligonucleotide
  Sense strand starting at position 2634 of SEQ ID NO: 1879591
auacuuguuuaucugggaa

SEQ ID NO: 1918443 - RNA, 19 nt, Artificial Sequence
  Description of Artificial Sequence: Synthetic oligonucleotide
  Antisense strand to SEQ ID NO: 1918442
uucccagauaaacaaguau

SEQ ID NO: 1918444 - RNA, 19 nt, Artificial Sequence
  Description of Artificial Sequence: Synthetic oligonucleotide
  Sense strand starting at position 2637 of SEQ ID NO: 1879591
cuuguuuaucugggaaggu

SEQ ID NO: 1918445 - RNA, 19 nt, Artificial Sequence
  Description of Artificial Sequence: Synthetic oligonucleotide
  Antisense strand to SEQ ID NO: 1918444
accuucccagauaaacaag

SEQ ID NO: 1918446 - RNA, 19 nt, Artificial Sequence
  Description of Artificial Sequence: Synthetic oligonucleotide
  Sense strand starting at position 2689 of SEQ ID NO: 1879591
aggaguugugggugaggua

SEQ ID NO: 1918447 - RNA, 19 nt, Artificial Sequence
  Description of Artificial Sequence: Synthetic oligonucleotide
  Antisense strand to SEQ ID NO: 1918446
uaccucacccacaacuccu

SEQ ID NO: 1918448 - RNA, 19 nt, Artificial Sequence
  Description of Artificial Sequence: Synthetic oligonucleotide
  Sense strand starting at position 2690 of SEQ ID NO: 1879591
ggaguugugggugagguau

SEQ ID NO: 1918449 - RNA, 19 nt, Artificial Sequence
  Description of Artificial Sequence: Synthetic oligonucleotide
  Antisense strand to SEQ ID NO: 1918448
auaccucacccacaacucc

SEQ ID NO: 1918450 - RNA, 19 nt, Artificial Sequence
  Description of Artificial Sequence: Synthetic oligonucleotide
  Sense strand starting at position 2704 of SEQ ID NO: 1879591
gguauaaacgccuaucuuu

SEQ ID NO: 1918451 - RNA, 19 nt, Artificial Sequence
  Description of Artificial Sequence: Synthetic oligonucleotide
  Antisense strand to SEQ ID NO: 1918450
aaagauaggcguuuauacc

SEQ ID NO: 1918452 - RNA, 19 nt, Artificial Sequence
  Description of Artificial Sequence: Synthetic oligonucleotide
  Sense strand starting at position 3214 of SEQ ID NO: 1879591
uagagcuuucugggcaaag

SEQ ID NO: 1918453 - RNA, 19 nt, Artificial Sequence
  Description of Artificial Sequence: Synthetic oligonucleotide
  Antisense strand to SEQ ID NO: 1918452
cuuugcccagaaagcucua

SEQ ID NO: 1918454 - RNA, 19 nt, Artificial Sequence
  Description of Artificial Sequence: Synthetic oligonucleotide
  Sense strand starting at position 3339 of SEQ ID NO: 1879591
gaggaagguucugcuguau

SEQ ID NO: 1918455 - RNA, 19 nt, Artificial Sequence
  Description of Artificial Sequence: Synthetic oligonucleotide
  Antisense strand to SEQ ID NO: 1918454
auacagcagaaccuuccuc

SEQ ID NO: 1918456 - RNA, 19 nt, Artificial Sequence
  Description of Artificial Sequence: Synthetic oligonucleotide
  Sense strand starting at position 3343 of SEQ ID NO: 1879591
aagguucugcuguauuaag

SEQ ID NO: 1918457 - RNA, 19 nt, Artificial Sequence
  Description of Artificial Sequence: Synthetic oligonucleotide
  Antisense strand to SEQ ID NO: 1918456
cuuaauacagcagaaccuu

SEQ ID NO: 1918458 - RNA, 19 nt, Artificial Sequence
  Description of Artificial Sequence: Synthetic oligonucleotide
  Sense strand starting at position 3370 of SEQ ID NO: 1879591
cucagugcuguuggaagaa

SEQ ID NO: 1918459 - RNA, 19 nt, Artificial Sequence
  Description of Artificial Sequence: Synthetic oligonucleotide
  Antisense strand to SEQ ID NO: 1918458
uucuuccaacagcacugag

SEQ ID NO: 1918460 - RNA, 19 nt, Artificial Sequence
  Description of Artificial Sequence: Synthetic oligonucleotide
  Sense strand starting at position 3583 of SEQ ID NO: 1879591
agaugccaguguucagagu

SEQ ID NO: 1918461 - RNA, 19 nt, Artificial Sequence
  Description of Artificial Sequence: Synthetic oligonucleotide
  Antisense strand to SEQ ID NO: 1918460
acucugaacacuggcaucu

SEQ ID NO: 1918462 - RNA, 19 nt, Artificial Sequence
  Description of Artificial Sequence: Synthetic oligonucleotide
  Sense strand starting at position 3667 of SEQ ID NO: 1879591
caaauauuaccgggucaca

SEQ ID NO: 1918463 - RNA, 19 nt, Artificial Sequence
  Description of Artificial Sequence: Synthetic oligonucleotide
  Antisense strand to SEQ ID NO: 1918462
ugugacccgguaauauuug

SEQ ID NO: 1918464 - RNA, 19 nt, Artificial Sequence
  Description of Artificial Sequence: Synthetic oligonucleotide
  Sense strand starting at position 3720 of SEQ ID NO: 1879591
cagugaugcuacucuaagg

SEQ ID NO: 1918465 - RNA, 19 nt, Artificial Sequence
  Description of Artificial Sequence: Synthetic oligonucleotide
  Antisense strand to SEQ ID NO: 1918464
ccuuagaguagcaucacug

SEQ ID NO: 1918466 - RNA, 19 nt, Artificial Sequence
  Description of Artificial Sequence: Synthetic oligonucleotide
  Sense strand starting at position 3794 of SEQ ID NO: 1879591
ggaguccucuuggcagacu

SEQ ID NO: 1918467 - RNA, 19 nt, Artificial Sequence
  Description of Artificial Sequence: Synthetic oligonucleotide
  Antisense strand to SEQ ID NO: 1918466
agucugccaagaggacucc

SEQ ID NO: 1918468 - RNA, 19 nt, Artificial Sequence
  Description of Artificial Sequence: Synthetic oligonucleotide
  Sense strand starting at position 3803 of SEQ ID NO: 1879591
uuggcagacuccuuggaca

SEQ ID NO: 1918469 - RNA, 19 nt, Artificial Sequence
  Description of Artificial Sequence: Synthetic oligonucleotide
  Antisense strand to SEQ ID NO: 1918468
uguccaaggagucugccaa

SEQ ID NO: 1918470 - RNA, 19 nt, Artificial Sequence
  Description of Artificial Sequence: Synthetic oligonucleotide
  Sense strand starting at position 3805 of SEQ ID NO: 1879591
ggcagacuccuuggacagu

SEQ ID NO: 1918471 - RNA, 19 nt, Artificial Sequence
  Description of Artificial Sequence: Synthetic oligonucleotide
  Antisense strand to SEQ ID NO: 1918470
acuguccaaggagucugcc

SEQ ID NO: 1918472 - RNA, 19 nt, Artificial Sequence
  Description of Artificial Sequence: Synthetic oligonucleotide
  Sense strand starting at position 3982 of SEQ ID NO: 1879591
caaauauagugaucggacu

SEQ ID NO: 1918473 - RNA, 19 nt, Artificial Sequence
  Description of Artificial Sequence: Synthetic oligonucleotide
  Antisense strand to SEQ ID NO: 1918472
aguccgaucacuauauuug

SEQ ID NO: 1918474 - RNA, 19 nt, Artificial Sequence
  Description of Artificial Sequence: Synthetic oligonucleotide
  Sense strand starting at position 3983 of SEQ ID NO: 1879591
aaauauagugaucggacuu

SEQ ID NO: 1918475 - RNA, 19 nt, Artificial Sequence
  Description of Artificial Sequence: Synthetic oligonucleotide
  Antisense strand to SEQ ID NO: 1918474
aaguccgaucacuauauuu

SEQ ID NO: 1918476 - RNA, 19 nt, Artificial Sequence
  Description of Artificial Sequence: Synthetic oligonucleotide
  Sense strand starting at position 349 of SEQ ID NO: 1879592
agagguuugucagucuuau

SEQ ID NO: 1918477 - RNA, 19 nt, Artificial Sequence
  Description of Artificial Sequence: Synthetic oligonucleotide
  Antisense strand to SEQ ID NO: 1918476
auaagacugacaaaccucu

SEQ ID NO: 1918478 - RNA, 19 nt, Artificial Sequence
  Description of Artificial Sequence: Synthetic oligonucleotide
  Sense strand starting at position 355 of SEQ ID NO: 1879592
uugucagucuuaucaucua

SEQ ID NO: 1918479 - RNA, 19 nt, Artificial Sequence
  Description of Artificial Sequence: Synthetic oligonucleotide
  Antisense strand to SEQ ID NO: 1918478
uagaugauaagacugacaa

SEQ ID NO: 1918480 - RNA, 19 nt, Artificial Sequence
  Description of Artificial Sequence: Synthetic oligonucleotide
  Sense strand starting at position 358 of SEQ ID NO: 1879592
ucagucuuaucaucuauga

SEQ ID NO: 1918481 - RNA, 19 nt, Artificial Sequence
  Description of Artificial Sequence: Synthetic oligonucleotide
  Antisense strand to SEQ ID NO: 1918480
ucauagaugauaagacuga

SEQ ID NO: 1918482 - RNA, 19 nt, Artificial Sequence
  Description of Artificial Sequence: Synthetic oligonucleotide
  Sense strand starting at position 538 of SEQ ID NO: 1879592
cuuggaaaucuauagugcu

SEQ ID NO: 1918483 - RNA, 19 nt, Artificial Sequence
  Description of Artificial Sequence: Synthetic oligonucleotide
  Antisense strand to SEQ ID NO: 1918482
agcacuauagauuuccaag

SEQ ID NO: 1918484 - RNA, 19 nt, Artificial Sequence
  Description of Artificial Sequence: Synthetic oligonucleotide
  Sense strand starting at position 586 of SEQ ID NO: 1879592
uucuguuugcaauggacaa

SEQ ID NO: 1918485 - RNA, 19 nt, Artificial Sequence
  Description of Artificial Sequence: Synthetic oligonucleotide
  Antisense strand to SEQ ID NO: 1918484
uuguccauugcaaacagaa

SEQ ID NO: 1918486 - RNA, 19 nt, Artificial Sequence
  Description of Artificial Sequence: Synthetic oligonucleotide
  Sense strand starting at position 590 of SEQ ID NO: 1879592
guuugcaauggacaauaau

SEQ ID NO: 1918487 - RNA, 19 nt, Artificial Sequence
  Description of Artificial Sequence: Synthetic oligonucleotide
  Antisense strand to SEQ ID NO: 1918486
auuauuguccauugcaaac

SEQ ID NO: 1918488 - RNA, 19 nt, Artificial Sequence
  Description of Artificial Sequence: Synthetic oligonucleotide
  Sense strand starting at position 627 of SEQ ID NO: 1879592
ggccucagguauucugagu

SEQ ID NO: 1918489 - RNA, 19 nt, Artificial Sequence
  Description of Artificial Sequence: Synthetic oligonucleotide
  Antisense strand to SEQ ID NO: 1918488
acucagaauaccugaggcc

SEQ ID NO: 1918490 - RNA, 19 nt, Artificial Sequence
  Description of Artificial Sequence: Synthetic oligonucleotide
  Sense strand starting at position 885 of SEQ ID NO: 1879592
auuacuuucuguuugucaa

SEQ ID NO: 1918491 - RNA, 19 nt, Artificial Sequence
  Description of Artificial Sequence: Synthetic oligonucleotide
  Antisense strand to SEQ ID NO: 1918490
uugacaaacagaaaguaau

SEQ ID NO: 1918492 - RNA, 19 nt, Artificial Sequence
  Description of Artificial Sequence: Synthetic oligonucleotide
  Sense strand starting at position 886 of SEQ ID NO: 1879592
uuacuuucuguuugucaaa

SEQ ID NO: 1918493 - RNA, 19 nt, Artificial Sequence
  Description of Artificial Sequence: Synthetic oligonucleotide
  Antisense strand to SEQ ID NO: 1918492
uuugacaaacagaaaguaa

SEQ ID NO: 1918494 - RNA, 19 nt, Artificial Sequence
  Description of Artificial Sequence: Synthetic oligonucleotide
  Sense strand starting at position 898 of SEQ ID NO: 1879592
ugucaaagucucuacugga

SEQ ID NO: 1918495 - RNA, 19 nt, Artificial Sequence
  Description of Artificial Sequence: Synthetic oligonucleotide
  Antisense strand to SEQ ID NO: 1918494
uccaguagagacuuugaca

SEQ ID NO: 1918496 - RNA, 19 nt, Artificial Sequence
  Description of Artificial Sequence: Synthetic oligonucleotide
  Sense strand starting at position 921 of SEQ ID NO: 1879592
cauggaaguuuggugagaa

SEQ ID NO: 1918497 - RNA, 19 nt, Artificial Sequence
  Description of Artificial Sequence: Synthetic oligonucleotide
  Antisense strand to SEQ ID NO: 1918496
uucucaccaaacuuccaug

SEQ ID NO: 1918498 - RNA, 19 nt, Artificial Sequence
  Description of Artificial Sequence: Synthetic oligonucleotide
  Sense strand starting at position 940 of SEQ ID NO: 1879592
gaaugaaccuuugugcaag

SEQ ID NO: 1918499 - RNA, 19 nt, Artificial Sequence
  Description of Artificial Sequence: Synthetic oligonucleotide
  Antisense strand to SEQ ID NO: 1918498
cuugcacaaagguucauuc

SEQ ID NO: 1918500 - RNA, 19 nt, Artificial Sequence
  Description of Artificial Sequence: Synthetic oligonucleotide
  Sense strand starting at position 942 of SEQ ID NO: 1879592
augaaccuuugugcaagau

SEQ ID NO: 1918501 - RNA, 19 nt, Artificial Sequence
  Description of Artificial Sequence: Synthetic oligonucleotide
  Antisense strand to SEQ ID NO: 1918500
aucuugcacaaagguucau

SEQ ID NO: 1918502 - RNA, 19 nt, Artificial Sequence
  Description of Artificial Sequence: Synthetic oligonucleotide
  Sense strand starting at position 966 of SEQ ID NO: 1879592
agcugacagaccugugagu

SEQ ID NO: 1918503 - RNA, 19 nt, Artificial Sequence
  Description of Artificial Sequence: Synthetic oligonucleotide
  Antisense strand to SEQ ID NO: 1918502
acucacaggucugucagcu

SEQ ID NO: 1918504 - RNA, 19 nt, Artificial Sequence
  Description of Artificial Sequence: Synthetic oligonucleotide
  Sense strand starting at position 1044 of SEQ ID NO: 1879592
uggccuuugcucuucguau

SEQ ID NO: 1918505 - RNA, 19 nt, Artificial Sequence
  Description of Artificial Sequence: Synthetic oligonucleotide
  Antisense strand to SEQ ID NO: 1918504
auacgaagagcaaaggcca

SEQ ID NO: 1918506 - RNA, 19 nt, Artificial Sequence
  Description of Artificial Sequence: Synthetic oligonucleotide
  Sense strand starting at position 1073 of SEQ ID NO: 1879592
aggcuucuguuucuaucaa

SEQ ID NO: 1918507 - RNA, 19 nt, Artificial Sequence
  Description of Artificial Sequence: Synthetic oligonucleotide
  Antisense strand to SEQ ID NO: 1918506
uugauagaaacagaagccu

SEQ ID NO: 1918508 - RNA, 19 nt, Artificial Sequence
  Description of Artificial Sequence: Synthetic oligonucleotide
  Sense strand starting at position 1686 of SEQ ID NO: 1879592
gcgcccagucucucuuuaa

SEQ ID NO: 1918509 - RNA, 19 nt, Artificial Sequence
  Description of Artificial Sequence: Synthetic oligonucleotide
  Antisense strand to SEQ ID NO: 1918508
uuaaagagagacugggcgc

SEQ ID NO: 1918510 - RNA, 19 nt, Artificial Sequence
  Description of Artificial Sequence: Synthetic oligonucleotide
  Sense strand starting at position 1809 of SEQ ID NO: 1879592
ugguuuagcagugaaguaa

SEQ ID NO: 1918511 - RNA, 19 nt, Artificial Sequence
  Description of Artificial Sequence: Synthetic oligonucleotide
  Antisense strand to SEQ ID NO: 1918510
uuacuucacugcuaaacca

SEQ ID NO: 1918512 - RNA, 19 nt, Artificial Sequence
  Description of Artificial Sequence: Synthetic oligonucleotide
  Sense strand starting at position 1877 of SEQ ID NO: 1879592
gauuaagaaugggauccua

SEQ ID NO: 1918513 - RNA, 19 nt, Artificial Sequence
  Description of Artificial Sequence: Synthetic oligonucleotide
  Antisense strand to SEQ ID NO: 1918512
uaggaucccauucuuaauc

SEQ ID NO: 1918514 - RNA, 19 nt, Artificial Sequence
  Description of Artificial Sequence: Synthetic oligonucleotide
  Sense strand starting at position 1900 of SEQ ID NO: 1879592
gcuuacaugcaaugaugaa

SEQ ID NO: 1918515 - RNA, 19 nt, Artificial Sequence
  Description of Artificial Sequence: Synthetic oligonucleotide
  Antisense strand to SEQ ID NO: 1918514
uucaucauugcauguaagc

SEQ ID NO: 1918516 - RNA, 19 nt, Artificial Sequence
  Description of Artificial Sequence: Synthetic oligonucleotide
  Sense strand starting at position 2287 of SEQ ID NO: 1879592
ugucgcagccgcucaauua

SEQ ID NO: 1918517 - RNA, 19 nt, Artificial Sequence
  Description of Artificial Sequence: Synthetic oligonucleotide
  Antisense strand to SEQ ID NO: 1918516
uaauugagcggcugcgaca

SEQ ID NO: 1918518 - RNA, 19 nt, Artificial Sequence
  Description of Artificial Sequence: Synthetic oligonucleotide
  Sense strand starting at position 2448 of SEQ ID NO: 1879592
cuguguucugcagcguuga

SEQ ID NO: 1918519 - RNA, 19 nt, Artificial Sequence
  Description of Artificial Sequence: Synthetic oligonucleotide
  Antisense strand to SEQ ID NO: 1918518
ucaacgcugcagaacacag

SEQ ID NO: 1918520 - RNA, 19 nt, Artificial Sequence
  Description of Artificial Sequence: Synthetic oligonucleotide
  Sense strand starting at position 2461 of SEQ ID NO: 1879592
cguugacuugagcacaaga

SEQ ID NO: 1918521 - RNA, 19 nt, Artificial Sequence
  Description of Artificial Sequence: Synthetic oligonucleotide
  Antisense strand to SEQ ID NO: 1918520
ucuugugcucaagucaacg

SEQ ID NO: 1918522 - RNA, 19 nt, Artificial Sequence
  Description of Artificial Sequence: Synthetic oligonucleotide
  Sense strand starting at position 2625 of SEQ ID NO: 1879592
agaacagaguucgcaaagu

SEQ ID NO: 1918523 - RNA, 19 nt, Artificial Sequence
  Description of Artificial Sequence: Synthetic oligonucleotide
  Antisense strand to SEQ ID NO: 1918522
acuuugcgaacucuguucu

SEQ ID NO: 1918524 - RNA, 19 nt, Artificial Sequence
  Description of Artificial Sequence: Synthetic oligonucleotide
  Sense strand starting at position 3133 of SEQ ID NO: 1879592
gcucacagauaguuucuaa

SEQ ID NO: 1918525 - RNA, 19 nt, Artificial Sequence
  Description of Artificial Sequence: Synthetic oligonucleotide
  Antisense strand to SEQ ID NO: 1918524
uuagaaacuaucugugagc

SEQ ID NO: 1918526 - RNA, 19 nt, Artificial Sequence
  Description of Artificial Sequence: Synthetic oligonucleotide
  Sense strand starting at position 3144 of SEQ ID NO: 1879592
guuucuaaugacuacgaau

SEQ ID NO: 1918527 - RNA, 19 nt, Artificial Sequence
  Description of Artificial Sequence: Synthetic oligonucleotide
  Antisense strand to SEQ ID NO: 1918526
auucguagucauuagaaac

SEQ ID NO: 1918528 - RNA, 19 nt, Artificial Sequence
  Description of Artificial Sequence: Synthetic oligonucleotide
  Sense strand starting at position 3146 of SEQ ID NO: 1879592
uucuaaugacuacgaauga

SEQ ID NO: 1918529 - RNA, 19 nt, Artificial Sequence
  Description of Artificial Sequence: Synthetic oligonucleotide
  Antisense strand to SEQ ID NO: 1918528
ucauucguagucauuagaa

SEQ ID NO: 1918530 - RNA, 19 nt, Artificial Sequence
  Description of Artificial Sequence: Synthetic oligonucleotide
  Sense strand starting at position 3164 of SEQ ID NO: 1879592
aggacuuugucuccacauu

SEQ ID NO: 1918531 - RNA, 19 nt, Artificial Sequence
  Description of Artificial Sequence: Synthetic oligonucleotide
  Antisense strand to SEQ ID NO: 1918530
aauguggagacaaaguccu

SEQ ID NO: 1918532 - RNA, 19 nt, Artificial Sequence
  Description of Artificial Sequence: Synthetic oligonucleotide
  Sense strand starting at position 3345 of SEQ ID NO: 1879592
aaugguuaccacggucaau

SEQ ID NO: 1918533 - RNA, 19 nt, Artificial Sequence
  Description of Artificial Sequence: Synthetic oligonucleotide
  Antisense strand to SEQ ID NO: 1918532
auugaccgugguaaccauu

SEQ ID NO: 1918534 - RNA, 19 nt, Artificial Sequence
  Description of Artificial Sequence: Synthetic oligonucleotide
  Sense strand starting at position 3356 of SEQ ID NO: 1879592
cggucaaucuaauuaucca

SEQ ID NO: 1918535 - RNA, 19 nt, Artificial Sequence
  Description of Artificial Sequence: Synthetic oligonucleotide
  Antisense strand to SEQ ID NO: 1918534
uggauaauuagauugaccg

SEQ ID NO: 1918536 - RNA, 19 nt, Artificial Sequence
  Description of Artificial Sequence: Synthetic oligonucleotide
  Sense strand starting at position 3374 of SEQ ID NO: 1879592
auugcuucugcauaguuaa

SEQ ID NO: 1918537 - RNA, 19 nt, Artificial Sequence
  Description of Artificial Sequence: Synthetic oligonucleotide
  Antisense strand to SEQ ID NO: 1918536
uuaacuaugcagaagcaau

SEQ ID NO: 1918538 - RNA, 19 nt, Artificial Sequence
  Description of Artificial Sequence: Synthetic oligonucleotide
  Sense strand starting at position 3457 of SEQ ID NO: 1879592
caguauugguaaccauagu

SEQ ID NO: 1918539 - RNA, 19 nt, Artificial Sequence
  Description of Artificial Sequence: Synthetic oligonucleotide
  Antisense strand to SEQ ID NO: 1918538
acuaugguuaccaauacug

SEQ ID NO: 1918540 - RNA, 19 nt, Artificial Sequence
  Description of Artificial Sequence: Synthetic oligonucleotide
  Sense strand starting at position 3487 of SEQ ID NO: 1879592
acgugagcucuccacaauu

SEQ ID NO: 1918541 - RNA, 19 nt, Artificial Sequence
  Description of Artificial Sequence: Synthetic oligonucleotide
  Antisense strand to SEQ ID NO: 1918540
aauuguggagagcucacgu

SEQ ID NO: 1918542 - RNA, 19 nt, Artificial Sequence
  Description of Artificial Sequence: Synthetic oligonucleotide
  Sense strand starting at position 3563 of SEQ ID NO: 1879592
gugcuaggcacuggauuua

SEQ ID NO: 1918543 - RNA, 19 nt, Artificial Sequence
  Description of Artificial Sequence: Synthetic oligonucleotide
  Antisense strand to SEQ ID NO: 1918542
uaaauccagugccuagcac

SEQ ID NO: 1918544 - RNA, 19 nt, Artificial Sequence
  Description of Artificial Sequence: Synthetic oligonucleotide
  Sense strand starting at position 3574 of SEQ ID NO: 1879592
uggauuuacucugggaacu

SEQ ID NO: 1918545 - RNA, 19 nt, Artificial Sequence
  Description of Artificial Sequence: Synthetic oligonucleotide
  Antisense strand to SEQ ID NO: 1918544
aguucccagaguaaaucca

SEQ ID NO: 1918546 - RNA, 19 nt, Artificial Sequence
  Description of Artificial Sequence: Synthetic oligonucleotide
  Sense strand starting at position 3782 of SEQ ID NO: 1879592
agagcagugacuuggcaga

SEQ ID NO: 1918547 - RNA, 19 nt, Artificial Sequence
  Description of Artificial Sequence: Synthetic oligonucleotide
  Antisense strand to SEQ ID NO: 1918546
ucugccaagucacugcucu

SEQ ID NO: 1918548 - RNA, 19 nt, Artificial Sequence
  Description of Artificial Sequence: Synthetic oligonucleotide
  Sense strand starting at position 3801 of SEQ ID NO: 1879592
gccagaaggcauuaucaca

SEQ ID NO: 1918549 - RNA, 19 nt, Artificial Sequence
  Description of Artificial Sequence: Synthetic oligonucleotide
  Antisense strand to SEQ ID NO: 1918548
ugugauaaugccuucuggc

SEQ ID NO: 1918550 - RNA, 19 nt, Artificial Sequence
  Description of Artificial Sequence: Synthetic oligonucleotide
  Sense strand starting at position 3824 of SEQ ID NO: 1879592
uucuuuauauaggaggaaa

SEQ ID NO: 1918551 - RNA, 19 nt, Artificial Sequence
  Description of Artificial Sequence: Synthetic oligonucleotide
  Antisense strand to SEQ ID NO: 1918550
uuuccuccuauauaaagaa

SEQ ID NO: 1918552 - RNA, 19 nt, Artificial Sequence
  Description of Artificial Sequence: Synthetic oligonucleotide
  Sense strand starting at position 3981 of SEQ ID NO: 1879592
ugugaaaucucccuggaaa

SEQ ID NO: 1918553 - RNA, 19 nt, Artificial Sequence
  Description of Artificial Sequence: Synthetic oligonucleotide
  Antisense strand to SEQ ID NO: 1918552
uuuccagggagauuucaca

SEQ ID NO: 1918554 - RNA, 19 nt, Artificial Sequence
  Description of Artificial Sequence: Synthetic oligonucleotide
  Sense strand starting at position 3982 of SEQ ID NO: 1879592
gugaaaucucccuggaaag

SEQ ID NO: 1918555 - RNA, 19 nt, Artificial Sequence
  Description of Artificial Sequence: Synthetic oligonucleotide
  Antisense strand to SEQ ID NO: 1918554
cuuuccagggagauuucac

SEQ ID NO: 1918556 - RNA, 19 nt, Artificial Sequence
  Description of Artificial Sequence: Synthetic oligonucleotide
  Sense strand starting at position 99 of SEQ ID NO: 1879593
caagauagucacugaagca

SEQ ID NO: 1918557 - RNA, 19 nt, Artificial Sequence
  Description of Artificial Sequence: Synthetic oligonucleotide
  Antisense strand to SEQ ID NO: 1918556
ugcuucagugacuaucuug

SEQ ID NO: 1918558 - RNA, 19 nt, Artificial Sequence
  Description of Artificial Sequence: Synthetic oligonucleotide
  Sense strand starting at position 149 of SEQ ID NO: 1879593
cuaucuaaauguccaggua

SEQ ID NO: 1918559 - RNA, 19 nt, Artificial Sequence
  Description of Artificial Sequence: Synthetic oligonucleotide
  Antisense strand to SEQ ID NO: 1918558
uaccuggacauuuagauag

SEQ ID NO: 1918560 - RNA, 19 nt, Artificial Sequence
  Description of Artificial Sequence: Synthetic oligonucleotide
  Sense strand starting at position 152 of SEQ ID NO: 1879593
ucuaaauguccagguauag

SEQ ID NO: 1918561 - RNA, 19 nt, Artificial Sequence
  Description of Artificial Sequence: Synthetic oligonucleotide
  Antisense strand to SEQ ID NO: 1918560
cuauaccuggacauuuaga

SEQ ID NO: 1918562 - RNA, 19 nt, Artificial Sequence
  Description of Artificial Sequence: Synthetic oligonucleotide
  Sense strand starting at position 184 of SEQ ID NO: 1879593
ucuauuguaguguauuaag

SEQ ID NO: 1918563 - RNA, 19 nt, Artificial Sequence
  Description of Artificial Sequence: Synthetic oligonucleotide
  Antisense strand to SEQ ID NO: 1918562
cuuaauacacuacaauaga

SEQ ID NO: 1918564 - RNA, 19 nt, Artificial Sequence
  Description of Artificial Sequence: Synthetic oligonucleotide
  Sense strand starting at position 195 of SEQ ID NO: 1879593
guauuaaguguggaguuca

SEQ ID NO: 1918565 - RNA, 19 nt, Artificial Sequence
  Description of Artificial Sequence: Synthetic oligonucleotide
  Antisense strand to SEQ ID NO: 1918564
ugaacuccacacuuaauac

SEQ ID NO: 1918566 - RNA, 19 nt, Artificial Sequence
  Description of Artificial Sequence: Synthetic oligonucleotide
  Sense strand starting at position 233 of SEQ ID NO: 1879593
gaaagaagaucuccgugaa

SEQ ID NO: 1918567 - RNA, 19 nt, Artificial Sequence
  Description of Artificial Sequence: Synthetic oligonucleotide
  Antisense strand to SEQ ID NO: 1918566
uucacggagaucuucuuuc

SEQ ID NO: 1918568 - RNA, 19 nt, Artificial Sequence
  Description of Artificial Sequence: Synthetic oligonucleotide
  Sense strand starting at position 234 of SEQ ID NO: 1879593
aaagaagaucuccgugaau

SEQ ID NO: 1918569 - RNA, 19 nt, Artificial Sequence
  Description of Artificial Sequence: Synthetic oligonucleotide
  Antisense strand to SEQ ID NO: 1918568
auucacggagaucuucuuu

SEQ ID NO: 1918570 - RNA, 19 nt, Artificial Sequence
  Description of Artificial Sequence: Synthetic oligonucleotide
  Sense strand starting at position 236 of SEQ ID NO: 1879593
agaagaucuccgugaauga

SEQ ID NO: 1918571 - RNA, 19 nt, Artificial Sequence
  Description of Artificial Sequence: Synthetic oligonucleotide
  Antisense strand to SEQ ID NO: 1918570
ucauucacggagaucuucu

SEQ ID NO: 1918572 - RNA, 19 nt, Artificial Sequence
  Description of Artificial Sequence: Synthetic oligonucleotide
  Sense strand starting at position 273 of SEQ ID NO: 1879593
agauauuguuaaguccaaa

SEQ ID NO: 1918573 - RNA, 19 nt, Artificial Sequence
  Description of Artificial Sequence: Synthetic oligonucleotide
  Antisense strand to SEQ ID NO: 1918572
uuuggacuuaacaauaucu

SEQ ID NO: 1918574 - RNA, 19 nt, Artificial Sequence
  Description of Artificial Sequence: Synthetic oligonucleotide
  Sense strand starting at position 346 of SEQ ID NO: 1879593
uacaguuauguaugaagau

SEQ ID NO: 1918575 - RNA, 19 nt, Artificial Sequence
  Description of Artificial Sequence: Synthetic oligonucleotide
  Antisense strand to SEQ ID NO: 1918574
aucuucauacauaacugua

SEQ ID NO: 1918576 - RNA, 19 nt, Artificial Sequence
  Description of Artificial Sequence: Synthetic oligonucleotide
  Sense strand starting at position 489 of SEQ ID NO: 1879593
gucgaauaccuacaaaggu

SEQ ID NO: 1918577 - RNA, 19 nt, Artificial Sequence
  Description of Artificial Sequence: Synthetic oligonucleotide
  Antisense strand to SEQ ID NO: 1918576
accuuuguagguauucgac

SEQ ID NO: 1918578 - RNA, 19 nt, Artificial Sequence
  Description of Artificial Sequence: Synthetic oligonucleotide
  Sense strand starting at position 651 of SEQ ID NO: 1879593
ggaacaaagcacuguaauu

SEQ ID NO: 1918579 - RNA, 19 nt, Artificial Sequence
  Description of Artificial Sequence: Synthetic oligonucleotide
  Antisense strand to SEQ ID NO: 1918578
aauuacagugcuuuguucc

SEQ ID NO: 1918580 - RNA, 19 nt, Artificial Sequence
  Description of Artificial Sequence: Synthetic oligonucleotide
  Sense strand starting at position 930 of SEQ ID NO: 1879593
acaaguaaauguguugauu

SEQ ID NO: 1918581 - RNA, 19 nt, Artificial Sequence
  Description of Artificial Sequence: Synthetic oligonucleotide
  Antisense strand to SEQ ID NO: 1918580
aaucaacacauuuacuugu

SEQ ID NO: 1918582 - RNA, 19 nt, Artificial Sequence
  Description of Artificial Sequence: Synthetic oligonucleotide
  Sense strand starting at position 1052 of SEQ ID NO: 1879593
gcgugaacucaugauucua

SEQ ID NO: 1918583 - RNA, 19 nt, Artificial Sequence
  Description of Artificial Sequence: Synthetic oligonucleotide
  Antisense strand to SEQ ID NO: 1918582
uagaaucaugaguucacgc

SEQ ID NO: 1918584 - RNA, 19 nt, Artificial Sequence
  Description of Artificial Sequence: Synthetic oligonucleotide
  Sense strand starting at position 1054 of SEQ ID NO: 1879593
gugaacucaugauucuaaa

SEQ ID NO: 1918585 - RNA, 19 nt, Artificial Sequence
  Description of Artificial Sequence: Synthetic oligonucleotide
  Antisense strand to SEQ ID NO: 1918584
uuuagaaucaugaguucac

SEQ ID NO: 1918586 - RNA, 19 nt, Artificial Sequence
  Description of Artificial Sequence: Synthetic oligonucleotide
  Sense strand starting at position 1111 of SEQ ID NO: 1879593
augagucucuaugcacaua

SEQ ID NO: 1918587 - RNA, 19 nt, Artificial Sequence
  Description of Artificial Sequence: Synthetic oligonucleotide
  Antisense strand to SEQ ID NO: 1918586
uaugugcauagagacucau

SEQ ID NO: 1918588 - RNA, 19 nt, Artificial Sequence
  Description of Artificial Sequence: Synthetic oligonucleotide
  Sense strand starting at position 1229 of SEQ ID NO: 1879593
ggaacauaugcucaggucu

SEQ ID NO: 1918589 - RNA, 19 nt, Artificial Sequence
  Description of Artificial Sequence: Synthetic oligonucleotide
  Antisense strand to SEQ ID NO: 1918588
agaccugagcauauguucc

SEQ ID NO: 1918590 - RNA, 19 nt, Artificial Sequence
  Description of Artificial Sequence: Synthetic oligonucleotide
  Sense strand starting at position 1284 of SEQ ID NO: 1879593
gaggaagucuuacucuugu

SEQ ID NO: 1918591 - RNA, 19 nt, Artificial Sequence
  Description of Artificial Sequence: Synthetic oligonucleotide
  Antisense strand to SEQ ID NO: 1918590
acaagaguaagacuuccuc

SEQ ID NO: 1918592 - RNA, 19 nt, Artificial Sequence
  Description of Artificial Sequence: Synthetic oligonucleotide
  Sense strand starting at position 1297 of SEQ ID NO: 1879593
ucuuguuacccagacuagu

SEQ ID NO: 1918593 - RNA, 19 nt, Artificial Sequence
  Description of Artificial Sequence: Synthetic oligonucleotide
  Antisense strand to SEQ ID NO: 1918592
acuagucuggguaacaaga

SEQ ID NO: 1918594 - RNA, 19 nt, Artificial Sequence
  Description of Artificial Sequence: Synthetic oligonucleotide
  Sense strand starting at position 1374 of SEQ ID NO: 1879593
cugcuuaagcgucuugagu

SEQ ID NO: 1918595 - RNA, 19 nt, Artificial Sequence
  Description of Artificial Sequence: Synthetic oligonucleotide
  Antisense strand to SEQ ID NO: 1918594
acucaagacgcuuaagcag

SEQ ID NO: 1918596 - RNA, 19 nt, Artificial Sequence
  Description of Artificial Sequence: Synthetic oligonucleotide
  Sense strand starting at position 1375 of SEQ ID NO: 1879593
ugcuuaagcgucuugagug

SEQ ID NO: 1918597 - RNA, 19 nt, Artificial Sequence
  Description of Artificial Sequence: Synthetic oligonucleotide
  Antisense strand to SEQ ID NO: 1918596
cacucaagacgcuuaagca

SEQ ID NO: 1918598 - RNA, 19 nt, Artificial Sequence
  Description of Artificial Sequence: Synthetic oligonucleotide
  Sense strand starting at position 1607 of SEQ ID NO: 1879593
guagauuccagucagagua

SEQ ID NO: 1918599 - RNA, 19 nt, Artificial Sequence
  Description of Artificial Sequence: Synthetic oligonucleotide
  Antisense strand to SEQ ID NO: 1918598
uacucugacuggaaucuac

SEQ ID NO: 1918600 - RNA, 19 nt, Artificial Sequence
  Description of Artificial Sequence: Synthetic oligonucleotide
  Sense strand starting at position 2055 of SEQ ID NO: 1879593
gggagauauuugcaugaac

SEQ ID NO: 1918601 - RNA, 19 nt, Artificial Sequence
  Description of Artificial Sequence: Synthetic oligonucleotide
  Antisense strand to SEQ ID NO: 1918600
guucaugcaaauaucuccc

SEQ ID NO: 1918602 - RNA, 19 nt, Artificial Sequence
  Description of Artificial Sequence: Synthetic oligonucleotide
  Sense strand starting at position 2418 of SEQ ID NO: 1879593
ugucauauguaaucuagac

SEQ ID NO: 1918603 - RNA, 19 nt, Artificial Sequence
  Description of Artificial Sequence: Synthetic oligonucleotide
  Antisense strand to SEQ ID NO: 1918602
gucuagauuacauaugaca

SEQ ID NO: 1918604 - RNA, 19 nt, Artificial Sequence
  Description of Artificial Sequence: Synthetic oligonucleotide
  Sense strand starting at position 2425 of SEQ ID NO: 1879593
uguaaucuagacuggacau

SEQ ID NO: 1918605 - RNA, 19 nt, Artificial Sequence
  Description of Artificial Sequence: Synthetic oligonucleotide
  Antisense strand to SEQ ID NO: 1918604
auguccagucuagauuaca

SEQ ID NO: 1918606 - RNA, 19 nt, Artificial Sequence
  Description of Artificial Sequence: Synthetic oligonucleotide
  Sense strand starting at position 2464 of SEQ ID NO: 1879593
gcuauuaauggacaagcua

SEQ ID NO: 1918607 - RNA, 19 nt, Artificial Sequence
  Description of Artificial Sequence: Synthetic oligonucleotide
  Antisense strand to SEQ ID NO: 1918606
uagcuuguccauuaauagc

SEQ ID NO: 1918608 - RNA, 19 nt, Artificial Sequence
  Description of Artificial Sequence: Synthetic oligonucleotide
  Sense strand starting at position 2489 of SEQ ID NO: 1879593
uuagaauguaauggcagau

SEQ ID NO: 1918609 - RNA, 19 nt, Artificial Sequence
  Description of Artificial Sequence: Synthetic oligonucleotide
  Antisense strand to SEQ ID NO: 1918608
aucugccauuacauucuaa

SEQ ID NO: 1918610 - RNA, 19 nt, Artificial Sequence
  Description of Artificial Sequence: Synthetic oligonucleotide
  Sense strand starting at position 2501 of SEQ ID NO: 1879593
ggcagauuacaguacuaua

SEQ ID NO: 1918611 - RNA, 19 nt, Artificial Sequence
  Description of Artificial Sequence: Synthetic oligonucleotide
  Antisense strand to SEQ ID NO: 1918610
uauaguacuguaaucugcc

SEQ ID NO: 1918612 - RNA, 19 nt, Artificial Sequence
  Description of Artificial Sequence: Synthetic oligonucleotide
  Sense strand starting at position 2540 of SEQ ID NO: 1879593
guugauaacuauucuguaa

SEQ ID NO: 1918613 - RNA, 19 nt, Artificial Sequence
  Description of Artificial Sequence: Synthetic oligonucleotide
  Antisense strand to SEQ ID NO: 1918612
uuacagaauaguuaucaac

SEQ ID NO: 1918614 - RNA, 19 nt, Artificial Sequence
  Description of Artificial Sequence: Synthetic oligonucleotide
  Sense strand starting at position 2571 of SEQ ID NO: 1879593
auguguuuauucuuaggaa

SEQ ID NO: 1918615 - RNA, 19 nt, Artificial Sequence
  Description of Artificial Sequence: Synthetic oligonucleotide
  Antisense strand to SEQ ID NO: 1918614
uuccuaagaauaaacacau

SEQ ID NO: 1918616 - RNA, 19 nt, Artificial Sequence
  Description of Artificial Sequence: Synthetic oligonucleotide
  Sense strand starting at position 2731 of SEQ ID NO: 1879593
aaauguuaacauuggguaa

SEQ ID NO: 1918617 - RNA, 19 nt, Artificial Sequence
  Description of Artificial Sequence: Synthetic oligonucleotide
  Antisense strand to SEQ ID NO: 1918616
uuacccaauguuaacauuu

SEQ ID NO: 1918618 - RNA, 19 nt, Artificial Sequence
  Description of Artificial Sequence: Synthetic oligonucleotide
  Sense strand starting at position 2734 of SEQ ID NO: 1879593
uguuaacauuggguaaauc

SEQ ID NO: 1918619 - RNA, 19 nt, Artificial Sequence
  Description of Artificial Sequence: Synthetic oligonucleotide
  Antisense strand to SEQ ID NO: 1918618
gauuuacccaauguuaaca

SEQ ID NO: 1918620 - RNA, 19 nt, Artificial Sequence
  Description of Artificial Sequence: Synthetic oligonucleotide
  Sense strand starting at position 2735 of SEQ ID NO: 1879593
guuaacauuggguaaaucu

SEQ ID NO: 1918621 - RNA, 19 nt, Artificial Sequence
  Description of Artificial Sequence: Synthetic oligonucleotide
  Antisense strand to SEQ ID NO: 1918620
agauuuacccaauguuaac

SEQ ID NO: 1918622 - RNA, 19 nt, Artificial Sequence
  Description of Artificial Sequence: Synthetic oligonucleotide
  Sense strand starting at position 2744 of SEQ ID NO: 1879593
ggguaaaucugaguuaaga

SEQ ID NO: 1918623 - RNA, 19 nt, Artificial Sequence
  Description of Artificial Sequence: Synthetic oligonucleotide
  Antisense strand to SEQ ID NO: 1918622
ucuuaacucagauuuaccc

SEQ ID NO: 1918624 - RNA, 19 nt, Artificial Sequence
  Description of Artificial Sequence: Synthetic oligonucleotide
  Sense strand starting at position 3390 of SEQ ID NO: 1879593
ccucaagucuuucuaagag

SEQ ID NO: 1918625 - RNA, 19 nt, Artificial Sequence
  Description of Artificial Sequence: Synthetic oligonucleotide
  Antisense strand to SEQ ID NO: 1918624
cucuuagaaagacuugagg

SEQ ID NO: 1918626 - RNA, 19 nt, Artificial Sequence
  Description of Artificial Sequence: Synthetic oligonucleotide
  Sense strand starting at position 3569 of SEQ ID NO: 1879593
ggaugucacuugucuaaca

SEQ ID NO: 1918627 - RNA, 19 nt, Artificial Sequence
  Description of Artificial Sequence: Synthetic oligonucleotide
  Antisense strand to SEQ ID NO: 1918626
uguuagacaagugacaucc

SEQ ID NO: 1918628 - RNA, 19 nt, Artificial Sequence
  Description of Artificial Sequence: Synthetic oligonucleotide
  Sense strand starting at position 3571 of SEQ ID NO: 1879593
augucacuugucuaacaua

SEQ ID NO: 1918629 - RNA, 19 nt, Artificial Sequence
  Description of Artificial Sequence: Synthetic oligonucleotide
  Antisense strand to SEQ ID NO: 1918628
uauguuagacaagugacau

SEQ ID NO: 1918630 - RNA, 19 nt, Artificial Sequence
  Description of Artificial Sequence: Synthetic oligonucleotide
  Sense strand starting at position 3590 of SEQ ID NO: 1879593
ggaugugucauagacucua

SEQ ID NO: 1918631 - RNA, 19 nt, Artificial Sequence
  Description of Artificial Sequence: Synthetic oligonucleotide
  Antisense strand to SEQ ID NO: 1918630
uagagucuaugacacaucc

SEQ ID NO: 1918632 - RNA, 19 nt, Artificial Sequence
  Description of Artificial Sequence: Synthetic oligonucleotide
  Sense strand starting at position 3595 of SEQ ID NO: 1879593
ugucauagacucuauuauu

SEQ ID NO: 1918633 - RNA, 19 nt, Artificial Sequence
  Description of Artificial Sequence: Synthetic oligonucleotide
  Antisense strand to SEQ ID NO: 1918632
aauaauagagucuaugaca

SEQ ID NO: 1918634 - RNA, 19 nt, Artificial Sequence
  Description of Artificial Sequence: Synthetic oligonucleotide
  Sense strand starting at position 3938 of SEQ ID NO: 1879593
gccuaaugggcucaaguga

SEQ ID NO: 1918635 - RNA, 19 nt, Artificial Sequence
  Description of Artificial Sequence: Synthetic oligonucleotide
  Antisense strand to SEQ ID NO: 1918634
ucacuugagcccauuaggc

SEQ ID NO: 1918636 - RNA, 19 nt, Artificial Sequence
  Description of Artificial Sequence: Synthetic oligonucleotide
  Sense strand starting at position 138 of SEQ ID NO: 1879594
uuauuaaucccuuguggga

SEQ ID NO: 1918637 - RNA, 19 nt, Artificial Sequence
  Description of Artificial Sequence: Synthetic oligonucleotide
  Antisense strand to SEQ ID NO: 1918636
ucccacaagggauuaauaa

SEQ ID NO: 1918638 - RNA, 19 nt, Artificial Sequence
  Description of Artificial Sequence: Synthetic oligonucleotide
  Sense strand starting at position 152 of SEQ ID NO: 1879594
ugggauggguaguuugcaa

SEQ ID NO: 1918639 - RNA, 19 nt, Artificial Sequence
  Description of Artificial Sequence: Synthetic oligonucleotide
  Antisense strand to SEQ ID NO: 1918638
uugcaaacuacccauccca

SEQ ID NO: 1918640 - RNA, 19 nt, Artificial Sequence
  Description of Artificial Sequence: Synthetic oligonucleotide
  Sense strand starting at position 288 of SEQ ID NO: 1879594
gugggauauugcucaagga

SEQ ID NO: 1918641 - RNA, 19 nt, Artificial Sequence
  Description of Artificial Sequence: Synthetic oligonucleotide
  Antisense strand to SEQ ID NO: 1918640
uccuugagcaauaucccac

SEQ ID NO: 1918642 - RNA, 19 nt, Artificial Sequence
  Description of Artificial Sequence: Synthetic oligonucleotide
  Sense strand starting at position 403 of SEQ ID NO: 1879594
ugauuugauuuguggauau

SEQ ID NO: 1918643 - RNA, 19 nt, Artificial Sequence
  Description of Artificial Sequence: Synthetic oligonucleotide
  Antisense strand to SEQ ID NO: 1918642
auauccacaaaucaaauca

SEQ ID NO: 1918644 - RNA, 19 nt, Artificial Sequence
  Description of Artificial Sequence: Synthetic oligonucleotide
  Sense strand starting at position 1412 of SEQ ID NO: 1879594
gucagcagucaucaauauu

SEQ ID NO: 1918645 - RNA, 19 nt, Artificial Sequence
  Description of Artificial Sequence: Synthetic oligonucleotide
  Antisense strand to SEQ ID NO: 1918644
aauauugaugacugcugac

SEQ ID NO: 1918646 - RNA, 19 nt, Artificial Sequence
  Description of Artificial Sequence: Synthetic oligonucleotide
  Sense strand starting at position 1415 of SEQ ID NO: 1879594
agcagucaucaauauuaug

SEQ ID NO: 1918647 - RNA, 19 nt, Artificial Sequence
  Description of Artificial Sequence: Synthetic oligonucleotide
  Antisense strand to SEQ ID NO: 1918646
cauaauauugaugacugcu

SEQ ID NO: 1918648 - RNA, 19 nt, Artificial Sequence
  Description of Artificial Sequence: Synthetic oligonucleotide
  Sense strand starting at position 1431 of SEQ ID NO: 1879594
auggcaagauccuccacaa

SEQ ID NO: 1918649 - RNA, 19 nt, Artificial Sequence
  Description of Artificial Sequence: Synthetic oligonucleotide
  Antisense strand to SEQ ID NO: 1918648
uuguggaggaucuugccau

SEQ ID NO: 1918650 - RNA, 19 nt, Artificial Sequence
  Description of Artificial Sequence: Synthetic oligonucleotide
  Sense strand starting at position 1516 of SEQ ID NO: 1879594
uuaauuaagguaugcucau

SEQ ID NO: 1918651 - RNA, 19 nt, Artificial Sequence
  Description of Artificial Sequence: Synthetic oligonucleotide
  Antisense strand to SEQ ID NO: 1918650
augagcauaccuuaauuaa

SEQ ID NO: 1918652 - RNA, 19 nt, Artificial Sequence
  Description of Artificial Sequence: Synthetic oligonucleotide
  Sense strand starting at position 1844 of SEQ ID NO: 1879594
aggaaauagcuuuguugac

SEQ ID NO: 1918653 - RNA, 19 nt, Artificial Sequence
  Description of Artificial Sequence: Synthetic oligonucleotide
  Antisense strand to SEQ ID NO: 1918652
gucaacaaagcuauuuccu

SEQ ID NO: 1918654 - RNA, 19 nt, Artificial Sequence
  Description of Artificial Sequence: Synthetic oligonucleotide
  Sense strand starting at position 1846 of SEQ ID NO: 1879594
gaaauagcuuuguugacca

SEQ ID NO: 1918655 - RNA, 19 nt, Artificial Sequence
  Description of Artificial Sequence: Synthetic oligonucleotide
  Antisense strand to SEQ ID NO: 1918654
uggucaacaaagcuauuuc

SEQ ID NO: 1918656 - RNA, 19 nt, Artificial Sequence
  Description of Artificial Sequence: Synthetic oligonucleotide
  Sense strand starting at position 1984 of SEQ ID NO: 1879594
gcaaauaaaugagccauau

SEQ ID NO: 1918657 - RNA, 19 nt, Artificial Sequence
  Description of Artificial Sequence: Synthetic oligonucleotide
  Antisense strand to SEQ ID NO: 1918656
auauggcucauuuauuugc

SEQ ID NO: 1918658 - RNA, 19 nt, Artificial Sequence
  Description of Artificial Sequence: Synthetic oligonucleotide
  Sense strand starting at position 2003 of SEQ ID NO: 1879594
ucccuuuggguuugaaaug

SEQ ID NO: 1918659 - RNA, 19 nt, Artificial Sequence
  Description of Artificial Sequence: Synthetic oligonucleotide
  Antisense strand to SEQ ID NO: 1918658
cauuucaaacccaaaggga

SEQ ID NO: 1918660 - RNA, 19 nt, Artificial Sequence
  Description of Artificial Sequence: Synthetic oligonucleotide
  Sense strand starting at position 2082 of SEQ ID NO: 1879594
gggagaaacaggugugcau

SEQ ID NO: 1918661 - RNA, 19 nt, Artificial Sequence
  Description of Artificial Sequence: Synthetic oligonucleotide
  Antisense strand to SEQ ID NO: 1918660
augcacaccuguuucuccc

SEQ ID NO: 1918662 - RNA, 19 nt, Artificial Sequence
  Description of Artificial Sequence: Synthetic oligonucleotide
  Sense strand starting at position 2108 of SEQ ID NO: 1879594
gggcauuugucucuguuua

SEQ ID NO: 1918663 - RNA, 19 nt, Artificial Sequence
  Description of Artificial Sequence: Synthetic oligonucleotide
  Antisense strand to SEQ ID NO: 1918662
uaaacagagacaaaugccc

SEQ ID NO: 1918664 - RNA, 19 nt, Artificial Sequence
  Description of Artificial Sequence: Synthetic oligonucleotide
  Sense strand starting at position 2109 of SEQ ID NO: 1879594
ggcauuugucucuguuuac

SEQ ID NO: 1918665 - RNA, 19 nt, Artificial Sequence
  Description of Artificial Sequence: Synthetic oligonucleotide
  Antisense strand to SEQ ID NO: 1918664
guaaacagagacaaaugcc

SEQ ID NO: 1918666 - RNA, 19 nt, Artificial Sequence
  Description of Artificial Sequence: Synthetic oligonucleotide
  Sense strand starting at position 2110 of SEQ ID NO: 1879594
gcauuugucucuguuuaca

SEQ ID NO: 1918667 - RNA, 19 nt, Artificial Sequence
  Description of Artificial Sequence: Synthetic oligonucleotide
  Antisense strand to SEQ ID NO: 1918666
uguaaacagagacaaaugc

SEQ ID NO: 1918668 - RNA, 19 nt, Artificial Sequence
  Description of Artificial Sequence: Synthetic oligonucleotide
  Sense strand starting at position 2112 of SEQ ID NO: 1879594
auuugucucuguuuacauu

SEQ ID NO: 1918669 - RNA, 19 nt, Artificial Sequence
  Description of Artificial Sequence: Synthetic oligonucleotide
  Antisense strand to SEQ ID NO: 1918668
aauguaaacagagacaaau

SEQ ID NO: 1918670 - RNA, 19 nt, Artificial Sequence
  Description of Artificial Sequence: Synthetic oligonucleotide
  Sense strand starting at position 2449 of SEQ ID NO: 1879594
ggcccuggucaggaagaua

SEQ ID NO: 1918671 - RNA, 19 nt, Artificial Sequence
  Description of Artificial Sequence: Synthetic oligonucleotide
  Antisense strand to SEQ ID NO: 1918670
uaucuuccugaccagggcc

SEQ ID NO: 1918672 - RNA, 19 nt, Artificial Sequence
  Description of Artificial Sequence: Synthetic oligonucleotide
  Sense strand starting at position 2501 of SEQ ID NO: 1879594
ugccucuuuacggauguaa

SEQ ID NO: 1918673 - RNA, 19 nt, Artificial Sequence
  Description of Artificial Sequence: Synthetic oligonucleotide
  Antisense strand to SEQ ID NO: 1918672
uuacauccguaaagaggca

SEQ ID NO: 1918674 - RNA, 19 nt, Artificial Sequence
  Description of Artificial Sequence: Synthetic oligonucleotide
  Sense strand starting at position 2522 of SEQ ID NO: 1879594
aagagacaugcccacguua

SEQ ID NO: 1918675 - RNA, 19 nt, Artificial Sequence
  Description of Artificial Sequence: Synthetic oligonucleotide
  Antisense strand to SEQ ID NO: 1918674
uaacgugggcaugucucuu

SEQ ID NO: 1918676 - RNA, 19 nt, Artificial Sequence
  Description of Artificial Sequence: Synthetic oligonucleotide
  Sense strand starting at position 2542 of SEQ ID NO: 1879594
cugcgagccaucucucagu

SEQ ID NO: 1918677 - RNA, 19 nt, Artificial Sequence
  Description of Artificial Sequence: Synthetic oligonucleotide
  Antisense strand to SEQ ID NO: 1918676
acugagagauggcucgcag

SEQ ID NO: 1918678 - RNA, 19 nt, Artificial Sequence
  Description of Artificial Sequence: Synthetic oligonucleotide
  Sense strand starting at position 2685 of SEQ ID NO: 1879594
cuuucugaaugucuagaau

SEQ ID NO: 1918679 - RNA, 19 nt, Artificial Sequence
  Description of Artificial Sequence: Synthetic oligonucleotide
  Antisense strand to SEQ ID NO: 1918678
auucuagacauucagaaag

SEQ ID NO: 1918680 - RNA, 19 nt, Artificial Sequence
  Description of Artificial Sequence: Synthetic oligonucleotide
  Sense strand starting at position 2714 of SEQ ID NO: 1879594
agaggaucuagcuguguca

SEQ ID NO: 1918681 - RNA, 19 nt, Artificial Sequence
  Description of Artificial Sequence: Synthetic oligonucleotide
  Antisense strand to SEQ ID NO: 1918680
ugacacagcuagauccucu

SEQ ID NO: 1918682 - RNA, 19 nt, Artificial Sequence
  Description of Artificial Sequence: Synthetic oligonucleotide
  Sense strand starting at position 2759 of SEQ ID NO: 1879594
ugcuaucugccagaagcaa

SEQ ID NO: 1918683 - RNA, 19 nt, Artificial Sequence
  Description of Artificial Sequence: Synthetic oligonucleotide
  Antisense strand to SEQ ID NO: 1918682
uugcuucuggcagauagca

SEQ ID NO: 1918684 - RNA, 19 nt, Artificial Sequence
  Description of Artificial Sequence: Synthetic oligonucleotide
  Sense strand starting at position 2852 of SEQ ID NO: 1879594
gaacccauucuaugugguu

SEQ ID NO: 1918685 - RNA, 19 nt, Artificial Sequence
  Description of Artificial Sequence: Synthetic oligonucleotide
  Antisense strand to SEQ ID NO: 1918684
aaccacauagaauggguuc

SEQ ID NO: 1918686 - RNA, 19 nt, Artificial Sequence
  Description of Artificial Sequence: Synthetic oligonucleotide
  Sense strand starting at position 2921 of SEQ ID NO: 1879594
uagucuagccaauaggagu

SEQ ID NO: 1918687 - RNA, 19 nt, Artificial Sequence
  Description of Artificial Sequence: Synthetic oligonucleotide
  Antisense strand to SEQ ID NO: 1918686
acuccuauuggcuagacua

SEQ ID NO: 1918688 - RNA, 19 nt, Artificial Sequence
  Description of Artificial Sequence: Synthetic oligonucleotide
  Sense strand starting at position 2959 of SEQ ID NO: 1879594
cagugauuggcacagagcu

SEQ ID NO: 1918689 - RNA, 19 nt, Artificial Sequence
  Description of Artificial Sequence: Synthetic oligonucleotide
  Antisense strand to SEQ ID NO: 1918688
agcucugugccaaucacug

SEQ ID NO: 1918690 - RNA, 19 nt, Artificial Sequence
  Description of Artificial Sequence: Synthetic oligonucleotide
  Sense strand starting at position 3239 of SEQ ID NO: 1879594
aucucuucucaggagcuaa

SEQ ID NO: 1918691 - RNA, 19 nt, Artificial Sequence
  Description of Artificial Sequence: Synthetic oligonucleotide
  Antisense strand to SEQ ID NO: 1918690
uuagcuccugagaagagau

SEQ ID NO: 1918692 - RNA, 19 nt, Artificial Sequence
  Description of Artificial Sequence: Synthetic oligonucleotide
  Sense strand starting at position 3292 of SEQ ID NO: 1879594
ggguuucugucacugggau

SEQ ID NO: 1918693 - RNA, 19 nt, Artificial Sequence
  Description of Artificial Sequence: Synthetic oligonucleotide
  Antisense strand to SEQ ID NO: 1918692
aucccagugacagaaaccc

SEQ ID NO: 1918694 - RNA, 19 nt, Artificial Sequence
  Description of Artificial Sequence: Synthetic oligonucleotide
  Sense strand starting at position 3293 of SEQ ID NO: 1879594
gguuucugucacugggauu

SEQ ID NO: 1918695 - RNA, 19 nt, Artificial Sequence
  Description of Artificial Sequence: Synthetic oligonucleotide
  Antisense strand to SEQ ID NO: 1918694
aaucccagugacagaaacc

SEQ ID NO: 1918696 - RNA, 19 nt, Artificial Sequence
  Description of Artificial Sequence: Synthetic oligonucleotide
  Sense strand starting at position 3428 of SEQ ID NO: 1879594
acuaauuacgggcagagua

SEQ ID NO: 1918697 - RNA, 19 nt, Artificial Sequence
  Description of Artificial Sequence: Synthetic oligonucleotide
  Antisense strand to SEQ ID NO: 1918696
uacucugcccguaauuagu

SEQ ID NO: 1918698 - RNA, 19 nt, Artificial Sequence
  Description of Artificial Sequence: Synthetic oligonucleotide
  Sense strand starting at position 3462 of SEQ ID NO: 1879594
cucagagaucagggcacaa

SEQ ID NO: 1918699 - RNA, 19 nt, Artificial Sequence
  Description of Artificial Sequence: Synthetic oligonucleotide
  Antisense strand to SEQ ID NO: 1918698
uugugcccugaucucugag

SEQ ID NO: 1918700 - RNA, 19 nt, Artificial Sequence
  Description of Artificial Sequence: Synthetic oligonucleotide
  Sense strand starting at position 3528 of SEQ ID NO: 1879594
ggaaguaagcuguggacua

SEQ ID NO: 1918701 - RNA, 19 nt, Artificial Sequence
  Description of Artificial Sequence: Synthetic oligonucleotide
  Antisense strand to SEQ ID NO: 1918700
uaguccacagcuuacuucc

SEQ ID NO: 1918702 - RNA, 19 nt, Artificial Sequence
  Description of Artificial Sequence: Synthetic oligonucleotide
  Sense strand starting at position 3615 of SEQ ID NO: 1879594
acuuucugaguguguauuu

SEQ ID NO: 1918703 - RNA, 19 nt, Artificial Sequence
  Description of Artificial Sequence: Synthetic oligonucleotide
  Antisense strand to SEQ ID NO: 1918702
aaauacacacucagaaagu

SEQ ID NO: 1918704 - RNA, 19 nt, Artificial Sequence
  Description of Artificial Sequence: Synthetic oligonucleotide
  Sense strand starting at position 3709 of SEQ ID NO: 1879594
augacagguuuccuauagu

SEQ ID NO: 1918705 - RNA, 19 nt, Artificial Sequence
  Description of Artificial Sequence: Synthetic oligonucleotide
  Antisense strand to SEQ ID NO: 1918704
acuauaggaaaccugucau

SEQ ID NO: 1918706 - RNA, 19 nt, Artificial Sequence
  Description of Artificial Sequence: Synthetic oligonucleotide
  Sense strand starting at position 3712 of SEQ ID NO: 1879594
acagguuuccuauaguucu

SEQ ID NO: 1918707 - RNA, 19 nt, Artificial Sequence
  Description of Artificial Sequence: Synthetic oligonucleotide
  Antisense strand to SEQ ID NO: 1918706
agaacuauaggaaaccugu

SEQ ID NO: 1918708 - RNA, 19 nt, Artificial Sequence
  Description of Artificial Sequence: Synthetic oligonucleotide
  Sense strand starting at position 3719 of SEQ ID NO: 1879594
uccuauaguucuuuggacu

SEQ ID NO: 1918709 - RNA, 19 nt, Artificial Sequence
  Description of Artificial Sequence: Synthetic oligonucleotide
  Antisense strand to SEQ ID NO: 1918708
aguccaaagaacuauagga

SEQ ID NO: 1918710 - RNA, 19 nt, Artificial Sequence
  Description of Artificial Sequence: Synthetic oligonucleotide
  Sense strand starting at position 3788 of SEQ ID NO: 1879594
gaaugaagaucuuuggcuu

SEQ ID NO: 1918711 - RNA, 19 nt, Artificial Sequence
  Description of Artificial Sequence: Synthetic oligonucleotide
  Antisense strand to SEQ ID NO: 1918710
aagccaaagaucuucauuc

SEQ ID NO: 1918712 - RNA, 19 nt, Artificial Sequence
  Description of Artificial Sequence: Synthetic oligonucleotide
  Sense strand starting at position 3916 of SEQ ID NO: 1879594
uuauaugcacgucauucua

SEQ ID NO: 1918713 - RNA, 19 nt, Artificial Sequence
  Description of Artificial Sequence: Synthetic oligonucleotide
  Antisense strand to SEQ ID NO: 1918712
uagaaugacgugcauauaa

SEQ ID NO: 1918714 - RNA, 19 nt, Artificial Sequence
  Description of Artificial Sequence: Synthetic oligonucleotide
  Sense strand starting at position 3968 of SEQ ID NO: 1879594
ucuuauugccuguaugaau

SEQ ID NO: 1918715 - RNA, 19 nt, Artificial Sequence
  Description of Artificial Sequence: Synthetic oligonucleotide
  Antisense strand to SEQ ID NO: 1918714
auucauacaggcaauaaga

SEQ ID NO: 1918716 - RNA, 19 nt, Artificial Sequence
  Description of Artificial Sequence: Synthetic oligonucleotide
  Sense strand starting at position 1989 of SEQ ID NO: 1879595
ucgcaucaccuagaacuau

SEQ ID NO: 1918717 - RNA, 19 nt, Artificial Sequence
  Description of Artificial Sequence: Synthetic oligonucleotide
  Antisense strand to SEQ ID NO: 1918716
auaguucuaggugaugcga

SEQ ID NO: 1918718 - RNA, 19 nt, Artificial Sequence
  Description of Artificial Sequence: Synthetic oligonucleotide
  Sense strand starting at position 1998 of SEQ ID NO: 1879595
cuagaacuaucugggaaca

SEQ ID NO: 1918719 - RNA, 19 nt, Artificial Sequence
  Description of Artificial Sequence: Synthetic oligonucleotide
  Antisense strand to SEQ ID NO: 1918718
uguucccagauaguucuag

SEQ ID NO: 1918720 - RNA, 19 nt, Artificial Sequence
  Description of Artificial Sequence: Synthetic oligonucleotide
  Sense strand starting at position 2000 of SEQ ID NO: 1879595
agaacuaucugggaacaca

SEQ ID NO: 1918721 - RNA, 19 nt, Artificial Sequence
  Description of Artificial Sequence: Synthetic oligonucleotide
  Antisense strand to SEQ ID NO: 1918720
uguguucccagauaguucu

SEQ ID NO: 1918722 - RNA, 19 nt, Artificial Sequence
  Description of Artificial Sequence: Synthetic oligonucleotide
  Sense strand starting at position 2026 of SEQ ID NO: 1879595
cuuagcacauguguuagaa

SEQ ID NO: 1918723 - RNA, 19 nt, Artificial Sequence
  Description of Artificial Sequence: Synthetic oligonucleotide
  Antisense strand to SEQ ID NO: 1918722
uucuaacacaugugcuaag

SEQ ID NO: 1918724 - RNA, 19 nt, Artificial Sequence
  Description of Artificial Sequence: Synthetic oligonucleotide
  Sense strand starting at position 2028 of SEQ ID NO: 1879595
uagcacauguguuagaaga

SEQ ID NO: 1918725 - RNA, 19 nt, Artificial Sequence
  Description of Artificial Sequence: Synthetic oligonucleotide
  Antisense strand to SEQ ID NO: 1918724
ucuucuaacacaugugcua

SEQ ID NO: 1918726 - RNA, 19 nt, Artificial Sequence
  Description of Artificial Sequence: Synthetic oligonucleotide
  Sense strand starting at position 2030 of SEQ ID NO: 1879595
gcacauguguuagaagaac

SEQ ID NO: 1918727 - RNA, 19 nt, Artificial Sequence
  Description of Artificial Sequence: Synthetic oligonucleotide
  Antisense strand to SEQ ID NO: 1918726
guucuucuaacacaugugc

SEQ ID NO: 1918728 - RNA, 19 nt, Artificial Sequence
  Description of Artificial Sequence: Synthetic oligonucleotide
  Sense strand starting at position 2054 of SEQ ID NO: 1879595
augaauuaaugugcacauu

SEQ ID NO: 1918729 - RNA, 19 nt, Artificial Sequence
  Description of Artificial Sequence: Synthetic oligonucleotide
  Antisense strand to SEQ ID NO: 1918728
aaugugcacauuaauucau

SEQ ID NO: 1918730 - RNA, 19 nt, Artificial Sequence
  Description of Artificial Sequence: Synthetic oligonucleotide
  Sense strand starting at position 2538 of SEQ ID NO: 1879595
ggcuguuauugauagcgga

SEQ ID NO: 1918731 - RNA, 19 nt, Artificial Sequence
  Description of Artificial Sequence: Synthetic oligonucleotide
  Antisense strand to SEQ ID NO: 1918730
uccgcuaucaauaacagcc

SEQ ID NO: 1918732 - RNA, 19 nt, Artificial Sequence
  Description of Artificial Sequence: Synthetic oligonucleotide
  Sense strand starting at position 2541 of SEQ ID NO: 1879595
uguuauugauagcggaaca

SEQ ID NO: 1918733 - RNA, 19 nt, Artificial Sequence
  Description of Artificial Sequence: Synthetic oligonucleotide
  Antisense strand to SEQ ID NO: 1918732
uguuccgcuaucaauaaca

SEQ ID NO: 1918734 - RNA, 19 nt, Artificial Sequence
  Description of Artificial Sequence: Synthetic oligonucleotide
  Sense strand starting at position 2542 of SEQ ID NO: 1879595
guuauugauagcggaacaa

SEQ ID NO: 1918735 - RNA, 19 nt, Artificial Sequence
  Description of Artificial Sequence: Synthetic oligonucleotide
  Antisense strand to SEQ ID NO: 1918734
uuguuccgcuaucaauaac

SEQ ID NO: 1918736 - RNA, 19 nt, Artificial Sequence
  Description of Artificial Sequence: Synthetic oligonucleotide
  Sense strand starting at position 2559 of SEQ ID NO: 1879595
aagcuaucccaucagguga

SEQ ID NO: 1918737 - RNA, 19 nt, Artificial Sequence
  Description of Artificial Sequence: Synthetic oligonucleotide
  Antisense strand to SEQ ID NO: 1918736
ucaccugaugggauagcuu

SEQ ID NO: 1918738 - RNA, 19 nt, Artificial Sequence
  Description of Artificial Sequence: Synthetic oligonucleotide
  Sense strand starting at position 2599 of SEQ ID NO: 1879595
aagagcaaguuagaucaga

SEQ ID NO: 1918739 - RNA, 19 nt, Artificial Sequence
  Description of Artificial Sequence: Synthetic oligonucleotide
  Antisense strand to SEQ ID NO: 1918738
ucugaucuaacuugcucuu

SEQ ID NO: 1918740 - RNA, 19 nt, Artificial Sequence
  Description of Artificial Sequence: Synthetic oligonucleotide
  Sense strand starting at position 2604 of SEQ ID NO: 1879595
caaguuagaucagaagacu

SEQ ID NO: 1918741 - RNA, 19 nt, Artificial Sequence
  Description of Artificial Sequence: Synthetic oligonucleotide
  Antisense strand to SEQ ID NO: 1918740
agucuucugaucuaacuug

SEQ ID NO: 1918742 - RNA, 19 nt, Artificial Sequence
  Description of Artificial Sequence: Synthetic oligonucleotide
  Sense strand starting at position 2650 of SEQ ID NO: 1879595
gugcgaaccugaucaagac

SEQ ID NO: 1918743 - RNA, 19 nt, Artificial Sequence
  Description of Artificial Sequence: Synthetic oligonucleotide
  Antisense strand to SEQ ID NO: 1918742
gucuugaucagguucgcac

SEQ ID NO: 1918744 - RNA, 19 nt, Artificial Sequence
  Description of Artificial Sequence: Synthetic oligonucleotide
  Sense strand starting at position 2726 of SEQ ID NO: 1879595
auggauguuuaauucugau

SEQ ID NO: 1918745 - RNA, 19 nt, Artificial Sequence
  Description of Artificial Sequence: Synthetic oligonucleotide
  Antisense strand to SEQ ID NO: 1918744
aucagaauuaaacauccau

SEQ ID NO: 1918746 - RNA, 19 nt, Artificial Sequence
  Description of Artificial Sequence: Synthetic oligonucleotide
  Sense strand starting at position 2753 of SEQ ID NO: 1879595
uguuuaagagcuuggcaaa

SEQ ID NO: 1918747 - RNA, 19 nt, Artificial Sequence
  Description of Artificial Sequence: Synthetic oligonucleotide
  Antisense strand to SEQ ID NO: 1918746
uuugccaagcucuuaaaca

SEQ ID NO: 1918748 - RNA, 19 nt, Artificial Sequence
  Description of Artificial Sequence: Synthetic oligonucleotide
  Sense strand starting at position 2754 of SEQ ID NO: 1879595
guuuaagagcuuggcaaac

SEQ ID NO: 1918749 - RNA, 19 nt, Artificial Sequence
  Description of Artificial Sequence: Synthetic oligonucleotide
  Antisense strand to SEQ ID NO: 1918748
guuugccaagcucuuaaac

SEQ ID NO: 1918750 - RNA, 19 nt, Artificial Sequence
  Description of Artificial Sequence: Synthetic oligonucleotide
  Sense strand starting at position 2756 of SEQ ID NO: 1879595
uuaagagcuuggcaaacua

SEQ ID NO: 1918751 - RNA, 19 nt, Artificial Sequence
  Description of Artificial Sequence: Synthetic oligonucleotide
  Antisense strand to SEQ ID NO: 1918750
uaguuugccaagcucuuaa

SEQ ID NO: 1918752 - RNA, 19 nt, Artificial Sequence
  Description of Artificial Sequence: Synthetic oligonucleotide
  Sense strand starting at position 2795 of SEQ ID NO: 1879595
uuacguuuaucagcuguca

SEQ ID NO: 1918753 - RNA, 19 nt, Artificial Sequence
  Description of Artificial Sequence: Synthetic oligonucleotide
  Antisense strand to SEQ ID NO: 1918752
ugacagcugauaaacguaa

SEQ ID NO: 1918754 - RNA, 19 nt, Artificial Sequence
  Description of Artificial Sequence: Synthetic oligonucleotide
  Sense strand starting at position 2797 of SEQ ID NO: 1879595
acguuuaucagcugucaag

SEQ ID NO: 1918755 - RNA, 19 nt, Artificial Sequence
  Description of Artificial Sequence: Synthetic oligonucleotide
  Antisense strand to SEQ ID NO: 1918754
cuugacagcugauaaacgu

SEQ ID NO: 1918756 - RNA, 19 nt, Artificial Sequence
  Description of Artificial Sequence: Synthetic oligonucleotide
  Sense strand starting at position 2800 of SEQ ID NO: 1879595
uuuaucagcugucaagguu

SEQ ID NO: 1918757 - RNA, 19 nt, Artificial Sequence
  Description of Artificial Sequence: Synthetic oligonucleotide
  Antisense strand to SEQ ID NO: 1918756
aaccuugacagcugauaaa

SEQ ID NO: 1918758 - RNA, 19 nt, Artificial Sequence
  Description of Artificial Sequence: Synthetic oligonucleotide
  Sense strand starting at position 2803 of SEQ ID NO: 1879595
aucagcugucaagguugaa

SEQ ID NO: 1918759 - RNA, 19 nt, Artificial Sequence
  Description of Artificial Sequence: Synthetic oligonucleotide
  Antisense strand to SEQ ID NO: 1918758
uucaaccuugacagcugau

SEQ ID NO: 1918760 - RNA, 19 nt, Artificial Sequence
  Description of Artificial Sequence: Synthetic oligonucleotide
  Sense strand starting at position 2902 of SEQ ID NO: 1879595
cugacaaaggcugauguua

SEQ ID NO: 1918761 - RNA, 19 nt, Artificial Sequence
  Description of Artificial Sequence: Synthetic oligonucleotide
  Antisense strand to SEQ ID NO: 1918760
uaacaucagccuuugucag

SEQ ID NO: 1918762 - RNA, 19 nt, Artificial Sequence
  Description of Artificial Sequence: Synthetic oligonucleotide
  Sense strand starting at position 2904 of SEQ ID NO: 1879595
gacaaaggcugauguuaca

SEQ ID NO: 1918763 - RNA, 19 nt, Artificial Sequence
  Description of Artificial Sequence: Synthetic oligonucleotide
  Antisense strand to SEQ ID NO: 1918762
uguaacaucagccuuuguc

SEQ ID NO: 1918764 - RNA, 19 nt, Artificial Sequence
  Description of Artificial Sequence: Synthetic oligonucleotide
  Sense strand starting at position 2907 of SEQ ID NO: 1879595
aaaggcugauguuacagaa

SEQ ID NO: 1918765 - RNA, 19 nt, Artificial Sequence
  Description of Artificial Sequence: Synthetic oligonucleotide
  Antisense strand to SEQ ID NO: 1918764
uucuguaacaucagccuuu

SEQ ID NO: 1918766 - RNA, 19 nt, Artificial Sequence
  Description of Artificial Sequence: Synthetic oligonucleotide
  Sense strand starting at position 2944 of SEQ ID NO: 1879595
gcagacaaccugggaucua

SEQ ID NO: 1918767 - RNA, 19 nt, Artificial Sequence
  Description of Artificial Sequence: Synthetic oligonucleotide
  Antisense strand to SEQ ID NO: 1918766
uagaucccagguugucugc

SEQ ID NO: 1918768 - RNA, 19 nt, Artificial Sequence
  Description of Artificial Sequence: Synthetic oligonucleotide
  Sense strand starting at position 2966 of SEQ ID NO: 1879595
ccaguuugcaacugagaug

SEQ ID NO: 1918769 - RNA, 19 nt, Artificial Sequence
  Description of Artificial Sequence: Synthetic oligonucleotide
  Antisense strand to SEQ ID NO: 1918768
caucucaguugcaaacugg

SEQ ID NO: 1918770 - RNA, 19 nt, Artificial Sequence
  Description of Artificial Sequence: Synthetic oligonucleotide
  Sense strand starting at position 2978 of SEQ ID NO: 1879595
ugagauggcacgugagaca

SEQ ID NO: 1918771 - RNA, 19 nt, Artificial Sequence
  Description of Artificial Sequence: Synthetic oligonucleotide
  Antisense strand to SEQ ID NO: 1918770
ugucucacgugccaucuca

SEQ ID NO: 1918772 - RNA, 19 nt, Artificial Sequence
  Description of Artificial Sequence: Synthetic oligonucleotide
  Sense strand starting at position 3092 of SEQ ID NO: 1879595
ccagcaguaugucuggaau

SEQ ID NO: 1918773 - RNA, 19 nt, Artificial Sequence
  Description of Artificial Sequence: Synthetic oligonucleotide
  Antisense strand to SEQ ID NO: 1918772
auuccagacauacugcugg

SEQ ID NO: 1918774 - RNA, 19 nt, Artificial Sequence
  Description of Artificial Sequence: Synthetic oligonucleotide
  Sense strand starting at position 3094 of SEQ ID NO: 1879595
agcaguaugucuggaauau

SEQ ID NO: 1918775 - RNA, 19 nt, Artificial Sequence
  Description of Artificial Sequence: Synthetic oligonucleotide
  Antisense strand to SEQ ID NO: 1918774
auauuccagacauacugcu

SEQ ID NO: 1918776 - RNA, 19 nt, Artificial Sequence
  Description of Artificial Sequence: Synthetic oligonucleotide
  Sense strand starting at position 3095 of SEQ ID NO: 1879595
gcaguaugucuggaauaug

SEQ ID NO: 1918777 - RNA, 19 nt, Artificial Sequence
  Description of Artificial Sequence: Synthetic oligonucleotide
  Antisense strand to SEQ ID NO: 1918776
cauauuccagacauacugc

SEQ ID NO: 1918778 - RNA, 19 nt, Artificial Sequence
  Description of Artificial Sequence: Synthetic oligonucleotide
  Sense strand starting at position 3098 of SEQ ID NO: 1879595
guaugucuggaauauggua

SEQ ID NO: 1918779 - RNA, 19 nt, Artificial Sequence
  Description of Artificial Sequence: Synthetic oligonucleotide
  Antisense strand to SEQ ID NO: 1918778
uaccauauuccagacauac

SEQ ID NO: 1918780 - RNA, 19 nt, Artificial Sequence
  Description of Artificial Sequence: Synthetic oligonucleotide
  Sense strand starting at position 3125 of SEQ ID NO: 1879595
guaagcauuugcucaauga

SEQ ID NO: 1918781 - RNA, 19 nt, Artificial Sequence
  Description of Artificial Sequence: Synthetic oligonucleotide
  Antisense strand to SEQ ID NO: 1918780
ucauugagcaaaugcuuac

SEQ ID NO: 1918782 - RNA, 19 nt, Artificial Sequence
  Description of Artificial Sequence: Synthetic oligonucleotide
  Sense strand starting at position 3132 of SEQ ID NO: 1879595
uuugcucaaugagagaaua

SEQ ID NO: 1918783 - RNA, 19 nt, Artificial Sequence
  Description of Artificial Sequence: Synthetic oligonucleotide
  Antisense strand to SEQ ID NO: 1918782
uauucucucauugagcaaa

SEQ ID NO: 1918784 - RNA, 19 nt, Artificial Sequence
  Description of Artificial Sequence: Synthetic oligonucleotide
  Sense strand starting at position 3732 of SEQ ID NO: 1879595
gcgucacuucccggagaug

SEQ ID NO: 1918785 - RNA, 19 nt, Artificial Sequence
  Description of Artificial Sequence: Synthetic oligonucleotide
  Antisense strand to SEQ ID NO: 1918784
caucuccgggaagugacgc

SEQ ID NO: 1918786 - RNA, 19 nt, Artificial Sequence
  Description of Artificial Sequence: Synthetic oligonucleotide
  Sense strand starting at position 3909 of SEQ ID NO: 1879595
gccggagacuuauagagaa

SEQ ID NO: 1918787 - RNA, 19 nt, Artificial Sequence
  Description of Artificial Sequence: Synthetic oligonucleotide
  Antisense strand to SEQ ID NO: 1918786
uucucuauaagucuccggc

SEQ ID NO: 1918788 - RNA, 19 nt, Artificial Sequence
  Description of Artificial Sequence: Synthetic oligonucleotide
  Sense strand starting at position 3949 of SEQ ID NO: 1879595
gcuccuaggagguguggua

SEQ ID NO: 1918789 - RNA, 19 nt, Artificial Sequence
  Description of Artificial Sequence: Synthetic oligonucleotide
  Antisense strand to SEQ ID NO: 1918788
uaccacaccuccuaggagc

SEQ ID NO: 1918790 - RNA, 19 nt, Artificial Sequence
  Description of Artificial Sequence: Synthetic oligonucleotide
  Sense strand starting at position 3962 of SEQ ID NO: 1879595
gugguacagucgcuauuua

SEQ ID NO: 1918791 - RNA, 19 nt, Artificial Sequence
  Description of Artificial Sequence: Synthetic oligonucleotide
  Antisense strand to SEQ ID NO: 1918790
uaaauagcgacuguaccac

SEQ ID NO: 1918792 - RNA, 19 nt, Artificial Sequence
  Description of Artificial Sequence: Synthetic oligonucleotide
  Sense strand starting at position 3963 of SEQ ID NO: 1879595
ugguacagucgcuauuuau

SEQ ID NO: 1918793 - RNA, 19 nt, Artificial Sequence
  Description of Artificial Sequence: Synthetic oligonucleotide
  Antisense strand to SEQ ID NO: 1918792
auaaauagcgacuguacca

SEQ ID NO: 1918794 - RNA, 19 nt, Artificial Sequence
  Description of Artificial Sequence: Synthetic oligonucleotide
  Sense strand starting at position 3966 of SEQ ID NO: 1879595
uacagucgcuauuuauuga

SEQ ID NO: 1918795 - RNA, 19 nt, Artificial Sequence
  Description of Artificial Sequence: Synthetic oligonucleotide
  Antisense strand to SEQ ID NO: 1918794
ucaauaaauagcgacugua

SEQ ID NO: 1918796 - RNA, 19 nt, Artificial Sequence
  Description of Artificial Sequence: Synthetic oligonucleotide
  Sense strand starting at position 881 of SEQ ID NO: 1879596
uugccauagcccugacaau

SEQ ID NO: 1918797 - RNA, 19 nt, Artificial Sequence
  Description of Artificial Sequence: Synthetic oligonucleotide
  Antisense strand to SEQ ID NO: 1918796
auugucagggcuauggcaa

SEQ ID NO: 1918798 - RNA, 19 nt, Artificial Sequence
  Description of Artificial Sequence: Synthetic oligonucleotide
  Sense strand starting at position 6 of SEQ ID NO: 1879601
gguguugaugaaggaauau

SEQ ID NO: 1918799 - RNA, 19 nt, Artificial Sequence
  Description of Artificial Sequence: Synthetic oligonucleotide
  Antisense strand to SEQ ID NO: 1918798
auauuccuucaucaacacc

SEQ ID NO: 1918800 - RNA, 19 nt, Artificial Sequence
  Description of Artificial Sequence: Synthetic oligonucleotide
  Sense strand starting at position 43 of SEQ ID NO: 1879601
cugauuauaugagggagua

SEQ ID NO: 1918801 - RNA, 19 nt, Artificial Sequence
  Description of Artificial Sequence: Synthetic oligonucleotide
  Antisense strand to SEQ ID NO: 1918800
uacucccucauauaaucag

SEQ ID NO: 1918802 - RNA, 19 nt, Artificial Sequence
  Description of Artificial Sequence: Synthetic oligonucleotide
  Sense strand starting at position 55 of SEQ ID NO: 1879601
gggaguauuuguuagaugg

SEQ ID NO: 1918803 - RNA, 19 nt, Artificial Sequence
  Description of Artificial Sequence: Synthetic oligonucleotide
  Antisense strand to SEQ ID NO: 1918802
ccaucuaacaaauacuccc

SEQ ID NO: 1918804 - RNA, 19 nt, Artificial Sequence
  Description of Artificial Sequence: Synthetic oligonucleotide
  Sense strand starting at position 57 of SEQ ID NO: 1879601
gaguauuuguuagauggag

SEQ ID NO: 1918805 - RNA, 19 nt, Artificial Sequence
  Description of Artificial Sequence: Synthetic oligonucleotide
  Antisense strand to SEQ ID NO: 1918804
cuccaucuaacaaauacuc

SEQ ID NO: 1918806 - RNA, 19 nt, Artificial Sequence
  Description of Artificial Sequence: Synthetic oligonucleotide
  Sense strand starting at position 253 of SEQ ID NO: 1879601
ggguuuccauggaggagaa

SEQ ID NO: 1918807 - RNA, 19 nt, Artificial Sequence
  Description of Artificial Sequence: Synthetic oligonucleotide
  Antisense strand to SEQ ID NO: 1918806
uucuccuccauggaaaccc

SEQ ID NO: 1918808 - RNA, 19 nt, Artificial Sequence
  Description of Artificial Sequence: Synthetic oligonucleotide
  Sense strand starting at position 266 of SEQ ID NO: 1879601
ggagaagccuggccauguu

SEQ ID NO: 1918809 - RNA, 19 nt, Artificial Sequence
  Description of Artificial Sequence: Synthetic oligonucleotide
  Antisense strand to SEQ ID NO: 1918808
aacauggccaggcuucucc

SEQ ID NO: 1918810 - RNA, 19 nt, Artificial Sequence
  Description of Artificial Sequence: Synthetic oligonucleotide
  Sense strand starting at position 505 of SEQ ID NO: 1879601
gugugcacacguuuccuua

SEQ ID NO: 1918811 - RNA, 19 nt, Artificial Sequence
  Description of Artificial Sequence: Synthetic oligonucleotide
  Antisense strand to SEQ ID NO: 1918810
uaaggaaacgugugcacac

SEQ ID NO: 1918812 - RNA, 19 nt, Artificial Sequence
  Description of Artificial Sequence: Synthetic oligonucleotide
  Sense strand starting at position 763 of SEQ ID NO: 1879601
ccuugacauccacgugcau

SEQ ID NO: 1918813 - RNA, 19 nt, Artificial Sequence
  Description of Artificial Sequence: Synthetic oligonucleotide
  Antisense strand to SEQ ID NO: 1918812
augcacguggaugucaagg

SEQ ID NO: 1918814 - RNA, 19 nt, Artificial Sequence
  Description of Artificial Sequence: Synthetic oligonucleotide
  Sense strand starting at position 1414 of SEQ ID NO: 1879601
uuugguguuccugcgcaaa

SEQ ID NO: 1918815 - RNA, 19 nt, Artificial Sequence
  Description of Artificial Sequence: Synthetic oligonucleotide
  Antisense strand to SEQ ID NO: 1918814
uuugcgcaggaacaccaaa

SEQ ID NO: 1918816 - RNA, 19 nt, Artificial Sequence
  Description of Artificial Sequence: Synthetic oligonucleotide
  Sense strand starting at position 1416 of SEQ ID NO: 1879601
ugguguuccugcgcaaaug

SEQ ID NO: 1918817 - RNA, 19 nt, Artificial Sequence
  Description of Artificial Sequence: Synthetic oligonucleotide
  Antisense strand to SEQ ID NO: 1918816
cauuugcgcaggaacacca

SEQ ID NO: 1918818 - RNA, 19 nt, Artificial Sequence
  Description of Artificial Sequence: Synthetic oligonucleotide
  Sense strand starting at position 1441 of SEQ ID NO: 1879601
ggccauuuccuaugucugu

SEQ ID NO: 1918819 - RNA, 19 nt, Artificial Sequence
  Description of Artificial Sequence: Synthetic oligonucleotide
  Antisense strand to SEQ ID NO: 1918818
acagacauaggaaauggcc

SEQ ID NO: 1918820 - RNA, 19 nt, Artificial Sequence
  Description of Artificial Sequence: Synthetic oligonucleotide
  Sense strand starting at position 2378 of SEQ ID NO: 1879601
gggucuaucugggaaacca

SEQ ID NO: 1918821 - RNA, 19 nt, Artificial Sequence
  Description of Artificial Sequence: Synthetic oligonucleotide
  Antisense strand to SEQ ID NO: 1918820
ugguuucccagauagaccc

SEQ ID NO: 1918822 - RNA, 19 nt, Artificial Sequence
  Description of Artificial Sequence: Synthetic oligonucleotide
  Sense strand starting at position 3136 of SEQ ID NO: 1879601
gggccucugccacacagau

SEQ ID NO: 1918823 - RNA, 19 nt, Artificial Sequence
  Description of Artificial Sequence: Synthetic oligonucleotide
  Antisense strand to SEQ ID NO: 1918822
aucuguguggcagaggccc

SEQ ID NO: 1918824 - RNA, 19 nt, Artificial Sequence
  Description of Artificial Sequence: Synthetic oligonucleotide
  Sense strand starting at position 3183 of SEQ ID NO: 1879601
ggugccuagacuuggacau

SEQ ID NO: 1918825 - RNA, 19 nt, Artificial Sequence
  Description of Artificial Sequence: Synthetic oligonucleotide
  Antisense strand to SEQ ID NO: 1918824
auguccaagucuaggcacc

SEQ ID NO: 1918826 - RNA, 19 nt, Artificial Sequence
  Description of Artificial Sequence: Synthetic oligonucleotide
  Sense strand starting at position 3184 of SEQ ID NO: 1879601
gugccuagacuuggacaua

SEQ ID NO: 1918827 - RNA, 19 nt, Artificial Sequence
  Description of Artificial Sequence: Synthetic oligonucleotide
  Antisense strand to SEQ ID NO: 1918826
uauguccaagucuaggcac

SEQ ID NO: 1918828 - RNA, 19 nt, Artificial Sequence
  Description of Artificial Sequence: Synthetic oligonucleotide
  Sense strand starting at position 3667 of SEQ ID NO: 1879601
cuagaugcuucugcucaga

SEQ ID NO: 1918829 - RNA, 19 nt, Artificial Sequence
  Description of Artificial Sequence: Synthetic oligonucleotide
  Antisense strand to SEQ ID NO: 1918828
ucugagcagaagcaucuag

SEQ ID NO: 1918830 - RNA, 19 nt, Artificial Sequence
  Description of Artificial Sequence: Synthetic oligonucleotide
  Sense strand starting at position 286 of SEQ ID NO: 1879600
gggucuaucugggaaacca

SEQ ID NO: 1918831 - RNA, 19 nt, Artificial Sequence
  Description of Artificial Sequence: Synthetic oligonucleotide
  Antisense strand to SEQ ID NO: 1918830
ugguuucccagauagaccc

SEQ ID NO: 1918832 - RNA, 19 nt, Artificial Sequence
  Description of Artificial Sequence: Synthetic oligonucleotide
  Sense strand starting at position 1044 of SEQ ID NO: 1879600
gggccucugccacacagau

SEQ ID NO: 1918833 - RNA, 19 nt, Artificial Sequence
  Description of Artificial Sequence: Synthetic oligonucleotide
  Antisense strand to SEQ ID NO: 1918832
aucuguguggcagaggccc

SEQ ID NO: 1918834 - RNA, 19 nt, Artificial Sequence
  Description of Artificial Sequence: Synthetic oligonucleotide
  Sense strand starting at position 1091 of SEQ ID NO: 1879600
ggugccuagacuuggacau

SEQ ID NO: 1918835 - RNA, 19 nt, Artificial Sequence
  Description of Artificial Sequence: Synthetic oligonucleotide
  Antisense strand to SEQ ID NO: 1918834
auguccaagucuaggcacc

SEQ ID NO: 1918836 - RNA, 19 nt, Artificial Sequence
  Description of Artificial Sequence: Synthetic oligonucleotide
  Sense strand starting at position 1092 of SEQ ID NO: 1879600
gugccuagacuuggacaua

SEQ ID NO: 1918837 - RNA, 19 nt, Artificial Sequence
  Description of Artificial Sequence: Synthetic oligonucleotide
  Antisense strand to SEQ ID NO: 1918836
uauguccaagucuaggcac

SEQ ID NO: 1918838 - RNA, 19 nt, Artificial Sequence
  Description of Artificial Sequence: Synthetic oligonucleotide
  Sense strand starting at position 1575 of SEQ ID NO: 1879600
cuagaugcuucugcucaga

SEQ ID NO: 1918839 - RNA, 19 nt, Artificial Sequence
  Description of Artificial Sequence: Synthetic oligonucleotide
  Antisense strand to SEQ ID NO: 1918838
ucugagcagaagcaucuag

SEQ ID NO: 1918840 - RNA, 19 nt, Artificial Sequence
  Description of Artificial Sequence: Synthetic oligonucleotide
  Sense strand starting at position 2020 of SEQ ID NO: 1879600
cugcguugugcucagcaca

SEQ ID NO: 1918841 - RNA, 19 nt, Artificial Sequence
  Description of Artificial Sequence: Synthetic oligonucleotide
  Antisense strand to SEQ ID NO: 1918840
ugugcugagcacaacgcag

SEQ ID NO: 1918842 - RNA, 19 nt, Artificial Sequence
  Description of Artificial Sequence: Synthetic oligonucleotide
  Sense strand starting at position 2067 of SEQ ID NO: 1879600
ugaguucuccugugcacag

SEQ ID NO: 1918843 - RNA, 19 nt, Artificial Sequence
  Description of Artificial Sequence: Synthetic oligonucleotide
  Antisense strand to SEQ ID NO: 1918842
cugugcacaggagaacuca

SEQ ID NO: 1918844 - RNA, 19 nt, Artificial Sequence
  Description of Artificial Sequence: Synthetic oligonucleotide
  Sense strand starting at position 2068 of SEQ ID NO: 1879600
gaguucuccugugcacaga

SEQ ID NO: 1918845 - RNA, 19 nt, Artificial Sequence
  Description of Artificial Sequence: Synthetic oligonucleotide
  Antisense strand to SEQ ID NO: 1918844
ucugugcacaggagaacuc

SEQ ID NO: 1918846 - RNA, 19 nt, Artificial Sequence
  Description of Artificial Sequence: Synthetic oligonucleotide
  Sense strand starting at position 2112 of SEQ ID NO: 1879600
caguguucuccuuggcaca

SEQ ID NO: 1918847 - RNA, 19 nt, Artificial Sequence
  Description of Artificial Sequence: Synthetic oligonucleotide
  Antisense strand to SEQ ID NO: 1918846
ugugccaaggagaacacug

SEQ ID NO: 1918848 - RNA, 19 nt, Artificial Sequence
  Description of Artificial Sequence: Synthetic oligonucleotide
  Sense strand starting at position 2114 of SEQ ID NO: 1879600
guguucuccuuggcacaga

SEQ ID NO: 1918849 - RNA, 19 nt, Artificial Sequence
  Description of Artificial Sequence: Synthetic oligonucleotide
  Antisense strand to SEQ ID NO: 1918848
ucugugccaaggagaacac

SEQ ID NO: 1918850 - RNA, 19 nt, Artificial Sequence
  Description of Artificial Sequence: Synthetic oligonucleotide
  Sense strand starting at position 2660 of SEQ ID NO: 1879600
aggcuuaagguugguguua

SEQ ID NO: 1918851 - RNA, 19 nt, Artificial Sequence
  Description of Artificial Sequence: Synthetic oligonucleotide
  Antisense strand to SEQ ID NO: 1918850
uaacaccaaccuuaagccu

SEQ ID NO: 1918852 - RNA, 19 nt, Artificial Sequence
  Description of Artificial Sequence: Synthetic oligonucleotide
  Sense strand starting at position 2831 of SEQ ID NO: 1879600
ggguuaggguuagggauua

SEQ ID NO: 1918853 - RNA, 19 nt, Artificial Sequence
  Description of Artificial Sequence: Synthetic oligonucleotide
  Antisense strand to SEQ ID NO: 1918852
uaaucccuaacccuaaccc

SEQ ID NO: 1918854 - RNA, 19 nt, Artificial Sequence
  Description of Artificial Sequence: Synthetic oligonucleotide
  Sense strand starting at position 2885 of SEQ ID NO: 1879600
ucuguuggcugucuauuua

SEQ ID NO: 1918855 - RNA, 19 nt, Artificial Sequence
  Description of Artificial Sequence: Synthetic oligonucleotide
  Antisense strand to SEQ ID NO: 1918854
uaaauagacagccaacaga

SEQ ID NO: 1918856 - RNA, 19 nt, Artificial Sequence
  Description of Artificial Sequence: Synthetic oligonucleotide
  Sense strand starting at position 3156 of SEQ ID NO: 1879600
acauauggcucgccaauua

SEQ ID NO: 1918857 - RNA, 19 nt, Artificial Sequence
  Description of Artificial Sequence: Synthetic oligonucleotide
  Antisense strand to SEQ ID NO: 1918856
uaauuggcgagccauaugu

SEQ ID NO: 1918858 - RNA, 19 nt, Artificial Sequence
  Description of Artificial Sequence: Synthetic oligonucleotide
  Sense strand starting at position 3222 of SEQ ID NO: 1879600
uugcuuacuuugucgaaga

SEQ ID NO: 1918859 - RNA, 19 nt, Artificial Sequence
  Description of Artificial Sequence: Synthetic oligonucleotide
  Antisense strand to SEQ ID NO: 1918858
ucuucgacaaaguaagcaa

SEQ ID NO: 1918860 - RNA, 19 nt, Artificial Sequence
  Description of Artificial Sequence: Synthetic oligonucleotide
  Sense strand starting at position 3223 of SEQ ID NO: 1879600
ugcuuacuuugucgaagau

SEQ ID NO: 1918861 - RNA, 19 nt, Artificial Sequence
  Description of Artificial Sequence: Synthetic oligonucleotide
  Antisense strand to SEQ ID NO: 1918860
aucuucgacaaaguaagca

SEQ ID NO: 1918862 - RNA, 19 nt, Artificial Sequence
  Description of Artificial Sequence: Synthetic oligonucleotide
  Sense strand starting at position 3224 of SEQ ID NO: 1879600
gcuuacuuugucgaagauc

SEQ ID NO: 1918863 - RNA, 19 nt, Artificial Sequence
  Description of Artificial Sequence: Synthetic oligonucleotide
  Antisense strand to SEQ ID NO: 1918862
gaucuucgacaaaguaagc

SEQ ID NO: 1918864 - RNA, 19 nt, Artificial Sequence
  Description of Artificial Sequence: Synthetic oligonucleotide
  Sense strand starting at position 3235 of SEQ ID NO: 1879600
cgaagaucagucggcugua

SEQ ID NO: 1918865 - RNA, 19 nt, Artificial Sequence
  Description of Artificial Sequence: Synthetic oligonucleotide
  Antisense strand to SEQ ID NO: 1918864
uacagccgacugaucuucg

SEQ ID NO: 1918866 - RNA, 19 nt, Artificial Sequence
  Description of Artificial Sequence: Synthetic oligonucleotide
  Sense strand starting at position 3272 of SEQ ID NO: 1879600
uggguucucucuucuguua

SEQ ID NO: 1918867 - RNA, 19 nt, Artificial Sequence
  Description of Artificial Sequence: Synthetic oligonucleotide
  Antisense strand to SEQ ID NO: 1918866
uaacagaagagagaaccca

SEQ ID NO: 1918868 - RNA, 19 nt, Artificial Sequence
  Description of Artificial Sequence: Synthetic oligonucleotide
  Sense strand starting at position 3274 of SEQ ID NO: 1879600
gguucucucuucuguuaca

SEQ ID NO: 1918869 - RNA, 19 nt, Artificial Sequence
  Description of Artificial Sequence: Synthetic oligonucleotide
  Antisense strand to SEQ ID NO: 1918868
uguaacagaagagagaacc

SEQ ID NO: 1918870 - RNA, 19 nt, Artificial Sequence
  Description of Artificial Sequence: Synthetic oligonucleotide
  Sense strand starting at position 3290 of SEQ ID NO: 1879600
acauuagucuaugugcgua

SEQ ID NO: 1918871 - RNA, 19 nt, Artificial Sequence
  Description of Artificial Sequence: Synthetic oligonucleotide
  Antisense strand to SEQ ID NO: 1918870
uacgcacauagacuaaugu

SEQ ID NO: 1918872 - RNA, 19 nt, Artificial Sequence
  Description of Artificial Sequence: Synthetic oligonucleotide
  Sense strand starting at position 3373 of SEQ ID NO: 1879600
cugugaugccuccagguuu

SEQ ID NO: 1918873 - RNA, 19 nt, Artificial Sequence
  Description of Artificial Sequence: Synthetic oligonucleotide
  Antisense strand to SEQ ID NO: 1918872
aaaccuggaggcaucacag

SEQ ID NO: 1918874 - RNA, 19 nt, Artificial Sequence
  Description of Artificial Sequence: Synthetic oligonucleotide
  Sense strand starting at position 255 of SEQ ID NO: 1879602
ccugaugaaucuguaagga

SEQ ID NO: 1918875 - RNA, 19 nt, Artificial Sequence
  Description of Artificial Sequence: Synthetic oligonucleotide
  Antisense strand to SEQ ID NO: 1918874
uccuuacagauucaucagg

SEQ ID NO: 1918876 - RNA, 19 nt, Artificial Sequence
  Description of Artificial Sequence: Synthetic oligonucleotide
  Sense strand starting at position 493 of SEQ ID NO: 1879602
agaccacuggcccauuaau

SEQ ID NO: 1918877 - RNA, 19 nt, Artificial Sequence
  Description of Artificial Sequence: Synthetic oligonucleotide
  Antisense strand to SEQ ID NO: 1918876
auuaaugggccaguggucu

SEQ ID NO: 1918878 - RNA, 19 nt, Artificial Sequence
  Description of Artificial Sequence: Synthetic oligonucleotide
  Sense strand starting at position 546 of SEQ ID NO: 1879602
uggaaagugucacugagga

SEQ ID NO: 1918879 - RNA, 19 nt, Artificial Sequence
  Description of Artificial Sequence: Synthetic oligonucleotide
  Antisense strand to SEQ ID NO: 1918878
uccucagugacacuuucca

SEQ ID NO: 1918880 - RNA, 19 nt, Artificial Sequence
  Description of Artificial Sequence: Synthetic oligonucleotide
  Sense strand starting at position 616 of SEQ ID NO: 1879602
gcccuaaagcaaugagaau

SEQ ID NO: 1918881 - RNA, 19 nt, Artificial Sequence
  Description of Artificial Sequence: Synthetic oligonucleotide
  Antisense strand to SEQ ID NO: 1918880
auucucauugcuuuagggc

SEQ ID NO: 1918882 - RNA, 19 nt, Artificial Sequence
  Description of Artificial Sequence: Synthetic oligonucleotide
  Sense strand starting at position 1054 of SEQ ID NO: 1879602
ggugcaguccuauaauccu

SEQ ID NO: 1918883 - RNA, 19 nt, Artificial Sequence
  Description of Artificial Sequence: Synthetic oligonucleotide
  Antisense strand to SEQ ID NO: 1918882
aggauuauaggacugcacc

SEQ ID NO: 1918884 - RNA, 19 nt, Artificial Sequence
  Description of Artificial Sequence: Synthetic oligonucleotide
  Sense strand starting at position 1225 of SEQ ID NO: 1879602
acgugaugguauucuagag

SEQ ID NO: 1918885 - RNA, 19 nt, Artificial Sequence
  Description of Artificial Sequence: Synthetic oligonucleotide
  Antisense strand to SEQ ID NO: 1918884
cucuagaauaccaucacgu

SEQ ID NO: 1918886 - RNA, 19 nt, Artificial Sequence
  Description of Artificial Sequence: Synthetic oligonucleotide
  Sense strand starting at position 1229 of SEQ ID NO: 1879602
gaugguauucuagagcauu

SEQ ID NO: 1918887 - RNA, 19 nt, Artificial Sequence
  Description of Artificial Sequence: Synthetic oligonucleotide
  Antisense strand to SEQ ID NO: 1918886
aaugcucuagaauaccauc

SEQ ID NO: 1918888 - RNA, 19 nt, Artificial Sequence
  Description of Artificial Sequence: Synthetic oligonucleotide
  Sense strand starting at position 1379 of SEQ ID NO: 1879602
ugcaguagucuagagcacu

SEQ ID NO: 1918889 - RNA, 19 nt, Artificial Sequence
  Description of Artificial Sequence: Synthetic oligonucleotide
  Antisense strand to SEQ ID NO: 1918888
agugcucuagacuacugca

SEQ ID NO: 1918890 - RNA, 19 nt, Artificial Sequence
  Description of Artificial Sequence: Synthetic oligonucleotide
  Sense strand starting at position 1516 of SEQ ID NO: 1879602
cggaacaagucucuugaga

SEQ ID NO: 1918891 - RNA, 19 nt, Artificial Sequence
  Description of Artificial Sequence: Synthetic oligonucleotide
  Antisense strand to SEQ ID NO: 1918890
ucucaagagacuuguuccg

SEQ ID NO: 1918892 - RNA, 19 nt, Artificial Sequence
  Description of Artificial Sequence: Synthetic oligonucleotide
  Sense strand starting at position 1524 of SEQ ID NO: 1879602
gucucuugagaauggugua

SEQ ID NO: 1918893 - RNA, 19 nt, Artificial Sequence
  Description of Artificial Sequence: Synthetic oligonucleotide
  Antisense strand to SEQ ID NO: 1918892
uacaccauucucaagagac

SEQ ID NO: 1918894 - RNA, 19 nt, Artificial Sequence
  Description of Artificial Sequence: Synthetic oligonucleotide
  Sense strand starting at position 1529 of SEQ ID NO: 1879602
uugagaaugguguacggga

SEQ ID NO: 1918895 - RNA, 19 nt, Artificial Sequence
  Description of Artificial Sequence: Synthetic oligonucleotide
  Antisense strand to SEQ ID NO: 1918894
ucccguacaccauucucaa

SEQ ID NO: 1918896 - RNA, 19 nt, Artificial Sequence
  Description of Artificial Sequence: Synthetic oligonucleotide
  Sense strand starting at position 1536 of SEQ ID NO: 1879602
ugguguacgggagaucuaa

SEQ ID NO: 1918897 - RNA, 19 nt, Artificial Sequence
  Description of Artificial Sequence: Synthetic oligonucleotide
  Antisense strand to SEQ ID NO: 1918896
uuagaucucccguacacca

SEQ ID NO: 1918898 - RNA, 19 nt, Artificial Sequence
  Description of Artificial Sequence: Synthetic oligonucleotide
  Sense strand starting at position 1588 of SEQ ID NO: 1879602
ucacaauaccgcuaagugu

SEQ ID NO: 1918899 - RNA, 19 nt, Artificial Sequence
  Description of Artificial Sequence: Synthetic oligonucleotide
  Antisense strand to SEQ ID NO: 1918898
acacuuagcgguauuguga

SEQ ID NO: 1918900 - RNA, 19 nt, Artificial Sequence
  Description of Artificial Sequence: Synthetic oligonucleotide
  Sense strand starting at position 1603 of SEQ ID NO: 1879602
gugugugaacuauagcuga

SEQ ID NO: 1918901 - RNA, 19 nt, Artificial Sequence
  Description of Artificial Sequence: Synthetic oligonucleotide
  Antisense strand to SEQ ID NO: 1918900
ucagcuauaguucacacac

SEQ ID NO: 1918902 - RNA, 19 nt, Artificial Sequence
  Description of Artificial Sequence: Synthetic oligonucleotide
  Sense strand starting at position 1827 of SEQ ID NO: 1879602
aggaaauucucugugccau

SEQ ID NO: 1918903 - RNA, 19 nt, Artificial Sequence
  Description of Artificial Sequence: Synthetic oligonucleotide
  Antisense strand to SEQ ID NO: 1918902
auggcacagagaauuuccu

SEQ ID NO: 1918904 - RNA, 19 nt, Artificial Sequence
  Description of Artificial Sequence: Synthetic oligonucleotide
  Sense strand starting at position 1828 of SEQ ID NO: 1879602
ggaaauucucugugccauu

SEQ ID NO: 1918905 - RNA, 19 nt, Artificial Sequence
  Description of Artificial Sequence: Synthetic oligonucleotide
  Antisense strand to SEQ ID NO: 1918904
aauggcacagagaauuucc

SEQ ID NO: 1918906 - RNA, 19 nt, Artificial Sequence
  Description of Artificial Sequence: Synthetic oligonucleotide
  Sense strand starting at position 1891 of SEQ ID NO: 1879602
acgggcauguuccuaagaa

SEQ ID NO: 1918907 - RNA, 19 nt, Artificial Sequence
  Description of Artificial Sequence: Synthetic oligonucleotide
  Antisense strand to SEQ ID NO: 1918906
uucuuaggaacaugcccgu

SEQ ID NO: 1918908 - RNA, 19 nt, Artificial Sequence
  Description of Artificial Sequence: Synthetic oligonucleotide
  Sense strand starting at position 2008 of SEQ ID NO: 1879602
gugcaaacucaggagcuuu

SEQ ID NO: 1918909 - RNA, 19 nt, Artificial Sequence
  Description of Artificial Sequence: Synthetic oligonucleotide
  Antisense strand to SEQ ID NO: 1918908
aaagcuccugaguuugcac

SEQ ID NO: 1918910 - RNA, 19 nt, Artificial Sequence
  Description of Artificial Sequence: Synthetic oligonucleotide
  Sense strand starting at position 2082 of SEQ ID NO: 1879602
agugauaccugauuagauc

SEQ ID NO: 1918911 - RNA, 19 nt, Artificial Sequence
  Description of Artificial Sequence: Synthetic oligonucleotide
  Antisense strand to SEQ ID NO: 1918910
gaucuaaucagguaucacu

SEQ ID NO: 1918912 - RNA, 19 nt, Artificial Sequence
  Description of Artificial Sequence: Synthetic oligonucleotide
  Sense strand starting at position 2246 of SEQ ID NO: 1879602
gaugaaguuugacuaacau

SEQ ID NO: 1918913 - RNA, 19 nt, Artificial Sequence
  Description of Artificial Sequence: Synthetic oligonucleotide
  Antisense strand to SEQ ID NO: 1918912
auguuagucaaacuucauc

SEQ ID NO: 1918914 - RNA, 19 nt, Artificial Sequence
  Description of Artificial Sequence: Synthetic oligonucleotide
  Sense strand starting at position 2276 of SEQ ID NO: 1879602
agugacauggaagguuuaa

SEQ ID NO: 1918915 - RNA, 19 nt, Artificial Sequence
  Description of Artificial Sequence: Synthetic oligonucleotide
  Antisense strand to SEQ ID NO: 1918914
uuaaaccuuccaugucacu

SEQ ID NO: 1918916 - RNA, 19 nt, Artificial Sequence
  Description of Artificial Sequence: Synthetic oligonucleotide
  Sense strand starting at position 2344 of SEQ ID NO: 1879602
gggagaauauuuggccaca

SEQ ID NO: 1918917 - RNA, 19 nt, Artificial Sequence
  Description of Artificial Sequence: Synthetic oligonucleotide
  Antisense strand to SEQ ID NO: 1918916
uguggccaaauauucuccc

SEQ ID NO: 1918918 - RNA, 19 nt, Artificial Sequence
  Description of Artificial Sequence: Synthetic oligonucleotide
  Sense strand starting at position 2444 of SEQ ID NO: 1879602
ucuguuauccaacaguuac

SEQ ID NO: 1918919 - RNA, 19 nt, Artificial Sequence
  Description of Artificial Sequence: Synthetic oligonucleotide
  Antisense strand to SEQ ID NO: 1918918
guaacuguuggauaacaga

SEQ ID NO: 1918920 - RNA, 19 nt, Artificial Sequence
  Description of Artificial Sequence: Synthetic oligonucleotide
  Sense strand starting at position 2520 of SEQ ID NO: 1879602
aaccacugaggguguuauu

SEQ ID NO: 1918921 - RNA, 19 nt, Artificial Sequence
  Description of Artificial Sequence: Synthetic oligonucleotide
  Antisense strand to SEQ ID NO: 1918920
aauaacacccucagugguu

SEQ ID NO: 1918922 - RNA, 19 nt, Artificial Sequence
  Description of Artificial Sequence: Synthetic oligonucleotide
  Sense strand starting at position 2527 of SEQ ID NO: 1879602
gaggguguuauugaucaca

SEQ ID NO: 1918923 - RNA, 19 nt, Artificial Sequence
  Description of Artificial Sequence: Synthetic oligonucleotide
  Antisense strand to SEQ ID NO: 1918922
ugugaucaauaacacccuc

SEQ ID NO: 1918924 - RNA, 19 nt, Artificial Sequence
  Description of Artificial Sequence: Synthetic oligonucleotide
  Sense strand starting at position 2529 of SEQ ID NO: 1879602
ggguguuauugaucacaag

SEQ ID NO: 1918925 - RNA, 19 nt, Artificial Sequence
  Description of Artificial Sequence: Synthetic oligonucleotide
  Antisense strand to SEQ ID NO: 1918924
cuugugaucaauaacaccc

SEQ ID NO: 1918926 - RNA, 19 nt, Artificial Sequence
  Description of Artificial Sequence: Synthetic oligonucleotide
  Sense strand starting at position 2706 of SEQ ID NO: 1879602
gaaagacucugucuggauu

SEQ ID NO: 1918927 - RNA, 19 nt, Artificial Sequence
  Description of Artificial Sequence: Synthetic oligonucleotide
  Antisense strand to SEQ ID NO: 1918926
aauccagacagagucuuuc

SEQ ID NO: 1918928 - RNA, 19 nt, Artificial Sequence
  Description of Artificial Sequence: Synthetic oligonucleotide
  Sense strand starting at position 2742 of SEQ ID NO: 1879602
agggaauaguuacagaaga

SEQ ID NO: 1918929 - RNA, 19 nt, Artificial Sequence
  Description of Artificial Sequence: Synthetic oligonucleotide
  Antisense strand to SEQ ID NO: 1918928
ucuucuguaacuauucccu

SEQ ID NO: 1918930 - RNA, 19 nt, Artificial Sequence
  Description of Artificial Sequence: Synthetic oligonucleotide
  Sense strand starting at position 2789 of SEQ ID NO: 1879602
ugucuuugagggcagagaa

SEQ ID NO: 1918931 - RNA, 19 nt, Artificial Sequence
  Description of Artificial Sequence: Synthetic oligonucleotide
  Antisense strand to SEQ ID NO: 1918930
uucucugcccucaaagaca

SEQ ID NO: 1918932 - RNA, 19 nt, Artificial Sequence
  Description of Artificial Sequence: Synthetic oligonucleotide
  Sense strand starting at position 3054 of SEQ ID NO: 1879602
ggugcuauggucuggaaac

SEQ ID NO: 1918933 - RNA, 19 nt, Artificial Sequence
  Description of Artificial Sequence: Synthetic oligonucleotide
  Antisense strand to SEQ ID NO: 1918932
guuuccagaccauagcacc

SEQ ID NO: 1918934 - RNA, 19 nt, Artificial Sequence
  Description of Artificial Sequence: Synthetic oligonucleotide
  Sense strand starting at position 3056 of SEQ ID NO: 1879602
ugcuauggucuggaaaccu

SEQ ID NO: 1918935 - RNA, 19 nt, Artificial Sequence
  Description of Artificial Sequence: Synthetic oligonucleotide
  Antisense strand to SEQ ID NO: 1918934
agguuuccagaccauagca

SEQ ID NO: 1918936 - RNA, 19 nt, Artificial Sequence
  Description of Artificial Sequence: Synthetic oligonucleotide
  Sense strand starting at position 3223 of SEQ ID NO: 1879602
ccucccuugucccugauau

SEQ ID NO: 1918937 - RNA, 19 nt, Artificial Sequence
  Description of Artificial Sequence: Synthetic oligonucleotide
  Antisense strand to SEQ ID NO: 1918936
auaucagggacaagggagg

SEQ ID NO: 1918938 - RNA, 19 nt, Artificial Sequence
  Description of Artificial Sequence: Synthetic oligonucleotide
  Sense strand starting at position 3225 of SEQ ID NO: 1879602
ucccuugucccugauauug

SEQ ID NO: 1918939 - RNA, 19 nt, Artificial Sequence
  Description of Artificial Sequence: Synthetic oligonucleotide
  Antisense strand to SEQ ID NO: 1918938
caauaucagggacaaggga

SEQ ID NO: 1918940 - RNA, 19 nt, Artificial Sequence
  Description of Artificial Sequence: Synthetic oligonucleotide
  Sense strand starting at position 3350 of SEQ ID NO: 1879602
gauagauuacuugagcgca

SEQ ID NO: 1918941 - RNA, 19 nt, Artificial Sequence
  Description of Artificial Sequence: Synthetic oligonucleotide
  Antisense strand to SEQ ID NO: 1918940
ugcgcucaaguaaucuauc

SEQ ID NO: 1918942 - RNA, 19 nt, Artificial Sequence
  Description of Artificial Sequence: Synthetic oligonucleotide
  Sense strand starting at position 3475 of SEQ ID NO: 1879602
gaaguuuagaugcgaggau

SEQ ID NO: 1918943 - RNA, 19 nt, Artificial Sequence
  Description of Artificial Sequence: Synthetic oligonucleotide
  Antisense strand to SEQ ID NO: 1918942
auccucgcaucuaaacuuc

SEQ ID NO: 1918944 - RNA, 19 nt, Artificial Sequence
  Description of Artificial Sequence: Synthetic oligonucleotide
  Sense strand starting at position 3825 of SEQ ID NO: 1879602
gcgagccuucuugucuuua

SEQ ID NO: 1918945 - RNA, 19 nt, Artificial Sequence
  Description of Artificial Sequence: Synthetic oligonucleotide
  Antisense strand to SEQ ID NO: 1918944
uaaagacaagaaggcucgc

SEQ ID NO: 1918946 - RNA, 19 nt, Artificial Sequence
  Description of Artificial Sequence: Synthetic oligonucleotide
  Sense strand starting at position 3841 of SEQ ID NO: 1879602
uuaagagcagcgcauauau

SEQ ID NO: 1918947 - RNA, 19 nt, Artificial Sequence
  Description of Artificial Sequence: Synthetic oligonucleotide
  Antisense strand to SEQ ID NO: 1918946
auauaugcgcugcucuuaa

SEQ ID NO: 1918948 - RNA, 19 nt, Artificial Sequence
  Description of Artificial Sequence: Synthetic oligonucleotide
  Sense strand starting at position 3924 of SEQ ID NO: 1879602
guugaaauaucugcuaagu

SEQ ID NO: 1918949 - RNA, 19 nt, Artificial Sequence
  Description of Artificial Sequence: Synthetic oligonucleotide
  Antisense strand to SEQ ID NO: 1918948
acuuagcagauauuucaac

SEQ ID NO: 1918950 - RNA, 19 nt, Artificial Sequence
  Description of Artificial Sequence: Synthetic oligonucleotide
  Sense strand starting at position 3967 of SEQ ID NO: 1879602
gggaucacacagugauucu

SEQ ID NO: 1918951 - RNA, 19 nt, Artificial Sequence
  Description of Artificial Sequence: Synthetic oligonucleotide
  Antisense strand to SEQ ID NO: 1918950
agaaucacugugugauccc

SEQ ID NO: 1918952 - RNA, 19 nt, Artificial Sequence
  Description of Artificial Sequence: Synthetic oligonucleotide
  Sense strand starting at position 3974 of SEQ ID NO: 1879602
cacagugauucuuccgaug

SEQ ID NO: 1918953 - RNA, 19 nt, Artificial Sequence
  Description of Artificial Sequence: Synthetic oligonucleotide
  Antisense strand to SEQ ID NO: 1918952
caucggaagaaucacugug

SEQ ID NO: 1918954 - RNA, 19 nt, Artificial Sequence
  Description of Artificial Sequence: Synthetic oligonucleotide
  Sense strand starting at position 491 of SEQ ID NO: 1879603
agaccacuggcccauuaau

SEQ ID NO: 1918955 - RNA, 19 nt, Artificial Sequence
  Description of Artificial Sequence: Synthetic oligonucleotide
  Antisense strand to SEQ ID NO: 1918954
auuaaugggccaguggucu

SEQ ID NO: 1918956 - RNA, 19 nt, Artificial Sequence
  Description of Artificial Sequence: Synthetic oligonucleotide
  Sense strand starting at position 544 of SEQ ID NO: 1879603
uggaaagugucacugagga

SEQ ID NO: 1918957 - RNA, 19 nt, Artificial Sequence
  Description of Artificial Sequence: Synthetic oligonucleotide
  Antisense strand to SEQ ID NO: 1918956
uccucagugacacuuucca

SEQ ID NO: 1918958 - RNA, 19 nt, Artificial Sequence
  Description of Artificial Sequence: Synthetic oligonucleotide
  Sense strand starting at position 614 of SEQ ID NO: 1879603
gcccuaaagcaaugagaau

SEQ ID NO: 1918959 - RNA, 19 nt, Artificial Sequence
  Description of Artificial Sequence: Synthetic oligonucleotide
  Antisense strand to SEQ ID NO: 1918958
auucucauugcuuuagggc

SEQ ID NO: 1918960 - RNA, 19 nt, Artificial Sequence
  Description of Artificial Sequence: Synthetic oligonucleotide
  Sense strand starting at position 1055 of SEQ ID NO: 1879603
ggugcaguccuauaauccu

SEQ ID NO: 1918961 - RNA, 19 nt, Artificial Sequence
  Description of Artificial Sequence: Synthetic oligonucleotide
  Antisense strand to SEQ ID NO: 1918960
aggauuauaggacugcacc

SEQ ID NO: 1918962 - RNA, 19 nt, Artificial Sequence
  Description of Artificial Sequence: Synthetic oligonucleotide
  Sense strand starting at position 1226 of SEQ ID NO: 1879603
acgugaugguauucuagag

SEQ ID NO: 1918963 - RNA, 19 nt, Artificial Sequence
  Description of Artificial Sequence: Synthetic oligonucleotide
  Antisense strand to SEQ ID NO: 1918962
cucuagaauaccaucacgu

SEQ ID NO: 1918964 - RNA, 19 nt, Artificial Sequence
  Description of Artificial Sequence: Synthetic oligonucleotide
  Sense strand starting at position 1230 of SEQ ID NO: 1879603
gaugguauucuagagcauu

SEQ ID NO: 1918965 - RNA, 19 nt, Artificial Sequence
  Description of Artificial Sequence: Synthetic oligonucleotide
  Antisense strand to SEQ ID NO: 1918964
aaugcucuagaauaccauc

SEQ ID NO: 1918966 - RNA, 19 nt, Artificial Sequence
  Description of Artificial Sequence: Synthetic oligonucleotide
  Sense strand starting at position 1380 of SEQ ID NO: 1879603
ugcaguagucuagagcacu

SEQ ID NO: 1918967 - RNA, 19 nt, Artificial Sequence
  Description of Artificial Sequence: Synthetic oligonucleotide
  Antisense strand to SEQ ID NO: 1918966
agugcucuagacuacugca

SEQ ID NO: 1918968 - RNA, 19 nt, Artificial Sequence
  Description of Artificial Sequence: Synthetic oligonucleotide
  Sense strand starting at position 1517 of SEQ ID NO: 1879603
cggaacaagucucuugaga

SEQ ID NO: 1918969 - RNA, 19 nt, Artificial Sequence
  Description of Artificial Sequence: Synthetic oligonucleotide
  Antisense strand to SEQ ID NO: 1918968
ucucaagagacuuguuccg

SEQ ID NO: 1918970 - RNA, 19 nt, Artificial Sequence
  Description of Artificial Sequence: Synthetic oligonucleotide
  Sense strand starting at position 1525 of SEQ ID NO: 1879603
gucucuugagaauggugua

SEQ ID NO: 1918971 - RNA, 19 nt, Artificial Sequence
  Description of Artificial Sequence: Synthetic oligonucleotide
  Antisense strand to SEQ ID NO: 1918970
uacaccauucucaagagac

SEQ ID NO: 1918972 - RNA, 19 nt, Artificial Sequence
  Description of Artificial Sequence: Synthetic oligonucleotide
  Sense strand starting at position 1530 of SEQ ID NO: 1879603
uugagaaugguguacggga

SEQ ID NO: 1918973 - RNA, 19 nt, Artificial Sequence
  Description of Artificial Sequence: Synthetic oligonucleotide
  Antisense strand to SEQ ID NO: 1918972
ucccguacaccauucucaa

SEQ ID NO: 1918974 - RNA, 19 nt, Artificial Sequence
  Description of Artificial Sequence: Synthetic oligonucleotide
  Sense strand starting at position 1537 of SEQ ID NO: 1879603
ugguguacgggagaucuaa

SEQ ID NO: 1918975 - RNA, 19 nt, Artificial Sequence
  Description of Artificial Sequence: Synthetic oligonucleotide
  Antisense strand to SEQ ID NO: 1918974
uuagaucucccguacacca

SEQ ID NO: 1918976 - RNA, 19 nt, Artificial Sequence
  Description of Artificial Sequence: Synthetic oligonucleotide
  Sense strand starting at position 1589 of SEQ ID NO: 1879603
ucacaauaccgcuaagugu

SEQ ID NO: 1918977 - RNA, 19 nt, Artificial Sequence
  Description of Artificial Sequence: Synthetic oligonucleotide
  Antisense strand to SEQ ID NO: 1918976
acacuuagcgguauuguga

SEQ ID NO: 1918978 - RNA, 19 nt, Artificial Sequence
  Description of Artificial Sequence: Synthetic oligonucleotide
  Sense strand starting at position 1604 of SEQ ID NO: 1879603
gugugugaacuauagcuga

SEQ ID NO: 1918979 - RNA, 19 nt, Artificial Sequence
  Description of Artificial Sequence: Synthetic oligonucleotide
  Antisense strand to SEQ ID NO: 1918978
ucagcuauaguucacacac

SEQ ID NO: 1918980 - RNA, 19 nt, Artificial Sequence
  Description of Artificial Sequence: Synthetic oligonucleotide
  Sense strand starting at position 1828 of SEQ ID NO: 1879603
aggaaauucucugugccau

SEQ ID NO: 1918981 - RNA, 19 nt, Artificial Sequence
  Description of Artificial Sequence: Synthetic oligonucleotide
  Antisense strand to SEQ ID NO: 1918980
auggcacagagaauuuccu

SEQ ID NO: 1918982 - RNA, 19 nt, Artificial Sequence
  Description of Artificial Sequence: Synthetic oligonucleotide
  Sense strand starting at position 1829 of SEQ ID NO: 1879603
ggaaauucucugugccauu

SEQ ID NO: 1918983 - RNA, 19 nt, Artificial Sequence
  Description of Artificial Sequence: Synthetic oligonucleotide
  Antisense strand to SEQ ID NO: 1918982
aauggcacagagaauuucc

SEQ ID NO: 1918984 - RNA, 19 nt, Artificial Sequence
  Description of Artificial Sequence: Synthetic oligonucleotide
  Sense strand starting at position 1892 of SEQ ID NO: 1879603
acgggcauguuccuaagaa

SEQ ID NO: 1918985 - RNA, 19 nt, Artificial Sequence
  Description of Artificial Sequence: Synthetic oligonucleotide
  Antisense strand to SEQ ID NO: 1918984
uucuuaggaacaugcccgu

SEQ ID NO: 1918986 - RNA, 19 nt, Artificial Sequence
  Description of Artificial Sequence: Synthetic oligonucleotide
  Sense strand starting at position 2009 of SEQ ID NO: 1879603
gugcaaacucaggagcuuu

SEQ ID NO: 1918987 - RNA, 19 nt, Artificial Sequence
  Description of Artificial Sequence: Synthetic oligonucleotide
  Antisense strand to SEQ ID NO: 1918986
aaagcuccugaguuugcac

SEQ ID NO: 1918988 - RNA, 19 nt, Artificial Sequence
  Description of Artificial Sequence: Synthetic oligonucleotide
  Sense strand starting at position 2247 of SEQ ID NO: 1879603
gaugaaguuugacuaacau

SEQ ID NO: 1918989 - RNA, 19 nt, Artificial Sequence
  Description of Artificial Sequence: Synthetic oligonucleotide
  Antisense strand to SEQ ID NO: 1918988
auguuagucaaacuucauc

SEQ ID NO: 1918990 - RNA, 19 nt, Artificial Sequence
  Description of Artificial Sequence: Synthetic oligonucleotide
  Sense strand starting at position 2277 of SEQ ID NO: 1879603
agugacauggaagguuuaa

SEQ ID NO: 1918991 - RNA, 19 nt, Artificial Sequence
  Description of Artificial Sequence: Synthetic oligonucleotide
  Antisense strand to SEQ ID NO: 1918990
uuaaaccuuccaugucacu

SEQ ID NO: 1918992 - RNA, 19 nt, Artificial Sequence
  Description of Artificial Sequence: Synthetic oligonucleotide
  Sense strand starting at position 2345 of SEQ ID NO: 1879603
gggagaauauuuggccaca

SEQ ID NO: 1918993 - RNA, 19 nt, Artificial Sequence
  Description of Artificial Sequence: Synthetic oligonucleotide
  Antisense strand to SEQ ID NO: 1918992
uguggccaaauauucuccc

SEQ ID NO: 1918994 - RNA, 19 nt, Artificial Sequence
  Description of Artificial Sequence: Synthetic oligonucleotide
  Sense strand starting at position 2445 of SEQ ID NO: 1879603
ucuguuauccaacaguuac

SEQ ID NO: 1918995 - RNA, 19 nt, Artificial Sequence
  Description of Artificial Sequence: Synthetic oligonucleotide
  Antisense strand to SEQ ID NO: 1918994
guaacuguuggauaacaga

SEQ ID NO: 1918996 - RNA, 19 nt, Artificial Sequence
  Description of Artificial Sequence: Synthetic oligonucleotide
  Sense strand starting at position 2521 of SEQ ID NO: 1879603
aaccacugaggguguuauu

SEQ ID NO: 1918997 - RNA, 19 nt, Artificial Sequence
  Description of Artificial Sequence: Synthetic oligonucleotide
  Antisense strand to SEQ ID NO: 1918996
aauaacacccucagugguu

SEQ ID NO: 1918998 - RNA, 19 nt, Artificial Sequence
  Description of Artificial Sequence: Synthetic oligonucleotide
  Sense strand starting at position 2528 of SEQ ID NO: 1879603
gaggguguuauugaucaca

SEQ ID NO: 1918999 - RNA, 19 nt, Artificial Sequence
  Description of Artificial Sequence: Synthetic oligonucleotide
  Antisense strand to SEQ ID NO: 1918998
ugugaucaauaacacccuc

SEQ ID NO: 1919000 - RNA, 19 nt, Artificial Sequence
  Description of Artificial Sequence: Synthetic oligonucleotide
  Sense strand starting at position 2530 of SEQ ID NO: 1879603
ggguguuauugaucacaag

SEQ ID NO: 1919001 - RNA, 19 nt, Artificial Sequence
  Description of Artificial Sequence: Synthetic oligonucleotide
  Antisense strand to SEQ ID NO: 1919000
cuugugaucaauaacaccc

SEQ ID NO: 1919002 - RNA, 19 nt, Artificial Sequence
  Description of Artificial Sequence: Synthetic oligonucleotide
  Sense strand starting at position 2707 of SEQ ID NO: 1879603
gaaagacucugucuggauu

SEQ ID NO: 1919003 - RNA, 19 nt, Artificial Sequence
  Description of Artificial Sequence: Synthetic oligonucleotide
  Antisense strand to SEQ ID NO: 1919002
aauccagacagagucuuuc

SEQ ID NO: 1919004 - RNA, 19 nt, Artificial Sequence
  Description of Artificial Sequence: Synthetic oligonucleotide
  Sense strand starting at position 2713 of SEQ ID NO: 1879603
cucugucuggauugaguuu

SEQ ID NO: 1919005 - RNA, 19 nt, Artificial Sequence
  Description of Artificial Sequence: Synthetic oligonucleotide
  Antisense strand to SEQ ID NO: 1919004
aaacucaauccagacagag

SEQ ID NO: 1919006 - RNA, 19 nt, Artificial Sequence
  Description of Artificial Sequence: Synthetic oligonucleotide
  Sense strand starting at position 2714 of SEQ ID NO: 1879603
ucugucuggauugaguuua

SEQ ID NO: 1919007 - RNA, 19 nt, Artificial Sequence
  Description of Artificial Sequence: Synthetic oligonucleotide
  Antisense strand to SEQ ID NO: 1919006
uaaacucaauccagacaga

SEQ ID NO: 1919008 - RNA, 19 nt, Artificial Sequence
  Description of Artificial Sequence: Synthetic oligonucleotide
  Sense strand starting at position 2743 of SEQ ID NO: 1879603
agggaauaguuacagaaga

SEQ ID NO: 1919009 - RNA, 19 nt, Artificial Sequence
  Description of Artificial Sequence: Synthetic oligonucleotide
  Antisense strand to SEQ ID NO: 1919008
ucuucuguaacuauucccu

SEQ ID NO: 1919010 - RNA, 19 nt, Artificial Sequence
  Description of Artificial Sequence: Synthetic oligonucleotide
  Sense strand starting at position 3055 of SEQ ID NO: 1879603
ggugcuauggucuggaaac

SEQ ID NO: 1919011 - RNA, 19 nt, Artificial Sequence
  Description of Artificial Sequence: Synthetic oligonucleotide
  Antisense strand to SEQ ID NO: 1919010
guuuccagaccauagcacc

SEQ ID NO: 1919012 - RNA, 19 nt, Artificial Sequence
  Description of Artificial Sequence: Synthetic oligonucleotide
  Sense strand starting at position 3057 of SEQ ID NO: 1879603
ugcuauggucuggaaaccu

SEQ ID NO: 1919013 - RNA, 19 nt, Artificial Sequence
  Description of Artificial Sequence: Synthetic oligonucleotide
  Antisense strand to SEQ ID NO: 1919012
agguuuccagaccauagca

SEQ ID NO: 1919014 - RNA, 19 nt, Artificial Sequence
  Description of Artificial Sequence: Synthetic oligonucleotide
  Sense strand starting at position 3224 of SEQ ID NO: 1879603
ccucccuugucccugauau

SEQ ID NO: 1919015 - RNA, 19 nt, Artificial Sequence
  Description of Artificial Sequence: Synthetic oligonucleotide
  Antisense strand to SEQ ID NO: 1919014
auaucagggacaagggagg

SEQ ID NO: 1919016 - RNA, 19 nt, Artificial Sequence
  Description of Artificial Sequence: Synthetic oligonucleotide
  Sense strand starting at position 3225 of SEQ ID NO: 1879603
cucccuugucccugauauu

SEQ ID NO: 1919017 - RNA, 19 nt, Artificial Sequence
  Description of Artificial Sequence: Synthetic oligonucleotide
  Antisense strand to SEQ ID NO: 1919016
aauaucagggacaagggag

SEQ ID NO: 1919018 - RNA, 19 nt, Artificial Sequence
  Description of Artificial Sequence: Synthetic oligonucleotide
  Sense strand starting at position 3226 of SEQ ID NO: 1879603
ucccuugucccugauauug

SEQ ID NO: 1919019 - RNA, 19 nt, Artificial Sequence
  Description of Artificial Sequence: Synthetic oligonucleotide
  Antisense strand to SEQ ID NO: 1919018
caauaucagggacaaggga

SEQ ID NO: 1919020 - RNA, 19 nt, Artificial Sequence
  Description of Artificial Sequence: Synthetic oligonucleotide
  Sense strand starting at position 3351 of SEQ ID NO: 1879603
gauagauuacuugagcgca

SEQ ID NO: 1919021 - RNA, 19 nt, Artificial Sequence
  Description of Artificial Sequence: Synthetic oligonucleotide
  Antisense strand to SEQ ID NO: 1919020
ugcgcucaaguaaucuauc

SEQ ID NO: 1919022 - RNA, 19 nt, Artificial Sequence
  Description of Artificial Sequence: Synthetic oligonucleotide
  Sense strand starting at position 3476 of SEQ ID NO: 1879603
gaaguuuagaugcgaggau

SEQ ID NO: 1919023 - RNA, 19 nt, Artificial Sequence
  Description of Artificial Sequence: Synthetic oligonucleotide
  Antisense strand to SEQ ID NO: 1919022
auccucgcaucuaaacuuc

SEQ ID NO: 1919024 - RNA, 19 nt, Artificial Sequence
  Description of Artificial Sequence: Synthetic oligonucleotide
  Sense strand starting at position 3838 of SEQ ID NO: 1879603
gcgagccuucuugucuuua

SEQ ID NO: 1919025 - RNA, 19 nt, Artificial Sequence
  Description of Artificial Sequence: Synthetic oligonucleotide
  Antisense strand to SEQ ID NO: 1919024
uaaagacaagaaggcucgc

SEQ ID NO: 1919026 - RNA, 19 nt, Artificial Sequence
  Description of Artificial Sequence: Synthetic oligonucleotide
  Sense strand starting at position 3842 of SEQ ID NO: 1879603
gccuucuugucuuuaagag

SEQ ID NO: 1919027 - RNA, 19 nt, Artificial Sequence
  Description of Artificial Sequence: Synthetic oligonucleotide
  Antisense strand to SEQ ID NO: 1919026
cucuuaaagacaagaaggc

SEQ ID NO: 1919028 - RNA, 19 nt, Artificial Sequence
  Description of Artificial Sequence: Synthetic oligonucleotide
  Sense strand starting at position 3854 of SEQ ID NO: 1879603
uuaagagcagcgcauauau

SEQ ID NO: 1919029 - RNA, 19 nt, Artificial Sequence
  Description of Artificial Sequence: Synthetic oligonucleotide
  Antisense strand to SEQ ID NO: 1919028
auauaugcgcugcucuuaa

SEQ ID NO: 1919030 - RNA, 19 nt, Artificial Sequence
  Description of Artificial Sequence: Synthetic oligonucleotide
  Sense strand starting at position 3937 of SEQ ID NO: 1879603
guugaaauaucugcuaagu

SEQ ID NO: 1919031 - RNA, 19 nt, Artificial Sequence
  Description of Artificial Sequence: Synthetic oligonucleotide
  Antisense strand to SEQ ID NO: 1919030
acuuagcagauauuucaac

SEQ ID NO: 1919032 - RNA, 19 nt, Artificial Sequence
  Description of Artificial Sequence: Synthetic oligonucleotide
  Sense strand starting at position 3980 of SEQ ID NO: 1879603
gggaucacacagugauucu

SEQ ID NO: 1919033 - RNA, 19 nt, Artificial Sequence
  Description of Artificial Sequence: Synthetic oligonucleotide
  Antisense strand to SEQ ID NO: 1919032
agaaucacugugugauccc

SEQ ID NO: 1919034 - RNA, 19 nt, Artificial Sequence
  Description of Artificial Sequence: Synthetic oligonucleotide
  Sense strand starting at position 80 of SEQ ID NO: 1879604
auuugugguugagcucuua

SEQ ID NO: 1919035 - RNA, 19 nt, Artificial Sequence
  Description of Artificial Sequence: Synthetic oligonucleotide
  Antisense strand to SEQ ID NO: 1919034
uaagagcucaaccacaaau

SEQ ID NO: 1919036 - RNA, 19 nt, Artificial Sequence
  Description of Artificial Sequence: Synthetic oligonucleotide
  Sense strand starting at position 115 of SEQ ID NO: 1879604
aggauaagugcucagcaag

SEQ ID NO: 1919037 - RNA, 19 nt, Artificial Sequence
  Description of Artificial Sequence: Synthetic oligonucleotide
  Antisense strand to SEQ ID NO: 1919036
cuugcugagcacuuauccu

SEQ ID NO: 1919038 - RNA, 19 nt, Artificial Sequence
  Description of Artificial Sequence: Synthetic oligonucleotide
  Sense strand starting at position 131 of SEQ ID NO: 1879604
aagggcuuaugucuaugau

SEQ ID NO: 1919039 - RNA, 19 nt, Artificial Sequence
  Description of Artificial Sequence: Synthetic oligonucleotide
  Antisense strand to SEQ ID NO: 1919038
aucauagacauaagcccuu

SEQ ID NO: 1919040 - RNA, 19 nt, Artificial Sequence
  Description of Artificial Sequence: Synthetic oligonucleotide
  Sense strand starting at position 132 of SEQ ID NO: 1879604
agggcuuaugucuaugauc

SEQ ID NO: 1919041 - RNA, 19 nt, Artificial Sequence
  Description of Artificial Sequence: Synthetic oligonucleotide
  Antisense strand to SEQ ID NO: 1919040
gaucauagacauaagcccu

SEQ ID NO: 1919042 - RNA, 19 nt, Artificial Sequence
  Description of Artificial Sequence: Synthetic oligonucleotide
  Sense strand starting at position 286 of SEQ ID NO: 1879604
acuuucuggccauaaaugu

SEQ ID NO: 1919043 - RNA, 19 nt, Artificial Sequence
  Description of Artificial Sequence: Synthetic oligonucleotide
  Antisense strand to SEQ ID NO: 1919042
acauuuauggccagaaagu

SEQ ID NO: 1919044 - RNA, 19 nt, Artificial Sequence
  Description of Artificial Sequence: Synthetic oligonucleotide
  Sense strand starting at position 443 of SEQ ID NO: 1879604
ugaacagaugagugcaaua

SEQ ID NO: 1919045 - RNA, 19 nt, Artificial Sequence
  Description of Artificial Sequence: Synthetic oligonucleotide
  Antisense strand to SEQ ID NO: 1919044
uauugcacucaucuguuca

SEQ ID NO: 1919046 - RNA, 19 nt, Artificial Sequence
  Description of Artificial Sequence: Synthetic oligonucleotide
  Sense strand starting at position 448 of SEQ ID NO: 1879604
agaugagugcaauauucua

SEQ ID NO: 1919047 - RNA, 19 nt, Artificial Sequence
  Description of Artificial Sequence: Synthetic oligonucleotide
  Antisense strand to SEQ ID NO: 1919046
uagaauauugcacucaucu

SEQ ID NO: 1919048 - RNA, 19 nt, Artificial Sequence
  Description of Artificial Sequence: Synthetic oligonucleotide
  Sense strand starting at position 586 of SEQ ID NO: 1879604
gagcuacuuccugggaaug

SEQ ID NO: 1919049 - RNA, 19 nt, Artificial Sequence
  Description of Artificial Sequence: Synthetic oligonucleotide
  Antisense strand to SEQ ID NO: 1919048
cauucccaggaaguagcuc

SEQ ID NO: 1919050 - RNA, 19 nt, Artificial Sequence
  Description of Artificial Sequence: Synthetic oligonucleotide
  Sense strand starting at position 587 of SEQ ID NO: 1879604
agcuacuuccugggaauga

SEQ ID NO: 1919051 - RNA, 19 nt, Artificial Sequence
  Description of Artificial Sequence: Synthetic oligonucleotide
  Antisense strand to SEQ ID NO: 1919050
ucauucccaggaaguagcu

SEQ ID NO: 1919052 - RNA, 19 nt, Artificial Sequence
  Description of Artificial Sequence: Synthetic oligonucleotide
  Sense strand starting at position 591 of SEQ ID NO: 1879604
acuuccugggaaugauauu

SEQ ID NO: 1919053 - RNA, 19 nt, Artificial Sequence
  Description of Artificial Sequence: Synthetic oligonucleotide
  Antisense strand to SEQ ID NO: 1919052
aauaucauucccaggaagu

SEQ ID NO: 1919054 - RNA, 19 nt, Artificial Sequence
  Description of Artificial Sequence: Synthetic oligonucleotide
  Sense strand starting at position 597 of SEQ ID NO: 1879604
ugggaaugauauucuguuu

SEQ ID NO: 1919055 - RNA, 19 nt, Artificial Sequence
  Description of Artificial Sequence: Synthetic oligonucleotide
  Antisense strand to SEQ ID NO: 1919054
aaacagaauaucauuccca

SEQ ID NO: 1919056 - RNA, 19 nt, Artificial Sequence
  Description of Artificial Sequence: Synthetic oligonucleotide
  Sense strand starting at position 665 of SEQ ID NO: 1879604
uguugcuuucuguuccauu

SEQ ID NO: 1919057 - RNA, 19 nt, Artificial Sequence
  Description of Artificial Sequence: Synthetic oligonucleotide
  Antisense strand to SEQ ID NO: 1919056
aauggaacagaaagcaaca

SEQ ID NO: 1919058 - RNA, 19 nt, Artificial Sequence
  Description of Artificial Sequence: Synthetic oligonucleotide
  Sense strand starting at position 735 of SEQ ID NO: 1879604
ugagaacucuaccuuagug

SEQ ID NO: 1919059 - RNA, 19 nt, Artificial Sequence
  Description of Artificial Sequence: Synthetic oligonucleotide
  Antisense strand to SEQ ID NO: 1919058
cacuaagguagaguucuca

SEQ ID NO: 1919060 - RNA, 19 nt, Artificial Sequence
  Description of Artificial Sequence: Synthetic oligonucleotide
  Sense strand starting at position 857 of SEQ ID NO: 1879604
ccuuccaggucaguuaaua

SEQ ID NO: 1919061 - RNA, 19 nt, Artificial Sequence
  Description of Artificial Sequence: Synthetic oligonucleotide
  Antisense strand to SEQ ID NO: 1919060
uauuaacugaccuggaagg

SEQ ID NO: 1919062 - RNA, 19 nt, Artificial Sequence
  Description of Artificial Sequence: Synthetic oligonucleotide
  Sense strand starting at position 895 of SEQ ID NO: 1879604
caaauaaaugguggaaugu

SEQ ID NO: 1919063 - RNA, 19 nt, Artificial Sequence
  Description of Artificial Sequence: Synthetic oligonucleotide
  Antisense strand to SEQ ID NO: 1919062
acauuccaccauuuauuug

SEQ ID NO: 1919064 - RNA, 19 nt, Artificial Sequence
  Description of Artificial Sequence: Synthetic oligonucleotide
  Sense strand starting at position 1576 of SEQ ID NO: 1879604
ugguguuaucaauaggagu

SEQ ID NO: 1919065 - RNA, 19 nt, Artificial Sequence
  Description of Artificial Sequence: Synthetic oligonucleotide
  Antisense strand to SEQ ID NO: 1919064
acuccuauugauaacacca

SEQ ID NO: 1919066 - RNA, 19 nt, Artificial Sequence
  Description of Artificial Sequence: Synthetic oligonucleotide
  Sense strand starting at position 1655 of SEQ ID NO: 1879604
ucacaaguuuagucaacua

SEQ ID NO: 1919067 - RNA, 19 nt, Artificial Sequence
  Description of Artificial Sequence: Synthetic oligonucleotide
  Antisense strand to SEQ ID NO: 1919066
uaguugacuaaacuuguga

SEQ ID NO: 1919068 - RNA, 19 nt, Artificial Sequence
  Description of Artificial Sequence: Synthetic oligonucleotide
  Sense strand starting at position 1838 of SEQ ID NO: 1879604
gcagaagauuagucuccua

SEQ ID NO: 1919069 - RNA, 19 nt, Artificial Sequence
  Description of Artificial Sequence: Synthetic oligonucleotide
  Antisense strand to SEQ ID NO: 1919068
uaggagacuaaucuucugc

SEQ ID NO: 1919070 - RNA, 19 nt, Artificial Sequence
  Description of Artificial Sequence: Synthetic oligonucleotide
  Sense strand starting at position 2020 of SEQ ID NO: 1879604
aauguuauguaucuggaac

SEQ ID NO: 1919071 - RNA, 19 nt, Artificial Sequence
  Description of Artificial Sequence: Synthetic oligonucleotide
  Antisense strand to SEQ ID NO: 1919070
guuccagauacauaacauu

SEQ ID NO: 1919072 - RNA, 19 nt, Artificial Sequence
  Description of Artificial Sequence: Synthetic oligonucleotide
  Sense strand starting at position 2136 of SEQ ID NO: 1879604
agcagagaucgucacuaug

SEQ ID NO: 1919073 - RNA, 19 nt, Artificial Sequence
  Description of Artificial Sequence: Synthetic oligonucleotide
  Antisense strand to SEQ ID NO: 1919072
cauagugacgaucucugcu

SEQ ID NO: 1919074 - RNA, 19 nt, Artificial Sequence
  Description of Artificial Sequence: Synthetic oligonucleotide
  Sense strand starting at position 2139 of SEQ ID NO: 1879604
agagaucgucacuaugcua

SEQ ID NO: 1919075 - RNA, 19 nt, Artificial Sequence
  Description of Artificial Sequence: Synthetic oligonucleotide
  Antisense strand to SEQ ID NO: 1919074
uagcauagugacgaucucu

SEQ ID NO: 1919076 - RNA, 19 nt, Artificial Sequence
  Description of Artificial Sequence: Synthetic oligonucleotide
  Sense strand starting at position 2261 of SEQ ID NO: 1879604
guggcuuuaguauaauaca

SEQ ID NO: 1919077 - RNA, 19 nt, Artificial Sequence
  Description of Artificial Sequence: Synthetic oligonucleotide
  Antisense strand to SEQ ID NO: 1919076
uguauuauacuaaagccac

SEQ ID NO: 1919078 - RNA, 19 nt, Artificial Sequence
  Description of Artificial Sequence: Synthetic oligonucleotide
  Sense strand starting at position 2360 of SEQ ID NO: 1879604
uggagucuugacuguacau

SEQ ID NO: 1919079 - RNA, 19 nt, Artificial Sequence
  Description of Artificial Sequence: Synthetic oligonucleotide
  Antisense strand to SEQ ID NO: 1919078
auguacagucaagacucca

SEQ ID NO: 1919080 - RNA, 19 nt, Artificial Sequence
  Description of Artificial Sequence: Synthetic oligonucleotide
  Sense strand starting at position 2414 of SEQ ID NO: 1879604
gcaauuccuccugaguuac

SEQ ID NO: 1919081 - RNA, 19 nt, Artificial Sequence
  Description of Artificial Sequence: Synthetic oligonucleotide
  Antisense strand to SEQ ID NO: 1919080
guaacucaggaggaauugc

SEQ ID NO: 1919082 - RNA, 19 nt, Artificial Sequence
  Description of Artificial Sequence: Synthetic oligonucleotide
  Sense strand starting at position 2448 of SEQ ID NO: 1879604
ugugauucacugggcaaag

SEQ ID NO: 1919083 - RNA, 19 nt, Artificial Sequence
  Description of Artificial Sequence: Synthetic oligonucleotide
  Antisense strand to SEQ ID NO: 1919082
cuuugcccagugaaucaca

SEQ ID NO: 1919084 - RNA, 19 nt, Artificial Sequence
  Description of Artificial Sequence: Synthetic oligonucleotide
  Sense strand starting at position 2473 of SEQ ID NO: 1879604
aggguauccugcuucuaga

SEQ ID NO: 1919085 - RNA, 19 nt, Artificial Sequence
  Description of Artificial Sequence: Synthetic oligonucleotide
  Antisense strand to SEQ ID NO: 1919084
ucuagaagcaggauacccu

SEQ ID NO: 1919086 - RNA, 19 nt, Artificial Sequence
  Description of Artificial Sequence: Synthetic oligonucleotide
  Sense strand starting at position 2531 of SEQ ID NO: 1879604
ucucuagcuccagauguua

SEQ ID NO: 1919087 - RNA, 19 nt, Artificial Sequence
  Description of Artificial Sequence: Synthetic oligonucleotide
  Antisense strand to SEQ ID NO: 1919086
uaacaucuggagcuagaga

SEQ ID NO: 1919088 - RNA, 19 nt, Artificial Sequence
  Description of Artificial Sequence: Synthetic oligonucleotide
  Sense strand starting at position 3135 of SEQ ID NO: 1879604
ugacacaaucuuggugcaa

SEQ ID NO: 1919089 - RNA, 19 nt, Artificial Sequence
  Description of Artificial Sequence: Synthetic oligonucleotide
  Antisense strand to SEQ ID NO: 1919088
uugcaccaagauuguguca

SEQ ID NO: 1919090 - RNA, 19 nt, Artificial Sequence
  Description of Artificial Sequence: Synthetic oligonucleotide
  Sense strand starting at position 3157 of SEQ ID NO: 1879604
cacugagugagccagagua

SEQ ID NO: 1919091 - RNA, 19 nt, Artificial Sequence
  Description of Artificial Sequence: Synthetic oligonucleotide
  Antisense strand to SEQ ID NO: 1919090
uacucuggcucacucagug

SEQ ID NO: 1919092 - RNA, 19 nt, Artificial Sequence
  Description of Artificial Sequence: Synthetic oligonucleotide
  Sense strand starting at position 3159 of SEQ ID NO: 1879604
cugagugagccagaguaca

SEQ ID NO: 1919093 - RNA, 19 nt, Artificial Sequence
  Description of Artificial Sequence: Synthetic oligonucleotide
  Antisense strand to SEQ ID NO: 1919092
uguacucuggcucacucag

SEQ ID NO: 1919094 - RNA, 19 nt, Artificial Sequence
  Description of Artificial Sequence: Synthetic oligonucleotide
  Sense strand starting at position 3180 of SEQ ID NO: 1879604
uuauuaggcccaggaguau

SEQ ID NO: 1919095 - RNA, 19 nt, Artificial Sequence
  Description of Artificial Sequence: Synthetic oligonucleotide
  Antisense strand to SEQ ID NO: 1919094
auacuccugggccuaauaa

SEQ ID NO: 1919096 - RNA, 19 nt, Artificial Sequence
  Description of Artificial Sequence: Synthetic oligonucleotide
  Sense strand starting at position 3195 of SEQ ID NO: 1879604
guauuauaaccacaagcag

SEQ ID NO: 1919097 - RNA, 19 nt, Artificial Sequence
  Description of Artificial Sequence: Synthetic oligonucleotide
  Antisense strand to SEQ ID NO: 1919096
cugcuugugguuauaauac

SEQ ID NO: 1919098 - RNA, 19 nt, Artificial Sequence
  Description of Artificial Sequence: Synthetic oligonucleotide
  Sense strand starting at position 3248 of SEQ ID NO: 1879604
agguuccagugauccagau

SEQ ID NO: 1919099 - RNA, 19 nt, Artificial Sequence
  Description of Artificial Sequence: Synthetic oligonucleotide
  Antisense strand to SEQ ID NO: 1919098
aucuggaucacuggaaccu

SEQ ID NO: 1919100 - RNA, 19 nt, Artificial Sequence
  Description of Artificial Sequence: Synthetic oligonucleotide
  Sense strand starting at position 3356 of SEQ ID NO: 1879604
gugucuccacaauaacuau

SEQ ID NO: 1919101 - RNA, 19 nt, Artificial Sequence
  Description of Artificial Sequence: Synthetic oligonucleotide
  Antisense strand to SEQ ID NO: 1919100
auaguuauuguggagacac

SEQ ID NO: 1919102 - RNA, 19 nt, Artificial Sequence
  Description of Artificial Sequence: Synthetic oligonucleotide
  Sense strand starting at position 3401 of SEQ ID NO: 1879604
caggaaguguuggcaauga

SEQ ID NO: 1919103 - RNA, 19 nt, Artificial Sequence
  Description of Artificial Sequence: Synthetic oligonucleotide
  Antisense strand to SEQ ID NO: 1919102
ucauugccaacacuuccug

SEQ ID NO: 1919104 - RNA, 19 nt, Artificial Sequence
  Description of Artificial Sequence: Synthetic oligonucleotide
  Sense strand starting at position 3424 of SEQ ID NO: 1879604
ccuccugacuggucugaaa

SEQ ID NO: 1919105 - RNA, 19 nt, Artificial Sequence
  Description of Artificial Sequence: Synthetic oligonucleotide
  Antisense strand to SEQ ID NO: 1919104
uuucagaccagucaggagg

SEQ ID NO: 1919106 - RNA, 19 nt, Artificial Sequence
  Description of Artificial Sequence: Synthetic oligonucleotide
  Sense strand starting at position 3561 of SEQ ID NO: 1879604
uuucauggucagggacaga

SEQ ID NO: 1919107 - RNA, 19 nt, Artificial Sequence
  Description of Artificial Sequence: Synthetic oligonucleotide
  Antisense strand to SEQ ID NO: 1919106
ucugucccugaccaugaaa

SEQ ID NO: 1919108 - RNA, 19 nt, Artificial Sequence
  Description of Artificial Sequence: Synthetic oligonucleotide
  Sense strand starting at position 3935 of SEQ ID NO: 1879604
ccagcuaggccucauuaau

SEQ ID NO: 1919109 - RNA, 19 nt, Artificial Sequence
  Description of Artificial Sequence: Synthetic oligonucleotide
  Antisense strand to SEQ ID NO: 1919108
auuaaugaggccuagcugg

SEQ ID NO: 1919110 - RNA, 19 nt, Artificial Sequence
  Description of Artificial Sequence: Synthetic oligonucleotide
  Sense strand starting at position 3982 of SEQ ID NO: 1879604
auucgauauugcucaugaa

SEQ ID NO: 1919111 - RNA, 19 nt, Artificial Sequence
  Description of Artificial Sequence: Synthetic oligonucleotide
  Antisense strand to SEQ ID NO: 1919110
uucaugagcaauaucgaau

SEQ ID NO: 1919112 - RNA, 19 nt, Artificial Sequence
  Description of Artificial Sequence: Synthetic oligonucleotide
  Sense strand starting at position 3983 of SEQ ID NO: 1879604
uucgauauugcucaugaag

SEQ ID NO: 1919113 - RNA, 19 nt, Artificial Sequence
  Description of Artificial Sequence: Synthetic oligonucleotide
  Antisense strand to SEQ ID NO: 1919112
cuucaugagcaauaucgaa

SEQ ID NO: 1919114 - RNA, 19 nt, Artificial Sequence
  Description of Artificial Sequence: Synthetic oligonucleotide
  Sense strand starting at position 507 of SEQ ID NO: 1879605
cucauugacccuuaaggua

SEQ ID NO: 1919115 - RNA, 19 nt, Artificial Sequence
  Description of Artificial Sequence: Synthetic oligonucleotide
  Antisense strand to SEQ ID NO: 1919114
uaccuuaagggucaaugag

SEQ ID NO: 1919116 - RNA, 19 nt, Artificial Sequence
  Description of Artificial Sequence: Synthetic oligonucleotide
  Sense strand starting at position 622 of SEQ ID NO: 1879605
guggcugagccaggauaaa

SEQ ID NO: 1919117 - RNA, 19 nt, Artificial Sequence
  Description of Artificial Sequence: Synthetic oligonucleotide
  Antisense strand to SEQ ID NO: 1919116
uuuauccuggcucagccac

SEQ ID NO: 1919118 - RNA, 19 nt, Artificial Sequence
  Description of Artificial Sequence: Synthetic oligonucleotide
  Sense strand starting at position 656 of SEQ ID NO: 1879605
uucucuguagcucaugaga

SEQ ID NO: 1919119 - RNA, 19 nt, Artificial Sequence
  Description of Artificial Sequence: Synthetic oligonucleotide
  Antisense strand to SEQ ID NO: 1919118
ucucaugagcuacagagaa

SEQ ID NO: 1919120 - RNA, 19 nt, Artificial Sequence
  Description of Artificial Sequence: Synthetic oligonucleotide
  Sense strand starting at position 664 of SEQ ID NO: 1879605
agcucaugagacugagauu

SEQ ID NO: 1919121 - RNA, 19 nt, Artificial Sequence
  Description of Artificial Sequence: Synthetic oligonucleotide
  Antisense strand to SEQ ID NO: 1919120
aaucucagucucaugagcu

SEQ ID NO: 1919122 - RNA, 19 nt, Artificial Sequence
  Description of Artificial Sequence: Synthetic oligonucleotide
  Sense strand starting at position 684 of SEQ ID NO: 1879605
gcaugagcugguguucguu

SEQ ID NO: 1919123 - RNA, 19 nt, Artificial Sequence
  Description of Artificial Sequence: Synthetic oligonucleotide
  Antisense strand to SEQ ID NO: 1919122
aacgaacaccagcucaugc

SEQ ID NO: 1919124 - RNA, 19 nt, Artificial Sequence
  Description of Artificial Sequence: Synthetic oligonucleotide
  Sense strand starting at position 690 of SEQ ID NO: 1879605
gcugguguucguucuccua

SEQ ID NO: 1919125 - RNA, 19 nt, Artificial Sequence
  Description of Artificial Sequence: Synthetic oligonucleotide
  Antisense strand to SEQ ID NO: 1919124
uaggagaacgaacaccagc

SEQ ID NO: 1919126 - RNA, 19 nt, Artificial Sequence
  Description of Artificial Sequence: Synthetic oligonucleotide
  Sense strand starting at position 781 of SEQ ID NO: 1879605
cuuggauaguacuuauaau

SEQ ID NO: 1919127 - RNA, 19 nt, Artificial Sequence
  Description of Artificial Sequence: Synthetic oligonucleotide
  Antisense strand to SEQ ID NO: 1919126
auuauaaguacuauccaag

SEQ ID NO: 1919128 - RNA, 19 nt, Artificial Sequence
  Description of Artificial Sequence: Synthetic oligonucleotide
  Sense strand starting at position 1217 of SEQ ID NO: 1879605
gccgcagaucuuuaacaga

SEQ ID NO: 1919129 - RNA, 19 nt, Artificial Sequence
  Description of Artificial Sequence: Synthetic oligonucleotide
  Antisense strand to SEQ ID NO: 1919128
ucuguuaaagaucugcggc

SEQ ID NO: 1919130 - RNA, 19 nt, Artificial Sequence
  Description of Artificial Sequence: Synthetic oligonucleotide
  Sense strand starting at position 1237 of SEQ ID NO: 1879605
ccuuuaagagucuggacuu

SEQ ID NO: 1919131 - RNA, 19 nt, Artificial Sequence
  Description of Artificial Sequence: Synthetic oligonucleotide
  Antisense strand to SEQ ID NO: 1919130
aaguccagacucuuaaagg

SEQ ID NO: 1919132 - RNA, 19 nt, Artificial Sequence
  Description of Artificial Sequence: Synthetic oligonucleotide
  Sense strand starting at position 1249 of SEQ ID NO: 1879605
uggacuuagagcuaagugu

SEQ ID NO: 1919133 - RNA, 19 nt, Artificial Sequence
  Description of Artificial Sequence: Synthetic oligonucleotide
  Antisense strand to SEQ ID NO: 1919132
acacuuagcucuaagucca

SEQ ID NO: 1919134 - RNA, 19 nt, Artificial Sequence
  Description of Artificial Sequence: Synthetic oligonucleotide
  Sense strand starting at position 1343 of SEQ ID NO: 1879605
uuguguggugaccauuaaa

SEQ ID NO: 1919135 - RNA, 19 nt, Artificial Sequence
  Description of Artificial Sequence: Synthetic oligonucleotide
  Antisense strand to SEQ ID NO: 1919134
uuuaauggucaccacacaa

SEQ ID NO: 1919136 - RNA, 19 nt, Artificial Sequence
  Description of Artificial Sequence: Synthetic oligonucleotide
  Sense strand starting at position 1625 of SEQ ID NO: 1879605
ucuccagaggccuggaauu

SEQ ID NO: 1919137 - RNA, 19 nt, Artificial Sequence
  Description of Artificial Sequence: Synthetic oligonucleotide
  Antisense strand to SEQ ID NO: 1919136
aauuccaggccucuggaga

SEQ ID NO: 1919138 - RNA, 19 nt, Artificial Sequence
  Description of Artificial Sequence: Synthetic oligonucleotide
  Sense strand starting at position 1718 of SEQ ID NO: 1879605
guaugucugccuuucugua

SEQ ID NO: 1919139 - RNA, 19 nt, Artificial Sequence
  Description of Artificial Sequence: Synthetic oligonucleotide
  Antisense strand to SEQ ID NO: 1919138
uacagaaaggcagacauac

SEQ ID NO: 1919140 - RNA, 19 nt, Artificial Sequence
  Description of Artificial Sequence: Synthetic oligonucleotide
  Sense strand starting at position 1725 of SEQ ID NO: 1879605
ugccuuucuguacagagga

SEQ ID NO: 1919141 - RNA, 19 nt, Artificial Sequence
  Description of Artificial Sequence: Synthetic oligonucleotide
  Antisense strand to SEQ ID NO: 1919140
uccucuguacagaaaggca

SEQ ID NO: 1919142 - RNA, 19 nt, Artificial Sequence
  Description of Artificial Sequence: Synthetic oligonucleotide
  Sense strand starting at position 1877 of SEQ ID NO: 1879605
ggaaccugcccucacuaua

SEQ ID NO: 1919143 - RNA, 19 nt, Artificial Sequence
  Description of Artificial Sequence: Synthetic oligonucleotide
  Antisense strand to SEQ ID NO: 1919142
uauagugagggcagguucc

SEQ ID NO: 1919144 - RNA, 19 nt, Artificial Sequence
  Description of Artificial Sequence: Synthetic oligonucleotide
  Sense strand starting at position 1893 of SEQ ID NO: 1879605
auaauugagaguugacuug

SEQ ID NO: 1919145 - RNA, 19 nt, Artificial Sequence
  Description of Artificial Sequence: Synthetic oligonucleotide
  Antisense strand to SEQ ID NO: 1919144
caagucaacucucaauuau

SEQ ID NO: 1919146 - RNA, 19 nt, Artificial Sequence
  Description of Artificial Sequence: Synthetic oligonucleotide
  Sense strand starting at position 1978 of SEQ ID NO: 1879605
caaggacaguaguuggauu

SEQ ID NO: 1919147 - RNA, 19 nt, Artificial Sequence
  Description of Artificial Sequence: Synthetic oligonucleotide
  Antisense strand to SEQ ID NO: 1919146
aauccaacuacuguccuug

SEQ ID NO: 1919148 - RNA, 19 nt, Artificial Sequence
  Description of Artificial Sequence: Synthetic oligonucleotide
  Sense strand starting at position 2023 of SEQ ID NO: 1879605
gucucuuugcuccagacca

SEQ ID NO: 1919149 - RNA, 19 nt, Artificial Sequence
  Description of Artificial Sequence: Synthetic oligonucleotide
  Antisense strand to SEQ ID NO: 1919148
uggucuggagcaaagagac

SEQ ID NO: 1919150 - RNA, 19 nt, Artificial Sequence
  Description of Artificial Sequence: Synthetic oligonucleotide
  Sense strand starting at position 2139 of SEQ ID NO: 1879605
ugaggugaguauguuggaa

SEQ ID NO: 1919151 - RNA, 19 nt, Artificial Sequence
  Description of Artificial Sequence: Synthetic oligonucleotide
  Antisense strand to SEQ ID NO: 1919150
uuccaacauacucaccuca

SEQ ID NO: 1919152 - RNA, 19 nt, Artificial Sequence
  Description of Artificial Sequence: Synthetic oligonucleotide
  Sense strand starting at position 2277 of SEQ ID NO: 1879605
auaagauauccuggucacu

SEQ ID NO: 1919153 - RNA, 19 nt, Artificial Sequence
  Description of Artificial Sequence: Synthetic oligonucleotide
  Antisense strand to SEQ ID NO: 1919152
agugaccaggauaucuuau

SEQ ID NO: 1919154 - RNA, 19 nt, Artificial Sequence
  Description of Artificial Sequence: Synthetic oligonucleotide
  Sense strand starting at position 2279 of SEQ ID NO: 1879605
aagauauccuggucacugu

SEQ ID NO: 1919155 - RNA, 19 nt, Artificial Sequence
  Description of Artificial Sequence: Synthetic oligonucleotide
  Antisense strand to SEQ ID NO: 1919154
acagugaccaggauaucuu

SEQ ID NO: 1919156 - RNA, 19 nt, Artificial Sequence
  Description of Artificial Sequence: Synthetic oligonucleotide
  Sense strand starting at position 2585 of SEQ ID NO: 1879605
uuucucugaggccauaauu

SEQ ID NO: 1919157 - RNA, 19 nt, Artificial Sequence
  Description of Artificial Sequence: Synthetic oligonucleotide
  Antisense strand to SEQ ID NO: 1919156
aauuauggccucagagaaa

SEQ ID NO: 1919158 - RNA, 19 nt, Artificial Sequence
  Description of Artificial Sequence: Synthetic oligonucleotide
  Sense strand starting at position 2789 of SEQ ID NO: 1879605
ggaacuaaaugguuaagca

SEQ ID NO: 1919159 - RNA, 19 nt, Artificial Sequence
  Description of Artificial Sequence: Synthetic oligonucleotide
  Antisense strand to SEQ ID NO: 1919158
ugcuuaaccauuuaguucc

SEQ ID NO: 1919160 - RNA, 19 nt, Artificial Sequence
  Description of Artificial Sequence: Synthetic oligonucleotide
  Sense strand starting at position 2825 of SEQ ID NO: 1879605
gguucagaugugugcauuu

SEQ ID NO: 1919161 - RNA, 19 nt, Artificial Sequence
  Description of Artificial Sequence: Synthetic oligonucleotide
  Antisense strand to SEQ ID NO: 1919160
aaaugcacacaucugaacc

SEQ ID NO: 1919162 - RNA, 19 nt, Artificial Sequence
  Description of Artificial Sequence: Synthetic oligonucleotide
  Sense strand starting at position 2899 of SEQ ID NO: 1879605
gaaauaugugcaugaaagg

SEQ ID NO: 1919163 - RNA, 19 nt, Artificial Sequence
  Description of Artificial Sequence: Synthetic oligonucleotide
  Antisense strand to SEQ ID NO: 1919162
ccuuucaugcacauauuuc

SEQ ID NO: 1919164 - RNA, 19 nt, Artificial Sequence
  Description of Artificial Sequence: Synthetic oligonucleotide
  Sense strand starting at position 2947 of SEQ ID NO: 1879605
ggagccaaaucuguauaaa

SEQ ID NO: 1919165 - RNA, 19 nt, Artificial Sequence
  Description of Artificial Sequence: Synthetic oligonucleotide
  Antisense strand to SEQ ID NO: 1919164
uuuauacagauuuggcucc

SEQ ID NO: 1919166 - RNA, 19 nt, Artificial Sequence
  Description of Artificial Sequence: Synthetic oligonucleotide
  Sense strand starting at position 2975 of SEQ ID NO: 1879605
gaagcagagucuguaggaa

SEQ ID NO: 1919167 - RNA, 19 nt, Artificial Sequence
  Description of Artificial Sequence: Synthetic oligonucleotide
  Antisense strand to SEQ ID NO: 1919166
uuccuacagacucugcuuc

SEQ ID NO: 1919168 - RNA, 19 nt, Artificial Sequence
  Description of Artificial Sequence: Synthetic oligonucleotide
  Sense strand starting at position 3002 of SEQ ID NO: 1879605
ggaauuagaagagguguca

SEQ ID NO: 1919169 - RNA, 19 nt, Artificial Sequence
  Description of Artificial Sequence: Synthetic oligonucleotide
  Antisense strand to SEQ ID NO: 1919168
ugacaccucuucuaauucc

SEQ ID NO: 1919170 - RNA, 19 nt, Artificial Sequence
  Description of Artificial Sequence: Synthetic oligonucleotide
  Sense strand starting at position 3037 of SEQ ID NO: 1879605
caggaauggaguuggaagu

SEQ ID NO: 1919171 - RNA, 19 nt, Artificial Sequence
  Description of Artificial Sequence: Synthetic oligonucleotide
  Antisense strand to SEQ ID NO: 1919170
acuuccaacuccauuccug

SEQ ID NO: 1919172 - RNA, 19 nt, Artificial Sequence
  Description of Artificial Sequence: Synthetic oligonucleotide
  Sense strand starting at position 3312 of SEQ ID NO: 1879605
ugagcaguauugguaauac

SEQ ID NO: 1919173 - RNA, 19 nt, Artificial Sequence
  Description of Artificial Sequence: Synthetic oligonucleotide
  Antisense strand to SEQ ID NO: 1919172
guauuaccaauacugcuca

SEQ ID NO: 1919174 - RNA, 19 nt, Artificial Sequence
  Description of Artificial Sequence: Synthetic oligonucleotide
  Sense strand starting at position 3370 of SEQ ID NO: 1879605
ugugcuguacuuuauauuu

SEQ ID NO: 1919175 - RNA, 19 nt, Artificial Sequence
  Description of Artificial Sequence: Synthetic oligonucleotide
  Antisense strand to SEQ ID NO: 1919174
aaauauaaaguacagcaca

SEQ ID NO: 1919176 - RNA, 19 nt, Artificial Sequence
  Description of Artificial Sequence: Synthetic oligonucleotide
  Sense strand starting at position 3398 of SEQ ID NO: 1879605
uuuaauugccaagagcaaa

SEQ ID NO: 1919177 - RNA, 19 nt, Artificial Sequence
  Description of Artificial Sequence: Synthetic oligonucleotide
  Antisense strand to SEQ ID NO: 1919176
uuugcucuuggcaauuaaa

SEQ ID NO: 1919178 - RNA, 19 nt, Artificial Sequence
  Description of Artificial Sequence: Synthetic oligonucleotide
  Sense strand starting at position 3512 of SEQ ID NO: 1879605
gugaccuuggaguaucacu

SEQ ID NO: 1919179 - RNA, 19 nt, Artificial Sequence
  Description of Artificial Sequence: Synthetic oligonucleotide
  Antisense strand to SEQ ID NO: 1919178
agugauacuccaaggucac

SEQ ID NO: 1919180 - RNA, 19 nt, Artificial Sequence
  Description of Artificial Sequence: Synthetic oligonucleotide
  Sense strand starting at position 3517 of SEQ ID NO: 1879605
cuuggaguaucacuuaacu

SEQ ID NO: 1919181 - RNA, 19 nt, Artificial Sequence
  Description of Artificial Sequence: Synthetic oligonucleotide
  Antisense strand to SEQ ID NO: 1919180
aguuaagugauacuccaag

SEQ ID NO: 1919182 - RNA, 19 nt, Artificial Sequence
  Description of Artificial Sequence: Synthetic oligonucleotide
  Sense strand starting at position 3572 of SEQ ID NO: 1879605
cgaucaauccuggauccau

SEQ ID NO: 1919183 - RNA, 19 nt, Artificial Sequence
  Description of Artificial Sequence: Synthetic oligonucleotide
  Antisense strand to SEQ ID NO: 1919182
auggauccaggauugaucg

SEQ ID NO: 1919184 - RNA, 19 nt, Artificial Sequence
  Description of Artificial Sequence: Synthetic oligonucleotide
  Sense strand starting at position 3599 of SEQ ID NO: 1879605
ccaaauaauuuguagcaga

SEQ ID NO: 1919185 - RNA, 19 nt, Artificial Sequence
  Description of Artificial Sequence: Synthetic oligonucleotide
  Antisense strand to SEQ ID NO: 1919184
ucugcuacaaauuauuugg

SEQ ID NO: 1919186 - RNA, 19 nt, Artificial Sequence
  Description of Artificial Sequence: Synthetic oligonucleotide
  Sense strand starting at position 3613 of SEQ ID NO: 1879605
gcagaaacaguugaaucuu

SEQ ID NO: 1919187 - RNA, 19 nt, Artificial Sequence
  Description of Artificial Sequence: Synthetic oligonucleotide
  Antisense strand to SEQ ID NO: 1919186
aagauucaacuguuucugc

SEQ ID NO: 1919188 - RNA, 19 nt, Artificial Sequence
  Description of Artificial Sequence: Synthetic oligonucleotide
  Sense strand starting at position 3629 of SEQ ID NO: 1879605
cuuacuuguguguaaauau

SEQ ID NO: 1919189 - RNA, 19 nt, Artificial Sequence
  Description of Artificial Sequence: Synthetic oligonucleotide
  Antisense strand to SEQ ID NO: 1919188
auauuuacacacaaguaag

SEQ ID NO: 1919190 - RNA, 19 nt, Artificial Sequence
  Description of Artificial Sequence: Synthetic oligonucleotide
  Sense strand starting at position 3636 of SEQ ID NO: 1879605
guguguaaauaugcauuua

SEQ ID NO: 1919191 - RNA, 19 nt, Artificial Sequence
  Description of Artificial Sequence: Synthetic oligonucleotide
  Antisense strand to SEQ ID NO: 1919190
uaaaugcauauuuacacac

SEQ ID NO: 1919192 - RNA, 19 nt, Artificial Sequence
  Description of Artificial Sequence: Synthetic oligonucleotide
  Sense strand starting at position 3688 of SEQ ID NO: 1879605
agggacucuuaccaauuua

SEQ ID NO: 1919193 - RNA, 19 nt, Artificial Sequence
  Description of Artificial Sequence: Synthetic oligonucleotide
  Antisense strand to SEQ ID NO: 1919192
uaaauugguaagagucccu

SEQ ID NO: 1919194 - RNA, 19 nt, Artificial Sequence
  Description of Artificial Sequence: Synthetic oligonucleotide
  Sense strand starting at position 738 of SEQ ID NO: 1879606
uaguauaaguugccuagaa

SEQ ID NO: 1919195 - RNA, 19 nt, Artificial Sequence
  Description of Artificial Sequence: Synthetic oligonucleotide
  Antisense strand to SEQ ID NO: 1919194
uucuaggcaacuuauacua

SEQ ID NO: 1919196 - RNA, 19 nt, Artificial Sequence
  Description of Artificial Sequence: Synthetic oligonucleotide
  Sense strand starting at position 739 of SEQ ID NO: 1879606
aguauaaguugccuagaac

SEQ ID NO: 1919197 - RNA, 19 nt, Artificial Sequence
  Description of Artificial Sequence: Synthetic oligonucleotide
  Antisense strand to SEQ ID NO: 1919196
guucuaggcaacuuauacu

SEQ ID NO: 1919198 - RNA, 19 nt, Artificial Sequence
  Description of Artificial Sequence: Synthetic oligonucleotide
  Sense strand starting at position 740 of SEQ ID NO: 1879606
guauaaguugccuagaaca

SEQ ID NO: 1919199 - RNA, 19 nt, Artificial Sequence
  Description of Artificial Sequence: Synthetic oligonucleotide
  Antisense strand to SEQ ID NO: 1919198
uguucuaggcaacuuauac

SEQ ID NO: 1919200 - RNA, 19 nt, Artificial Sequence
  Description of Artificial Sequence: Synthetic oligonucleotide
  Sense strand starting at position 742 of SEQ ID NO: 1879606
auaaguugccuagaacaua

SEQ ID NO: 1919201 - RNA, 19 nt, Artificial Sequence
  Description of Artificial Sequence: Synthetic oligonucleotide
  Antisense strand to SEQ ID NO: 1919200
uauguucuaggcaacuuau

SEQ ID NO: 1919202 - RNA, 19 nt, Artificial Sequence
  Description of Artificial Sequence: Synthetic oligonucleotide
  Sense strand starting at position 771 of SEQ ID NO: 1879606
cucaauaaauguuugagua

SEQ ID NO: 1919203 - RNA, 19 nt, Artificial Sequence
  Description of Artificial Sequence: Synthetic oligonucleotide
  Antisense strand to SEQ ID NO: 1919202
uacucaaacauuuauugag

SEQ ID NO: 1919204 - RNA, 19 nt, Artificial Sequence
  Description of Artificial Sequence: Synthetic oligonucleotide
  Sense strand starting at position 772 of SEQ ID NO: 1879606
ucaauaaauguuugaguag

SEQ ID NO: 1919205 - RNA, 19 nt, Artificial Sequence
  Description of Artificial Sequence: Synthetic oligonucleotide
  Antisense strand to SEQ ID NO: 1919204
cuacucaaacauuuauuga

SEQ ID NO: 1919206 - RNA, 19 nt, Artificial Sequence
  Description of Artificial Sequence: Synthetic oligonucleotide
  Sense strand starting at position 775 of SEQ ID NO: 1879606
auaaauguuugaguaggau

SEQ ID NO: 1919207 - RNA, 19 nt, Artificial Sequence
  Description of Artificial Sequence: Synthetic oligonucleotide
  Antisense strand to SEQ ID NO: 1919206
auccuacucaaacauuuau

SEQ ID NO: 1919208 - RNA, 19 nt, Artificial Sequence
  Description of Artificial Sequence: Synthetic oligonucleotide
  Sense strand starting at position 1067 of SEQ ID NO: 1879606
auaaucaguugagugcaua

SEQ ID NO: 1919209 - RNA, 19 nt, Artificial Sequence
  Description of Artificial Sequence: Synthetic oligonucleotide
  Antisense strand to SEQ ID NO: 1919208
uaugcacucaacugauuau

SEQ ID NO: 1919210 - RNA, 19 nt, Artificial Sequence
  Description of Artificial Sequence: Synthetic oligonucleotide
  Sense strand starting at position 1216 of SEQ ID NO: 1879606
guaugcaaacguuaaauga

SEQ ID NO: 1919211 - RNA, 19 nt, Artificial Sequence
  Description of Artificial Sequence: Synthetic oligonucleotide
  Antisense strand to SEQ ID NO: 1919210
ucauuuaacguuugcauac

SEQ ID NO: 1919212 - RNA, 19 nt, Artificial Sequence
  Description of Artificial Sequence: Synthetic oligonucleotide
  Sense strand starting at position 1225 of SEQ ID NO: 1879606
cguuaaaugagguguuaaa

SEQ ID NO: 1919213 - RNA, 19 nt, Artificial Sequence
  Description of Artificial Sequence: Synthetic oligonucleotide
  Antisense strand to SEQ ID NO: 1919212
uuuaacaccucauuuaacg

SEQ ID NO: 1919214 - RNA, 19 nt, Artificial Sequence
  Description of Artificial Sequence: Synthetic oligonucleotide
  Sense strand starting at position 1238 of SEQ ID NO: 1879606
guuaaaguggugggauugu

SEQ ID NO: 1919215 - RNA, 19 nt, Artificial Sequence
  Description of Artificial Sequence: Synthetic oligonucleotide
  Antisense strand to SEQ ID NO: 1919214
acaaucccaccacuuuaac

SEQ ID NO: 1919216 - RNA, 19 nt, Artificial Sequence
  Description of Artificial Sequence: Synthetic oligonucleotide
  Sense strand starting at position 1333 of SEQ ID NO: 1879606
uguaugagugcguuugugu

SEQ ID NO: 1919217 - RNA, 19 nt, Artificial Sequence
  Description of Artificial Sequence: Synthetic oligonucleotide
  Antisense strand to SEQ ID NO: 1919216
acacaaacgcacucauaca

SEQ ID NO: 1919218 - RNA, 19 nt, Artificial Sequence
  Description of Artificial Sequence: Synthetic oligonucleotide
  Sense strand starting at position 1334 of SEQ ID NO: 1879606
guaugagugcguuugugug

SEQ ID NO: 1919219 - RNA, 19 nt, Artificial Sequence
  Description of Artificial Sequence: Synthetic oligonucleotide
  Antisense strand to SEQ ID NO: 1919218
cacacaaacgcacucauac

SEQ ID NO: 1919220 - RNA, 19 nt, Artificial Sequence
  Description of Artificial Sequence: Synthetic oligonucleotide
  Sense strand starting at position 1528 of SEQ ID NO: 1879606
augccuuaugaggaagcua

SEQ ID NO: 1919221 - RNA, 19 nt, Artificial Sequence
  Description of Artificial Sequence: Synthetic oligonucleotide
  Antisense strand to SEQ ID NO: 1919220
uagcuuccucauaaggcau

SEQ ID NO: 1919222 - RNA, 19 nt, Artificial Sequence
  Description of Artificial Sequence: Synthetic oligonucleotide
  Sense strand starting at position 2053 of SEQ ID NO: 1879606
ugaagaaggacgugaguaa

SEQ ID NO: 1919223 - RNA, 19 nt, Artificial Sequence
  Description of Artificial Sequence: Synthetic oligonucleotide
  Antisense strand to SEQ ID NO: 1919222
uuacucacguccuucuuca

SEQ ID NO: 1919224 - RNA, 19 nt, Artificial Sequence
  Description of Artificial Sequence: Synthetic oligonucleotide
  Sense strand starting at position 2355 of SEQ ID NO: 1879606
ccaacuggguucuuggaga

SEQ ID NO: 1919225 - RNA, 19 nt, Artificial Sequence
  Description of Artificial Sequence: Synthetic oligonucleotide
  Antisense strand to SEQ ID NO: 1919224
ucuccaagaacccaguugg

SEQ ID NO: 1919226 - RNA, 19 nt, Artificial Sequence
  Description of Artificial Sequence: Synthetic oligonucleotide
  Sense strand starting at position 2369 of SEQ ID NO: 1879606
ggagaugcuucguuaggga

SEQ ID NO: 1919227 - RNA, 19 nt, Artificial Sequence
  Description of Artificial Sequence: Synthetic oligonucleotide
  Antisense strand to SEQ ID NO: 1919226
ucccuaacgaagcaucucc

SEQ ID NO: 1919228 - RNA, 19 nt, Artificial Sequence
  Description of Artificial Sequence: Synthetic oligonucleotide
  Sense strand starting at position 2450 of SEQ ID NO: 1879606
ggcuguaccaggugaagga

SEQ ID NO: 1919229 - RNA, 19 nt, Artificial Sequence
  Description of Artificial Sequence: Synthetic oligonucleotide
  Antisense strand to SEQ ID NO: 1919228
uccuucaccugguacagcc

SEQ ID NO: 1919230 - RNA, 19 nt, Artificial Sequence
  Description of Artificial Sequence: Synthetic oligonucleotide
  Sense strand starting at position 2598 of SEQ ID NO: 1879606
agugaauacacguagcuga

SEQ ID NO: 1919231 - RNA, 19 nt, Artificial Sequence
  Description of Artificial Sequence: Synthetic oligonucleotide
  Antisense strand to SEQ ID NO: 1919230
ucagcuacguguauucacu

SEQ ID NO: 1919232 - RNA, 19 nt, Artificial Sequence
  Description of Artificial Sequence: Synthetic oligonucleotide
  Sense strand starting at position 2603 of SEQ ID NO: 1879606
auacacguagcugagaauu

SEQ ID NO: 1919233 - RNA, 19 nt, Artificial Sequence
  Description of Artificial Sequence: Synthetic oligonucleotide
  Antisense strand to SEQ ID NO: 1919232
aauucucagcuacguguau

SEQ ID NO: 1919234 - RNA, 19 nt, Artificial Sequence
  Description of Artificial Sequence: Synthetic oligonucleotide
  Sense strand starting at position 2609 of SEQ ID NO: 1879606
guagcugagaauuaaugua

SEQ ID NO: 1919235 - RNA, 19 nt, Artificial Sequence
  Description of Artificial Sequence: Synthetic oligonucleotide
  Antisense strand to SEQ ID NO: 1919234
uacauuaauucucagcuac

SEQ ID NO: 1919236 - RNA, 19 nt, Artificial Sequence
  Description of Artificial Sequence: Synthetic oligonucleotide
  Sense strand starting at position 2713 of SEQ ID NO: 1879606
acgaauggcuuuguugaga

SEQ ID NO: 1919237 - RNA, 19 nt, Artificial Sequence
  Description of Artificial Sequence: Synthetic oligonucleotide
  Antisense strand to SEQ ID NO: 1919236
ucucaacaaagccauucgu

SEQ ID NO: 1919238 - RNA, 19 nt, Artificial Sequence
  Description of Artificial Sequence: Synthetic oligonucleotide
  Sense strand starting at position 2838 of SEQ ID NO: 1879606
ugaaacguguucuuauuga

SEQ ID NO: 1919239 - RNA, 19 nt, Artificial Sequence
  Description of Artificial Sequence: Synthetic oligonucleotide
  Antisense strand to SEQ ID NO: 1919238
ucaauaagaacacguuuca

SEQ ID NO: 1919240 - RNA, 19 nt, Artificial Sequence
  Description of Artificial Sequence: Synthetic oligonucleotide
  Sense strand starting at position 2849 of SEQ ID NO: 1879606
cuuauugaacacugcagua

SEQ ID NO: 1919241 - RNA, 19 nt, Artificial Sequence
  Description of Artificial Sequence: Synthetic oligonucleotide
  Antisense strand to SEQ ID NO: 1919240
uacugcaguguucaauaag

SEQ ID NO: 1919242 - RNA, 19 nt, Artificial Sequence
  Description of Artificial Sequence: Synthetic oligonucleotide
  Sense strand starting at position 2939 of SEQ ID NO: 1879606
uccucuucccuguaagguu

SEQ ID NO: 1919243 - RNA, 19 nt, Artificial Sequence
  Description of Artificial Sequence: Synthetic oligonucleotide
  Antisense strand to SEQ ID NO: 1919242
aaccuuacagggaagagga

SEQ ID NO: 1919244 - RNA, 19 nt, Artificial Sequence
  Description of Artificial Sequence: Synthetic oligonucleotide
  Sense strand starting at position 2946 of SEQ ID NO: 1879606
cccuguaagguuuauuaca

SEQ ID NO: 1919245 - RNA, 19 nt, Artificial Sequence
  Description of Artificial Sequence: Synthetic oligonucleotide
  Antisense strand to SEQ ID NO: 1919244
uguaauaaaccuuacaggg

SEQ ID NO: 1919246 - RNA, 19 nt, Artificial Sequence
  Description of Artificial Sequence: Synthetic oligonucleotide
  Sense strand starting at position 2948 of SEQ ID NO: 1879606
cuguaagguuuauuacacu

SEQ ID NO: 1919247 - RNA, 19 nt, Artificial Sequence
  Description of Artificial Sequence: Synthetic oligonucleotide
  Antisense strand to SEQ ID NO: 1919246
aguguaauaaaccuuacag

SEQ ID NO: 1919248 - RNA, 19 nt, Artificial Sequence
  Description of Artificial Sequence: Synthetic oligonucleotide
  Sense strand starting at position 2971 of SEQ ID NO: 1879606
ucacaauuggugugacuca

SEQ ID NO: 1919249 - RNA, 19 nt, Artificial Sequence
  Description of Artificial Sequence: Synthetic oligonucleotide
  Antisense strand to SEQ ID NO: 1919248
ugagucacaccaauuguga

SEQ ID NO: 1919250 - RNA, 19 nt, Artificial Sequence
  Description of Artificial Sequence: Synthetic oligonucleotide
  Sense strand starting at position 3003 of SEQ ID NO: 1879606
acuggauaugacugggagu

SEQ ID NO: 1919251 - RNA, 19 nt, Artificial Sequence
  Description of Artificial Sequence: Synthetic oligonucleotide
  Antisense strand to SEQ ID NO: 1919250
acucccagucauauccagu

SEQ ID NO: 1919252 - RNA, 19 nt, Artificial Sequence
  Description of Artificial Sequence: Synthetic oligonucleotide
  Sense strand starting at position 3004 of SEQ ID NO: 1879606
cuggauaugacugggaguu

SEQ ID NO: 1919253 - RNA, 19 nt, Artificial Sequence
  Description of Artificial Sequence: Synthetic oligonucleotide
  Antisense strand to SEQ ID NO: 1919252
aacucccagucauauccag

SEQ ID NO: 1919254 - RNA, 19 nt, Artificial Sequence
  Description of Artificial Sequence: Synthetic oligonucleotide
  Sense strand starting at position 3005 of SEQ ID NO: 1879606
uggauaugacugggaguug

SEQ ID NO: 1919255 - RNA, 19 nt, Artificial Sequence
  Description of Artificial Sequence: Synthetic oligonucleotide
  Antisense strand to SEQ ID NO: 1919254
caacucccagucauaucca

SEQ ID NO: 1919256 - RNA, 19 nt, Artificial Sequence
  Description of Artificial Sequence: Synthetic oligonucleotide
  Sense strand starting at position 3042 of SEQ ID NO: 1879606
aacagagauuuauggagca

SEQ ID NO: 1919257 - RNA, 19 nt, Artificial Sequence
  Description of Artificial Sequence: Synthetic oligonucleotide
  Antisense strand to SEQ ID NO: 1919256
ugcuccauaaaucucuguu

SEQ ID NO: 1919258 - RNA, 19 nt, Artificial Sequence
  Description of Artificial Sequence: Synthetic oligonucleotide
  Sense strand starting at position 3056 of SEQ ID NO: 1879606
gagcacuugcuauauggaa

SEQ ID NO: 1919259 - RNA, 19 nt, Artificial Sequence
  Description of Artificial Sequence: Synthetic oligonucleotide
  Antisense strand to SEQ ID NO: 1919258
uuccauauagcaagugcuc

SEQ ID NO: 1919260 - RNA, 19 nt, Artificial Sequence
  Description of Artificial Sequence: Synthetic oligonucleotide
  Sense strand starting at position 3058 of SEQ ID NO: 1879606
gcacuugcuauauggaaag

SEQ ID NO: 1919261 - RNA, 19 nt, Artificial Sequence
  Description of Artificial Sequence: Synthetic oligonucleotide
  Antisense strand to SEQ ID NO: 1919260
cuuuccauauagcaagugc

SEQ ID NO: 1919262 - RNA, 19 nt, Artificial Sequence
  Description of Artificial Sequence: Synthetic oligonucleotide
  Sense strand starting at position 3128 of SEQ ID NO: 1879606
uuuacauucuaguugagau

SEQ ID NO: 1919263 - RNA, 19 nt, Artificial Sequence
  Description of Artificial Sequence: Synthetic oligonucleotide
  Antisense strand to SEQ ID NO: 1919262
aucucaacuagaauguaaa

SEQ ID NO: 1919264 - RNA, 19 nt, Artificial Sequence
  Description of Artificial Sequence: Synthetic oligonucleotide
  Sense strand starting at position 3659 of SEQ ID NO: 1879606
uuuccaaaugucuacugga

SEQ ID NO: 1919265 - RNA, 19 nt, Artificial Sequence
  Description of Artificial Sequence: Synthetic oligonucleotide
  Antisense strand to SEQ ID NO: 1919264
uccaguagacauuuggaaa

SEQ ID NO: 1919266 - RNA, 19 nt, Artificial Sequence
  Description of Artificial Sequence: Synthetic oligonucleotide
  Sense strand starting at position 3768 of SEQ ID NO: 1879606
auugccuuucuugaugaau

SEQ ID NO: 1919267 - RNA, 19 nt, Artificial Sequence
  Description of Artificial Sequence: Synthetic oligonucleotide
  Antisense strand to SEQ ID NO: 1919266
auucaucaagaaaggcaau

SEQ ID NO: 1919268 - RNA, 19 nt, Artificial Sequence
  Description of Artificial Sequence: Synthetic oligonucleotide
  Sense strand starting at position 3771 of SEQ ID NO: 1879606
gccuuucuugaugaauggu

SEQ ID NO: 1919269 - RNA, 19 nt, Artificial Sequence
  Description of Artificial Sequence: Synthetic oligonucleotide
  Antisense strand to SEQ ID NO: 1919268
accauucaucaagaaaggc

SEQ ID NO: 1919270 - RNA, 19 nt, Artificial Sequence
  Description of Artificial Sequence: Synthetic oligonucleotide
  Sense strand starting at position 3780 of SEQ ID NO: 1879606
gaugaauggugugcuacca

SEQ ID NO: 1919271 - RNA, 19 nt, Artificial Sequence
  Description of Artificial Sequence: Synthetic oligonucleotide
  Antisense strand to SEQ ID NO: 1919270
ugguagcacaccauucauc

SEQ ID NO: 1919272 - RNA, 19 nt, Artificial Sequence
  Description of Artificial Sequence: Synthetic oligonucleotide
  Sense strand starting at position 3848 of SEQ ID NO: 1879606
ucuaguuauuugccucauu

SEQ ID NO: 1919273 - RNA, 19 nt, Artificial Sequence
  Description of Artificial Sequence: Synthetic oligonucleotide
  Antisense strand to SEQ ID NO: 1919272
aaugaggcaaauaacuaga

SEQ ID NO: 1919274 - RNA, 19 nt, Artificial Sequence
  Description of Artificial Sequence: Synthetic oligonucleotide
  Sense strand starting at position 255 of SEQ ID NO: 1879607
ccugaugaaucuguaagga

SEQ ID NO: 1919275 - RNA, 19 nt, Artificial Sequence
  Description of Artificial Sequence: Synthetic oligonucleotide
  Antisense strand to SEQ ID NO: 1919274
uccuuacagauucaucagg

SEQ ID NO: 1919276 - RNA, 19 nt, Artificial Sequence
  Description of Artificial Sequence: Synthetic oligonucleotide
  Sense strand starting at position 493 of SEQ ID NO: 1879607
agaccacuggcccauuaau

SEQ ID NO: 1919277 - RNA, 19 nt, Artificial Sequence
  Description of Artificial Sequence: Synthetic oligonucleotide
  Antisense strand to SEQ ID NO: 1919276
auuaaugggccaguggucu

SEQ ID NO: 1919278 - RNA, 19 nt, Artificial Sequence
  Description of Artificial Sequence: Synthetic oligonucleotide
  Sense strand starting at position 546 of SEQ ID NO: 1879607
uggaaagugucacugagga

SEQ ID NO: 1919279 - RNA, 19 nt, Artificial Sequence
  Description of Artificial Sequence: Synthetic oligonucleotide
  Antisense strand to SEQ ID NO: 1919278
uccucagugacacuuucca

SEQ ID NO: 1919280 - RNA, 19 nt, Artificial Sequence
  Description of Artificial Sequence: Synthetic oligonucleotide
  Sense strand starting at position 616 of SEQ ID NO: 1879607
gcccuaaagcaaugagaau

SEQ ID NO: 1919281 - RNA, 19 nt, Artificial Sequence
  Description of Artificial Sequence: Synthetic oligonucleotide
  Antisense strand to SEQ ID NO: 1919280
auucucauugcuuuagggc

SEQ ID NO: 1919282 - RNA, 19 nt, Artificial Sequence
  Description of Artificial Sequence: Synthetic oligonucleotide
  Sense strand starting at position 1054 of SEQ ID NO: 1879607
ggugcaguccuauaauccu

SEQ ID NO: 1919283 - RNA, 19 nt, Artificial Sequence
  Description of Artificial Sequence: Synthetic oligonucleotide
  Antisense strand to SEQ ID NO: 1919282
aggauuauaggacugcacc

SEQ ID NO: 1919284 - RNA, 19 nt, Artificial Sequence
  Description of Artificial Sequence: Synthetic oligonucleotide
  Sense strand starting at position 1225 of SEQ ID NO: 1879607
acgugaugguauucuagag

SEQ ID NO: 1919285 - RNA, 19 nt, Artificial Sequence
  Description of Artificial Sequence: Synthetic oligonucleotide
  Antisense strand to SEQ ID NO: 1919284
cucuagaauaccaucacgu

SEQ ID NO: 1919286 - RNA, 19 nt, Artificial Sequence
  Description of Artificial Sequence: Synthetic oligonucleotide
  Sense strand starting at position 1229 of SEQ ID NO: 1879607
gaugguauucuagagcauu

SEQ ID NO: 1919287 - RNA, 19 nt, Artificial Sequence
  Description of Artificial Sequence: Synthetic oligonucleotide
  Antisense strand to SEQ ID NO: 1919286
aaugcucuagaauaccauc

SEQ ID NO: 1919288 - RNA, 19 nt, Artificial Sequence
  Description of Artificial Sequence: Synthetic oligonucleotide
  Sense strand starting at position 1379 of SEQ ID NO: 1879607
ugcaguagucuagagcacu

SEQ ID NO: 1919289 - RNA, 19 nt, Artificial Sequence
  Description of Artificial Sequence: Synthetic oligonucleotide
  Antisense strand to SEQ ID NO: 1919288
agugcucuagacuacugca

SEQ ID NO: 1919290 - RNA, 19 nt, Artificial Sequence
  Description of Artificial Sequence: Synthetic oligonucleotide
  Sense strand starting at position 1516 of SEQ ID NO: 1879607
cggaacaagucucuugaga

SEQ ID NO: 1919291 - RNA, 19 nt, Artificial Sequence
  Description of Artificial Sequence: Synthetic oligonucleotide
  Antisense strand to SEQ ID NO: 1919290
ucucaagagacuuguuccg

SEQ ID NO: 1919292 - RNA, 19 nt, Artificial Sequence
  Description of Artificial Sequence: Synthetic oligonucleotide
  Sense strand starting at position 1524 of SEQ ID NO: 1879607
gucucuugagaauggugua

SEQ ID NO: 1919293 - RNA, 19 nt, Artificial Sequence
  Description of Artificial Sequence: Synthetic oligonucleotide
  Antisense strand to SEQ ID NO: 1919292
uacaccauucucaagagac

SEQ ID NO: 1919294 - RNA, 19 nt, Artificial Sequence
  Description of Artificial Sequence: Synthetic oligonucleotide
  Sense strand starting at position 1529 of SEQ ID NO: 1879607
uugagaaugguguacggga

SEQ ID NO: 1919295 - RNA, 19 nt, Artificial Sequence
  Description of Artificial Sequence: Synthetic oligonucleotide
  Antisense strand to SEQ ID NO: 1919294
ucccguacaccauucucaa

SEQ ID NO: 1919296 - RNA, 19 nt, Artificial Sequence
  Description of Artificial Sequence: Synthetic oligonucleotide
  Sense strand starting at position 1536 of SEQ ID NO: 1879607
ugguguacgggagaucuaa

SEQ ID NO: 1919297 - RNA, 19 nt, Artificial Sequence
  Description of Artificial Sequence: Synthetic oligonucleotide
  Antisense strand to SEQ ID NO: 1919296
uuagaucucccguacacca

SEQ ID NO: 1919298 - RNA, 19 nt, Artificial Sequence
  Description of Artificial Sequence: Synthetic oligonucleotide
  Sense strand starting at position 1588 of SEQ ID NO: 1879607
ucacaauaccgcuaagugu

SEQ ID NO: 1919299 - RNA, 19 nt, Artificial Sequence
  Description of Artificial Sequence: Synthetic oligonucleotide
  Antisense strand to SEQ ID NO: 1919298
acacuuagcgguauuguga

SEQ ID NO: 1919300 - RNA, 19 nt, Artificial Sequence
  Description of Artificial Sequence: Synthetic oligonucleotide
  Sense strand starting at position 1603 of SEQ ID NO: 1879607
gugugugaacuauagcuga

SEQ ID NO: 1919301 - RNA, 19 nt, Artificial Sequence
  Description of Artificial Sequence: Synthetic oligonucleotide
  Antisense strand to SEQ ID NO: 1919300
ucagcuauaguucacacac

SEQ ID NO: 1919302 - RNA, 19 nt, Artificial Sequence
  Description of Artificial Sequence: Synthetic oligonucleotide
  Sense strand starting at position 1827 of SEQ ID NO: 1879607
aggaaauucucugugccau

SEQ ID NO: 1919303 - RNA, 19 nt, Artificial Sequence
  Description of Artificial Sequence: Synthetic oligonucleotide
  Antisense strand to SEQ ID NO: 1919302
auggcacagagaauuuccu

SEQ ID NO: 1919304 - RNA, 19 nt, Artificial Sequence
  Description of Artificial Sequence: Synthetic oligonucleotide
  Sense strand starting at position 1828 of SEQ ID NO: 1879607
ggaaauucucugugccauu

SEQ ID NO: 1919305 - RNA, 19 nt, Artificial Sequence
  Description of Artificial Sequence: Synthetic oligonucleotide
  Antisense strand to SEQ ID NO: 1919304
aauggcacagagaauuucc

SEQ ID NO: 1919306 - RNA, 19 nt, Artificial Sequence
  Description of Artificial Sequence: Synthetic oligonucleotide
  Sense strand starting at position 1891 of SEQ ID NO: 1879607
acgggcauguuccuaagaa

SEQ ID NO: 1919307 - RNA, 19 nt, Artificial Sequence
  Description of Artificial Sequence: Synthetic oligonucleotide
  Antisense strand to SEQ ID NO: 1919306
uucuuaggaacaugcccgu

SEQ ID NO: 1919308 - RNA, 19 nt, Artificial Sequence
  Description of Artificial Sequence: Synthetic oligonucleotide
  Sense strand starting at position 2008 of SEQ ID NO: 1879607
gugcaaacucaggagcuuu

SEQ ID NO: 1919309 - RNA, 19 nt, Artificial Sequence
  Description of Artificial Sequence: Synthetic oligonucleotide
  Antisense strand to SEQ ID NO: 1919308
aaagcuccugaguuugcac

SEQ ID NO: 1919310 - RNA, 19 nt, Artificial Sequence
  Description of Artificial Sequence: Synthetic oligonucleotide
  Sense strand starting at position 2082 of SEQ ID NO: 1879607
agugauaccugauuagauc

SEQ ID NO: 1919311 - RNA, 19 nt, Artificial Sequence
  Description of Artificial Sequence: Synthetic oligonucleotide
  Antisense strand to SEQ ID NO: 1919310
gaucuaaucagguaucacu

SEQ ID NO: 1919312 - RNA, 19 nt, Artificial Sequence
  Description of Artificial Sequence: Synthetic oligonucleotide
  Sense strand starting at position 2246 of SEQ ID NO: 1879607
gaugaaguuugacuaacau

SEQ ID NO: 1919313 - RNA, 19 nt, Artificial Sequence
  Description of Artificial Sequence: Synthetic oligonucleotide
  Antisense strand to SEQ ID NO: 1919312
auguuagucaaacuucauc

SEQ ID NO: 1919314 - RNA, 19 nt, Artificial Sequence
  Description of Artificial Sequence: Synthetic oligonucleotide
  Sense strand starting at position 2276 of SEQ ID NO: 1879607
agugacauggaagguuuaa

SEQ ID NO: 1919315 - RNA, 19 nt, Artificial Sequence
  Description of Artificial Sequence: Synthetic oligonucleotide
  Antisense strand to SEQ ID NO: 1919314
uuaaaccuuccaugucacu

SEQ ID NO: 1919316 - RNA, 19 nt, Artificial Sequence
  Description of Artificial Sequence: Synthetic oligonucleotide
  Sense strand starting at position 2344 of SEQ ID NO: 1879607
gggagaauauuuggccaca

SEQ ID NO: 1919317 - RNA, 19 nt, Artificial Sequence
  Description of Artificial Sequence: Synthetic oligonucleotide
  Antisense strand to SEQ ID NO: 1919316
uguggccaaauauucuccc

SEQ ID NO: 1919318 - RNA, 19 nt, Artificial Sequence
  Description of Artificial Sequence: Synthetic oligonucleotide
  Sense strand starting at position 2444 of SEQ ID NO: 1879607
ucuguuauccaacaguuac

SEQ ID NO: 1919319 - RNA, 19 nt, Artificial Sequence
  Description of Artificial Sequence: Synthetic oligonucleotide
  Antisense strand to SEQ ID NO: 1919318
guaacuguuggauaacaga

SEQ ID NO: 1919320 - RNA, 19 nt, Artificial Sequence
  Description of Artificial Sequence: Synthetic oligonucleotide
  Sense strand starting at position 2520 of SEQ ID NO: 1879607
aaccacugaggguguuauu

SEQ ID NO: 1919321 - RNA, 19 nt, Artificial Sequence
  Description of Artificial Sequence: Synthetic oligonucleotide
  Antisense strand to SEQ ID NO: 1919320
aauaacacccucagugguu

SEQ ID NO: 1919322 - RNA, 19 nt, Artificial Sequence
  Description of Artificial Sequence: Synthetic oligonucleotide
  Sense strand starting at position 2527 of SEQ ID NO: 1879607
gaggguguuauugaucaca

SEQ ID NO: 1919323 - RNA, 19 nt, Artificial Sequence
  Description of Artificial Sequence: Synthetic oligonucleotide
  Antisense strand to SEQ ID NO: 1919322
ugugaucaauaacacccuc

SEQ ID NO: 1919324 - RNA, 19 nt, Artificial Sequence
  Description of Artificial Sequence: Synthetic oligonucleotide
  Sense strand starting at position 2529 of SEQ ID NO: 1879607
ggguguuauugaucacaag

SEQ ID NO: 1919325 - RNA, 19 nt, Artificial Sequence
  Description of Artificial Sequence: Synthetic oligonucleotide
  Antisense strand to SEQ ID NO: 1919324
cuugugaucaauaacaccc

SEQ ID NO: 1919326 - RNA, 19 nt, Artificial Sequence
  Description of Artificial Sequence: Synthetic oligonucleotide
  Sense strand starting at position 2706 of SEQ ID NO: 1879607
gaaagacucugucuggauu

SEQ ID NO: 1919327 - RNA, 19 nt, Artificial Sequence
  Description of Artificial Sequence: Synthetic oligonucleotide
  Antisense strand to SEQ ID NO: 1919326
aauccagacagagucuuuc

SEQ ID NO: 1919328 - RNA, 19 nt, Artificial Sequence
  Description of Artificial Sequence: Synthetic oligonucleotide
  Sense strand starting at position 2742 of SEQ ID NO: 1879607
agggaauaguuacagaaga

SEQ ID NO: 1919329 - RNA, 19 nt, Artificial Sequence
  Description of Artificial Sequence: Synthetic oligonucleotide
  Antisense strand to SEQ ID NO: 1919328
ucuucuguaacuauucccu

SEQ ID NO: 1919330 - RNA, 19 nt, Artificial Sequence
  Description of Artificial Sequence: Synthetic oligonucleotide
  Sense strand starting at position 2789 of SEQ ID NO: 1879607
ugucuuugagggcagagaa

SEQ ID NO: 1919331 - RNA, 19 nt, Artificial Sequence
  Description of Artificial Sequence: Synthetic oligonucleotide
  Antisense strand to SEQ ID NO: 1919330
uucucugcccucaaagaca

SEQ ID NO: 1919332 - RNA, 19 nt, Artificial Sequence
  Description of Artificial Sequence: Synthetic oligonucleotide
  Sense strand starting at position 3054 of SEQ ID NO: 1879607
ggugcuauggucuggaaac

SEQ ID NO: 1919333 - RNA, 19 nt, Artificial Sequence
  Description of Artificial Sequence: Synthetic oligonucleotide
  Antisense strand to SEQ ID NO: 1919332
guuuccagaccauagcacc

SEQ ID NO: 1919334 - RNA, 19 nt, Artificial Sequence
  Description of Artificial Sequence: Synthetic oligonucleotide
  Sense strand starting at position 3056 of SEQ ID NO: 1879607
ugcuauggucuggaaaccu

SEQ ID NO: 1919335 - RNA, 19 nt, Artificial Sequence
  Description of Artificial Sequence: Synthetic oligonucleotide
  Antisense strand to SEQ ID NO: 1919334
agguuuccagaccauagca

SEQ ID NO: 1919336 - RNA, 19 nt, Artificial Sequence
  Description of Artificial Sequence: Synthetic oligonucleotide
  Sense strand starting at position 3223 of SEQ ID NO: 1879607
ccucccuugucccugauau

SEQ ID NO: 1919337 - RNA, 19 nt, Artificial Sequence
  Description of Artificial Sequence: Synthetic oligonucleotide
  Antisense strand to SEQ ID NO: 1919336
auaucagggacaagggagg

SEQ ID NO: 1919338 - RNA, 19 nt, Artificial Sequence
  Description of Artificial Sequence: Synthetic oligonucleotide
  Sense strand starting at position 3225 of SEQ ID NO: 1879607
ucccuugucccugauauug

SEQ ID NO: 1919339 - RNA, 19 nt, Artificial Sequence
  Description of Artificial Sequence: Synthetic oligonucleotide
  Antisense strand to SEQ ID NO: 1919338
caauaucagggacaaggga

SEQ ID NO: 1919340 - RNA, 19 nt, Artificial Sequence
  Description of Artificial Sequence: Synthetic oligonucleotide
  Sense strand starting at position 3350 of SEQ ID NO: 1879607
gauagauuacuugagcgca

SEQ ID NO: 1919341 - RNA, 19 nt, Artificial Sequence
  Description of Artificial Sequence: Synthetic oligonucleotide
  Antisense strand to SEQ ID NO: 1919340
ugcgcucaaguaaucuauc

SEQ ID NO: 1919342 - RNA, 19 nt, Artificial Sequence
  Description of Artificial Sequence: Synthetic oligonucleotide
  Sense strand starting at position 3475 of SEQ ID NO: 1879607
gaaguuuagaugcgaggau

SEQ ID NO: 1919343 - RNA, 19 nt, Artificial Sequence
  Description of Artificial Sequence: Synthetic oligonucleotide
  Antisense strand to SEQ ID NO: 1919342
auccucgcaucuaaacuuc

SEQ ID NO: 1919344 - RNA, 19 nt, Artificial Sequence
  Description of Artificial Sequence: Synthetic oligonucleotide
  Sense strand starting at position 3825 of SEQ ID NO: 1879607
gcgagccuucuugucuuua

SEQ ID NO: 1919345 - RNA, 19 nt, Artificial Sequence
  Description of Artificial Sequence: Synthetic oligonucleotide
  Antisense strand to SEQ ID NO: 1919344
uaaagacaagaaggcucgc

SEQ ID NO: 1919346 - RNA, 19 nt, Artificial Sequence
  Description of Artificial Sequence: Synthetic oligonucleotide
  Sense strand starting at position 3841 of SEQ ID NO: 1879607
uuaagagcagcgcauauau

SEQ ID NO: 1919347 - RNA, 19 nt, Artificial Sequence
  Description of Artificial Sequence: Synthetic oligonucleotide
  Antisense strand to SEQ ID NO: 1919346
auauaugcgcugcucuuaa

SEQ ID NO: 1919348 - RNA, 19 nt, Artificial Sequence
  Description of Artificial Sequence: Synthetic oligonucleotide
  Sense strand starting at position 3924 of SEQ ID NO: 1879607
guugaaauaucugcuaagu

SEQ ID NO: 1919349 - RNA, 19 nt, Artificial Sequence
  Description of Artificial Sequence: Synthetic oligonucleotide
  Antisense strand to SEQ ID NO: 1919348
acuuagcagauauuucaac

SEQ ID NO: 1919350 - RNA, 19 nt, Artificial Sequence
  Description of Artificial Sequence: Synthetic oligonucleotide
  Sense strand starting at position 3967 of SEQ ID NO: 1879607
gggaucacacagugauucu

SEQ ID NO: 1919351 - RNA, 19 nt, Artificial Sequence
  Description of Artificial Sequence: Synthetic oligonucleotide
  Antisense strand to SEQ ID NO: 1919350
agaaucacugugugauccc

SEQ ID NO: 1919352 - RNA, 19 nt, Artificial Sequence
  Description of Artificial Sequence: Synthetic oligonucleotide
  Sense strand starting at position 3974 of SEQ ID NO: 1879607
cacagugauucuuccgaug

SEQ ID NO: 1919353 - RNA, 19 nt, Artificial Sequence
  Description of Artificial Sequence: Synthetic oligonucleotide
  Antisense strand to SEQ ID NO: 1919352
caucggaagaaucacugug

SEQ ID NO: 1919354 - RNA, 19 nt, Artificial Sequence
  Description of Artificial Sequence: Synthetic oligonucleotide
  Sense strand starting at position 491 of SEQ ID NO: 1879608
agaccacuggcccauuaau

SEQ ID NO: 1919355 - RNA, 19 nt, Artificial Sequence
  Description of Artificial Sequence: Synthetic oligonucleotide
  Antisense strand to SEQ ID NO: 1919354
auuaaugggccaguggucu

SEQ ID NO: 1919356 - RNA, 19 nt, Artificial Sequence
  Description of Artificial Sequence: Synthetic oligonucleotide
  Sense strand starting at position 544 of SEQ ID NO: 1879608
uggaaagugucacugagga

SEQ ID NO: 1919357 - RNA, 19 nt, Artificial Sequence
  Description of Artificial Sequence: Synthetic oligonucleotide
  Antisense strand to SEQ ID NO: 1919356
uccucagugacacuuucca

SEQ ID NO: 1919358 - RNA, 19 nt, Artificial Sequence
  Description of Artificial Sequence: Synthetic oligonucleotide
  Sense strand starting at position 614 of SEQ ID NO: 1879608
gcccuaaagcaaugagaau

SEQ ID NO: 1919359 - RNA, 19 nt, Artificial Sequence
  Description of Artificial Sequence: Synthetic oligonucleotide
  Antisense strand to SEQ ID NO: 1919358
auucucauugcuuuagggc

SEQ ID NO: 1919360 - RNA, 19 nt, Artificial Sequence
  Description of Artificial Sequence: Synthetic oligonucleotide
  Sense strand starting at position 1055 of SEQ ID NO: 1879608
ggugcaguccuauaauccu

SEQ ID NO: 1919361 - RNA, 19 nt, Artificial Sequence
  Description of Artificial Sequence: Synthetic oligonucleotide
  Antisense strand to SEQ ID NO: 1919360
aggauuauaggacugcacc

SEQ ID NO: 1919362 - RNA, 19 nt, Artificial Sequence
  Description of Artificial Sequence: Synthetic oligonucleotide
  Sense strand starting at position 1226 of SEQ ID NO: 1879608
acgugaugguauucuagag

SEQ ID NO: 1919363 - RNA, 19 nt, Artificial Sequence
  Description of Artificial Sequence: Synthetic oligonucleotide
  Antisense strand to SEQ ID NO: 1919362
cucuagaauaccaucacgu

SEQ ID NO: 1919364 - RNA, 19 nt, Artificial Sequence
  Description of Artificial Sequence: Synthetic oligonucleotide
  Sense strand starting at position 1230 of SEQ ID NO: 1879608
gaugguauucuagagcauu

SEQ ID NO: 1919365 - RNA, 19 nt, Artificial Sequence
  Description of Artificial Sequence: Synthetic oligonucleotide
  Antisense strand to SEQ ID NO: 1919364
aaugcucuagaauaccauc

SEQ ID NO: 1919366 - RNA, 19 nt, Artificial Sequence
  Description of Artificial Sequence: Synthetic oligonucleotide
  Sense strand starting at position 1380 of SEQ ID NO: 1879608
ugcaguagucuagagcacu

SEQ ID NO: 1919367 - RNA, 19 nt, Artificial Sequence
  Description of Artificial Sequence: Synthetic oligonucleotide
  Antisense strand to SEQ ID NO: 1919366
agugcucuagacuacugca

SEQ ID NO: 1919368 - RNA, 19 nt, Artificial Sequence
  Description of Artificial Sequence: Synthetic oligonucleotide
  Sense strand starting at position 1517 of SEQ ID NO: 1879608
cggaacaagucucuugaga

SEQ ID NO: 1919369 - RNA, 19 nt, Artificial Sequence
  Description of Artificial Sequence: Synthetic oligonucleotide
  Antisense strand to SEQ ID NO: 1919368
ucucaagagacuuguuccg

SEQ ID NO: 1919370 - RNA, 19 nt, Artificial Sequence
  Description of Artificial Sequence: Synthetic oligonucleotide
  Sense strand starting at position 1525 of SEQ ID NO: 1879608
gucucuugagaauggugua

SEQ ID NO: 1919371 - RNA, 19 nt, Artificial Sequence
  Description of Artificial Sequence: Synthetic oligonucleotide
  Antisense strand to SEQ ID NO: 1919370
uacaccauucucaagagac

SEQ ID NO: 1919372 - RNA, 19 nt, Artificial Sequence
  Description of Artificial Sequence: Synthetic oligonucleotide
  Sense strand starting at position 1530 of SEQ ID NO: 1879608
uugagaaugguguacggga

SEQ ID NO: 1919373 - RNA, 19 nt, Artificial Sequence
  Description of Artificial Sequence: Synthetic oligonucleotide
  Antisense strand to SEQ ID NO: 1919372
ucccguacaccauucucaa

SEQ ID NO: 1919374 - RNA, 19 nt, Artificial Sequence
  Description of Artificial Sequence: Synthetic oligonucleotide
  Sense strand starting at position 1537 of SEQ ID NO: 1879608
ugguguacgggagaucuaa

SEQ ID NO: 1919375 - RNA, 19 nt, Artificial Sequence
  Description of Artificial Sequence: Synthetic oligonucleotide
  Antisense strand to SEQ ID NO: 1919374
uuagaucucccguacacca

SEQ ID NO: 1919376 - RNA, 19 nt, Artificial Sequence
  Description of Artificial Sequence: Synthetic oligonucleotide
  Sense strand starting at position 1589 of SEQ ID NO: 1879608
ucacaauaccgcuaagugu

SEQ ID NO: 1919377 - RNA, 19 nt, Artificial Sequence
  Description of Artificial Sequence: Synthetic oligonucleotide
  Antisense strand to SEQ ID NO: 1919376
acacuuagcgguauuguga

SEQ ID NO: 1919378 - RNA, 19 nt, Artificial Sequence
  Description of Artificial Sequence: Synthetic oligonucleotide
  Sense strand starting at position 1604 of SEQ ID NO: 1879608
gugugugaacuauagcuga

SEQ ID NO: 1919379 - RNA, 19 nt, Artificial Sequence
  Description of Artificial Sequence: Synthetic oligonucleotide
  Antisense strand to SEQ ID NO: 1919378
ucagcuauaguucacacac

SEQ ID NO: 1919380 - RNA, 19 nt, Artificial Sequence
  Description of Artificial Sequence: Synthetic oligonucleotide
  Sense strand starting at position 1828 of SEQ ID NO: 1879608
aggaaauucucugugccau

SEQ ID NO: 1919381 - RNA, 19 nt, Artificial Sequence
  Description of Artificial Sequence: Synthetic oligonucleotide
  Antisense strand to SEQ ID NO: 1919380
auggcacagagaauuuccu

SEQ ID NO: 1919382 - RNA, 19 nt, Artificial Sequence
  Description of Artificial Sequence: Synthetic oligonucleotide
  Sense strand starting at position 1829 of SEQ ID NO: 1879608
ggaaauucucugugccauu

SEQ ID NO: 1919383 - RNA, 19 nt, Artificial Sequence
  Description of Artificial Sequence: Synthetic oligonucleotide
  Antisense strand to SEQ ID NO: 1919382
aauggcacagagaauuucc

SEQ ID NO: 1919384 - RNA, 19 nt, Artificial Sequence
  Description of Artificial Sequence: Synthetic oligonucleotide
  Sense strand starting at position 1892 of SEQ ID NO: 1879608
acgggcauguuccuaagaa

SEQ ID NO: 1919385 - RNA, 19 nt, Artificial Sequence
  Description of Artificial Sequence: Synthetic oligonucleotide
  Antisense strand to SEQ ID NO: 1919384
uucuuaggaacaugcccgu

SEQ ID NO: 1919386 - RNA, 19 nt, Artificial Sequence
  Description of Artificial Sequence: Synthetic oligonucleotide
  Sense strand starting at position 2009 of SEQ ID NO: 1879608
gugcaaacucaggagcuuu

SEQ ID NO: 1919387 - RNA, 19 nt, Artificial Sequence
  Description of Artificial Sequence: Synthetic oligonucleotide
  Antisense strand to SEQ ID NO: 1919386
aaagcuccugaguuugcac

SEQ ID NO: 1919388 - RNA, 19 nt, Artificial Sequence
  Description of Artificial Sequence: Synthetic oligonucleotide
  Sense strand starting at position 2247 of SEQ ID NO: 1879608
gaugaaguuugacuaacau

SEQ ID NO: 1919389 - RNA, 19 nt, Artificial Sequence
  Description of Artificial Sequence: Synthetic oligonucleotide
  Antisense strand to SEQ ID NO: 1919388
auguuagucaaacuucauc

SEQ ID NO: 1919390 - RNA, 19 nt, Artificial Sequence
  Description of Artificial Sequence: Synthetic oligonucleotide
  Sense strand starting at position 2277 of SEQ ID NO: 1879608
agugacauggaagguuuaa

SEQ ID NO: 1919391 - RNA, 19 nt, Artificial Sequence
  Description of Artificial Sequence: Synthetic oligonucleotide
  Antisense strand to SEQ ID NO: 1919390
uuaaaccuuccaugucacu

SEQ ID NO: 1919392 - RNA, 19 nt, Artificial Sequence
  Description of Artificial Sequence: Synthetic oligonucleotide
  Sense strand starting at position 2345 of SEQ ID NO: 1879608
gggagaauauuuggccaca

SEQ ID NO: 1919393 - RNA, 19 nt, Artificial Sequence
  Description of Artificial Sequence: Synthetic oligonucleotide
  Antisense strand to SEQ ID NO: 1919392
uguggccaaauauucuccc

SEQ ID NO: 1919394 - RNA, 19 nt, Artificial Sequence
  Description of Artificial Sequence: Synthetic oligonucleotide
  Sense strand starting at position 2445 of SEQ ID NO: 1879608
ucuguuauccaacaguuac

SEQ ID NO: 1919395 - RNA, 19 nt, Artificial Sequence
  Description of Artificial Sequence: Synthetic oligonucleotide
  Antisense strand to SEQ ID NO: 1919394
guaacuguuggauaacaga

SEQ ID NO: 1919396 - RNA, 19 nt, Artificial Sequence
  Description of Artificial Sequence: Synthetic oligonucleotide
  Sense strand starting at position 2521 of SEQ ID NO: 1879608
aaccacugaggguguuauu

SEQ ID NO: 1919397 - RNA, 19 nt, Artificial Sequence
  Description of Artificial Sequence: Synthetic oligonucleotide
  Antisense strand to SEQ ID NO: 1919396
aauaacacccucagugguu

SEQ ID NO: 1919398 - RNA, 19 nt, Artificial Sequence
  Description of Artificial Sequence: Synthetic oligonucleotide
  Sense strand starting at position 2528 of SEQ ID NO: 1879608
gaggguguuauugaucaca

SEQ ID NO: 1919399 - RNA, 19 nt, Artificial Sequence
  Description of Artificial Sequence: Synthetic oligonucleotide
  Antisense strand to SEQ ID NO: 1919398
ugugaucaauaacacccuc

SEQ ID NO: 1919400 - RNA, 19 nt, Artificial Sequence
  Description of Artificial Sequence: Synthetic oligonucleotide
  Sense strand starting at position 2530 of SEQ ID NO: 1879608
ggguguuauugaucacaag

SEQ ID NO: 1919401 - RNA, 19 nt, Artificial Sequence
  Description of Artificial Sequence: Synthetic oligonucleotide
  Antisense strand to SEQ ID NO: 1919400
cuugugaucaauaacaccc

SEQ ID NO: 1919402 - RNA, 19 nt, Artificial Sequence
  Description of Artificial Sequence: Synthetic oligonucleotide
  Sense strand starting at position 2707 of SEQ ID NO: 1879608
gaaagacucugucuggauu

SEQ ID NO: 1919403 - RNA, 19 nt, Artificial Sequence
  Description of Artificial Sequence: Synthetic oligonucleotide
  Antisense strand to SEQ ID NO: 1919402
aauccagacagagucuuuc

SEQ ID NO: 1919404 - RNA, 19 nt, Artificial Sequence
  Description of Artificial Sequence: Synthetic oligonucleotide
  Sense strand starting at position 2713 of SEQ ID NO: 1879608
cucugucuggauugaguuu

SEQ ID NO: 1919405 - RNA, 19 nt, Artificial Sequence
  Description of Artificial Sequence: Synthetic oligonucleotide
  Antisense strand to SEQ ID NO: 1919404
aaacucaauccagacagag

SEQ ID NO: 1919406 - RNA, 19 nt, Artificial Sequence
  Description of Artificial Sequence: Synthetic oligonucleotide
  Sense strand starting at position 2714 of SEQ ID NO: 1879608
ucugucuggauugaguuua

SEQ ID NO: 1919407 - RNA, 19 nt, Artificial Sequence
  Description of Artificial Sequence: Synthetic oligonucleotide
  Antisense strand to SEQ ID NO: 1919406
uaaacucaauccagacaga

SEQ ID NO: 1919408 - RNA, 19 nt, Artificial Sequence
  Description of Artificial Sequence: Synthetic oligonucleotide
  Sense strand starting at position 2743 of SEQ ID NO: 1879608
agggaauaguuacagaaga

SEQ ID NO: 1919409 - RNA, 19 nt, Artificial Sequence
  Description of Artificial Sequence: Synthetic oligonucleotide
  Antisense strand to SEQ ID NO: 1919408
ucuucuguaacuauucccu

SEQ ID NO: 1919410 - RNA, 19 nt, Artificial Sequence
  Description of Artificial Sequence: Synthetic oligonucleotide
  Sense strand starting at position 3055 of SEQ ID NO: 1879608
ggugcuauggucuggaaac

SEQ ID NO: 1919411 - RNA, 19 nt, Artificial Sequence
  Description of Artificial Sequence: Synthetic oligonucleotide
  Antisense strand to SEQ ID NO: 1919410
guuuccagaccauagcacc

SEQ ID NO: 1919412 - RNA, 19 nt, Artificial Sequence
  Description of Artificial Sequence: Synthetic oligonucleotide
  Sense strand starting at position 3057 of SEQ ID NO: 1879608
ugcuauggucuggaaaccu

SEQ ID NO: 1919413 - RNA, 19 nt, Artificial Sequence
  Description of Artificial Sequence: Synthetic oligonucleotide
  Antisense strand to SEQ ID NO: 1919412
agguuuccagaccauagca

SEQ ID NO: 1919414 - RNA, 19 nt, Artificial Sequence
  Description of Artificial Sequence: Synthetic oligonucleotide
  Sense strand starting at position 3224 of SEQ ID NO: 1879608
ccucccuugucccugauau

SEQ ID NO: 1919415 - RNA, 19 nt, Artificial Sequence
  Description of Artificial Sequence: Synthetic oligonucleotide
  Antisense strand to SEQ ID NO: 1919414
auaucagggacaagggagg

SEQ ID NO: 1919416 - RNA, 19 nt, Artificial Sequence
  Description of Artificial Sequence: Synthetic oligonucleotide
  Sense strand starting at position 3225 of SEQ ID NO: 1879608
cucccuugucccugauauu

SEQ ID NO: 1919417 - RNA, 19 nt, Artificial Sequence
  Description of Artificial Sequence: Synthetic oligonucleotide
  Antisense strand to SEQ ID NO: 1919416
aauaucagggacaagggag

SEQ ID NO: 1919418 - RNA, 19 nt, Artificial Sequence
  Description of Artificial Sequence: Synthetic oligonucleotide
  Sense strand starting at position 3226 of SEQ ID NO: 1879608
ucccuugucccugauauug

SEQ ID NO: 1919419 - RNA, 19 nt, Artificial Sequence
  Description of Artificial Sequence: Synthetic oligonucleotide
  Antisense strand to SEQ ID NO: 1919418
caauaucagggacaaggga

SEQ ID NO: 1919420 - RNA, 19 nt, Artificial Sequence
  Description of Artificial Sequence: Synthetic oligonucleotide
  Sense strand starting at position 3351 of SEQ ID NO: 1879608
gauagauuacuugagcgca

SEQ ID NO: 1919421 - RNA, 19 nt, Artificial Sequence
  Description of Artificial Sequence: Synthetic oligonucleotide
  Antisense strand to SEQ ID NO: 1919420
ugcgcucaaguaaucuauc

SEQ ID NO: 1919422 - RNA, 19 nt, Artificial Sequence
  Description of Artificial Sequence: Synthetic oligonucleotide
  Sense strand starting at position 3476 of SEQ ID NO: 1879608
gaaguuuagaugcgaggau

SEQ ID NO: 1919423 - RNA, 19 nt, Artificial Sequence
  Description of Artificial Sequence: Synthetic oligonucleotide
  Antisense strand to SEQ ID NO: 1919422
auccucgcaucuaaacuuc

SEQ ID NO: 1919424 - RNA, 19 nt, Artificial Sequence
  Description of Artificial Sequence: Synthetic oligonucleotide
  Sense strand starting at position 3838 of SEQ ID NO: 1879608
gcgagccuucuugucuuua

SEQ ID NO: 1919425 - RNA, 19 nt, Artificial Sequence
  Description of Artificial Sequence: Synthetic oligonucleotide
  Antisense strand to SEQ ID NO: 1919424
uaaagacaagaaggcucgc

SEQ ID NO: 1919426 - RNA, 19 nt, Artificial Sequence
  Description of Artificial Sequence: Synthetic oligonucleotide
  Sense strand starting at position 3842 of SEQ ID NO: 1879608
gccuucuugucuuuaagag

SEQ ID NO: 1919427 - RNA, 19 nt, Artificial Sequence
  Description of Artificial Sequence: Synthetic oligonucleotide
  Antisense strand to SEQ ID NO: 1919426
cucuuaaagacaagaaggc

SEQ ID NO: 1919428 - RNA, 19 nt, Artificial Sequence
  Description of Artificial Sequence: Synthetic oligonucleotide
  Sense strand starting at position 3854 of SEQ ID NO: 1879608
uuaagagcagcgcauauau

SEQ ID NO: 1919429 - RNA, 19 nt, Artificial Sequence
  Description of Artificial Sequence: Synthetic oligonucleotide
  Antisense strand to SEQ ID NO: 1919428
auauaugcgcugcucuuaa

SEQ ID NO: 1919430 - RNA, 19 nt, Artificial Sequence
  Description of Artificial Sequence: Synthetic oligonucleotide
  Sense strand starting at position 3937 of SEQ ID NO: 1879608
guugaaauaucugcuaagu

SEQ ID NO: 1919431 - RNA, 19 nt, Artificial Sequence
  Description of Artificial Sequence: Synthetic oligonucleotide
  Antisense strand to SEQ ID NO: 1919430
acuuagcagauauuucaac

SEQ ID NO: 1919432 - RNA, 19 nt, Artificial Sequence
  Description of Artificial Sequence: Synthetic oligonucleotide
  Sense strand starting at position 3980 of SEQ ID NO: 1879608
gggaucacacagugauucu

SEQ ID NO: 1919433 - RNA, 19 nt, Artificial Sequence
  Description of Artificial Sequence: Synthetic oligonucleotide
  Antisense strand to SEQ ID NO: 1919432
agaaucacugugugauccc

SEQ ID NO: 1919434 - RNA, 19 nt, Artificial Sequence
  Description of Artificial Sequence: Synthetic oligonucleotide
  Sense strand starting at position 470 of SEQ ID NO: 1879609
gcgugaagaacucaucaac

SEQ ID NO: 1919435 - RNA, 19 nt, Artificial Sequence
  Description of Artificial Sequence: Synthetic oligonucleotide
  Antisense strand to SEQ ID NO: 1919434
guugaugaguucuucacgc

SEQ ID NO: 1919436 - RNA, 19 nt, Artificial Sequence
  Description of Artificial Sequence: Synthetic oligonucleotide
  Sense strand starting at position 870 of SEQ ID NO: 1879609
ggguauggacuccagaguu

SEQ ID NO: 1919437 - RNA, 19 nt, Artificial Sequence
  Description of Artificial Sequence: Synthetic oligonucleotide
  Antisense strand to SEQ ID NO: 1919436
aacucuggaguccauaccc

SEQ ID NO: 1919438 - RNA, 19 nt, Artificial Sequence
  Description of Artificial Sequence: Synthetic oligonucleotide
  Sense strand starting at position 921 of SEQ ID NO: 1879609
gcaggaguccuagauaacu

SEQ ID NO: 1919439 - RNA, 19 nt, Artificial Sequence
  Description of Artificial Sequence: Synthetic oligonucleotide
  Antisense strand to SEQ ID NO: 1919438
aguuaucuaggacuccugc

SEQ ID NO: 1919440 - RNA, 19 nt, Artificial Sequence
  Description of Artificial Sequence: Synthetic oligonucleotide
  Sense strand starting at position 926 of SEQ ID NO: 1879609
aguccuagauaacuuggaa

SEQ ID NO: 1919441 - RNA, 19 nt, Artificial Sequence
  Description of Artificial Sequence: Synthetic oligonucleotide
  Antisense strand to SEQ ID NO: 1919440
uuccaaguuaucuaggacu

SEQ ID NO: 1919442 - RNA, 19 nt, Artificial Sequence
  Description of Artificial Sequence: Synthetic oligonucleotide
  Sense strand starting at position 930 of SEQ ID NO: 1879609
cuagauaacuuggaaauuu

SEQ ID NO: 1919443 - RNA, 19 nt, Artificial Sequence
  Description of Artificial Sequence: Synthetic oligonucleotide
  Antisense strand to SEQ ID NO: 1919442
aaauuuccaaguuaucuag

SEQ ID NO: 1919444 - RNA, 19 nt, Artificial Sequence
  Description of Artificial Sequence: Synthetic oligonucleotide
  Sense strand starting at position 1016 of SEQ ID NO: 1879609
cacagaccugugcaguaaa

SEQ ID NO: 1919445 - RNA, 19 nt, Artificial Sequence
  Description of Artificial Sequence: Synthetic oligonucleotide
  Antisense strand to SEQ ID NO: 1919444
uuuacugcacaggucugug

SEQ ID NO: 1919446 - RNA, 19 nt, Artificial Sequence
  Description of Artificial Sequence: Synthetic oligonucleotide
  Sense strand starting at position 1215 of SEQ ID NO: 1879609
ucagacuugccuuggugaa

SEQ ID NO: 1919447 - RNA, 19 nt, Artificial Sequence
  Description of Artificial Sequence: Synthetic oligonucleotide
  Antisense strand to SEQ ID NO: 1919446
uucaccaaggcaagucuga

SEQ ID NO: 1919448 - RNA, 19 nt, Artificial Sequence
  Description of Artificial Sequence: Synthetic oligonucleotide
  Sense strand starting at position 1216 of SEQ ID NO: 1879609
cagacuugccuuggugaag

SEQ ID NO: 1919449 - RNA, 19 nt, Artificial Sequence
  Description of Artificial Sequence: Synthetic oligonucleotide
  Antisense strand to SEQ ID NO: 1919448
cuucaccaaggcaagucug

SEQ ID NO: 1919450 - RNA, 19 nt, Artificial Sequence
  Description of Artificial Sequence: Synthetic oligonucleotide
  Sense strand starting at position 1234 of SEQ ID NO: 1879609
gguccucucccagagaggu

SEQ ID NO: 1919451 - RNA, 19 nt, Artificial Sequence
  Description of Artificial Sequence: Synthetic oligonucleotide
  Antisense strand to SEQ ID NO: 1919450
accucucugggagaggacc

SEQ ID NO: 1919452 - RNA, 19 nt, Artificial Sequence
  Description of Artificial Sequence: Synthetic oligonucleotide
  Sense strand starting at position 1410 of SEQ ID NO: 1879609
agcaaucaggcagauucua

SEQ ID NO: 1919453 - RNA, 19 nt, Artificial Sequence
  Description of Artificial Sequence: Synthetic oligonucleotide
  Antisense strand to SEQ ID NO: 1919452
uagaaucugccugauugcu

SEQ ID NO: 1919454 - RNA, 19 nt, Artificial Sequence
  Description of Artificial Sequence: Synthetic oligonucleotide
  Sense strand starting at position 1437 of SEQ ID NO: 1879609
acaucuauuugccauguga

SEQ ID NO: 1919455 - RNA, 19 nt, Artificial Sequence
  Description of Artificial Sequence: Synthetic oligonucleotide
  Antisense strand to SEQ ID NO: 1919454
ucacauggcaaauagaugu

SEQ ID NO: 1919456 - RNA, 19 nt, Artificial Sequence
  Description of Artificial Sequence: Synthetic oligonucleotide
  Sense strand starting at position 1459 of SEQ ID NO: 1879609
ugggcaaauuacucagcuu

SEQ ID NO: 1919457 - RNA, 19 nt, Artificial Sequence
  Description of Artificial Sequence: Synthetic oligonucleotide
  Antisense strand to SEQ ID NO: 1919456
aagcugaguaauuugccca

SEQ ID NO: 1919458 - RNA, 19 nt, Artificial Sequence
  Description of Artificial Sequence: Synthetic oligonucleotide
  Sense strand starting at position 1485 of SEQ ID NO: 1879609
ccugucuuugcugcaguaa

SEQ ID NO: 1919459 - RNA, 19 nt, Artificial Sequence
  Description of Artificial Sequence: Synthetic oligonucleotide
  Antisense strand to SEQ ID NO: 1919458
uuacugcagcaaagacagg

SEQ ID NO: 1919460 - RNA, 19 nt, Artificial Sequence
  Description of Artificial Sequence: Synthetic oligonucleotide
  Sense strand starting at position 1486 of SEQ ID NO: 1879609
cugucuuugcugcaguaaa

SEQ ID NO: 1919461 - RNA, 19 nt, Artificial Sequence
  Description of Artificial Sequence: Synthetic oligonucleotide
  Antisense strand to SEQ ID NO: 1919460
uuuacugcagcaaagacag

SEQ ID NO: 1919462 - RNA, 19 nt, Artificial Sequence
  Description of Artificial Sequence: Synthetic oligonucleotide
  Sense strand starting at position 2213 of SEQ ID NO: 1879609
gugucaucggaggacaaga

SEQ ID NO: 1919463 - RNA, 19 nt, Artificial Sequence
  Description of Artificial Sequence: Synthetic oligonucleotide
  Antisense strand to SEQ ID NO: 1919462
ucuuguccuccgaugacac

SEQ ID NO: 1919464 - RNA, 19 nt, Artificial Sequence
  Description of Artificial Sequence: Synthetic oligonucleotide
  Sense strand starting at position 2308 of SEQ ID NO: 1879609
cuagauuuaggcuguaguu

SEQ ID NO: 1919465 - RNA, 19 nt, Artificial Sequence
  Description of Artificial Sequence: Synthetic oligonucleotide
  Antisense strand to SEQ ID NO: 1919464
aacuacagccuaaaucuag

SEQ ID NO: 1919466 - RNA, 19 nt, Artificial Sequence
  Description of Artificial Sequence: Synthetic oligonucleotide
  Sense strand starting at position 2534 of SEQ ID NO: 1879609
gacccagacuugguaaaca

SEQ ID NO: 1919467 - RNA, 19 nt, Artificial Sequence
  Description of Artificial Sequence: Synthetic oligonucleotide
  Antisense strand to SEQ ID NO: 1919466
uguuuaccaagucuggguc

SEQ ID NO: 1919468 - RNA, 19 nt, Artificial Sequence
  Description of Artificial Sequence: Synthetic oligonucleotide
  Sense strand starting at position 2568 of SEQ ID NO: 1879609
augcuagcugcgagagguu

SEQ ID NO: 1919469 - RNA, 19 nt, Artificial Sequence
  Description of Artificial Sequence: Synthetic oligonucleotide
  Antisense strand to SEQ ID NO: 1919468
aaccucucgcagcuagcau

SEQ ID NO: 1919470 - RNA, 19 nt, Artificial Sequence
  Description of Artificial Sequence: Synthetic oligonucleotide
  Sense strand starting at position 2981 of SEQ ID NO: 1879609
guuugaguucuggaaucaa

SEQ ID NO: 1919471 - RNA, 19 nt, Artificial Sequence
  Description of Artificial Sequence: Synthetic oligonucleotide
  Antisense strand to SEQ ID NO: 1919470
uugauuccagaacucaaac

SEQ ID NO: 1919472 - RNA, 19 nt, Artificial Sequence
  Description of Artificial Sequence: Synthetic oligonucleotide
  Sense strand starting at position 3010 of SEQ ID NO: 1879609
guucuaguuccaggucuga

SEQ ID NO: 1919473 - RNA, 19 nt, Artificial Sequence
  Description of Artificial Sequence: Synthetic oligonucleotide
  Antisense strand to SEQ ID NO: 1919472
ucagaccuggaacuagaac

SEQ ID NO: 1919474 - RNA, 19 nt, Artificial Sequence
  Description of Artificial Sequence: Synthetic oligonucleotide
  Sense strand starting at position 3014 of SEQ ID NO: 1879609
uaguuccaggucugauaua

SEQ ID NO: 1919475 - RNA, 19 nt, Artificial Sequence
  Description of Artificial Sequence: Synthetic oligonucleotide
  Antisense strand to SEQ ID NO: 1919474
uauaucagaccuggaacua

SEQ ID NO: 1919476 - RNA, 19 nt, Artificial Sequence
  Description of Artificial Sequence: Synthetic oligonucleotide
  Sense strand starting at position 3120 of SEQ ID NO: 1879609
ugugccaggcuaugaaaua

SEQ ID NO: 1919477 - RNA, 19 nt, Artificial Sequence
  Description of Artificial Sequence: Synthetic oligonucleotide
  Antisense strand to SEQ ID NO: 1919476
uauuucauagccuggcaca

SEQ ID NO: 1919478 - RNA, 19 nt, Artificial Sequence
  Description of Artificial Sequence: Synthetic oligonucleotide
  Sense strand starting at position 3215 of SEQ ID NO: 1879609
cugaccaguguggguaaau

SEQ ID NO: 1919479 - RNA, 19 nt, Artificial Sequence
  Description of Artificial Sequence: Synthetic oligonucleotide
  Antisense strand to SEQ ID NO: 1919478
auuuacccacacuggucag

SEQ ID NO: 1919480 - RNA, 19 nt, Artificial Sequence
  Description of Artificial Sequence: Synthetic oligonucleotide
  Sense strand starting at position 3226 of SEQ ID NO: 1879609
ggguaaaucuuagucuaag

SEQ ID NO: 1919481 - RNA, 19 nt, Artificial Sequence
  Description of Artificial Sequence: Synthetic oligonucleotide
  Antisense strand to SEQ ID NO: 1919480
cuuagacuaagauuuaccc

SEQ ID NO: 1919482 - RNA, 19 nt, Artificial Sequence
  Description of Artificial Sequence: Synthetic oligonucleotide
  Sense strand starting at position 3227 of SEQ ID NO: 1879609
gguaaaucuuagucuaagu

SEQ ID NO: 1919483 - RNA, 19 nt, Artificial Sequence
  Description of Artificial Sequence: Synthetic oligonucleotide
  Antisense strand to SEQ ID NO: 1919482
acuuagacuaagauuuacc

SEQ ID NO: 1919484 - RNA, 19 nt, Artificial Sequence
  Description of Artificial Sequence: Synthetic oligonucleotide
  Sense strand starting at position 3238 of SEQ ID NO: 1879609
gucuaaguccaucauggga

SEQ ID NO: 1919485 - RNA, 19 nt, Artificial Sequence
  Description of Artificial Sequence: Synthetic oligonucleotide
  Antisense strand to SEQ ID NO: 1919484
ucccaugauggacuuagac

SEQ ID NO: 1919486 - RNA, 19 nt, Artificial Sequence
  Description of Artificial Sequence: Synthetic oligonucleotide
  Sense strand starting at position 3241 of SEQ ID NO: 1879609
uaaguccaucaugggaauu

SEQ ID NO: 1919487 - RNA, 19 nt, Artificial Sequence
  Description of Artificial Sequence: Synthetic oligonucleotide
  Antisense strand to SEQ ID NO: 1919486
aauucccaugauggacuua

SEQ ID NO: 1919488 - RNA, 19 nt, Artificial Sequence
  Description of Artificial Sequence: Synthetic oligonucleotide
  Sense strand starting at position 3267 of SEQ ID NO: 1879609
ccugccagucauuagucua

SEQ ID NO: 1919489 - RNA, 19 nt, Artificial Sequence
  Description of Artificial Sequence: Synthetic oligonucleotide
  Antisense strand to SEQ ID NO: 1919488
uagacuaaugacuggcagg

SEQ ID NO: 1919490 - RNA, 19 nt, Artificial Sequence
  Description of Artificial Sequence: Synthetic oligonucleotide
  Sense strand starting at position 3270 of SEQ ID NO: 1879609
gccagucauuagucuagga

SEQ ID NO: 1919491 - RNA, 19 nt, Artificial Sequence
  Description of Artificial Sequence: Synthetic oligonucleotide
  Antisense strand to SEQ ID NO: 1919490
uccuagacuaaugacuggc

SEQ ID NO: 1919492 - RNA, 19 nt, Artificial Sequence
  Description of Artificial Sequence: Synthetic oligonucleotide
  Sense strand starting at position 3272 of SEQ ID NO: 1879609
cagucauuagucuaggaau

SEQ ID NO: 1919493 - RNA, 19 nt, Artificial Sequence
  Description of Artificial Sequence: Synthetic oligonucleotide
  Antisense strand to SEQ ID NO: 1919492
auuccuagacuaaugacug

SEQ ID NO: 1919494 - RNA, 19 nt, Artificial Sequence
  Description of Artificial Sequence: Synthetic oligonucleotide
  Sense strand starting at position 3298 of SEQ ID NO: 1879609
ggacauagcucugcccagu

SEQ ID NO: 1919495 - RNA, 19 nt, Artificial Sequence
  Description of Artificial Sequence: Synthetic oligonucleotide
  Antisense strand to SEQ ID NO: 1919494
acugggcagagcuaugucc

SEQ ID NO: 1919496 - RNA, 19 nt, Artificial Sequence
  Description of Artificial Sequence: Synthetic oligonucleotide
  Sense strand starting at position 3304 of SEQ ID NO: 1879609
agcucugcccagugagauc

SEQ ID NO: 1919497 - RNA, 19 nt, Artificial Sequence
  Description of Artificial Sequence: Synthetic oligonucleotide
  Antisense strand to SEQ ID NO: 1919496
gaucucacugggcagagcu

SEQ ID NO: 1919498 - RNA, 19 nt, Artificial Sequence
  Description of Artificial Sequence: Synthetic oligonucleotide
  Sense strand starting at position 3313 of SEQ ID NO: 1879609
cagugagauccaugcgaaa

SEQ ID NO: 1919499 - RNA, 19 nt, Artificial Sequence
  Description of Artificial Sequence: Synthetic oligonucleotide
  Antisense strand to SEQ ID NO: 1919498
uuucgcauggaucucacug

SEQ ID NO: 1919500 - RNA, 19 nt, Artificial Sequence
  Description of Artificial Sequence: Synthetic oligonucleotide
  Sense strand starting at position 3750 of SEQ ID NO: 1879609
cgcaauucugagggcaaua

SEQ ID NO: 1919501 - RNA, 19 nt, Artificial Sequence
  Description of Artificial Sequence: Synthetic oligonucleotide
  Antisense strand to SEQ ID NO: 1919500
uauugcccucagaauugcg

SEQ ID NO: 1919502 - RNA, 19 nt, Artificial Sequence
  Description of Artificial Sequence: Synthetic oligonucleotide
  Sense strand starting at position 3803 of SEQ ID NO: 1879609
aaagaauguugauucuuga

SEQ ID NO: 1919503 - RNA, 19 nt, Artificial Sequence
  Description of Artificial Sequence: Synthetic oligonucleotide
  Antisense strand to SEQ ID NO: 1919502
ucaagaaucaacauucuuu

SEQ ID NO: 1919504 - RNA, 19 nt, Artificial Sequence
  Description of Artificial Sequence: Synthetic oligonucleotide
  Sense strand starting at position 3849 of SEQ ID NO: 1879609
uugaaacugaagugguuau

SEQ ID NO: 1919505 - RNA, 19 nt, Artificial Sequence
  Description of Artificial Sequence: Synthetic oligonucleotide
  Antisense strand to SEQ ID NO: 1919504
auaaccacuucaguuucaa

SEQ ID NO: 1919506 - RNA, 19 nt, Artificial Sequence
  Description of Artificial Sequence: Synthetic oligonucleotide
  Sense strand starting at position 3856 of SEQ ID NO: 1879609
ugaagugguuaucucugga

SEQ ID NO: 1919507 - RNA, 19 nt, Artificial Sequence
  Description of Artificial Sequence: Synthetic oligonucleotide
  Antisense strand to SEQ ID NO: 1919506
uccagagauaaccacuuca

SEQ ID NO: 1919508 - RNA, 19 nt, Artificial Sequence
  Description of Artificial Sequence: Synthetic oligonucleotide
  Sense strand starting at position 3859 of SEQ ID NO: 1879609
agugguuaucucuggaccu

SEQ ID NO: 1919509 - RNA, 19 nt, Artificial Sequence
  Description of Artificial Sequence: Synthetic oligonucleotide
  Antisense strand to SEQ ID NO: 1919508
agguccagagauaaccacu

SEQ ID NO: 1919510 - RNA, 19 nt, Artificial Sequence
  Description of Artificial Sequence: Synthetic oligonucleotide
  Sense strand starting at position 3918 of SEQ ID NO: 1879609
ccauuuauuuaguguaauc

SEQ ID NO: 1919511 - RNA, 19 nt, Artificial Sequence
  Description of Artificial Sequence: Synthetic oligonucleotide
  Antisense strand to SEQ ID NO: 1919510
gauuacacuaaauaaaugg

SEQ ID NO: 1919512 - RNA, 19 nt, Artificial Sequence
  Description of Artificial Sequence: Synthetic oligonucleotide
  Sense strand starting at position 3928 of SEQ ID NO: 1879609
aguguaaucuaucuauccu

SEQ ID NO: 1919513 - RNA, 19 nt, Artificial Sequence
  Description of Artificial Sequence: Synthetic oligonucleotide
  Antisense strand to SEQ ID NO: 1919512
aggauagauagauuacacu

SEQ ID NO: 1919514 - RNA, 19 nt, Artificial Sequence
  Description of Artificial Sequence: Synthetic oligonucleotide
  Sense strand starting at position 897 of SEQ ID NO: 1879610
caccaugccuggugaaaug

SEQ ID NO: 1919515 - RNA, 19 nt, Artificial Sequence
  Description of Artificial Sequence: Synthetic oligonucleotide
  Antisense strand to SEQ ID NO: 1919514
cauuucaccaggcauggug

SEQ ID NO: 1919516 - RNA, 19 nt, Artificial Sequence
  Description of Artificial Sequence: Synthetic oligonucleotide
  Sense strand starting at position 1266 of SEQ ID NO: 1879610
augcccuauugauggauaa

SEQ ID NO: 1919517 - RNA, 19 nt, Artificial Sequence
  Description of Artificial Sequence: Synthetic oligonucleotide
  Antisense strand to SEQ ID NO: 1919516
uuauccaucaauagggcau

SEQ ID NO: 1919518 - RNA, 19 nt, Artificial Sequence
  Description of Artificial Sequence: Synthetic oligonucleotide
  Sense strand starting at position 1267 of SEQ ID NO: 1879610
ugcccuauugauggauaau

SEQ ID NO: 1919519 - RNA, 19 nt, Artificial Sequence
  Description of Artificial Sequence: Synthetic oligonucleotide
  Antisense strand to SEQ ID NO: 1919518
auuauccaucaauagggca

SEQ ID NO: 1919520 - RNA, 19 nt, Artificial Sequence
  Description of Artificial Sequence: Synthetic oligonucleotide
  Sense strand starting at position 1276 of SEQ ID NO: 1879610
gauggauaauuguuucuag

SEQ ID NO: 1919521 - RNA, 19 nt, Artificial Sequence
  Description of Artificial Sequence: Synthetic oligonucleotide
  Antisense strand to SEQ ID NO: 1919520
cuagaaacaauuauccauc

SEQ ID NO: 1919522 - RNA, 19 nt, Artificial Sequence
  Description of Artificial Sequence: Synthetic oligonucleotide
  Sense strand starting at position 1277 of SEQ ID NO: 1879610
auggauaauuguuucuagu

SEQ ID NO: 1919523 - RNA, 19 nt, Artificial Sequence
  Description of Artificial Sequence: Synthetic oligonucleotide
  Antisense strand to SEQ ID NO: 1919522
acuagaaacaauuauccau

SEQ ID NO: 1919524 - RNA, 19 nt, Artificial Sequence
  Description of Artificial Sequence: Synthetic oligonucleotide
  Sense strand starting at position 1279 of SEQ ID NO: 1879610
ggauaauuguuucuaguuu

SEQ ID NO: 1919525 - RNA, 19 nt, Artificial Sequence
  Description of Artificial Sequence: Synthetic oligonucleotide
  Antisense strand to SEQ ID NO: 1919524
aaacuagaaacaauuaucc

SEQ ID NO: 1919526 - RNA, 19 nt, Artificial Sequence
  Description of Artificial Sequence: Synthetic oligonucleotide
  Sense strand starting at position 1375 of SEQ ID NO: 1879610
acagauuccuucucgggau

SEQ ID NO: 1919527 - RNA, 19 nt, Artificial Sequence
  Description of Artificial Sequence: Synthetic oligonucleotide
  Antisense strand to SEQ ID NO: 1919526
aucccgagaaggaaucugu

SEQ ID NO: 1919528 - RNA, 19 nt, Artificial Sequence
  Description of Artificial Sequence: Synthetic oligonucleotide
  Sense strand starting at position 1376 of SEQ ID NO: 1879610
cagauuccuucucgggauu

SEQ ID NO: 1919529 - RNA, 19 nt, Artificial Sequence
  Description of Artificial Sequence: Synthetic oligonucleotide
  Antisense strand to SEQ ID NO: 1919528
aaucccgagaaggaaucug

SEQ ID NO: 1919530 - RNA, 19 nt, Artificial Sequence
  Description of Artificial Sequence: Synthetic oligonucleotide
  Sense strand starting at position 1378 of SEQ ID NO: 1879610
gauuccuucucgggauugu

SEQ ID NO: 1919531 - RNA, 19 nt, Artificial Sequence
  Description of Artificial Sequence: Synthetic oligonucleotide
  Antisense strand to SEQ ID NO: 1919530
acaaucccgagaaggaauc

SEQ ID NO: 1919532 - RNA, 19 nt, Artificial Sequence
  Description of Artificial Sequence: Synthetic oligonucleotide
  Sense strand starting at position 1379 of SEQ ID NO: 1879610
auuccuucucgggauuguu

SEQ ID NO: 1919533 - RNA, 19 nt, Artificial Sequence
  Description of Artificial Sequence: Synthetic oligonucleotide
  Antisense strand to SEQ ID NO: 1919532
aacaaucccgagaaggaau

SEQ ID NO: 1919534 - RNA, 19 nt, Artificial Sequence
  Description of Artificial Sequence: Synthetic oligonucleotide
  Sense strand starting at position 1387 of SEQ ID NO: 1879610
ucgggauuguuugaucaaa

SEQ ID NO: 1919535 - RNA, 19 nt, Artificial Sequence
  Description of Artificial Sequence: Synthetic oligonucleotide
  Antisense strand to SEQ ID NO: 1919534
uuugaucaaacaaucccga

SEQ ID NO: 1919536 - RNA, 19 nt, Artificial Sequence
  Description of Artificial Sequence: Synthetic oligonucleotide
  Sense strand starting at position 1432 of SEQ ID NO: 1879610
gguagcaucccauacuaaa

SEQ ID NO: 1919537 - RNA, 19 nt, Artificial Sequence
  Description of Artificial Sequence: Synthetic oligonucleotide
  Antisense strand to SEQ ID NO: 1919536
uuuaguaugggaugcuacc

SEQ ID NO: 1919538 - RNA, 19 nt, Artificial Sequence
  Description of Artificial Sequence: Synthetic oligonucleotide
  Sense strand starting at position 1473 of SEQ ID NO: 1879610
acugguaguguaugagagu

SEQ ID NO: 1919539 - RNA, 19 nt, Artificial Sequence
  Description of Artificial Sequence: Synthetic oligonucleotide
  Antisense strand to SEQ ID NO: 1919538
acucucauacacuaccagu

SEQ ID NO: 1919540 - RNA, 19 nt, Artificial Sequence
  Description of Artificial Sequence: Synthetic oligonucleotide
  Sense strand starting at position 1512 of SEQ ID NO: 1879610
aucucagcucuugauguua

SEQ ID NO: 1919541 - RNA, 19 nt, Artificial Sequence
  Description of Artificial Sequence: Synthetic oligonucleotide
  Antisense strand to SEQ ID NO: 1919540
uaacaucaagagcugagau

SEQ ID NO: 1919542 - RNA, 19 nt, Artificial Sequence
  Description of Artificial Sequence: Synthetic oligonucleotide
  Sense strand starting at position 1514 of SEQ ID NO: 1879610
cucagcucuugauguuauu

SEQ ID NO: 1919543 - RNA, 19 nt, Artificial Sequence
  Description of Artificial Sequence: Synthetic oligonucleotide
  Antisense strand to SEQ ID NO: 1919542
aauaacaucaagagcugag

SEQ ID NO: 1919544 - RNA, 19 nt, Artificial Sequence
  Description of Artificial Sequence: Synthetic oligonucleotide
  Sense strand starting at position 1517 of SEQ ID NO: 1879610
agcucuugauguuauuaua

SEQ ID NO: 1919545 - RNA, 19 nt, Artificial Sequence
  Description of Artificial Sequence: Synthetic oligonucleotide
  Antisense strand to SEQ ID NO: 1919544
uauaauaacaucaagagcu

SEQ ID NO: 1919546 - RNA, 19 nt, Artificial Sequence
  Description of Artificial Sequence: Synthetic oligonucleotide
  Sense strand starting at position 1525 of SEQ ID NO: 1879610
auguuauuauaggcugacu

SEQ ID NO: 1919547 - RNA, 19 nt, Artificial Sequence
  Description of Artificial Sequence: Synthetic oligonucleotide
  Antisense strand to SEQ ID NO: 1919546
agucagccuauaauaacau

SEQ ID NO: 1919548 - RNA, 19 nt, Artificial Sequence
  Description of Artificial Sequence: Synthetic oligonucleotide
  Sense strand starting at position 1527 of SEQ ID NO: 1879610
guuauuauaggcugacuga

SEQ ID NO: 1919549 - RNA, 19 nt, Artificial Sequence
  Description of Artificial Sequence: Synthetic oligonucleotide
  Antisense strand to SEQ ID NO: 1919548
ucagucagccuauaauaac

SEQ ID NO: 1919550 - RNA, 19 nt, Artificial Sequence
  Description of Artificial Sequence: Synthetic oligonucleotide
  Sense strand starting at position 1528 of SEQ ID NO: 1879610
uuauuauaggcugacugau

SEQ ID NO: 1919551 - RNA, 19 nt, Artificial Sequence
  Description of Artificial Sequence: Synthetic oligonucleotide
  Antisense strand to SEQ ID NO: 1919550
aucagucagccuauaauaa

SEQ ID NO: 1919552 - RNA, 19 nt, Artificial Sequence
  Description of Artificial Sequence: Synthetic oligonucleotide
  Sense strand starting at position 1610 of SEQ ID NO: 1879610
uuaguugauugcugacuga

SEQ ID NO: 1919553 - RNA, 19 nt, Artificial Sequence
  Description of Artificial Sequence: Synthetic oligonucleotide
  Antisense strand to SEQ ID NO: 1919552
ucagucagcaaucaacuaa

SEQ ID NO: 1919554 - RNA, 19 nt, Artificial Sequence
  Description of Artificial Sequence: Synthetic oligonucleotide
  Sense strand starting at position 1613 of SEQ ID NO: 1879610
guugauugcugacugauag

SEQ ID NO: 1919555 - RNA, 19 nt, Artificial Sequence
  Description of Artificial Sequence: Synthetic oligonucleotide
  Antisense strand to SEQ ID NO: 1919554
cuaucagucagcaaucaac

SEQ ID NO: 1919556 - RNA, 19 nt, Artificial Sequence
  Description of Artificial Sequence: Synthetic oligonucleotide
  Sense strand starting at position 1619 of SEQ ID NO: 1879610
ugcugacugauaggaaguu

SEQ ID NO: 1919557 - RNA, 19 nt, Artificial Sequence
  Description of Artificial Sequence: Synthetic oligonucleotide
  Antisense strand to SEQ ID NO: 1919556
aacuuccuaucagucagca

SEQ ID NO: 1919558 - RNA, 19 nt, Artificial Sequence
  Description of Artificial Sequence: Synthetic oligonucleotide
  Sense strand starting at position 1620 of SEQ ID NO: 1879610
gcugacugauaggaaguuu

SEQ ID NO: 1919559 - RNA, 19 nt, Artificial Sequence
  Description of Artificial Sequence: Synthetic oligonucleotide
  Antisense strand to SEQ ID NO: 1919558
aaacuuccuaucagucagc

SEQ ID NO: 1919560 - RNA, 19 nt, Artificial Sequence
  Description of Artificial Sequence: Synthetic oligonucleotide
  Sense strand starting at position 1640 of SEQ ID NO: 1879610
cagucuuaggucuggugga

SEQ ID NO: 1919561 - RNA, 19 nt, Artificial Sequence
  Description of Artificial Sequence: Synthetic oligonucleotide
  Antisense strand to SEQ ID NO: 1919560
uccaccagaccuaagacug

SEQ ID NO: 1919562 - RNA, 19 nt, Artificial Sequence
  Description of Artificial Sequence: Synthetic oligonucleotide
  Sense strand starting at position 1641 of SEQ ID NO: 1879610
agucuuaggucugguggau

SEQ ID NO: 1919563 - RNA, 19 nt, Artificial Sequence
  Description of Artificial Sequence: Synthetic oligonucleotide
  Antisense strand to SEQ ID NO: 1919562
auccaccagaccuaagacu

SEQ ID NO: 1919564 - RNA, 19 nt, Artificial Sequence
  Description of Artificial Sequence: Synthetic oligonucleotide
  Sense strand starting at position 1676 of SEQ ID NO: 1879610
agguccaucugaccuagua

SEQ ID NO: 1919565 - RNA, 19 nt, Artificial Sequence
  Description of Artificial Sequence: Synthetic oligonucleotide
  Antisense strand to SEQ ID NO: 1919564
uacuaggucagauggaccu

SEQ ID NO: 1919566 - RNA, 19 nt, Artificial Sequence
  Description of Artificial Sequence: Synthetic oligonucleotide
  Sense strand starting at position 1684 of SEQ ID NO: 1879610
cugaccuaguaauagagaa

SEQ ID NO: 1919567 - RNA, 19 nt, Artificial Sequence
  Description of Artificial Sequence: Synthetic oligonucleotide
  Antisense strand to SEQ ID NO: 1919566
uucucuauuacuaggucag

SEQ ID NO: 1919568 - RNA, 19 nt, Artificial Sequence
  Description of Artificial Sequence: Synthetic oligonucleotide
  Sense strand starting at position 1777 of SEQ ID NO: 1879610
cagauagguuaaggaauuu

SEQ ID NO: 1919569 - RNA, 19 nt, Artificial Sequence
  Description of Artificial Sequence: Synthetic oligonucleotide
  Antisense strand to SEQ ID NO: 1919568
aaauuccuuaaccuaucug

SEQ ID NO: 1919570 - RNA, 19 nt, Artificial Sequence
  Description of Artificial Sequence: Synthetic oligonucleotide
  Sense strand starting at position 1789 of SEQ ID NO: 1879610
ggaauuugguuccaaaucu

SEQ ID NO: 1919571 - RNA, 19 nt, Artificial Sequence
  Description of Artificial Sequence: Synthetic oligonucleotide
  Antisense strand to SEQ ID NO: 1919570
agauuuggaaccaaauucc

SEQ ID NO: 1919572 - RNA, 19 nt, Artificial Sequence
  Description of Artificial Sequence: Synthetic oligonucleotide
  Sense strand starting at position 1812 of SEQ ID NO: 1879610
cucucagauuaguaagaca

SEQ ID NO: 1919573 - RNA, 19 nt, Artificial Sequence
  Description of Artificial Sequence: Synthetic oligonucleotide
  Antisense strand to SEQ ID NO: 1919572
ugucuuacuaaucugagag

SEQ ID NO: 1919574 - RNA, 19 nt, Artificial Sequence
  Description of Artificial Sequence: Synthetic oligonucleotide
  Sense strand starting at position 2000 of SEQ ID NO: 1879610
gauccagguuccuauuuga

SEQ ID NO: 1919575 - RNA, 19 nt, Artificial Sequence
  Description of Artificial Sequence: Synthetic oligonucleotide
  Antisense strand to SEQ ID NO: 1919574
ucaaauaggaaccuggauc

SEQ ID NO: 1919576 - RNA, 19 nt, Artificial Sequence
  Description of Artificial Sequence: Synthetic oligonucleotide
  Sense strand starting at position 2290 of SEQ ID NO: 1879610
aaacgaaauugcuggaaua

SEQ ID NO: 1919577 - RNA, 19 nt, Artificial Sequence
  Description of Artificial Sequence: Synthetic oligonucleotide
  Antisense strand to SEQ ID NO: 1919576
uauuccagcaauuucguuu

SEQ ID NO: 1919578 - RNA, 19 nt, Artificial Sequence
  Description of Artificial Sequence: Synthetic oligonucleotide
  Sense strand starting at position 2291 of SEQ ID NO: 1879610
aacgaaauugcuggaauaa

SEQ ID NO: 1919579 - RNA, 19 nt, Artificial Sequence
  Description of Artificial Sequence: Synthetic oligonucleotide
  Antisense strand to SEQ ID NO: 1919578
uuauuccagcaauuucguu

SEQ ID NO: 1919580 - RNA, 19 nt, Artificial Sequence
  Description of Artificial Sequence: Synthetic oligonucleotide
  Sense strand starting at position 3009 of SEQ ID NO: 1879610
gggagcuuuaagcaaagua

SEQ ID NO: 1919581 - RNA, 19 nt, Artificial Sequence
  Description of Artificial Sequence: Synthetic oligonucleotide
  Antisense strand to SEQ ID NO: 1919580
uacuuugcuuaaagcuccc

SEQ ID NO: 1919582 - RNA, 19 nt, Artificial Sequence
  Description of Artificial Sequence: Synthetic oligonucleotide
  Sense strand starting at position 3019 of SEQ ID NO: 1879610
agcaaaguauuggcaugau

SEQ ID NO: 1919583 - RNA, 19 nt, Artificial Sequence
  Description of Artificial Sequence: Synthetic oligonucleotide
  Antisense strand to SEQ ID NO: 1919582
aucaugccaauacuuugcu

SEQ ID NO: 1919584 - RNA, 19 nt, Artificial Sequence
  Description of Artificial Sequence: Synthetic oligonucleotide
  Sense strand starting at position 3471 of SEQ ID NO: 1879610
agguaaaguagcuaaagua

SEQ ID NO: 1919585 - RNA, 19 nt, Artificial Sequence
  Description of Artificial Sequence: Synthetic oligonucleotide
  Antisense strand to SEQ ID NO: 1919584
uacuuuagcuacuuuaccu

SEQ ID NO: 1919586 - RNA, 19 nt, Artificial Sequence
  Description of Artificial Sequence: Synthetic oligonucleotide
  Sense strand starting at position 3689 of SEQ ID NO: 1879610
guagaaaccuaguuuagau

SEQ ID NO: 1919587 - RNA, 19 nt, Artificial Sequence
  Description of Artificial Sequence: Synthetic oligonucleotide
  Antisense strand to SEQ ID NO: 1919586
aucuaaacuagguuucuac

SEQ ID NO: 1919588 - RNA, 19 nt, Artificial Sequence
  Description of Artificial Sequence: Synthetic oligonucleotide
  Sense strand starting at position 3772 of SEQ ID NO: 1879610
agaucauauuacuaguaug

SEQ ID NO: 1919589 - RNA, 19 nt, Artificial Sequence
  Description of Artificial Sequence: Synthetic oligonucleotide
  Antisense strand to SEQ ID NO: 1919588
cauacuaguaauaugaucu

SEQ ID NO: 1919590 - RNA, 19 nt, Artificial Sequence
  Description of Artificial Sequence: Synthetic oligonucleotide
  Sense strand starting at position 1266 of SEQ ID NO: 1879611
ugcccuauugauggauaau

SEQ ID NO: 1919591 - RNA, 19 nt, Artificial Sequence
  Description of Artificial Sequence: Synthetic oligonucleotide
  Antisense strand to SEQ ID NO: 1919590
auuauccaucaauagggca

SEQ ID NO: 1919592 - RNA, 19 nt, Artificial Sequence
  Description of Artificial Sequence: Synthetic oligonucleotide
  Sense strand starting at position 1275 of SEQ ID NO: 1879611
gauggauaauuguuucuag

SEQ ID NO: 1919593 - RNA, 19 nt, Artificial Sequence
  Description of Artificial Sequence: Synthetic oligonucleotide
  Antisense strand to SEQ ID NO: 1919592
cuagaaacaauuauccauc

SEQ ID NO: 1919594 - RNA, 19 nt, Artificial Sequence
  Description of Artificial Sequence: Synthetic oligonucleotide
  Sense strand starting at position 1276 of SEQ ID NO: 1879611
auggauaauuguuucuagu

SEQ ID NO: 1919595 - RNA, 19 nt, Artificial Sequence
  Description of Artificial Sequence: Synthetic oligonucleotide
  Antisense strand to SEQ ID NO: 1919594
acuagaaacaauuauccau

SEQ ID NO: 1919596 - RNA, 19 nt, Artificial Sequence
  Description of Artificial Sequence: Synthetic oligonucleotide
  Sense strand starting at position 1278 of SEQ ID NO: 1879611
ggauaauuguuucuaguuu

SEQ ID NO: 1919597 - RNA, 19 nt, Artificial Sequence
  Description of Artificial Sequence: Synthetic oligonucleotide
  Antisense strand to SEQ ID NO: 1919596
aaacuagaaacaauuaucc

SEQ ID NO: 1919598 - RNA, 19 nt, Artificial Sequence
  Description of Artificial Sequence: Synthetic oligonucleotide
  Sense strand starting at position 1374 of SEQ ID NO: 1879611
acagauuccuucucgggau

SEQ ID NO: 1919599 - RNA, 19 nt, Artificial Sequence
  Description of Artificial Sequence: Synthetic oligonucleotide
  Antisense strand to SEQ ID NO: 1919598
aucccgagaaggaaucugu

SEQ ID NO: 1919600 - RNA, 19 nt, Artificial Sequence
  Description of Artificial Sequence: Synthetic oligonucleotide
  Sense strand starting at position 1378 of SEQ ID NO: 1879611
auuccuucucgggauuguu

SEQ ID NO: 1919601 - RNA, 19 nt, Artificial Sequence
  Description of Artificial Sequence: Synthetic oligonucleotide
  Antisense strand to SEQ ID NO: 1919600
aacaaucccgagaaggaau

SEQ ID NO: 1919602 - RNA, 19 nt, Artificial Sequence
  Description of Artificial Sequence: Synthetic oligonucleotide
  Sense strand starting at position 1386 of SEQ ID NO: 1879611
ucgggauuguuugaucaaa

SEQ ID NO: 1919603 - RNA, 19 nt, Artificial Sequence
  Description of Artificial Sequence: Synthetic oligonucleotide
  Antisense strand to SEQ ID NO: 1919602
uuugaucaaacaaucccga

SEQ ID NO: 1919604 - RNA, 19 nt, Artificial Sequence
  Description of Artificial Sequence: Synthetic oligonucleotide
  Sense strand starting at position 1431 of SEQ ID NO: 1879611
gguagcaucccauacuaaa

SEQ ID NO: 1919605 - RNA, 19 nt, Artificial Sequence
  Description of Artificial Sequence: Synthetic oligonucleotide
  Antisense strand to SEQ ID NO: 1919604
uuuaguaugggaugcuacc

SEQ ID NO: 1919606 - RNA, 19 nt, Artificial Sequence
  Description of Artificial Sequence: Synthetic oligonucleotide
  Sense strand starting at position 1472 of SEQ ID NO: 1879611
acugguaguguaugagagu

SEQ ID NO: 1919607 - RNA, 19 nt, Artificial Sequence
  Description of Artificial Sequence: Synthetic oligonucleotide
  Antisense strand to SEQ ID NO: 1919606
acucucauacacuaccagu

SEQ ID NO: 1919608 - RNA, 19 nt, Artificial Sequence
  Description of Artificial Sequence: Synthetic oligonucleotide
  Sense strand starting at position 1511 of SEQ ID NO: 1879611
aucucagcucuugauguua

SEQ ID NO: 1919609 - RNA, 19 nt, Artificial Sequence
  Description of Artificial Sequence: Synthetic oligonucleotide
  Antisense strand to SEQ ID NO: 1919608
uaacaucaagagcugagau

SEQ ID NO: 1919610 - RNA, 19 nt, Artificial Sequence
  Description of Artificial Sequence: Synthetic oligonucleotide
  Sense strand starting at position 1516 of SEQ ID NO: 1879611
agcucuugauguuauuaua

SEQ ID NO: 1919611 - RNA, 19 nt, Artificial Sequence
  Description of Artificial Sequence: Synthetic oligonucleotide
  Antisense strand to SEQ ID NO: 1919610
uauaauaacaucaagagcu

SEQ ID NO: 1919612 - RNA, 19 nt, Artificial Sequence
  Description of Artificial Sequence: Synthetic oligonucleotide
  Sense strand starting at position 1524 of SEQ ID NO: 1879611
auguuauuauaggcugacu

SEQ ID NO: 1919613 - RNA, 19 nt, Artificial Sequence
  Description of Artificial Sequence: Synthetic oligonucleotide
  Antisense strand to SEQ ID NO: 1919612
agucagccuauaauaacau

SEQ ID NO: 1919614 - RNA, 19 nt, Artificial Sequence
  Description of Artificial Sequence: Synthetic oligonucleotide
  Sense strand starting at position 1526 of SEQ ID NO: 1879611
guuauuauaggcugacuga

SEQ ID NO: 1919615 - RNA, 19 nt, Artificial Sequence
  Description of Artificial Sequence: Synthetic oligonucleotide
  Antisense strand to SEQ ID NO: 1919614
ucagucagccuauaauaac

SEQ ID NO: 1919616 - RNA, 19 nt, Artificial Sequence
  Description of Artificial Sequence: Synthetic oligonucleotide
  Sense strand starting at position 1527 of SEQ ID NO: 1879611
uuauuauaggcugacugau

SEQ ID NO: 1919617 - RNA, 19 nt, Artificial Sequence
  Description of Artificial Sequence: Synthetic oligonucleotide
  Antisense strand to SEQ ID NO: 1919616
aucagucagccuauaauaa

SEQ ID NO: 1919618 - RNA, 19 nt, Artificial Sequence
  Description of Artificial Sequence: Synthetic oligonucleotide
  Sense strand starting at position 1565 of SEQ ID NO: 1879611
uugcauuugucucuacuga

SEQ ID NO: 1919619 - RNA, 19 nt, Artificial Sequence
  Description of Artificial Sequence: Synthetic oligonucleotide
  Antisense strand to SEQ ID NO: 1919618
ucaguagagacaaaugcaa

SEQ ID NO: 1919620 - RNA, 19 nt, Artificial Sequence
  Description of Artificial Sequence: Synthetic oligonucleotide
  Sense strand starting at position 1569 of SEQ ID NO: 1879611
auuugucucuacugaaagu

SEQ ID NO: 1919621 - RNA, 19 nt, Artificial Sequence
  Description of Artificial Sequence: Synthetic oligonucleotide
  Antisense strand to SEQ ID NO: 1919620
acuuucaguagagacaaau

SEQ ID NO: 1919622 - RNA, 19 nt, Artificial Sequence
  Description of Artificial Sequence: Synthetic oligonucleotide
  Sense strand starting at position 1608 of SEQ ID NO: 1879611
uuuaguugauugcugacua

SEQ ID NO: 1919623 - RNA, 19 nt, Artificial Sequence
  Description of Artificial Sequence: Synthetic oligonucleotide
  Antisense strand to SEQ ID NO: 1919622
uagucagcaaucaacuaaa

SEQ ID NO: 1919624 - RNA, 19 nt, Artificial Sequence
  Description of Artificial Sequence: Synthetic oligonucleotide
  Sense strand starting at position 1612 of SEQ ID NO: 1879611
guugauugcugacuaauag

SEQ ID NO: 1919625 - RNA, 19 nt, Artificial Sequence
  Description of Artificial Sequence: Synthetic oligonucleotide
  Antisense strand to SEQ ID NO: 1919624
cuauuagucagcaaucaac

SEQ ID NO: 1919626 - RNA, 19 nt, Artificial Sequence
  Description of Artificial Sequence: Synthetic oligonucleotide
  Sense strand starting at position 1619 of SEQ ID NO: 1879611
gcugacuaauaggaaguuu

SEQ ID NO: 1919627 - RNA, 19 nt, Artificial Sequence
  Description of Artificial Sequence: Synthetic oligonucleotide
  Antisense strand to SEQ ID NO: 1919626
aaacuuccuauuagucagc

SEQ ID NO: 1919628 - RNA, 19 nt, Artificial Sequence
  Description of Artificial Sequence: Synthetic oligonucleotide
  Sense strand starting at position 1627 of SEQ ID NO: 1879611
auaggaaguuugcaaucuu

SEQ ID NO: 1919629 - RNA, 19 nt, Artificial Sequence
  Description of Artificial Sequence: Synthetic oligonucleotide
  Antisense strand to SEQ ID NO: 1919628
aagauugcaaacuuccuau

SEQ ID NO: 1919630 - RNA, 19 nt, Artificial Sequence
  Description of Artificial Sequence: Synthetic oligonucleotide
  Sense strand starting at position 1639 of SEQ ID NO: 1879611
caaucuuaggucuggugga

SEQ ID NO: 1919631 - RNA, 19 nt, Artificial Sequence
  Description of Artificial Sequence: Synthetic oligonucleotide
  Antisense strand to SEQ ID NO: 1919630
uccaccagaccuaagauug

SEQ ID NO: 1919632 - RNA, 19 nt, Artificial Sequence
  Description of Artificial Sequence: Synthetic oligonucleotide
  Sense strand starting at position 1640 of SEQ ID NO: 1879611
aaucuuaggucugguggau

SEQ ID NO: 1919633 - RNA, 19 nt, Artificial Sequence
  Description of Artificial Sequence: Synthetic oligonucleotide
  Antisense strand to SEQ ID NO: 1919632
auccaccagaccuaagauu

SEQ ID NO: 1919634 - RNA, 19 nt, Artificial Sequence
  Description of Artificial Sequence: Synthetic oligonucleotide
  Sense strand starting at position 1675 of SEQ ID NO: 1879611
agguccaucugaccuagua

SEQ ID NO: 1919635 - RNA, 19 nt, Artificial Sequence
  Description of Artificial Sequence: Synthetic oligonucleotide
  Antisense strand to SEQ ID NO: 1919634
uacuaggucagauggaccu

SEQ ID NO: 1919636 - RNA, 19 nt, Artificial Sequence
  Description of Artificial Sequence: Synthetic oligonucleotide
  Sense strand starting at position 1788 of SEQ ID NO: 1879611
ggaauuugguuccaaaucu

SEQ ID NO: 1919637 - RNA, 19 nt, Artificial Sequence
  Description of Artificial Sequence: Synthetic oligonucleotide
  Antisense strand to SEQ ID NO: 1919636
agauuuggaaccaaauucc

SEQ ID NO: 1919638 - RNA, 19 nt, Artificial Sequence
  Description of Artificial Sequence: Synthetic oligonucleotide
  Sense strand starting at position 1811 of SEQ ID NO: 1879611
cucucagauuaguaagaca

SEQ ID NO: 1919639 - RNA, 19 nt, Artificial Sequence
  Description of Artificial Sequence: Synthetic oligonucleotide
  Antisense strand to SEQ ID NO: 1919638
ugucuuacuaaucugagag

SEQ ID NO: 1919640 - RNA, 19 nt, Artificial Sequence
  Description of Artificial Sequence: Synthetic oligonucleotide
  Sense strand starting at position 1883 of SEQ ID NO: 1879611
ugcuguuucuuguccugga

SEQ ID NO: 1919641 - RNA, 19 nt, Artificial Sequence
  Description of Artificial Sequence: Synthetic oligonucleotide
  Antisense strand to SEQ ID NO: 1919640
uccaggacaagaaacagca

SEQ ID NO: 1919642 - RNA, 19 nt, Artificial Sequence
  Description of Artificial Sequence: Synthetic oligonucleotide
  Sense strand starting at position 1887 of SEQ ID NO: 1879611
guuucuuguccuggaguuc

SEQ ID NO: 1919643 - RNA, 19 nt, Artificial Sequence
  Description of Artificial Sequence: Synthetic oligonucleotide
  Antisense strand to SEQ ID NO: 1919642
gaacuccaggacaagaaac

SEQ ID NO: 1919644 - RNA, 19 nt, Artificial Sequence
  Description of Artificial Sequence: Synthetic oligonucleotide
  Sense strand starting at position 1932 of SEQ ID NO: 1879611
ucagcucaguguucugaaa

SEQ ID NO: 1919645 - RNA, 19 nt, Artificial Sequence
  Description of Artificial Sequence: Synthetic oligonucleotide
  Antisense strand to SEQ ID NO: 1919644
uuucagaacacugagcuga

SEQ ID NO: 1919646 - RNA, 19 nt, Artificial Sequence
  Description of Artificial Sequence: Synthetic oligonucleotide
  Sense strand starting at position 1958 of SEQ ID NO: 1879611
aggcauuaaucguuauuaa

SEQ ID NO: 1919647 - RNA, 19 nt, Artificial Sequence
  Description of Artificial Sequence: Synthetic oligonucleotide
  Antisense strand to SEQ ID NO: 1919646
uuaauaacgauuaaugccu

SEQ ID NO: 1919648 - RNA, 19 nt, Artificial Sequence
  Description of Artificial Sequence: Synthetic oligonucleotide
  Sense strand starting at position 1959 of SEQ ID NO: 1879611
ggcauuaaucguuauuaac

SEQ ID NO: 1919649 - RNA, 19 nt, Artificial Sequence
  Description of Artificial Sequence: Synthetic oligonucleotide
  Antisense strand to SEQ ID NO: 1919648
guuaauaacgauuaaugcc

SEQ ID NO: 1919650 - RNA, 19 nt, Artificial Sequence
  Description of Artificial Sequence: Synthetic oligonucleotide
  Sense strand starting at position 1999 of SEQ ID NO: 1879611
gauccagguuccuauuuga

SEQ ID NO: 1919651 - RNA, 19 nt, Artificial Sequence
  Description of Artificial Sequence: Synthetic oligonucleotide
  Antisense strand to SEQ ID NO: 1919650
ucaaauaggaaccuggauc

SEQ ID NO: 1919652 - RNA, 19 nt, Artificial Sequence
  Description of Artificial Sequence: Synthetic oligonucleotide
  Sense strand starting at position 2059 of SEQ ID NO: 1879611
cuuugugacccuugacaua

SEQ ID NO: 1919653 - RNA, 19 nt, Artificial Sequence
  Description of Artificial Sequence: Synthetic oligonucleotide
  Antisense strand to SEQ ID NO: 1919652
uaugucaagggucacaaag

SEQ ID NO: 1919654 - RNA, 19 nt, Artificial Sequence
  Description of Artificial Sequence: Synthetic oligonucleotide
  Sense strand starting at position 2062 of SEQ ID NO: 1879611
ugugacccuugacauaauu

SEQ ID NO: 1919655 - RNA, 19 nt, Artificial Sequence
  Description of Artificial Sequence: Synthetic oligonucleotide
  Antisense strand to SEQ ID NO: 1919654
aauuaugucaagggucaca

SEQ ID NO: 1919656 - RNA, 19 nt, Artificial Sequence
  Description of Artificial Sequence: Synthetic oligonucleotide
  Sense strand starting at position 2289 of SEQ ID NO: 1879611
aaacgaaauugcuggaaua

SEQ ID NO: 1919657 - RNA, 19 nt, Artificial Sequence
  Description of Artificial Sequence: Synthetic oligonucleotide
  Antisense strand to SEQ ID NO: 1919656
uauuccagcaauuucguuu

SEQ ID NO: 1919658 - RNA, 19 nt, Artificial Sequence
  Description of Artificial Sequence: Synthetic oligonucleotide
  Sense strand starting at position 2290 of SEQ ID NO: 1879611
aacgaaauugcuggaauaa

SEQ ID NO: 1919659 - RNA, 19 nt, Artificial Sequence
  Description of Artificial Sequence: Synthetic oligonucleotide
  Antisense strand to SEQ ID NO: 1919658
uuauuccagcaauuucguu

SEQ ID NO: 1919660 - RNA, 19 nt, Artificial Sequence
  Description of Artificial Sequence: Synthetic oligonucleotide
  Sense strand starting at position 3237 of SEQ ID NO: 1879611
uccagcaugucagugagaa

SEQ ID NO: 1919661 - RNA, 19 nt, Artificial Sequence
  Description of Artificial Sequence: Synthetic oligonucleotide
  Antisense strand to SEQ ID NO: 1919660
uucucacugacaugcugga

SEQ ID NO: 1919662 - RNA, 19 nt, Artificial Sequence
  Description of Artificial Sequence: Synthetic oligonucleotide
  Sense strand starting at position 3238 of SEQ ID NO: 1879611
ccagcaugucagugagaau

SEQ ID NO: 1919663 - RNA, 19 nt, Artificial Sequence
  Description of Artificial Sequence: Synthetic oligonucleotide
  Antisense strand to SEQ ID NO: 1919662
auucucacugacaugcugg

SEQ ID NO: 1919664 - RNA, 19 nt, Artificial Sequence
  Description of Artificial Sequence: Synthetic oligonucleotide
  Sense strand starting at position 3239 of SEQ ID NO: 1879611
cagcaugucagugagaaug

SEQ ID NO: 1919665 - RNA, 19 nt, Artificial Sequence
  Description of Artificial Sequence: Synthetic oligonucleotide
  Antisense strand to SEQ ID NO: 1919664
cauucucacugacaugcug

SEQ ID NO: 1919666 - RNA, 19 nt, Artificial Sequence
  Description of Artificial Sequence: Synthetic oligonucleotide
  Sense strand starting at position 3316 of SEQ ID NO: 1879611
aauguuaauugagggauua

SEQ ID NO: 1919667 - RNA, 19 nt, Artificial Sequence
  Description of Artificial Sequence: Synthetic oligonucleotide
  Antisense strand to SEQ ID NO: 1919666
uaaucccucaauuaacauu

SEQ ID NO: 1919668 - RNA, 19 nt, Artificial Sequence
  Description of Artificial Sequence: Synthetic oligonucleotide
  Sense strand starting at position 3317 of SEQ ID NO: 1879611
auguuaauugagggauuac

SEQ ID NO: 1919669 - RNA, 19 nt, Artificial Sequence
  Description of Artificial Sequence: Synthetic oligonucleotide
  Antisense strand to SEQ ID NO: 1919668
guaaucccucaauuaacau

SEQ ID NO: 1919670 - RNA, 19 nt, Artificial Sequence
  Description of Artificial Sequence: Synthetic oligonucleotide
  Sense strand starting at position 145 of SEQ ID NO: 1879612
augagauccauguaggcua

SEQ ID NO: 1919671 - RNA, 19 nt, Artificial Sequence
  Description of Artificial Sequence: Synthetic oligonucleotide
  Antisense strand to SEQ ID NO: 1919670
uagccuacauggaucucau

SEQ ID NO: 1919672 - RNA, 19 nt, Artificial Sequence
  Description of Artificial Sequence: Synthetic oligonucleotide
  Sense strand starting at position 199 of SEQ ID NO: 1879612
ccaguucuaucauuaguaa

SEQ ID NO: 1919673 - RNA, 19 nt, Artificial Sequence
  Description of Artificial Sequence: Synthetic oligonucleotide
  Antisense strand to SEQ ID NO: 1919672
uuacuaaugauagaacugg

SEQ ID NO: 1919674 - RNA, 19 nt, Artificial Sequence
  Description of Artificial Sequence: Synthetic oligonucleotide
  Sense strand starting at position 374 of SEQ ID NO: 1879612
gggucuccagacuguuuaa

SEQ ID NO: 1919675 - RNA, 19 nt, Artificial Sequence
  Description of Artificial Sequence: Synthetic oligonucleotide
  Antisense strand to SEQ ID NO: 1919674
uuaaacagucuggagaccc

SEQ ID NO: 1919676 - RNA, 19 nt, Artificial Sequence
  Description of Artificial Sequence: Synthetic oligonucleotide
  Sense strand starting at position 540 of SEQ ID NO: 1879612
guccguauuugcuuccaaa

SEQ ID NO: 1919677 - RNA, 19 nt, Artificial Sequence
  Description of Artificial Sequence: Synthetic oligonucleotide
  Antisense strand to SEQ ID NO: 1919676
uuuggaagcaaauacggac

SEQ ID NO: 1919678 - RNA, 19 nt, Artificial Sequence
  Description of Artificial Sequence: Synthetic oligonucleotide
  Sense strand starting at position 597 of SEQ ID NO: 1879612
aguaauuauucuccaggac

SEQ ID NO: 1919679 - RNA, 19 nt, Artificial Sequence
  Description of Artificial Sequence: Synthetic oligonucleotide
  Antisense strand to SEQ ID NO: 1919678
guccuggagaauaauuacu

SEQ ID NO: 1919680 - RNA, 19 nt, Artificial Sequence
  Description of Artificial Sequence: Synthetic oligonucleotide
  Sense strand starting at position 658 of SEQ ID NO: 1879612
gcugauagauuaguaagga

SEQ ID NO: 1919681 - RNA, 19 nt, Artificial Sequence
  Description of Artificial Sequence: Synthetic oligonucleotide
  Antisense strand to SEQ ID NO: 1919680
uccuuacuaaucuaucagc

SEQ ID NO: 1919682 - RNA, 19 nt, Artificial Sequence
  Description of Artificial Sequence: Synthetic oligonucleotide
  Sense strand starting at position 1192 of SEQ ID NO: 1879612
gguaucauauaugugacca

SEQ ID NO: 1919683 - RNA, 19 nt, Artificial Sequence
  Description of Artificial Sequence: Synthetic oligonucleotide
  Antisense strand to SEQ ID NO: 1919682
uggucacauauaugauacc

SEQ ID NO: 1919684 - RNA, 19 nt, Artificial Sequence
  Description of Artificial Sequence: Synthetic oligonucleotide
  Sense strand starting at position 1535 of SEQ ID NO: 1879612
aggguauagccuuauguuu

SEQ ID NO: 1919685 - RNA, 19 nt, Artificial Sequence
  Description of Artificial Sequence: Synthetic oligonucleotide
  Antisense strand to SEQ ID NO: 1919684
aaacauaaggcuauacccu

SEQ ID NO: 1919686 - RNA, 19 nt, Artificial Sequence
  Description of Artificial Sequence: Synthetic oligonucleotide
  Sense strand starting at position 1610 of SEQ ID NO: 1879612
gagugcuuaguauauacaa

SEQ ID NO: 1919687 - RNA, 19 nt, Artificial Sequence
  Description of Artificial Sequence: Synthetic oligonucleotide
  Antisense strand to SEQ ID NO: 1919686
uuguauauacuaagcacuc

SEQ ID NO: 1919688 - RNA, 19 nt, Artificial Sequence
  Description of Artificial Sequence: Synthetic oligonucleotide
  Sense strand starting at position 1670 of SEQ ID NO: 1879612
cugcaauagcuguaugaaa

SEQ ID NO: 1919689 - RNA, 19 nt, Artificial Sequence
  Description of Artificial Sequence: Synthetic oligonucleotide
  Antisense strand to SEQ ID NO: 1919688
uuucauacagcuauugcag

SEQ ID NO: 1919690 - RNA, 19 nt, Artificial Sequence
  Description of Artificial Sequence: Synthetic oligonucleotide
  Sense strand starting at position 1672 of SEQ ID NO: 1879612
gcaauagcuguaugaaaca

SEQ ID NO: 1919691 - RNA, 19 nt, Artificial Sequence
  Description of Artificial Sequence: Synthetic oligonucleotide
  Antisense strand to SEQ ID NO: 1919690
uguuucauacagcuauugc

SEQ ID NO: 1919692 - RNA, 19 nt, Artificial Sequence
  Description of Artificial Sequence: Synthetic oligonucleotide
  Sense strand starting at position 1691 of SEQ ID NO: 1879612
ggcacuauucccgacuuaa

SEQ ID NO: 1919693 - RNA, 19 nt, Artificial Sequence
  Description of Artificial Sequence: Synthetic oligonucleotide
  Antisense strand to SEQ ID NO: 1919692
uuaagucgggaauagugcc

SEQ ID NO: 1919694 - RNA, 19 nt, Artificial Sequence
  Description of Artificial Sequence: Synthetic oligonucleotide
  Sense strand starting at position 1951 of SEQ ID NO: 1879612
gcugucucucugcuuguaa

SEQ ID NO: 1919695 - RNA, 19 nt, Artificial Sequence
  Description of Artificial Sequence: Synthetic oligonucleotide
  Antisense strand to SEQ ID NO: 1919694
uuacaagcagagagacagc

SEQ ID NO: 1919696 - RNA, 19 nt, Artificial Sequence
  Description of Artificial Sequence: Synthetic oligonucleotide
  Sense strand starting at position 2390 of SEQ ID NO: 1879612
gcaccuucuaugggacaga

SEQ ID NO: 1919697 - RNA, 19 nt, Artificial Sequence
  Description of Artificial Sequence: Synthetic oligonucleotide
  Antisense strand to SEQ ID NO: 1919696
ucugucccauagaaggugc

SEQ ID NO: 1919698 - RNA, 19 nt, Artificial Sequence
  Description of Artificial Sequence: Synthetic oligonucleotide
  Sense strand starting at position 2400 of SEQ ID NO: 1879612
ugggacagacucuguucua

SEQ ID NO: 1919699 - RNA, 19 nt, Artificial Sequence
  Description of Artificial Sequence: Synthetic oligonucleotide
  Antisense strand to SEQ ID NO: 1919698
uagaacagagucuguccca

SEQ ID NO: 1919700 - RNA, 19 nt, Artificial Sequence
  Description of Artificial Sequence: Synthetic oligonucleotide
  Sense strand starting at position 2403 of SEQ ID NO: 1879612
gacagacucuguucuaggu

SEQ ID NO: 1919701 - RNA, 19 nt, Artificial Sequence
  Description of Artificial Sequence: Synthetic oligonucleotide
  Antisense strand to SEQ ID NO: 1919700
accuagaacagagucuguc

SEQ ID NO: 1919702 - RNA, 19 nt, Artificial Sequence
  Description of Artificial Sequence: Synthetic oligonucleotide
  Sense strand starting at position 2494 of SEQ ID NO: 1879612
uaauaagugcuauaaaggu

SEQ ID NO: 1919703 - RNA, 19 nt, Artificial Sequence
  Description of Artificial Sequence: Synthetic oligonucleotide
  Antisense strand to SEQ ID NO: 1919702
accuuuauagcacuuauua

SEQ ID NO: 1919704 - RNA, 19 nt, Artificial Sequence
  Description of Artificial Sequence: Synthetic oligonucleotide
  Sense strand starting at position 2500 of SEQ ID NO: 1879612
gugcuauaaagguaaugag

SEQ ID NO: 1919705 - RNA, 19 nt, Artificial Sequence
  Description of Artificial Sequence: Synthetic oligonucleotide
  Antisense strand to SEQ ID NO: 1919704
cucauuaccuuuauagcac

SEQ ID NO: 1919706 - RNA, 19 nt, Artificial Sequence
  Description of Artificial Sequence: Synthetic oligonucleotide
  Sense strand starting at position 2510 of SEQ ID NO: 1879612
gguaaugagcuaugauaau

SEQ ID NO: 1919707 - RNA, 19 nt, Artificial Sequence
  Description of Artificial Sequence: Synthetic oligonucleotide
  Antisense strand to SEQ ID NO: 1919706
auuaucauagcucauuacc

SEQ ID NO: 1919708 - RNA, 19 nt, Artificial Sequence
  Description of Artificial Sequence: Synthetic oligonucleotide
  Sense strand starting at position 2523 of SEQ ID NO: 1879612
gauaauguauaaccagagu

SEQ ID NO: 1919709 - RNA, 19 nt, Artificial Sequence
  Description of Artificial Sequence: Synthetic oligonucleotide
  Antisense strand to SEQ ID NO: 1919708
acucugguuauacauuauc

SEQ ID NO: 1919710 - RNA, 19 nt, Artificial Sequence
  Description of Artificial Sequence: Synthetic oligonucleotide
  Sense strand starting at position 2526 of SEQ ID NO: 1879612
aauguauaaccagaguugu

SEQ ID NO: 1919711 - RNA, 19 nt, Artificial Sequence
  Description of Artificial Sequence: Synthetic oligonucleotide
  Antisense strand to SEQ ID NO: 1919710
acaacucugguuauacauu

SEQ ID NO: 1919712 - RNA, 19 nt, Artificial Sequence
  Description of Artificial Sequence: Synthetic oligonucleotide
  Sense strand starting at position 2534 of SEQ ID NO: 1879612
accagaguuguuuaaggua

SEQ ID NO: 1919713 - RNA, 19 nt, Artificial Sequence
  Description of Artificial Sequence: Synthetic oligonucleotide
  Antisense strand to SEQ ID NO: 1919712
uaccuuaaacaacucuggu

SEQ ID NO: 1919714 - RNA, 19 nt, Artificial Sequence
  Description of Artificial Sequence: Synthetic oligonucleotide
  Sense strand starting at position 2539 of SEQ ID NO: 1879612
aguuguuuaagguagaguu

SEQ ID NO: 1919715 - RNA, 19 nt, Artificial Sequence
  Description of Artificial Sequence: Synthetic oligonucleotide
  Antisense strand to SEQ ID NO: 1919714
aacucuaccuuaaacaacu

SEQ ID NO: 1919716 - RNA, 19 nt, Artificial Sequence
  Description of Artificial Sequence: Synthetic oligonucleotide
  Sense strand starting at position 2541 of SEQ ID NO: 1879612
uuguuuaagguagaguuaa

SEQ ID NO: 1919717 - RNA, 19 nt, Artificial Sequence
  Description of Artificial Sequence: Synthetic oligonucleotide
  Antisense strand to SEQ ID NO: 1919716
uuaacucuaccuuaaacaa

SEQ ID NO: 1919718 - RNA, 19 nt, Artificial Sequence
  Description of Artificial Sequence: Synthetic oligonucleotide
  Sense strand starting at position 2612 of SEQ ID NO: 1879612
aaagucuggcauugaagaa

SEQ ID NO: 1919719 - RNA, 19 nt, Artificial Sequence
  Description of Artificial Sequence: Synthetic oligonucleotide
  Antisense strand to SEQ ID NO: 1919718
uucuucaaugccagacuuu

SEQ ID NO: 1919720 - RNA, 19 nt, Artificial Sequence
  Description of Artificial Sequence: Synthetic oligonucleotide
  Sense strand starting at position 2768 of SEQ ID NO: 1879612
aggugacuuagguaugagu

SEQ ID NO: 1919721 - RNA, 19 nt, Artificial Sequence
  Description of Artificial Sequence: Synthetic oligonucleotide
  Antisense strand to SEQ ID NO: 1919720
acucauaccuaagucaccu

SEQ ID NO: 1919722 - RNA, 19 nt, Artificial Sequence
  Description of Artificial Sequence: Synthetic oligonucleotide
  Sense strand starting at position 2776 of SEQ ID NO: 1879612
uagguaugagugugaggau

SEQ ID NO: 1919723 - RNA, 19 nt, Artificial Sequence
  Description of Artificial Sequence: Synthetic oligonucleotide
  Antisense strand to SEQ ID NO: 1919722
auccucacacucauaccua

SEQ ID NO: 1919724 - RNA, 19 nt, Artificial Sequence
  Description of Artificial Sequence: Synthetic oligonucleotide
  Sense strand starting at position 2790 of SEQ ID NO: 1879612
aggauaacuauugguaugu

SEQ ID NO: 1919725 - RNA, 19 nt, Artificial Sequence
  Description of Artificial Sequence: Synthetic oligonucleotide
  Antisense strand to SEQ ID NO: 1919724
acauaccaauaguuauccu

SEQ ID NO: 1919726 - RNA, 19 nt, Artificial Sequence
  Description of Artificial Sequence: Synthetic oligonucleotide
  Sense strand starting at position 2947 of SEQ ID NO: 1879612
gauugacagcuuuaccaug

SEQ ID NO: 1919727 - RNA, 19 nt, Artificial Sequence
  Description of Artificial Sequence: Synthetic oligonucleotide
  Antisense strand to SEQ ID NO: 1919726
caugguaaagcugucaauc

SEQ ID NO: 1919728 - RNA, 19 nt, Artificial Sequence
  Description of Artificial Sequence: Synthetic oligonucleotide
  Sense strand starting at position 2955 of SEQ ID NO: 1879612
gcuuuaccaugguuuauuu

SEQ ID NO: 1919729 - RNA, 19 nt, Artificial Sequence
  Description of Artificial Sequence: Synthetic oligonucleotide
  Antisense strand to SEQ ID NO: 1919728
aaauaaaccaugguaaagc

SEQ ID NO: 1919730 - RNA, 19 nt, Artificial Sequence
  Description of Artificial Sequence: Synthetic oligonucleotide
  Sense strand starting at position 2987 of SEQ ID NO: 1879612
uuaaguuugagccaggcau

SEQ ID NO: 1919731 - RNA, 19 nt, Artificial Sequence
  Description of Artificial Sequence: Synthetic oligonucleotide
  Antisense strand to SEQ ID NO: 1919730
augccuggcucaaacuuaa

SEQ ID NO: 1919732 - RNA, 19 nt, Artificial Sequence
  Description of Artificial Sequence: Synthetic oligonucleotide
  Sense strand starting at position 3139 of SEQ ID NO: 1879612
ucucaauguggugacucau

SEQ ID NO: 1919733 - RNA, 19 nt, Artificial Sequence
  Description of Artificial Sequence: Synthetic oligonucleotide
  Antisense strand to SEQ ID NO: 1919732
augagucaccacauugaga

SEQ ID NO: 1919734 - RNA, 19 nt, Artificial Sequence
  Description of Artificial Sequence: Synthetic oligonucleotide
  Sense strand starting at position 3151 of SEQ ID NO: 1879612
gacucaugccuguauguaa

SEQ ID NO: 1919735 - RNA, 19 nt, Artificial Sequence
  Description of Artificial Sequence: Synthetic oligonucleotide
  Antisense strand to SEQ ID NO: 1919734
uuacauacaggcaugaguc

SEQ ID NO: 1919736 - RNA, 19 nt, Artificial Sequence
  Description of Artificial Sequence: Synthetic oligonucleotide
  Sense strand starting at position 3576 of SEQ ID NO: 1879612
auggauaaucacuggccaa

SEQ ID NO: 1919737 - RNA, 19 nt, Artificial Sequence
  Description of Artificial Sequence: Synthetic oligonucleotide
  Antisense strand to SEQ ID NO: 1919736
uuggccagugauuauccau

SEQ ID NO: 1919738 - RNA, 19 nt, Artificial Sequence
  Description of Artificial Sequence: Synthetic oligonucleotide
  Sense strand starting at position 3598 of SEQ ID NO: 1879612
agucaaugugugcaaauau

SEQ ID NO: 1919739 - RNA, 19 nt, Artificial Sequence
  Description of Artificial Sequence: Synthetic oligonucleotide
  Antisense strand to SEQ ID NO: 1919738
auauuugcacacauugacu

SEQ ID NO: 1919740 - RNA, 19 nt, Artificial Sequence
  Description of Artificial Sequence: Synthetic oligonucleotide
  Sense strand starting at position 3608 of SEQ ID NO: 1879612
ugcaaauauugucugaaga

SEQ ID NO: 1919741 - RNA, 19 nt, Artificial Sequence
  Description of Artificial Sequence: Synthetic oligonucleotide
  Antisense strand to SEQ ID NO: 1919740
ucuucagacaauauuugca

SEQ ID NO: 1919742 - RNA, 19 nt, Artificial Sequence
  Description of Artificial Sequence: Synthetic oligonucleotide
  Sense strand starting at position 3609 of SEQ ID NO: 1879612
gcaaauauugucugaagag

SEQ ID NO: 1919743 - RNA, 19 nt, Artificial Sequence
  Description of Artificial Sequence: Synthetic oligonucleotide
  Antisense strand to SEQ ID NO: 1919742
cucuucagacaauauuugc

SEQ ID NO: 1919744 - RNA, 19 nt, Artificial Sequence
  Description of Artificial Sequence: Synthetic oligonucleotide
  Sense strand starting at position 3756 of SEQ ID NO: 1879612
gacuguagagcagaaaguu

SEQ ID NO: 1919745 - RNA, 19 nt, Artificial Sequence
  Description of Artificial Sequence: Synthetic oligonucleotide
  Antisense strand to SEQ ID NO: 1919744
aacuuucugcucuacaguc

SEQ ID NO: 1919746 - RNA, 19 nt, Artificial Sequence
  Description of Artificial Sequence: Synthetic oligonucleotide
  Sense strand starting at position 3852 of SEQ ID NO: 1879612
acuaucagccaguaaugca

SEQ ID NO: 1919747 - RNA, 19 nt, Artificial Sequence
  Description of Artificial Sequence: Synthetic oligonucleotide
  Antisense strand to SEQ ID NO: 1919746
ugcauuacuggcugauagu

SEQ ID NO: 1919748 - RNA, 19 nt, Artificial Sequence
  Description of Artificial Sequence: Synthetic oligonucleotide
  Sense strand starting at position 3915 of SEQ ID NO: 1879612
uaauccaugcaguauggua

SEQ ID NO: 1919749 - RNA, 19 nt, Artificial Sequence
  Description of Artificial Sequence: Synthetic oligonucleotide
  Antisense strand to SEQ ID NO: 1919748
uaccauacugcauggauua

SEQ ID NO: 1919750 - RNA, 19 nt, Artificial Sequence
  Description of Artificial Sequence: Synthetic oligonucleotide
  Sense strand starting at position 466 of SEQ ID NO: 1879613
agaugauguccugggacag

SEQ ID NO: 1919751 - RNA, 19 nt, Artificial Sequence
  Description of Artificial Sequence: Synthetic oligonucleotide
  Antisense strand to SEQ ID NO: 1919750
cugucccaggacaucaucu

SEQ ID NO: 1919752 - RNA, 19 nt, Artificial Sequence
  Description of Artificial Sequence: Synthetic oligonucleotide
  Sense strand starting at position 745 of SEQ ID NO: 1879613
gaagcugggcgugaagaau

SEQ ID NO: 1919753 - RNA, 19 nt, Artificial Sequence
  Description of Artificial Sequence: Synthetic oligonucleotide
  Antisense strand to SEQ ID NO: 1919752
auucuucacgcccagcuuc

SEQ ID NO: 1919754 - RNA, 19 nt, Artificial Sequence
  Description of Artificial Sequence: Synthetic oligonucleotide
  Sense strand starting at position 889 of SEQ ID NO: 1879613
aggucaacuugagaaaguu

SEQ ID NO: 1919755 - RNA, 19 nt, Artificial Sequence
  Description of Artificial Sequence: Synthetic oligonucleotide
  Antisense strand to SEQ ID NO: 1919754
aacuuucucaaguugaccu

SEQ ID NO: 1919756 - RNA, 19 nt, Artificial Sequence
  Description of Artificial Sequence: Synthetic oligonucleotide
  Sense strand starting at position 2184 of SEQ ID NO: 1879613
acaggaagauucugucuca

SEQ ID NO: 1919757 - RNA, 19 nt, Artificial Sequence
  Description of Artificial Sequence: Synthetic oligonucleotide
  Antisense strand to SEQ ID NO: 1919756
ugagacagaaucuuccugu

SEQ ID NO: 1919758 - RNA, 19 nt, Artificial Sequence
  Description of Artificial Sequence: Synthetic oligonucleotide
  Sense strand starting at position 2185 of SEQ ID NO: 1879613
caggaagauucugucucaa

SEQ ID NO: 1919759 - RNA, 19 nt, Artificial Sequence
  Description of Artificial Sequence: Synthetic oligonucleotide
  Antisense strand to SEQ ID NO: 1919758
uugagacagaaucuuccug

SEQ ID NO: 1919760 - RNA, 19 nt, Artificial Sequence
  Description of Artificial Sequence: Synthetic oligonucleotide
  Sense strand starting at position 3654 of SEQ ID NO: 1879613
guagaaacuccauacguac

SEQ ID NO: 1919761 - RNA, 19 nt, Artificial Sequence
  Description of Artificial Sequence: Synthetic oligonucleotide
  Antisense strand to SEQ ID NO: 1919760
guacguauggaguuucuac

SEQ ID NO: 1919762 - RNA, 19 nt, Artificial Sequence
  Description of Artificial Sequence: Synthetic oligonucleotide
  Sense strand starting at position 86 of SEQ ID NO: 1879614
ccaucauguguggauguau

SEQ ID NO: 1919763 - RNA, 19 nt, Artificial Sequence
  Description of Artificial Sequence: Synthetic oligonucleotide
  Antisense strand to SEQ ID NO: 1919762
auacauccacacaugaugg

SEQ ID NO: 1919764 - RNA, 19 nt, Artificial Sequence
  Description of Artificial Sequence: Synthetic oligonucleotide
  Sense strand starting at position 95 of SEQ ID NO: 1879614
guggauguauuaucaugca

SEQ ID NO: 1919765 - RNA, 19 nt, Artificial Sequence
  Description of Artificial Sequence: Synthetic oligonucleotide
  Antisense strand to SEQ ID NO: 1919764
ugcaugauaauacauccac

SEQ ID NO: 1919766 - RNA, 19 nt, Artificial Sequence
  Description of Artificial Sequence: Synthetic oligonucleotide
  Sense strand starting at position 170 of SEQ ID NO: 1879614
caaugucaugauggauauc

SEQ ID NO: 1919767 - RNA, 19 nt, Artificial Sequence
  Description of Artificial Sequence: Synthetic oligonucleotide
  Antisense strand to SEQ ID NO: 1919766
gauauccaucaugacauug

SEQ ID NO: 1919768 - RNA, 19 nt, Artificial Sequence
  Description of Artificial Sequence: Synthetic oligonucleotide
  Sense strand starting at position 369 of SEQ ID NO: 1879614
gugaguaggaaaugcuaga

SEQ ID NO: 1919769 - RNA, 19 nt, Artificial Sequence
  Description of Artificial Sequence: Synthetic oligonucleotide
  Antisense strand to SEQ ID NO: 1919768
ucuagcauuuccuacucac

SEQ ID NO: 1919770 - RNA, 19 nt, Artificial Sequence
  Description of Artificial Sequence: Synthetic oligonucleotide
  Sense strand starting at position 630 of SEQ ID NO: 1879614
gggucuggcucuuucuaga

SEQ ID NO: 1919771 - RNA, 19 nt, Artificial Sequence
  Description of Artificial Sequence: Synthetic oligonucleotide
  Antisense strand to SEQ ID NO: 1919770
ucuagaaagagccagaccc

SEQ ID NO: 1919772 - RNA, 19 nt, Artificial Sequence
  Description of Artificial Sequence: Synthetic oligonucleotide
  Sense strand starting at position 700 of SEQ ID NO: 1879614
gcuucuuggacugaaguga

SEQ ID NO: 1919773 - RNA, 19 nt, Artificial Sequence
  Description of Artificial Sequence: Synthetic oligonucleotide
  Antisense strand to SEQ ID NO: 1919772
ucacuucaguccaagaagc

SEQ ID NO: 1919774 - RNA, 19 nt, Artificial Sequence
  Description of Artificial Sequence: Synthetic oligonucleotide
  Sense strand starting at position 704 of SEQ ID NO: 1879614
cuuggacugaagugaacau

SEQ ID NO: 1919775 - RNA, 19 nt, Artificial Sequence
  Description of Artificial Sequence: Synthetic oligonucleotide
  Antisense strand to SEQ ID NO: 1919774
auguucacuucaguccaag

SEQ ID NO: 1919776 - RNA, 19 nt, Artificial Sequence
  Description of Artificial Sequence: Synthetic oligonucleotide
  Sense strand starting at position 864 of SEQ ID NO: 1879614
ugagaaugauauuaaagga

SEQ ID NO: 1919777 - RNA, 19 nt, Artificial Sequence
  Description of Artificial Sequence: Synthetic oligonucleotide
  Antisense strand to SEQ ID NO: 1919776
uccuuuaauaucauucuca

SEQ ID NO: 1919778 - RNA, 19 nt, Artificial Sequence
  Description of Artificial Sequence: Synthetic oligonucleotide
  Sense strand starting at position 1265 of SEQ ID NO: 1879614
acaggugguuaucccaauu

SEQ ID NO: 1919779 - RNA, 19 nt, Artificial Sequence
  Description of Artificial Sequence: Synthetic oligonucleotide
  Antisense strand to SEQ ID NO: 1919778
aauugggauaaccaccugu

SEQ ID NO: 1919780 - RNA, 19 nt, Artificial Sequence
  Description of Artificial Sequence: Synthetic oligonucleotide
  Sense strand starting at position 1564 of SEQ ID NO: 1879614
ccugauuccugcccuggua

SEQ ID NO: 1919781 - RNA, 19 nt, Artificial Sequence
  Description of Artificial Sequence: Synthetic oligonucleotide
  Antisense strand to SEQ ID NO: 1919780
uaccagggcaggaaucagg

SEQ ID NO: 1919782 - RNA, 19 nt, Artificial Sequence
  Description of Artificial Sequence: Synthetic oligonucleotide
  Sense strand starting at position 1577 of SEQ ID NO: 1879614
cugguauccugucccaaga

SEQ ID NO: 1919783 - RNA, 19 nt, Artificial Sequence
  Description of Artificial Sequence: Synthetic oligonucleotide
  Antisense strand to SEQ ID NO: 1919782
ucuugggacaggauaccag

SEQ ID NO: 1919784 - RNA, 19 nt, Artificial Sequence
  Description of Artificial Sequence: Synthetic oligonucleotide
  Sense strand starting at position 1796 of SEQ ID NO: 1879614
gguacaacuguugaucagu

SEQ ID NO: 1919785 - RNA, 19 nt, Artificial Sequence
  Description of Artificial Sequence: Synthetic oligonucleotide
  Antisense strand to SEQ ID NO: 1919784
acugaucaacaguuguacc

SEQ ID NO: 1919786 - RNA, 19 nt, Artificial Sequence
  Description of Artificial Sequence: Synthetic oligonucleotide
  Sense strand starting at position 1798 of SEQ ID NO: 1879614
uacaacuguugaucaguga

SEQ ID NO: 1919787 - RNA, 19 nt, Artificial Sequence
  Description of Artificial Sequence: Synthetic oligonucleotide
  Antisense strand to SEQ ID NO: 1919786
ucacugaucaacaguugua

SEQ ID NO: 1919788 - RNA, 19 nt, Artificial Sequence
  Description of Artificial Sequence: Synthetic oligonucleotide
  Sense strand starting at position 2035 of SEQ ID NO: 1879614
cagaacugagguugcuaua

SEQ ID NO: 1919789 - RNA, 19 nt, Artificial Sequence
  Description of Artificial Sequence: Synthetic oligonucleotide
  Antisense strand to SEQ ID NO: 1919788
uauagcaaccucaguucug

SEQ ID NO: 1919790 - RNA, 19 nt, Artificial Sequence
  Description of Artificial Sequence: Synthetic oligonucleotide
  Sense strand starting at position 2081 of SEQ ID NO: 1879614
ucuauaguuguggacugua

SEQ ID NO: 1919791 - RNA, 19 nt, Artificial Sequence
  Description of Artificial Sequence: Synthetic oligonucleotide
  Antisense strand to SEQ ID NO: 1919790
uacaguccacaacuauaga

SEQ ID NO: 1919792 - RNA, 19 nt, Artificial Sequence
  Description of Artificial Sequence: Synthetic oligonucleotide
  Sense strand starting at position 2584 of SEQ ID NO: 1879614
gccuaccuccucuguagau

SEQ ID NO: 1919793 - RNA, 19 nt, Artificial Sequence
  Description of Artificial Sequence: Synthetic oligonucleotide
  Antisense strand to SEQ ID NO: 1919792
aucuacagaggagguaggc

SEQ ID NO: 1919794 - RNA, 19 nt, Artificial Sequence
  Description of Artificial Sequence: Synthetic oligonucleotide
  Sense strand starting at position 2693 of SEQ ID NO: 1879614
ucccgcaggaucuguaaua

SEQ ID NO: 1919795 - RNA, 19 nt, Artificial Sequence
  Description of Artificial Sequence: Synthetic oligonucleotide
  Antisense strand to SEQ ID NO: 1919794
uauuacagauccugcggga

SEQ ID NO: 1919796 - RNA, 19 nt, Artificial Sequence
  Description of Artificial Sequence: Synthetic oligonucleotide
  Sense strand starting at position 2694 of SEQ ID NO: 1879614
cccgcaggaucuguaauau

SEQ ID NO: 1919797 - RNA, 19 nt, Artificial Sequence
  Description of Artificial Sequence: Synthetic oligonucleotide
  Antisense strand to SEQ ID NO: 1919796
auauuacagauccugcggg

SEQ ID NO: 1919798 - RNA, 19 nt, Artificial Sequence
  Description of Artificial Sequence: Synthetic oligonucleotide
  Sense strand starting at position 2926 of SEQ ID NO: 1879614
cuccuucuguccuuggauu

SEQ ID NO: 1919799 - RNA, 19 nt, Artificial Sequence
  Description of Artificial Sequence: Synthetic oligonucleotide
  Antisense strand to SEQ ID NO: 1919798
aauccaaggacagaaggag

SEQ ID NO: 1919800 - RNA, 19 nt, Artificial Sequence
  Description of Artificial Sequence: Synthetic oligonucleotide
  Sense strand starting at position 2927 of SEQ ID NO: 1879614
uccuucuguccuuggauua

SEQ ID NO: 1919801 - RNA, 19 nt, Artificial Sequence
  Description of Artificial Sequence: Synthetic oligonucleotide
  Antisense strand to SEQ ID NO: 1919800
uaauccaaggacagaagga

SEQ ID NO: 1919802 - RNA, 19 nt, Artificial Sequence
  Description of Artificial Sequence: Synthetic oligonucleotide
  Sense strand starting at position 2928 of SEQ ID NO: 1879614
ccuucuguccuuggauuau

SEQ ID NO: 1919803 - RNA, 19 nt, Artificial Sequence
  Description of Artificial Sequence: Synthetic oligonucleotide
  Antisense strand to SEQ ID NO: 1919802
auaauccaaggacagaagg

SEQ ID NO: 1919804 - RNA, 19 nt, Artificial Sequence
  Description of Artificial Sequence: Synthetic oligonucleotide
  Sense strand starting at position 2934 of SEQ ID NO: 1879614
guccuuggauuaucaguga

SEQ ID NO: 1919805 - RNA, 19 nt, Artificial Sequence
  Description of Artificial Sequence: Synthetic oligonucleotide
  Antisense strand to SEQ ID NO: 1919804
ucacugauaauccaaggac

SEQ ID NO: 1919806 - RNA, 19 nt, Artificial Sequence
  Description of Artificial Sequence: Synthetic oligonucleotide
  Sense strand starting at position 2937 of SEQ ID NO: 1879614
cuuggauuaucagugaagu

SEQ ID NO: 1919807 - RNA, 19 nt, Artificial Sequence
  Description of Artificial Sequence: Synthetic oligonucleotide
  Antisense strand to SEQ ID NO: 1919806
acuucacugauaauccaag

SEQ ID NO: 1919808 - RNA, 19 nt, Artificial Sequence
  Description of Artificial Sequence: Synthetic oligonucleotide
  Sense strand starting at position 2938 of SEQ ID NO: 1879614
uuggauuaucagugaagug

SEQ ID NO: 1919809 - RNA, 19 nt, Artificial Sequence
  Description of Artificial Sequence: Synthetic oligonucleotide
  Antisense strand to SEQ ID NO: 1919808
cacuucacugauaauccaa

SEQ ID NO: 1919810 - RNA, 19 nt, Artificial Sequence
  Description of Artificial Sequence: Synthetic oligonucleotide
  Sense strand starting at position 3022 of SEQ ID NO: 1879614
cugacagucagagagcauu

SEQ ID NO: 1919811 - RNA, 19 nt, Artificial Sequence
  Description of Artificial Sequence: Synthetic oligonucleotide
  Antisense strand to SEQ ID NO: 1919810
aaugcucucugacugucag

SEQ ID NO: 1919812 - RNA, 19 nt, Artificial Sequence
  Description of Artificial Sequence: Synthetic oligonucleotide
  Sense strand starting at position 3028 of SEQ ID NO: 1879614
gucagagagcauuguuccu

SEQ ID NO: 1919813 - RNA, 19 nt, Artificial Sequence
  Description of Artificial Sequence: Synthetic oligonucleotide
  Antisense strand to SEQ ID NO: 1919812
aggaacaaugcucucugac

SEQ ID NO: 1919814 - RNA, 19 nt, Artificial Sequence
  Description of Artificial Sequence: Synthetic oligonucleotide
  Sense strand starting at position 3166 of SEQ ID NO: 1879614
cauugucugccugugucau

SEQ ID NO: 1919815 - RNA, 19 nt, Artificial Sequence
  Description of Artificial Sequence: Synthetic oligonucleotide
  Antisense strand to SEQ ID NO: 1919814
augacacaggcagacaaug

SEQ ID NO: 1919816 - RNA, 19 nt, Artificial Sequence
  Description of Artificial Sequence: Synthetic oligonucleotide
  Sense strand starting at position 3198 of SEQ ID NO: 1879614
aagggaggcuuguuuauuc

SEQ ID NO: 1919817 - RNA, 19 nt, Artificial Sequence
  Description of Artificial Sequence: Synthetic oligonucleotide
  Antisense strand to SEQ ID NO: 1919816
gaauaaacaagccucccuu

SEQ ID NO: 1919818 - RNA, 19 nt, Artificial Sequence
  Description of Artificial Sequence: Synthetic oligonucleotide
  Sense strand starting at position 3251 of SEQ ID NO: 1879614
gggucuguaucucuuauuu

SEQ ID NO: 1919819 - RNA, 19 nt, Artificial Sequence
  Description of Artificial Sequence: Synthetic oligonucleotide
  Antisense strand to SEQ ID NO: 1919818
aaauaagagauacagaccc

SEQ ID NO: 1919820 - RNA, 19 nt, Artificial Sequence
  Description of Artificial Sequence: Synthetic oligonucleotide
  Sense strand starting at position 3435 of SEQ ID NO: 1879614
ggucuagucgcauacagag

SEQ ID NO: 1919821 - RNA, 19 nt, Artificial Sequence
  Description of Artificial Sequence: Synthetic oligonucleotide
  Antisense strand to SEQ ID NO: 1919820
cucuguaugcgacuagacc

SEQ ID NO: 1919822 - RNA, 19 nt, Artificial Sequence
  Description of Artificial Sequence: Synthetic oligonucleotide
  Sense strand starting at position 3506 of SEQ ID NO: 1879614
ggaaauagauacucauugu

SEQ ID NO: 1919823 - RNA, 19 nt, Artificial Sequence
  Description of Artificial Sequence: Synthetic oligonucleotide
  Antisense strand to SEQ ID NO: 1919822
acaaugaguaucuauuucc

SEQ ID NO: 1919824 - RNA, 19 nt, Artificial Sequence
  Description of Artificial Sequence: Synthetic oligonucleotide
  Sense strand starting at position 3509 of SEQ ID NO: 1879614
aauagauacucauugugga

SEQ ID NO: 1919825 - RNA, 19 nt, Artificial Sequence
  Description of Artificial Sequence: Synthetic oligonucleotide
  Antisense strand to SEQ ID NO: 1919824
uccacaaugaguaucuauu

SEQ ID NO: 1919826 - RNA, 19 nt, Artificial Sequence
  Description of Artificial Sequence: Synthetic oligonucleotide
  Sense strand starting at position 3510 of SEQ ID NO: 1879614
auagauacucauuguggaa

SEQ ID NO: 1919827 - RNA, 19 nt, Artificial Sequence
  Description of Artificial Sequence: Synthetic oligonucleotide
  Antisense strand to SEQ ID NO: 1919826
uuccacaaugaguaucuau

SEQ ID NO: 1919828 - RNA, 19 nt, Artificial Sequence
  Description of Artificial Sequence: Synthetic oligonucleotide
  Sense strand starting at position 3626 of SEQ ID NO: 1879614
guuccuaucuuaguggaag

SEQ ID NO: 1919829 - RNA, 19 nt, Artificial Sequence
  Description of Artificial Sequence: Synthetic oligonucleotide
  Antisense strand to SEQ ID NO: 1919828
cuuccacuaagauaggaac

SEQ ID NO: 1919830 - RNA, 19 nt, Artificial Sequence
  Description of Artificial Sequence: Synthetic oligonucleotide
  Sense strand starting at position 3672 of SEQ ID NO: 1879614
accuaaggaucaugaaaga

SEQ ID NO: 1919831 - RNA, 19 nt, Artificial Sequence
  Description of Artificial Sequence: Synthetic oligonucleotide
  Antisense strand to SEQ ID NO: 1919830
ucuuucaugauccuuaggu

SEQ ID NO: 1919832 - RNA, 19 nt, Artificial Sequence
  Description of Artificial Sequence: Synthetic oligonucleotide
  Sense strand starting at position 3698 of SEQ ID NO: 1879614
ggugaaagccuaggugaga

SEQ ID NO: 1919833 - RNA, 19 nt, Artificial Sequence
  Description of Artificial Sequence: Synthetic oligonucleotide
  Antisense strand to SEQ ID NO: 1919832
ucucaccuaggcuuucacc

SEQ ID NO: 1919834 - RNA, 19 nt, Artificial Sequence
  Description of Artificial Sequence: Synthetic oligonucleotide
  Sense strand starting at position 3699 of SEQ ID NO: 1879614
gugaaagccuaggugagau

SEQ ID NO: 1919835 - RNA, 19 nt, Artificial Sequence
  Description of Artificial Sequence: Synthetic oligonucleotide
  Antisense strand to SEQ ID NO: 1919834
aucucaccuaggcuuucac

SEQ ID NO: 1919836 - RNA, 19 nt, Artificial Sequence
  Description of Artificial Sequence: Synthetic oligonucleotide
  Sense strand starting at position 3707 of SEQ ID NO: 1879614
cuaggugagaucuggccuu

SEQ ID NO: 1919837 - RNA, 19 nt, Artificial Sequence
  Description of Artificial Sequence: Synthetic oligonucleotide
  Antisense strand to SEQ ID NO: 1919836
aaggccagaucucaccuag

SEQ ID NO: 1919838 - RNA, 19 nt, Artificial Sequence
  Description of Artificial Sequence: Synthetic oligonucleotide
  Sense strand starting at position 3713 of SEQ ID NO: 1879614
gagaucuggccuugcugau

SEQ ID NO: 1919839 - RNA, 19 nt, Artificial Sequence
  Description of Artificial Sequence: Synthetic oligonucleotide
  Antisense strand to SEQ ID NO: 1919838
aucagcaaggccagaucuc

SEQ ID NO: 1919840 - RNA, 19 nt, Artificial Sequence
  Description of Artificial Sequence: Synthetic oligonucleotide
  Sense strand starting at position 3725 of SEQ ID NO: 1879614
ugcugaucucaucagacca

SEQ ID NO: 1919841 - RNA, 19 nt, Artificial Sequence
  Description of Artificial Sequence: Synthetic oligonucleotide
  Antisense strand to SEQ ID NO: 1919840
uggucugaugagaucagca

SEQ ID NO: 1919842 - RNA, 19 nt, Artificial Sequence
  Description of Artificial Sequence: Synthetic oligonucleotide
  Sense strand starting at position 313 of SEQ ID NO: 1879615
gggagaaguucaucuccag

SEQ ID NO: 1919843 - RNA, 19 nt, Artificial Sequence
  Description of Artificial Sequence: Synthetic oligonucleotide
  Antisense strand to SEQ ID NO: 1919842
cuggagaugaacuucuccc

SEQ ID NO: 1919844 - RNA, 19 nt, Artificial Sequence
  Description of Artificial Sequence: Synthetic oligonucleotide
  Sense strand starting at position 494 of SEQ ID NO: 1879615
gcuugagaaucauccucuu

SEQ ID NO: 1919845 - RNA, 19 nt, Artificial Sequence
  Description of Artificial Sequence: Synthetic oligonucleotide
  Antisense strand to SEQ ID NO: 1919844
aagaggaugauucucaagc

SEQ ID NO: 1919846 - RNA, 19 nt, Artificial Sequence
  Description of Artificial Sequence: Synthetic oligonucleotide
  Sense strand starting at position 815 of SEQ ID NO: 1879615
aaggguuugcaccaucaga

SEQ ID NO: 1919847 - RNA, 19 nt, Artificial Sequence
  Description of Artificial Sequence: Synthetic oligonucleotide
  Antisense strand to SEQ ID NO: 1919846
ucugauggugcaaacccuu

SEQ ID NO: 1919848 - RNA, 19 nt, Artificial Sequence
  Description of Artificial Sequence: Synthetic oligonucleotide
  Sense strand starting at position 883 of SEQ ID NO: 1879615
uucuacugagaucgauuga

SEQ ID NO: 1919849 - RNA, 19 nt, Artificial Sequence
  Description of Artificial Sequence: Synthetic oligonucleotide
  Antisense strand to SEQ ID NO: 1919848
ucaaucgaucucaguagaa

SEQ ID NO: 1919850 - RNA, 19 nt, Artificial Sequence
  Description of Artificial Sequence: Synthetic oligonucleotide
  Sense strand starting at position 890 of SEQ ID NO: 1879615
gagaucgauugauuggauu

SEQ ID NO: 1919851 - RNA, 19 nt, Artificial Sequence
  Description of Artificial Sequence: Synthetic oligonucleotide
  Antisense strand to SEQ ID NO: 1919850
aauccaaucaaucgaucuc

SEQ ID NO: 1919852 - RNA, 19 nt, Artificial Sequence
  Description of Artificial Sequence: Synthetic oligonucleotide
  Sense strand starting at position 911 of SEQ ID NO: 1879615
ugagucacaugccuaauau

SEQ ID NO: 1919853 - RNA, 19 nt, Artificial Sequence
  Description of Artificial Sequence: Synthetic oligonucleotide
  Antisense strand to SEQ ID NO: 1919852
auauuaggcaugugacuca

SEQ ID NO: 1919854 - RNA, 19 nt, Artificial Sequence
  Description of Artificial Sequence: Synthetic oligonucleotide
  Sense strand starting at position 1002 of SEQ ID NO: 1879615
cuuccaaaucauuaagugu

SEQ ID NO: 1919855 - RNA, 19 nt, Artificial Sequence
  Description of Artificial Sequence: Synthetic oligonucleotide
  Antisense strand to SEQ ID NO: 1919854
acacuuaaugauuuggaag

SEQ ID NO: 1919856 - RNA, 19 nt, Artificial Sequence
  Description of Artificial Sequence: Synthetic oligonucleotide
  Sense strand starting at position 1035 of SEQ ID NO: 1879615
ugcuuaguuguuucuucuu

SEQ ID NO: 1919857 - RNA, 19 nt, Artificial Sequence
  Description of Artificial Sequence: Synthetic oligonucleotide
  Antisense strand to SEQ ID NO: 1919856
aagaagaaacaacuaagca

SEQ ID NO: 1919858 - RNA, 19 nt, Artificial Sequence
  Description of Artificial Sequence: Synthetic oligonucleotide
  Sense strand starting at position 1385 of SEQ ID NO: 1879615
cugucucugcaggacuaaa

SEQ ID NO: 1919859 - RNA, 19 nt, Artificial Sequence
  Description of Artificial Sequence: Synthetic oligonucleotide
  Antisense strand to SEQ ID NO: 1919858
uuuaguccugcagagacag

SEQ ID NO: 1919860 - RNA, 19 nt, Artificial Sequence
  Description of Artificial Sequence: Synthetic oligonucleotide
  Sense strand starting at position 1411 of SEQ ID NO: 1879615
guuagcgucacauugucau

SEQ ID NO: 1919861 - RNA, 19 nt, Artificial Sequence
  Description of Artificial Sequence: Synthetic oligonucleotide
  Antisense strand to SEQ ID NO: 1919860
augacaaugugacgcuaac

SEQ ID NO: 1919862 - RNA, 19 nt, Artificial Sequence
  Description of Artificial Sequence: Synthetic oligonucleotide
  Sense strand starting at position 1670 of SEQ ID NO: 1879615
uaggaaauugucuaccugu

SEQ ID NO: 1919863 - RNA, 19 nt, Artificial Sequence
  Description of Artificial Sequence: Synthetic oligonucleotide
  Antisense strand to SEQ ID NO: 1919862
acagguagacaauuuccua

SEQ ID NO: 1919864 - RNA, 19 nt, Artificial Sequence
  Description of Artificial Sequence: Synthetic oligonucleotide
  Sense strand starting at position 1734 of SEQ ID NO: 1879615
cuaagaugguagucauuag

SEQ ID NO: 1919865 - RNA, 19 nt, Artificial Sequence
  Description of Artificial Sequence: Synthetic oligonucleotide
  Antisense strand to SEQ ID NO: 1919864
cuaaugacuaccaucuuag

SEQ ID NO: 1919866 - RNA, 19 nt, Artificial Sequence
  Description of Artificial Sequence: Synthetic oligonucleotide
  Sense strand starting at position 1794 of SEQ ID NO: 1879615
uccgaagaaucaguuccaa

SEQ ID NO: 1919867 - RNA, 19 nt, Artificial Sequence
  Description of Artificial Sequence: Synthetic oligonucleotide
  Antisense strand to SEQ ID NO: 1919866
uuggaacugauucuucgga

SEQ ID NO: 1919868 - RNA, 19 nt, Artificial Sequence
  Description of Artificial Sequence: Synthetic oligonucleotide
  Sense strand starting at position 1837 of SEQ ID NO: 1879615
ccucuugugaaagaugagu

SEQ ID NO: 1919869 - RNA, 19 nt, Artificial Sequence
  Description of Artificial Sequence: Synthetic oligonucleotide
  Antisense strand to SEQ ID NO: 1919868
acucaucuuucacaagagg

SEQ ID NO: 1919870 - RNA, 19 nt, Artificial Sequence
  Description of Artificial Sequence: Synthetic oligonucleotide
  Sense strand starting at position 1839 of SEQ ID NO: 1879615
ucuugugaaagaugaguaa

SEQ ID NO: 1919871 - RNA, 19 nt, Artificial Sequence
  Description of Artificial Sequence: Synthetic oligonucleotide
  Antisense strand to SEQ ID NO: 1919870
uuacucaucuuucacaaga

SEQ ID NO: 1919872 - RNA, 19 nt, Artificial Sequence
  Description of Artificial Sequence: Synthetic oligonucleotide
  Sense strand starting at position 1882 of SEQ ID NO: 1879615
auguuugcucaugacaauu

SEQ ID NO: 1919873 - RNA, 19 nt, Artificial Sequence
  Description of Artificial Sequence: Synthetic oligonucleotide
  Antisense strand to SEQ ID NO: 1919872
aauugucaugagcaaacau

SEQ ID NO: 1919874 - RNA, 19 nt, Artificial Sequence
  Description of Artificial Sequence: Synthetic oligonucleotide
  Sense strand starting at position 1912 of SEQ ID NO: 1879615
ccaggacuucuuugauuaa

SEQ ID NO: 1919875 - RNA, 19 nt, Artificial Sequence
  Description of Artificial Sequence: Synthetic oligonucleotide
  Antisense strand to SEQ ID NO: 1919874
uuaaucaaagaaguccugg

SEQ ID NO: 1919876 - RNA, 19 nt, Artificial Sequence
  Description of Artificial Sequence: Synthetic oligonucleotide
  Sense strand starting at position 1915 of SEQ ID NO: 1879615
ggacuucuuugauuaauug

SEQ ID NO: 1919877 - RNA, 19 nt, Artificial Sequence
  Description of Artificial Sequence: Synthetic oligonucleotide
  Antisense strand to SEQ ID NO: 1919876
caauuaaucaaagaagucc

SEQ ID NO: 1919878 - RNA, 19 nt, Artificial Sequence
  Description of Artificial Sequence: Synthetic oligonucleotide
  Sense strand starting at position 1959 of SEQ ID NO: 1879615
gauguaugagcccacauuc

SEQ ID NO: 1919879 - RNA, 19 nt, Artificial Sequence
  Description of Artificial Sequence: Synthetic oligonucleotide
  Antisense strand to SEQ ID NO: 1919878
gaaugugggcucauacauc

SEQ ID NO: 1919880 - RNA, 19 nt, Artificial Sequence
  Description of Artificial Sequence: Synthetic oligonucleotide
  Sense strand starting at position 1988 of SEQ ID NO: 1879615
ggccacaguaucuaugagu

SEQ ID NO: 1919881 - RNA, 19 nt, Artificial Sequence
  Description of Artificial Sequence: Synthetic oligonucleotide
  Antisense strand to SEQ ID NO: 1919880
acucauagauacuguggcc

SEQ ID NO: 1919882 - RNA, 19 nt, Artificial Sequence
  Description of Artificial Sequence: Synthetic oligonucleotide
  Sense strand starting at position 2292 of SEQ ID NO: 1879615
uuacuaauuccuggagaua

SEQ ID NO: 1919883 - RNA, 19 nt, Artificial Sequence
  Description of Artificial Sequence: Synthetic oligonucleotide
  Antisense strand to SEQ ID NO: 1919882
uaucuccaggaauuaguaa

SEQ ID NO: 1919884 - RNA, 19 nt, Artificial Sequence
  Description of Artificial Sequence: Synthetic oligonucleotide
  Sense strand starting at position 2379 of SEQ ID NO: 1879615
ggugccuaauuucugugau

SEQ ID NO: 1919885 - RNA, 19 nt, Artificial Sequence
  Description of Artificial Sequence: Synthetic oligonucleotide
  Antisense strand to SEQ ID NO: 1919884
aucacagaaauuaggcacc

SEQ ID NO: 1919886 - RNA, 19 nt, Artificial Sequence
  Description of Artificial Sequence: Synthetic oligonucleotide
  Sense strand starting at position 2415 of SEQ ID NO: 1879615
caguguucucccgaggaag

SEQ ID NO: 1919887 - RNA, 19 nt, Artificial Sequence
  Description of Artificial Sequence: Synthetic oligonucleotide
  Antisense strand to SEQ ID NO: 1919886
cuuccucgggagaacacug

SEQ ID NO: 1919888 - RNA, 19 nt, Artificial Sequence
  Description of Artificial Sequence: Synthetic oligonucleotide
  Sense strand starting at position 2783 of SEQ ID NO: 1879615
cugcuuugaguuuaaauau

SEQ ID NO: 1919889 - RNA, 19 nt, Artificial Sequence
  Description of Artificial Sequence: Synthetic oligonucleotide
  Antisense strand to SEQ ID NO: 1919888
auauuuaaacucaaagcag

SEQ ID NO: 1919890 - RNA, 19 nt, Artificial Sequence
  Description of Artificial Sequence: Synthetic oligonucleotide
  Sense strand starting at position 3028 of SEQ ID NO: 1879615
aagguauuguaauugccaa

SEQ ID NO: 1919891 - RNA, 19 nt, Artificial Sequence
  Description of Artificial Sequence: Synthetic oligonucleotide
  Antisense strand to SEQ ID NO: 1919890
uuggcaauuacaauaccuu

SEQ ID NO: 1919892 - RNA, 19 nt, Artificial Sequence
  Description of Artificial Sequence: Synthetic oligonucleotide
  Sense strand starting at position 3063 of SEQ ID NO: 1879615
auagguauuagauggagca

SEQ ID NO: 1919893 - RNA, 19 nt, Artificial Sequence
  Description of Artificial Sequence: Synthetic oligonucleotide
  Antisense strand to SEQ ID NO: 1919892
ugcuccaucuaauaccuau

SEQ ID NO: 1919894 - RNA, 19 nt, Artificial Sequence
  Description of Artificial Sequence: Synthetic oligonucleotide
  Sense strand starting at position 3064 of SEQ ID NO: 1879615
uagguauuagauggagcaa

SEQ ID NO: 1919895 - RNA, 19 nt, Artificial Sequence
  Description of Artificial Sequence: Synthetic oligonucleotide
  Antisense strand to SEQ ID NO: 1919894
uugcuccaucuaauaccua

SEQ ID NO: 1919896 - RNA, 19 nt, Artificial Sequence
  Description of Artificial Sequence: Synthetic oligonucleotide
  Sense strand starting at position 3139 of SEQ ID NO: 1879615
ggguuuguuccacagccaa

SEQ ID NO: 1919897 - RNA, 19 nt, Artificial Sequence
  Description of Artificial Sequence: Synthetic oligonucleotide
  Antisense strand to SEQ ID NO: 1919896
uuggcuguggaacaaaccc

SEQ ID NO: 1919898 - RNA, 19 nt, Artificial Sequence
  Description of Artificial Sequence: Synthetic oligonucleotide
  Sense strand starting at position 3231 of SEQ ID NO: 1879615
uagauauaacagugagggu

SEQ ID NO: 1919899 - RNA, 19 nt, Artificial Sequence
  Description of Artificial Sequence: Synthetic oligonucleotide
  Antisense strand to SEQ ID NO: 1919898
acccucacuguuauaucua

SEQ ID NO: 1919900 - RNA, 19 nt, Artificial Sequence
  Description of Artificial Sequence: Synthetic oligonucleotide
  Sense strand starting at position 3325 of SEQ ID NO: 1879615
ucccgaacacagugauaug

SEQ ID NO: 1919901 - RNA, 19 nt, Artificial Sequence
  Description of Artificial Sequence: Synthetic oligonucleotide
  Antisense strand to SEQ ID NO: 1919900
cauaucacuguguucggga

SEQ ID NO: 1919902 - RNA, 19 nt, Artificial Sequence
  Description of Artificial Sequence: Synthetic oligonucleotide
  Sense strand starting at position 3406 of SEQ ID NO: 1879615
acucuuauguggucaugaa

SEQ ID NO: 1919903 - RNA, 19 nt, Artificial Sequence
  Description of Artificial Sequence: Synthetic oligonucleotide
  Antisense strand to SEQ ID NO: 1919902
uucaugaccacauaagagu

SEQ ID NO: 1919904 - RNA, 19 nt, Artificial Sequence
  Description of Artificial Sequence: Synthetic oligonucleotide
  Sense strand starting at position 3407 of SEQ ID NO: 1879615
cucuuauguggucaugaag

SEQ ID NO: 1919905 - RNA, 19 nt, Artificial Sequence
  Description of Artificial Sequence: Synthetic oligonucleotide
  Antisense strand to SEQ ID NO: 1919904
cuucaugaccacauaagag

SEQ ID NO: 1919906 - RNA, 19 nt, Artificial Sequence
  Description of Artificial Sequence: Synthetic oligonucleotide
  Sense strand starting at position 3553 of SEQ ID NO: 1879615
gaaagauggagcuggguuu

SEQ ID NO: 1919907 - RNA, 19 nt, Artificial Sequence
  Description of Artificial Sequence: Synthetic oligonucleotide
  Antisense strand to SEQ ID NO: 1919906
aaacccagcuccaucuuuc

SEQ ID NO: 1919908 - RNA, 19 nt, Artificial Sequence
  Description of Artificial Sequence: Synthetic oligonucleotide
  Sense strand starting at position 3720 of SEQ ID NO: 1879615
caacaugagugcuuggauu

SEQ ID NO: 1919909 - RNA, 19 nt, Artificial Sequence
  Description of Artificial Sequence: Synthetic oligonucleotide
  Antisense strand to SEQ ID NO: 1919908
aauccaagcacucauguug

SEQ ID NO: 1919910 - RNA, 19 nt, Artificial Sequence
  Description of Artificial Sequence: Synthetic oligonucleotide
  Sense strand starting at position 3722 of SEQ ID NO: 1879615
acaugagugcuuggauuaa

SEQ ID NO: 1919911 - RNA, 19 nt, Artificial Sequence
  Description of Artificial Sequence: Synthetic oligonucleotide
  Antisense strand to SEQ ID NO: 1919910
uuaauccaagcacucaugu

SEQ ID NO: 1919912 - RNA, 19 nt, Artificial Sequence
  Description of Artificial Sequence: Synthetic oligonucleotide
  Sense strand starting at position 3726 of SEQ ID NO: 1879615
gagugcuuggauuaagcca

SEQ ID NO: 1919913 - RNA, 19 nt, Artificial Sequence
  Description of Artificial Sequence: Synthetic oligonucleotide
  Antisense strand to SEQ ID NO: 1919912
uggcuuaauccaagcacuc

SEQ ID NO: 1919914 - RNA, 19 nt, Artificial Sequence
  Description of Artificial Sequence: Synthetic oligonucleotide
  Sense strand starting at position 3947 of SEQ ID NO: 1879615
gagugaguucagugagacu

SEQ ID NO: 1919915 - RNA, 19 nt, Artificial Sequence
  Description of Artificial Sequence: Synthetic oligonucleotide
  Antisense strand to SEQ ID NO: 1919914
agucucacugaacucacuc

SEQ ID NO: 1919916 - RNA, 19 nt, Artificial Sequence
  Description of Artificial Sequence: Synthetic oligonucleotide
  Sense strand starting at position 3958 of SEQ ID NO: 1879615
gugagacuuacuggucuug

SEQ ID NO: 1919917 - RNA, 19 nt, Artificial Sequence
  Description of Artificial Sequence: Synthetic oligonucleotide
  Antisense strand to SEQ ID NO: 1919916
caagaccaguaagucucac

SEQ ID NO: 1919918 - RNA, 19 nt, Artificial Sequence
  Description of Artificial Sequence: Synthetic oligonucleotide
  Sense strand starting at position 3960 of SEQ ID NO: 1879615
gagacuuacuggucuugaa

SEQ ID NO: 1919919 - RNA, 19 nt, Artificial Sequence
  Description of Artificial Sequence: Synthetic oligonucleotide
  Antisense strand to SEQ ID NO: 1919918
uucaagaccaguaagucuc

SEQ ID NO: 1919920 - RNA, 19 nt, Artificial Sequence
  Description of Artificial Sequence: Synthetic oligonucleotide
  Sense strand starting at position 3964 of SEQ ID NO: 1879615
cuuacuggucuugaagcau

SEQ ID NO: 1919921 - RNA, 19 nt, Artificial Sequence
  Description of Artificial Sequence: Synthetic oligonucleotide
  Antisense strand to SEQ ID NO: 1919920
augcuucaagaccaguaag

SEQ ID NO: 1919922 - RNA, 19 nt, Artificial Sequence
  Description of Artificial Sequence: Synthetic oligonucleotide
  Sense strand starting at position 103 of SEQ ID NO: 1879616
gaucuuaggaguuggcuga

SEQ ID NO: 1919923 - RNA, 19 nt, Artificial Sequence
  Description of Artificial Sequence: Synthetic oligonucleotide
  Antisense strand to SEQ ID NO: 1919922
ucagccaacuccuaagauc

SEQ ID NO: 1919924 - RNA, 19 nt, Artificial Sequence
  Description of Artificial Sequence: Synthetic oligonucleotide
  Sense strand starting at position 125 of SEQ ID NO: 1879616
ggcucacaggugugaacua

SEQ ID NO: 1919925 - RNA, 19 nt, Artificial Sequence
  Description of Artificial Sequence: Synthetic oligonucleotide
  Antisense strand to SEQ ID NO: 1919924
uaguucacaccugugagcc

SEQ ID NO: 1919926 - RNA, 19 nt, Artificial Sequence
  Description of Artificial Sequence: Synthetic oligonucleotide
  Sense strand starting at position 156 of SEQ ID NO: 1879616
guggcauuuaacugguacu

SEQ ID NO: 1919927 - RNA, 19 nt, Artificial Sequence
  Description of Artificial Sequence: Synthetic oligonucleotide
  Antisense strand to SEQ ID NO: 1919926
aguaccaguuaaaugccac

SEQ ID NO: 1919928 - RNA, 19 nt, Artificial Sequence
  Description of Artificial Sequence: Synthetic oligonucleotide
  Sense strand starting at position 201 of SEQ ID NO: 1879616
uugacuaguaagcgaagaa

SEQ ID NO: 1919929 - RNA, 19 nt, Artificial Sequence
  Description of Artificial Sequence: Synthetic oligonucleotide
  Antisense strand to SEQ ID NO: 1919928
uucuucgcuuacuagucaa

SEQ ID NO: 1919930 - RNA, 19 nt, Artificial Sequence
  Description of Artificial Sequence: Synthetic oligonucleotide
  Sense strand starting at position 202 of SEQ ID NO: 1879616
ugacuaguaagcgaagaau

SEQ ID NO: 1919931 - RNA, 19 nt, Artificial Sequence
  Description of Artificial Sequence: Synthetic oligonucleotide
  Antisense strand to SEQ ID NO: 1919930
auucuucgcuuacuaguca

SEQ ID NO: 1919932 - RNA, 19 nt, Artificial Sequence
  Description of Artificial Sequence: Synthetic oligonucleotide
  Sense strand starting at position 213 of SEQ ID NO: 1879616
cgaagaaugccucaaguga

SEQ ID NO: 1919933 - RNA, 19 nt, Artificial Sequence
  Description of Artificial Sequence: Synthetic oligonucleotide
  Antisense strand to SEQ ID NO: 1919932
ucacuugaggcauucuucg

SEQ ID NO: 1919934 - RNA, 19 nt, Artificial Sequence
  Description of Artificial Sequence: Synthetic oligonucleotide
  Sense strand starting at position 235 of SEQ ID NO: 1879616
ugcguacaaccucaguuaa

SEQ ID NO: 1919935 - RNA, 19 nt, Artificial Sequence
  Description of Artificial Sequence: Synthetic oligonucleotide
  Antisense strand to SEQ ID NO: 1919934
uuaacugagguuguacgca

SEQ ID NO: 1919936 - RNA, 19 nt, Artificial Sequence
  Description of Artificial Sequence: Synthetic oligonucleotide
  Sense strand starting at position 237 of SEQ ID NO: 1879616
cguacaaccucaguuaaca

SEQ ID NO: 1919937 - RNA, 19 nt, Artificial Sequence
  Description of Artificial Sequence: Synthetic oligonucleotide
  Antisense strand to SEQ ID NO: 1919936
uguuaacugagguuguacg

SEQ ID NO: 1919938 - RNA, 19 nt, Artificial Sequence
  Description of Artificial Sequence: Synthetic oligonucleotide
  Sense strand starting at position 512 of SEQ ID NO: 1879616
ugccuuaugccucucggua

SEQ ID NO: 1919939 - RNA, 19 nt, Artificial Sequence
  Description of Artificial Sequence: Synthetic oligonucleotide
  Antisense strand to SEQ ID NO: 1919938
uaccgagaggcauaaggca

SEQ ID NO: 1919940 - RNA, 19 nt, Artificial Sequence
  Description of Artificial Sequence: Synthetic oligonucleotide
  Sense strand starting at position 517 of SEQ ID NO: 1879616
uaugccucucgguagaauu

SEQ ID NO: 1919941 - RNA, 19 nt, Artificial Sequence
  Description of Artificial Sequence: Synthetic oligonucleotide
  Antisense strand to SEQ ID NO: 1919940
aauucuaccgagaggcaua

SEQ ID NO: 1919942 - RNA, 19 nt, Artificial Sequence
  Description of Artificial Sequence: Synthetic oligonucleotide
  Sense strand starting at position 525 of SEQ ID NO: 1879616
ucgguagaauucuuucuuu

SEQ ID NO: 1919943 - RNA, 19 nt, Artificial Sequence
  Description of Artificial Sequence: Synthetic oligonucleotide
  Antisense strand to SEQ ID NO: 1919942
aaagaaagaauucuaccga

SEQ ID NO: 1919944 - RNA, 19 nt, Artificial Sequence
  Description of Artificial Sequence: Synthetic oligonucleotide
  Sense strand starting at position 528 of SEQ ID NO: 1879616
guagaauucuuucuuugga

SEQ ID NO: 1919945 - RNA, 19 nt, Artificial Sequence
  Description of Artificial Sequence: Synthetic oligonucleotide
  Antisense strand to SEQ ID NO: 1919944
uccaaagaaagaauucuac

SEQ ID NO: 1919946 - RNA, 19 nt, Artificial Sequence
  Description of Artificial Sequence: Synthetic oligonucleotide
  Sense strand starting at position 598 of SEQ ID NO: 1879616
cacacuuuggugcaugaga

SEQ ID NO: 1919947 - RNA, 19 nt, Artificial Sequence
  Description of Artificial Sequence: Synthetic oligonucleotide
  Antisense strand to SEQ ID NO: 1919946
ucucaugcaccaaagugug

SEQ ID NO: 1919948 - RNA, 19 nt, Artificial Sequence
  Description of Artificial Sequence: Synthetic oligonucleotide
  Sense strand starting at position 600 of SEQ ID NO: 1879616
cacuuuggugcaugagacu

SEQ ID NO: 1919949 - RNA, 19 nt, Artificial Sequence
  Description of Artificial Sequence: Synthetic oligonucleotide
  Antisense strand to SEQ ID NO: 1919948
agucucaugcaccaaagug

SEQ ID NO: 1919950 - RNA, 19 nt, Artificial Sequence
  Description of Artificial Sequence: Synthetic oligonucleotide
  Sense strand starting at position 645 of SEQ ID NO: 1879616
agcauuacguauucuuaca

SEQ ID NO: 1919951 - RNA, 19 nt, Artificial Sequence
  Description of Artificial Sequence: Synthetic oligonucleotide
  Antisense strand to SEQ ID NO: 1919950
uguaagaauacguaaugcu

SEQ ID NO: 1919952 - RNA, 19 nt, Artificial Sequence
  Description of Artificial Sequence: Synthetic oligonucleotide
  Sense strand starting at position 684 of SEQ ID NO: 1879616
gaaggaagucucuggagua

SEQ ID NO: 1919953 - RNA, 19 nt, Artificial Sequence
  Description of Artificial Sequence: Synthetic oligonucleotide
  Antisense strand to SEQ ID NO: 1919952
uacuccagagacuuccuuc

SEQ ID NO: 1919954 - RNA, 19 nt, Artificial Sequence
  Description of Artificial Sequence: Synthetic oligonucleotide
  Sense strand starting at position 689 of SEQ ID NO: 1879616
aagucucuggaguacugau

SEQ ID NO: 1919955 - RNA, 19 nt, Artificial Sequence
  Description of Artificial Sequence: Synthetic oligonucleotide
  Antisense strand to SEQ ID NO: 1919954
aucaguacuccagagacuu

SEQ ID NO: 1919956 - RNA, 19 nt, Artificial Sequence
  Description of Artificial Sequence: Synthetic oligonucleotide
  Sense strand starting at position 823 of SEQ ID NO: 1879616
ucauguuuacuuuaaaguc

SEQ ID NO: 1919957 - RNA, 19 nt, Artificial Sequence
  Description of Artificial Sequence: Synthetic oligonucleotide
  Antisense strand to SEQ ID NO: 1919956
gacuuuaaaguaaacauga

SEQ ID NO: 1919958 - RNA, 19 nt, Artificial Sequence
  Description of Artificial Sequence: Synthetic oligonucleotide
  Sense strand starting at position 833 of SEQ ID NO: 1879616
uuuaaagucacguaagugu

SEQ ID NO: 1919959 - RNA, 19 nt, Artificial Sequence
  Description of Artificial Sequence: Synthetic oligonucleotide
  Antisense strand to SEQ ID NO: 1919958
acacuuacgugacuuuaaa

SEQ ID NO: 1919960 - RNA, 19 nt, Artificial Sequence
  Description of Artificial Sequence: Synthetic oligonucleotide
  Sense strand starting at position 844 of SEQ ID NO: 1879616
guaaguguacaauggcauu

SEQ ID NO: 1919961 - RNA, 19 nt, Artificial Sequence
  Description of Artificial Sequence: Synthetic oligonucleotide
  Antisense strand to SEQ ID NO: 1919960
aaugccauuguacacuuac

SEQ ID NO: 1919962 - RNA, 19 nt, Artificial Sequence
  Description of Artificial Sequence: Synthetic oligonucleotide
  Sense strand starting at position 850 of SEQ ID NO: 1879616
guacaauggcauuaaguac

SEQ ID NO: 1919963 - RNA, 19 nt, Artificial Sequence
  Description of Artificial Sequence: Synthetic oligonucleotide
  Antisense strand to SEQ ID NO: 1919962
guacuuaaugccauuguac

SEQ ID NO: 1919964 - RNA, 19 nt, Artificial Sequence
  Description of Artificial Sequence: Synthetic oligonucleotide
  Sense strand starting at position 1069 of SEQ ID NO: 1879616
aggcuuagauugcugcaaa

SEQ ID NO: 1919965 - RNA, 19 nt, Artificial Sequence
  Description of Artificial Sequence: Synthetic oligonucleotide
  Antisense strand to SEQ ID NO: 1919964
uuugcagcaaucuaagccu

SEQ ID NO: 1919966 - RNA, 19 nt, Artificial Sequence
  Description of Artificial Sequence: Synthetic oligonucleotide
  Sense strand starting at position 1238 of SEQ ID NO: 1879616
caaugauauugggucaauu

SEQ ID NO: 1919967 - RNA, 19 nt, Artificial Sequence
  Description of Artificial Sequence: Synthetic oligonucleotide
  Antisense strand to SEQ ID NO: 1919966
aauugacccaauaucauug

SEQ ID NO: 1919968 - RNA, 19 nt, Artificial Sequence
  Description of Artificial Sequence: Synthetic oligonucleotide
  Sense strand starting at position 1240 of SEQ ID NO: 1879616
augauauugggucaauugu

SEQ ID NO: 1919969 - RNA, 19 nt, Artificial Sequence
  Description of Artificial Sequence: Synthetic oligonucleotide
  Antisense strand to SEQ ID NO: 1919968
acaauugacccaauaucau

SEQ ID NO: 1919970 - RNA, 19 nt, Artificial Sequence
  Description of Artificial Sequence: Synthetic oligonucleotide
  Sense strand starting at position 1261 of SEQ ID NO: 1879616
caucuucgugugggaagaa

SEQ ID NO: 1919971 - RNA, 19 nt, Artificial Sequence
  Description of Artificial Sequence: Synthetic oligonucleotide
  Antisense strand to SEQ ID NO: 1919970
uucuucccacacgaagaug

SEQ ID NO: 1919972 - RNA, 19 nt, Artificial Sequence
  Description of Artificial Sequence: Synthetic oligonucleotide
  Sense strand starting at position 1271 of SEQ ID NO: 1879616
ugggaagaaugcccuaauu

SEQ ID NO: 1919973 - RNA, 19 nt, Artificial Sequence
  Description of Artificial Sequence: Synthetic oligonucleotide
  Antisense strand to SEQ ID NO: 1919972
aauuagggcauucuuccca

SEQ ID NO: 1919974 - RNA, 19 nt, Artificial Sequence
  Description of Artificial Sequence: Synthetic oligonucleotide
  Sense strand starting at position 1383 of SEQ ID NO: 1879616
cccucaaagucauugggaa

SEQ ID NO: 1919975 - RNA, 19 nt, Artificial Sequence
  Description of Artificial Sequence: Synthetic oligonucleotide
  Antisense strand to SEQ ID NO: 1919974
uucccaaugacuuugaggg

SEQ ID NO: 1919976 - RNA, 19 nt, Artificial Sequence
  Description of Artificial Sequence: Synthetic oligonucleotide
  Sense strand starting at position 1384 of SEQ ID NO: 1879616
ccucaaagucauugggaaa

SEQ ID NO: 1919977 - RNA, 19 nt, Artificial Sequence
  Description of Artificial Sequence: Synthetic oligonucleotide
  Antisense strand to SEQ ID NO: 1919976
uuucccaaugacuuugagg

SEQ ID NO: 1919978 - RNA, 19 nt, Artificial Sequence
  Description of Artificial Sequence: Synthetic oligonucleotide
  Sense strand starting at position 2019 of SEQ ID NO: 1879616
gaaaguauuacggguagga

SEQ ID NO: 1919979 - RNA, 19 nt, Artificial Sequence
  Description of Artificial Sequence: Synthetic oligonucleotide
  Antisense strand to SEQ ID NO: 1919978
uccuacccguaauacuuuc

SEQ ID NO: 1919980 - RNA, 19 nt, Artificial Sequence
  Description of Artificial Sequence: Synthetic oligonucleotide
  Sense strand starting at position 2061 of SEQ ID NO: 1879616
ggcugauucuggccuaaag

SEQ ID NO: 1919981 - RNA, 19 nt, Artificial Sequence
  Description of Artificial Sequence: Synthetic oligonucleotide
  Antisense strand to SEQ ID NO: 1919980
cuuuaggccagaaucagcc

SEQ ID NO: 1919982 - RNA, 19 nt, Artificial Sequence
  Description of Artificial Sequence: Synthetic oligonucleotide
  Sense strand starting at position 2182 of SEQ ID NO: 1879616
ggauaaagaugccuguaaa

SEQ ID NO: 1919983 - RNA, 19 nt, Artificial Sequence
  Description of Artificial Sequence: Synthetic oligonucleotide
  Antisense strand to SEQ ID NO: 1919982
uuuacaggcaucuuuaucc

SEQ ID NO: 1919984 - RNA, 19 nt, Artificial Sequence
  Description of Artificial Sequence: Synthetic oligonucleotide
  Sense strand starting at position 2183 of SEQ ID NO: 1879616
gauaaagaugccuguaaag

SEQ ID NO: 1919985 - RNA, 19 nt, Artificial Sequence
  Description of Artificial Sequence: Synthetic oligonucleotide
  Antisense strand to SEQ ID NO: 1919984
cuuuacaggcaucuuuauc

SEQ ID NO: 1919986 - RNA, 19 nt, Artificial Sequence
  Description of Artificial Sequence: Synthetic oligonucleotide
  Sense strand starting at position 2192 of SEQ ID NO: 1879616
gccuguaaagaggaguuga

SEQ ID NO: 1919987 - RNA, 19 nt, Artificial Sequence
  Description of Artificial Sequence: Synthetic oligonucleotide
  Antisense strand to SEQ ID NO: 1919986
ucaacuccucuuuacaggc

SEQ ID NO: 1919988 - RNA, 19 nt, Artificial Sequence
  Description of Artificial Sequence: Synthetic oligonucleotide
  Sense strand starting at position 2228 of SEQ ID NO: 1879616
acuugaaaugcccaggcuu

SEQ ID NO: 1919989 - RNA, 19 nt, Artificial Sequence
  Description of Artificial Sequence: Synthetic oligonucleotide
  Antisense strand to SEQ ID NO: 1919988
aagccugggcauuucaagu

SEQ ID NO: 1919990 - RNA, 19 nt, Artificial Sequence
  Description of Artificial Sequence: Synthetic oligonucleotide
  Sense strand starting at position 2286 of SEQ ID NO: 1879616
agagguuuagacggaguga

SEQ ID NO: 1919991 - RNA, 19 nt, Artificial Sequence
  Description of Artificial Sequence: Synthetic oligonucleotide
  Antisense strand to SEQ ID NO: 1919990
ucacuccgucuaaaccucu

SEQ ID NO: 1919992 - RNA, 19 nt, Artificial Sequence
  Description of Artificial Sequence: Synthetic oligonucleotide
  Sense strand starting at position 3830 of SEQ ID NO: 1879616
cgccacugugcgagugaua

SEQ ID NO: 1919993 - RNA, 19 nt, Artificial Sequence
  Description of Artificial Sequence: Synthetic oligonucleotide
  Antisense strand to SEQ ID NO: 1919992
uaucacucgcacaguggcg

SEQ ID NO: 1919994 - RNA, 19 nt, Artificial Sequence
  Description of Artificial Sequence: Synthetic oligonucleotide
  Sense strand starting at position 3837 of SEQ ID NO: 1879616
gugcgagugauaucugcuu

SEQ ID NO: 1919995 - RNA, 19 nt, Artificial Sequence
  Description of Artificial Sequence: Synthetic oligonucleotide
  Antisense strand to SEQ ID NO: 1919994
aagcagauaucacucgcac

SEQ ID NO: 1919996 - RNA, 19 nt, Artificial Sequence
  Description of Artificial Sequence: Synthetic oligonucleotide
  Sense strand starting at position 3849 of SEQ ID NO: 1879616
ucugcuuaggcuugagacu

SEQ ID NO: 1919997 - RNA, 19 nt, Artificial Sequence
  Description of Artificial Sequence: Synthetic oligonucleotide
  Antisense strand to SEQ ID NO: 1919996
agucucaagccuaagcaga

SEQ ID NO: 1919998 - RNA, 19 nt, Artificial Sequence
  Description of Artificial Sequence: Synthetic oligonucleotide
  Sense strand starting at position 3850 of SEQ ID NO: 1879616
cugcuuaggcuugagacuu

SEQ ID NO: 1919999 - RNA, 19 nt, Artificial Sequence
  Description of Artificial Sequence: Synthetic oligonucleotide
  Antisense strand to SEQ ID NO: 1919998
aagucucaagccuaagcag

SEQ ID NO: 1920000 - RNA, 19 nt, Artificial Sequence
  Description of Artificial Sequence: Synthetic oligonucleotide
  Sense strand starting at position 3878 of SEQ ID NO: 1879616
cacugagaaguuugaagua

SEQ ID NO: 1920001 - RNA, 19 nt, Artificial Sequence
  Description of Artificial Sequence: Synthetic oligonucleotide
  Antisense strand to SEQ ID NO: 1920000
uacuucaaacuucucagug

SEQ ID NO: 1920002 - RNA, 19 nt, Artificial Sequence
  Description of Artificial Sequence: Synthetic oligonucleotide
  Sense strand starting at position 950 of SEQ ID NO: 1879617
cuacucaaucaguguucua

SEQ ID NO: 1920003 - RNA, 19 nt, Artificial Sequence
  Description of Artificial Sequence: Synthetic oligonucleotide
  Antisense strand to SEQ ID NO: 1920002
uagaacacugauugaguag

SEQ ID NO: 1920004 - RNA, 19 nt, Artificial Sequence
  Description of Artificial Sequence: Synthetic oligonucleotide
  Sense strand starting at position 953 of SEQ ID NO: 1879617
cucaaucaguguucuacau

SEQ ID NO: 1920005 - RNA, 19 nt, Artificial Sequence
  Description of Artificial Sequence: Synthetic oligonucleotide
  Antisense strand to SEQ ID NO: 1920004
auguagaacacugauugag

SEQ ID NO: 1920006 - RNA, 19 nt, Artificial Sequence
  Description of Artificial Sequence: Synthetic oligonucleotide
  Sense strand starting at position 957 of SEQ ID NO: 1879617
aucaguguucuacaugcau

SEQ ID NO: 1920007 - RNA, 19 nt, Artificial Sequence
  Description of Artificial Sequence: Synthetic oligonucleotide
  Antisense strand to SEQ ID NO: 1920006
augcauguagaacacugau

SEQ ID NO: 1920008 - RNA, 19 nt, Artificial Sequence
  Description of Artificial Sequence: Synthetic oligonucleotide
  Sense strand starting at position 1199 of SEQ ID NO: 1879617
agucuagagagaugcuuua

SEQ ID NO: 1920009 - RNA, 19 nt, Artificial Sequence
  Description of Artificial Sequence: Synthetic oligonucleotide
  Antisense strand to SEQ ID NO: 1920008
uaaagcaucucucuagacu

SEQ ID NO: 1920010 - RNA, 19 nt, Artificial Sequence
  Description of Artificial Sequence: Synthetic oligonucleotide
  Sense strand starting at position 1260 of SEQ ID NO: 1879617
caguuuaacucagcaguga

SEQ ID NO: 1920011 - RNA, 19 nt, Artificial Sequence
  Description of Artificial Sequence: Synthetic oligonucleotide
  Antisense strand to SEQ ID NO: 1920010
ucacugcugaguuaaacug

SEQ ID NO: 1920012 - RNA, 19 nt, Artificial Sequence
  Description of Artificial Sequence: Synthetic oligonucleotide
  Sense strand starting at position 1271 of SEQ ID NO: 1879617
agcagugaccaauaucacu

SEQ ID NO: 1920013 - RNA, 19 nt, Artificial Sequence
  Description of Artificial Sequence: Synthetic oligonucleotide
  Antisense strand to SEQ ID NO: 1920012
agugauauuggucacugcu

SEQ ID NO: 1920014 - RNA, 19 nt, Artificial Sequence
  Description of Artificial Sequence: Synthetic oligonucleotide
  Sense strand starting at position 1373 of SEQ ID NO: 1879617
ugggauggcacuugcuaau

SEQ ID NO: 1920015 - RNA, 19 nt, Artificial Sequence
  Description of Artificial Sequence: Synthetic oligonucleotide
  Antisense strand to SEQ ID NO: 1920014
auuagcaagugccauccca

SEQ ID NO: 1920016 - RNA, 19 nt, Artificial Sequence
  Description of Artificial Sequence: Synthetic oligonucleotide
  Sense strand starting at position 1422 of SEQ ID NO: 1879617
agauuugcuuccugggaaa

SEQ ID NO: 1920017 - RNA, 19 nt, Artificial Sequence
  Description of Artificial Sequence: Synthetic oligonucleotide
  Antisense strand to SEQ ID NO: 1920016
uuucccaggaagcaaaucu

SEQ ID NO: 1920018 - RNA, 19 nt, Artificial Sequence
  Description of Artificial Sequence: Synthetic oligonucleotide
  Sense strand starting at position 1566 of SEQ ID NO: 1879617
ucuuuaugcucaguaucua

SEQ ID NO: 1920019 - RNA, 19 nt, Artificial Sequence
  Description of Artificial Sequence: Synthetic oligonucleotide
  Antisense strand to SEQ ID NO: 1920018
uagauacugagcauaaaga

SEQ ID NO: 1920020 - RNA, 19 nt, Artificial Sequence
  Description of Artificial Sequence: Synthetic oligonucleotide
  Sense strand starting at position 1578 of SEQ ID NO: 1879617
guaucuagauuaguaucaa

SEQ ID NO: 1920021 - RNA, 19 nt, Artificial Sequence
  Description of Artificial Sequence: Synthetic oligonucleotide
  Antisense strand to SEQ ID NO: 1920020
uugauacuaaucuagauac

SEQ ID NO: 1920022 - RNA, 19 nt, Artificial Sequence
  Description of Artificial Sequence: Synthetic oligonucleotide
  Sense strand starting at position 1610 of SEQ ID NO: 1879617
ccuacaagaguguaucauu

SEQ ID NO: 1920023 - RNA, 19 nt, Artificial Sequence
  Description of Artificial Sequence: Synthetic oligonucleotide
  Antisense strand to SEQ ID NO: 1920022
aaugauacacucuuguagg

SEQ ID NO: 1920024 - RNA, 19 nt, Artificial Sequence
  Description of Artificial Sequence: Synthetic oligonucleotide
  Sense strand starting at position 1664 of SEQ ID NO: 1879617
acuaguguauaccucaaua

SEQ ID NO: 1920025 - RNA, 19 nt, Artificial Sequence
  Description of Artificial Sequence: Synthetic oligonucleotide
  Antisense strand to SEQ ID NO: 1920024
uauugagguauacacuagu

SEQ ID NO: 1920026 - RNA, 19 nt, Artificial Sequence
  Description of Artificial Sequence: Synthetic oligonucleotide
  Sense strand starting at position 1764 of SEQ ID NO: 1879617
cgggcucaaacacaugauu

SEQ ID NO: 1920027 - RNA, 19 nt, Artificial Sequence
  Description of Artificial Sequence: Synthetic oligonucleotide
  Antisense strand to SEQ ID NO: 1920026
aaucauguguuugagcccg

SEQ ID NO: 1920028 - RNA, 19 nt, Artificial Sequence
  Description of Artificial Sequence: Synthetic oligonucleotide
  Sense strand starting at position 1800 of SEQ ID NO: 1879617
agcgauuuaucugaaucaa

SEQ ID NO: 1920029 - RNA, 19 nt, Artificial Sequence
  Description of Artificial Sequence: Synthetic oligonucleotide
  Antisense strand to SEQ ID NO: 1920028
uugauucagauaaaucgcu

SEQ ID NO: 1920030 - RNA, 19 nt, Artificial Sequence
  Description of Artificial Sequence: Synthetic oligonucleotide
  Sense strand starting at position 1814 of SEQ ID NO: 1879617
aucaaagguuaugcacaau

SEQ ID NO: 1920031 - RNA, 19 nt, Artificial Sequence
  Description of Artificial Sequence: Synthetic oligonucleotide
  Antisense strand to SEQ ID NO: 1920030
auugugcauaaccuuugau

SEQ ID NO: 1920032 - RNA, 19 nt, Artificial Sequence
  Description of Artificial Sequence: Synthetic oligonucleotide
  Sense strand starting at position 2013 of SEQ ID NO: 1879617
uggcaaugaagcgaugagu

SEQ ID NO: 1920033 - RNA, 19 nt, Artificial Sequence
  Description of Artificial Sequence: Synthetic oligonucleotide
  Antisense strand to SEQ ID NO: 1920032
acucaucgcuucauugcca

SEQ ID NO: 1920034 - RNA, 19 nt, Artificial Sequence
  Description of Artificial Sequence: Synthetic oligonucleotide
  Sense strand starting at position 2081 of SEQ ID NO: 1879617
auccuugcugcugaaacaa

SEQ ID NO: 1920035 - RNA, 19 nt, Artificial Sequence
  Description of Artificial Sequence: Synthetic oligonucleotide
  Antisense strand to SEQ ID NO: 1920034
uuguuucagcagcaaggau

SEQ ID NO: 1920036 - RNA, 19 nt, Artificial Sequence
  Description of Artificial Sequence: Synthetic oligonucleotide
  Sense strand starting at position 2274 of SEQ ID NO: 1879617
aagugauuccaggguguug

SEQ ID NO: 1920037 - RNA, 19 nt, Artificial Sequence
  Description of Artificial Sequence: Synthetic oligonucleotide
  Antisense strand to SEQ ID NO: 1920036
caacacccuggaaucacuu

SEQ ID NO: 1920038 - RNA, 19 nt, Artificial Sequence
  Description of Artificial Sequence: Synthetic oligonucleotide
  Sense strand starting at position 2332 of SEQ ID NO: 1879617
auuauuccugcauggauca

SEQ ID NO: 1920039 - RNA, 19 nt, Artificial Sequence
  Description of Artificial Sequence: Synthetic oligonucleotide
  Antisense strand to SEQ ID NO: 1920038
ugauccaugcaggaauaau

SEQ ID NO: 1920040 - RNA, 19 nt, Artificial Sequence
  Description of Artificial Sequence: Synthetic oligonucleotide
  Sense strand starting at position 2362 of SEQ ID NO: 1879617
agcgguaguccagagauca

SEQ ID NO: 1920041 - RNA, 19 nt, Artificial Sequence
  Description of Artificial Sequence: Synthetic oligonucleotide
  Antisense strand to SEQ ID NO: 1920040
ugaucucuggacuaccgcu

SEQ ID NO: 1920042 - RNA, 19 nt, Artificial Sequence
  Description of Artificial Sequence: Synthetic oligonucleotide
  Sense strand starting at position 2375 of SEQ ID NO: 1879617
agaucaguaggagacguau

SEQ ID NO: 1920043 - RNA, 19 nt, Artificial Sequence
  Description of Artificial Sequence: Synthetic oligonucleotide
  Antisense strand to SEQ ID NO: 1920042
auacgucuccuacugaucu

SEQ ID NO: 1920044 - RNA, 19 nt, Artificial Sequence
  Description of Artificial Sequence: Synthetic oligonucleotide
  Sense strand starting at position 2481 of SEQ ID NO: 1879617
ucauaaauugugggcaaca

SEQ ID NO: 1920045 - RNA, 19 nt, Artificial Sequence
  Description of Artificial Sequence: Synthetic oligonucleotide
  Antisense strand to SEQ ID NO: 1920044
uguugcccacaauuuauga

SEQ ID NO: 1920046 - RNA, 19 nt, Artificial Sequence
  Description of Artificial Sequence: Synthetic oligonucleotide
  Sense strand starting at position 2490 of SEQ ID NO: 1879617
gugggcaacagcuaagaua

SEQ ID NO: 1920047 - RNA, 19 nt, Artificial Sequence
  Description of Artificial Sequence: Synthetic oligonucleotide
  Antisense strand to SEQ ID NO: 1920046
uaucuuagcuguugcccac

SEQ ID NO: 1920048 - RNA, 19 nt, Artificial Sequence
  Description of Artificial Sequence: Synthetic oligonucleotide
  Sense strand starting at position 2540 of SEQ ID NO: 1879617
gcaagcggauuugugagua

SEQ ID NO: 1920049 - RNA, 19 nt, Artificial Sequence
  Description of Artificial Sequence: Synthetic oligonucleotide
  Antisense strand to SEQ ID NO: 1920048
uacucacaaauccgcuugc

SEQ ID NO: 1920050 - RNA, 19 nt, Artificial Sequence
  Description of Artificial Sequence: Synthetic oligonucleotide
  Sense strand starting at position 2544 of SEQ ID NO: 1879617
gcggauuugugaguaaugg

SEQ ID NO: 1920051 - RNA, 19 nt, Artificial Sequence
  Description of Artificial Sequence: Synthetic oligonucleotide
  Antisense strand to SEQ ID NO: 1920050
ccauuacucacaaauccgc

SEQ ID NO: 1920052 - RNA, 19 nt, Artificial Sequence
  Description of Artificial Sequence: Synthetic oligonucleotide
  Sense strand starting at position 2672 of SEQ ID NO: 1879617
gucccuucucugcaugaaa

SEQ ID NO: 1920053 - RNA, 19 nt, Artificial Sequence
  Description of Artificial Sequence: Synthetic oligonucleotide
  Antisense strand to SEQ ID NO: 1920052
uuucaugcagagaagggac

SEQ ID NO: 1920054 - RNA, 19 nt, Artificial Sequence
  Description of Artificial Sequence: Synthetic oligonucleotide
  Sense strand starting at position 2674 of SEQ ID NO: 1879617
cccuucucugcaugaaaga

SEQ ID NO: 1920055 - RNA, 19 nt, Artificial Sequence
  Description of Artificial Sequence: Synthetic oligonucleotide
  Antisense strand to SEQ ID NO: 1920054
ucuuucaugcagagaaggg

SEQ ID NO: 1920056 - RNA, 19 nt, Artificial Sequence
  Description of Artificial Sequence: Synthetic oligonucleotide
  Sense strand starting at position 2675 of SEQ ID NO: 1879617
ccuucucugcaugaaagaa

SEQ ID NO: 1920057 - RNA, 19 nt, Artificial Sequence
  Description of Artificial Sequence: Synthetic oligonucleotide
  Antisense strand to SEQ ID NO: 1920056
uucuuucaugcagagaagg

SEQ ID NO: 1920058 - RNA, 19 nt, Artificial Sequence
  Description of Artificial Sequence: Synthetic oligonucleotide
  Sense strand starting at position 2707 of SEQ ID NO: 1879617
gaaaccuguuugcugcaau

SEQ ID NO: 1920059 - RNA, 19 nt, Artificial Sequence
  Description of Artificial Sequence: Synthetic oligonucleotide
  Antisense strand to SEQ ID NO: 1920058
auugcagcaaacagguuuc

SEQ ID NO: 1920060 - RNA, 19 nt, Artificial Sequence
  Description of Artificial Sequence: Synthetic oligonucleotide
  Sense strand starting at position 2728 of SEQ ID NO: 1879617
guuugaaugccucauaccu

SEQ ID NO: 1920061 - RNA, 19 nt, Artificial Sequence
  Description of Artificial Sequence: Synthetic oligonucleotide
  Antisense strand to SEQ ID NO: 1920060
agguaugaggcauucaaac

SEQ ID NO: 1920062 - RNA, 19 nt, Artificial Sequence
  Description of Artificial Sequence: Synthetic oligonucleotide
  Sense strand starting at position 2740 of SEQ ID NO: 1879617
cauaccuggcuugguauua

SEQ ID NO: 1920063 - RNA, 19 nt, Artificial Sequence
  Description of Artificial Sequence: Synthetic oligonucleotide
  Antisense strand to SEQ ID NO: 1920062
uaauaccaagccagguaug

SEQ ID NO: 1920064 - RNA, 19 nt, Artificial Sequence
  Description of Artificial Sequence: Synthetic oligonucleotide
  Sense strand starting at position 2741 of SEQ ID NO: 1879617
auaccuggcuugguauuaa

SEQ ID NO: 1920065 - RNA, 19 nt, Artificial Sequence
  Description of Artificial Sequence: Synthetic oligonucleotide
  Antisense strand to SEQ ID NO: 1920064
uuaauaccaagccagguau

SEQ ID NO: 1920066 - RNA, 19 nt, Artificial Sequence
  Description of Artificial Sequence: Synthetic oligonucleotide
  Sense strand starting at position 2800 of SEQ ID NO: 1879617
uugaguuaauuauuggaca

SEQ ID NO: 1920067 - RNA, 19 nt, Artificial Sequence
  Description of Artificial Sequence: Synthetic oligonucleotide
  Antisense strand to SEQ ID NO: 1920066
uguccaauaauuaacucaa

SEQ ID NO: 1920068 - RNA, 19 nt, Artificial Sequence
  Description of Artificial Sequence: Synthetic oligonucleotide
  Sense strand starting at position 2884 of SEQ ID NO: 1879617
aagcaaugucacugagcau

SEQ ID NO: 1920069 - RNA, 19 nt, Artificial Sequence
  Description of Artificial Sequence: Synthetic oligonucleotide
  Antisense strand to SEQ ID NO: 1920068
augcucagugacauugcuu

SEQ ID NO: 1920070 - RNA, 19 nt, Artificial Sequence
  Description of Artificial Sequence: Synthetic oligonucleotide
  Sense strand starting at position 3307 of SEQ ID NO: 1879617
ucuugagccuucucaagua

SEQ ID NO: 1920071 - RNA, 19 nt, Artificial Sequence
  Description of Artificial Sequence: Synthetic oligonucleotide
  Antisense strand to SEQ ID NO: 1920070
uacuugagaaggcucaaga

SEQ ID NO: 1920072 - RNA, 19 nt, Artificial Sequence
  Description of Artificial Sequence: Synthetic oligonucleotide
  Sense strand starting at position 3427 of SEQ ID NO: 1879617
uguagauguccuuggccca

SEQ ID NO: 1920073 - RNA, 19 nt, Artificial Sequence
  Description of Artificial Sequence: Synthetic oligonucleotide
  Antisense strand to SEQ ID NO: 1920072
ugggccaaggacaucuaca

SEQ ID NO: 1920074 - RNA, 19 nt, Artificial Sequence
  Description of Artificial Sequence: Synthetic oligonucleotide
  Sense strand starting at position 3428 of SEQ ID NO: 1879617
guagauguccuuggcccaa

SEQ ID NO: 1920075 - RNA, 19 nt, Artificial Sequence
  Description of Artificial Sequence: Synthetic oligonucleotide
  Antisense strand to SEQ ID NO: 1920074
uugggccaaggacaucuac

SEQ ID NO: 1920076 - RNA, 19 nt, Artificial Sequence
  Description of Artificial Sequence: Synthetic oligonucleotide
  Sense strand starting at position 3430 of SEQ ID NO: 1879617
agauguccuuggcccaaua

SEQ ID NO: 1920077 - RNA, 19 nt, Artificial Sequence
  Description of Artificial Sequence: Synthetic oligonucleotide
  Antisense strand to SEQ ID NO: 1920076
uauugggccaaggacaucu

SEQ ID NO: 1920078 - RNA, 19 nt, Artificial Sequence
  Description of Artificial Sequence: Synthetic oligonucleotide
  Sense strand starting at position 3432 of SEQ ID NO: 1879617
auguccuuggcccaauaaa

SEQ ID NO: 1920079 - RNA, 19 nt, Artificial Sequence
  Description of Artificial Sequence: Synthetic oligonucleotide
  Antisense strand to SEQ ID NO: 1920078
uuuauugggccaaggacau

SEQ ID NO: 1920080 - RNA, 19 nt, Artificial Sequence
  Description of Artificial Sequence: Synthetic oligonucleotide
  Sense strand starting at position 3552 of SEQ ID NO: 1879617
gagugaugaucugaaagaa

SEQ ID NO: 1920081 - RNA, 19 nt, Artificial Sequence
  Description of Artificial Sequence: Synthetic oligonucleotide
  Antisense strand to SEQ ID NO: 1920080
uucuuucagaucaucacuc

SEQ ID NO: 1920082 - RNA, 19 nt, Artificial Sequence
  Description of Artificial Sequence: Synthetic oligonucleotide
  Sense strand starting at position 231 of SEQ ID NO: 1879618
guaugcugucaggaaucca

SEQ ID NO: 1920083 - RNA, 19 nt, Artificial Sequence
  Description of Artificial Sequence: Synthetic oligonucleotide
  Antisense strand to SEQ ID NO: 1920082
uggauuccugacagcauac

SEQ ID NO: 1920084 - RNA, 19 nt, Artificial Sequence
  Description of Artificial Sequence: Synthetic oligonucleotide
  Sense strand starting at position 601 of SEQ ID NO: 1879618
aagggaugauauugauuug

SEQ ID NO: 1920085 - RNA, 19 nt, Artificial Sequence
  Description of Artificial Sequence: Synthetic oligonucleotide
  Antisense strand to SEQ ID NO: 1920084
caaaucaauaucaucccuu

SEQ ID NO: 1920086 - RNA, 19 nt, Artificial Sequence
  Description of Artificial Sequence: Synthetic oligonucleotide
  Sense strand starting at position 770 of SEQ ID NO: 1879618
augggcuaauuccuuacaa

SEQ ID NO: 1920087 - RNA, 19 nt, Artificial Sequence
  Description of Artificial Sequence: Synthetic oligonucleotide
  Antisense strand to SEQ ID NO: 1920086
uuguaaggaauuagcccau

SEQ ID NO: 1920088 - RNA, 19 nt, Artificial Sequence
  Description of Artificial Sequence: Synthetic oligonucleotide
  Sense strand starting at position 771 of SEQ ID NO: 1879618
ugggcuaauuccuuacaau

SEQ ID NO: 1920089 - RNA, 19 nt, Artificial Sequence
  Description of Artificial Sequence: Synthetic oligonucleotide
  Antisense strand to SEQ ID NO: 1920088
auuguaaggaauuagccca

SEQ ID NO: 1920090 - RNA, 19 nt, Artificial Sequence
  Description of Artificial Sequence: Synthetic oligonucleotide
  Sense strand starting at position 772 of SEQ ID NO: 1879618
gggcuaauuccuuacaaug

SEQ ID NO: 1920091 - RNA, 19 nt, Artificial Sequence
  Description of Artificial Sequence: Synthetic oligonucleotide
  Antisense strand to SEQ ID NO: 1920090
cauuguaaggaauuagccc

SEQ ID NO: 1920092 - RNA, 19 nt, Artificial Sequence
  Description of Artificial Sequence: Synthetic oligonucleotide
  Sense strand starting at position 786 of SEQ ID NO: 1879618
caaugcaaugucuaggaca

SEQ ID NO: 1920093 - RNA, 19 nt, Artificial Sequence
  Description of Artificial Sequence: Synthetic oligonucleotide
  Antisense strand to SEQ ID NO: 1920092
uguccuagacauugcauug

SEQ ID NO: 1920094 - RNA, 19 nt, Artificial Sequence
  Description of Artificial Sequence: Synthetic oligonucleotide
  Sense strand starting at position 788 of SEQ ID NO: 1879618
augcaaugucuaggacaaa

SEQ ID NO: 1920095 - RNA, 19 nt, Artificial Sequence
  Description of Artificial Sequence: Synthetic oligonucleotide
  Antisense strand to SEQ ID NO: 1920094
uuuguccuagacauugcau

SEQ ID NO: 1920096 - RNA, 19 nt, Artificial Sequence
  Description of Artificial Sequence: Synthetic oligonucleotide
  Sense strand starting at position 838 of SEQ ID NO: 1879618
ggacacauuccaugcagga

SEQ ID NO: 1920097 - RNA, 19 nt, Artificial Sequence
  Description of Artificial Sequence: Synthetic oligonucleotide
  Antisense strand to SEQ ID NO: 1920096
uccugcauggaaugugucc

SEQ ID NO: 1920098 - RNA, 19 nt, Artificial Sequence
  Description of Artificial Sequence: Synthetic oligonucleotide
  Sense strand starting at position 953 of SEQ ID NO: 1879618
augugaaucccaggaagua

SEQ ID NO: 1920099 - RNA, 19 nt, Artificial Sequence
  Description of Artificial Sequence: Synthetic oligonucleotide
  Antisense strand to SEQ ID NO: 1920098
uacuuccugggauucacau

SEQ ID NO: 1920100 - RNA, 19 nt, Artificial Sequence
  Description of Artificial Sequence: Synthetic oligonucleotide
  Sense strand starting at position 1006 of SEQ ID NO: 1879618
cguguuagccauguuaguu

SEQ ID NO: 1920101 - RNA, 19 nt, Artificial Sequence
  Description of Artificial Sequence: Synthetic oligonucleotide
  Antisense strand to SEQ ID NO: 1920100
aacuaacauggcuaacacg

SEQ ID NO: 1920102 - RNA, 19 nt, Artificial Sequence
  Description of Artificial Sequence: Synthetic oligonucleotide
  Sense strand starting at position 1078 of SEQ ID NO: 1879618
ccugaaggucuccaacacu

SEQ ID NO: 1920103 - RNA, 19 nt, Artificial Sequence
  Description of Artificial Sequence: Synthetic oligonucleotide
  Antisense strand to SEQ ID NO: 1920102
aguguuggagaccuucagg

SEQ ID NO: 1920104 - RNA, 19 nt, Artificial Sequence
  Description of Artificial Sequence: Synthetic oligonucleotide
  Sense strand starting at position 1142 of SEQ ID NO: 1879618
accagaugacacuguguua

SEQ ID NO: 1920105 - RNA, 19 nt, Artificial Sequence
  Description of Artificial Sequence: Synthetic oligonucleotide
  Antisense strand to SEQ ID NO: 1920104
uaacacagugucaucuggu

SEQ ID NO: 1920106 - RNA, 19 nt, Artificial Sequence
  Description of Artificial Sequence: Synthetic oligonucleotide
  Sense strand starting at position 1145 of SEQ ID NO: 1879618
agaugacacuguguuacua

SEQ ID NO: 1920107 - RNA, 19 nt, Artificial Sequence
  Description of Artificial Sequence: Synthetic oligonucleotide
  Antisense strand to SEQ ID NO: 1920106
uaguaacacagugucaucu

SEQ ID NO: 1920108 - RNA, 19 nt, Artificial Sequence
  Description of Artificial Sequence: Synthetic oligonucleotide
  Sense strand starting at position 1158 of SEQ ID NO: 1879618
uuacuagaguggucaauag

SEQ ID NO: 1920109 - RNA, 19 nt, Artificial Sequence
  Description of Artificial Sequence: Synthetic oligonucleotide
  Antisense strand to SEQ ID NO: 1920108
cuauugaccacucuaguaa

SEQ ID NO: 1920110 - RNA, 19 nt, Artificial Sequence
  Description of Artificial Sequence: Synthetic oligonucleotide
  Sense strand starting at position 1162 of SEQ ID NO: 1879618
uagaguggucaauaggcaa

SEQ ID NO: 1920111 - RNA, 19 nt, Artificial Sequence
  Description of Artificial Sequence: Synthetic oligonucleotide
  Antisense strand to SEQ ID NO: 1920110
uugccuauugaccacucua

SEQ ID NO: 1920112 - RNA, 19 nt, Artificial Sequence
  Description of Artificial Sequence: Synthetic oligonucleotide
  Sense strand starting at position 1312 of SEQ ID NO: 1879618
gaggcagaggccgaauaau

SEQ ID NO: 1920113 - RNA, 19 nt, Artificial Sequence
  Description of Artificial Sequence: Synthetic oligonucleotide
  Antisense strand to SEQ ID NO: 1920112
auuauucggccucugccuc

SEQ ID NO: 1920114 - RNA, 19 nt, Artificial Sequence
  Description of Artificial Sequence: Synthetic oligonucleotide
  Sense strand starting at position 1382 of SEQ ID NO: 1879618
guguuaaaccaauaacuug

SEQ ID NO: 1920115 - RNA, 19 nt, Artificial Sequence
  Description of Artificial Sequence: Synthetic oligonucleotide
  Antisense strand to SEQ ID NO: 1920114
caaguuauugguuuaacac

SEQ ID NO: 1920116 - RNA, 19 nt, Artificial Sequence
  Description of Artificial Sequence: Synthetic oligonucleotide
  Sense strand starting at position 1425 of SEQ ID NO: 1879618
agaauucucuguuucuaag

SEQ ID NO: 1920117 - RNA, 19 nt, Artificial Sequence
  Description of Artificial Sequence: Synthetic oligonucleotide
  Antisense strand to SEQ ID NO: 1920116
cuuagaaacagagaauucu

SEQ ID NO: 1920118 - RNA, 19 nt, Artificial Sequence
  Description of Artificial Sequence: Synthetic oligonucleotide
  Sense strand starting at position 1449 of SEQ ID NO: 1879618
agcucugagcauugagaaa

SEQ ID NO: 1920119 - RNA, 19 nt, Artificial Sequence
  Description of Artificial Sequence: Synthetic oligonucleotide
  Antisense strand to SEQ ID NO: 1920118
uuucucaaugcucagagcu

SEQ ID NO: 1920120 - RNA, 19 nt, Artificial Sequence
  Description of Artificial Sequence: Synthetic oligonucleotide
  Sense strand starting at position 2214 of SEQ ID NO: 1879618
acggaauucgauuacccga

SEQ ID NO: 1920121 - RNA, 19 nt, Artificial Sequence
  Description of Artificial Sequence: Synthetic oligonucleotide
  Antisense strand to SEQ ID NO: 1920120
ucggguaaucgaauuccgu

SEQ ID NO: 1920122 - RNA, 19 nt, Artificial Sequence
  Description of Artificial Sequence: Synthetic oligonucleotide
  Sense strand starting at position 2216 of SEQ ID NO: 1879618
ggaauucgauuacccgaga

SEQ ID NO: 1920123 - RNA, 19 nt, Artificial Sequence
  Description of Artificial Sequence: Synthetic oligonucleotide
  Antisense strand to SEQ ID NO: 1920122
ucucggguaaucgaauucc

SEQ ID NO: 1920124 - RNA, 19 nt, Artificial Sequence
  Description of Artificial Sequence: Synthetic oligonucleotide
  Sense strand starting at position 2217 of SEQ ID NO: 1879618
gaauucgauuacccgagau

SEQ ID NO: 1920125 - RNA, 19 nt, Artificial Sequence
  Description of Artificial Sequence: Synthetic oligonucleotide
  Antisense strand to SEQ ID NO: 1920124
aucucggguaaucgaauuc

SEQ ID NO: 1920126 - RNA, 19 nt, Artificial Sequence
  Description of Artificial Sequence: Synthetic oligonucleotide
  Sense strand starting at position 2219 of SEQ ID NO: 1879618
auucgauuacccgagauua

SEQ ID NO: 1920127 - RNA, 19 nt, Artificial Sequence
  Description of Artificial Sequence: Synthetic oligonucleotide
  Antisense strand to SEQ ID NO: 1920126
uaaucucggguaaucgaau

SEQ ID NO: 1920128 - RNA, 19 nt, Artificial Sequence
  Description of Artificial Sequence: Synthetic oligonucleotide
  Sense strand starting at position 2221 of SEQ ID NO: 1879618
ucgauuacccgagauuaac

SEQ ID NO: 1920129 - RNA, 19 nt, Artificial Sequence
  Description of Artificial Sequence: Synthetic oligonucleotide
  Antisense strand to SEQ ID NO: 1920128
guuaaucucggguaaucga

SEQ ID NO: 1920130 - RNA, 19 nt, Artificial Sequence
  Description of Artificial Sequence: Synthetic oligonucleotide
  Sense strand starting at position 2232 of SEQ ID NO: 1879618
agauuaaccuucuuuggca

SEQ ID NO: 1920131 - RNA, 19 nt, Artificial Sequence
  Description of Artificial Sequence: Synthetic oligonucleotide
  Antisense strand to SEQ ID NO: 1920130
ugccaaagaagguuaaucu

SEQ ID NO: 1920132 - RNA, 19 nt, Artificial Sequence
  Description of Artificial Sequence: Synthetic oligonucleotide
  Sense strand starting at position 2256 of SEQ ID NO: 1879618
auaacaaauuugggagacu

SEQ ID NO: 1920133 - RNA, 19 nt, Artificial Sequence
  Description of Artificial Sequence: Synthetic oligonucleotide
  Antisense strand to SEQ ID NO: 1920132
agucucccaaauuuguuau

SEQ ID NO: 1920134 - RNA, 19 nt, Artificial Sequence
  Description of Artificial Sequence: Synthetic oligonucleotide
  Sense strand starting at position 2326 of SEQ ID NO: 1879618
agaugugaccuggguauau

SEQ ID NO: 1920135 - RNA, 19 nt, Artificial Sequence
  Description of Artificial Sequence: Synthetic oligonucleotide
  Antisense strand to SEQ ID NO: 1920134
auauacccaggucacaucu

SEQ ID NO: 1920136 - RNA, 19 nt, Artificial Sequence
  Description of Artificial Sequence: Synthetic oligonucleotide
  Sense strand starting at position 2652 of SEQ ID NO: 1879618
ugagaccuucucuaucgau

SEQ ID NO: 1920137 - RNA, 19 nt, Artificial Sequence
  Description of Artificial Sequence: Synthetic oligonucleotide
  Antisense strand to SEQ ID NO: 1920136
aucgauagagaaggucuca

SEQ ID NO: 1920138 - RNA, 19 nt, Artificial Sequence
  Description of Artificial Sequence: Synthetic oligonucleotide
  Sense strand starting at position 2659 of SEQ ID NO: 1879618
uucucuaucgauuagauag

SEQ ID NO: 1920139 - RNA, 19 nt, Artificial Sequence
  Description of Artificial Sequence: Synthetic oligonucleotide
  Antisense strand to SEQ ID NO: 1920138
cuaucuaaucgauagagaa

SEQ ID NO: 1920140 - RNA, 19 nt, Artificial Sequence
  Description of Artificial Sequence: Synthetic oligonucleotide
  Sense strand starting at position 3063 of SEQ ID NO: 1879618
aggugaaggcuuuaaaguc

SEQ ID NO: 1920141 - RNA, 19 nt, Artificial Sequence
  Description of Artificial Sequence: Synthetic oligonucleotide
  Antisense strand to SEQ ID NO: 1920140
gacuuuaaagccuucaccu

SEQ ID NO: 1920142 - RNA, 19 nt, Artificial Sequence
  Description of Artificial Sequence: Synthetic oligonucleotide
  Sense strand starting at position 3181 of SEQ ID NO: 1879618
guugaaugagccuacacaa

SEQ ID NO: 1920143 - RNA, 19 nt, Artificial Sequence
  Description of Artificial Sequence: Synthetic oligonucleotide
  Antisense strand to SEQ ID NO: 1920142
uuguguaggcucauucaac

SEQ ID NO: 1920144 - RNA, 19 nt, Artificial Sequence
  Description of Artificial Sequence: Synthetic oligonucleotide
  Sense strand starting at position 3253 of SEQ ID NO: 1879618
ggaagagcauugguucuca

SEQ ID NO: 1920145 - RNA, 19 nt, Artificial Sequence
  Description of Artificial Sequence: Synthetic oligonucleotide
  Antisense strand to SEQ ID NO: 1920144
ugagaaccaaugcucuucc

SEQ ID NO: 1920146 - RNA, 19 nt, Artificial Sequence
  Description of Artificial Sequence: Synthetic oligonucleotide
  Sense strand starting at position 3319 of SEQ ID NO: 1879618
aaugauuguugacucgaag

SEQ ID NO: 1920147 - RNA, 19 nt, Artificial Sequence
  Description of Artificial Sequence: Synthetic oligonucleotide
  Antisense strand to SEQ ID NO: 1920146
cuucgagucaacaaucauu

SEQ ID NO: 1920148 - RNA, 19 nt, Artificial Sequence
  Description of Artificial Sequence: Synthetic oligonucleotide
  Sense strand starting at position 3425 of SEQ ID NO: 1879618
uggguagaucucuauugca

SEQ ID NO: 1920149 - RNA, 19 nt, Artificial Sequence
  Description of Artificial Sequence: Synthetic oligonucleotide
  Antisense strand to SEQ ID NO: 1920148
ugcaauagagaucuaccca

SEQ ID NO: 1920150 - RNA, 19 nt, Artificial Sequence
  Description of Artificial Sequence: Synthetic oligonucleotide
  Sense strand starting at position 3461 of SEQ ID NO: 1879618
auaggcuagcuauauaaga

SEQ ID NO: 1920151 - RNA, 19 nt, Artificial Sequence
  Description of Artificial Sequence: Synthetic oligonucleotide
  Antisense strand to SEQ ID NO: 1920150
ucuuauauagcuagccuau

SEQ ID NO: 1920152 - RNA, 19 nt, Artificial Sequence
  Description of Artificial Sequence: Synthetic oligonucleotide
  Sense strand starting at position 3597 of SEQ ID NO: 1879618
cacuuauuugcggguuuaa

SEQ ID NO: 1920153 - RNA, 19 nt, Artificial Sequence
  Description of Artificial Sequence: Synthetic oligonucleotide
  Antisense strand to SEQ ID NO: 1920152
uuaaacccgcaaauaagug

SEQ ID NO: 1920154 - RNA, 19 nt, Artificial Sequence
  Description of Artificial Sequence: Synthetic oligonucleotide
  Sense strand starting at position 3674 of SEQ ID NO: 1879618
gcagaauaaucccuaaguu

SEQ ID NO: 1920155 - RNA, 19 nt, Artificial Sequence
  Description of Artificial Sequence: Synthetic oligonucleotide
  Antisense strand to SEQ ID NO: 1920154
aacuuagggauuauucugc

SEQ ID NO: 1920156 - RNA, 19 nt, Artificial Sequence
  Description of Artificial Sequence: Synthetic oligonucleotide
  Sense strand starting at position 3858 of SEQ ID NO: 1879618
agguccucaccuuggauau

SEQ ID NO: 1920157 - RNA, 19 nt, Artificial Sequence
  Description of Artificial Sequence: Synthetic oligonucleotide
  Antisense strand to SEQ ID NO: 1920156
auauccaaggugaggaccu

SEQ ID NO: 1920158 - RNA, 19 nt, Artificial Sequence
  Description of Artificial Sequence: Synthetic oligonucleotide
  Sense strand starting at position 3859 of SEQ ID NO: 1879618
gguccucaccuuggauaua

SEQ ID NO: 1920159 - RNA, 19 nt, Artificial Sequence
  Description of Artificial Sequence: Synthetic oligonucleotide
  Antisense strand to SEQ ID NO: 1920158
uauauccaaggugaggacc

SEQ ID NO: 1920160 - RNA, 19 nt, Artificial Sequence
  Description of Artificial Sequence: Synthetic oligonucleotide
  Sense strand starting at position 3911 of SEQ ID NO: 1879618
caaggaauuugagaaguca

SEQ ID NO: 1920161 - RNA, 19 nt, Artificial Sequence
  Description of Artificial Sequence: Synthetic oligonucleotide
  Antisense strand to SEQ ID NO: 1920160
ugacuucucaaauuccuug

SEQ ID NO: 1920162 - RNA, 19 nt, Artificial Sequence
  Description of Artificial Sequence: Synthetic oligonucleotide
  Sense strand starting at position 65 of SEQ ID NO: 1879619
cuuugagccucauugacaa

SEQ ID NO: 1920163 - RNA, 19 nt, Artificial Sequence
  Description of Artificial Sequence: Synthetic oligonucleotide
  Antisense strand to SEQ ID NO: 1920162
uugucaaugaggcucaaag

SEQ ID NO: 1920164 - RNA, 19 nt, Artificial Sequence
  Description of Artificial Sequence: Synthetic oligonucleotide
  Sense strand starting at position 237 of SEQ ID NO: 1879619
ggugguguacaguaagauu

SEQ ID NO: 1920165 - RNA, 19 nt, Artificial Sequence
  Description of Artificial Sequence: Synthetic oligonucleotide
  Antisense strand to SEQ ID NO: 1920164
aaucuuacuguacaccacc

SEQ ID NO: 1920166 - RNA, 19 nt, Artificial Sequence
  Description of Artificial Sequence: Synthetic oligonucleotide
  Sense strand starting at position 493 of SEQ ID NO: 1879619
aucuaugggcuuuggagaa

SEQ ID NO: 1920167 - RNA, 19 nt, Artificial Sequence
  Description of Artificial Sequence: Synthetic oligonucleotide
  Antisense strand to SEQ ID NO: 1920166
uucuccaaagcccauagau

SEQ ID NO: 1920168 - RNA, 19 nt, Artificial Sequence
  Description of Artificial Sequence: Synthetic oligonucleotide
  Sense strand starting at position 540 of SEQ ID NO: 1879619
uaacuaauggcauguagga

SEQ ID NO: 1920169 - RNA, 19 nt, Artificial Sequence
  Description of Artificial Sequence: Synthetic oligonucleotide
  Antisense strand to SEQ ID NO: 1920168
uccuacaugccauuaguua

SEQ ID NO: 1920170 - RNA, 19 nt, Artificial Sequence
  Description of Artificial Sequence: Synthetic oligonucleotide
  Sense strand starting at position 558 of SEQ ID NO: 1879619
accauucuuguugauggua

SEQ ID NO: 1920171 - RNA, 19 nt, Artificial Sequence
  Description of Artificial Sequence: Synthetic oligonucleotide
  Antisense strand to SEQ ID NO: 1920170
uaccaucaacaagaauggu

SEQ ID NO: 1920172 - RNA, 19 nt, Artificial Sequence
  Description of Artificial Sequence: Synthetic oligonucleotide
  Sense strand starting at position 619 of SEQ ID NO: 1879619
gcaacuaauguugauagua

SEQ ID NO: 1920173 - RNA, 19 nt, Artificial Sequence
  Description of Artificial Sequence: Synthetic oligonucleotide
  Antisense strand to SEQ ID NO: 1920172
uacuaucaacauuaguugc

SEQ ID NO: 1920174 - RNA, 19 nt, Artificial Sequence
  Description of Artificial Sequence: Synthetic oligonucleotide
  Sense strand starting at position 628 of SEQ ID NO: 1879619
guugauaguaaacaguuua

SEQ ID NO: 1920175 - RNA, 19 nt, Artificial Sequence
  Description of Artificial Sequence: Synthetic oligonucleotide
  Antisense strand to SEQ ID NO: 1920174
uaaacuguuuacuaucaac

SEQ ID NO: 1920176 - RNA, 19 nt, Artificial Sequence
  Description of Artificial Sequence: Synthetic oligonucleotide
  Sense strand starting at position 639 of SEQ ID NO: 1879619
acaguuuacuuaccuguaa

SEQ ID NO: 1920177 - RNA, 19 nt, Artificial Sequence
  Description of Artificial Sequence: Synthetic oligonucleotide
  Antisense strand to SEQ ID NO: 1920176
uuacagguaaguaaacugu

SEQ ID NO: 1920178 - RNA, 19 nt, Artificial Sequence
  Description of Artificial Sequence: Synthetic oligonucleotide
  Sense strand starting at position 643 of SEQ ID NO: 1879619
uuuacuuaccuguaaguag

SEQ ID NO: 1920179 - RNA, 19 nt, Artificial Sequence
  Description of Artificial Sequence: Synthetic oligonucleotide
  Antisense strand to SEQ ID NO: 1920178
cuacuuacagguaaguaaa

SEQ ID NO: 1920180 - RNA, 19 nt, Artificial Sequence
  Description of Artificial Sequence: Synthetic oligonucleotide
  Sense strand starting at position 727 of SEQ ID NO: 1879619
auggaaggccaguguuuaa

SEQ ID NO: 1920181 - RNA, 19 nt, Artificial Sequence
  Description of Artificial Sequence: Synthetic oligonucleotide
  Antisense strand to SEQ ID NO: 1920180
uuaaacacuggccuuccau

SEQ ID NO: 1920182 - RNA, 19 nt, Artificial Sequence
  Description of Artificial Sequence: Synthetic oligonucleotide
  Sense strand starting at position 1287 of SEQ ID NO: 1879619
agaugaacauuugaguugu

SEQ ID NO: 1920183 - RNA, 19 nt, Artificial Sequence
  Description of Artificial Sequence: Synthetic oligonucleotide
  Antisense strand to SEQ ID NO: 1920182
acaacucaaauguucaucu

SEQ ID NO: 1920184 - RNA, 19 nt, Artificial Sequence
  Description of Artificial Sequence: Synthetic oligonucleotide
  Sense strand starting at position 1317 of SEQ ID NO: 1879619
gguacuugugaauaaugcu

SEQ ID NO: 1920185 - RNA, 19 nt, Artificial Sequence
  Description of Artificial Sequence: Synthetic oligonucleotide
  Antisense strand to SEQ ID NO: 1920184
agcauuauucacaaguacc

SEQ ID NO: 1920186 - RNA, 19 nt, Artificial Sequence
  Description of Artificial Sequence: Synthetic oligonucleotide
  Sense strand starting at position 1336 of SEQ ID NO: 1879619
gcuacagaacacugaagua

SEQ ID NO: 1920187 - RNA, 19 nt, Artificial Sequence
  Description of Artificial Sequence: Synthetic oligonucleotide
  Antisense strand to SEQ ID NO: 1920186
uacuucaguguucuguagc

SEQ ID NO: 1920188 - RNA, 19 nt, Artificial Sequence
  Description of Artificial Sequence: Synthetic oligonucleotide
  Sense strand starting at position 1571 of SEQ ID NO: 1879619
ccauucuaauggguauaua

SEQ ID NO: 1920189 - RNA, 19 nt, Artificial Sequence
  Description of Artificial Sequence: Synthetic oligonucleotide
  Antisense strand to SEQ ID NO: 1920188
uauauacccauuagaaugg

SEQ ID NO: 1920190 - RNA, 19 nt, Artificial Sequence
  Description of Artificial Sequence: Synthetic oligonucleotide
  Sense strand starting at position 1825 of SEQ ID NO: 1879619
acagcaaaugcucaggaua

SEQ ID NO: 1920191 - RNA, 19 nt, Artificial Sequence
  Description of Artificial Sequence: Synthetic oligonucleotide
  Antisense strand to SEQ ID NO: 1920190
uauccugagcauuugcugu

SEQ ID NO: 1920192 - RNA, 19 nt, Artificial Sequence
  Description of Artificial Sequence: Synthetic oligonucleotide
  Sense strand starting at position 1828 of SEQ ID NO: 1879619
gcaaaugcucaggauauaa

SEQ ID NO: 1920193 - RNA, 19 nt, Artificial Sequence
  Description of Artificial Sequence: Synthetic oligonucleotide
  Antisense strand to SEQ ID NO: 1920192
uuauauccugagcauuugc

SEQ ID NO: 1920194 - RNA, 19 nt, Artificial Sequence
  Description of Artificial Sequence: Synthetic oligonucleotide
  Sense strand starting at position 1851 of SEQ ID NO: 1879619
auccauuagucauuacaga

SEQ ID NO: 1920195 - RNA, 19 nt, Artificial Sequence
  Description of Artificial Sequence: Synthetic oligonucleotide
  Antisense strand to SEQ ID NO: 1920194
ucuguaaugacuaauggau

SEQ ID NO: 1920196 - RNA, 19 nt, Artificial Sequence
  Description of Artificial Sequence: Synthetic oligonucleotide
  Sense strand starting at position 1881 of SEQ ID NO: 1879619
ggcugacacacguagaaua

SEQ ID NO: 1920197 - RNA, 19 nt, Artificial Sequence
  Description of Artificial Sequence: Synthetic oligonucleotide
  Antisense strand to SEQ ID NO: 1920196
uauucuacgugugucagcc

SEQ ID NO: 1920198 - RNA, 19 nt, Artificial Sequence
  Description of Artificial Sequence: Synthetic oligonucleotide
  Sense strand starting at position 1892 of SEQ ID NO: 1879619
guagaauaccauuauuagc

SEQ ID NO: 1920199 - RNA, 19 nt, Artificial Sequence
  Description of Artificial Sequence: Synthetic oligonucleotide
  Antisense strand to SEQ ID NO: 1920198
gcuaauaaugguauucuac

SEQ ID NO: 1920200 - RNA, 19 nt, Artificial Sequence
  Description of Artificial Sequence: Synthetic oligonucleotide
  Sense strand starting at position 2221 of SEQ ID NO: 1879619
ucuacagcucgggaaacau

SEQ ID NO: 1920201 - RNA, 19 nt, Artificial Sequence
  Description of Artificial Sequence: Synthetic oligonucleotide
  Antisense strand to SEQ ID NO: 1920200
auguuucccgagcuguaga

SEQ ID NO: 1920202 - RNA, 19 nt, Artificial Sequence
  Description of Artificial Sequence: Synthetic oligonucleotide
  Sense strand starting at position 2522 of SEQ ID NO: 1879619
ucuucugcuagagggaaau

SEQ ID NO: 1920203 - RNA, 19 nt, Artificial Sequence
  Description of Artificial Sequence: Synthetic oligonucleotide
  Antisense strand to SEQ ID NO: 1920202
auuucccucuagcagaaga

SEQ ID NO: 1920204 - RNA, 19 nt, Artificial Sequence
  Description of Artificial Sequence: Synthetic oligonucleotide
  Sense strand starting at position 2583 of SEQ ID NO: 1879619
cguaauugcccauugcuuu

SEQ ID NO: 1920205 - RNA, 19 nt, Artificial Sequence
  Description of Artificial Sequence: Synthetic oligonucleotide
  Antisense strand to SEQ ID NO: 1920204
aaagcaaugggcaauuacg

SEQ ID NO: 1920206 - RNA, 19 nt, Artificial Sequence
  Description of Artificial Sequence: Synthetic oligonucleotide
  Sense strand starting at position 2647 of SEQ ID NO: 1879619
cuuagauacuguuuacaga

SEQ ID NO: 1920207 - RNA, 19 nt, Artificial Sequence
  Description of Artificial Sequence: Synthetic oligonucleotide
  Antisense strand to SEQ ID NO: 1920206
ucuguaaacaguaucuaag

SEQ ID NO: 1920208 - RNA, 19 nt, Artificial Sequence
  Description of Artificial Sequence: Synthetic oligonucleotide
  Sense strand starting at position 2657 of SEQ ID NO: 1879619
guuuacagauuaucucuuu

SEQ ID NO: 1920209 - RNA, 19 nt, Artificial Sequence
  Description of Artificial Sequence: Synthetic oligonucleotide
  Antisense strand to SEQ ID NO: 1920208
aaagagauaaucuguaaac

SEQ ID NO: 1920210 - RNA, 19 nt, Artificial Sequence
  Description of Artificial Sequence: Synthetic oligonucleotide
  Sense strand starting at position 2843 of SEQ ID NO: 1879619
gugcuuaaugcuguaucgu

SEQ ID NO: 1920211 - RNA, 19 nt, Artificial Sequence
  Description of Artificial Sequence: Synthetic oligonucleotide
  Antisense strand to SEQ ID NO: 1920210
acgauacagcauuaagcac

SEQ ID NO: 1920212 - RNA, 19 nt, Artificial Sequence
  Description of Artificial Sequence: Synthetic oligonucleotide
  Sense strand starting at position 2912 of SEQ ID NO: 1879619
ugaacuucccacuggauua

SEQ ID NO: 1920213 - RNA, 19 nt, Artificial Sequence
  Description of Artificial Sequence: Synthetic oligonucleotide
  Antisense strand to SEQ ID NO: 1920212
uaauccagugggaaguuca

SEQ ID NO: 1920214 - RNA, 19 nt, Artificial Sequence
  Description of Artificial Sequence: Synthetic oligonucleotide
  Sense strand starting at position 2983 of SEQ ID NO: 1879619
guaagcucucaggaaaugu

SEQ ID NO: 1920215 - RNA, 19 nt, Artificial Sequence
  Description of Artificial Sequence: Synthetic oligonucleotide
  Antisense strand to SEQ ID NO: 1920214
acauuuccugagagcuuac

SEQ ID NO: 1920216 - RNA, 19 nt, Artificial Sequence
  Description of Artificial Sequence: Synthetic oligonucleotide
  Sense strand starting at position 3067 of SEQ ID NO: 1879619
auccaauuaguuugaguca

SEQ ID NO: 1920217 - RNA, 19 nt, Artificial Sequence
  Description of Artificial Sequence: Synthetic oligonucleotide
  Antisense strand to SEQ ID NO: 1920216
ugacucaaacuaauuggau

SEQ ID NO: 1920218 - RNA, 19 nt, Artificial Sequence
  Description of Artificial Sequence: Synthetic oligonucleotide
  Sense strand starting at position 3124 of SEQ ID NO: 1879619
ugccaagugaauuguaaga

SEQ ID NO: 1920219 - RNA, 19 nt, Artificial Sequence
  Description of Artificial Sequence: Synthetic oligonucleotide
  Antisense strand to SEQ ID NO: 1920218
ucuuacaauucacuuggca

SEQ ID NO: 1920220 - RNA, 19 nt, Artificial Sequence
  Description of Artificial Sequence: Synthetic oligonucleotide
  Sense strand starting at position 3152 of SEQ ID NO: 1879619
gugguuaggcauuauuaag

SEQ ID NO: 1920221 - RNA, 19 nt, Artificial Sequence
  Description of Artificial Sequence: Synthetic oligonucleotide
  Antisense strand to SEQ ID NO: 1920220
cuuaauaaugccuaaccac

SEQ ID NO: 1920222 - RNA, 19 nt, Artificial Sequence
  Description of Artificial Sequence: Synthetic oligonucleotide
  Sense strand starting at position 3238 of SEQ ID NO: 1879619
cuuaaaugggacggugauu

SEQ ID NO: 1920223 - RNA, 19 nt, Artificial Sequence
  Description of Artificial Sequence: Synthetic oligonucleotide
  Antisense strand to SEQ ID NO: 1920222
aaucaccgucccauuuaag

SEQ ID NO: 1920224 - RNA, 19 nt, Artificial Sequence
  Description of Artificial Sequence: Synthetic oligonucleotide
  Sense strand starting at position 3249 of SEQ ID NO: 1879619
cggugauuggaagggaauu

SEQ ID NO: 1920225 - RNA, 19 nt, Artificial Sequence
  Description of Artificial Sequence: Synthetic oligonucleotide
  Antisense strand to SEQ ID NO: 1920224
aauucccuuccaaucaccg

SEQ ID NO: 1920226 - RNA, 19 nt, Artificial Sequence
  Description of Artificial Sequence: Synthetic oligonucleotide
  Sense strand starting at position 3296 of SEQ ID NO: 1879619
agggcaauugugggaggua

SEQ ID NO: 1920227 - RNA, 19 nt, Artificial Sequence
  Description of Artificial Sequence: Synthetic oligonucleotide
  Antisense strand to SEQ ID NO: 1920226
uaccucccacaauugcccu

SEQ ID NO: 1920228 - RNA, 19 nt, Artificial Sequence
  Description of Artificial Sequence: Synthetic oligonucleotide
  Sense strand starting at position 3373 of SEQ ID NO: 1879619
gcuguuacugugaguagug

SEQ ID NO: 1920229 - RNA, 19 nt, Artificial Sequence
  Description of Artificial Sequence: Synthetic oligonucleotide
  Antisense strand to SEQ ID NO: 1920228
cacuacucacaguaacagc

SEQ ID NO: 1920230 - RNA, 19 nt, Artificial Sequence
  Description of Artificial Sequence: Synthetic oligonucleotide
  Sense strand starting at position 3544 of SEQ ID NO: 1879619
aggugacguguguaagaug

SEQ ID NO: 1920231 - RNA, 19 nt, Artificial Sequence
  Description of Artificial Sequence: Synthetic oligonucleotide
  Antisense strand to SEQ ID NO: 1920230
caucuuacacacgucaccu

SEQ ID NO: 1920232 - RNA, 19 nt, Artificial Sequence
  Description of Artificial Sequence: Synthetic oligonucleotide
  Sense strand starting at position 3558 of SEQ ID NO: 1879619
agaugacagcgguacuuaa

SEQ ID NO: 1920233 - RNA, 19 nt, Artificial Sequence
  Description of Artificial Sequence: Synthetic oligonucleotide
  Antisense strand to SEQ ID NO: 1920232
uuaaguaccgcugucaucu

SEQ ID NO: 1920234 - RNA, 19 nt, Artificial Sequence
  Description of Artificial Sequence: Synthetic oligonucleotide
  Sense strand starting at position 3719 of SEQ ID NO: 1879619
cuggaccucuuugcuuaaa

SEQ ID NO: 1920235 - RNA, 19 nt, Artificial Sequence
  Description of Artificial Sequence: Synthetic oligonucleotide
  Antisense strand to SEQ ID NO: 1920234
uuuaagcaaagagguccag

SEQ ID NO: 1920236 - RNA, 19 nt, Artificial Sequence
  Description of Artificial Sequence: Synthetic oligonucleotide
  Sense strand starting at position 3871 of SEQ ID NO: 1879619
caaguaugcgaguauaaug

SEQ ID NO: 1920237 - RNA, 19 nt, Artificial Sequence
  Description of Artificial Sequence: Synthetic oligonucleotide
  Antisense strand to SEQ ID NO: 1920236
cauuauacucgcauacuug

SEQ ID NO: 1920238 - RNA, 19 nt, Artificial Sequence
  Description of Artificial Sequence: Synthetic oligonucleotide
  Sense strand starting at position 3881 of SEQ ID NO: 1879619
aguauaaugugauuccuau

SEQ ID NO: 1920239 - RNA, 19 nt, Artificial Sequence
  Description of Artificial Sequence: Synthetic oligonucleotide
  Antisense strand to SEQ ID NO: 1920238
auaggaaucacauuauacu

SEQ ID NO: 1920240 - RNA, 19 nt, Artificial Sequence
  Description of Artificial Sequence: Synthetic oligonucleotide
  Sense strand starting at position 3972 of SEQ ID NO: 1879619
aggucuuuaucauccagua

SEQ ID NO: 1920241 - RNA, 19 nt, Artificial Sequence
  Description of Artificial Sequence: Synthetic oligonucleotide
  Antisense strand to SEQ ID NO: 1920240
uacuggaugauaaagaccu

SEQ ID NO: 1920242 - RNA, 19 nt, Artificial Sequence
  Description of Artificial Sequence: Synthetic oligonucleotide
  Sense strand starting at position 166 of SEQ ID NO: 1879620
aggaguuaguguucaaugg

SEQ ID NO: 1920243 - RNA, 19 nt, Artificial Sequence
  Description of Artificial Sequence: Synthetic oligonucleotide
  Antisense strand to SEQ ID NO: 1920242
ccauugaacacuaacuccu

SEQ ID NO: 1920244 - RNA, 19 nt, Artificial Sequence
  Description of Artificial Sequence: Synthetic oligonucleotide
  Sense strand starting at position 515 of SEQ ID NO: 1879620
aaagauauuccaggcugag

SEQ ID NO: 1920245 - RNA, 19 nt, Artificial Sequence
  Description of Artificial Sequence: Synthetic oligonucleotide
  Antisense strand to SEQ ID NO: 1920244
cucagccuggaauaucuuu

SEQ ID NO: 1920246 - RNA, 19 nt, Artificial Sequence
  Description of Artificial Sequence: Synthetic oligonucleotide
  Sense strand starting at position 555 of SEQ ID NO: 1879620
aggcaauuccaaggucaua

SEQ ID NO: 1920247 - RNA, 19 nt, Artificial Sequence
  Description of Artificial Sequence: Synthetic oligonucleotide
  Antisense strand to SEQ ID NO: 1920246
uaugaccuuggaauugccu

SEQ ID NO: 1920248 - RNA, 19 nt, Artificial Sequence
  Description of Artificial Sequence: Synthetic oligonucleotide
  Sense strand starting at position 725 of SEQ ID NO: 1879620
uccauuaagcuggauauau

SEQ ID NO: 1920249 - RNA, 19 nt, Artificial Sequence
  Description of Artificial Sequence: Synthetic oligonucleotide
  Antisense strand to SEQ ID NO: 1920248
auauauccagcuuaaugga

SEQ ID NO: 1920250 - RNA, 19 nt, Artificial Sequence
  Description of Artificial Sequence: Synthetic oligonucleotide
  Sense strand starting at position 735 of SEQ ID NO: 1879620
uggauauaugcccaagcuu

SEQ ID NO: 1920251 - RNA, 19 nt, Artificial Sequence
  Description of Artificial Sequence: Synthetic oligonucleotide
  Antisense strand to SEQ ID NO: 1920250
aagcuugggcauauaucca

SEQ ID NO: 1920252 - RNA, 19 nt, Artificial Sequence
  Description of Artificial Sequence: Synthetic oligonucleotide
  Sense strand starting at position 943 of SEQ ID NO: 1879620
ggaagcuaacgaugugaga

SEQ ID NO: 1920253 - RNA, 19 nt, Artificial Sequence
  Description of Artificial Sequence: Synthetic oligonucleotide
  Antisense strand to SEQ ID NO: 1920252
ucucacaucguuagcuucc

SEQ ID NO: 1920254 - RNA, 19 nt, Artificial Sequence
  Description of Artificial Sequence: Synthetic oligonucleotide
  Sense strand starting at position 956 of SEQ ID NO: 1879620
gugagauagccuuagcaua

SEQ ID NO: 1920255 - RNA, 19 nt, Artificial Sequence
  Description of Artificial Sequence: Synthetic oligonucleotide
  Antisense strand to SEQ ID NO: 1920254
uaugcuaaggcuaucucac

SEQ ID NO: 1920256 - RNA, 19 nt, Artificial Sequence
  Description of Artificial Sequence: Synthetic oligonucleotide
  Sense strand starting at position 958 of SEQ ID NO: 1879620
gagauagccuuagcauaga

SEQ ID NO: 1920257 - RNA, 19 nt, Artificial Sequence
  Description of Artificial Sequence: Synthetic oligonucleotide
  Antisense strand to SEQ ID NO: 1920256
ucuaugcuaaggcuaucuc

SEQ ID NO: 1920258 - RNA, 19 nt, Artificial Sequence
  Description of Artificial Sequence: Synthetic oligonucleotide
  Sense strand starting at position 1041 of SEQ ID NO: 1879620
agaauaaguccauguugga

SEQ ID NO: 1920259 - RNA, 19 nt, Artificial Sequence
  Description of Artificial Sequence: Synthetic oligonucleotide
  Antisense strand to SEQ ID NO: 1920258
uccaacauggacuuauucu

SEQ ID NO: 1920260 - RNA, 19 nt, Artificial Sequence
  Description of Artificial Sequence: Synthetic oligonucleotide
  Sense strand starting at position 1068 of SEQ ID NO: 1879620
guuucaugugccuugugua

SEQ ID NO: 1920261 - RNA, 19 nt, Artificial Sequence
  Description of Artificial Sequence: Synthetic oligonucleotide
  Antisense strand to SEQ ID NO: 1920260
uacacaaggcacaugaaac

SEQ ID NO: 1920262 - RNA, 19 nt, Artificial Sequence
  Description of Artificial Sequence: Synthetic oligonucleotide
  Sense strand starting at position 1122 of SEQ ID NO: 1879620
uugagugaguccuuauaac

SEQ ID NO: 1920263 - RNA, 19 nt, Artificial Sequence
  Description of Artificial Sequence: Synthetic oligonucleotide
  Antisense strand to SEQ ID NO: 1920262
guuauaaggacucacucaa

SEQ ID NO: 1920264 - RNA, 19 nt, Artificial Sequence
  Description of Artificial Sequence: Synthetic oligonucleotide
  Sense strand starting at position 1143 of SEQ ID NO: 1879620
cgccaugacccagacaaau

SEQ ID NO: 1920265 - RNA, 19 nt, Artificial Sequence
  Description of Artificial Sequence: Synthetic oligonucleotide
  Antisense strand to SEQ ID NO: 1920264
auuugucugggucauggcg

SEQ ID NO: 1920266 - RNA, 19 nt, Artificial Sequence
  Description of Artificial Sequence: Synthetic oligonucleotide
  Sense strand starting at position 1634 of SEQ ID NO: 1879620
gcugacuuaggguaggauu

SEQ ID NO: 1920267 - RNA, 19 nt, Artificial Sequence
  Description of Artificial Sequence: Synthetic oligonucleotide
  Antisense strand to SEQ ID NO: 1920266
aauccuacccuaagucagc

SEQ ID NO: 1920268 - RNA, 19 nt, Artificial Sequence
  Description of Artificial Sequence: Synthetic oligonucleotide
  Sense strand starting at position 1636 of SEQ ID NO: 1879620
ugacuuaggguaggauuau

SEQ ID NO: 1920269 - RNA, 19 nt, Artificial Sequence
  Description of Artificial Sequence: Synthetic oligonucleotide
  Antisense strand to SEQ ID NO: 1920268
auaauccuacccuaaguca

SEQ ID NO: 1920270 - RNA, 19 nt, Artificial Sequence
  Description of Artificial Sequence: Synthetic oligonucleotide
  Sense strand starting at position 1735 of SEQ ID NO: 1879620
ucugaugucacccgaggaa

SEQ ID NO: 1920271 - RNA, 19 nt, Artificial Sequence
  Description of Artificial Sequence: Synthetic oligonucleotide
  Antisense strand to SEQ ID NO: 1920270
uuccucgggugacaucaga

SEQ ID NO: 1920272 - RNA, 19 nt, Artificial Sequence
  Description of Artificial Sequence: Synthetic oligonucleotide
  Sense strand starting at position 1810 of SEQ ID NO: 1879620
acaacuuucccacguaaga

SEQ ID NO: 1920273 - RNA, 19 nt, Artificial Sequence
  Description of Artificial Sequence: Synthetic oligonucleotide
  Antisense strand to SEQ ID NO: 1920272
ucuuacgugggaaaguugu

SEQ ID NO: 1920274 - RNA, 19 nt, Artificial Sequence
  Description of Artificial Sequence: Synthetic oligonucleotide
  Sense strand starting at position 1906 of SEQ ID NO: 1879620
ugggauggcuucuuagaag

SEQ ID NO: 1920275 - RNA, 19 nt, Artificial Sequence
  Description of Artificial Sequence: Synthetic oligonucleotide
  Antisense strand to SEQ ID NO: 1920274
cuucuaagaagccauccca

SEQ ID NO: 1920276 - RNA, 19 nt, Artificial Sequence
  Description of Artificial Sequence: Synthetic oligonucleotide
  Sense strand starting at position 1958 of SEQ ID NO: 1879620
uaggaaaucucugugucac

SEQ ID NO: 1920277 - RNA, 19 nt, Artificial Sequence
  Description of Artificial Sequence: Synthetic oligonucleotide
  Antisense strand to SEQ ID NO: 1920276
gugacacagagauuuccua

SEQ ID NO: 1920278 - RNA, 19 nt, Artificial Sequence
  Description of Artificial Sequence: Synthetic oligonucleotide
  Sense strand starting at position 1960 of SEQ ID NO: 1879620
ggaaaucucugugucacca

SEQ ID NO: 1920279 - RNA, 19 nt, Artificial Sequence
  Description of Artificial Sequence: Synthetic oligonucleotide
  Antisense strand to SEQ ID NO: 1920278
uggugacacagagauuucc

SEQ ID NO: 1920280 - RNA, 19 nt, Artificial Sequence
  Description of Artificial Sequence: Synthetic oligonucleotide
  Sense strand starting at position 1964 of SEQ ID NO: 1879620
aucucugugucaccaggaa

SEQ ID NO: 1920281 - RNA, 19 nt, Artificial Sequence
  Description of Artificial Sequence: Synthetic oligonucleotide
  Antisense strand to SEQ ID NO: 1920280
uuccuggugacacagagau

SEQ ID NO: 1920282 - RNA, 19 nt, Artificial Sequence
  Description of Artificial Sequence: Synthetic oligonucleotide
  Sense strand starting at position 2138 of SEQ ID NO: 1879620
cugauucuucugcagagag

SEQ ID NO: 1920283 - RNA, 19 nt, Artificial Sequence
  Description of Artificial Sequence: Synthetic oligonucleotide
  Antisense strand to SEQ ID NO: 1920282
cucucugcagaagaaucag

SEQ ID NO: 1920284 - RNA, 19 nt, Artificial Sequence
  Description of Artificial Sequence: Synthetic oligonucleotide
  Sense strand starting at position 2174 of SEQ ID NO: 1879620
ccuugugaggaccaucauu

SEQ ID NO: 1920285 - RNA, 19 nt, Artificial Sequence
  Description of Artificial Sequence: Synthetic oligonucleotide
  Antisense strand to SEQ ID NO: 1920284
aaugaugguccucacaagg

SEQ ID NO: 1920286 - RNA, 19 nt, Artificial Sequence
  Description of Artificial Sequence: Synthetic oligonucleotide
  Sense strand starting at position 2187 of SEQ ID NO: 1879620
aucauuacucuugguuuga

SEQ ID NO: 1920287 - RNA, 19 nt, Artificial Sequence
  Description of Artificial Sequence: Synthetic oligonucleotide
  Antisense strand to SEQ ID NO: 1920286
ucaaaccaagaguaaugau

SEQ ID NO: 1920288 - RNA, 19 nt, Artificial Sequence
  Description of Artificial Sequence: Synthetic oligonucleotide
  Sense strand starting at position 2188 of SEQ ID NO: 1879620
ucauuacucuugguuugag

SEQ ID NO: 1920289 - RNA, 19 nt, Artificial Sequence
  Description of Artificial Sequence: Synthetic oligonucleotide
  Antisense strand to SEQ ID NO: 1920288
cucaaaccaagaguaauga

SEQ ID NO: 1920290 - RNA, 19 nt, Artificial Sequence
  Description of Artificial Sequence: Synthetic oligonucleotide
  Sense strand starting at position 2189 of SEQ ID NO: 1879620
cauuacucuugguuugaga

SEQ ID NO: 1920291 - RNA, 19 nt, Artificial Sequence
  Description of Artificial Sequence: Synthetic oligonucleotide
  Antisense strand to SEQ ID NO: 1920290
ucucaaaccaagaguaaug

SEQ ID NO: 1920292 - RNA, 19 nt, Artificial Sequence
  Description of Artificial Sequence: Synthetic oligonucleotide
  Sense strand starting at position 2191 of SEQ ID NO: 1879620
uuacucuugguuugagaag

SEQ ID NO: 1920293 - RNA, 19 nt, Artificial Sequence
  Description of Artificial Sequence: Synthetic oligonucleotide
  Antisense strand to SEQ ID NO: 1920292
cuucucaaaccaagaguaa

SEQ ID NO: 1920294 - RNA, 19 nt, Artificial Sequence
  Description of Artificial Sequence: Synthetic oligonucleotide
  Sense strand starting at position 2213 of SEQ ID NO: 1879620
gcaguccuuggaggacaua

SEQ ID NO: 1920295 - RNA, 19 nt, Artificial Sequence
  Description of Artificial Sequence: Synthetic oligonucleotide
  Antisense strand to SEQ ID NO: 1920294
uauguccuccaaggacugc

SEQ ID NO: 1920296 - RNA, 19 nt, Artificial Sequence
  Description of Artificial Sequence: Synthetic oligonucleotide
  Sense strand starting at position 2824 of SEQ ID NO: 1879620
cccacaauaugaguuugaa

SEQ ID NO: 1920297 - RNA, 19 nt, Artificial Sequence
  Description of Artificial Sequence: Synthetic oligonucleotide
  Antisense strand to SEQ ID NO: 1920296
uucaaacucauauuguggg

SEQ ID NO: 1920298 - RNA, 19 nt, Artificial Sequence
  Description of Artificial Sequence: Synthetic oligonucleotide
  Sense strand starting at position 2827 of SEQ ID NO: 1879620
acaauaugaguuugaagca

SEQ ID NO: 1920299 - RNA, 19 nt, Artificial Sequence
  Description of Artificial Sequence: Synthetic oligonucleotide
  Antisense strand to SEQ ID NO: 1920298
ugcuucaaacucauauugu

SEQ ID NO: 1920300 - RNA, 19 nt, Artificial Sequence
  Description of Artificial Sequence: Synthetic oligonucleotide
  Sense strand starting at position 2834 of SEQ ID NO: 1879620
gaguuugaagcauggauac

SEQ ID NO: 1920301 - RNA, 19 nt, Artificial Sequence
  Description of Artificial Sequence: Synthetic oligonucleotide
  Antisense strand to SEQ ID NO: 1920300
guauccaugcuucaaacuc

SEQ ID NO: 1920302 - RNA, 19 nt, Artificial Sequence
  Description of Artificial Sequence: Synthetic oligonucleotide
  Sense strand starting at position 3661 of SEQ ID NO: 1879620
augacuauucuguagugua

SEQ ID NO: 1920303 - RNA, 19 nt, Artificial Sequence
  Description of Artificial Sequence: Synthetic oligonucleotide
  Antisense strand to SEQ ID NO: 1920302
uacacuacagaauagucau

SEQ ID NO: 1920304 - RNA, 19 nt, Artificial Sequence
  Description of Artificial Sequence: Synthetic oligonucleotide
  Sense strand starting at position 3668 of SEQ ID NO: 1879620
uucuguaguguauguauuu

SEQ ID NO: 1920305 - RNA, 19 nt, Artificial Sequence
  Description of Artificial Sequence: Synthetic oligonucleotide
  Antisense strand to SEQ ID NO: 1920304
aaauacauacacuacagaa

SEQ ID NO: 1920306 - RNA, 19 nt, Artificial Sequence
  Description of Artificial Sequence: Synthetic oligonucleotide
  Sense strand starting at position 3673 of SEQ ID NO: 1879620
uaguguauguauuugcuca

SEQ ID NO: 1920307 - RNA, 19 nt, Artificial Sequence
  Description of Artificial Sequence: Synthetic oligonucleotide
  Antisense strand to SEQ ID NO: 1920306
ugagcaaauacauacacua

SEQ ID NO: 1920308 - RNA, 19 nt, Artificial Sequence
  Description of Artificial Sequence: Synthetic oligonucleotide
  Sense strand starting at position 3675 of SEQ ID NO: 1879620
guguauguauuugcucaga

SEQ ID NO: 1920309 - RNA, 19 nt, Artificial Sequence
  Description of Artificial Sequence: Synthetic oligonucleotide
  Antisense strand to SEQ ID NO: 1920308
ucugagcaaauacauacac

SEQ ID NO: 1920310 - RNA, 19 nt, Artificial Sequence
  Description of Artificial Sequence: Synthetic oligonucleotide
  Sense strand starting at position 3677 of SEQ ID NO: 1879620
guauguauuugcucagaac

SEQ ID NO: 1920311 - RNA, 19 nt, Artificial Sequence
  Description of Artificial Sequence: Synthetic oligonucleotide
  Antisense strand to SEQ ID NO: 1920310
guucugagcaaauacauac

SEQ ID NO: 1920312 - RNA, 19 nt, Artificial Sequence
  Description of Artificial Sequence: Synthetic oligonucleotide
  Sense strand starting at position 3792 of SEQ ID NO: 1879620
agcccagaacaaugaguau

SEQ ID NO: 1920313 - RNA, 19 nt, Artificial Sequence
  Description of Artificial Sequence: Synthetic oligonucleotide
  Antisense strand to SEQ ID NO: 1920312
auacucauuguucugggcu

SEQ ID NO: 1920314 - RNA, 19 nt, Artificial Sequence
  Description of Artificial Sequence: Synthetic oligonucleotide
  Sense strand starting at position 3811 of SEQ ID NO: 1879620
uaaagugagugcuuagaua

SEQ ID NO: 1920315 - RNA, 19 nt, Artificial Sequence
  Description of Artificial Sequence: Synthetic oligonucleotide
  Antisense strand to SEQ ID NO: 1920314
uaucuaagcacucacuuua

SEQ ID NO: 1920316 - RNA, 19 nt, Artificial Sequence
  Description of Artificial Sequence: Synthetic oligonucleotide
  Sense strand starting at position 3907 of SEQ ID NO: 1879620
cuggaauagucuuuauaau

SEQ ID NO: 1920317 - RNA, 19 nt, Artificial Sequence
  Description of Artificial Sequence: Synthetic oligonucleotide
  Antisense strand to SEQ ID NO: 1920316
auuauaaagacuauuccag

SEQ ID NO: 1920318 - RNA, 19 nt, Artificial Sequence
  Description of Artificial Sequence: Synthetic oligonucleotide
  Sense strand starting at position 3965 of SEQ ID NO: 1879620
uuagguaccauguagguau

SEQ ID NO: 1920319 - RNA, 19 nt, Artificial Sequence
  Description of Artificial Sequence: Synthetic oligonucleotide
  Antisense strand to SEQ ID NO: 1920318
auaccuacaugguaccuaa

SEQ ID NO: 1920320 - RNA, 19 nt, Artificial Sequence
  Description of Artificial Sequence: Synthetic oligonucleotide
  Sense strand starting at position 3979 of SEQ ID NO: 1879620
gguauuagguucuugauaa

SEQ ID NO: 1920321 - RNA, 19 nt, Artificial Sequence
  Description of Artificial Sequence: Synthetic oligonucleotide
  Antisense strand to SEQ ID NO: 1920320
uuaucaagaaccuaauacc

SEQ ID NO: 1920322 - RNA, 19 nt, Artificial Sequence
  Description of Artificial Sequence: Synthetic oligonucleotide
  Sense strand starting at position 618 of SEQ ID NO: 1879621
uccgauuucucuugaagga

SEQ ID NO: 1920323 - RNA, 19 nt, Artificial Sequence
  Description of Artificial Sequence: Synthetic oligonucleotide
  Antisense strand to SEQ ID NO: 1920322
uccuucaagagaaaucgga

SEQ ID NO: 1920324 - RNA, 19 nt, Artificial Sequence
  Description of Artificial Sequence: Synthetic oligonucleotide
  Sense strand starting at position 650 of SEQ ID NO: 1879621
uugaaaggcuucuugaaag

SEQ ID NO: 1920325 - RNA, 19 nt, Artificial Sequence
  Description of Artificial Sequence: Synthetic oligonucleotide
  Antisense strand to SEQ ID NO: 1920324
cuuucaagaagccuuucaa

SEQ ID NO: 1920326 - RNA, 19 nt, Artificial Sequence
  Description of Artificial Sequence: Synthetic oligonucleotide
  Sense strand starting at position 822 of SEQ ID NO: 1879621
gggauaagucuccauugcu

SEQ ID NO: 1920327 - RNA, 19 nt, Artificial Sequence
  Description of Artificial Sequence: Synthetic oligonucleotide
  Antisense strand to SEQ ID NO: 1920326
agcaauggagacuuauccc

SEQ ID NO: 1920328 - RNA, 19 nt, Artificial Sequence
  Description of Artificial Sequence: Synthetic oligonucleotide
  Sense strand starting at position 915 of SEQ ID NO: 1879621
ucugaucccuucuagagga

SEQ ID NO: 1920329 - RNA, 19 nt, Artificial Sequence
  Description of Artificial Sequence: Synthetic oligonucleotide
  Antisense strand to SEQ ID NO: 1920328
uccucuagaagggaucaga

SEQ ID NO: 1920330 - RNA, 19 nt, Artificial Sequence
  Description of Artificial Sequence: Synthetic oligonucleotide
  Sense strand starting at position 1117 of SEQ ID NO: 1879621
cucucuauuccgcgcggaa

SEQ ID NO: 1920331 - RNA, 19 nt, Artificial Sequence
  Description of Artificial Sequence: Synthetic oligonucleotide
  Antisense strand to SEQ ID NO: 1920330
uuccgcgcggaauagagag

SEQ ID NO: 1920332 - RNA, 19 nt, Artificial Sequence
  Description of Artificial Sequence: Synthetic oligonucleotide
  Sense strand starting at position 2005 of SEQ ID NO: 1879621
cgccgagcugccuauauau

SEQ ID NO: 1920333 - RNA, 19 nt, Artificial Sequence
  Description of Artificial Sequence: Synthetic oligonucleotide
  Antisense strand to SEQ ID NO: 1920332
auauauaggcagcucggcg

SEQ ID NO: 1920334 - RNA, 19 nt, Artificial Sequence
  Description of Artificial Sequence: Synthetic oligonucleotide
  Sense strand starting at position 2390 of SEQ ID NO: 1879621
ucagauggcugguccugaa

SEQ ID NO: 1920335 - RNA, 19 nt, Artificial Sequence
  Description of Artificial Sequence: Synthetic oligonucleotide
  Antisense strand to SEQ ID NO: 1920334
uucaggaccagccaucuga

SEQ ID NO: 1920336 - RNA, 19 nt, Artificial Sequence
  Description of Artificial Sequence: Synthetic oligonucleotide
  Sense strand starting at position 2393 of SEQ ID NO: 1879621
gauggcugguccugaauua

SEQ ID NO: 1920337 - RNA, 19 nt, Artificial Sequence
  Description of Artificial Sequence: Synthetic oligonucleotide
  Antisense strand to SEQ ID NO: 1920336
uaauucaggaccagccauc

SEQ ID NO: 1920338 - RNA, 19 nt, Artificial Sequence
  Description of Artificial Sequence: Synthetic oligonucleotide
  Sense strand starting at position 2394 of SEQ ID NO: 1879621
auggcugguccugaauuau

SEQ ID NO: 1920339 - RNA, 19 nt, Artificial Sequence
  Description of Artificial Sequence: Synthetic oligonucleotide
  Antisense strand to SEQ ID NO: 1920338
auaauucaggaccagccau

SEQ ID NO: 1920340 - RNA, 19 nt, Artificial Sequence
  Description of Artificial Sequence: Synthetic oligonucleotide
  Sense strand starting at position 2400 of SEQ ID NO: 1879621
gguccugaauuauacucua

SEQ ID NO: 1920341 - RNA, 19 nt, Artificial Sequence
  Description of Artificial Sequence: Synthetic oligonucleotide
  Antisense strand to SEQ ID NO: 1920340
uagaguauaauucaggacc

SEQ ID NO: 1920342 - RNA, 19 nt, Artificial Sequence
  Description of Artificial Sequence: Synthetic oligonucleotide
  Sense strand starting at position 2416 of SEQ ID NO: 1879621
cuagaaauguggucauaga

SEQ ID NO: 1920343 - RNA, 19 nt, Artificial Sequence
  Description of Artificial Sequence: Synthetic oligonucleotide
  Antisense strand to SEQ ID NO: 1920342
ucuaugaccacauuucuag

SEQ ID NO: 1920344 - RNA, 19 nt, Artificial Sequence
  Description of Artificial Sequence: Synthetic oligonucleotide
  Sense strand starting at position 2703 of SEQ ID NO: 1879621
gggacuuugugaccuugaa

SEQ ID NO: 1920345 - RNA, 19 nt, Artificial Sequence
  Description of Artificial Sequence: Synthetic oligonucleotide
  Antisense strand to SEQ ID NO: 1920344
uucaaggucacaaaguccc

SEQ ID NO: 1920346 - RNA, 19 nt, Artificial Sequence
  Description of Artificial Sequence: Synthetic oligonucleotide
  Sense strand starting at position 2763 of SEQ ID NO: 1879621
uugacaaccugucugacuu

SEQ ID NO: 1920347 - RNA, 19 nt, Artificial Sequence
  Description of Artificial Sequence: Synthetic oligonucleotide
  Antisense strand to SEQ ID NO: 1920346
aagucagacagguugucaa

SEQ ID NO: 1920348 - RNA, 19 nt, Artificial Sequence
  Description of Artificial Sequence: Synthetic oligonucleotide
  Sense strand starting at position 3177 of SEQ ID NO: 1879621
gaagcaaaguguugcaaau

SEQ ID NO: 1920349 - RNA, 19 nt, Artificial Sequence
  Description of Artificial Sequence: Synthetic oligonucleotide
  Antisense strand to SEQ ID NO: 1920348
auuugcaacacuuugcuuc

SEQ ID NO: 1920350 - RNA, 19 nt, Artificial Sequence
  Description of Artificial Sequence: Synthetic oligonucleotide
  Sense strand starting at position 3555 of SEQ ID NO: 1879621
cuuggagagguuugauaac

SEQ ID NO: 1920351 - RNA, 19 nt, Artificial Sequence
  Description of Artificial Sequence: Synthetic oligonucleotide
  Antisense strand to SEQ ID NO: 1920350
guuaucaaaccucuccaag

SEQ ID NO: 1920352 - RNA, 19 nt, Artificial Sequence
  Description of Artificial Sequence: Synthetic oligonucleotide
  Sense strand starting at position 3564 of SEQ ID NO: 1879621
guuugauaacaugggccaa

SEQ ID NO: 1920353 - RNA, 19 nt, Artificial Sequence
  Description of Artificial Sequence: Synthetic oligonucleotide
  Antisense strand to SEQ ID NO: 1920352
uuggcccauguuaucaaac

SEQ ID NO: 1920354 - RNA, 19 nt, Artificial Sequence
  Description of Artificial Sequence: Synthetic oligonucleotide
  Sense strand starting at position 3690 of SEQ ID NO: 1879621
acugcagcucacugaaagu

SEQ ID NO: 1920355 - RNA, 19 nt, Artificial Sequence
  Description of Artificial Sequence: Synthetic oligonucleotide
  Antisense strand to SEQ ID NO: 1920354
acuuucagugagcugcagu

SEQ ID NO: 1920356 - RNA, 19 nt, Artificial Sequence
  Description of Artificial Sequence: Synthetic oligonucleotide
  Sense strand starting at position 3701 of SEQ ID NO: 1879621
cugaaaguaccgugacuuc

SEQ ID NO: 1920357 - RNA, 19 nt, Artificial Sequence
  Description of Artificial Sequence: Synthetic oligonucleotide
  Antisense strand to SEQ ID NO: 1920356
gaagucacgguacuuucag

SEQ ID NO: 1920358 - RNA, 19 nt, Artificial Sequence
  Description of Artificial Sequence: Synthetic oligonucleotide
  Sense strand starting at position 3710 of SEQ ID NO: 1879621
ccgugacuucuccacagcu

SEQ ID NO: 1920359 - RNA, 19 nt, Artificial Sequence
  Description of Artificial Sequence: Synthetic oligonucleotide
  Antisense strand to SEQ ID NO: 1920358
agcuguggagaagucacgg

SEQ ID NO: 1920360 - RNA, 19 nt, Artificial Sequence
  Description of Artificial Sequence: Synthetic oligonucleotide
  Sense strand starting at position 3928 of SEQ ID NO: 1879621
aggcaaaucuucccaagga

SEQ ID NO: 1920361 - RNA, 19 nt, Artificial Sequence
  Description of Artificial Sequence: Synthetic oligonucleotide
  Antisense strand to SEQ ID NO: 1920360
uccuugggaagauuugccu

SEQ ID NO: 1920362 - RNA, 19 nt, Artificial Sequence
  Description of Artificial Sequence: Synthetic oligonucleotide
  Sense strand starting at position 3929 of SEQ ID NO: 1879621
ggcaaaucuucccaaggau

SEQ ID NO: 1920363 - RNA, 19 nt, Artificial Sequence
  Description of Artificial Sequence: Synthetic oligonucleotide
  Antisense strand to SEQ ID NO: 1920362
auccuugggaagauuugcc

SEQ ID NO: 1920364 - RNA, 19 nt, Artificial Sequence
  Description of Artificial Sequence: Synthetic oligonucleotide
  Sense strand starting at position 3962 of SEQ ID NO: 1879621
cgaagagcaucaggguaaa

SEQ ID NO: 1920365 - RNA, 19 nt, Artificial Sequence
  Description of Artificial Sequence: Synthetic oligonucleotide
  Antisense strand to SEQ ID NO: 1920364
uuuacccugaugcucuucg

SEQ ID NO: 1920366 - RNA, 19 nt, Artificial Sequence
  Description of Artificial Sequence: Synthetic oligonucleotide
  Sense strand starting at position 211 of SEQ ID NO: 1879622
gaacaugauucugcucgga

SEQ ID NO: 1920367 - RNA, 19 nt, Artificial Sequence
  Description of Artificial Sequence: Synthetic oligonucleotide
  Antisense strand to SEQ ID NO: 1920366
uccgagcagaaucauguuc

SEQ ID NO: 1920368 - RNA, 19 nt, Artificial Sequence
  Description of Artificial Sequence: Synthetic oligonucleotide
  Sense strand starting at position 214 of SEQ ID NO: 1879622
caugauucugcucggaggu

SEQ ID NO: 1920369 - RNA, 19 nt, Artificial Sequence
  Description of Artificial Sequence: Synthetic oligonucleotide
  Antisense strand to SEQ ID NO: 1920368
accuccgagcagaaucaug

SEQ ID NO: 1920370 - RNA, 19 nt, Artificial Sequence
  Description of Artificial Sequence: Synthetic oligonucleotide
  Sense strand starting at position 252 of SEQ ID NO: 1879622
uggugaaacugaggcauaa

SEQ ID NO: 1920371 - RNA, 19 nt, Artificial Sequence
  Description of Artificial Sequence: Synthetic oligonucleotide
  Antisense strand to SEQ ID NO: 1920370
uuaugccucaguuucacca

SEQ ID NO: 1920372 - RNA, 19 nt, Artificial Sequence
  Description of Artificial Sequence: Synthetic oligonucleotide
  Sense strand starting at position 265 of SEQ ID NO: 1879622
gcauaagaagcuuaagcaa

SEQ ID NO: 1920373 - RNA, 19 nt, Artificial Sequence
  Description of Artificial Sequence: Synthetic oligonucleotide
  Antisense strand to SEQ ID NO: 1920372
uugcuuaagcuucuuaugc

SEQ ID NO: 1920374 - RNA, 19 nt, Artificial Sequence
  Description of Artificial Sequence: Synthetic oligonucleotide
  Sense strand starting at position 280 of SEQ ID NO: 1879622
gcaacuugcucagccaaua

SEQ ID NO: 1920375 - RNA, 19 nt, Artificial Sequence
  Description of Artificial Sequence: Synthetic oligonucleotide
  Antisense strand to SEQ ID NO: 1920374
uauuggcugagcaaguugc

SEQ ID NO: 1920376 - RNA, 19 nt, Artificial Sequence
  Description of Artificial Sequence: Synthetic oligonucleotide
  Sense strand starting at position 351 of SEQ ID NO: 1879622
cccuuagagaaaugacgua

SEQ ID NO: 1920377 - RNA, 19 nt, Artificial Sequence
  Description of Artificial Sequence: Synthetic oligonucleotide
  Antisense strand to SEQ ID NO: 1920376
uacgucauuucucuaaggg

SEQ ID NO: 1920378 - RNA, 19 nt, Artificial Sequence
  Description of Artificial Sequence: Synthetic oligonucleotide
  Sense strand starting at position 554 of SEQ ID NO: 1879622
agguguucagccuggaguu

SEQ ID NO: 1920379 - RNA, 19 nt, Artificial Sequence
  Description of Artificial Sequence: Synthetic oligonucleotide
  Antisense strand to SEQ ID NO: 1920378
aacuccaggcugaacaccu

SEQ ID NO: 1920380 - RNA, 19 nt, Artificial Sequence
  Description of Artificial Sequence: Synthetic oligonucleotide
  Sense strand starting at position 744 of SEQ ID NO: 1879622
ccagguagcccaggguaau

SEQ ID NO: 1920381 - RNA, 19 nt, Artificial Sequence
  Description of Artificial Sequence: Synthetic oligonucleotide
  Antisense strand to SEQ ID NO: 1920380
auuacccugggcuaccugg

SEQ ID NO: 1920382 - RNA, 19 nt, Artificial Sequence
  Description of Artificial Sequence: Synthetic oligonucleotide
  Sense strand starting at position 791 of SEQ ID NO: 1879622
ggcuucuaaccaggaguca

SEQ ID NO: 1920383 - RNA, 19 nt, Artificial Sequence
  Description of Artificial Sequence: Synthetic oligonucleotide
  Antisense strand to SEQ ID NO: 1920382
ugacuccugguuagaagcc

SEQ ID NO: 1920384 - RNA, 19 nt, Artificial Sequence
  Description of Artificial Sequence: Synthetic oligonucleotide
  Sense strand starting at position 792 of SEQ ID NO: 1879622
gcuucuaaccaggagucau

SEQ ID NO: 1920385 - RNA, 19 nt, Artificial Sequence
  Description of Artificial Sequence: Synthetic oligonucleotide
  Antisense strand to SEQ ID NO: 1920384
augacuccugguuagaagc

SEQ ID NO: 1920386 - RNA, 19 nt, Artificial Sequence
  Description of Artificial Sequence: Synthetic oligonucleotide
  Sense strand starting at position 1091 of SEQ ID NO: 1879622
gccggaucucagugacaga

SEQ ID NO: 1920387 - RNA, 19 nt, Artificial Sequence
  Description of Artificial Sequence: Synthetic oligonucleotide
  Antisense strand to SEQ ID NO: 1920386
ucugucacugagauccggc

SEQ ID NO: 1920388 - RNA, 19 nt, Artificial Sequence
  Description of Artificial Sequence: Synthetic oligonucleotide
  Sense strand starting at position 1118 of SEQ ID NO: 1879622
ccucuuucuuuccagggua

SEQ ID NO: 1920389 - RNA, 19 nt, Artificial Sequence
  Description of Artificial Sequence: Synthetic oligonucleotide
  Antisense strand to SEQ ID NO: 1920388
uacccuggaaagaaagagg

SEQ ID NO: 1920390 - RNA, 19 nt, Artificial Sequence
  Description of Artificial Sequence: Synthetic oligonucleotide
  Sense strand starting at position 1120 of SEQ ID NO: 1879622
ucuuucuuuccaggguaca

SEQ ID NO: 1920391 - RNA, 19 nt, Artificial Sequence
  Description of Artificial Sequence: Synthetic oligonucleotide
  Antisense strand to SEQ ID NO: 1920390
uguacccuggaaagaaaga

SEQ ID NO: 1920392 - RNA, 19 nt, Artificial Sequence
  Description of Artificial Sequence: Synthetic oligonucleotide
  Sense strand starting at position 1988 of SEQ ID NO: 1879622
gcuacagcgucaucgagaa

SEQ ID NO: 1920393 - RNA, 19 nt, Artificial Sequence
  Description of Artificial Sequence: Synthetic oligonucleotide
  Antisense strand to SEQ ID NO: 1920392
uucucgaugacgcuguagc

SEQ ID NO: 1920394 - RNA, 19 nt, Artificial Sequence
  Description of Artificial Sequence: Synthetic oligonucleotide
  Sense strand starting at position 2003 of SEQ ID NO: 1879622
agaagcuguccaggaaguu

SEQ ID NO: 1920395 - RNA, 19 nt, Artificial Sequence
  Description of Artificial Sequence: Synthetic oligonucleotide
  Antisense strand to SEQ ID NO: 1920394
aacuuccuggacagcuucu

SEQ ID NO: 1920396 - RNA, 19 nt, Artificial Sequence
  Description of Artificial Sequence: Synthetic oligonucleotide
  Sense strand starting at position 3232 of SEQ ID NO: 1879622
acauguuucugugucguga

SEQ ID NO: 1920397 - RNA, 19 nt, Artificial Sequence
  Description of Artificial Sequence: Synthetic oligonucleotide
  Antisense strand to SEQ ID NO: 1920396
ucacgacacagaaacaugu

SEQ ID NO: 1920398 - RNA, 19 nt, Artificial Sequence
  Description of Artificial Sequence: Synthetic oligonucleotide
  Sense strand starting at position 3235 of SEQ ID NO: 1879622
uguuucugugucgugaguu

SEQ ID NO: 1920399 - RNA, 19 nt, Artificial Sequence
  Description of Artificial Sequence: Synthetic oligonucleotide
  Antisense strand to SEQ ID NO: 1920398
aacucacgacacagaaaca

SEQ ID NO: 1920400 - RNA, 19 nt, Artificial Sequence
  Description of Artificial Sequence: Synthetic oligonucleotide
  Sense strand starting at position 3269 of SEQ ID NO: 1879622
uucugugaugcgggagagu

SEQ ID NO: 1920401 - RNA, 19 nt, Artificial Sequence
  Description of Artificial Sequence: Synthetic oligonucleotide
  Antisense strand to SEQ ID NO: 1920400
acucucccgcaucacagaa

SEQ ID NO: 1920402 - RNA, 19 nt, Artificial Sequence
  Description of Artificial Sequence: Synthetic oligonucleotide
  Sense strand starting at position 3346 of SEQ ID NO: 1879622
gugugugggucuuugggau

SEQ ID NO: 1920403 - RNA, 19 nt, Artificial Sequence
  Description of Artificial Sequence: Synthetic oligonucleotide
  Antisense strand to SEQ ID NO: 1920402
aucccaaagacccacacac

SEQ ID NO: 1920404 - RNA, 19 nt, Artificial Sequence
  Description of Artificial Sequence: Synthetic oligonucleotide
  Sense strand starting at position 3350 of SEQ ID NO: 1879622
gugggucuuugggauguga

SEQ ID NO: 1920405 - RNA, 19 nt, Artificial Sequence
  Description of Artificial Sequence: Synthetic oligonucleotide
  Antisense strand to SEQ ID NO: 1920404
ucacaucccaaagacccac

SEQ ID NO: 1920406 - RNA, 19 nt, Artificial Sequence
  Description of Artificial Sequence: Synthetic oligonucleotide
  Sense strand starting at position 3379 of SEQ ID NO: 1879622
caggguguccaguaggaca

SEQ ID NO: 1920407 - RNA, 19 nt, Artificial Sequence
  Description of Artificial Sequence: Synthetic oligonucleotide
  Antisense strand to SEQ ID NO: 1920406
uguccuacuggacacccug

SEQ ID NO: 1920408 - RNA, 19 nt, Artificial Sequence
  Description of Artificial Sequence: Synthetic oligonucleotide
  Sense strand starting at position 3455 of SEQ ID NO: 1879622
gcacguuauugagaggauc

SEQ ID NO: 1920409 - RNA, 19 nt, Artificial Sequence
  Description of Artificial Sequence: Synthetic oligonucleotide
  Antisense strand to SEQ ID NO: 1920408
gauccucucaauaacgugc

SEQ ID NO: 1920410 - RNA, 19 nt, Artificial Sequence
  Description of Artificial Sequence: Synthetic oligonucleotide
  Sense strand starting at position 3457 of SEQ ID NO: 1879622
acguuauugagaggaucca

SEQ ID NO: 1920411 - RNA, 19 nt, Artificial Sequence
  Description of Artificial Sequence: Synthetic oligonucleotide
  Antisense strand to SEQ ID NO: 1920410
uggauccucucaauaacgu

SEQ ID NO: 1920412 - RNA, 19 nt, Artificial Sequence
  Description of Artificial Sequence: Synthetic oligonucleotide
  Sense strand starting at position 3497 of SEQ ID NO: 1879622
cccucauuauaugguauuu

SEQ ID NO: 1920413 - RNA, 19 nt, Artificial Sequence
  Description of Artificial Sequence: Synthetic oligonucleotide
  Antisense strand to SEQ ID NO: 1920412
aaauaccauauaaugaggg

SEQ ID NO: 1920414 - RNA, 19 nt, Artificial Sequence
  Description of Artificial Sequence: Synthetic oligonucleotide
  Sense strand starting at position 3499 of SEQ ID NO: 1879622
cucauuauaugguauuuga

SEQ ID NO: 1920415 - RNA, 19 nt, Artificial Sequence
  Description of Artificial Sequence: Synthetic oligonucleotide
  Antisense strand to SEQ ID NO: 1920414
ucaaauaccauauaaugag

SEQ ID NO: 1920416 - RNA, 19 nt, Artificial Sequence
  Description of Artificial Sequence: Synthetic oligonucleotide
  Sense strand starting at position 3506 of SEQ ID NO: 1879622
uaugguauuugacagauag

SEQ ID NO: 1920417 - RNA, 19 nt, Artificial Sequence
  Description of Artificial Sequence: Synthetic oligonucleotide
  Antisense strand to SEQ ID NO: 1920416
cuaucugucaaauaccaua

SEQ ID NO: 1920418 - RNA, 19 nt, Artificial Sequence
  Description of Artificial Sequence: Synthetic oligonucleotide
  Sense strand starting at position 3523 of SEQ ID NO: 1879622
aggugcuguguucauugua

SEQ ID NO: 1920419 - RNA, 19 nt, Artificial Sequence
  Description of Artificial Sequence: Synthetic oligonucleotide
  Antisense strand to SEQ ID NO: 1920418
uacaaugaacacagcaccu

SEQ ID NO: 1920420 - RNA, 19 nt, Artificial Sequence
  Description of Artificial Sequence: Synthetic oligonucleotide
  Sense strand starting at position 3536 of SEQ ID NO: 1879622
auuguaugcuguucuagac

SEQ ID NO: 1920421 - RNA, 19 nt, Artificial Sequence
  Description of Artificial Sequence: Synthetic oligonucleotide
  Antisense strand to SEQ ID NO: 1920420
gucuagaacagcauacaau

SEQ ID NO: 1920422 - RNA, 19 nt, Artificial Sequence
  Description of Artificial Sequence: Synthetic oligonucleotide
  Sense strand starting at position 3553 of SEQ ID NO: 1879622
acacuugggugucuugaua

SEQ ID NO: 1920423 - RNA, 19 nt, Artificial Sequence
  Description of Artificial Sequence: Synthetic oligonucleotide
  Antisense strand to SEQ ID NO: 1920422
uaucaagacacccaagugu

SEQ ID NO: 1920424 - RNA, 19 nt, Artificial Sequence
  Description of Artificial Sequence: Synthetic oligonucleotide
  Sense strand starting at position 3560 of SEQ ID NO: 1879622
ggugucuugauacagcagu

SEQ ID NO: 1920425 - RNA, 19 nt, Artificial Sequence
  Description of Artificial Sequence: Synthetic oligonucleotide
  Antisense strand to SEQ ID NO: 1920424
acugcuguaucaagacacc

SEQ ID NO: 1920426 - RNA, 19 nt, Artificial Sequence
  Description of Artificial Sequence: Synthetic oligonucleotide
  Sense strand starting at position 3566 of SEQ ID NO: 1879622
uugauacagcagugaacua

SEQ ID NO: 1920427 - RNA, 19 nt, Artificial Sequence
  Description of Artificial Sequence: Synthetic oligonucleotide
  Antisense strand to SEQ ID NO: 1920426
uaguucacugcuguaucaa

SEQ ID NO: 1920428 - RNA, 19 nt, Artificial Sequence
  Description of Artificial Sequence: Synthetic oligonucleotide
  Sense strand starting at position 3726 of SEQ ID NO: 1879622
cccaguauguuggagaucu

SEQ ID NO: 1920429 - RNA, 19 nt, Artificial Sequence
  Description of Artificial Sequence: Synthetic oligonucleotide
  Antisense strand to SEQ ID NO: 1920428
agaucuccaacauacuggg

SEQ ID NO: 1920430 - RNA, 19 nt, Artificial Sequence
  Description of Artificial Sequence: Synthetic oligonucleotide
  Sense strand starting at position 3728 of SEQ ID NO: 1879622
caguauguuggagaucuua

SEQ ID NO: 1920431 - RNA, 19 nt, Artificial Sequence
  Description of Artificial Sequence: Synthetic oligonucleotide
  Antisense strand to SEQ ID NO: 1920430
uaagaucuccaacauacug

SEQ ID NO: 1920432 - RNA, 19 nt, Artificial Sequence
  Description of Artificial Sequence: Synthetic oligonucleotide
  Sense strand starting at position 3736 of SEQ ID NO: 1879622
uggagaucuuaguuucccu

SEQ ID NO: 1920433 - RNA, 19 nt, Artificial Sequence
  Description of Artificial Sequence: Synthetic oligonucleotide
  Antisense strand to SEQ ID NO: 1920432
agggaaacuaagaucucca

SEQ ID NO: 1920434 - RNA, 19 nt, Artificial Sequence
  Description of Artificial Sequence: Synthetic oligonucleotide
  Sense strand starting at position 3740 of SEQ ID NO: 1879622
gaucuuaguuucccugagu

SEQ ID NO: 1920435 - RNA, 19 nt, Artificial Sequence
  Description of Artificial Sequence: Synthetic oligonucleotide
  Antisense strand to SEQ ID NO: 1920434
acucagggaaacuaagauc

SEQ ID NO: 1920436 - RNA, 19 nt, Artificial Sequence
  Description of Artificial Sequence: Synthetic oligonucleotide
  Sense strand starting at position 3790 of SEQ ID NO: 1879622
gggacaaccugucuguagu

SEQ ID NO: 1920437 - RNA, 19 nt, Artificial Sequence
  Description of Artificial Sequence: Synthetic oligonucleotide
  Antisense strand to SEQ ID NO: 1920436
acuacagacagguuguccc

SEQ ID NO: 1920438 - RNA, 19 nt, Artificial Sequence
  Description of Artificial Sequence: Synthetic oligonucleotide
  Sense strand starting at position 3814 of SEQ ID NO: 1879622
aggcacuaugacugugaga

SEQ ID NO: 1920439 - RNA, 19 nt, Artificial Sequence
  Description of Artificial Sequence: Synthetic oligonucleotide
  Antisense strand to SEQ ID NO: 1920438
ucucacagucauagugccu

SEQ ID NO: 1920440 - RNA, 19 nt, Artificial Sequence
  Description of Artificial Sequence: Synthetic oligonucleotide
  Sense strand starting at position 3816 of SEQ ID NO: 1879622
gcacuaugacugugagauc

SEQ ID NO: 1920441 - RNA, 19 nt, Artificial Sequence
  Description of Artificial Sequence: Synthetic oligonucleotide
  Antisense strand to SEQ ID NO: 1920440
gaucucacagucauagugc

SEQ ID NO: 1920442 - RNA, 19 nt, Artificial Sequence
  Description of Artificial Sequence: Synthetic oligonucleotide
  Sense strand starting at position 3817 of SEQ ID NO: 1879622
cacuaugacugugagaucu

SEQ ID NO: 1920443 - RNA, 19 nt, Artificial Sequence
  Description of Artificial Sequence: Synthetic oligonucleotide
  Antisense strand to SEQ ID NO: 1920442
agaucucacagucauagug

SEQ ID NO: 1920444 - RNA, 19 nt, Artificial Sequence
  Description of Artificial Sequence: Synthetic oligonucleotide
  Sense strand starting at position 3819 of SEQ ID NO: 1879622
cuaugacugugagaucuga

SEQ ID NO: 1920445 - RNA, 19 nt, Artificial Sequence
  Description of Artificial Sequence: Synthetic oligonucleotide
  Antisense strand to SEQ ID NO: 1920444
ucagaucucacagucauag

SEQ ID NO: 1920446 - RNA, 19 nt, Artificial Sequence
  Description of Artificial Sequence: Synthetic oligonucleotide
  Sense strand starting at position 7 of SEQ ID NO: 1879623
ccuagugaugagcggaagu

SEQ ID NO: 1920447 - RNA, 19 nt, Artificial Sequence
  Description of Artificial Sequence: Synthetic oligonucleotide
  Antisense strand to SEQ ID NO: 1920446
acuuccgcucaucacuagg

SEQ ID NO: 1920448 - RNA, 19 nt, Artificial Sequence
  Description of Artificial Sequence: Synthetic oligonucleotide
  Sense strand starting at position 9 of SEQ ID NO: 1879623
uagugaugagcggaaguga

SEQ ID NO: 1920449 - RNA, 19 nt, Artificial Sequence
  Description of Artificial Sequence: Synthetic oligonucleotide
  Antisense strand to SEQ ID NO: 1920448
ucacuuccgcucaucacua

SEQ ID NO: 1920450 - RNA, 19 nt, Artificial Sequence
  Description of Artificial Sequence: Synthetic oligonucleotide
  Sense strand starting at position 20 of SEQ ID NO: 1879623
ggaagugagcccugucaug

SEQ ID NO: 1920451 - RNA, 19 nt, Artificial Sequence
  Description of Artificial Sequence: Synthetic oligonucleotide
  Antisense strand to SEQ ID NO: 1920450
caugacagggcucacuucc

SEQ ID NO: 1920452 - RNA, 19 nt, Artificial Sequence
  Description of Artificial Sequence: Synthetic oligonucleotide
  Sense strand starting at position 25 of SEQ ID NO: 1879623
ugagcccugucauggauaa

SEQ ID NO: 1920453 - RNA, 19 nt, Artificial Sequence
  Description of Artificial Sequence: Synthetic oligonucleotide
  Antisense strand to SEQ ID NO: 1920452
uuauccaugacagggcuca

SEQ ID NO: 1920454 - RNA, 19 nt, Artificial Sequence
  Description of Artificial Sequence: Synthetic oligonucleotide
  Sense strand starting at position 26 of SEQ ID NO: 1879623
gagcccugucauggauaaa

SEQ ID NO: 1920455 - RNA, 19 nt, Artificial Sequence
  Description of Artificial Sequence: Synthetic oligonucleotide
  Antisense strand to SEQ ID NO: 1920454
uuuauccaugacagggcuc

SEQ ID NO: 1920456 - RNA, 19 nt, Artificial Sequence
  Description of Artificial Sequence: Synthetic oligonucleotide
  Sense strand starting at position 110 of SEQ ID NO: 1879623
gugcuuggcugcucgaaga

SEQ ID NO: 1920457 - RNA, 19 nt, Artificial Sequence
  Description of Artificial Sequence: Synthetic oligonucleotide
  Antisense strand to SEQ ID NO: 1920456
ucuucgagcagccaagcac

SEQ ID NO: 1920458 - RNA, 19 nt, Artificial Sequence
  Description of Artificial Sequence: Synthetic oligonucleotide
  Sense strand starting at position 224 of SEQ ID NO: 1879623
gccacagaacgguguuaag

SEQ ID NO: 1920459 - RNA, 19 nt, Artificial Sequence
  Description of Artificial Sequence: Synthetic oligonucleotide
  Antisense strand to SEQ ID NO: 1920458
cuuaacaccguucuguggc

SEQ ID NO: 1920460 - RNA, 19 nt, Artificial Sequence
  Description of Artificial Sequence: Synthetic oligonucleotide
  Sense strand starting at position 227 of SEQ ID NO: 1879623
acagaacgguguuaagauu

SEQ ID NO: 1920461 - RNA, 19 nt, Artificial Sequence
  Description of Artificial Sequence: Synthetic oligonucleotide
  Antisense strand to SEQ ID NO: 1920460
aaucuuaacaccguucugu

SEQ ID NO: 1920462 - RNA, 19 nt, Artificial Sequence
  Description of Artificial Sequence: Synthetic oligonucleotide
  Sense strand starting at position 689 of SEQ ID NO: 1879623
cagggagugcuaggaugaa

SEQ ID NO: 1920463 - RNA, 19 nt, Artificial Sequence
  Description of Artificial Sequence: Synthetic oligonucleotide
  Antisense strand to SEQ ID NO: 1920462
uucauccuagcacucccug

SEQ ID NO: 1920464 - RNA, 19 nt, Artificial Sequence
  Description of Artificial Sequence: Synthetic oligonucleotide
  Sense strand starting at position 1322 of SEQ ID NO: 1879623
cugagaggcucuuacacaa

SEQ ID NO: 1920465 - RNA, 19 nt, Artificial Sequence
  Description of Artificial Sequence: Synthetic oligonucleotide
  Antisense strand to SEQ ID NO: 1920464
uuguguaagagccucucag

SEQ ID NO: 1920466 - RNA, 19 nt, Artificial Sequence
  Description of Artificial Sequence: Synthetic oligonucleotide
  Sense strand starting at position 1634 of SEQ ID NO: 1879623
gaaauaugacggugugggu

SEQ ID NO: 1920467 - RNA, 19 nt, Artificial Sequence
  Description of Artificial Sequence: Synthetic oligonucleotide
  Antisense strand to SEQ ID NO: 1920466
acccacaccgucauauuuc

SEQ ID NO: 1920468 - RNA, 19 nt, Artificial Sequence
  Description of Artificial Sequence: Synthetic oligonucleotide
  Sense strand starting at position 1693 of SEQ ID NO: 1879623
guguguacaauuggaagaa

SEQ ID NO: 1920469 - RNA, 19 nt, Artificial Sequence
  Description of Artificial Sequence: Synthetic oligonucleotide
  Antisense strand to SEQ ID NO: 1920468
uucuuccaauuguacacac

SEQ ID NO: 1920470 - RNA, 19 nt, Artificial Sequence
  Description of Artificial Sequence: Synthetic oligonucleotide
  Sense strand starting at position 1716 of SEQ ID NO: 1879623
agccgauuguguggugaug

SEQ ID NO: 1920471 - RNA, 19 nt, Artificial Sequence
  Description of Artificial Sequence: Synthetic oligonucleotide
  Antisense strand to SEQ ID NO: 1920470
caucaccacacaaucggcu

SEQ ID NO: 1920472 - RNA, 19 nt, Artificial Sequence
  Description of Artificial Sequence: Synthetic oligonucleotide
  Sense strand starting at position 1717 of SEQ ID NO: 1879623
gccgauuguguggugaugu

SEQ ID NO: 1920473 - RNA, 19 nt, Artificial Sequence
  Description of Artificial Sequence: Synthetic oligonucleotide
  Antisense strand to SEQ ID NO: 1920472
acaucaccacacaaucggc

SEQ ID NO: 1920474 - RNA, 19 nt, Artificial Sequence
  Description of Artificial Sequence: Synthetic oligonucleotide
  Sense strand starting at position 1719 of SEQ ID NO: 1879623
cgauuguguggugauguga

SEQ ID NO: 1920475 - RNA, 19 nt, Artificial Sequence
  Description of Artificial Sequence: Synthetic oligonucleotide
  Antisense strand to SEQ ID NO: 1920474
ucacaucaccacacaaucg

SEQ ID NO: 1920476 - RNA, 19 nt, Artificial Sequence
  Description of Artificial Sequence: Synthetic oligonucleotide
  Sense strand starting at position 1727 of SEQ ID NO: 1879623
uggugaugugaaugagcca

SEQ ID NO: 1920477 - RNA, 19 nt, Artificial Sequence
  Description of Artificial Sequence: Synthetic oligonucleotide
  Antisense strand to SEQ ID NO: 1920476
uggcucauucacaucacca

SEQ ID NO: 1920478 - RNA, 19 nt, Artificial Sequence
  Description of Artificial Sequence: Synthetic oligonucleotide
  Sense strand starting at position 1783 of SEQ ID NO: 1879623
caaggaauugcucacuguu

SEQ ID NO: 1920479 - RNA, 19 nt, Artificial Sequence
  Description of Artificial Sequence: Synthetic oligonucleotide
  Antisense strand to SEQ ID NO: 1920478
aacagugagcaauuccuug

SEQ ID NO: 1920480 - RNA, 19 nt, Artificial Sequence
  Description of Artificial Sequence: Synthetic oligonucleotide
  Sense strand starting at position 1785 of SEQ ID NO: 1879623
aggaauugcucacuguugu

SEQ ID NO: 1920481 - RNA, 19 nt, Artificial Sequence
  Description of Artificial Sequence: Synthetic oligonucleotide
  Antisense strand to SEQ ID NO: 1920480
acaacagugagcaauuccu

SEQ ID NO: 1920482 - RNA, 19 nt, Artificial Sequence
  Description of Artificial Sequence: Synthetic oligonucleotide
  Sense strand starting at position 2015 of SEQ ID NO: 1879623
uuucucagguguuauagau

SEQ ID NO: 1920483 - RNA, 19 nt, Artificial Sequence
  Description of Artificial Sequence: Synthetic oligonucleotide
  Antisense strand to SEQ ID NO: 1920482
aucuauaacaccugagaaa

SEQ ID NO: 1920484 - RNA, 19 nt, Artificial Sequence
  Description of Artificial Sequence: Synthetic oligonucleotide
  Sense strand starting at position 2019 of SEQ ID NO: 1879623
ucagguguuauagauagcu

SEQ ID NO: 1920485 - RNA, 19 nt, Artificial Sequence
  Description of Artificial Sequence: Synthetic oligonucleotide
  Antisense strand to SEQ ID NO: 1920484
agcuaucuauaacaccuga

SEQ ID NO: 1920486 - RNA, 19 nt, Artificial Sequence
  Description of Artificial Sequence: Synthetic oligonucleotide
  Sense strand starting at position 2057 of SEQ ID NO: 1879623
ggugaaaugguuggcuugu

SEQ ID NO: 1920487 - RNA, 19 nt, Artificial Sequence
  Description of Artificial Sequence: Synthetic oligonucleotide
  Antisense strand to SEQ ID NO: 1920486
acaagccaaccauuucacc

SEQ ID NO: 1920488 - RNA, 19 nt, Artificial Sequence
  Description of Artificial Sequence: Synthetic oligonucleotide
  Sense strand starting at position 2058 of SEQ ID NO: 1879623
gugaaaugguuggcuugua

SEQ ID NO: 1920489 - RNA, 19 nt, Artificial Sequence
  Description of Artificial Sequence: Synthetic oligonucleotide
  Antisense strand to SEQ ID NO: 1920488
uacaagccaaccauuucac

SEQ ID NO: 1920490 - RNA, 19 nt, Artificial Sequence
  Description of Artificial Sequence: Synthetic oligonucleotide
  Sense strand starting at position 2059 of SEQ ID NO: 1879623
ugaaaugguuggcuuguau

SEQ ID NO: 1920491 - RNA, 19 nt, Artificial Sequence
  Description of Artificial Sequence: Synthetic oligonucleotide
  Antisense strand to SEQ ID NO: 1920490
auacaagccaaccauuuca

SEQ ID NO: 1920492 - RNA, 19 nt, Artificial Sequence
  Description of Artificial Sequence: Synthetic oligonucleotide
  Sense strand starting at position 2114 of SEQ ID NO: 1879623
ggaucacacucagcaugau

SEQ ID NO: 1920493 - RNA, 19 nt, Artificial Sequence
  Description of Artificial Sequence: Synthetic oligonucleotide
  Antisense strand to SEQ ID NO: 1920492
aucaugcugagugugaucc

SEQ ID NO: 1920494 - RNA, 19 nt, Artificial Sequence
  Description of Artificial Sequence: Synthetic oligonucleotide
  Sense strand starting at position 2215 of SEQ ID NO: 1879623
gugcucaccaaguggaauu

SEQ ID NO: 1920495 - RNA, 19 nt, Artificial Sequence
  Description of Artificial Sequence: Synthetic oligonucleotide
  Antisense strand to SEQ ID NO: 1920494
aauuccacuuggugagcac

SEQ ID NO: 1920496 - RNA, 19 nt, Artificial Sequence
  Description of Artificial Sequence: Synthetic oligonucleotide
  Sense strand starting at position 2226 of SEQ ID NO: 1879623
guggaauuggagugugacu

SEQ ID NO: 1920497 - RNA, 19 nt, Artificial Sequence
  Description of Artificial Sequence: Synthetic oligonucleotide
  Antisense strand to SEQ ID NO: 1920496
agucacacuccaauuccac

SEQ ID NO: 1920498 - RNA, 19 nt, Artificial Sequence
  Description of Artificial Sequence: Synthetic oligonucleotide
  Sense strand starting at position 2231 of SEQ ID NO: 1879623
auuggagugugacucugua

SEQ ID NO: 1920499 - RNA, 19 nt, Artificial Sequence
  Description of Artificial Sequence: Synthetic oligonucleotide
  Antisense strand to SEQ ID NO: 1920498
uacagagucacacuccaau

SEQ ID NO: 1920500 - RNA, 19 nt, Artificial Sequence
  Description of Artificial Sequence: Synthetic oligonucleotide
  Sense strand starting at position 2239 of SEQ ID NO: 1879623
gugacucuguagcagugau

SEQ ID NO: 1920501 - RNA, 19 nt, Artificial Sequence
  Description of Artificial Sequence: Synthetic oligonucleotide
  Antisense strand to SEQ ID NO: 1920500
aucacugcuacagagucac

SEQ ID NO: 1920502 - RNA, 19 nt, Artificial Sequence
  Description of Artificial Sequence: Synthetic oligonucleotide
  Sense strand starting at position 2292 of SEQ ID NO: 1879623
ccuuuacacgcguguuuaa

SEQ ID NO: 1920503 - RNA, 19 nt, Artificial Sequence
  Description of Artificial Sequence: Synthetic oligonucleotide
  Antisense strand to SEQ ID NO: 1920502
uuaaacacgcguguaaagg

SEQ ID NO: 1920504 - RNA, 19 nt, Artificial Sequence
  Description of Artificial Sequence: Synthetic oligonucleotide
  Sense strand starting at position 2301 of SEQ ID NO: 1879623
gcguguuuaaaugugugua

SEQ ID NO: 1920505 - RNA, 19 nt, Artificial Sequence
  Description of Artificial Sequence: Synthetic oligonucleotide
  Antisense strand to SEQ ID NO: 1920504
uacacacauuuaaacacgc

SEQ ID NO: 1920506 - RNA, 19 nt, Artificial Sequence
  Description of Artificial Sequence: Synthetic oligonucleotide
  Sense strand starting at position 2302 of SEQ ID NO: 1879623
cguguuuaaauguguguaa

SEQ ID NO: 1920507 - RNA, 19 nt, Artificial Sequence
  Description of Artificial Sequence: Synthetic oligonucleotide
  Antisense strand to SEQ ID NO: 1920506
uuacacacauuuaaacacg

SEQ ID NO: 1920508 - RNA, 19 nt, Artificial Sequence
  Description of Artificial Sequence: Synthetic oligonucleotide
  Sense strand starting at position 2303 of SEQ ID NO: 1879623
guguuuaaauguguguaaa

SEQ ID NO: 1920509 - RNA, 19 nt, Artificial Sequence
  Description of Artificial Sequence: Synthetic oligonucleotide
  Antisense strand to SEQ ID NO: 1920508
uuuacacacauuuaaacac

SEQ ID NO: 1920510 - RNA, 19 nt, Artificial Sequence
  Description of Artificial Sequence: Synthetic oligonucleotide
  Sense strand starting at position 2428 of SEQ ID NO: 1879623
gaaacaccgucucugugaa

SEQ ID NO: 1920511 - RNA, 19 nt, Artificial Sequence
  Description of Artificial Sequence: Synthetic oligonucleotide
  Antisense strand to SEQ ID NO: 1920510
uucacagagacgguguuuc

SEQ ID NO: 1920512 - RNA, 19 nt, Artificial Sequence
  Description of Artificial Sequence: Synthetic oligonucleotide
  Sense strand starting at position 2429 of SEQ ID NO: 1879623
aaacaccgucucugugaaa

SEQ ID NO: 1920513 - RNA, 19 nt, Artificial Sequence
  Description of Artificial Sequence: Synthetic oligonucleotide
  Antisense strand to SEQ ID NO: 1920512
uuucacagagacgguguuu

SEQ ID NO: 1920514 - RNA, 19 nt, Artificial Sequence
  Description of Artificial Sequence: Synthetic oligonucleotide
  Sense strand starting at position 2633 of SEQ ID NO: 1879623
uuaaaugcaccaugaugaa

SEQ ID NO: 1920515 - RNA, 19 nt, Artificial Sequence
  Description of Artificial Sequence: Synthetic oligonucleotide
  Antisense strand to SEQ ID NO: 1920514
uucaucauggugcauuuaa

SEQ ID NO: 1920516 - RNA, 19 nt, Artificial Sequence
  Description of Artificial Sequence: Synthetic oligonucleotide
  Sense strand starting at position 3392 of SEQ ID NO: 1879623
aauugucaucugcauggaa

SEQ ID NO: 1920517 - RNA, 19 nt, Artificial Sequence
  Description of Artificial Sequence: Synthetic oligonucleotide
  Antisense strand to SEQ ID NO: 1920516
uuccaugcagaugacaauu

SEQ ID NO: 1920518 - RNA, 19 nt, Artificial Sequence
  Description of Artificial Sequence: Synthetic oligonucleotide
  Sense strand starting at position 3476 of SEQ ID NO: 1879623
gguggccacucucauuauu

SEQ ID NO: 1920519 - RNA, 19 nt, Artificial Sequence
  Description of Artificial Sequence: Synthetic oligonucleotide
  Antisense strand to SEQ ID NO: 1920518
aauaaugagaguggccacc

SEQ ID NO: 1920520 - RNA, 19 nt, Artificial Sequence
  Description of Artificial Sequence: Synthetic oligonucleotide
  Sense strand starting at position 3509 of SEQ ID NO: 1879623
ggugaaacaucacagagca

SEQ ID NO: 1920521 - RNA, 19 nt, Artificial Sequence
  Description of Artificial Sequence: Synthetic oligonucleotide
  Antisense strand to SEQ ID NO: 1920520
ugcucugugauguuucacc

SEQ ID NO: 1920522 - RNA, 19 nt, Artificial Sequence
  Description of Artificial Sequence: Synthetic oligonucleotide
  Sense strand starting at position 3751 of SEQ ID NO: 1879623
gauaguugaucacaaggca

SEQ ID NO: 1920523 - RNA, 19 nt, Artificial Sequence
  Description of Artificial Sequence: Synthetic oligonucleotide
  Antisense strand to SEQ ID NO: 1920522
ugccuugugaucaacuauc

SEQ ID NO: 1920524 - RNA, 19 nt, Artificial Sequence
  Description of Artificial Sequence: Synthetic oligonucleotide
  Sense strand starting at position 399 of SEQ ID NO: 1879624
ggcccaacuuucgcuauuu

SEQ ID NO: 1920525 - RNA, 19 nt, Artificial Sequence
  Description of Artificial Sequence: Synthetic oligonucleotide
  Antisense strand to SEQ ID NO: 1920524
aaauagcgaaaguugggcc

SEQ ID NO: 1920526 - RNA, 19 nt, Artificial Sequence
  Description of Artificial Sequence: Synthetic oligonucleotide
  Sense strand starting at position 423 of SEQ ID NO: 1879624
augugagccuugucuaaga

SEQ ID NO: 1920527 - RNA, 19 nt, Artificial Sequence
  Description of Artificial Sequence: Synthetic oligonucleotide
  Antisense strand to SEQ ID NO: 1920526
ucuuagacaaggcucacau

SEQ ID NO: 1920528 - RNA, 19 nt, Artificial Sequence
  Description of Artificial Sequence: Synthetic oligonucleotide
  Sense strand starting at position 425 of SEQ ID NO: 1879624
gugagccuugucuaagauu

SEQ ID NO: 1920529 - RNA, 19 nt, Artificial Sequence
  Description of Artificial Sequence: Synthetic oligonucleotide
  Antisense strand to SEQ ID NO: 1920528
aaucuuagacaaggcucac

SEQ ID NO: 1920530 - RNA, 19 nt, Artificial Sequence
  Description of Artificial Sequence: Synthetic oligonucleotide
  Sense strand starting at position 434 of SEQ ID NO: 1879624
gucuaagauuauucgguga

SEQ ID NO: 1920531 - RNA, 19 nt, Artificial Sequence
  Description of Artificial Sequence: Synthetic oligonucleotide
  Antisense strand to SEQ ID NO: 1920530
ucaccgaauaaucuuagac

SEQ ID NO: 1920532 - RNA, 19 nt, Artificial Sequence
  Description of Artificial Sequence: Synthetic oligonucleotide
  Sense strand starting at position 438 of SEQ ID NO: 1879624
aagauuauucggugaggca

SEQ ID NO: 1920533 - RNA, 19 nt, Artificial Sequence
  Description of Artificial Sequence: Synthetic oligonucleotide
  Antisense strand to SEQ ID NO: 1920532
ugccucaccgaauaaucuu

SEQ ID NO: 1920534 - RNA, 19 nt, Artificial Sequence
  Description of Artificial Sequence: Synthetic oligonucleotide
  Sense strand starting at position 439 of SEQ ID NO: 1879624
agauuauucggugaggcag

SEQ ID NO: 1920535 - RNA, 19 nt, Artificial Sequence
  Description of Artificial Sequence: Synthetic oligonucleotide
  Antisense strand to SEQ ID NO: 1920534
cugccucaccgaauaaucu

SEQ ID NO: 1920536 - RNA, 19 nt, Artificial Sequence
  Description of Artificial Sequence: Synthetic oligonucleotide
  Sense strand starting at position 634 of SEQ ID NO: 1879624
cgaauaauauugccauaca

SEQ ID NO: 1920537 - RNA, 19 nt, Artificial Sequence
  Description of Artificial Sequence: Synthetic oligonucleotide
  Antisense strand to SEQ ID NO: 1920536
uguauggcaauauuauucg

SEQ ID NO: 1920538 - RNA, 19 nt, Artificial Sequence
  Description of Artificial Sequence: Synthetic oligonucleotide
  Sense strand starting at position 646 of SEQ ID NO: 1879624
ccauacaucugagugucuu

SEQ ID NO: 1920539 - RNA, 19 nt, Artificial Sequence
  Description of Artificial Sequence: Synthetic oligonucleotide
  Antisense strand to SEQ ID NO: 1920538
aagacacucagauguaugg

SEQ ID NO: 1920540 - RNA, 19 nt, Artificial Sequence
  Description of Artificial Sequence: Synthetic oligonucleotide
  Sense strand starting at position 665 of SEQ ID NO: 1879624
ccagguagcuucccucaaa

SEQ ID NO: 1920541 - RNA, 19 nt, Artificial Sequence
  Description of Artificial Sequence: Synthetic oligonucleotide
  Antisense strand to SEQ ID NO: 1920540
uuugagggaagcuaccugg

SEQ ID NO: 1920542 - RNA, 19 nt, Artificial Sequence
  Description of Artificial Sequence: Synthetic oligonucleotide
  Sense strand starting at position 698 of SEQ ID NO: 1879624
gcuccaaauuugccaaugu

SEQ ID NO: 1920543 - RNA, 19 nt, Artificial Sequence
  Description of Artificial Sequence: Synthetic oligonucleotide
  Antisense strand to SEQ ID NO: 1920542
acauuggcaaauuuggagc

SEQ ID NO: 1920544 - RNA, 19 nt, Artificial Sequence
  Description of Artificial Sequence: Synthetic oligonucleotide
  Sense strand starting at position 707 of SEQ ID NO: 1879624
uugccaauguuuccugaga

SEQ ID NO: 1920545 - RNA, 19 nt, Artificial Sequence
  Description of Artificial Sequence: Synthetic oligonucleotide
  Antisense strand to SEQ ID NO: 1920544
ucucaggaaacauuggcaa

SEQ ID NO: 1920546 - RNA, 19 nt, Artificial Sequence
  Description of Artificial Sequence: Synthetic oligonucleotide
  Sense strand starting at position 708 of SEQ ID NO: 1879624
ugccaauguuuccugagag

SEQ ID NO: 1920547 - RNA, 19 nt, Artificial Sequence
  Description of Artificial Sequence: Synthetic oligonucleotide
  Antisense strand to SEQ ID NO: 1920546
cucucaggaaacauuggca

SEQ ID NO: 1920548 - RNA, 19 nt, Artificial Sequence
  Description of Artificial Sequence: Synthetic oligonucleotide
  Sense strand starting at position 864 of SEQ ID NO: 1879624
ggaggagccguuuaggacu

SEQ ID NO: 1920549 - RNA, 19 nt, Artificial Sequence
  Description of Artificial Sequence: Synthetic oligonucleotide
  Antisense strand to SEQ ID NO: 1920548
aguccuaaacggcuccucc

SEQ ID NO: 1920550 - RNA, 19 nt, Artificial Sequence
  Description of Artificial Sequence: Synthetic oligonucleotide
  Sense strand starting at position 870 of SEQ ID NO: 1879624
gccguuuaggacuaagaca

SEQ ID NO: 1920551 - RNA, 19 nt, Artificial Sequence
  Description of Artificial Sequence: Synthetic oligonucleotide
  Antisense strand to SEQ ID NO: 1920550
ugucuuaguccuaaacggc

SEQ ID NO: 1920552 - RNA, 19 nt, Artificial Sequence
  Description of Artificial Sequence: Synthetic oligonucleotide
  Sense strand starting at position 1277 of SEQ ID NO: 1879624
uucugaauucuccggaaug

SEQ ID NO: 1920553 - RNA, 19 nt, Artificial Sequence
  Description of Artificial Sequence: Synthetic oligonucleotide
  Antisense strand to SEQ ID NO: 1920552
cauuccggagaauucagaa

SEQ ID NO: 1920554 - RNA, 19 nt, Artificial Sequence
  Description of Artificial Sequence: Synthetic oligonucleotide
  Sense strand starting at position 1279 of SEQ ID NO: 1879624
cugaauucuccggaaugug

SEQ ID NO: 1920555 - RNA, 19 nt, Artificial Sequence
  Description of Artificial Sequence: Synthetic oligonucleotide
  Antisense strand to SEQ ID NO: 1920554
cacauuccggagaauucag

SEQ ID NO: 1920556 - RNA, 19 nt, Artificial Sequence
  Description of Artificial Sequence: Synthetic oligonucleotide
  Sense strand starting at position 2082 of SEQ ID NO: 1879624
cucggagagcucuagagau

SEQ ID NO: 1920557 - RNA, 19 nt, Artificial Sequence
  Description of Artificial Sequence: Synthetic oligonucleotide
  Antisense strand to SEQ ID NO: 1920556
aucucuagagcucuccgag

SEQ ID NO: 1920558 - RNA, 19 nt, Artificial Sequence
  Description of Artificial Sequence: Synthetic oligonucleotide
  Sense strand starting at position 2347 of SEQ ID NO: 1879624
ggaagagcucgcgaaucca

SEQ ID NO: 1920559 - RNA, 19 nt, Artificial Sequence
  Description of Artificial Sequence: Synthetic oligonucleotide
  Antisense strand to SEQ ID NO: 1920558
uggauucgcgagcucuucc

SEQ ID NO: 1920560 - RNA, 19 nt, Artificial Sequence
  Description of Artificial Sequence: Synthetic oligonucleotide
  Sense strand starting at position 2487 of SEQ ID NO: 1879624
gugccaggaucuuccagaa

SEQ ID NO: 1920561 - RNA, 19 nt, Artificial Sequence
  Description of Artificial Sequence: Synthetic oligonucleotide
  Antisense strand to SEQ ID NO: 1920560
uucuggaagauccuggcac

SEQ ID NO: 1920562 - RNA, 19 nt, Artificial Sequence
  Description of Artificial Sequence: Synthetic oligonucleotide
  Sense strand starting at position 2556 of SEQ ID NO: 1879624
cccagugcccuuuggagaa

SEQ ID NO: 1920563 - RNA, 19 nt, Artificial Sequence
  Description of Artificial Sequence: Synthetic oligonucleotide
  Antisense strand to SEQ ID NO: 1920562
uucuccaaagggcacuggg

SEQ ID NO: 1920564 - RNA, 19 nt, Artificial Sequence
  Description of Artificial Sequence: Synthetic oligonucleotide
  Sense strand starting at position 2560 of SEQ ID NO: 1879624
gugcccuuuggagaaacaa

SEQ ID NO: 1920565 - RNA, 19 nt, Artificial Sequence
  Description of Artificial Sequence: Synthetic oligonucleotide
  Antisense strand to SEQ ID NO: 1920564
uuguuucuccaaagggcac

SEQ ID NO: 1920566 - RNA, 19 nt, Artificial Sequence
  Description of Artificial Sequence: Synthetic oligonucleotide
  Sense strand starting at position 2568 of SEQ ID NO: 1879624
uggagaaacaaguaugugu

SEQ ID NO: 1920567 - RNA, 19 nt, Artificial Sequence
  Description of Artificial Sequence: Synthetic oligonucleotide
  Antisense strand to SEQ ID NO: 1920566
acacauacuuguuucucca

SEQ ID NO: 1920568 - RNA, 19 nt, Artificial Sequence
  Description of Artificial Sequence: Synthetic oligonucleotide
  Sense strand starting at position 2632 of SEQ ID NO: 1879624
auccuaucgcuacaucgau

SEQ ID NO: 1920569 - RNA, 19 nt, Artificial Sequence
  Description of Artificial Sequence: Synthetic oligonucleotide
  Antisense strand to SEQ ID NO: 1920568
aucgauguagcgauaggau

SEQ ID NO: 1920570 - RNA, 19 nt, Artificial Sequence
  Description of Artificial Sequence: Synthetic oligonucleotide
  Sense strand starting at position 2638 of SEQ ID NO: 1879624
ucgcuacaucgauaaagug

SEQ ID NO: 1920571 - RNA, 19 nt, Artificial Sequence
  Description of Artificial Sequence: Synthetic oligonucleotide
  Antisense strand to SEQ ID NO: 1920570
cacuuuaucgauguagcga

SEQ ID NO: 1920572 - RNA, 19 nt, Artificial Sequence
  Description of Artificial Sequence: Synthetic oligonucleotide
  Sense strand starting at position 2657 of SEQ ID NO: 1879624
ugcuccuuugggcaaauaa

SEQ ID NO: 1920573 - RNA, 19 nt, Artificial Sequence
  Description of Artificial Sequence: Synthetic oligonucleotide
  Antisense strand to SEQ ID NO: 1920572
uuauuugcccaaaggagca

SEQ ID NO: 1920574 - RNA, 19 nt, Artificial Sequence
  Description of Artificial Sequence: Synthetic oligonucleotide
  Sense strand starting at position 2736 of SEQ ID NO: 1879624
ugcugugaggaguaaauca

SEQ ID NO: 1920575 - RNA, 19 nt, Artificial Sequence
  Description of Artificial Sequence: Synthetic oligonucleotide
  Antisense strand to SEQ ID NO: 1920574
ugauuuacuccucacagca

SEQ ID NO: 1920576 - RNA, 19 nt, Artificial Sequence
  Description of Artificial Sequence: Synthetic oligonucleotide
  Sense strand starting at position 2795 of SEQ ID NO: 1879624
gcaaguacgaguucgcuuu

SEQ ID NO: 1920577 - RNA, 19 nt, Artificial Sequence
  Description of Artificial Sequence: Synthetic oligonucleotide
  Antisense strand to SEQ ID NO: 1920576
aaagcgaacucguacuugc

SEQ ID NO: 1920578 - RNA, 19 nt, Artificial Sequence
  Description of Artificial Sequence: Synthetic oligonucleotide
  Sense strand starting at position 2858 of SEQ ID NO: 1879624
guggauuucuccguccuca

SEQ ID NO: 1920579 - RNA, 19 nt, Artificial Sequence
  Description of Artificial Sequence: Synthetic oligonucleotide
  Antisense strand to SEQ ID NO: 1920578
ugaggacggagaaauccac

SEQ ID NO: 1920580 - RNA, 19 nt, Artificial Sequence
  Description of Artificial Sequence: Synthetic oligonucleotide
  Sense strand starting at position 2911 of SEQ ID NO: 1879624
ucauaagucuaagugggau

SEQ ID NO: 1920581 - RNA, 19 nt, Artificial Sequence
  Description of Artificial Sequence: Synthetic oligonucleotide
  Antisense strand to SEQ ID NO: 1920580
aucccacuuagacuuauga

SEQ ID NO: 1920582 - RNA, 19 nt, Artificial Sequence
  Description of Artificial Sequence: Synthetic oligonucleotide
  Sense strand starting at position 2913 of SEQ ID NO: 1879624
auaagucuaagugggauau

SEQ ID NO: 1920583 - RNA, 19 nt, Artificial Sequence
  Description of Artificial Sequence: Synthetic oligonucleotide
  Antisense strand to SEQ ID NO: 1920582
auaucccacuuagacuuau

SEQ ID NO: 1920584 - RNA, 19 nt, Artificial Sequence
  Description of Artificial Sequence: Synthetic oligonucleotide
  Sense strand starting at position 2914 of SEQ ID NO: 1879624
uaagucuaagugggauauu

SEQ ID NO: 1920585 - RNA, 19 nt, Artificial Sequence
  Description of Artificial Sequence: Synthetic oligonucleotide
  Antisense strand to SEQ ID NO: 1920584
aauaucccacuuagacuua

SEQ ID NO: 1920586 - RNA, 19 nt, Artificial Sequence
  Description of Artificial Sequence: Synthetic oligonucleotide
  Sense strand starting at position 2915 of SEQ ID NO: 1879624
aagucuaagugggauauuu

SEQ ID NO: 1920587 - RNA, 19 nt, Artificial Sequence
  Description of Artificial Sequence: Synthetic oligonucleotide
  Antisense strand to SEQ ID NO: 1920586
aaauaucccacuuagacuu

SEQ ID NO: 1920588 - RNA, 19 nt, Artificial Sequence
  Description of Artificial Sequence: Synthetic oligonucleotide
  Sense strand starting at position 2979 of SEQ ID NO: 1879624
uauaauauguggguuggua

SEQ ID NO: 1920589 - RNA, 19 nt, Artificial Sequence
  Description of Artificial Sequence: Synthetic oligonucleotide
  Antisense strand to SEQ ID NO: 1920588
uaccaacccacauauuaua

SEQ ID NO: 1920590 - RNA, 19 nt, Artificial Sequence
  Description of Artificial Sequence: Synthetic oligonucleotide
  Sense strand starting at position 3035 of SEQ ID NO: 1879624
ucagaugccugucucauuu

SEQ ID NO: 1920591 - RNA, 19 nt, Artificial Sequence
  Description of Artificial Sequence: Synthetic oligonucleotide
  Antisense strand to SEQ ID NO: 1920590
aaaugagacaggcaucuga

SEQ ID NO: 1920592 - RNA, 19 nt, Artificial Sequence
  Description of Artificial Sequence: Synthetic oligonucleotide
  Sense strand starting at position 3152 of SEQ ID NO: 1879624
ucgugugcggaucuuguaa

SEQ ID NO: 1920593 - RNA, 19 nt, Artificial Sequence
  Description of Artificial Sequence: Synthetic oligonucleotide
  Antisense strand to SEQ ID NO: 1920592
uuacaagauccgcacacga

SEQ ID NO: 1920594 - RNA, 19 nt, Artificial Sequence
  Description of Artificial Sequence: Synthetic oligonucleotide
  Sense strand starting at position 3212 of SEQ ID NO: 1879624
uuguauagauuccuuggaa

SEQ ID NO: 1920595 - RNA, 19 nt, Artificial Sequence
  Description of Artificial Sequence: Synthetic oligonucleotide
  Antisense strand to SEQ ID NO: 1920594
uuccaaggaaucuauacaa

SEQ ID NO: 1920596 - RNA, 19 nt, Artificial Sequence
  Description of Artificial Sequence: Synthetic oligonucleotide
  Sense strand starting at position 3213 of SEQ ID NO: 1879624
uguauagauuccuuggaau

SEQ ID NO: 1920597 - RNA, 19 nt, Artificial Sequence
  Description of Artificial Sequence: Synthetic oligonucleotide
  Antisense strand to SEQ ID NO: 1920596
auuccaaggaaucuauaca

SEQ ID NO: 1920598 - RNA, 19 nt, Artificial Sequence
  Description of Artificial Sequence: Synthetic oligonucleotide
  Sense strand starting at position 3323 of SEQ ID NO: 1879624
gauuuccaguagucuguua

SEQ ID NO: 1920599 - RNA, 19 nt, Artificial Sequence
  Description of Artificial Sequence: Synthetic oligonucleotide
  Antisense strand to SEQ ID NO: 1920598
uaacagacuacuggaaauc

SEQ ID NO: 1920600 - RNA, 19 nt, Artificial Sequence
  Description of Artificial Sequence: Synthetic oligonucleotide
  Sense strand starting at position 3726 of SEQ ID NO: 1879624
uaaguaugacauuaguugu

SEQ ID NO: 1920601 - RNA, 19 nt, Artificial Sequence
  Description of Artificial Sequence: Synthetic oligonucleotide
  Antisense strand to SEQ ID NO: 1920600
acaacuaaugucauacuua

SEQ ID NO: 1920602 - RNA, 19 nt, Artificial Sequence
  Description of Artificial Sequence: Synthetic oligonucleotide
  Sense strand starting at position 3734 of SEQ ID NO: 1879624
acauuaguugugggaguuu

SEQ ID NO: 1920603 - RNA, 19 nt, Artificial Sequence
  Description of Artificial Sequence: Synthetic oligonucleotide
  Antisense strand to SEQ ID NO: 1920602
aaacucccacaacuaaugu

SEQ ID NO: 1920604 - RNA, 19 nt, Artificial Sequence
  Description of Artificial Sequence: Synthetic oligonucleotide
  Sense strand starting at position 18 of SEQ ID NO: 1879625
cgguucuuucugggaagag

SEQ ID NO: 1920605 - RNA, 19 nt, Artificial Sequence
  Description of Artificial Sequence: Synthetic oligonucleotide
  Antisense strand to SEQ ID NO: 1920604
cucuucccagaaagaaccg

SEQ ID NO: 1920606 - RNA, 19 nt, Artificial Sequence
  Description of Artificial Sequence: Synthetic oligonucleotide
  Sense strand starting at position 19 of SEQ ID NO: 1879625
gguucuuucugggaagagg

SEQ ID NO: 1920607 - RNA, 19 nt, Artificial Sequence
  Description of Artificial Sequence: Synthetic oligonucleotide
  Antisense strand to SEQ ID NO: 1920606
ccucuucccagaaagaacc

SEQ ID NO: 1920608 - RNA, 19 nt, Artificial Sequence
  Description of Artificial Sequence: Synthetic oligonucleotide
  Sense strand starting at position 66 of SEQ ID NO: 1879625
gccuccauccaagaagguu

SEQ ID NO: 1920609 - RNA, 19 nt, Artificial Sequence
  Description of Artificial Sequence: Synthetic oligonucleotide
  Antisense strand to SEQ ID NO: 1920608
aaccuucuuggauggaggc

SEQ ID NO: 1920610 - RNA, 19 nt, Artificial Sequence
  Description of Artificial Sequence: Synthetic oligonucleotide
  Sense strand starting at position 426 of SEQ ID NO: 1879625
aaagaaagguguucuccau

SEQ ID NO: 1920611 - RNA, 19 nt, Artificial Sequence
  Description of Artificial Sequence: Synthetic oligonucleotide
  Antisense strand to SEQ ID NO: 1920610
auggagaacaccuuucuuu

SEQ ID NO: 1920612 - RNA, 19 nt, Artificial Sequence
  Description of Artificial Sequence: Synthetic oligonucleotide
  Sense strand starting at position 435 of SEQ ID NO: 1879625
uguucuccauucuuaggaa

SEQ ID NO: 1920613 - RNA, 19 nt, Artificial Sequence
  Description of Artificial Sequence: Synthetic oligonucleotide
  Antisense strand to SEQ ID NO: 1920612
uuccuaagaauggagaaca

SEQ ID NO: 1920614 - RNA, 19 nt, Artificial Sequence
  Description of Artificial Sequence: Synthetic oligonucleotide
  Sense strand starting at position 465 of SEQ ID NO: 1879625
ggaauccauacuuguguga

SEQ ID NO: 1920615 - RNA, 19 nt, Artificial Sequence
  Description of Artificial Sequence: Synthetic oligonucleotide
  Antisense strand to SEQ ID NO: 1920614
ucacacaaguauggauucc

SEQ ID NO: 1920616 - RNA, 19 nt, Artificial Sequence
  Description of Artificial Sequence: Synthetic oligonucleotide
  Sense strand starting at position 468 of SEQ ID NO: 1879625
auccauacuugugugaaag

SEQ ID NO: 1920617 - RNA, 19 nt, Artificial Sequence
  Description of Artificial Sequence: Synthetic oligonucleotide
  Antisense strand to SEQ ID NO: 1920616
cuuucacacaaguauggau

SEQ ID NO: 1920618 - RNA, 19 nt, Artificial Sequence
  Description of Artificial Sequence: Synthetic oligonucleotide
  Sense strand starting at position 469 of SEQ ID NO: 1879625
uccauacuugugugaaagu

SEQ ID NO: 1920619 - RNA, 19 nt, Artificial Sequence
  Description of Artificial Sequence: Synthetic oligonucleotide
  Antisense strand to SEQ ID NO: 1920618
acuuucacacaaguaugga

SEQ ID NO: 1920620 - RNA, 19 nt, Artificial Sequence
  Description of Artificial Sequence: Synthetic oligonucleotide
  Sense strand starting at position 510 of SEQ ID NO: 1879625
uggagauucuaaggaaacu

SEQ ID NO: 1920621 - RNA, 19 nt, Artificial Sequence
  Description of Artificial Sequence: Synthetic oligonucleotide
  Antisense strand to SEQ ID NO: 1920620
aguuuccuuagaaucucca

SEQ ID NO: 1920622 - RNA, 19 nt, Artificial Sequence
  Description of Artificial Sequence: Synthetic oligonucleotide
  Sense strand starting at position 724 of SEQ ID NO: 1879625
cugccuacuccuggugaga

SEQ ID NO: 1920623 - RNA, 19 nt, Artificial Sequence
  Description of Artificial Sequence: Synthetic oligonucleotide
  Antisense strand to SEQ ID NO: 1920622
ucucaccaggaguaggcag

SEQ ID NO: 1920624 - RNA, 19 nt, Artificial Sequence
  Description of Artificial Sequence: Synthetic oligonucleotide
  Sense strand starting at position 998 of SEQ ID NO: 1879625
aguagauauuacucauaca

SEQ ID NO: 1920625 - RNA, 19 nt, Artificial Sequence
  Description of Artificial Sequence: Synthetic oligonucleotide
  Antisense strand to SEQ ID NO: 1920624
uguaugaguaauaucuacu

SEQ ID NO: 1920626 - RNA, 19 nt, Artificial Sequence
  Description of Artificial Sequence: Synthetic oligonucleotide
  Sense strand starting at position 1099 of SEQ ID NO: 1879625
agguaucuauugccugaga

SEQ ID NO: 1920627 - RNA, 19 nt, Artificial Sequence
  Description of Artificial Sequence: Synthetic oligonucleotide
  Antisense strand to SEQ ID NO: 1920626
ucucaggcaauagauaccu

SEQ ID NO: 1920628 - RNA, 19 nt, Artificial Sequence
  Description of Artificial Sequence: Synthetic oligonucleotide
  Sense strand starting at position 1100 of SEQ ID NO: 1879625
gguaucuauugccugagau

SEQ ID NO: 1920629 - RNA, 19 nt, Artificial Sequence
  Description of Artificial Sequence: Synthetic oligonucleotide
  Antisense strand to SEQ ID NO: 1920628
aucucaggcaauagauacc

SEQ ID NO: 1920630 - RNA, 19 nt, Artificial Sequence
  Description of Artificial Sequence: Synthetic oligonucleotide
  Sense strand starting at position 1101 of SEQ ID NO: 1879625
guaucuauugccugagauc

SEQ ID NO: 1920631 - RNA, 19 nt, Artificial Sequence
  Description of Artificial Sequence: Synthetic oligonucleotide
  Antisense strand to SEQ ID NO: 1920630
gaucucaggcaauagauac

SEQ ID NO: 1920632 - RNA, 19 nt, Artificial Sequence
  Description of Artificial Sequence: Synthetic oligonucleotide
  Sense strand starting at position 1249 of SEQ ID NO: 1879625
ggacgcggcuccuuuaaga

SEQ ID NO: 1920633 - RNA, 19 nt, Artificial Sequence
  Description of Artificial Sequence: Synthetic oligonucleotide
  Antisense strand to SEQ ID NO: 1920632
ucuuaaaggagccgcgucc

SEQ ID NO: 1920634 - RNA, 19 nt, Artificial Sequence
  Description of Artificial Sequence: Synthetic oligonucleotide
  Sense strand starting at position 1271 of SEQ ID NO: 1879625
gagcucuuguucuuaugaa

SEQ ID NO: 1920635 - RNA, 19 nt, Artificial Sequence
  Description of Artificial Sequence: Synthetic oligonucleotide
  Antisense strand to SEQ ID NO: 1920634
uucauaagaacaagagcuc

SEQ ID NO: 1920636 - RNA, 19 nt, Artificial Sequence
  Description of Artificial Sequence: Synthetic oligonucleotide
  Sense strand starting at position 1278 of SEQ ID NO: 1879625
uguucuuaugaaugaacuu

SEQ ID NO: 1920637 - RNA, 19 nt, Artificial Sequence
  Description of Artificial Sequence: Synthetic oligonucleotide
  Antisense strand to SEQ ID NO: 1920636
aaguucauucauaagaaca

SEQ ID NO: 1920638 - RNA, 19 nt, Artificial Sequence
  Description of Artificial Sequence: Synthetic oligonucleotide
  Sense strand starting at position 1313 of SEQ ID NO: 1879625
agaguugaggcgcaagagu

SEQ ID NO: 1920639 - RNA, 19 nt, Artificial Sequence
  Description of Artificial Sequence: Synthetic oligonucleotide
  Antisense strand to SEQ ID NO: 1920638
acucuugcgccucaacucu

SEQ ID NO: 1920640 - RNA, 19 nt, Artificial Sequence
  Description of Artificial Sequence: Synthetic oligonucleotide
  Sense strand starting at position 1432 of SEQ ID NO: 1879625
ccgcucaacacggaagaau

SEQ ID NO: 1920641 - RNA, 19 nt, Artificial Sequence
  Description of Artificial Sequence: Synthetic oligonucleotide
  Antisense strand to SEQ ID NO: 1920640
auucuuccguguugagcgg

SEQ ID NO: 1920642 - RNA, 19 nt, Artificial Sequence
  Description of Artificial Sequence: Synthetic oligonucleotide
  Sense strand starting at position 2540 of SEQ ID NO: 1879625
cucccaagucguggagaga

SEQ ID NO: 1920643 - RNA, 19 nt, Artificial Sequence
  Description of Artificial Sequence: Synthetic oligonucleotide
  Antisense strand to SEQ ID NO: 1920642
ucucuccacgacuugggag

SEQ ID NO: 1920644 - RNA, 19 nt, Artificial Sequence
  Description of Artificial Sequence: Synthetic oligonucleotide
  Sense strand starting at position 2541 of SEQ ID NO: 1879625
ucccaagucguggagagaa

SEQ ID NO: 1920645 - RNA, 19 nt, Artificial Sequence
  Description of Artificial Sequence: Synthetic oligonucleotide
  Antisense strand to SEQ ID NO: 1920644
uucucuccacgacuuggga

SEQ ID NO: 1920646 - RNA, 19 nt, Artificial Sequence
  Description of Artificial Sequence: Synthetic oligonucleotide
  Sense strand starting at position 2726 of SEQ ID NO: 1879625
gcaacuguuauguagcaga

SEQ ID NO: 1920647 - RNA, 19 nt, Artificial Sequence
  Description of Artificial Sequence: Synthetic oligonucleotide
  Antisense strand to SEQ ID NO: 1920646
ucugcuacauaacaguugc

SEQ ID NO: 1920648 - RNA, 19 nt, Artificial Sequence
  Description of Artificial Sequence: Synthetic oligonucleotide
  Sense strand starting at position 2837 of SEQ ID NO: 1879625
ggguguaugugucucccaa

SEQ ID NO: 1920649 - RNA, 19 nt, Artificial Sequence
  Description of Artificial Sequence: Synthetic oligonucleotide
  Antisense strand to SEQ ID NO: 1920648
uugggagacacauacaccc

SEQ ID NO: 1920650 - RNA, 19 nt, Artificial Sequence
  Description of Artificial Sequence: Synthetic oligonucleotide
  Sense strand starting at position 2839 of SEQ ID NO: 1879625
guguaugugucucccaaca

SEQ ID NO: 1920651 - RNA, 19 nt, Artificial Sequence
  Description of Artificial Sequence: Synthetic oligonucleotide
  Antisense strand to SEQ ID NO: 1920650
uguugggagacacauacac

SEQ ID NO: 1920652 - RNA, 19 nt, Artificial Sequence
  Description of Artificial Sequence: Synthetic oligonucleotide
  Sense strand starting at position 2868 of SEQ ID NO: 1879625
ggagauacauggcuccaga

SEQ ID NO: 1920653 - RNA, 19 nt, Artificial Sequence
  Description of Artificial Sequence: Synthetic oligonucleotide
  Antisense strand to SEQ ID NO: 1920652
ucuggagccauguaucucc

SEQ ID NO: 1920654 - RNA, 19 nt, Artificial Sequence
  Description of Artificial Sequence: Synthetic oligonucleotide
  Sense strand starting at position 2887 of SEQ ID NO: 1879625
ggcacugaggguugaaaca

SEQ ID NO: 1920655 - RNA, 19 nt, Artificial Sequence
  Description of Artificial Sequence: Synthetic oligonucleotide
  Antisense strand to SEQ ID NO: 1920654
uguuucaacccucagugcc

SEQ ID NO: 1920656 - RNA, 19 nt, Artificial Sequence
  Description of Artificial Sequence: Synthetic oligonucleotide
  Sense strand starting at position 2931 of SEQ ID NO: 1879625
ccagaaaugugguccucaa

SEQ ID NO: 1920657 - RNA, 19 nt, Artificial Sequence
  Description of Artificial Sequence: Synthetic oligonucleotide
  Antisense strand to SEQ ID NO: 1920656
uugaggaccacauuucugg

SEQ ID NO: 1920658 - RNA, 19 nt, Artificial Sequence
  Description of Artificial Sequence: Synthetic oligonucleotide
  Sense strand starting at position 2961 of SEQ ID NO: 1879625
agggcauuaguuuggaaca

SEQ ID NO: 1920659 - RNA, 19 nt, Artificial Sequence
  Description of Artificial Sequence: Synthetic oligonucleotide
  Antisense strand to SEQ ID NO: 1920658
uguuccaaacuaaugcccu

SEQ ID NO: 1920660 - RNA, 19 nt, Artificial Sequence
  Description of Artificial Sequence: Synthetic oligonucleotide
  Sense strand starting at position 3024 of SEQ ID NO: 1879625
cucugagucccuuauguca

SEQ ID NO: 1920661 - RNA, 19 nt, Artificial Sequence
  Description of Artificial Sequence: Synthetic oligonucleotide
  Antisense strand to SEQ ID NO: 1920660
ugacauaagggacucagag

SEQ ID NO: 1920662 - RNA, 19 nt, Artificial Sequence
  Description of Artificial Sequence: Synthetic oligonucleotide
  Sense strand starting at position 3055 of SEQ ID NO: 1879625
ucuuuccaguucucugauu

SEQ ID NO: 1920663 - RNA, 19 nt, Artificial Sequence
  Description of Artificial Sequence: Synthetic oligonucleotide
  Antisense strand to SEQ ID NO: 1920662
aaucagagaacuggaaaga

SEQ ID NO: 1920664 - RNA, 19 nt, Artificial Sequence
  Description of Artificial Sequence: Synthetic oligonucleotide
  Sense strand starting at position 3057 of SEQ ID NO: 1879625
uuuccaguucucugauuag

SEQ ID NO: 1920665 - RNA, 19 nt, Artificial Sequence
  Description of Artificial Sequence: Synthetic oligonucleotide
  Antisense strand to SEQ ID NO: 1920664
cuaaucagagaacuggaaa

SEQ ID NO: 1920666 - RNA, 19 nt, Artificial Sequence
  Description of Artificial Sequence: Synthetic oligonucleotide
  Sense strand starting at position 3060 of SEQ ID NO: 1879625
ccaguucucugauuaguga

SEQ ID NO: 1920667 - RNA, 19 nt, Artificial Sequence
  Description of Artificial Sequence: Synthetic oligonucleotide
  Antisense strand to SEQ ID NO: 1920666
ucacuaaucagagaacugg

SEQ ID NO: 1920668 - RNA, 19 nt, Artificial Sequence
  Description of Artificial Sequence: Synthetic oligonucleotide
  Sense strand starting at position 3061 of SEQ ID NO: 1879625
caguucucugauuagugaa

SEQ ID NO: 1920669 - RNA, 19 nt, Artificial Sequence
  Description of Artificial Sequence: Synthetic oligonucleotide
  Antisense strand to SEQ ID NO: 1920668
uucacuaaucagagaacug

SEQ ID NO: 1920670 - RNA, 19 nt, Artificial Sequence
  Description of Artificial Sequence: Synthetic oligonucleotide
  Sense strand starting at position 3260 of SEQ ID NO: 1879625
gccauugcugagcagaaga

SEQ ID NO: 1920671 - RNA, 19 nt, Artificial Sequence
  Description of Artificial Sequence: Synthetic oligonucleotide
  Antisense strand to SEQ ID NO: 1920670
ucuucugcucagcaauggc

SEQ ID NO: 1920672 - RNA, 19 nt, Artificial Sequence
  Description of Artificial Sequence: Synthetic oligonucleotide
  Sense strand starting at position 3340 of SEQ ID NO: 1879625
gugugacacuguucugucu

SEQ ID NO: 1920673 - RNA, 19 nt, Artificial Sequence
  Description of Artificial Sequence: Synthetic oligonucleotide
  Antisense strand to SEQ ID NO: 1920672
agacagaacagugucacac

SEQ ID NO: 1920674 - RNA, 19 nt, Artificial Sequence
  Description of Artificial Sequence: Synthetic oligonucleotide
  Sense strand starting at position 3517 of SEQ ID NO: 1879625
uagcuuagggccugaauua

SEQ ID NO: 1920675 - RNA, 19 nt, Artificial Sequence
  Description of Artificial Sequence: Synthetic oligonucleotide
  Antisense strand to SEQ ID NO: 1920674
uaauucaggcccuaagcua

SEQ ID NO: 1920676 - RNA, 19 nt, Artificial Sequence
  Description of Artificial Sequence: Synthetic oligonucleotide
  Sense strand starting at position 3518 of SEQ ID NO: 1879625
agcuuagggccugaauuau

SEQ ID NO: 1920677 - RNA, 19 nt, Artificial Sequence
  Description of Artificial Sequence: Synthetic oligonucleotide
  Antisense strand to SEQ ID NO: 1920676
auaauucaggcccuaagcu

SEQ ID NO: 1920678 - RNA, 19 nt, Artificial Sequence
  Description of Artificial Sequence: Synthetic oligonucleotide
  Sense strand starting at position 3538 of SEQ ID NO: 1879625
guguucagugaaugaaugu

SEQ ID NO: 1920679 - RNA, 19 nt, Artificial Sequence
  Description of Artificial Sequence: Synthetic oligonucleotide
  Antisense strand to SEQ ID NO: 1920678
acauucauucacugaacac

SEQ ID NO: 1920680 - RNA, 19 nt, Artificial Sequence
  Description of Artificial Sequence: Synthetic oligonucleotide
  Sense strand starting at position 3605 of SEQ ID NO: 1879625
agcccuaagugucuccauu

SEQ ID NO: 1920681 - RNA, 19 nt, Artificial Sequence
  Description of Artificial Sequence: Synthetic oligonucleotide
  Antisense strand to SEQ ID NO: 1920680
aauggagacacuuagggcu

SEQ ID NO: 1920682 - RNA, 19 nt, Artificial Sequence
  Description of Artificial Sequence: Synthetic oligonucleotide
  Sense strand starting at position 3655 of SEQ ID NO: 1879625
aguuaaccucccuguguaa

SEQ ID NO: 1920683 - RNA, 19 nt, Artificial Sequence
  Description of Artificial Sequence: Synthetic oligonucleotide
  Antisense strand to SEQ ID NO: 1920682
uuacacagggagguuaacu

SEQ ID NO: 1920684 - RNA, 19 nt, Artificial Sequence
  Description of Artificial Sequence: Synthetic oligonucleotide
  Sense strand starting at position 189 of SEQ ID NO: 1879626
uguaucagccucugaaagu

SEQ ID NO: 1920685 - RNA, 19 nt, Artificial Sequence
  Description of Artificial Sequence: Synthetic oligonucleotide
  Antisense strand to SEQ ID NO: 1920684
acuuucagaggcugauaca

SEQ ID NO: 1920686 - RNA, 19 nt, Artificial Sequence
  Description of Artificial Sequence: Synthetic oligonucleotide
  Sense strand starting at position 287 of SEQ ID NO: 1879626
ccugaaguguugccaaaug

SEQ ID NO: 1920687 - RNA, 19 nt, Artificial Sequence
  Description of Artificial Sequence: Synthetic oligonucleotide
  Antisense strand to SEQ ID NO: 1920686
cauuuggcaacacuucagg

SEQ ID NO: 1920688 - RNA, 19 nt, Artificial Sequence
  Description of Artificial Sequence: Synthetic oligonucleotide
  Sense strand starting at position 424 of SEQ ID NO: 1879626
cauguuggguuauuggaau

SEQ ID NO: 1920689 - RNA, 19 nt, Artificial Sequence
  Description of Artificial Sequence: Synthetic oligonucleotide
  Antisense strand to SEQ ID NO: 1920688
auuccaauaacccaacaug

SEQ ID NO: 1920690 - RNA, 19 nt, Artificial Sequence
  Description of Artificial Sequence: Synthetic oligonucleotide
  Sense strand starting at position 510 of SEQ ID NO: 1879626
ugagauguguuucucugau

SEQ ID NO: 1920691 - RNA, 19 nt, Artificial Sequence
  Description of Artificial Sequence: Synthetic oligonucleotide
  Antisense strand to SEQ ID NO: 1920690
aucagagaaacacaucuca

SEQ ID NO: 1920692 - RNA, 19 nt, Artificial Sequence
  Description of Artificial Sequence: Synthetic oligonucleotide
  Sense strand starting at position 512 of SEQ ID NO: 1879626
agauguguuucucugauug

SEQ ID NO: 1920693 - RNA, 19 nt, Artificial Sequence
  Description of Artificial Sequence: Synthetic oligonucleotide
  Antisense strand to SEQ ID NO: 1920692
caaucagagaaacacaucu

SEQ ID NO: 1920694 - RNA, 19 nt, Artificial Sequence
  Description of Artificial Sequence: Synthetic oligonucleotide
  Sense strand starting at position 533 of SEQ ID NO: 1879626
ucaagauuaucagaggaaa

SEQ ID NO: 1920695 - RNA, 19 nt, Artificial Sequence
  Description of Artificial Sequence: Synthetic oligonucleotide
  Antisense strand to SEQ ID NO: 1920694
uuuccucugauaaucuuga

SEQ ID NO: 1920696 - RNA, 19 nt, Artificial Sequence
  Description of Artificial Sequence: Synthetic oligonucleotide
  Sense strand starting at position 591 of SEQ ID NO: 1879626
cugugugaucaguacacaa

SEQ ID NO: 1920697 - RNA, 19 nt, Artificial Sequence
  Description of Artificial Sequence: Synthetic oligonucleotide
  Antisense strand to SEQ ID NO: 1920696
uuguguacugaucacacag

SEQ ID NO: 1920698 - RNA, 19 nt, Artificial Sequence
  Description of Artificial Sequence: Synthetic oligonucleotide
  Sense strand starting at position 616 of SEQ ID NO: 1879626
agcuguagucagugauuuc

SEQ ID NO: 1920699 - RNA, 19 nt, Artificial Sequence
  Description of Artificial Sequence: Synthetic oligonucleotide
  Antisense strand to SEQ ID NO: 1920698
gaaaucacugacuacagcu

SEQ ID NO: 1920700 - RNA, 19 nt, Artificial Sequence
  Description of Artificial Sequence: Synthetic oligonucleotide
  Sense strand starting at position 617 of SEQ ID NO: 1879626
gcuguagucagugauuucu

SEQ ID NO: 1920701 - RNA, 19 nt, Artificial Sequence
  Description of Artificial Sequence: Synthetic oligonucleotide
  Antisense strand to SEQ ID NO: 1920700
agaaaucacugacuacagc

SEQ ID NO: 1920702 - RNA, 19 nt, Artificial Sequence
  Description of Artificial Sequence: Synthetic oligonucleotide
  Sense strand starting at position 619 of SEQ ID NO: 1879626
uguagucagugauuucugu

SEQ ID NO: 1920703 - RNA, 19 nt, Artificial Sequence
  Description of Artificial Sequence: Synthetic oligonucleotide
  Antisense strand to SEQ ID NO: 1920702
acagaaaucacugacuaca

SEQ ID NO: 1920704 - RNA, 19 nt, Artificial Sequence
  Description of Artificial Sequence: Synthetic oligonucleotide
  Sense strand starting at position 625 of SEQ ID NO: 1879626
cagugauuucugugcuccu

SEQ ID NO: 1920705 - RNA, 19 nt, Artificial Sequence
  Description of Artificial Sequence: Synthetic oligonucleotide
  Antisense strand to SEQ ID NO: 1920704
aggagcacagaaaucacug

SEQ ID NO: 1920706 - RNA, 19 nt, Artificial Sequence
  Description of Artificial Sequence: Synthetic oligonucleotide
  Sense strand starting at position 645 of SEQ ID NO: 1879626
aggccauacuguucucuaa

SEQ ID NO: 1920707 - RNA, 19 nt, Artificial Sequence
  Description of Artificial Sequence: Synthetic oligonucleotide
  Antisense strand to SEQ ID NO: 1920706
uuagagaacaguauggccu

SEQ ID NO: 1920708 - RNA, 19 nt, Artificial Sequence
  Description of Artificial Sequence: Synthetic oligonucleotide
  Sense strand starting at position 682 of SEQ ID NO: 1879626
ugccuuccaguuuaguauu

SEQ ID NO: 1920709 - RNA, 19 nt, Artificial Sequence
  Description of Artificial Sequence: Synthetic oligonucleotide
  Antisense strand to SEQ ID NO: 1920708
aauacuaaacuggaaggca

SEQ ID NO: 1920710 - RNA, 19 nt, Artificial Sequence
  Description of Artificial Sequence: Synthetic oligonucleotide
  Sense strand starting at position 910 of SEQ ID NO: 1879626
auacuuauaucuccaggua

SEQ ID NO: 1920711 - RNA, 19 nt, Artificial Sequence
  Description of Artificial Sequence: Synthetic oligonucleotide
  Antisense strand to SEQ ID NO: 1920710
uaccuggagauauaaguau

SEQ ID NO: 1920712 - RNA, 19 nt, Artificial Sequence
  Description of Artificial Sequence: Synthetic oligonucleotide
  Sense strand starting at position 924 of SEQ ID NO: 1879626
agguaaucacagugaugag

SEQ ID NO: 1920713 - RNA, 19 nt, Artificial Sequence
  Description of Artificial Sequence: Synthetic oligonucleotide
  Antisense strand to SEQ ID NO: 1920712
cucaucacugugauuaccu

SEQ ID NO: 1920714 - RNA, 19 nt, Artificial Sequence
  Description of Artificial Sequence: Synthetic oligonucleotide
  Sense strand starting at position 960 of SEQ ID NO: 1879626
guaguaaggcuuuacagau

SEQ ID NO: 1920715 - RNA, 19 nt, Artificial Sequence
  Description of Artificial Sequence: Synthetic oligonucleotide
  Antisense strand to SEQ ID NO: 1920714
aucuguaaagccuuacuac

SEQ ID NO: 1920716 - RNA, 19 nt, Artificial Sequence
  Description of Artificial Sequence: Synthetic oligonucleotide
  Sense strand starting at position 967 of SEQ ID NO: 1879626
ggcuuuacagauuaaacuu

SEQ ID NO: 1920717 - RNA, 19 nt, Artificial Sequence
  Description of Artificial Sequence: Synthetic oligonucleotide
  Antisense strand to SEQ ID NO: 1920716
aaguuuaaucuguaaagcc

SEQ ID NO: 1920718 - RNA, 19 nt, Artificial Sequence
  Description of Artificial Sequence: Synthetic oligonucleotide
  Sense strand starting at position 992 of SEQ ID NO: 1879626
cuuggcuuccuuuaggaaa

SEQ ID NO: 1920719 - RNA, 19 nt, Artificial Sequence
  Description of Artificial Sequence: Synthetic oligonucleotide
  Antisense strand to SEQ ID NO: 1920718
uuuccuaaaggaagccaag

SEQ ID NO: 1920720 - RNA, 19 nt, Artificial Sequence
  Description of Artificial Sequence: Synthetic oligonucleotide
  Sense strand starting at position 1456 of SEQ ID NO: 1879626
cgaggugggacuuggauaa

SEQ ID NO: 1920721 - RNA, 19 nt, Artificial Sequence
  Description of Artificial Sequence: Synthetic oligonucleotide
  Antisense strand to SEQ ID NO: 1920720
uuauccaagucccaccucg

SEQ ID NO: 1920722 - RNA, 19 nt, Artificial Sequence
  Description of Artificial Sequence: Synthetic oligonucleotide
  Sense strand starting at position 1474 of SEQ ID NO: 1879626
aagaucacccagugaaagu

SEQ ID NO: 1920723 - RNA, 19 nt, Artificial Sequence
  Description of Artificial Sequence: Synthetic oligonucleotide
  Antisense strand to SEQ ID NO: 1920722
acuuucacugggugaucuu

SEQ ID NO: 1920724 - RNA, 19 nt, Artificial Sequence
  Description of Artificial Sequence: Synthetic oligonucleotide
  Sense strand starting at position 1673 of SEQ ID NO: 1879626
ggaggaucgccuuagccua

SEQ ID NO: 1920725 - RNA, 19 nt, Artificial Sequence
  Description of Artificial Sequence: Synthetic oligonucleotide
  Antisense strand to SEQ ID NO: 1920724
uaggcuaaggcgauccucc

SEQ ID NO: 1920726 - RNA, 19 nt, Artificial Sequence
  Description of Artificial Sequence: Synthetic oligonucleotide
  Sense strand starting at position 1792 of SEQ ID NO: 1879626
aggcuuuaggcagggaaua

SEQ ID NO: 1920727 - RNA, 19 nt, Artificial Sequence
  Description of Artificial Sequence: Synthetic oligonucleotide
  Antisense strand to SEQ ID NO: 1920726
uauucccugccuaaagccu

SEQ ID NO: 1920728 - RNA, 19 nt, Artificial Sequence
  Description of Artificial Sequence: Synthetic oligonucleotide
  Sense strand starting at position 1793 of SEQ ID NO: 1879626
ggcuuuaggcagggaauaa

SEQ ID NO: 1920729 - RNA, 19 nt, Artificial Sequence
  Description of Artificial Sequence: Synthetic oligonucleotide
  Antisense strand to SEQ ID NO: 1920728
uuauucccugccuaaagcc

SEQ ID NO: 1920730 - RNA, 19 nt, Artificial Sequence
  Description of Artificial Sequence: Synthetic oligonucleotide
  Sense strand starting at position 1991 of SEQ ID NO: 1879626
ccagucacucuaggaguaa

SEQ ID NO: 1920731 - RNA, 19 nt, Artificial Sequence
  Description of Artificial Sequence: Synthetic oligonucleotide
  Antisense strand to SEQ ID NO: 1920730
uuacuccuagagugacugg

SEQ ID NO: 1920732 - RNA, 19 nt, Artificial Sequence
  Description of Artificial Sequence: Synthetic oligonucleotide
  Sense strand starting at position 2223 of SEQ ID NO: 1879626
uuuagauacugagcacuca

SEQ ID NO: 1920733 - RNA, 19 nt, Artificial Sequence
  Description of Artificial Sequence: Synthetic oligonucleotide
  Antisense strand to SEQ ID NO: 1920732
ugagugcucaguaucuaaa

SEQ ID NO: 1920734 - RNA, 19 nt, Artificial Sequence
  Description of Artificial Sequence: Synthetic oligonucleotide
  Sense strand starting at position 2434 of SEQ ID NO: 1879626
cccuuucuacuggacgauu

SEQ ID NO: 1920735 - RNA, 19 nt, Artificial Sequence
  Description of Artificial Sequence: Synthetic oligonucleotide
  Antisense strand to SEQ ID NO: 1920734
aaucguccaguagaaaggg

SEQ ID NO: 1920736 - RNA, 19 nt, Artificial Sequence
  Description of Artificial Sequence: Synthetic oligonucleotide
  Sense strand starting at position 2445 of SEQ ID NO: 1879626
ggacgauucucaucacuag

SEQ ID NO: 1920737 - RNA, 19 nt, Artificial Sequence
  Description of Artificial Sequence: Synthetic oligonucleotide
  Antisense strand to SEQ ID NO: 1920736
cuagugaugagaaucgucc

SEQ ID NO: 1920738 - RNA, 19 nt, Artificial Sequence
  Description of Artificial Sequence: Synthetic oligonucleotide
  Sense strand starting at position 2448 of SEQ ID NO: 1879626
cgauucucaucacuaggaa

SEQ ID NO: 1920739 - RNA, 19 nt, Artificial Sequence
  Description of Artificial Sequence: Synthetic oligonucleotide
  Antisense strand to SEQ ID NO: 1920738
uuccuagugaugagaaucg

SEQ ID NO: 1920740 - RNA, 19 nt, Artificial Sequence
  Description of Artificial Sequence: Synthetic oligonucleotide
  Sense strand starting at position 2466 of SEQ ID NO: 1879626
aaaggagguuuauuaucuu

SEQ ID NO: 1920741 - RNA, 19 nt, Artificial Sequence
  Description of Artificial Sequence: Synthetic oligonucleotide
  Antisense strand to SEQ ID NO: 1920740
aagauaauaaaccuccuuu

SEQ ID NO: 1920742 - RNA, 19 nt, Artificial Sequence
  Description of Artificial Sequence: Synthetic oligonucleotide
  Sense strand starting at position 2469 of SEQ ID NO: 1879626
ggagguuuauuaucuucca

SEQ ID NO: 1920743 - RNA, 19 nt, Artificial Sequence
  Description of Artificial Sequence: Synthetic oligonucleotide
  Antisense strand to SEQ ID NO: 1920742
uggaagauaauaaaccucc

SEQ ID NO: 1920744 - RNA, 19 nt, Artificial Sequence
  Description of Artificial Sequence: Synthetic oligonucleotide
  Sense strand starting at position 2472 of SEQ ID NO: 1879626
gguuuauuaucuuccagca

SEQ ID NO: 1920745 - RNA, 19 nt, Artificial Sequence
  Description of Artificial Sequence: Synthetic oligonucleotide
  Antisense strand to SEQ ID NO: 1920744
ugcuggaagauaauaaacc

SEQ ID NO: 1920746 - RNA, 19 nt, Artificial Sequence
  Description of Artificial Sequence: Synthetic oligonucleotide
  Sense strand starting at position 2675 of SEQ ID NO: 1879626
gcuacugccuccuugaaag

SEQ ID NO: 1920747 - RNA, 19 nt, Artificial Sequence
  Description of Artificial Sequence: Synthetic oligonucleotide
  Antisense strand to SEQ ID NO: 1920746
cuuucaaggaggcaguagc

SEQ ID NO: 1920748 - RNA, 19 nt, Artificial Sequence
  Description of Artificial Sequence: Synthetic oligonucleotide
  Sense strand starting at position 3107 of SEQ ID NO: 1879626
cacaguuucccugggugau

SEQ ID NO: 1920749 - RNA, 19 nt, Artificial Sequence
  Description of Artificial Sequence: Synthetic oligonucleotide
  Antisense strand to SEQ ID NO: 1920748
aucacccagggaaacugug

SEQ ID NO: 1920750 - RNA, 19 nt, Artificial Sequence
  Description of Artificial Sequence: Synthetic oligonucleotide
  Sense strand starting at position 3108 of SEQ ID NO: 1879626
acaguuucccugggugauu

SEQ ID NO: 1920751 - RNA, 19 nt, Artificial Sequence
  Description of Artificial Sequence: Synthetic oligonucleotide
  Antisense strand to SEQ ID NO: 1920750
aaucacccagggaaacugu

SEQ ID NO: 1920752 - RNA, 19 nt, Artificial Sequence
  Description of Artificial Sequence: Synthetic oligonucleotide
  Sense strand starting at position 3133 of SEQ ID NO: 1879626
gagucccauggcuguaaua

SEQ ID NO: 1920753 - RNA, 19 nt, Artificial Sequence
  Description of Artificial Sequence: Synthetic oligonucleotide
  Antisense strand to SEQ ID NO: 1920752
uauuacagccaugggacuc

SEQ ID NO: 1920754 - RNA, 19 nt, Artificial Sequence
  Description of Artificial Sequence: Synthetic oligonucleotide
  Sense strand starting at position 3135 of SEQ ID NO: 1879626
gucccauggcuguaauaua

SEQ ID NO: 1920755 - RNA, 19 nt, Artificial Sequence
  Description of Artificial Sequence: Synthetic oligonucleotide
  Antisense strand to SEQ ID NO: 1920754
uauauuacagccaugggac

SEQ ID NO: 1920756 - RNA, 19 nt, Artificial Sequence
  Description of Artificial Sequence: Synthetic oligonucleotide
  Sense strand starting at position 3187 of SEQ ID NO: 1879626
acaugaauguguguaugua

SEQ ID NO: 1920757 - RNA, 19 nt, Artificial Sequence
  Description of Artificial Sequence: Synthetic oligonucleotide
  Antisense strand to SEQ ID NO: 1920756
uacauacacacauucaugu

SEQ ID NO: 1920758 - RNA, 19 nt, Artificial Sequence
  Description of Artificial Sequence: Synthetic oligonucleotide
  Sense strand starting at position 3269 of SEQ ID NO: 1879626
gcuccagauuaccugacua

SEQ ID NO: 1920759 - RNA, 19 nt, Artificial Sequence
  Description of Artificial Sequence: Synthetic oligonucleotide
  Antisense strand to SEQ ID NO: 1920758
uagucagguaaucuggagc

SEQ ID NO: 1920760 - RNA, 19 nt, Artificial Sequence
  Description of Artificial Sequence: Synthetic oligonucleotide
  Sense strand starting at position 3298 of SEQ ID NO: 1879626
uccauuggaugauaagaua

SEQ ID NO: 1920761 - RNA, 19 nt, Artificial Sequence
  Description of Artificial Sequence: Synthetic oligonucleotide
  Antisense strand to SEQ ID NO: 1920760
uaucuuaucauccaaugga

SEQ ID NO: 1920762 - RNA, 19 nt, Artificial Sequence
  Description of Artificial Sequence: Synthetic oligonucleotide
  Sense strand starting at position 3769 of SEQ ID NO: 1879626
aucuguuguccacauggca

SEQ ID NO: 1920763 - RNA, 19 nt, Artificial Sequence
  Description of Artificial Sequence: Synthetic oligonucleotide
  Antisense strand to SEQ ID NO: 1920762
ugccauguggacaacagau

SEQ ID NO: 1920764 - RNA, 19 nt, Artificial Sequence
  Description of Artificial Sequence: Synthetic oligonucleotide
  Sense strand starting at position 103 of SEQ ID NO: 1879627
agguaaauuugccuuuccu

SEQ ID NO: 1920765 - RNA, 19 nt, Artificial Sequence
  Description of Artificial Sequence: Synthetic oligonucleotide
  Antisense strand to SEQ ID NO: 1920764
aggaaaggcaaauuuaccu

SEQ ID NO: 1920766 - RNA, 19 nt, Artificial Sequence
  Description of Artificial Sequence: Synthetic oligonucleotide
  Sense strand starting at position 366 of SEQ ID NO: 1879627
aaauuacaagaguggcauu

SEQ ID NO: 1920767 - RNA, 19 nt, Artificial Sequence
  Description of Artificial Sequence: Synthetic oligonucleotide
  Antisense strand to SEQ ID NO: 1920766
aaugccacucuuguaauuu

SEQ ID NO: 1920768 - RNA, 19 nt, Artificial Sequence
  Description of Artificial Sequence: Synthetic oligonucleotide
  Sense strand starting at position 376 of SEQ ID NO: 1879627
aguggcauugcuuugcauu

SEQ ID NO: 1920769 - RNA, 19 nt, Artificial Sequence
  Description of Artificial Sequence: Synthetic oligonucleotide
  Antisense strand to SEQ ID NO: 1920768
aaugcaaagcaaugccacu

SEQ ID NO: 1920770 - RNA, 19 nt, Artificial Sequence
  Description of Artificial Sequence: Synthetic oligonucleotide
  Sense strand starting at position 426 of SEQ ID NO: 1879627
gaagacaacugguuuccua

SEQ ID NO: 1920771 - RNA, 19 nt, Artificial Sequence
  Description of Artificial Sequence: Synthetic oligonucleotide
  Antisense strand to SEQ ID NO: 1920770
uaggaaaccaguugucuuc

SEQ ID NO: 1920772 - RNA, 19 nt, Artificial Sequence
  Description of Artificial Sequence: Synthetic oligonucleotide
  Sense strand starting at position 470 of SEQ ID NO: 1879627
ugugauaucacaugucagg

SEQ ID NO: 1920773 - RNA, 19 nt, Artificial Sequence
  Description of Artificial Sequence: Synthetic oligonucleotide
  Antisense strand to SEQ ID NO: 1920772
ccugacaugugauaucaca

SEQ ID NO: 1920774 - RNA, 19 nt, Artificial Sequence
  Description of Artificial Sequence: Synthetic oligonucleotide
  Sense strand starting at position 626 of SEQ ID NO: 1879627
accgcugaacuagaauaua

SEQ ID NO: 1920775 - RNA, 19 nt, Artificial Sequence
  Description of Artificial Sequence: Synthetic oligonucleotide
  Antisense strand to SEQ ID NO: 1920774
uauauucuaguucagcggu

SEQ ID NO: 1920776 - RNA, 19 nt, Artificial Sequence
  Description of Artificial Sequence: Synthetic oligonucleotide
  Sense strand starting at position 693 of SEQ ID NO: 1879627
accagucuggcacauagua

SEQ ID NO: 1920777 - RNA, 19 nt, Artificial Sequence
  Description of Artificial Sequence: Synthetic oligonucleotide
  Antisense strand to SEQ ID NO: 1920776
uacuaugugccagacuggu

SEQ ID NO: 1920778 - RNA, 19 nt, Artificial Sequence
  Description of Artificial Sequence: Synthetic oligonucleotide
  Sense strand starting at position 739 of SEQ ID NO: 1879627
auguaugaaccugaggcua

SEQ ID NO: 1920779 - RNA, 19 nt, Artificial Sequence
  Description of Artificial Sequence: Synthetic oligonucleotide
  Antisense strand to SEQ ID NO: 1920778
uagccucagguucauacau

SEQ ID NO: 1920780 - RNA, 19 nt, Artificial Sequence
  Description of Artificial Sequence: Synthetic oligonucleotide
  Sense strand starting at position 751 of SEQ ID NO: 1879627
gaggcuauaguaugaaaga

SEQ ID NO: 1920781 - RNA, 19 nt, Artificial Sequence
  Description of Artificial Sequence: Synthetic oligonucleotide
  Antisense strand to SEQ ID NO: 1920780
ucuuucauacuauagccuc

SEQ ID NO: 1920782 - RNA, 19 nt, Artificial Sequence
  Description of Artificial Sequence: Synthetic oligonucleotide
  Sense strand starting at position 828 of SEQ ID NO: 1879627
gagguuucugagcaaguaa

SEQ ID NO: 1920783 - RNA, 19 nt, Artificial Sequence
  Description of Artificial Sequence: Synthetic oligonucleotide
  Antisense strand to SEQ ID NO: 1920782
uuacuugcucagaaaccuc

SEQ ID NO: 1920784 - RNA, 19 nt, Artificial Sequence
  Description of Artificial Sequence: Synthetic oligonucleotide
  Sense strand starting at position 849 of SEQ ID NO: 1879627
guaacagucugauuaaucu

SEQ ID NO: 1920785 - RNA, 19 nt, Artificial Sequence
  Description of Artificial Sequence: Synthetic oligonucleotide
  Antisense strand to SEQ ID NO: 1920784
agauuaaucagacuguuac

SEQ ID NO: 1920786 - RNA, 19 nt, Artificial Sequence
  Description of Artificial Sequence: Synthetic oligonucleotide
  Sense strand starting at position 934 of SEQ ID NO: 1879627
uuugauguaguccaaguga

SEQ ID NO: 1920787 - RNA, 19 nt, Artificial Sequence
  Description of Artificial Sequence: Synthetic oligonucleotide
  Antisense strand to SEQ ID NO: 1920786
ucacuuggacuacaucaaa

SEQ ID NO: 1920788 - RNA, 19 nt, Artificial Sequence
  Description of Artificial Sequence: Synthetic oligonucleotide
  Sense strand starting at position 963 of SEQ ID NO: 1879627
gguucugaagugggaugaa

SEQ ID NO: 1920789 - RNA, 19 nt, Artificial Sequence
  Description of Artificial Sequence: Synthetic oligonucleotide
  Antisense strand to SEQ ID NO: 1920788
uucaucccacuucagaacc

SEQ ID NO: 1920790 - RNA, 19 nt, Artificial Sequence
  Description of Artificial Sequence: Synthetic oligonucleotide
  Sense strand starting at position 973 of SEQ ID NO: 1879627
ugggaugaagacugugcaa

SEQ ID NO: 1920791 - RNA, 19 nt, Artificial Sequence
  Description of Artificial Sequence: Synthetic oligonucleotide
  Antisense strand to SEQ ID NO: 1920790
uugcacagucuucauccca

SEQ ID NO: 1920792 - RNA, 19 nt, Artificial Sequence
  Description of Artificial Sequence: Synthetic oligonucleotide
  Sense strand starting at position 975 of SEQ ID NO: 1879627
ggaugaagacugugcaaac

SEQ ID NO: 1920793 - RNA, 19 nt, Artificial Sequence
  Description of Artificial Sequence: Synthetic oligonucleotide
  Antisense strand to SEQ ID NO: 1920792
guuugcacagucuucaucc

SEQ ID NO: 1920794 - RNA, 19 nt, Artificial Sequence
  Description of Artificial Sequence: Synthetic oligonucleotide
  Sense strand starting at position 976 of SEQ ID NO: 1879627
gaugaagacugugcaaacu

SEQ ID NO: 1920795 - RNA, 19 nt, Artificial Sequence
  Description of Artificial Sequence: Synthetic oligonucleotide
  Antisense strand to SEQ ID NO: 1920794
aguuugcacagucuucauc

SEQ ID NO: 1920796 - RNA, 19 nt, Artificial Sequence
  Description of Artificial Sequence: Synthetic oligonucleotide
  Sense strand starting at position 1033 of SEQ ID NO: 1879627
uguauuagcccucaacuag

SEQ ID NO: 1920797 - RNA, 19 nt, Artificial Sequence
  Description of Artificial Sequence: Synthetic oligonucleotide
  Antisense strand to SEQ ID NO: 1920796
cuaguugagggcuaauaca

SEQ ID NO: 1920798 - RNA, 19 nt, Artificial Sequence
  Description of Artificial Sequence: Synthetic oligonucleotide
  Sense strand starting at position 1201 of SEQ ID NO: 1879627
ugcagauaauaguuauauc

SEQ ID NO: 1920799 - RNA, 19 nt, Artificial Sequence
  Description of Artificial Sequence: Synthetic oligonucleotide
  Antisense strand to SEQ ID NO: 1920798
gauauaacuauuaucugca

SEQ ID NO: 1920800 - RNA, 19 nt, Artificial Sequence
  Description of Artificial Sequence: Synthetic oligonucleotide
  Sense strand starting at position 1290 of SEQ ID NO: 1879627
gcuaauauugguuauuaac

SEQ ID NO: 1920801 - RNA, 19 nt, Artificial Sequence
  Description of Artificial Sequence: Synthetic oligonucleotide
  Antisense strand to SEQ ID NO: 1920800
guuaauaaccaauauuagc

SEQ ID NO: 1920802 - RNA, 19 nt, Artificial Sequence
  Description of Artificial Sequence: Synthetic oligonucleotide
  Sense strand starting at position 1350 of SEQ ID NO: 1879627
ucaauauuaguugaagugu

SEQ ID NO: 1920803 - RNA, 19 nt, Artificial Sequence
  Description of Artificial Sequence: Synthetic oligonucleotide
  Antisense strand to SEQ ID NO: 1920802
acacuucaacuaauauuga

SEQ ID NO: 1920804 - RNA, 19 nt, Artificial Sequence
  Description of Artificial Sequence: Synthetic oligonucleotide
  Sense strand starting at position 1631 of SEQ ID NO: 1879627
cuugauugauaagcauaaa

SEQ ID NO: 1920805 - RNA, 19 nt, Artificial Sequence
  Description of Artificial Sequence: Synthetic oligonucleotide
  Antisense strand to SEQ ID NO: 1920804
uuuaugcuuaucaaucaag

SEQ ID NO: 1920806 - RNA, 19 nt, Artificial Sequence
  Description of Artificial Sequence: Synthetic oligonucleotide
  Sense strand starting at position 1744 of SEQ ID NO: 1879627
uggcuauauccagauaauu

SEQ ID NO: 1920807 - RNA, 19 nt, Artificial Sequence
  Description of Artificial Sequence: Synthetic oligonucleotide
  Antisense strand to SEQ ID NO: 1920806
aauuaucuggauauagcca

SEQ ID NO: 1920808 - RNA, 19 nt, Artificial Sequence
  Description of Artificial Sequence: Synthetic oligonucleotide
  Sense strand starting at position 2074 of SEQ ID NO: 1879627
ugcagccauuugguugaaa

SEQ ID NO: 1920809 - RNA, 19 nt, Artificial Sequence
  Description of Artificial Sequence: Synthetic oligonucleotide
  Antisense strand to SEQ ID NO: 1920808
uuucaaccaaauggcugca

SEQ ID NO: 1920810 - RNA, 19 nt, Artificial Sequence
  Description of Artificial Sequence: Synthetic oligonucleotide
  Sense strand starting at position 2177 of SEQ ID NO: 1879627
ucggaaaugugcuugauuu

SEQ ID NO: 1920811 - RNA, 19 nt, Artificial Sequence
  Description of Artificial Sequence: Synthetic oligonucleotide
  Antisense strand to SEQ ID NO: 1920810
aaaucaagcacauuuccga

SEQ ID NO: 1920812 - RNA, 19 nt, Artificial Sequence
  Description of Artificial Sequence: Synthetic oligonucleotide
  Sense strand starting at position 2281 of SEQ ID NO: 1879627
cacagcaacuguuugaaga

SEQ ID NO: 1920813 - RNA, 19 nt, Artificial Sequence
  Description of Artificial Sequence: Synthetic oligonucleotide
  Antisense strand to SEQ ID NO: 1920812
ucuucaaacaguugcugug

SEQ ID NO: 1920814 - RNA, 19 nt, Artificial Sequence
  Description of Artificial Sequence: Synthetic oligonucleotide
  Sense strand starting at position 2323 of SEQ ID NO: 1879627
cuacuucuacaguaguaua

SEQ ID NO: 1920815 - RNA, 19 nt, Artificial Sequence
  Description of Artificial Sequence: Synthetic oligonucleotide
  Antisense strand to SEQ ID NO: 1920814
uauacuacuguagaaguag

SEQ ID NO: 1920816 - RNA, 19 nt, Artificial Sequence
  Description of Artificial Sequence: Synthetic oligonucleotide
  Sense strand starting at position 2331 of SEQ ID NO: 1879627
acaguaguauauucugaaa

SEQ ID NO: 1920817 - RNA, 19 nt, Artificial Sequence
  Description of Artificial Sequence: Synthetic oligonucleotide
  Antisense strand to SEQ ID NO: 1920816
uuucagaauauacuacugu

SEQ ID NO: 1920818 - RNA, 19 nt, Artificial Sequence
  Description of Artificial Sequence: Synthetic oligonucleotide
  Sense strand starting at position 2428 of SEQ ID NO: 1879627
aguaaacuuugcuugagaa

SEQ ID NO: 1920819 - RNA, 19 nt, Artificial Sequence
  Description of Artificial Sequence: Synthetic oligonucleotide
  Antisense strand to SEQ ID NO: 1920818
uucucaagcaaaguuuacu

SEQ ID NO: 1920820 - RNA, 19 nt, Artificial Sequence
  Description of Artificial Sequence: Synthetic oligonucleotide
  Sense strand starting at position 2625 of SEQ ID NO: 1879627
cauaucaauguuggagaua

SEQ ID NO: 1920821 - RNA, 19 nt, Artificial Sequence
  Description of Artificial Sequence: Synthetic oligonucleotide
  Antisense strand to SEQ ID NO: 1920820
uaucuccaacauugauaug

SEQ ID NO: 1920822 - RNA, 19 nt, Artificial Sequence
  Description of Artificial Sequence: Synthetic oligonucleotide
  Sense strand starting at position 2673 of SEQ ID NO: 1879627
agguaauacuauccaggua

SEQ ID NO: 1920823 - RNA, 19 nt, Artificial Sequence
  Description of Artificial Sequence: Synthetic oligonucleotide
  Antisense strand to SEQ ID NO: 1920822
uaccuggauaguauuaccu

SEQ ID NO: 1920824 - RNA, 19 nt, Artificial Sequence
  Description of Artificial Sequence: Synthetic oligonucleotide
  Sense strand starting at position 2740 of SEQ ID NO: 1879627
gaaagcuaugaggguucua

SEQ ID NO: 1920825 - RNA, 19 nt, Artificial Sequence
  Description of Artificial Sequence: Synthetic oligonucleotide
  Antisense strand to SEQ ID NO: 1920824
uagaacccucauagcuuuc

SEQ ID NO: 1920826 - RNA, 19 nt, Artificial Sequence
  Description of Artificial Sequence: Synthetic oligonucleotide
  Sense strand starting at position 2992 of SEQ ID NO: 1879627
cuuccaucauggcuauaga

SEQ ID NO: 1920827 - RNA, 19 nt, Artificial Sequence
  Description of Artificial Sequence: Synthetic oligonucleotide
  Antisense strand to SEQ ID NO: 1920826
ucuauagccaugauggaag

SEQ ID NO: 1920828 - RNA, 19 nt, Artificial Sequence
  Description of Artificial Sequence: Synthetic oligonucleotide
  Sense strand starting at position 2993 of SEQ ID NO: 1879627
uuccaucauggcuauagau

SEQ ID NO: 1920829 - RNA, 19 nt, Artificial Sequence
  Description of Artificial Sequence: Synthetic oligonucleotide
  Antisense strand to SEQ ID NO: 1920828
aucuauagccaugauggaa

SEQ ID NO: 1920830 - RNA, 19 nt, Artificial Sequence
  Description of Artificial Sequence: Synthetic oligonucleotide
  Sense strand starting at position 2995 of SEQ ID NO: 1879627
ccaucauggcuauagauua

SEQ ID NO: 1920831 - RNA, 19 nt, Artificial Sequence
  Description of Artificial Sequence: Synthetic oligonucleotide
  Antisense strand to SEQ ID NO: 1920830
uaaucuauagccaugaugg

SEQ ID NO: 1920832 - RNA, 19 nt, Artificial Sequence
  Description of Artificial Sequence: Synthetic oligonucleotide
  Sense strand starting at position 3647 of SEQ ID NO: 1879627
gcuagaccauaguugaaau

SEQ ID NO: 1920833 - RNA, 19 nt, Artificial Sequence
  Description of Artificial Sequence: Synthetic oligonucleotide
  Antisense strand to SEQ ID NO: 1920832
auuucaacuauggucuagc

SEQ ID NO: 1920834 - RNA, 19 nt, Artificial Sequence
  Description of Artificial Sequence: Synthetic oligonucleotide
  Sense strand starting at position 3712 of SEQ ID NO: 1879627
acaugaagacuuggcauaa

SEQ ID NO: 1920835 - RNA, 19 nt, Artificial Sequence
  Description of Artificial Sequence: Synthetic oligonucleotide
  Antisense strand to SEQ ID NO: 1920834
uuaugccaagucuucaugu

SEQ ID NO: 1920836 - RNA, 19 nt, Artificial Sequence
  Description of Artificial Sequence: Synthetic oligonucleotide
  Sense strand starting at position 3713 of SEQ ID NO: 1879627
caugaagacuuggcauaag

SEQ ID NO: 1920837 - RNA, 19 nt, Artificial Sequence
  Description of Artificial Sequence: Synthetic oligonucleotide
  Antisense strand to SEQ ID NO: 1920836
cuuaugccaagucuucaug

SEQ ID NO: 1920838 - RNA, 19 nt, Artificial Sequence
  Description of Artificial Sequence: Synthetic oligonucleotide
  Sense strand starting at position 3884 of SEQ ID NO: 1879627
cacagacuugugggauuaa

SEQ ID NO: 1920839 - RNA, 19 nt, Artificial Sequence
  Description of Artificial Sequence: Synthetic oligonucleotide
  Antisense strand to SEQ ID NO: 1920838
uuaaucccacaagucugug

SEQ ID NO: 1920840 - RNA, 19 nt, Artificial Sequence
  Description of Artificial Sequence: Synthetic oligonucleotide
  Sense strand starting at position 3916 of SEQ ID NO: 1879627
uccuguaagccugaggaua

SEQ ID NO: 1920841 - RNA, 19 nt, Artificial Sequence
  Description of Artificial Sequence: Synthetic oligonucleotide
  Antisense strand to SEQ ID NO: 1920840
uauccucaggcuuacagga

SEQ ID NO: 1920842 - RNA, 19 nt, Artificial Sequence
  Description of Artificial Sequence: Synthetic oligonucleotide
  Sense strand starting at position 3966 of SEQ ID NO: 1879627
ccugcaguucugucagcua

SEQ ID NO: 1920843 - RNA, 19 nt, Artificial Sequence
  Description of Artificial Sequence: Synthetic oligonucleotide
  Antisense strand to SEQ ID NO: 1920842
uagcugacagaacugcagg

SEQ ID NO: 1920844 - RNA, 19 nt, Artificial Sequence
  Description of Artificial Sequence: Synthetic oligonucleotide
  Sense strand starting at position 68 of SEQ ID NO: 1879628
guaagaacuuaugggauaa

SEQ ID NO: 1920845 - RNA, 19 nt, Artificial Sequence
  Description of Artificial Sequence: Synthetic oligonucleotide
  Antisense strand to SEQ ID NO: 1920844
uuaucccauaaguucuuac

SEQ ID NO: 1920846 - RNA, 19 nt, Artificial Sequence
  Description of Artificial Sequence: Synthetic oligonucleotide
  Sense strand starting at position 2111 of SEQ ID NO: 1879628
ugaacuaagucccugauaa

SEQ ID NO: 1920847 - RNA, 19 nt, Artificial Sequence
  Description of Artificial Sequence: Synthetic oligonucleotide
  Antisense strand to SEQ ID NO: 1920846
uuaucagggacuuaguuca

SEQ ID NO: 1920848 - RNA, 19 nt, Artificial Sequence
  Description of Artificial Sequence: Synthetic oligonucleotide
  Sense strand starting at position 2211 of SEQ ID NO: 1879628
uuagucauuuccggagacu

SEQ ID NO: 1920849 - RNA, 19 nt, Artificial Sequence
  Description of Artificial Sequence: Synthetic oligonucleotide
  Antisense strand to SEQ ID NO: 1920848
agucuccggaaaugacuaa

SEQ ID NO: 1920850 - RNA, 19 nt, Artificial Sequence
  Description of Artificial Sequence: Synthetic oligonucleotide
  Sense strand starting at position 2562 of SEQ ID NO: 1879628
gggcaauccuuauugugcu

SEQ ID NO: 1920851 - RNA, 19 nt, Artificial Sequence
  Description of Artificial Sequence: Synthetic oligonucleotide
  Antisense strand to SEQ ID NO: 1920850
agcacaauaaggauugccc

SEQ ID NO: 1920852 - RNA, 19 nt, Artificial Sequence
  Description of Artificial Sequence: Synthetic oligonucleotide
  Sense strand starting at position 2568 of SEQ ID NO: 1879628
uccuuauugugcuuucuuu

SEQ ID NO: 1920853 - RNA, 19 nt, Artificial Sequence
  Description of Artificial Sequence: Synthetic oligonucleotide
  Antisense strand to SEQ ID NO: 1920852
aaagaaagcacaauaagga

SEQ ID NO: 1920854 - RNA, 19 nt, Artificial Sequence
  Description of Artificial Sequence: Synthetic oligonucleotide
  Sense strand starting at position 2572 of SEQ ID NO: 1879628
uauugugcuuucuuuagag

SEQ ID NO: 1920855 - RNA, 19 nt, Artificial Sequence
  Description of Artificial Sequence: Synthetic oligonucleotide
  Antisense strand to SEQ ID NO: 1920854
cucuaaagaaagcacaaua

SEQ ID NO: 1920856 - RNA, 19 nt, Artificial Sequence
  Description of Artificial Sequence: Synthetic oligonucleotide
  Sense strand starting at position 2574 of SEQ ID NO: 1879628
uugugcuuucuuuagagau

SEQ ID NO: 1920857 - RNA, 19 nt, Artificial Sequence
  Description of Artificial Sequence: Synthetic oligonucleotide
  Antisense strand to SEQ ID NO: 1920856
aucucuaaagaaagcacaa

SEQ ID NO: 1920858 - RNA, 19 nt, Artificial Sequence
  Description of Artificial Sequence: Synthetic oligonucleotide
  Sense strand starting at position 2639 of SEQ ID NO: 1879628
gcucuuaguaggugccuua

SEQ ID NO: 1920859 - RNA, 19 nt, Artificial Sequence
  Description of Artificial Sequence: Synthetic oligonucleotide
  Antisense strand to SEQ ID NO: 1920858
uaaggcaccuacuaagagc

SEQ ID NO: 1920860 - RNA, 19 nt, Artificial Sequence
  Description of Artificial Sequence: Synthetic oligonucleotide
  Sense strand starting at position 2730 of SEQ ID NO: 1879628
gagucaaacgaaugcugau

SEQ ID NO: 1920861 - RNA, 19 nt, Artificial Sequence
  Description of Artificial Sequence: Synthetic oligonucleotide
  Antisense strand to SEQ ID NO: 1920860
aucagcauucguuugacuc

SEQ ID NO: 1920862 - RNA, 19 nt, Artificial Sequence
  Description of Artificial Sequence: Synthetic oligonucleotide
  Sense strand starting at position 2767 of SEQ ID NO: 1879628
agucaaagauuagaagcaa

SEQ ID NO: 1920863 - RNA, 19 nt, Artificial Sequence
  Description of Artificial Sequence: Synthetic oligonucleotide
  Antisense strand to SEQ ID NO: 1920862
uugcuucuaaucuuugacu

SEQ ID NO: 1920864 - RNA, 19 nt, Artificial Sequence
  Description of Artificial Sequence: Synthetic oligonucleotide
  Sense strand starting at position 2897 of SEQ ID NO: 1879628
ggugaaucucgacgacauu

SEQ ID NO: 1920865 - RNA, 19 nt, Artificial Sequence
  Description of Artificial Sequence: Synthetic oligonucleotide
  Antisense strand to SEQ ID NO: 1920864
aaugucgucgagauucacc

SEQ ID NO: 1920866 - RNA, 19 nt, Artificial Sequence
  Description of Artificial Sequence: Synthetic oligonucleotide
  Sense strand starting at position 2898 of SEQ ID NO: 1879628
gugaaucucgacgacauua

SEQ ID NO: 1920867 - RNA, 19 nt, Artificial Sequence
  Description of Artificial Sequence: Synthetic oligonucleotide
  Antisense strand to SEQ ID NO: 1920866
uaaugucgucgagauucac

SEQ ID NO: 1920868 - RNA, 19 nt, Artificial Sequence
  Description of Artificial Sequence: Synthetic oligonucleotide
  Sense strand starting at position 2991 of SEQ ID NO: 1879628
ucuaaucuagagugacaga

SEQ ID NO: 1920869 - RNA, 19 nt, Artificial Sequence
  Description of Artificial Sequence: Synthetic oligonucleotide
  Antisense strand to SEQ ID NO: 1920868
ucugucacucuagauuaga

SEQ ID NO: 1920870 - RNA, 19 nt, Artificial Sequence
  Description of Artificial Sequence: Synthetic oligonucleotide
  Sense strand starting at position 3137 of SEQ ID NO: 1879628
gcagucuuggcucauugua

SEQ ID NO: 1920871 - RNA, 19 nt, Artificial Sequence
  Description of Artificial Sequence: Synthetic oligonucleotide
  Antisense strand to SEQ ID NO: 1920870
uacaaugagccaagacugc

SEQ ID NO: 1920872 - RNA, 19 nt, Artificial Sequence
  Description of Artificial Sequence: Synthetic oligonucleotide
  Sense strand starting at position 3481 of SEQ ID NO: 1879628
gguggugacauagguguau

SEQ ID NO: 1920873 - RNA, 19 nt, Artificial Sequence
  Description of Artificial Sequence: Synthetic oligonucleotide
  Antisense strand to SEQ ID NO: 1920872
auacaccuaugucaccacc

SEQ ID NO: 1920874 - RNA, 19 nt, Artificial Sequence
  Description of Artificial Sequence: Synthetic oligonucleotide
  Sense strand starting at position 3485 of SEQ ID NO: 1879628
gugacauagguguauugcu

SEQ ID NO: 1920875 - RNA, 19 nt, Artificial Sequence
  Description of Artificial Sequence: Synthetic oligonucleotide
  Antisense strand to SEQ ID NO: 1920874
agcaauacaccuaugucac

SEQ ID NO: 1920876 - RNA, 19 nt, Artificial Sequence
  Description of Artificial Sequence: Synthetic oligonucleotide
  Sense strand starting at position 3493 of SEQ ID NO: 1879628
gguguauugcuuugucaaa

SEQ ID NO: 1920877 - RNA, 19 nt, Artificial Sequence
  Description of Artificial Sequence: Synthetic oligonucleotide
  Antisense strand to SEQ ID NO: 1920876
uuugacaaagcaauacacc

SEQ ID NO: 1920878 - RNA, 19 nt, Artificial Sequence
  Description of Artificial Sequence: Synthetic oligonucleotide
  Sense strand starting at position 3494 of SEQ ID NO: 1879628
guguauugcuuugucaaag

SEQ ID NO: 1920879 - RNA, 19 nt, Artificial Sequence
  Description of Artificial Sequence: Synthetic oligonucleotide
  Antisense strand to SEQ ID NO: 1920878
cuuugacaaagcaauacac

SEQ ID NO: 1920880 - RNA, 19 nt, Artificial Sequence
  Description of Artificial Sequence: Synthetic oligonucleotide
  Sense strand starting at position 3495 of SEQ ID NO: 1879628
uguauugcuuugucaaagc

SEQ ID NO: 1920881 - RNA, 19 nt, Artificial Sequence
  Description of Artificial Sequence: Synthetic oligonucleotide
  Antisense strand to SEQ ID NO: 1920880
gcuuugacaaagcaauaca

SEQ ID NO: 1920882 - RNA, 19 nt, Artificial Sequence
  Description of Artificial Sequence: Synthetic oligonucleotide
  Sense strand starting at position 3503 of SEQ ID NO: 1879628
uuugucaaagcucauggau

SEQ ID NO: 1920883 - RNA, 19 nt, Artificial Sequence
  Description of Artificial Sequence: Synthetic oligonucleotide
  Antisense strand to SEQ ID NO: 1920882
auccaugagcuuugacaaa

SEQ ID NO: 1920884 - RNA, 19 nt, Artificial Sequence
  Description of Artificial Sequence: Synthetic oligonucleotide
  Sense strand starting at position 3539 of SEQ ID NO: 1879628
gugcauguuguuguaugua

SEQ ID NO: 1920885 - RNA, 19 nt, Artificial Sequence
  Description of Artificial Sequence: Synthetic oligonucleotide
  Antisense strand to SEQ ID NO: 1920884
uacauacaacaacaugcac

SEQ ID NO: 1920886 - RNA, 19 nt, Artificial Sequence
  Description of Artificial Sequence: Synthetic oligonucleotide
  Sense strand starting at position 3542 of SEQ ID NO: 1879628
cauguuguuguauguaaac

SEQ ID NO: 1920887 - RNA, 19 nt, Artificial Sequence
  Description of Artificial Sequence: Synthetic oligonucleotide
  Antisense strand to SEQ ID NO: 1920886
guuuacauacaacaacaug

SEQ ID NO: 1920888 - RNA, 19 nt, Artificial Sequence
  Description of Artificial Sequence: Synthetic oligonucleotide
  Sense strand starting at position 3544 of SEQ ID NO: 1879628
uguuguuguauguaaacua

SEQ ID NO: 1920889 - RNA, 19 nt, Artificial Sequence
  Description of Artificial Sequence: Synthetic oligonucleotide
  Antisense strand to SEQ ID NO: 1920888
uaguuuacauacaacaaca

SEQ ID NO: 1920890 - RNA, 19 nt, Artificial Sequence
  Description of Artificial Sequence: Synthetic oligonucleotide
  Sense strand starting at position 3569 of SEQ ID NO: 1879628
aaugaaauuuguuagggag

SEQ ID NO: 1920891 - RNA, 19 nt, Artificial Sequence
  Description of Artificial Sequence: Synthetic oligonucleotide
  Antisense strand to SEQ ID NO: 1920890
cucccuaacaaauuucauu

SEQ ID NO: 1920892 - RNA, 19 nt, Artificial Sequence
  Description of Artificial Sequence: Synthetic oligonucleotide
  Sense strand starting at position 3571 of SEQ ID NO: 1879628
ugaaauuuguuagggagaa

SEQ ID NO: 1920893 - RNA, 19 nt, Artificial Sequence
  Description of Artificial Sequence: Synthetic oligonucleotide
  Antisense strand to SEQ ID NO: 1920892
uucucccuaacaaauuuca

SEQ ID NO: 1920894 - RNA, 19 nt, Artificial Sequence
  Description of Artificial Sequence: Synthetic oligonucleotide
  Sense strand starting at position 3572 of SEQ ID NO: 1879628
gaaauuuguuagggagaaa

SEQ ID NO: 1920895 - RNA, 19 nt, Artificial Sequence
  Description of Artificial Sequence: Synthetic oligonucleotide
  Antisense strand to SEQ ID NO: 1920894
uuucucccuaacaaauuuc

SEQ ID NO: 1920896 - RNA, 19 nt, Artificial Sequence
  Description of Artificial Sequence: Synthetic oligonucleotide
  Sense strand starting at position 3628 of SEQ ID NO: 1879628
acuugacaguuucugguaa

SEQ ID NO: 1920897 - RNA, 19 nt, Artificial Sequence
  Description of Artificial Sequence: Synthetic oligonucleotide
  Antisense strand to SEQ ID NO: 1920896
uuaccagaaacugucaagu

SEQ ID NO: 1920898 - RNA, 19 nt, Artificial Sequence
  Description of Artificial Sequence: Synthetic oligonucleotide
  Sense strand starting at position 3663 of SEQ ID NO: 1879628
uuauccauguucuaaggaa

SEQ ID NO: 1920899 - RNA, 19 nt, Artificial Sequence
  Description of Artificial Sequence: Synthetic oligonucleotide
  Antisense strand to SEQ ID NO: 1920898
uuccuuagaacauggauaa

SEQ ID NO: 1920900 - RNA, 19 nt, Artificial Sequence
  Description of Artificial Sequence: Synthetic oligonucleotide
  Sense strand starting at position 3700 of SEQ ID NO: 1879628
accguuguuguacagauau

SEQ ID NO: 1920901 - RNA, 19 nt, Artificial Sequence
  Description of Artificial Sequence: Synthetic oligonucleotide
  Antisense strand to SEQ ID NO: 1920900
auaucuguacaacaacggu

SEQ ID NO: 1920902 - RNA, 19 nt, Artificial Sequence
  Description of Artificial Sequence: Synthetic oligonucleotide
  Sense strand starting at position 3702 of SEQ ID NO: 1879628
cguuguuguacagauauuc

SEQ ID NO: 1920903 - RNA, 19 nt, Artificial Sequence
  Description of Artificial Sequence: Synthetic oligonucleotide
  Antisense strand to SEQ ID NO: 1920902
gaauaucuguacaacaacg

SEQ ID NO: 1920904 - RNA, 19 nt, Artificial Sequence
  Description of Artificial Sequence: Synthetic oligonucleotide
  Sense strand starting at position 3707 of SEQ ID NO: 1879628
uuguacagauauuccagua

SEQ ID NO: 1920905 - RNA, 19 nt, Artificial Sequence
  Description of Artificial Sequence: Synthetic oligonucleotide
  Antisense strand to SEQ ID NO: 1920904
uacuggaauaucuguacaa

SEQ ID NO: 1920906 - RNA, 19 nt, Artificial Sequence
  Description of Artificial Sequence: Synthetic oligonucleotide
  Sense strand starting at position 3753 of SEQ ID NO: 1879628
ggaggaguuguagaguguu

SEQ ID NO: 1920907 - RNA, 19 nt, Artificial Sequence
  Description of Artificial Sequence: Synthetic oligonucleotide
  Antisense strand to SEQ ID NO: 1920906
aacacucuacaacuccucc

SEQ ID NO: 1920908 - RNA, 19 nt, Artificial Sequence
  Description of Artificial Sequence: Synthetic oligonucleotide
  Sense strand starting at position 3756 of SEQ ID NO: 1879628
ggaguuguagaguguuaug

SEQ ID NO: 1920909 - RNA, 19 nt, Artificial Sequence
  Description of Artificial Sequence: Synthetic oligonucleotide
  Antisense strand to SEQ ID NO: 1920908
cauaacacucuacaacucc

SEQ ID NO: 1920910 - RNA, 19 nt, Artificial Sequence
  Description of Artificial Sequence: Synthetic oligonucleotide
  Sense strand starting at position 3791 of SEQ ID NO: 1879628
aggagaacaucuguugugu

SEQ ID NO: 1920911 - RNA, 19 nt, Artificial Sequence
  Description of Artificial Sequence: Synthetic oligonucleotide
  Antisense strand to SEQ ID NO: 1920910
acacaacagauguucuccu

SEQ ID NO: 1920912 - RNA, 19 nt, Artificial Sequence
  Description of Artificial Sequence: Synthetic oligonucleotide
  Sense strand starting at position 3802 of SEQ ID NO: 1879628
uguuguguuccaucagcuu

SEQ ID NO: 1920913 - RNA, 19 nt, Artificial Sequence
  Description of Artificial Sequence: Synthetic oligonucleotide
  Antisense strand to SEQ ID NO: 1920912
aagcugauggaacacaaca

SEQ ID NO: 1920914 - RNA, 19 nt, Artificial Sequence
  Description of Artificial Sequence: Synthetic oligonucleotide
  Sense strand starting at position 3820 of SEQ ID NO: 1879628
uuguuccuuuguucccaaa

SEQ ID NO: 1920915 - RNA, 19 nt, Artificial Sequence
  Description of Artificial Sequence: Synthetic oligonucleotide
  Antisense strand to SEQ ID NO: 1920914
uuugggaacaaaggaacaa

SEQ ID NO: 1920916 - RNA, 19 nt, Artificial Sequence
  Description of Artificial Sequence: Synthetic oligonucleotide
  Sense strand starting at position 3849 of SEQ ID NO: 1879628
uguguucuguuacuuuaua

SEQ ID NO: 1920917 - RNA, 19 nt, Artificial Sequence
  Description of Artificial Sequence: Synthetic oligonucleotide
  Antisense strand to SEQ ID NO: 1920916
uauaaaguaacagaacaca

SEQ ID NO: 1920918 - RNA, 19 nt, Artificial Sequence
  Description of Artificial Sequence: Synthetic oligonucleotide
  Sense strand starting at position 3850 of SEQ ID NO: 1879628
guguucuguuacuuuauaa

SEQ ID NO: 1920919 - RNA, 19 nt, Artificial Sequence
  Description of Artificial Sequence: Synthetic oligonucleotide
  Antisense strand to SEQ ID NO: 1920918
uuauaaaguaacagaacac

SEQ ID NO: 1920920 - RNA, 19 nt, Artificial Sequence
  Description of Artificial Sequence: Synthetic oligonucleotide
  Sense strand starting at position 3951 of SEQ ID NO: 1879628
ugccaaauucuaugaaguu

SEQ ID NO: 1920921 - RNA, 19 nt, Artificial Sequence
  Description of Artificial Sequence: Synthetic oligonucleotide
  Antisense strand to SEQ ID NO: 1920920
aacuucauagaauuuggca

SEQ ID NO: 1920922 - RNA, 19 nt, Artificial Sequence
  Description of Artificial Sequence: Synthetic oligonucleotide
  Sense strand starting at position 3960 of SEQ ID NO: 1879628
cuaugaaguucugaaucac

SEQ ID NO: 1920923 - RNA, 19 nt, Artificial Sequence
  Description of Artificial Sequence: Synthetic oligonucleotide
  Antisense strand to SEQ ID NO: 1920922
gugauucagaacuucauag

SEQ ID NO: 1920924 - RNA, 19 nt, Artificial Sequence
  Description of Artificial Sequence: Synthetic oligonucleotide
  Sense strand starting at position 25 of SEQ ID NO: 1879629
aggagagaguucccuuauu

SEQ ID NO: 1920925 - RNA, 19 nt, Artificial Sequence
  Description of Artificial Sequence: Synthetic oligonucleotide
  Antisense strand to SEQ ID NO: 1920924
aauaagggaacucucuccu

SEQ ID NO: 1920926 - RNA, 19 nt, Artificial Sequence
  Description of Artificial Sequence: Synthetic oligonucleotide
  Sense strand starting at position 30 of SEQ ID NO: 1879629
agaguucccuuauugcaag

SEQ ID NO: 1920927 - RNA, 19 nt, Artificial Sequence
  Description of Artificial Sequence: Synthetic oligonucleotide
  Antisense strand to SEQ ID NO: 1920926
cuugcaauaagggaacucu

SEQ ID NO: 1920928 - RNA, 19 nt, Artificial Sequence
  Description of Artificial Sequence: Synthetic oligonucleotide
  Sense strand starting at position 97 of SEQ ID NO: 1879629
gcgagaaaguuagcaaauu

SEQ ID NO: 1920929 - RNA, 19 nt, Artificial Sequence
  Description of Artificial Sequence: Synthetic oligonucleotide
  Antisense strand to SEQ ID NO: 1920928
aauuugcuaacuuucucgc

SEQ ID NO: 1920930 - RNA, 19 nt, Artificial Sequence
  Description of Artificial Sequence: Synthetic oligonucleotide
  Sense strand starting at position 188 of SEQ ID NO: 1879629
gccuaaugacaccgaaaug

SEQ ID NO: 1920931 - RNA, 19 nt, Artificial Sequence
  Description of Artificial Sequence: Synthetic oligonucleotide
  Antisense strand to SEQ ID NO: 1920930
cauuucggugucauuaggc

SEQ ID NO: 1920932 - RNA, 19 nt, Artificial Sequence
  Description of Artificial Sequence: Synthetic oligonucleotide
  Sense strand starting at position 482 of SEQ ID NO: 1879629
acuuguugcaugugaggca

SEQ ID NO: 1920933 - RNA, 19 nt, Artificial Sequence
  Description of Artificial Sequence: Synthetic oligonucleotide
  Antisense strand to SEQ ID NO: 1920932
ugccucacaugcaacaagu

SEQ ID NO: 1920934 - RNA, 19 nt, Artificial Sequence
  Description of Artificial Sequence: Synthetic oligonucleotide
  Sense strand starting at position 692 of SEQ ID NO: 1879629
ucgcaugcaugcucagaca

SEQ ID NO: 1920935 - RNA, 19 nt, Artificial Sequence
  Description of Artificial Sequence: Synthetic oligonucleotide
  Antisense strand to SEQ ID NO: 1920934
ugucugagcaugcaugcga

SEQ ID NO: 1920936 - RNA, 19 nt, Artificial Sequence
  Description of Artificial Sequence: Synthetic oligonucleotide
  Sense strand starting at position 2315 of SEQ ID NO: 1879629
ucgcuuucuccugagagaa

SEQ ID NO: 1920937 - RNA, 19 nt, Artificial Sequence
  Description of Artificial Sequence: Synthetic oligonucleotide
  Antisense strand to SEQ ID NO: 1920936
uucucucaggagaaagcga

SEQ ID NO: 1920938 - RNA, 19 nt, Artificial Sequence
  Description of Artificial Sequence: Synthetic oligonucleotide
  Sense strand starting at position 2327 of SEQ ID NO: 1879629
gagagaagucuccgcguuu

SEQ ID NO: 1920939 - RNA, 19 nt, Artificial Sequence
  Description of Artificial Sequence: Synthetic oligonucleotide
  Antisense strand to SEQ ID NO: 1920938
aaacgcggagacuucucuc

SEQ ID NO: 1920940 - RNA, 19 nt, Artificial Sequence
  Description of Artificial Sequence: Synthetic oligonucleotide
  Sense strand starting at position 2328 of SEQ ID NO: 1879629
agagaagucuccgcguuuc

SEQ ID NO: 1920941 - RNA, 19 nt, Artificial Sequence
  Description of Artificial Sequence: Synthetic oligonucleotide
  Antisense strand to SEQ ID NO: 1920940
gaaacgcggagacuucucu

SEQ ID NO: 1920942 - RNA, 19 nt, Artificial Sequence
  Description of Artificial Sequence: Synthetic oligonucleotide
  Sense strand starting at position 2331 of SEQ ID NO: 1879629
gaagucuccgcguuucuga

SEQ ID NO: 1920943 - RNA, 19 nt, Artificial Sequence
  Description of Artificial Sequence: Synthetic oligonucleotide
  Antisense strand to SEQ ID NO: 1920942
ucagaaacgcggagacuuc

SEQ ID NO: 1920944 - RNA, 19 nt, Artificial Sequence
  Description of Artificial Sequence: Synthetic oligonucleotide
  Sense strand starting at position 2332 of SEQ ID NO: 1879629
aagucuccgcguuucugaa

SEQ ID NO: 1920945 - RNA, 19 nt, Artificial Sequence
  Description of Artificial Sequence: Synthetic oligonucleotide
  Antisense strand to SEQ ID NO: 1920944
uucagaaacgcggagacuu

SEQ ID NO: 1920946 - RNA, 19 nt, Artificial Sequence
  Description of Artificial Sequence: Synthetic oligonucleotide
  Sense strand starting at position 2339 of SEQ ID NO: 1879629
cgcguuucugaacaaugca

SEQ ID NO: 1920947 - RNA, 19 nt, Artificial Sequence
  Description of Artificial Sequence: Synthetic oligonucleotide
  Antisense strand to SEQ ID NO: 1920946
ugcauuguucagaaacgcg

SEQ ID NO: 1920948 - RNA, 19 nt, Artificial Sequence
  Description of Artificial Sequence: Synthetic oligonucleotide
  Sense strand starting at position 2360 of SEQ ID NO: 1879629
gcuaguuucucauuucuuu

SEQ ID NO: 1920949 - RNA, 19 nt, Artificial Sequence
  Description of Artificial Sequence: Synthetic oligonucleotide
  Antisense strand to SEQ ID NO: 1920948
aaagaaaugagaaacuagc

SEQ ID NO: 1920950 - RNA, 19 nt, Artificial Sequence
  Description of Artificial Sequence: Synthetic oligonucleotide
  Sense strand starting at position 2706 of SEQ ID NO: 1879629
gcguacuuccggagaaggu

SEQ ID NO: 1920951 - RNA, 19 nt, Artificial Sequence
  Description of Artificial Sequence: Synthetic oligonucleotide
  Antisense strand to SEQ ID NO: 1920950
accuucuccggaaguacgc

SEQ ID NO: 1920952 - RNA, 19 nt, Artificial Sequence
  Description of Artificial Sequence: Synthetic oligonucleotide
  Sense strand starting at position 2725 of SEQ ID NO: 1879629
cccugagaaccuggcugau

SEQ ID NO: 1920953 - RNA, 19 nt, Artificial Sequence
  Description of Artificial Sequence: Synthetic oligonucleotide
  Antisense strand to SEQ ID NO: 1920952
aucagccagguucucaggg

SEQ ID NO: 1920954 - RNA, 19 nt, Artificial Sequence
  Description of Artificial Sequence: Synthetic oligonucleotide
  Sense strand starting at position 2727 of SEQ ID NO: 1879629
cugagaaccuggcugaucu

SEQ ID NO: 1920955 - RNA, 19 nt, Artificial Sequence
  Description of Artificial Sequence: Synthetic oligonucleotide
  Antisense strand to SEQ ID NO: 1920954
agaucagccagguucucag

SEQ ID NO: 1920956 - RNA, 19 nt, Artificial Sequence
  Description of Artificial Sequence: Synthetic oligonucleotide
  Sense strand starting at position 2728 of SEQ ID NO: 1879629
ugagaaccuggcugaucuu

SEQ ID NO: 1920957 - RNA, 19 nt, Artificial Sequence
  Description of Artificial Sequence: Synthetic oligonucleotide
  Antisense strand to SEQ ID NO: 1920956
aagaucagccagguucuca

SEQ ID NO: 1920958 - RNA, 19 nt, Artificial Sequence
  Description of Artificial Sequence: Synthetic oligonucleotide
  Sense strand starting at position 2869 of SEQ ID NO: 1879629
cuguucgugccaugacaga

SEQ ID NO: 1920959 - RNA, 19 nt, Artificial Sequence
  Description of Artificial Sequence: Synthetic oligonucleotide
  Antisense strand to SEQ ID NO: 1920958
ucugucauggcacgaacag

SEQ ID NO: 1920960 - RNA, 19 nt, Artificial Sequence
  Description of Artificial Sequence: Synthetic oligonucleotide
  Sense strand starting at position 2874 of SEQ ID NO: 1879629
cgugccaugacagaucaua

SEQ ID NO: 1920961 - RNA, 19 nt, Artificial Sequence
  Description of Artificial Sequence: Synthetic oligonucleotide
  Antisense strand to SEQ ID NO: 1920960
uaugaucugucauggcacg

SEQ ID NO: 1920962 - RNA, 19 nt, Artificial Sequence
  Description of Artificial Sequence: Synthetic oligonucleotide
  Sense strand starting at position 2997 of SEQ ID NO: 1879629
guuagcuuguuguuggaga

SEQ ID NO: 1920963 - RNA, 19 nt, Artificial Sequence
  Description of Artificial Sequence: Synthetic oligonucleotide
  Antisense strand to SEQ ID NO: 1920962
ucuccaacaacaagcuaac

SEQ ID NO: 1920964 - RNA, 19 nt, Artificial Sequence
  Description of Artificial Sequence: Synthetic oligonucleotide
  Sense strand starting at position 2999 of SEQ ID NO: 1879629
uagcuuguuguuggagaga

SEQ ID NO: 1920965 - RNA, 19 nt, Artificial Sequence
  Description of Artificial Sequence: Synthetic oligonucleotide
  Antisense strand to SEQ ID NO: 1920964
ucucuccaacaacaagcua

SEQ ID NO: 1920966 - RNA, 19 nt, Artificial Sequence
  Description of Artificial Sequence: Synthetic oligonucleotide
  Sense strand starting at position 3039 of SEQ ID NO: 1879629
ugugcaagcugcuuaucua

SEQ ID NO: 1920967 - RNA, 19 nt, Artificial Sequence
  Description of Artificial Sequence: Synthetic oligonucleotide
  Antisense strand to SEQ ID NO: 1920966
uagauaagcagcuugcaca

SEQ ID NO: 1920968 - RNA, 19 nt, Artificial Sequence
  Description of Artificial Sequence: Synthetic oligonucleotide
  Sense strand starting at position 3042 of SEQ ID NO: 1879629
gcaagcugcuuaucuagaa

SEQ ID NO: 1920969 - RNA, 19 nt, Artificial Sequence
  Description of Artificial Sequence: Synthetic oligonucleotide
  Antisense strand to SEQ ID NO: 1920968
uucuagauaagcagcuugc

SEQ ID NO: 1920970 - RNA, 19 nt, Artificial Sequence
  Description of Artificial Sequence: Synthetic oligonucleotide
  Sense strand starting at position 3046 of SEQ ID NO: 1879629
gcugcuuaucuagaauacu

SEQ ID NO: 1920971 - RNA, 19 nt, Artificial Sequence
  Description of Artificial Sequence: Synthetic oligonucleotide
  Antisense strand to SEQ ID NO: 1920970
aguauucuagauaagcagc

SEQ ID NO: 1920972 - RNA, 19 nt, Artificial Sequence
  Description of Artificial Sequence: Synthetic oligonucleotide
  Sense strand starting at position 3061 of SEQ ID NO: 1879629
uacugcaguccugaggaau

SEQ ID NO: 1920973 - RNA, 19 nt, Artificial Sequence
  Description of Artificial Sequence: Synthetic oligonucleotide
  Antisense strand to SEQ ID NO: 1920972
auuccucaggacugcagua

SEQ ID NO: 1920974 - RNA, 19 nt, Artificial Sequence
  Description of Artificial Sequence: Synthetic oligonucleotide
  Sense strand starting at position 3151 of SEQ ID NO: 1879629
cagguauuccugcaugaga

SEQ ID NO: 1920975 - RNA, 19 nt, Artificial Sequence
  Description of Artificial Sequence: Synthetic oligonucleotide
  Antisense strand to SEQ ID NO: 1920974
ucucaugcaggaauaccug

SEQ ID NO: 1920976 - RNA, 19 nt, Artificial Sequence
  Description of Artificial Sequence: Synthetic oligonucleotide
  Sense strand starting at position 3153 of SEQ ID NO: 1879629
gguauuccugcaugagagc

SEQ ID NO: 1920977 - RNA, 19 nt, Artificial Sequence
  Description of Artificial Sequence: Synthetic oligonucleotide
  Antisense strand to SEQ ID NO: 1920976
gcucucaugcaggaauacc

SEQ ID NO: 1920978 - RNA, 19 nt, Artificial Sequence
  Description of Artificial Sequence: Synthetic oligonucleotide
  Sense strand starting at position 3200 of SEQ ID NO: 1879629
uguuuagggauugguggaa

SEQ ID NO: 1920979 - RNA, 19 nt, Artificial Sequence
  Description of Artificial Sequence: Synthetic oligonucleotide
  Antisense strand to SEQ ID NO: 1920978
uuccaccaaucccuaaaca

SEQ ID NO: 1920980 - RNA, 19 nt, Artificial Sequence
  Description of Artificial Sequence: Synthetic oligonucleotide
  Sense strand starting at position 3205 of SEQ ID NO: 1879629
agggauugguggaaguagu

SEQ ID NO: 1920981 - RNA, 19 nt, Artificial Sequence
  Description of Artificial Sequence: Synthetic oligonucleotide
  Antisense strand to SEQ ID NO: 1920980
acuacuuccaccaaucccu

SEQ ID NO: 1920982 - RNA, 19 nt, Artificial Sequence
  Description of Artificial Sequence: Synthetic oligonucleotide
  Sense strand starting at position 3247 of SEQ ID NO: 1879629
cacagcugucgugaugaaa

SEQ ID NO: 1920983 - RNA, 19 nt, Artificial Sequence
  Description of Artificial Sequence: Synthetic oligonucleotide
  Antisense strand to SEQ ID NO: 1920982
uuucaucacgacagcugug

SEQ ID NO: 1920984 - RNA, 19 nt, Artificial Sequence
  Description of Artificial Sequence: Synthetic oligonucleotide
  Sense strand starting at position 3250 of SEQ ID NO: 1879629
agcugucgugaugaaauca

SEQ ID NO: 1920985 - RNA, 19 nt, Artificial Sequence
  Description of Artificial Sequence: Synthetic oligonucleotide
  Antisense strand to SEQ ID NO: 1920984
ugauuucaucacgacagcu

SEQ ID NO: 1920986 - RNA, 19 nt, Artificial Sequence
  Description of Artificial Sequence: Synthetic oligonucleotide
  Sense strand starting at position 3255 of SEQ ID NO: 1879629
ucgugaugaaaucaggcuu

SEQ ID NO: 1920987 - RNA, 19 nt, Artificial Sequence
  Description of Artificial Sequence: Synthetic oligonucleotide
  Antisense strand to SEQ ID NO: 1920986
aagccugauuucaucacga

SEQ ID NO: 1920988 - RNA, 19 nt, Artificial Sequence
  Description of Artificial Sequence: Synthetic oligonucleotide
  Sense strand starting at position 3484 of SEQ ID NO: 1879629
auccguugugucuaacuga

SEQ ID NO: 1920989 - RNA, 19 nt, Artificial Sequence
  Description of Artificial Sequence: Synthetic oligonucleotide
  Antisense strand to SEQ ID NO: 1920988
ucaguuagacacaacggau

SEQ ID NO: 1920990 - RNA, 19 nt, Artificial Sequence
  Description of Artificial Sequence: Synthetic oligonucleotide
  Sense strand starting at position 3487 of SEQ ID NO: 1879629
cguugugucuaacugauuc

SEQ ID NO: 1920991 - RNA, 19 nt, Artificial Sequence
  Description of Artificial Sequence: Synthetic oligonucleotide
  Antisense strand to SEQ ID NO: 1920990
gaaucaguuagacacaacg

SEQ ID NO: 1920992 - RNA, 19 nt, Artificial Sequence
  Description of Artificial Sequence: Synthetic oligonucleotide
  Sense strand starting at position 3549 of SEQ ID NO: 1879629
agcucuuaucucgagcuuu

SEQ ID NO: 1920993 - RNA, 19 nt, Artificial Sequence
  Description of Artificial Sequence: Synthetic oligonucleotide
  Antisense strand to SEQ ID NO: 1920992
aaagcucgagauaagagcu

SEQ ID NO: 1920994 - RNA, 19 nt, Artificial Sequence
  Description of Artificial Sequence: Synthetic oligonucleotide
  Sense strand starting at position 3572 of SEQ ID NO: 1879629
ugcucucauccuugagacu

SEQ ID NO: 1920995 - RNA, 19 nt, Artificial Sequence
  Description of Artificial Sequence: Synthetic oligonucleotide
  Antisense strand to SEQ ID NO: 1920994
agucucaaggaugagagca

SEQ ID NO: 1920996 - RNA, 19 nt, Artificial Sequence
  Description of Artificial Sequence: Synthetic oligonucleotide
  Sense strand starting at position 3611 of SEQ ID NO: 1879629
uuggauucccuguguaaac

SEQ ID NO: 1920997 - RNA, 19 nt, Artificial Sequence
  Description of Artificial Sequence: Synthetic oligonucleotide
  Antisense strand to SEQ ID NO: 1920996
guuuacacagggaauccaa

SEQ ID NO: 1920998 - RNA, 19 nt, Artificial Sequence
  Description of Artificial Sequence: Synthetic oligonucleotide
  Sense strand starting at position 3613 of SEQ ID NO: 1879629
ggauucccuguguaaacga

SEQ ID NO: 1920999 - RNA, 19 nt, Artificial Sequence
  Description of Artificial Sequence: Synthetic oligonucleotide
  Antisense strand to SEQ ID NO: 1920998
ucguuuacacagggaaucc

SEQ ID NO: 1921000 - RNA, 19 nt, Artificial Sequence
  Description of Artificial Sequence: Synthetic oligonucleotide
  Sense strand starting at position 3724 of SEQ ID NO: 1879629
ggcacuaucuugguugacu

SEQ ID NO: 1921001 - RNA, 19 nt, Artificial Sequence
  Description of Artificial Sequence: Synthetic oligonucleotide
  Antisense strand to SEQ ID NO: 1921000
agucaaccaagauagugcc

SEQ ID NO: 1921002 - RNA, 19 nt, Artificial Sequence
  Description of Artificial Sequence: Synthetic oligonucleotide
  Sense strand starting at position 3725 of SEQ ID NO: 1879629
gcacuaucuugguugacug

SEQ ID NO: 1921003 - RNA, 19 nt, Artificial Sequence
  Description of Artificial Sequence: Synthetic oligonucleotide
  Antisense strand to SEQ ID NO: 1921002
cagucaaccaagauagugc

SEQ ID NO: 1921004 - RNA, 19 nt, Artificial Sequence
  Description of Artificial Sequence: Synthetic oligonucleotide
  Sense strand starting at position 31 of SEQ ID NO: 1879630
gggagacccugccuguaua

SEQ ID NO: 1921005 - RNA, 19 nt, Artificial Sequence
  Description of Artificial Sequence: Synthetic oligonucleotide
  Antisense strand to SEQ ID NO: 1921004
uauacaggcagggucuccc

SEQ ID NO: 1921006 - RNA, 19 nt, Artificial Sequence
  Description of Artificial Sequence: Synthetic oligonucleotide
  Sense strand starting at position 32 of SEQ ID NO: 1879630
ggagacccugccuguauaa

SEQ ID NO: 1921007 - RNA, 19 nt, Artificial Sequence
  Description of Artificial Sequence: Synthetic oligonucleotide
  Antisense strand to SEQ ID NO: 1921006
uuauacaggcagggucucc

SEQ ID NO: 1921008 - RNA, 19 nt, Artificial Sequence
  Description of Artificial Sequence: Synthetic oligonucleotide
  Sense strand starting at position 118 of SEQ ID NO: 1879630
ugacuaccauuacuguaua

SEQ ID NO: 1921009 - RNA, 19 nt, Artificial Sequence
  Description of Artificial Sequence: Synthetic oligonucleotide
  Antisense strand to SEQ ID NO: 1921008
uauacaguaaugguaguca

SEQ ID NO: 1921010 - RNA, 19 nt, Artificial Sequence
  Description of Artificial Sequence: Synthetic oligonucleotide
  Sense strand starting at position 156 of SEQ ID NO: 1879630
ugcuaaguagcuuauguau

SEQ ID NO: 1921011 - RNA, 19 nt, Artificial Sequence
  Description of Artificial Sequence: Synthetic oligonucleotide
  Antisense strand to SEQ ID NO: 1921010
auacauaagcuacuuagca

SEQ ID NO: 1921012 - RNA, 19 nt, Artificial Sequence
  Description of Artificial Sequence: Synthetic oligonucleotide
  Sense strand starting at position 546 of SEQ ID NO: 1879630
uguuaagucuucucucuga

SEQ ID NO: 1921013 - RNA, 19 nt, Artificial Sequence
  Description of Artificial Sequence: Synthetic oligonucleotide
  Antisense strand to SEQ ID NO: 1921012
ucagagagaagacuuaaca

SEQ ID NO: 1921014 - RNA, 19 nt, Artificial Sequence
  Description of Artificial Sequence: Synthetic oligonucleotide
  Sense strand starting at position 571 of SEQ ID NO: 1879630
agcuguuaacaguaacaaa

SEQ ID NO: 1921015 - RNA, 19 nt, Artificial Sequence
  Description of Artificial Sequence: Synthetic oligonucleotide
  Antisense strand to SEQ ID NO: 1921014
uuuguuacuguuaacagcu

SEQ ID NO: 1921016 - RNA, 19 nt, Artificial Sequence
  Description of Artificial Sequence: Synthetic oligonucleotide
  Sense strand starting at position 796 of SEQ ID NO: 1879630
gugaaaugguaacuuauaa

SEQ ID NO: 1921017 - RNA, 19 nt, Artificial Sequence
  Description of Artificial Sequence: Synthetic oligonucleotide
  Antisense strand to SEQ ID NO: 1921016
uuauaaguuaccauuucac

SEQ ID NO: 1921018 - RNA, 19 nt, Artificial Sequence
  Description of Artificial Sequence: Synthetic oligonucleotide
  Sense strand starting at position 1002 of SEQ ID NO: 1879630
auaucacauuuggguaaca

SEQ ID NO: 1921019 - RNA, 19 nt, Artificial Sequence
  Description of Artificial Sequence: Synthetic oligonucleotide
  Antisense strand to SEQ ID NO: 1921018
uguuacccaaaugugauau

SEQ ID NO: 1921020 - RNA, 19 nt, Artificial Sequence
  Description of Artificial Sequence: Synthetic oligonucleotide
  Sense strand starting at position 1306 of SEQ ID NO: 1879630
gcgcaauucucauuccaga

SEQ ID NO: 1921021 - RNA, 19 nt, Artificial Sequence
  Description of Artificial Sequence: Synthetic oligonucleotide
  Antisense strand to SEQ ID NO: 1921020
ucuggaaugagaauugcgc

SEQ ID NO: 1921022 - RNA, 19 nt, Artificial Sequence
  Description of Artificial Sequence: Synthetic oligonucleotide
  Sense strand starting at position 1413 of SEQ ID NO: 1879630
ccuggcggugucuaugaaa

SEQ ID NO: 1921023 - RNA, 19 nt, Artificial Sequence
  Description of Artificial Sequence: Synthetic oligonucleotide
  Antisense strand to SEQ ID NO: 1921022
uuucauagacaccgccagg

SEQ ID NO: 1921024 - RNA, 19 nt, Artificial Sequence
  Description of Artificial Sequence: Synthetic oligonucleotide
  Sense strand starting at position 1425 of SEQ ID NO: 1879630
uaugaaaugcuccagguga

SEQ ID NO: 1921025 - RNA, 19 nt, Artificial Sequence
  Description of Artificial Sequence: Synthetic oligonucleotide
  Antisense strand to SEQ ID NO: 1921024
ucaccuggagcauuucaua

SEQ ID NO: 1921026 - RNA, 19 nt, Artificial Sequence
  Description of Artificial Sequence: Synthetic oligonucleotide
  Sense strand starting at position 1441 of SEQ ID NO: 1879630
ugaccuucuccagaaggca

SEQ ID NO: 1921027 - RNA, 19 nt, Artificial Sequence
  Description of Artificial Sequence: Synthetic oligonucleotide
  Antisense strand to SEQ ID NO: 1921026
ugccuucuggagaagguca

SEQ ID NO: 1921028 - RNA, 19 nt, Artificial Sequence
  Description of Artificial Sequence: Synthetic oligonucleotide
  Sense strand starting at position 1586 of SEQ ID NO: 1879630
acucaagagcucugcgacu

SEQ ID NO: 1921029 - RNA, 19 nt, Artificial Sequence
  Description of Artificial Sequence: Synthetic oligonucleotide
  Antisense strand to SEQ ID NO: 1921028
agucgcagagcucuugagu

SEQ ID NO: 1921030 - RNA, 19 nt, Artificial Sequence
  Description of Artificial Sequence: Synthetic oligonucleotide
  Sense strand starting at position 2045 of SEQ ID NO: 1879630
uccagauaucgcgagauga

SEQ ID NO: 1921031 - RNA, 19 nt, Artificial Sequence
  Description of Artificial Sequence: Synthetic oligonucleotide
  Antisense strand to SEQ ID NO: 1921030
ucaucucgcgauaucugga

SEQ ID NO: 1921032 - RNA, 19 nt, Artificial Sequence
  Description of Artificial Sequence: Synthetic oligonucleotide
  Sense strand starting at position 2047 of SEQ ID NO: 1879630
cagauaucgcgagaugauc

SEQ ID NO: 1921033 - RNA, 19 nt, Artificial Sequence
  Description of Artificial Sequence: Synthetic oligonucleotide
  Antisense strand to SEQ ID NO: 1921032
gaucaucucgcgauaucug

SEQ ID NO: 1921034 - RNA, 19 nt, Artificial Sequence
  Description of Artificial Sequence: Synthetic oligonucleotide
  Sense strand starting at position 2233 of SEQ ID NO: 1879630
cgacauuggcccuggaaau

SEQ ID NO: 1921035 - RNA, 19 nt, Artificial Sequence
  Description of Artificial Sequence: Synthetic oligonucleotide
  Antisense strand to SEQ ID NO: 1921034
auuuccagggccaaugucg

SEQ ID NO: 1921036 - RNA, 19 nt, Artificial Sequence
  Description of Artificial Sequence: Synthetic oligonucleotide
  Sense strand starting at position 2234 of SEQ ID NO: 1879630
gacauuggcccuggaaauc

SEQ ID NO: 1921037 - RNA, 19 nt, Artificial Sequence
  Description of Artificial Sequence: Synthetic oligonucleotide
  Antisense strand to SEQ ID NO: 1921036
gauuuccagggccaauguc

SEQ ID NO: 1921038 - RNA, 19 nt, Artificial Sequence
  Description of Artificial Sequence: Synthetic oligonucleotide
  Sense strand starting at position 2342 of SEQ ID NO: 1879630
gguuucuugcauuggaauu

SEQ ID NO: 1921039 - RNA, 19 nt, Artificial Sequence
  Description of Artificial Sequence: Synthetic oligonucleotide
  Antisense strand to SEQ ID NO: 1921038
aauuccaaugcaagaaacc

SEQ ID NO: 1921040 - RNA, 19 nt, Artificial Sequence
  Description of Artificial Sequence: Synthetic oligonucleotide
  Sense strand starting at position 2355 of SEQ ID NO: 1879630
ggaauucccgccugaacca

SEQ ID NO: 1921041 - RNA, 19 nt, Artificial Sequence
  Description of Artificial Sequence: Synthetic oligonucleotide
  Antisense strand to SEQ ID NO: 1921040
ugguucaggcgggaauucc

SEQ ID NO: 1921042 - RNA, 19 nt, Artificial Sequence
  Description of Artificial Sequence: Synthetic oligonucleotide
  Sense strand starting at position 2380 of SEQ ID NO: 1879630
ccgaaacugcucugggaaa

SEQ ID NO: 1921043 - RNA, 19 nt, Artificial Sequence
  Description of Artificial Sequence: Synthetic oligonucleotide
  Antisense strand to SEQ ID NO: 1921042
uuucccagagcaguuucgg

SEQ ID NO: 1921044 - RNA, 19 nt, Artificial Sequence
  Description of Artificial Sequence: Synthetic oligonucleotide
  Sense strand starting at position 2635 of SEQ ID NO: 1879630
acagacucucccugaguaa

SEQ ID NO: 1921045 - RNA, 19 nt, Artificial Sequence
  Description of Artificial Sequence: Synthetic oligonucleotide
  Antisense strand to SEQ ID NO: 1921044
uuacucagggagagucugu

SEQ ID NO: 1921046 - RNA, 19 nt, Artificial Sequence
  Description of Artificial Sequence: Synthetic oligonucleotide
  Sense strand starting at position 2638 of SEQ ID NO: 1879630
gacucucccugaguaauug

SEQ ID NO: 1921047 - RNA, 19 nt, Artificial Sequence
  Description of Artificial Sequence: Synthetic oligonucleotide
  Antisense strand to SEQ ID NO: 1921046
caauuacucagggagaguc

SEQ ID NO: 1921048 - RNA, 19 nt, Artificial Sequence
  Description of Artificial Sequence: Synthetic oligonucleotide
  Sense strand starting at position 2642 of SEQ ID NO: 1879630
cucccugaguaauugcaaa

SEQ ID NO: 1921049 - RNA, 19 nt, Artificial Sequence
  Description of Artificial Sequence: Synthetic oligonucleotide
  Antisense strand to SEQ ID NO: 1921048
uuugcaauuacucagggag

SEQ ID NO: 1921050 - RNA, 19 nt, Artificial Sequence
  Description of Artificial Sequence: Synthetic oligonucleotide
  Sense strand starting at position 2701 of SEQ ID NO: 1879630
gccuccuauccauguauau

SEQ ID NO: 1921051 - RNA, 19 nt, Artificial Sequence
  Description of Artificial Sequence: Synthetic oligonucleotide
  Antisense strand to SEQ ID NO: 1921050
auauacauggauaggaggc

SEQ ID NO: 1921052 - RNA, 19 nt, Artificial Sequence
  Description of Artificial Sequence: Synthetic oligonucleotide
  Sense strand starting at position 3145 of SEQ ID NO: 1879630
cugcgagauccugaaacca

SEQ ID NO: 1921053 - RNA, 19 nt, Artificial Sequence
  Description of Artificial Sequence: Synthetic oligonucleotide
  Antisense strand to SEQ ID NO: 1921052
ugguuucaggaucucgcag

SEQ ID NO: 1921054 - RNA, 19 nt, Artificial Sequence
  Description of Artificial Sequence: Synthetic oligonucleotide
  Sense strand starting at position 3205 of SEQ ID NO: 1879630
uggcuagugucauugauuu

SEQ ID NO: 1921055 - RNA, 19 nt, Artificial Sequence
  Description of Artificial Sequence: Synthetic oligonucleotide
  Antisense strand to SEQ ID NO: 1921054
aaaucaaugacacuagcca

SEQ ID NO: 1921056 - RNA, 19 nt, Artificial Sequence
  Description of Artificial Sequence: Synthetic oligonucleotide
  Sense strand starting at position 3246 of SEQ ID NO: 1879630
auagaaaucugaccacguu

SEQ ID NO: 1921057 - RNA, 19 nt, Artificial Sequence
  Description of Artificial Sequence: Synthetic oligonucleotide
  Antisense strand to SEQ ID NO: 1921056
aacguggucagauuucuau

SEQ ID NO: 1921058 - RNA, 19 nt, Artificial Sequence
  Description of Artificial Sequence: Synthetic oligonucleotide
  Sense strand starting at position 3247 of SEQ ID NO: 1879630
uagaaaucugaccacguua

SEQ ID NO: 1921059 - RNA, 19 nt, Artificial Sequence
  Description of Artificial Sequence: Synthetic oligonucleotide
  Antisense strand to SEQ ID NO: 1921058
uaacguggucagauuucua

SEQ ID NO: 1921060 - RNA, 19 nt, Artificial Sequence
  Description of Artificial Sequence: Synthetic oligonucleotide
  Sense strand starting at position 3249 of SEQ ID NO: 1879630
gaaaucugaccacguuaug

SEQ ID NO: 1921061 - RNA, 19 nt, Artificial Sequence
  Description of Artificial Sequence: Synthetic oligonucleotide
  Antisense strand to SEQ ID NO: 1921060
cauaacguggucagauuuc

SEQ ID NO: 1921062 - RNA, 19 nt, Artificial Sequence
  Description of Artificial Sequence: Synthetic oligonucleotide
  Sense strand starting at position 3260 of SEQ ID NO: 1879630
acguuaugccucugauuag

SEQ ID NO: 1921063 - RNA, 19 nt, Artificial Sequence
  Description of Artificial Sequence: Synthetic oligonucleotide
  Antisense strand to SEQ ID NO: 1921062
cuaaucagaggcauaacgu

SEQ ID NO: 1921064 - RNA, 19 nt, Artificial Sequence
  Description of Artificial Sequence: Synthetic oligonucleotide
  Sense strand starting at position 3263 of SEQ ID NO: 1879630
uuaugccucugauuagaag

SEQ ID NO: 1921065 - RNA, 19 nt, Artificial Sequence
  Description of Artificial Sequence: Synthetic oligonucleotide
  Antisense strand to SEQ ID NO: 1921064
cuucuaaucagaggcauaa

SEQ ID NO: 1921066 - RNA, 19 nt, Artificial Sequence
  Description of Artificial Sequence: Synthetic oligonucleotide
  Sense strand starting at position 3656 of SEQ ID NO: 1879630
uaggaagccuagucagaua

SEQ ID NO: 1921067 - RNA, 19 nt, Artificial Sequence
  Description of Artificial Sequence: Synthetic oligonucleotide
  Antisense strand to SEQ ID NO: 1921066
uaucugacuaggcuuccua

SEQ ID NO: 1921068 - RNA, 19 nt, Artificial Sequence
  Description of Artificial Sequence: Synthetic oligonucleotide
  Sense strand starting at position 3724 of SEQ ID NO: 1879630
cgcauugauuucucuaucu

SEQ ID NO: 1921069 - RNA, 19 nt, Artificial Sequence
  Description of Artificial Sequence: Synthetic oligonucleotide
  Antisense strand to SEQ ID NO: 1921068
agauagagaaaucaaugcg

SEQ ID NO: 1921070 - RNA, 19 nt, Artificial Sequence
  Description of Artificial Sequence: Synthetic oligonucleotide
  Sense strand starting at position 3748 of SEQ ID NO: 1879630
ugaaacaucugguuguaga

SEQ ID NO: 1921071 - RNA, 19 nt, Artificial Sequence
  Description of Artificial Sequence: Synthetic oligonucleotide
  Antisense strand to SEQ ID NO: 1921070
ucuacaaccagauguuuca

SEQ ID NO: 1921072 - RNA, 19 nt, Artificial Sequence
  Description of Artificial Sequence: Synthetic oligonucleotide
  Sense strand starting at position 3749 of SEQ ID NO: 1879630
gaaacaucugguuguagau

SEQ ID NO: 1921073 - RNA, 19 nt, Artificial Sequence
  Description of Artificial Sequence: Synthetic oligonucleotide
  Antisense strand to SEQ ID NO: 1921072
aucuacaaccagauguuuc

SEQ ID NO: 1921074 - RNA, 19 nt, Artificial Sequence
  Description of Artificial Sequence: Synthetic oligonucleotide
  Sense strand starting at position 3761 of SEQ ID NO: 1879630
uguagauauuaucugcuag

SEQ ID NO: 1921075 - RNA, 19 nt, Artificial Sequence
  Description of Artificial Sequence: Synthetic oligonucleotide
  Antisense strand to SEQ ID NO: 1921074
cuagcagauaauaucuaca

SEQ ID NO: 1921076 - RNA, 19 nt, Artificial Sequence
  Description of Artificial Sequence: Synthetic oligonucleotide
  Sense strand starting at position 3823 of SEQ ID NO: 1879630
gcacaaugccuuggauagu

SEQ ID NO: 1921077 - RNA, 19 nt, Artificial Sequence
  Description of Artificial Sequence: Synthetic oligonucleotide
  Antisense strand to SEQ ID NO: 1921076
acuauccaaggcauugugc

SEQ ID NO: 1921078 - RNA, 19 nt, Artificial Sequence
  Description of Artificial Sequence: Synthetic oligonucleotide
  Sense strand starting at position 3837 of SEQ ID NO: 1879630
auaguagggucuucuauga

SEQ ID NO: 1921079 - RNA, 19 nt, Artificial Sequence
  Description of Artificial Sequence: Synthetic oligonucleotide
  Antisense strand to SEQ ID NO: 1921078
ucauagaagacccuacuau

SEQ ID NO: 1921080 - RNA, 19 nt, Artificial Sequence
  Description of Artificial Sequence: Synthetic oligonucleotide
  Sense strand starting at position 3841 of SEQ ID NO: 1879630
uagggucuucuaugaaaua

SEQ ID NO: 1921081 - RNA, 19 nt, Artificial Sequence
  Description of Artificial Sequence: Synthetic oligonucleotide
  Antisense strand to SEQ ID NO: 1921080
uauuucauagaagacccua

SEQ ID NO: 1921082 - RNA, 19 nt, Artificial Sequence
  Description of Artificial Sequence: Synthetic oligonucleotide
  Sense strand starting at position 3853 of SEQ ID NO: 1879630
ugaaauauuuguugaacug

SEQ ID NO: 1921083 - RNA, 19 nt, Artificial Sequence
  Description of Artificial Sequence: Synthetic oligonucleotide
  Antisense strand to SEQ ID NO: 1921082
caguucaacaaauauuuca

SEQ ID NO: 1921084 - RNA, 19 nt, Artificial Sequence
  Description of Artificial Sequence: Synthetic oligonucleotide
  Sense strand starting at position 89 of SEQ ID NO: 1879631
gcugauaguagguaagguu

SEQ ID NO: 1921085 - RNA, 19 nt, Artificial Sequence
  Description of Artificial Sequence: Synthetic oligonucleotide
  Antisense strand to SEQ ID NO: 1921084
aaccuuaccuacuaucagc

SEQ ID NO: 1921086 - RNA, 19 nt, Artificial Sequence
  Description of Artificial Sequence: Synthetic oligonucleotide
  Sense strand starting at position 96 of SEQ ID NO: 1879631
guagguaagguucacagua

SEQ ID NO: 1921087 - RNA, 19 nt, Artificial Sequence
  Description of Artificial Sequence: Synthetic oligonucleotide
  Antisense strand to SEQ ID NO: 1921086
uacugugaaccuuaccuac

SEQ ID NO: 1921088 - RNA, 19 nt, Artificial Sequence
  Description of Artificial Sequence: Synthetic oligonucleotide
  Sense strand starting at position 613 of SEQ ID NO: 1879631
gagguaauauacccgauua

SEQ ID NO: 1921089 - RNA, 19 nt, Artificial Sequence
  Description of Artificial Sequence: Synthetic oligonucleotide
  Antisense strand to SEQ ID NO: 1921088
uaaucggguauauuaccuc

SEQ ID NO: 1921090 - RNA, 19 nt, Artificial Sequence
  Description of Artificial Sequence: Synthetic oligonucleotide
  Sense strand starting at position 614 of SEQ ID NO: 1879631
agguaauauacccgauuag

SEQ ID NO: 1921091 - RNA, 19 nt, Artificial Sequence
  Description of Artificial Sequence: Synthetic oligonucleotide
  Antisense strand to SEQ ID NO: 1921090
cuaaucggguauauuaccu

SEQ ID NO: 1921092 - RNA, 19 nt, Artificial Sequence
  Description of Artificial Sequence: Synthetic oligonucleotide
  Sense strand starting at position 656 of SEQ ID NO: 1879631
augaaauuaccugagccuu

SEQ ID NO: 1921093 - RNA, 19 nt, Artificial Sequence
  Description of Artificial Sequence: Synthetic oligonucleotide
  Antisense strand to SEQ ID NO: 1921092
aaggcucagguaauuucau

SEQ ID NO: 1921094 - RNA, 19 nt, Artificial Sequence
  Description of Artificial Sequence: Synthetic oligonucleotide
  Sense strand starting at position 681 of SEQ ID NO: 1879631
acaguacugugaucuaaga

SEQ ID NO: 1921095 - RNA, 19 nt, Artificial Sequence
  Description of Artificial Sequence: Synthetic oligonucleotide
  Antisense strand to SEQ ID NO: 1921094
ucuuagaucacaguacugu

SEQ ID NO: 1921096 - RNA, 19 nt, Artificial Sequence
  Description of Artificial Sequence: Synthetic oligonucleotide
  Sense strand starting at position 720 of SEQ ID NO: 1879631
ugcacuuuguuucuuauuu

SEQ ID NO: 1921097 - RNA, 19 nt, Artificial Sequence
  Description of Artificial Sequence: Synthetic oligonucleotide
  Antisense strand to SEQ ID NO: 1921096
aaauaagaaacaaagugca

SEQ ID NO: 1921098 - RNA, 19 nt, Artificial Sequence
  Description of Artificial Sequence: Synthetic oligonucleotide
  Sense strand starting at position 724 of SEQ ID NO: 1879631
cuuuguuucuuauuugcua

SEQ ID NO: 1921099 - RNA, 19 nt, Artificial Sequence
  Description of Artificial Sequence: Synthetic oligonucleotide
  Antisense strand to SEQ ID NO: 1921098
uagcaaauaagaaacaaag

SEQ ID NO: 1921100 - RNA, 19 nt, Artificial Sequence
  Description of Artificial Sequence: Synthetic oligonucleotide
  Sense strand starting at position 797 of SEQ ID NO: 1879631
agagauuggcauuggcaga

SEQ ID NO: 1921101 - RNA, 19 nt, Artificial Sequence
  Description of Artificial Sequence: Synthetic oligonucleotide
  Antisense strand to SEQ ID NO: 1921100
ucugccaaugccaaucucu

SEQ ID NO: 1921102 - RNA, 19 nt, Artificial Sequence
  Description of Artificial Sequence: Synthetic oligonucleotide
  Sense strand starting at position 798 of SEQ ID NO: 1879631
gagauuggcauuggcagaa

SEQ ID NO: 1921103 - RNA, 19 nt, Artificial Sequence
  Description of Artificial Sequence: Synthetic oligonucleotide
  Antisense strand to SEQ ID NO: 1921102
uucugccaaugccaaucuc

SEQ ID NO: 1921104 - RNA, 19 nt, Artificial Sequence
  Description of Artificial Sequence: Synthetic oligonucleotide
  Sense strand starting at position 850 of SEQ ID NO: 1879631
agcaguacucucuagagua

SEQ ID NO: 1921105 - RNA, 19 nt, Artificial Sequence
  Description of Artificial Sequence: Synthetic oligonucleotide
  Antisense strand to SEQ ID NO: 1921104
uacucuagagaguacugcu

SEQ ID NO: 1921106 - RNA, 19 nt, Artificial Sequence
  Description of Artificial Sequence: Synthetic oligonucleotide
  Sense strand starting at position 852 of SEQ ID NO: 1879631
caguacucucuagaguaag

SEQ ID NO: 1921107 - RNA, 19 nt, Artificial Sequence
  Description of Artificial Sequence: Synthetic oligonucleotide
  Antisense strand to SEQ ID NO: 1921106
cuuacucuagagaguacug

SEQ ID NO: 1921108 - RNA, 19 nt, Artificial Sequence
  Description of Artificial Sequence: Synthetic oligonucleotide
  Sense strand starting at position 1107 of SEQ ID NO: 1879631
ggagaucaagguugaagua

SEQ ID NO: 1921109 - RNA, 19 nt, Artificial Sequence
  Description of Artificial Sequence: Synthetic oligonucleotide
  Antisense strand to SEQ ID NO: 1921108
uacuucaaccuugaucucc

SEQ ID NO: 1921110 - RNA, 19 nt, Artificial Sequence
  Description of Artificial Sequence: Synthetic oligonucleotide
  Sense strand starting at position 1117 of SEQ ID NO: 1879631
guugaaguaagcuaugauc

SEQ ID NO: 1921111 - RNA, 19 nt, Artificial Sequence
  Description of Artificial Sequence: Synthetic oligonucleotide
  Antisense strand to SEQ ID NO: 1921110
gaucauagcuuacuucaac

SEQ ID NO: 1921112 - RNA, 19 nt, Artificial Sequence
  Description of Artificial Sequence: Synthetic oligonucleotide
  Sense strand starting at position 1205 of SEQ ID NO: 1879631
ugguguuuacagcuucgua

SEQ ID NO: 1921113 - RNA, 19 nt, Artificial Sequence
  Description of Artificial Sequence: Synthetic oligonucleotide
  Antisense strand to SEQ ID NO: 1921112
uacgaagcuguaaacacca

SEQ ID NO: 1921114 - RNA, 19 nt, Artificial Sequence
  Description of Artificial Sequence: Synthetic oligonucleotide
  Sense strand starting at position 1206 of SEQ ID NO: 1879631
gguguuuacagcuucguau

SEQ ID NO: 1921115 - RNA, 19 nt, Artificial Sequence
  Description of Artificial Sequence: Synthetic oligonucleotide
  Antisense strand to SEQ ID NO: 1921114
auacgaagcuguaaacacc

SEQ ID NO: 1921116 - RNA, 19 nt, Artificial Sequence
  Description of Artificial Sequence: Synthetic oligonucleotide
  Sense strand starting at position 1207 of SEQ ID NO: 1879631
guguuuacagcuucguauu

SEQ ID NO: 1921117 - RNA, 19 nt, Artificial Sequence
  Description of Artificial Sequence: Synthetic oligonucleotide
  Antisense strand to SEQ ID NO: 1921116
aauacgaagcuguaaacac

SEQ ID NO: 1921118 - RNA, 19 nt, Artificial Sequence
  Description of Artificial Sequence: Synthetic oligonucleotide
  Sense strand starting at position 1234 of SEQ ID NO: 1879631
cgauaugugccagauauca

SEQ ID NO: 1921119 - RNA, 19 nt, Artificial Sequence
  Description of Artificial Sequence: Synthetic oligonucleotide
  Antisense strand to SEQ ID NO: 1921118
ugauaucuggcacauaucg

SEQ ID NO: 1921120 - RNA, 19 nt, Artificial Sequence
  Description of Artificial Sequence: Synthetic oligonucleotide
  Sense strand starting at position 1263 of SEQ ID NO: 1879631
guccuuauuugauagaaau

SEQ ID NO: 1921121 - RNA, 19 nt, Artificial Sequence
  Description of Artificial Sequence: Synthetic oligonucleotide
  Antisense strand to SEQ ID NO: 1921120
auuucuaucaaauaaggac

SEQ ID NO: 1921122 - RNA, 19 nt, Artificial Sequence
  Description of Artificial Sequence: Synthetic oligonucleotide
  Sense strand starting at position 1455 of SEQ ID NO: 1879631
uaagcuggucuacaaugau

SEQ ID NO: 1921123 - RNA, 19 nt, Artificial Sequence
  Description of Artificial Sequence: Synthetic oligonucleotide
  Antisense strand to SEQ ID NO: 1921122
aucauuguagaccagcuua

SEQ ID NO: 1921124 - RNA, 19 nt, Artificial Sequence
  Description of Artificial Sequence: Synthetic oligonucleotide
  Sense strand starting at position 1458 of SEQ ID NO: 1879631
gcuggucuacaaugaugga

SEQ ID NO: 1921125 - RNA, 19 nt, Artificial Sequence
  Description of Artificial Sequence: Synthetic oligonucleotide
  Antisense strand to SEQ ID NO: 1921124
uccaucauuguagaccagc

SEQ ID NO: 1921126 - RNA, 19 nt, Artificial Sequence
  Description of Artificial Sequence: Synthetic oligonucleotide
  Sense strand starting at position 1625 of SEQ ID NO: 1879631
uacgaaguucucugaauac

SEQ ID NO: 1921127 - RNA, 19 nt, Artificial Sequence
  Description of Artificial Sequence: Synthetic oligonucleotide
  Antisense strand to SEQ ID NO: 1921126
guauucagagaacuucgua

SEQ ID NO: 1921128 - RNA, 19 nt, Artificial Sequence
  Description of Artificial Sequence: Synthetic oligonucleotide
  Sense strand starting at position 1799 of SEQ ID NO: 1879631
ccgggagaaguaugacaga

SEQ ID NO: 1921129 - RNA, 19 nt, Artificial Sequence
  Description of Artificial Sequence: Synthetic oligonucleotide
  Antisense strand to SEQ ID NO: 1921128
ucugucauacuucucccgg

SEQ ID NO: 1921130 - RNA, 19 nt, Artificial Sequence
  Description of Artificial Sequence: Synthetic oligonucleotide
  Sense strand starting at position 1900 of SEQ ID NO: 1879631
gcuccucugauggaaggua

SEQ ID NO: 1921131 - RNA, 19 nt, Artificial Sequence
  Description of Artificial Sequence: Synthetic oligonucleotide
  Antisense strand to SEQ ID NO: 1921130
uaccuuccaucagaggagc

SEQ ID NO: 1921132 - RNA, 19 nt, Artificial Sequence
  Description of Artificial Sequence: Synthetic oligonucleotide
  Sense strand starting at position 1936 of SEQ ID NO: 1879631
caguuaucacaguacugua

SEQ ID NO: 1921133 - RNA, 19 nt, Artificial Sequence
  Description of Artificial Sequence: Synthetic oligonucleotide
  Antisense strand to SEQ ID NO: 1921132
uacaguacugugauaacug

SEQ ID NO: 1921134 - RNA, 19 nt, Artificial Sequence
  Description of Artificial Sequence: Synthetic oligonucleotide
  Sense strand starting at position 1944 of SEQ ID NO: 1879631
acaguacuguaccuuuaga

SEQ ID NO: 1921135 - RNA, 19 nt, Artificial Sequence
  Description of Artificial Sequence: Synthetic oligonucleotide
  Antisense strand to SEQ ID NO: 1921134
ucuaaagguacaguacugu

SEQ ID NO: 1921136 - RNA, 19 nt, Artificial Sequence
  Description of Artificial Sequence: Synthetic oligonucleotide
  Sense strand starting at position 2150 of SEQ ID NO: 1879631
aguggugaggcugaaauau

SEQ ID NO: 1921137 - RNA, 19 nt, Artificial Sequence
  Description of Artificial Sequence: Synthetic oligonucleotide
  Antisense strand to SEQ ID NO: 1921136
auauuucagccucaccacu

SEQ ID NO: 1921138 - RNA, 19 nt, Artificial Sequence
  Description of Artificial Sequence: Synthetic oligonucleotide
  Sense strand starting at position 2271 of SEQ ID NO: 1879631
ucaaauaugcaguaagcuu

SEQ ID NO: 1921139 - RNA, 19 nt, Artificial Sequence
  Description of Artificial Sequence: Synthetic oligonucleotide
  Antisense strand to SEQ ID NO: 1921138
aagcuuacugcauauuuga

SEQ ID NO: 1921140 - RNA, 19 nt, Artificial Sequence
  Description of Artificial Sequence: Synthetic oligonucleotide
  Sense strand starting at position 2379 of SEQ ID NO: 1879631
gaggaacuacuacguucua

SEQ ID NO: 1921141 - RNA, 19 nt, Artificial Sequence
  Description of Artificial Sequence: Synthetic oligonucleotide
  Antisense strand to SEQ ID NO: 1921140
uagaacguaguaguuccuc

SEQ ID NO: 1921142 - RNA, 19 nt, Artificial Sequence
  Description of Artificial Sequence: Synthetic oligonucleotide
  Sense strand starting at position 2380 of SEQ ID NO: 1879631
aggaacuacuacguucuaa

SEQ ID NO: 1921143 - RNA, 19 nt, Artificial Sequence
  Description of Artificial Sequence: Synthetic oligonucleotide
  Antisense strand to SEQ ID NO: 1921142
uuagaacguaguaguuccu

SEQ ID NO: 1921144 - RNA, 19 nt, Artificial Sequence
  Description of Artificial Sequence: Synthetic oligonucleotide
  Sense strand starting at position 2662 of SEQ ID NO: 1879631
uuugccagagaucauauau

SEQ ID NO: 1921145 - RNA, 19 nt, Artificial Sequence
  Description of Artificial Sequence: Synthetic oligonucleotide
  Antisense strand to SEQ ID NO: 1921144
auauaugaucucuggcaaa

SEQ ID NO: 1921146 - RNA, 19 nt, Artificial Sequence
  Description of Artificial Sequence: Synthetic oligonucleotide
  Sense strand starting at position 2683 of SEQ ID NO: 1879631
cuaaguuauggcgaaccca

SEQ ID NO: 1921147 - RNA, 19 nt, Artificial Sequence
  Description of Artificial Sequence: Synthetic oligonucleotide
  Antisense strand to SEQ ID NO: 1921146
uggguucgccauaacuuag

SEQ ID NO: 1921148 - RNA, 19 nt, Artificial Sequence
  Description of Artificial Sequence: Synthetic oligonucleotide
  Sense strand starting at position 2702 of SEQ ID NO: 1879631
uguccagaaccaugucaaa

SEQ ID NO: 1921149 - RNA, 19 nt, Artificial Sequence
  Description of Artificial Sequence: Synthetic oligonucleotide
  Antisense strand to SEQ ID NO: 1921148
uuugacaugguucuggaca

SEQ ID NO: 1921150 - RNA, 19 nt, Artificial Sequence
  Description of Artificial Sequence: Synthetic oligonucleotide
  Sense strand starting at position 2950 of SEQ ID NO: 1879631
guacucaaauuaguaacau

SEQ ID NO: 1921151 - RNA, 19 nt, Artificial Sequence
  Description of Artificial Sequence: Synthetic oligonucleotide
  Antisense strand to SEQ ID NO: 1921150
auguuacuaauuugaguac

SEQ ID NO: 1921152 - RNA, 19 nt, Artificial Sequence
  Description of Artificial Sequence: Synthetic oligonucleotide
  Sense strand starting at position 2996 of SEQ ID NO: 1879631
auucuauaccuauggugau

SEQ ID NO: 1921153 - RNA, 19 nt, Artificial Sequence
  Description of Artificial Sequence: Synthetic oligonucleotide
  Antisense strand to SEQ ID NO: 1921152
aucaccauagguauagaau

SEQ ID NO: 1921154 - RNA, 19 nt, Artificial Sequence
  Description of Artificial Sequence: Synthetic oligonucleotide
  Sense strand starting at position 3382 of SEQ ID NO: 1879631
ucuuuagaucagcagaagu

SEQ ID NO: 1921155 - RNA, 19 nt, Artificial Sequence
  Description of Artificial Sequence: Synthetic oligonucleotide
  Antisense strand to SEQ ID NO: 1921154
acuucugcugaucuaaaga

SEQ ID NO: 1921156 - RNA, 19 nt, Artificial Sequence
  Description of Artificial Sequence: Synthetic oligonucleotide
  Sense strand starting at position 3384 of SEQ ID NO: 1879631
uuuagaucagcagaaguca

SEQ ID NO: 1921157 - RNA, 19 nt, Artificial Sequence
  Description of Artificial Sequence: Synthetic oligonucleotide
  Antisense strand to SEQ ID NO: 1921156
ugacuucugcugaucuaaa

SEQ ID NO: 1921158 - RNA, 19 nt, Artificial Sequence
  Description of Artificial Sequence: Synthetic oligonucleotide
  Sense strand starting at position 3707 of SEQ ID NO: 1879631
cugcuacgugaacaaagau

SEQ ID NO: 1921159 - RNA, 19 nt, Artificial Sequence
  Description of Artificial Sequence: Synthetic oligonucleotide
  Antisense strand to SEQ ID NO: 1921158
aucuuuguucacguagcag

SEQ ID NO: 1921160 - RNA, 19 nt, Artificial Sequence
  Description of Artificial Sequence: Synthetic oligonucleotide
  Sense strand starting at position 3848 of SEQ ID NO: 1879631
acugaagguuggguaagua

SEQ ID NO: 1921161 - RNA, 19 nt, Artificial Sequence
  Description of Artificial Sequence: Synthetic oligonucleotide
  Antisense strand to SEQ ID NO: 1921160
uacuuacccaaccuucagu

SEQ ID NO: 1921162 - RNA, 19 nt, Artificial Sequence
  Description of Artificial Sequence: Synthetic oligonucleotide
  Sense strand starting at position 3968 of SEQ ID NO: 1879631
ggaaguguacugcaaaguu

SEQ ID NO: 1921163 - RNA, 19 nt, Artificial Sequence
  Description of Artificial Sequence: Synthetic oligonucleotide
  Antisense strand to SEQ ID NO: 1921162
aacuuugcaguacacuucc

SEQ ID NO: 1921164 - RNA, 19 nt, Artificial Sequence
  Description of Artificial Sequence: Synthetic oligonucleotide
  Sense strand starting at position 104 of SEQ ID NO: 1879632
agcccuaggcaucaguauu

SEQ ID NO: 1921165 - RNA, 19 nt, Artificial Sequence
  Description of Artificial Sequence: Synthetic oligonucleotide
  Antisense strand to SEQ ID NO: 1921164
aauacugaugccuagggcu

SEQ ID NO: 1921166 - RNA, 19 nt, Artificial Sequence
  Description of Artificial Sequence: Synthetic oligonucleotide
  Sense strand starting at position 217 of SEQ ID NO: 1879632
aggaacuuccugcaaguga

SEQ ID NO: 1921167 - RNA, 19 nt, Artificial Sequence
  Description of Artificial Sequence: Synthetic oligonucleotide
  Antisense strand to SEQ ID NO: 1921166
ucacuugcaggaaguuccu

SEQ ID NO: 1921168 - RNA, 19 nt, Artificial Sequence
  Description of Artificial Sequence: Synthetic oligonucleotide
  Sense strand starting at position 228 of SEQ ID NO: 1879632
gcaagugauccagacuuaa

SEQ ID NO: 1921169 - RNA, 19 nt, Artificial Sequence
  Description of Artificial Sequence: Synthetic oligonucleotide
  Antisense strand to SEQ ID NO: 1921168
uuaagucuggaucacuugc

SEQ ID NO: 1921170 - RNA, 19 nt, Artificial Sequence
  Description of Artificial Sequence: Synthetic oligonucleotide
  Sense strand starting at position 243 of SEQ ID NO: 1879632
uuaacucuguuggucuuaa

SEQ ID NO: 1921171 - RNA, 19 nt, Artificial Sequence
  Description of Artificial Sequence: Synthetic oligonucleotide
  Antisense strand to SEQ ID NO: 1921170
uuaagaccaacagaguuaa

SEQ ID NO: 1921172 - RNA, 19 nt, Artificial Sequence
  Description of Artificial Sequence: Synthetic oligonucleotide
  Sense strand starting at position 291 of SEQ ID NO: 1879632
caguuaugugcugaaggca

SEQ ID NO: 1921173 - RNA, 19 nt, Artificial Sequence
  Description of Artificial Sequence: Synthetic oligonucleotide
  Antisense strand to SEQ ID NO: 1921172
ugccuucagcacauaacug

SEQ ID NO: 1921174 - RNA, 19 nt, Artificial Sequence
  Description of Artificial Sequence: Synthetic oligonucleotide
  Sense strand starting at position 347 of SEQ ID NO: 1879632
aggaaauaagcaggcguau

SEQ ID NO: 1921175 - RNA, 19 nt, Artificial Sequence
  Description of Artificial Sequence: Synthetic oligonucleotide
  Antisense strand to SEQ ID NO: 1921174
auacgccugcuuauuuccu

SEQ ID NO: 1921176 - RNA, 19 nt, Artificial Sequence
  Description of Artificial Sequence: Synthetic oligonucleotide
  Sense strand starting at position 405 of SEQ ID NO: 1879632
guguacuugacagguuaac

SEQ ID NO: 1921177 - RNA, 19 nt, Artificial Sequence
  Description of Artificial Sequence: Synthetic oligonucleotide
  Antisense strand to SEQ ID NO: 1921176
guuaaccugucaaguacac

SEQ ID NO: 1921178 - RNA, 19 nt, Artificial Sequence
  Description of Artificial Sequence: Synthetic oligonucleotide
  Sense strand starting at position 471 of SEQ ID NO: 1879632
ggacgcucuagugagcaau

SEQ ID NO: 1921179 - RNA, 19 nt, Artificial Sequence
  Description of Artificial Sequence: Synthetic oligonucleotide
  Antisense strand to SEQ ID NO: 1921178
auugcucacuagagcgucc

SEQ ID NO: 1921180 - RNA, 19 nt, Artificial Sequence
  Description of Artificial Sequence: Synthetic oligonucleotide
  Sense strand starting at position 851 of SEQ ID NO: 1879632
gcuguaaauggugaucuac

SEQ ID NO: 1921181 - RNA, 19 nt, Artificial Sequence
  Description of Artificial Sequence: Synthetic oligonucleotide
  Antisense strand to SEQ ID NO: 1921180
guagaucaccauuuacagc

SEQ ID NO: 1921182 - RNA, 19 nt, Artificial Sequence
  Description of Artificial Sequence: Synthetic oligonucleotide
  Sense strand starting at position 853 of SEQ ID NO: 1879632
uguaaauggugaucuacuc

SEQ ID NO: 1921183 - RNA, 19 nt, Artificial Sequence
  Description of Artificial Sequence: Synthetic oligonucleotide
  Antisense strand to SEQ ID NO: 1921182
gaguagaucaccauuuaca

SEQ ID NO: 1921184 - RNA, 19 nt, Artificial Sequence
  Description of Artificial Sequence: Synthetic oligonucleotide
  Sense strand starting at position 983 of SEQ ID NO: 1879632
agucaugaaaguugaugau

SEQ ID NO: 1921185 - RNA, 19 nt, Artificial Sequence
  Description of Artificial Sequence: Synthetic oligonucleotide
  Antisense strand to SEQ ID NO: 1921184
aucaucaacuuucaugacu

SEQ ID NO: 1921186 - RNA, 19 nt, Artificial Sequence
  Description of Artificial Sequence: Synthetic oligonucleotide
  Sense strand starting at position 1071 of SEQ ID NO: 1879632
aguguaauguucucauaaa

SEQ ID NO: 1921187 - RNA, 19 nt, Artificial Sequence
  Description of Artificial Sequence: Synthetic oligonucleotide
  Antisense strand to SEQ ID NO: 1921186
uuuaugagaacauuacacu

SEQ ID NO: 1921188 - RNA, 19 nt, Artificial Sequence
  Description of Artificial Sequence: Synthetic oligonucleotide
  Sense strand starting at position 1103 of SEQ ID NO: 1879632
uauauuaaggcuuaaggua

SEQ ID NO: 1921189 - RNA, 19 nt, Artificial Sequence
  Description of Artificial Sequence: Synthetic oligonucleotide
  Antisense strand to SEQ ID NO: 1921188
uaccuuaagccuuaauaua

SEQ ID NO: 1921190 - RNA, 19 nt, Artificial Sequence
  Description of Artificial Sequence: Synthetic oligonucleotide
  Sense strand starting at position 1118 of SEQ ID NO: 1879632
gguaauuacugguuugagu

SEQ ID NO: 1921191 - RNA, 19 nt, Artificial Sequence
  Description of Artificial Sequence: Synthetic oligonucleotide
  Antisense strand to SEQ ID NO: 1921190
acucaaaccaguaauuacc

SEQ ID NO: 1921192 - RNA, 19 nt, Artificial Sequence
  Description of Artificial Sequence: Synthetic oligonucleotide
  Sense strand starting at position 1203 of SEQ ID NO: 1879632
ucuuacagugagugauaca

SEQ ID NO: 1921193 - RNA, 19 nt, Artificial Sequence
  Description of Artificial Sequence: Synthetic oligonucleotide
  Antisense strand to SEQ ID NO: 1921192
uguaucacucacuguaaga

SEQ ID NO: 1921194 - RNA, 19 nt, Artificial Sequence
  Description of Artificial Sequence: Synthetic oligonucleotide
  Sense strand starting at position 1351 of SEQ ID NO: 1879632
aguugauugggaugacuag

SEQ ID NO: 1921195 - RNA, 19 nt, Artificial Sequence
  Description of Artificial Sequence: Synthetic oligonucleotide
  Antisense strand to SEQ ID NO: 1921194
cuagucaucccaaucaacu

SEQ ID NO: 1921196 - RNA, 19 nt, Artificial Sequence
  Description of Artificial Sequence: Synthetic oligonucleotide
  Sense strand starting at position 1419 of SEQ ID NO: 1879632
aguaaugcagcuuacaaau

SEQ ID NO: 1921197 - RNA, 19 nt, Artificial Sequence
  Description of Artificial Sequence: Synthetic oligonucleotide
  Antisense strand to SEQ ID NO: 1921196
auuuguaagcugcauuacu

SEQ ID NO: 1921198 - RNA, 19 nt, Artificial Sequence
  Description of Artificial Sequence: Synthetic oligonucleotide
  Sense strand starting at position 1555 of SEQ ID NO: 1879632
caaagaggauuggaauacu

SEQ ID NO: 1921199 - RNA, 19 nt, Artificial Sequence
  Description of Artificial Sequence: Synthetic oligonucleotide
  Antisense strand to SEQ ID NO: 1921198
aguauuccaauccucuuug

SEQ ID NO: 1921200 - RNA, 19 nt, Artificial Sequence
  Description of Artificial Sequence: Synthetic oligonucleotide
  Sense strand starting at position 1678 of SEQ ID NO: 1879632
gcaggugcaccucaauaaa

SEQ ID NO: 1921201 - RNA, 19 nt, Artificial Sequence
  Description of Artificial Sequence: Synthetic oligonucleotide
  Antisense strand to SEQ ID NO: 1921200
uuuauugaggugcaccugc

SEQ ID NO: 1921202 - RNA, 19 nt, Artificial Sequence
  Description of Artificial Sequence: Synthetic oligonucleotide
  Sense strand starting at position 2034 of SEQ ID NO: 1879632
aguucugcuccuggaaaua

SEQ ID NO: 1921203 - RNA, 19 nt, Artificial Sequence
  Description of Artificial Sequence: Synthetic oligonucleotide
  Antisense strand to SEQ ID NO: 1921202
uauuuccaggagcagaacu

SEQ ID NO: 1921204 - RNA, 19 nt, Artificial Sequence
  Description of Artificial Sequence: Synthetic oligonucleotide
  Sense strand starting at position 2127 of SEQ ID NO: 1879632
ccuuguacuccugaaucga

SEQ ID NO: 1921205 - RNA, 19 nt, Artificial Sequence
  Description of Artificial Sequence: Synthetic oligonucleotide
  Antisense strand to SEQ ID NO: 1921204
ucgauucaggaguacaagg

SEQ ID NO: 1921206 - RNA, 19 nt, Artificial Sequence
  Description of Artificial Sequence: Synthetic oligonucleotide
  Sense strand starting at position 2136 of SEQ ID NO: 1879632
ccugaaucgacucguagag

SEQ ID NO: 1921207 - RNA, 19 nt, Artificial Sequence
  Description of Artificial Sequence: Synthetic oligonucleotide
  Antisense strand to SEQ ID NO: 1921206
cucuacgagucgauucagg

SEQ ID NO: 1921208 - RNA, 19 nt, Artificial Sequence
  Description of Artificial Sequence: Synthetic oligonucleotide
  Sense strand starting at position 2231 of SEQ ID NO: 1879632
acgagaagucagcacuuga

SEQ ID NO: 1921209 - RNA, 19 nt, Artificial Sequence
  Description of Artificial Sequence: Synthetic oligonucleotide
  Antisense strand to SEQ ID NO: 1921208
ucaagugcugacuucucgu

SEQ ID NO: 1921210 - RNA, 19 nt, Artificial Sequence
  Description of Artificial Sequence: Synthetic oligonucleotide
  Sense strand starting at position 2236 of SEQ ID NO: 1879632
aagucagcacuugaguuua

SEQ ID NO: 1921211 - RNA, 19 nt, Artificial Sequence
  Description of Artificial Sequence: Synthetic oligonucleotide
  Antisense strand to SEQ ID NO: 1921210
uaaacucaagugcugacuu

SEQ ID NO: 1921212 - RNA, 19 nt, Artificial Sequence
  Description of Artificial Sequence: Synthetic oligonucleotide
  Sense strand starting at position 2388 of SEQ ID NO: 1879632
cucagacguuacucauuga

SEQ ID NO: 1921213 - RNA, 19 nt, Artificial Sequence
  Description of Artificial Sequence: Synthetic oligonucleotide
  Antisense strand to SEQ ID NO: 1921212
ucaaugaguaacgucugag

SEQ ID NO: 1921214 - RNA, 19 nt, Artificial Sequence
  Description of Artificial Sequence: Synthetic oligonucleotide
  Sense strand starting at position 2401 of SEQ ID NO: 1879632
cauugaguccagugaggau

SEQ ID NO: 1921215 - RNA, 19 nt, Artificial Sequence
  Description of Artificial Sequence: Synthetic oligonucleotide
  Antisense strand to SEQ ID NO: 1921214
auccucacuggacucaaug

SEQ ID NO: 1921216 - RNA, 19 nt, Artificial Sequence
  Description of Artificial Sequence: Synthetic oligonucleotide
  Sense strand starting at position 2469 of SEQ ID NO: 1879632
cugagugugccugaugaag

SEQ ID NO: 1921217 - RNA, 19 nt, Artificial Sequence
  Description of Artificial Sequence: Synthetic oligonucleotide
  Antisense strand to SEQ ID NO: 1921216
cuucaucaggcacacucag

SEQ ID NO: 1921218 - RNA, 19 nt, Artificial Sequence
  Description of Artificial Sequence: Synthetic oligonucleotide
  Sense strand starting at position 2525 of SEQ ID NO: 1879632
cacuuuggacgccaagaaa

SEQ ID NO: 1921219 - RNA, 19 nt, Artificial Sequence
  Description of Artificial Sequence: Synthetic oligonucleotide
  Antisense strand to SEQ ID NO: 1921218
uuucuuggcguccaaagug

SEQ ID NO: 1921220 - RNA, 19 nt, Artificial Sequence
  Description of Artificial Sequence: Synthetic oligonucleotide
  Sense strand starting at position 2536 of SEQ ID NO: 1879632
ccaagaaacgaguguguca

SEQ ID NO: 1921221 - RNA, 19 nt, Artificial Sequence
  Description of Artificial Sequence: Synthetic oligonucleotide
  Antisense strand to SEQ ID NO: 1921220
ugacacacucguuucuugg

SEQ ID NO: 1921222 - RNA, 19 nt, Artificial Sequence
  Description of Artificial Sequence: Synthetic oligonucleotide
  Sense strand starting at position 2611 of SEQ ID NO: 1879632
uuaggaucugacugaugca

SEQ ID NO: 1921223 - RNA, 19 nt, Artificial Sequence
  Description of Artificial Sequence: Synthetic oligonucleotide
  Antisense strand to SEQ ID NO: 1921222
ugcaucagucagauccuaa

SEQ ID NO: 1921224 - RNA, 19 nt, Artificial Sequence
  Description of Artificial Sequence: Synthetic oligonucleotide
  Sense strand starting at position 2766 of SEQ ID NO: 1879632
gggucagucuuaucccaga

SEQ ID NO: 1921225 - RNA, 19 nt, Artificial Sequence
  Description of Artificial Sequence: Synthetic oligonucleotide
  Antisense strand to SEQ ID NO: 1921224
ucugggauaagacugaccc

SEQ ID NO: 1921226 - RNA, 19 nt, Artificial Sequence
  Description of Artificial Sequence: Synthetic oligonucleotide
  Sense strand starting at position 2771 of SEQ ID NO: 1879632
agucuuaucccagaugguu

SEQ ID NO: 1921227 - RNA, 19 nt, Artificial Sequence
  Description of Artificial Sequence: Synthetic oligonucleotide
  Antisense strand to SEQ ID NO: 1921226
aaccaucugggauaagacu

SEQ ID NO: 1921228 - RNA, 19 nt, Artificial Sequence
  Description of Artificial Sequence: Synthetic oligonucleotide
  Sense strand starting at position 2823 of SEQ ID NO: 1879632
ugaggaagcccuggaagau

SEQ ID NO: 1921229 - RNA, 19 nt, Artificial Sequence
  Description of Artificial Sequence: Synthetic oligonucleotide
  Antisense strand to SEQ ID NO: 1921228
aucuuccagggcuuccuca

SEQ ID NO: 1921230 - RNA, 19 nt, Artificial Sequence
  Description of Artificial Sequence: Synthetic oligonucleotide
  Sense strand starting at position 2839 of SEQ ID NO: 1879632
gaugaagggcucuacaguu

SEQ ID NO: 1921231 - RNA, 19 nt, Artificial Sequence
  Description of Artificial Sequence: Synthetic oligonucleotide
  Antisense strand to SEQ ID NO: 1921230
aacuguagagcccuucauc

SEQ ID NO: 1921232 - RNA, 19 nt, Artificial Sequence
  Description of Artificial Sequence: Synthetic oligonucleotide
  Sense strand starting at position 3082 of SEQ ID NO: 1879632
accuuuaaagugcaugaga

SEQ ID NO: 1921233 - RNA, 19 nt, Artificial Sequence
  Description of Artificial Sequence: Synthetic oligonucleotide
  Antisense strand to SEQ ID NO: 1921232
ucucaugcacuuuaaaggu

SEQ ID NO: 1921234 - RNA, 19 nt, Artificial Sequence
  Description of Artificial Sequence: Synthetic oligonucleotide
  Sense strand starting at position 3084 of SEQ ID NO: 1879632
cuuuaaagugcaugagaac

SEQ ID NO: 1921235 - RNA, 19 nt, Artificial Sequence
  Description of Artificial Sequence: Synthetic oligonucleotide
  Antisense strand to SEQ ID NO: 1921234
guucucaugcacuuuaaag

SEQ ID NO: 1921236 - RNA, 19 nt, Artificial Sequence
  Description of Artificial Sequence: Synthetic oligonucleotide
  Sense strand starting at position 3187 of SEQ ID NO: 1879632
ggugauuccgugcuaugcu

SEQ ID NO: 1921237 - RNA, 19 nt, Artificial Sequence
  Description of Artificial Sequence: Synthetic oligonucleotide
  Antisense strand to SEQ ID NO: 1921236
agcauagcacggaaucacc

SEQ ID NO: 1921238 - RNA, 19 nt, Artificial Sequence
  Description of Artificial Sequence: Synthetic oligonucleotide
  Sense strand starting at position 3976 of SEQ ID NO: 1879632
augaguuguuguccaggga

SEQ ID NO: 1921239 - RNA, 19 nt, Artificial Sequence
  Description of Artificial Sequence: Synthetic oligonucleotide
  Antisense strand to SEQ ID NO: 1921238
ucccuggacaacaacucau

SEQ ID NO: 1921240 - RNA, 19 nt, Artificial Sequence
  Description of Artificial Sequence: Synthetic oligonucleotide
  Sense strand starting at position 3979 of SEQ ID NO: 1879632
aguuguuguccagggacag

SEQ ID NO: 1921241 - RNA, 19 nt, Artificial Sequence
  Description of Artificial Sequence: Synthetic oligonucleotide
  Antisense strand to SEQ ID NO: 1921240
cugucccuggacaacaacu

SEQ ID NO: 1921242 - RNA, 19 nt, Artificial Sequence
  Description of Artificial Sequence: Synthetic oligonucleotide
  Sense strand starting at position 3980 of SEQ ID NO: 1879632
guuguuguccagggacaga

SEQ ID NO: 1921243 - RNA, 19 nt, Artificial Sequence
  Description of Artificial Sequence: Synthetic oligonucleotide
  Antisense strand to SEQ ID NO: 1921242
ucugucccuggacaacaac

SEQ ID NO: 1921244 - RNA, 19 nt, Artificial Sequence
  Description of Artificial Sequence: Synthetic oligonucleotide
  Sense strand starting at position 102 of SEQ ID NO: 1879633
cccagaaagcaugaguauu

SEQ ID NO: 1921245 - RNA, 19 nt, Artificial Sequence
  Description of Artificial Sequence: Synthetic oligonucleotide
  Antisense strand to SEQ ID NO: 1921244
aauacucaugcuuucuggg

SEQ ID NO: 1921246 - RNA, 19 nt, Artificial Sequence
  Description of Artificial Sequence: Synthetic oligonucleotide
  Sense strand starting at position 104 of SEQ ID NO: 1879633
cagaaagcaugaguauuga

SEQ ID NO: 1921247 - RNA, 19 nt, Artificial Sequence
  Description of Artificial Sequence: Synthetic oligonucleotide
  Antisense strand to SEQ ID NO: 1921246
ucaauacucaugcuuucug

SEQ ID NO: 1921248 - RNA, 19 nt, Artificial Sequence
  Description of Artificial Sequence: Synthetic oligonucleotide
  Sense strand starting at position 114 of SEQ ID NO: 1879633
gaguauugaccagggucuu

SEQ ID NO: 1921249 - RNA, 19 nt, Artificial Sequence
  Description of Artificial Sequence: Synthetic oligonucleotide
  Antisense strand to SEQ ID NO: 1921248
aagacccuggucaauacuc

SEQ ID NO: 1921250 - RNA, 19 nt, Artificial Sequence
  Description of Artificial Sequence: Synthetic oligonucleotide
  Sense strand starting at position 340 of SEQ ID NO: 1879633
aaguuaggacugggucuua

SEQ ID NO: 1921251 - RNA, 19 nt, Artificial Sequence
  Description of Artificial Sequence: Synthetic oligonucleotide
  Antisense strand to SEQ ID NO: 1921250
uaagacccaguccuaacuu

SEQ ID NO: 1921252 - RNA, 19 nt, Artificial Sequence
  Description of Artificial Sequence: Synthetic oligonucleotide
  Sense strand starting at position 401 of SEQ ID NO: 1879633
auaccuucucagugaguuc

SEQ ID NO: 1921253 - RNA, 19 nt, Artificial Sequence
  Description of Artificial Sequence: Synthetic oligonucleotide
  Antisense strand to SEQ ID NO: 1921252
gaacucacugagaagguau

SEQ ID NO: 1921254 - RNA, 19 nt, Artificial Sequence
  Description of Artificial Sequence: Synthetic oligonucleotide
  Sense strand starting at position 408 of SEQ ID NO: 1879633
cucagugaguucuugguga

SEQ ID NO: 1921255 - RNA, 19 nt, Artificial Sequence
  Description of Artificial Sequence: Synthetic oligonucleotide
  Antisense strand to SEQ ID NO: 1921254
ucaccaagaacucacugag

SEQ ID NO: 1921256 - RNA, 19 nt, Artificial Sequence
  Description of Artificial Sequence: Synthetic oligonucleotide
  Sense strand starting at position 410 of SEQ ID NO: 1879633
cagugaguucuuggugaau

SEQ ID NO: 1921257 - RNA, 19 nt, Artificial Sequence
  Description of Artificial Sequence: Synthetic oligonucleotide
  Antisense strand to SEQ ID NO: 1921256
auucaccaagaacucacug

SEQ ID NO: 1921258 - RNA, 19 nt, Artificial Sequence
  Description of Artificial Sequence: Synthetic oligonucleotide
  Sense strand starting at position 437 of SEQ ID NO: 1879633
gauggauuauuugaugauc

SEQ ID NO: 1921259 - RNA, 19 nt, Artificial Sequence
  Description of Artificial Sequence: Synthetic oligonucleotide
  Antisense strand to SEQ ID NO: 1921258
gaucaucaaauaauccauc

SEQ ID NO: 1921260 - RNA, 19 nt, Artificial Sequence
  Description of Artificial Sequence: Synthetic oligonucleotide
  Sense strand starting at position 439 of SEQ ID NO: 1879633
uggauuauuugaugauccu

SEQ ID NO: 1921261 - RNA, 19 nt, Artificial Sequence
  Description of Artificial Sequence: Synthetic oligonucleotide
  Antisense strand to SEQ ID NO: 1921260
aggaucaucaaauaaucca

SEQ ID NO: 1921262 - RNA, 19 nt, Artificial Sequence
  Description of Artificial Sequence: Synthetic oligonucleotide
  Sense strand starting at position 762 of SEQ ID NO: 1879633
ggagaaagugcagagcaua

SEQ ID NO: 1921263 - RNA, 19 nt, Artificial Sequence
  Description of Artificial Sequence: Synthetic oligonucleotide
  Antisense strand to SEQ ID NO: 1921262
uaugcucugcacuuucucc

SEQ ID NO: 1921264 - RNA, 19 nt, Artificial Sequence
  Description of Artificial Sequence: Synthetic oligonucleotide
  Sense strand starting at position 803 of SEQ ID NO: 1879633
uccauaaagccucaaaggu

SEQ ID NO: 1921265 - RNA, 19 nt, Artificial Sequence
  Description of Artificial Sequence: Synthetic oligonucleotide
  Antisense strand to SEQ ID NO: 1921264
accuuugaggcuuuaugga

SEQ ID NO: 1921266 - RNA, 19 nt, Artificial Sequence
  Description of Artificial Sequence: Synthetic oligonucleotide
  Sense strand starting at position 843 of SEQ ID NO: 1879633
acgguuuaauauccuguga

SEQ ID NO: 1921267 - RNA, 19 nt, Artificial Sequence
  Description of Artificial Sequence: Synthetic oligonucleotide
  Antisense strand to SEQ ID NO: 1921266
ucacaggauauuaaaccgu

SEQ ID NO: 1921268 - RNA, 19 nt, Artificial Sequence
  Description of Artificial Sequence: Synthetic oligonucleotide
  Sense strand starting at position 847 of SEQ ID NO: 1879633
uuuaauauccugugagaag

SEQ ID NO: 1921269 - RNA, 19 nt, Artificial Sequence
  Description of Artificial Sequence: Synthetic oligonucleotide
  Antisense strand to SEQ ID NO: 1921268
cuucucacaggauauuaaa

SEQ ID NO: 1921270 - RNA, 19 nt, Artificial Sequence
  Description of Artificial Sequence: Synthetic oligonucleotide
  Sense strand starting at position 1232 of SEQ ID NO: 1879633
uccuaaaggccuuaggagu

SEQ ID NO: 1921271 - RNA, 19 nt, Artificial Sequence
  Description of Artificial Sequence: Synthetic oligonucleotide
  Antisense strand to SEQ ID NO: 1921270
acuccuaaggccuuuagga

SEQ ID NO: 1921272 - RNA, 19 nt, Artificial Sequence
  Description of Artificial Sequence: Synthetic oligonucleotide
  Sense strand starting at position 1534 of SEQ ID NO: 1879633
cucuguuugccacagagaa

SEQ ID NO: 1921273 - RNA, 19 nt, Artificial Sequence
  Description of Artificial Sequence: Synthetic oligonucleotide
  Antisense strand to SEQ ID NO: 1921272
uucucuguggcaaacagag

SEQ ID NO: 1921274 - RNA, 19 nt, Artificial Sequence
  Description of Artificial Sequence: Synthetic oligonucleotide
  Sense strand starting at position 1576 of SEQ ID NO: 1879633
aguaguuaagguugaagga

SEQ ID NO: 1921275 - RNA, 19 nt, Artificial Sequence
  Description of Artificial Sequence: Synthetic oligonucleotide
  Antisense strand to SEQ ID NO: 1921274
uccuucaaccuuaacuacu

SEQ ID NO: 1921276 - RNA, 19 nt, Artificial Sequence
  Description of Artificial Sequence: Synthetic oligonucleotide
  Sense strand starting at position 1597 of SEQ ID NO: 1879633
auuacaacucagugucuua

SEQ ID NO: 1921277 - RNA, 19 nt, Artificial Sequence
  Description of Artificial Sequence: Synthetic oligonucleotide
  Antisense strand to SEQ ID NO: 1921276
uaagacacugaguuguaau

SEQ ID NO: 1921278 - RNA, 19 nt, Artificial Sequence
  Description of Artificial Sequence: Synthetic oligonucleotide
  Sense strand starting at position 1667 of SEQ ID NO: 1879633
aguggaaugguguaacagu

SEQ ID NO: 1921279 - RNA, 19 nt, Artificial Sequence
  Description of Artificial Sequence: Synthetic oligonucleotide
  Antisense strand to SEQ ID NO: 1921278
acuguuacaccauuccacu

SEQ ID NO: 1921280 - RNA, 19 nt, Artificial Sequence
  Description of Artificial Sequence: Synthetic oligonucleotide
  Sense strand starting at position 2234 of SEQ ID NO: 1879633
gcacuagaguuacuagaga

SEQ ID NO: 1921281 - RNA, 19 nt, Artificial Sequence
  Description of Artificial Sequence: Synthetic oligonucleotide
  Antisense strand to SEQ ID NO: 1921280
ucucuaguaacucuagugc

SEQ ID NO: 1921282 - RNA, 19 nt, Artificial Sequence
  Description of Artificial Sequence: Synthetic oligonucleotide
  Sense strand starting at position 2453 of SEQ ID NO: 1879633
gagcacuuacucggugaca

SEQ ID NO: 1921283 - RNA, 19 nt, Artificial Sequence
  Description of Artificial Sequence: Synthetic oligonucleotide
  Antisense strand to SEQ ID NO: 1921282
ugucaccgaguaagugcuc

SEQ ID NO: 1921284 - RNA, 19 nt, Artificial Sequence
  Description of Artificial Sequence: Synthetic oligonucleotide
  Sense strand starting at position 2456 of SEQ ID NO: 1879633
cacuuacucggugacauca

SEQ ID NO: 1921285 - RNA, 19 nt, Artificial Sequence
  Description of Artificial Sequence: Synthetic oligonucleotide
  Antisense strand to SEQ ID NO: 1921284
ugaugucaccgaguaagug

SEQ ID NO: 1921286 - RNA, 19 nt, Artificial Sequence
  Description of Artificial Sequence: Synthetic oligonucleotide
  Sense strand starting at position 2818 of SEQ ID NO: 1879633
acagaagaguugccuagaa

SEQ ID NO: 1921287 - RNA, 19 nt, Artificial Sequence
  Description of Artificial Sequence: Synthetic oligonucleotide
  Antisense strand to SEQ ID NO: 1921286
uucuaggcaacucuucugu

SEQ ID NO: 1921288 - RNA, 19 nt, Artificial Sequence
  Description of Artificial Sequence: Synthetic oligonucleotide
  Sense strand starting at position 3079 of SEQ ID NO: 1879633
ugguauacagcucagugau

SEQ ID NO: 1921289 - RNA, 19 nt, Artificial Sequence
  Description of Artificial Sequence: Synthetic oligonucleotide
  Antisense strand to SEQ ID NO: 1921288
aucacugagcuguauacca

SEQ ID NO: 1921290 - RNA, 19 nt, Artificial Sequence
  Description of Artificial Sequence: Synthetic oligonucleotide
  Sense strand starting at position 3121 of SEQ ID NO: 1879633
acaauaaccgcucagucua

SEQ ID NO: 1921291 - RNA, 19 nt, Artificial Sequence
  Description of Artificial Sequence: Synthetic oligonucleotide
  Antisense strand to SEQ ID NO: 1921290
uagacugagcgguuauugu

SEQ ID NO: 1921292 - RNA, 19 nt, Artificial Sequence
  Description of Artificial Sequence: Synthetic oligonucleotide
  Sense strand starting at position 3173 of SEQ ID NO: 1879633
ucaugaugccucugacuag

SEQ ID NO: 1921293 - RNA, 19 nt, Artificial Sequence
  Description of Artificial Sequence: Synthetic oligonucleotide
  Antisense strand to SEQ ID NO: 1921292
cuagucagaggcaucauga

SEQ ID NO: 1921294 - RNA, 19 nt, Artificial Sequence
  Description of Artificial Sequence: Synthetic oligonucleotide
  Sense strand starting at position 3244 of SEQ ID NO: 1879633
caauaugauucuguggaga

SEQ ID NO: 1921295 - RNA, 19 nt, Artificial Sequence
  Description of Artificial Sequence: Synthetic oligonucleotide
  Antisense strand to SEQ ID NO: 1921294
ucuccacagaaucauauug

SEQ ID NO: 1921296 - RNA, 19 nt, Artificial Sequence
  Description of Artificial Sequence: Synthetic oligonucleotide
  Sense strand starting at position 3386 of SEQ ID NO: 1879633
cccagcauuucuuuagagu

SEQ ID NO: 1921297 - RNA, 19 nt, Artificial Sequence
  Description of Artificial Sequence: Synthetic oligonucleotide
  Antisense strand to SEQ ID NO: 1921296
acucuaaagaaaugcuggg

SEQ ID NO: 1921298 - RNA, 19 nt, Artificial Sequence
  Description of Artificial Sequence: Synthetic oligonucleotide
  Sense strand starting at position 3424 of SEQ ID NO: 1879633
gaccauagcuuguuugauc

SEQ ID NO: 1921299 - RNA, 19 nt, Artificial Sequence
  Description of Artificial Sequence: Synthetic oligonucleotide
  Antisense strand to SEQ ID NO: 1921298
gaucaaacaagcuaugguc

SEQ ID NO: 1921300 - RNA, 19 nt, Artificial Sequence
  Description of Artificial Sequence: Synthetic oligonucleotide
  Sense strand starting at position 3458 of SEQ ID NO: 1879633
uuggguguuagggauguga

SEQ ID NO: 1921301 - RNA, 19 nt, Artificial Sequence
  Description of Artificial Sequence: Synthetic oligonucleotide
  Antisense strand to SEQ ID NO: 1921300
ucacaucccuaacacccaa

SEQ ID NO: 1921302 - RNA, 19 nt, Artificial Sequence
  Description of Artificial Sequence: Synthetic oligonucleotide
  Sense strand starting at position 3471 of SEQ ID NO: 1879633
augugagcuagagaugcaa

SEQ ID NO: 1921303 - RNA, 19 nt, Artificial Sequence
  Description of Artificial Sequence: Synthetic oligonucleotide
  Antisense strand to SEQ ID NO: 1921302
uugcaucucuagcucacau

SEQ ID NO: 1921304 - RNA, 19 nt, Artificial Sequence
  Description of Artificial Sequence: Synthetic oligonucleotide
  Sense strand starting at position 3656 of SEQ ID NO: 1879633
gaucuuugggacggugaga

SEQ ID NO: 1921305 - RNA, 19 nt, Artificial Sequence
  Description of Artificial Sequence: Synthetic oligonucleotide
  Antisense strand to SEQ ID NO: 1921304
ucucaccgucccaaagauc

SEQ ID NO: 1921306 - RNA, 19 nt, Artificial Sequence
  Description of Artificial Sequence: Synthetic oligonucleotide
  Sense strand starting at position 3710 of SEQ ID NO: 1879633
gcgucucuccuggaacaua

SEQ ID NO: 1921307 - RNA, 19 nt, Artificial Sequence
  Description of Artificial Sequence: Synthetic oligonucleotide
  Antisense strand to SEQ ID NO: 1921306
uauguuccaggagagacgc

SEQ ID NO: 1921308 - RNA, 19 nt, Artificial Sequence
  Description of Artificial Sequence: Synthetic oligonucleotide
  Sense strand starting at position 3775 of SEQ ID NO: 1879633
ggguuuccaccaggcaaga

SEQ ID NO: 1921309 - RNA, 19 nt, Artificial Sequence
  Description of Artificial Sequence: Synthetic oligonucleotide
  Antisense strand to SEQ ID NO: 1921308
ucuugccugguggaaaccc

SEQ ID NO: 1921310 - RNA, 19 nt, Artificial Sequence
  Description of Artificial Sequence: Synthetic oligonucleotide
  Sense strand starting at position 3858 of SEQ ID NO: 1879633
ggcuccaggugacuucuua

SEQ ID NO: 1921311 - RNA, 19 nt, Artificial Sequence
  Description of Artificial Sequence: Synthetic oligonucleotide
  Antisense strand to SEQ ID NO: 1921310
uaagaagucaccuggagcc

SEQ ID NO: 1921312 - RNA, 19 nt, Artificial Sequence
  Description of Artificial Sequence: Synthetic oligonucleotide
  Sense strand starting at position 3862 of SEQ ID NO: 1879633
ccaggugacuucuuaucac

SEQ ID NO: 1921313 - RNA, 19 nt, Artificial Sequence
  Description of Artificial Sequence: Synthetic oligonucleotide
  Antisense strand to SEQ ID NO: 1921312
gugauaagaagucaccugg

SEQ ID NO: 1921314 - RNA, 19 nt, Artificial Sequence
  Description of Artificial Sequence: Synthetic oligonucleotide
  Sense strand starting at position 3865 of SEQ ID NO: 1879633
ggugacuucuuaucacuga

SEQ ID NO: 1921315 - RNA, 19 nt, Artificial Sequence
  Description of Artificial Sequence: Synthetic oligonucleotide
  Antisense strand to SEQ ID NO: 1921314
ucagugauaagaagucacc

SEQ ID NO: 1921316 - RNA, 19 nt, Artificial Sequence
  Description of Artificial Sequence: Synthetic oligonucleotide
  Sense strand starting at position 3956 of SEQ ID NO: 1879633
agaguugacuugcuugaaa

SEQ ID NO: 1921317 - RNA, 19 nt, Artificial Sequence
  Description of Artificial Sequence: Synthetic oligonucleotide
  Antisense strand to SEQ ID NO: 1921316
uuucaagcaagucaacucu

SEQ ID NO: 1921318 - RNA, 19 nt, Artificial Sequence
  Description of Artificial Sequence: Synthetic oligonucleotide
  Sense strand starting at position 3958 of SEQ ID NO: 1879633
aguugacuugcuugaaauu

SEQ ID NO: 1921319 - RNA, 19 nt, Artificial Sequence
  Description of Artificial Sequence: Synthetic oligonucleotide
  Antisense strand to SEQ ID NO: 1921318
aauuucaagcaagucaacu

SEQ ID NO: 1921320 - RNA, 19 nt, Artificial Sequence
  Description of Artificial Sequence: Synthetic oligonucleotide
  Sense strand starting at position 3959 of SEQ ID NO: 1879633
guugacuugcuugaaauug

SEQ ID NO: 1921321 - RNA, 19 nt, Artificial Sequence
  Description of Artificial Sequence: Synthetic oligonucleotide
  Antisense strand to SEQ ID NO: 1921320
caauuucaagcaagucaac

SEQ ID NO: 1921322 - RNA, 19 nt, Artificial Sequence
  Description of Artificial Sequence: Synthetic oligonucleotide
  Sense strand starting at position 3977 of SEQ ID NO: 1879633
gcauaauugacguaagacu

SEQ ID NO: 1921323 - RNA, 19 nt, Artificial Sequence
  Description of Artificial Sequence: Synthetic oligonucleotide
  Antisense strand to SEQ ID NO: 1921322
agucuuacgucaauuaugc

SEQ ID NO: 1921324 - RNA, 19 nt, Artificial Sequence
  Description of Artificial Sequence: Synthetic oligonucleotide
  Sense strand starting at position 108 of SEQ ID NO: 1879634
guacaaguuucuguaggaa

SEQ ID NO: 1921325 - RNA, 19 nt, Artificial Sequence
  Description of Artificial Sequence: Synthetic oligonucleotide
  Antisense strand to SEQ ID NO: 1921324
uuccuacagaaacuuguac

SEQ ID NO: 1921326 - RNA, 19 nt, Artificial Sequence
  Description of Artificial Sequence: Synthetic oligonucleotide
  Sense strand starting at position 111 of SEQ ID NO: 1879634
caaguuucuguaggaacau

SEQ ID NO: 1921327 - RNA, 19 nt, Artificial Sequence
  Description of Artificial Sequence: Synthetic oligonucleotide
  Antisense strand to SEQ ID NO: 1921326
auguuccuacagaaacuug

SEQ ID NO: 1921328 - RNA, 19 nt, Artificial Sequence
  Description of Artificial Sequence: Synthetic oligonucleotide
  Sense strand starting at position 254 of SEQ ID NO: 1879634
cccugcauugaauaagacu

SEQ ID NO: 1921329 - RNA, 19 nt, Artificial Sequence
  Description of Artificial Sequence: Synthetic oligonucleotide
  Antisense strand to SEQ ID NO: 1921328
agucuuauucaaugcaggg

SEQ ID NO: 1921330 - RNA, 19 nt, Artificial Sequence
  Description of Artificial Sequence: Synthetic oligonucleotide
  Sense strand starting at position 265 of SEQ ID NO: 1879634
auaagacuauuggugcuau

SEQ ID NO: 1921331 - RNA, 19 nt, Artificial Sequence
  Description of Artificial Sequence: Synthetic oligonucleotide
  Antisense strand to SEQ ID NO: 1921330
auagcaccaauagucuuau

SEQ ID NO: 1921332 - RNA, 19 nt, Artificial Sequence
  Description of Artificial Sequence: Synthetic oligonucleotide
  Sense strand starting at position 386 of SEQ ID NO: 1879634
aucagagaccuuugaucuu

SEQ ID NO: 1921333 - RNA, 19 nt, Artificial Sequence
  Description of Artificial Sequence: Synthetic oligonucleotide
  Antisense strand to SEQ ID NO: 1921332
aagaucaaaggucucugau

SEQ ID NO: 1921334 - RNA, 19 nt, Artificial Sequence
  Description of Artificial Sequence: Synthetic oligonucleotide
  Sense strand starting at position 389 of SEQ ID NO: 1879634
agagaccuuugaucuuacu

SEQ ID NO: 1921335 - RNA, 19 nt, Artificial Sequence
  Description of Artificial Sequence: Synthetic oligonucleotide
  Antisense strand to SEQ ID NO: 1921334
aguaagaucaaaggucucu

SEQ ID NO: 1921336 - RNA, 19 nt, Artificial Sequence
  Description of Artificial Sequence: Synthetic oligonucleotide
  Sense strand starting at position 651 of SEQ ID NO: 1879634
gcuagaaacgauuaagcua

SEQ ID NO: 1921337 - RNA, 19 nt, Artificial Sequence
  Description of Artificial Sequence: Synthetic oligonucleotide
  Antisense strand to SEQ ID NO: 1921336
uagcuuaaucguuucuagc

SEQ ID NO: 1921338 - RNA, 19 nt, Artificial Sequence
  Description of Artificial Sequence: Synthetic oligonucleotide
  Sense strand starting at position 659 of SEQ ID NO: 1879634
cgauuaagcuaagugagga

SEQ ID NO: 1921339 - RNA, 19 nt, Artificial Sequence
  Description of Artificial Sequence: Synthetic oligonucleotide
  Antisense strand to SEQ ID NO: 1921338
uccucacuuagcuuaaucg

SEQ ID NO: 1921340 - RNA, 19 nt, Artificial Sequence
  Description of Artificial Sequence: Synthetic oligonucleotide
  Sense strand starting at position 817 of SEQ ID NO: 1879634
acgaaacagccuuauuacu

SEQ ID NO: 1921341 - RNA, 19 nt, Artificial Sequence
  Description of Artificial Sequence: Synthetic oligonucleotide
  Antisense strand to SEQ ID NO: 1921340
aguaauaaggcuguuucgu

SEQ ID NO: 1921342 - RNA, 19 nt, Artificial Sequence
  Description of Artificial Sequence: Synthetic oligonucleotide
  Sense strand starting at position 848 of SEQ ID NO: 1879634
gucugaguggucuagaagg

SEQ ID NO: 1921343 - RNA, 19 nt, Artificial Sequence
  Description of Artificial Sequence: Synthetic oligonucleotide
  Antisense strand to SEQ ID NO: 1921342
ccuucuagaccacucagac

SEQ ID NO: 1921344 - RNA, 19 nt, Artificial Sequence
  Description of Artificial Sequence: Synthetic oligonucleotide
  Sense strand starting at position 853 of SEQ ID NO: 1879634
aguggucuagaaggaagau

SEQ ID NO: 1921345 - RNA, 19 nt, Artificial Sequence
  Description of Artificial Sequence: Synthetic oligonucleotide
  Antisense strand to SEQ ID NO: 1921344
aucuuccuucuagaccacu

SEQ ID NO: 1921346 - RNA, 19 nt, Artificial Sequence
  Description of Artificial Sequence: Synthetic oligonucleotide
  Sense strand starting at position 955 of SEQ ID NO: 1879634
agguaagggagcuguagaa

SEQ ID NO: 1921347 - RNA, 19 nt, Artificial Sequence
  Description of Artificial Sequence: Synthetic oligonucleotide
  Antisense strand to SEQ ID NO: 1921346
uucuacagcucccuuaccu

SEQ ID NO: 1921348 - RNA, 19 nt, Artificial Sequence
  Description of Artificial Sequence: Synthetic oligonucleotide
  Sense strand starting at position 1016 of SEQ ID NO: 1879634
gaaagaagcugucuuucug

SEQ ID NO: 1921349 - RNA, 19 nt, Artificial Sequence
  Description of Artificial Sequence: Synthetic oligonucleotide
  Antisense strand to SEQ ID NO: 1921348
cagaaagacagcuucuuuc

SEQ ID NO: 1921350 - RNA, 19 nt, Artificial Sequence
  Description of Artificial Sequence: Synthetic oligonucleotide
  Sense strand starting at position 1272 of SEQ ID NO: 1879634
uuaugcaguggugacauua

SEQ ID NO: 1921351 - RNA, 19 nt, Artificial Sequence
  Description of Artificial Sequence: Synthetic oligonucleotide
  Antisense strand to SEQ ID NO: 1921350
uaaugucaccacugcauaa

SEQ ID NO: 1921352 - RNA, 19 nt, Artificial Sequence
  Description of Artificial Sequence: Synthetic oligonucleotide
  Sense strand starting at position 1391 of SEQ ID NO: 1879634
gagggcacaucucuuuaca

SEQ ID NO: 1921353 - RNA, 19 nt, Artificial Sequence
  Description of Artificial Sequence: Synthetic oligonucleotide
  Antisense strand to SEQ ID NO: 1921352
uguaaagagaugugcccuc

SEQ ID NO: 1921354 - RNA, 19 nt, Artificial Sequence
  Description of Artificial Sequence: Synthetic oligonucleotide
  Sense strand starting at position 1394 of SEQ ID NO: 1879634
ggcacaucucuuuacagca

SEQ ID NO: 1921355 - RNA, 19 nt, Artificial Sequence
  Description of Artificial Sequence: Synthetic oligonucleotide
  Antisense strand to SEQ ID NO: 1921354
ugcuguaaagagaugugcc

SEQ ID NO: 1921356 - RNA, 19 nt, Artificial Sequence
  Description of Artificial Sequence: Synthetic oligonucleotide
  Sense strand starting at position 1481 of SEQ ID NO: 1879634
acuacugggcauugacaau

SEQ ID NO: 1921357 - RNA, 19 nt, Artificial Sequence
  Description of Artificial Sequence: Synthetic oligonucleotide
  Antisense strand to SEQ ID NO: 1921356
auugucaaugcccaguagu

SEQ ID NO: 1921358 - RNA, 19 nt, Artificial Sequence
  Description of Artificial Sequence: Synthetic oligonucleotide
  Sense strand starting at position 1592 of SEQ ID NO: 1879634
ggucuuauuuaagaaacac

SEQ ID NO: 1921359 - RNA, 19 nt, Artificial Sequence
  Description of Artificial Sequence: Synthetic oligonucleotide
  Antisense strand to SEQ ID NO: 1921358
guguuucuuaaauaagacc

SEQ ID NO: 1921360 - RNA, 19 nt, Artificial Sequence
  Description of Artificial Sequence: Synthetic oligonucleotide
  Sense strand starting at position 1699 of SEQ ID NO: 1879634
cuagaugccuuauuaagaa

SEQ ID NO: 1921361 - RNA, 19 nt, Artificial Sequence
  Description of Artificial Sequence: Synthetic oligonucleotide
  Antisense strand to SEQ ID NO: 1921360
uucuuaauaaggcaucuag

SEQ ID NO: 1921362 - RNA, 19 nt, Artificial Sequence
  Description of Artificial Sequence: Synthetic oligonucleotide
  Sense strand starting at position 2113 of SEQ ID NO: 1879634
ugacuccaauuuggagaaa

SEQ ID NO: 1921363 - RNA, 19 nt, Artificial Sequence
  Description of Artificial Sequence: Synthetic oligonucleotide
  Antisense strand to SEQ ID NO: 1921362
uuucuccaaauuggaguca

SEQ ID NO: 1921364 - RNA, 19 nt, Artificial Sequence
  Description of Artificial Sequence: Synthetic oligonucleotide
  Sense strand starting at position 2134 of SEQ ID NO: 1879634
uucuauuguguguaagaag

SEQ ID NO: 1921365 - RNA, 19 nt, Artificial Sequence
  Description of Artificial Sequence: Synthetic oligonucleotide
  Antisense strand to SEQ ID NO: 1921364
cuucuuacacacaauagaa

SEQ ID NO: 1921366 - RNA, 19 nt, Artificial Sequence
  Description of Artificial Sequence: Synthetic oligonucleotide
  Sense strand starting at position 2199 of SEQ ID NO: 1879634
agagucuaucgaugcagaa

SEQ ID NO: 1921367 - RNA, 19 nt, Artificial Sequence
  Description of Artificial Sequence: Synthetic oligonucleotide
  Antisense strand to SEQ ID NO: 1921366
uucugcaucgauagacucu

SEQ ID NO: 1921368 - RNA, 19 nt, Artificial Sequence
  Description of Artificial Sequence: Synthetic oligonucleotide
  Sense strand starting at position 2201 of SEQ ID NO: 1879634
agucuaucgaugcagaaac

SEQ ID NO: 1921369 - RNA, 19 nt, Artificial Sequence
  Description of Artificial Sequence: Synthetic oligonucleotide
  Antisense strand to SEQ ID NO: 1921368
guuucugcaucgauagacu

SEQ ID NO: 1921370 - RNA, 19 nt, Artificial Sequence
  Description of Artificial Sequence: Synthetic oligonucleotide
  Sense strand starting at position 2285 of SEQ ID NO: 1879634
gucagcagugaucaacauu

SEQ ID NO: 1921371 - RNA, 19 nt, Artificial Sequence
  Description of Artificial Sequence: Synthetic oligonucleotide
  Antisense strand to SEQ ID NO: 1921370
aauguugaucacugcugac

SEQ ID NO: 1921372 - RNA, 19 nt, Artificial Sequence
  Description of Artificial Sequence: Synthetic oligonucleotide
  Sense strand starting at position 2343 of SEQ ID NO: 1879634
ugagguucagaugauuguu

SEQ ID NO: 1921373 - RNA, 19 nt, Artificial Sequence
  Description of Artificial Sequence: Synthetic oligonucleotide
  Antisense strand to SEQ ID NO: 1921372
aacaaucaucugaaccuca

SEQ ID NO: 1921374 - RNA, 19 nt, Artificial Sequence
  Description of Artificial Sequence: Synthetic oligonucleotide
  Sense strand starting at position 2531 of SEQ ID NO: 1879634
ugcaauggucuagaaccaa

SEQ ID NO: 1921375 - RNA, 19 nt, Artificial Sequence
  Description of Artificial Sequence: Synthetic oligonucleotide
  Antisense strand to SEQ ID NO: 1921374
uugguucuagaccauugca

SEQ ID NO: 1921376 - RNA, 19 nt, Artificial Sequence
  Description of Artificial Sequence: Synthetic oligonucleotide
  Sense strand starting at position 2563 of SEQ ID NO: 1879634
ccaagagaagccuguauau

SEQ ID NO: 1921377 - RNA, 19 nt, Artificial Sequence
  Description of Artificial Sequence: Synthetic oligonucleotide
  Antisense strand to SEQ ID NO: 1921376
auauacaggcuucucuugg

SEQ ID NO: 1921378 - RNA, 19 nt, Artificial Sequence
  Description of Artificial Sequence: Synthetic oligonucleotide
  Sense strand starting at position 2565 of SEQ ID NO: 1879634
aagagaagccuguauaucu

SEQ ID NO: 1921379 - RNA, 19 nt, Artificial Sequence
  Description of Artificial Sequence: Synthetic oligonucleotide
  Antisense strand to SEQ ID NO: 1921378
agauauacaggcuucucuu

SEQ ID NO: 1921380 - RNA, 19 nt, Artificial Sequence
  Description of Artificial Sequence: Synthetic oligonucleotide
  Sense strand starting at position 2573 of SEQ ID NO: 1879634
ccuguauaucugggaggag

SEQ ID NO: 1921381 - RNA, 19 nt, Artificial Sequence
  Description of Artificial Sequence: Synthetic oligonucleotide
  Antisense strand to SEQ ID NO: 1921380
cuccucccagauauacagg

SEQ ID NO: 1921382 - RNA, 19 nt, Artificial Sequence
  Description of Artificial Sequence: Synthetic oligonucleotide
  Sense strand starting at position 2588 of SEQ ID NO: 1879634
ggagaaguauggcucauau

SEQ ID NO: 1921383 - RNA, 19 nt, Artificial Sequence
  Description of Artificial Sequence: Synthetic oligonucleotide
  Antisense strand to SEQ ID NO: 1921382
auaugagccauacuucucc

SEQ ID NO: 1921384 - RNA, 19 nt, Artificial Sequence
  Description of Artificial Sequence: Synthetic oligonucleotide
  Sense strand starting at position 2744 of SEQ ID NO: 1879634
gacuaauaacguugaguau

SEQ ID NO: 1921385 - RNA, 19 nt, Artificial Sequence
  Description of Artificial Sequence: Synthetic oligonucleotide
  Antisense strand to SEQ ID NO: 1921384
auacucaacguuauuaguc

SEQ ID NO: 1921386 - RNA, 19 nt, Artificial Sequence
  Description of Artificial Sequence: Synthetic oligonucleotide
  Sense strand starting at position 2756 of SEQ ID NO: 1879634
ugaguaucuccuuauguac

SEQ ID NO: 1921387 - RNA, 19 nt, Artificial Sequence
  Description of Artificial Sequence: Synthetic oligonucleotide
  Antisense strand to SEQ ID NO: 1921386
guacauaaggagauacuca

SEQ ID NO: 1921388 - RNA, 19 nt, Artificial Sequence
  Description of Artificial Sequence: Synthetic oligonucleotide
  Sense strand starting at position 2882 of SEQ ID NO: 1879634
guaaguguuccuuauacau

SEQ ID NO: 1921389 - RNA, 19 nt, Artificial Sequence
  Description of Artificial Sequence: Synthetic oligonucleotide
  Antisense strand to SEQ ID NO: 1921388
auguauaaggaacacuuac

SEQ ID NO: 1921390 - RNA, 19 nt, Artificial Sequence
  Description of Artificial Sequence: Synthetic oligonucleotide
  Sense strand starting at position 3166 of SEQ ID NO: 1879634
ccauauuauguguaaguau

SEQ ID NO: 1921391 - RNA, 19 nt, Artificial Sequence
  Description of Artificial Sequence: Synthetic oligonucleotide
  Antisense strand to SEQ ID NO: 1921390
auacuuacacauaauaugg

SEQ ID NO: 1921392 - RNA, 19 nt, Artificial Sequence
  Description of Artificial Sequence: Synthetic oligonucleotide
  Sense strand starting at position 3229 of SEQ ID NO: 1879634
aagugugugacagggaaua

SEQ ID NO: 1921393 - RNA, 19 nt, Artificial Sequence
  Description of Artificial Sequence: Synthetic oligonucleotide
  Antisense strand to SEQ ID NO: 1921392
uauucccugucacacacuu

SEQ ID NO: 1921394 - RNA, 19 nt, Artificial Sequence
  Description of Artificial Sequence: Synthetic oligonucleotide
  Sense strand starting at position 3478 of SEQ ID NO: 1879634
ugacuuucugaguauguga

SEQ ID NO: 1921395 - RNA, 19 nt, Artificial Sequence
  Description of Artificial Sequence: Synthetic oligonucleotide
  Antisense strand to SEQ ID NO: 1921394
ucacauacucagaaaguca

SEQ ID NO: 1921396 - RNA, 19 nt, Artificial Sequence
  Description of Artificial Sequence: Synthetic oligonucleotide
  Sense strand starting at position 3481 of SEQ ID NO: 1879634
cuuucugaguaugugaaau

SEQ ID NO: 1921397 - RNA, 19 nt, Artificial Sequence
  Description of Artificial Sequence: Synthetic oligonucleotide
  Antisense strand to SEQ ID NO: 1921396
auuucacauacucagaaag

SEQ ID NO: 1921398 - RNA, 19 nt, Artificial Sequence
  Description of Artificial Sequence: Synthetic oligonucleotide
  Sense strand starting at position 3731 of SEQ ID NO: 1879634
uagguaguaucaguuaaag

SEQ ID NO: 1921399 - RNA, 19 nt, Artificial Sequence
  Description of Artificial Sequence: Synthetic oligonucleotide
  Antisense strand to SEQ ID NO: 1921398
cuuuaacugauacuaccua

SEQ ID NO: 1921400 - RNA, 19 nt, Artificial Sequence
  Description of Artificial Sequence: Synthetic oligonucleotide
  Sense strand starting at position 3920 of SEQ ID NO: 1879634
aguagaugugguuagagca

SEQ ID NO: 1921401 - RNA, 19 nt, Artificial Sequence
  Description of Artificial Sequence: Synthetic oligonucleotide
  Antisense strand to SEQ ID NO: 1921400
ugcucuaaccacaucuacu

SEQ ID NO: 1921402 - RNA, 19 nt, Artificial Sequence
  Description of Artificial Sequence: Synthetic oligonucleotide
  Sense strand starting at position 3927 of SEQ ID NO: 1879634
gugguuagagcacaguaaa

SEQ ID NO: 1921403 - RNA, 19 nt, Artificial Sequence
  Description of Artificial Sequence: Synthetic oligonucleotide
  Antisense strand to SEQ ID NO: 1921402
uuuacugugcucuaaccac

SEQ ID NO: 1921404 - RNA, 19 nt, Artificial Sequence
  Description of Artificial Sequence: Synthetic oligonucleotide
  Sense strand starting at position 10 of SEQ ID NO: 1879635
uguaguuuguaacuaugaa

SEQ ID NO: 1921405 - RNA, 19 nt, Artificial Sequence
  Description of Artificial Sequence: Synthetic oligonucleotide
  Antisense strand to SEQ ID NO: 1921404
uucauaguuacaaacuaca

SEQ ID NO: 1921406 - RNA, 19 nt, Artificial Sequence
  Description of Artificial Sequence: Synthetic oligonucleotide
  Sense strand starting at position 60 of SEQ ID NO: 1879635
gauuguaccgacugcauga

SEQ ID NO: 1921407 - RNA, 19 nt, Artificial Sequence
  Description of Artificial Sequence: Synthetic oligonucleotide
  Antisense strand to SEQ ID NO: 1921406
ucaugcagucgguacaauc

SEQ ID NO: 1921408 - RNA, 19 nt, Artificial Sequence
  Description of Artificial Sequence: Synthetic oligonucleotide
  Sense strand starting at position 70 of SEQ ID NO: 1879635
acugcaugacagugucaaa

SEQ ID NO: 1921409 - RNA, 19 nt, Artificial Sequence
  Description of Artificial Sequence: Synthetic oligonucleotide
  Antisense strand to SEQ ID NO: 1921408
uuugacacugucaugcagu

SEQ ID NO: 1921410 - RNA, 19 nt, Artificial Sequence
  Description of Artificial Sequence: Synthetic oligonucleotide
  Sense strand starting at position 746 of SEQ ID NO: 1879635
cgugcuggcaauuaugaaa

SEQ ID NO: 1921411 - RNA, 19 nt, Artificial Sequence
  Description of Artificial Sequence: Synthetic oligonucleotide
  Antisense strand to SEQ ID NO: 1921410
uuucauaauugccagcacg

SEQ ID NO: 1921412 - RNA, 19 nt, Artificial Sequence
  Description of Artificial Sequence: Synthetic oligonucleotide
  Sense strand starting at position 774 of SEQ ID NO: 1879635
ucaugacuuugcucaguaa

SEQ ID NO: 1921413 - RNA, 19 nt, Artificial Sequence
  Description of Artificial Sequence: Synthetic oligonucleotide
  Antisense strand to SEQ ID NO: 1921412
uuacugagcaaagucauga

SEQ ID NO: 1921414 - RNA, 19 nt, Artificial Sequence
  Description of Artificial Sequence: Synthetic oligonucleotide
  Sense strand starting at position 955 of SEQ ID NO: 1879635
ugcuuuauugugcauuaua

SEQ ID NO: 1921415 - RNA, 19 nt, Artificial Sequence
  Description of Artificial Sequence: Synthetic oligonucleotide
  Antisense strand to SEQ ID NO: 1921414
uauaaugcacaauaaagca

SEQ ID NO: 1921416 - RNA, 19 nt, Artificial Sequence
  Description of Artificial Sequence: Synthetic oligonucleotide
  Sense strand starting at position 1002 of SEQ ID NO: 1879635
uugugaaauccuuguguug

SEQ ID NO: 1921417 - RNA, 19 nt, Artificial Sequence
  Description of Artificial Sequence: Synthetic oligonucleotide
  Antisense strand to SEQ ID NO: 1921416
caacacaaggauuucacaa

SEQ ID NO: 1921418 - RNA, 19 nt, Artificial Sequence
  Description of Artificial Sequence: Synthetic oligonucleotide
  Sense strand starting at position 1005 of SEQ ID NO: 1879635
ugaaauccuuguguugaga

SEQ ID NO: 1921419 - RNA, 19 nt, Artificial Sequence
  Description of Artificial Sequence: Synthetic oligonucleotide
  Antisense strand to SEQ ID NO: 1921418
ucucaacacaaggauuuca

SEQ ID NO: 1921420 - RNA, 19 nt, Artificial Sequence
  Description of Artificial Sequence: Synthetic oligonucleotide
  Sense strand starting at position 1059 of SEQ ID NO: 1879635
ucauuucguguuugucaca

SEQ ID NO: 1921421 - RNA, 19 nt, Artificial Sequence
  Description of Artificial Sequence: Synthetic oligonucleotide
  Antisense strand to SEQ ID NO: 1921420
ugugacaaacacgaaauga

SEQ ID NO: 1921422 - RNA, 19 nt, Artificial Sequence
  Description of Artificial Sequence: Synthetic oligonucleotide
  Sense strand starting at position 1060 of SEQ ID NO: 1879635
cauuucguguuugucacau

SEQ ID NO: 1921423 - RNA, 19 nt, Artificial Sequence
  Description of Artificial Sequence: Synthetic oligonucleotide
  Antisense strand to SEQ ID NO: 1921422
augugacaaacacgaaaug

SEQ ID NO: 1921424 - RNA, 19 nt, Artificial Sequence
  Description of Artificial Sequence: Synthetic oligonucleotide
  Sense strand starting at position 1131 of SEQ ID NO: 1879635
ggugaugugugaucacuga

SEQ ID NO: 1921425 - RNA, 19 nt, Artificial Sequence
  Description of Artificial Sequence: Synthetic oligonucleotide
  Antisense strand to SEQ ID NO: 1921424
ucagugaucacacaucacc

SEQ ID NO: 1921426 - RNA, 19 nt, Artificial Sequence
  Description of Artificial Sequence: Synthetic oligonucleotide
  Sense strand starting at position 1135 of SEQ ID NO: 1879635
augugugaucacugaccuu

SEQ ID NO: 1921427 - RNA, 19 nt, Artificial Sequence
  Description of Artificial Sequence: Synthetic oligonucleotide
  Antisense strand to SEQ ID NO: 1921426
aaggucagugaucacacau

SEQ ID NO: 1921428 - RNA, 19 nt, Artificial Sequence
  Description of Artificial Sequence: Synthetic oligonucleotide
  Sense strand starting at position 1212 of SEQ ID NO: 1879635
uaagaaaguuguguguucu

SEQ ID NO: 1921429 - RNA, 19 nt, Artificial Sequence
  Description of Artificial Sequence: Synthetic oligonucleotide
  Antisense strand to SEQ ID NO: 1921428
agaacacacaacuuucuua

SEQ ID NO: 1921430 - RNA, 19 nt, Artificial Sequence
  Description of Artificial Sequence: Synthetic oligonucleotide
  Sense strand starting at position 1213 of SEQ ID NO: 1879635
aagaaaguuguguguucua

SEQ ID NO: 1921431 - RNA, 19 nt, Artificial Sequence
  Description of Artificial Sequence: Synthetic oligonucleotide
  Antisense strand to SEQ ID NO: 1921430
uagaacacacaacuuucuu

SEQ ID NO: 1921432 - RNA, 19 nt, Artificial Sequence
  Description of Artificial Sequence: Synthetic oligonucleotide
  Sense strand starting at position 1494 of SEQ ID NO: 1879635
uaaguucuuggaggaaauu

SEQ ID NO: 1921433 - RNA, 19 nt, Artificial Sequence
  Description of Artificial Sequence: Synthetic oligonucleotide
  Antisense strand to SEQ ID NO: 1921432
aauuuccuccaagaacuua

SEQ ID NO: 1921434 - RNA, 19 nt, Artificial Sequence
  Description of Artificial Sequence: Synthetic oligonucleotide
  Sense strand starting at position 1715 of SEQ ID NO: 1879635
agcaaaguuuagcucauga

SEQ ID NO: 1921435 - RNA, 19 nt, Artificial Sequence
  Description of Artificial Sequence: Synthetic oligonucleotide
  Antisense strand to SEQ ID NO: 1921434
ucaugagcuaaacuuugcu

SEQ ID NO: 1921436 - RNA, 19 nt, Artificial Sequence
  Description of Artificial Sequence: Synthetic oligonucleotide
  Sense strand starting at position 1720 of SEQ ID NO: 1879635
aguuuagcucaugagguuu

SEQ ID NO: 1921437 - RNA, 19 nt, Artificial Sequence
  Description of Artificial Sequence: Synthetic oligonucleotide
  Antisense strand to SEQ ID NO: 1921436
aaaccucaugagcuaaacu

SEQ ID NO: 1921438 - RNA, 19 nt, Artificial Sequence
  Description of Artificial Sequence: Synthetic oligonucleotide
  Sense strand starting at position 1726 of SEQ ID NO: 1879635
gcucaugagguuuagugaa

SEQ ID NO: 1921439 - RNA, 19 nt, Artificial Sequence
  Description of Artificial Sequence: Synthetic oligonucleotide
  Antisense strand to SEQ ID NO: 1921438
uucacuaaaccucaugagc

SEQ ID NO: 1921440 - RNA, 19 nt, Artificial Sequence
  Description of Artificial Sequence: Synthetic oligonucleotide
  Sense strand starting at position 1728 of SEQ ID NO: 1879635
ucaugagguuuagugaaag

SEQ ID NO: 1921441 - RNA, 19 nt, Artificial Sequence
  Description of Artificial Sequence: Synthetic oligonucleotide
  Antisense strand to SEQ ID NO: 1921440
cuuucacuaaaccucauga

SEQ ID NO: 1921442 - RNA, 19 nt, Artificial Sequence
  Description of Artificial Sequence: Synthetic oligonucleotide
  Sense strand starting at position 1745 of SEQ ID NO: 1879635
agcagcugucuccauaaca

SEQ ID NO: 1921443 - RNA, 19 nt, Artificial Sequence
  Description of Artificial Sequence: Synthetic oligonucleotide
  Antisense strand to SEQ ID NO: 1921442
uguuauggagacagcugcu

SEQ ID NO: 1921444 - RNA, 19 nt, Artificial Sequence
  Description of Artificial Sequence: Synthetic oligonucleotide
  Sense strand starting at position 2183 of SEQ ID NO: 1879635
ggccauuguagagagcuua

SEQ ID NO: 1921445 - RNA, 19 nt, Artificial Sequence
  Description of Artificial Sequence: Synthetic oligonucleotide
  Antisense strand to SEQ ID NO: 1921444
uaagcucucuacaauggcc

SEQ ID NO: 1921446 - RNA, 19 nt, Artificial Sequence
  Description of Artificial Sequence: Synthetic oligonucleotide
  Sense strand starting at position 2253 of SEQ ID NO: 1879635
agcucugagggagauguau

SEQ ID NO: 1921447 - RNA, 19 nt, Artificial Sequence
  Description of Artificial Sequence: Synthetic oligonucleotide
  Antisense strand to SEQ ID NO: 1921446
auacaucucccucagagcu

SEQ ID NO: 1921448 - RNA, 19 nt, Artificial Sequence
  Description of Artificial Sequence: Synthetic oligonucleotide
  Sense strand starting at position 2404 of SEQ ID NO: 1879635
acugauuucucugaugguu

SEQ ID NO: 1921449 - RNA, 19 nt, Artificial Sequence
  Description of Artificial Sequence: Synthetic oligonucleotide
  Antisense strand to SEQ ID NO: 1921448
aaccaucagagaaaucagu

SEQ ID NO: 1921450 - RNA, 19 nt, Artificial Sequence
  Description of Artificial Sequence: Synthetic oligonucleotide
  Sense strand starting at position 2416 of SEQ ID NO: 1879635
gaugguucugggcaaacua

SEQ ID NO: 1921451 - RNA, 19 nt, Artificial Sequence
  Description of Artificial Sequence: Synthetic oligonucleotide
  Antisense strand to SEQ ID NO: 1921450
uaguuugcccagaaccauc

SEQ ID NO: 1921452 - RNA, 19 nt, Artificial Sequence
  Description of Artificial Sequence: Synthetic oligonucleotide
  Sense strand starting at position 2466 of SEQ ID NO: 1879635
ugcugaugccauuaagaau

SEQ ID NO: 1921453 - RNA, 19 nt, Artificial Sequence
  Description of Artificial Sequence: Synthetic oligonucleotide
  Antisense strand to SEQ ID NO: 1921452
auucuuaauggcaucagca

SEQ ID NO: 1921454 - RNA, 19 nt, Artificial Sequence
  Description of Artificial Sequence: Synthetic oligonucleotide
  Sense strand starting at position 2479 of SEQ ID NO: 1879635
aagaauauuccugggugca

SEQ ID NO: 1921455 - RNA, 19 nt, Artificial Sequence
  Description of Artificial Sequence: Synthetic oligonucleotide
  Antisense strand to SEQ ID NO: 1921454
ugcacccaggaauauucuu

SEQ ID NO: 1921456 - RNA, 19 nt, Artificial Sequence
  Description of Artificial Sequence: Synthetic oligonucleotide
  Sense strand starting at position 2480 of SEQ ID NO: 1879635
agaauauuccugggugcag

SEQ ID NO: 1921457 - RNA, 19 nt, Artificial Sequence
  Description of Artificial Sequence: Synthetic oligonucleotide
  Antisense strand to SEQ ID NO: 1921456
cugcacccaggaauauucu

SEQ ID NO: 1921458 - RNA, 19 nt, Artificial Sequence
  Description of Artificial Sequence: Synthetic oligonucleotide
  Sense strand starting at position 2481 of SEQ ID NO: 1879635
gaauauuccugggugcagu

SEQ ID NO: 1921459 - RNA, 19 nt, Artificial Sequence
  Description of Artificial Sequence: Synthetic oligonucleotide
  Antisense strand to SEQ ID NO: 1921458
acugcacccaggaauauuc

SEQ ID NO: 1921460 - RNA, 19 nt, Artificial Sequence
  Description of Artificial Sequence: Synthetic oligonucleotide
  Sense strand starting at position 2669 of SEQ ID NO: 1879635
aggagagauuugugauuca

SEQ ID NO: 1921461 - RNA, 19 nt, Artificial Sequence
  Description of Artificial Sequence: Synthetic oligonucleotide
  Antisense strand to SEQ ID NO: 1921460
ugaaucacaaaucucuccu

SEQ ID NO: 1921462 - RNA, 19 nt, Artificial Sequence
  Description of Artificial Sequence: Synthetic oligonucleotide
  Sense strand starting at position 2713 of SEQ ID NO: 1879635
ucacaagcauuuggaagaa

SEQ ID NO: 1921463 - RNA, 19 nt, Artificial Sequence
  Description of Artificial Sequence: Synthetic oligonucleotide
  Antisense strand to SEQ ID NO: 1921462
uucuuccaaaugcuuguga

SEQ ID NO: 1921464 - RNA, 19 nt, Artificial Sequence
  Description of Artificial Sequence: Synthetic oligonucleotide
  Sense strand starting at position 2748 of SEQ ID NO: 1879635
auggauuacuaugagggau

SEQ ID NO: 1921465 - RNA, 19 nt, Artificial Sequence
  Description of Artificial Sequence: Synthetic oligonucleotide
  Antisense strand to SEQ ID NO: 1921464
aucccucauaguaauccau

SEQ ID NO: 1921466 - RNA, 19 nt, Artificial Sequence
  Description of Artificial Sequence: Synthetic oligonucleotide
  Sense strand starting at position 2792 of SEQ ID NO: 1879635
ugcugauacgguggaaaug

SEQ ID NO: 1921467 - RNA, 19 nt, Artificial Sequence
  Description of Artificial Sequence: Synthetic oligonucleotide
  Antisense strand to SEQ ID NO: 1921466
cauuuccaccguaucagca

SEQ ID NO: 1921468 - RNA, 19 nt, Artificial Sequence
  Description of Artificial Sequence: Synthetic oligonucleotide
  Sense strand starting at position 3160 of SEQ ID NO: 1879635
ugaagaugugacugacuuu

SEQ ID NO: 1921469 - RNA, 19 nt, Artificial Sequence
  Description of Artificial Sequence: Synthetic oligonucleotide
  Antisense strand to SEQ ID NO: 1921468
aaagucagucacaucuuca

SEQ ID NO: 1921470 - RNA, 19 nt, Artificial Sequence
  Description of Artificial Sequence: Synthetic oligonucleotide
  Sense strand starting at position 3163 of SEQ ID NO: 1879635
agaugugacugacuuuauc

SEQ ID NO: 1921471 - RNA, 19 nt, Artificial Sequence
  Description of Artificial Sequence: Synthetic oligonucleotide
  Antisense strand to SEQ ID NO: 1921470
gauaaagucagucacaucu

SEQ ID NO: 1921472 - RNA, 19 nt, Artificial Sequence
  Description of Artificial Sequence: Synthetic oligonucleotide
  Sense strand starting at position 3180 of SEQ ID NO: 1879635
ucaugagaaucucaugaua

SEQ ID NO: 1921473 - RNA, 19 nt, Artificial Sequence
  Description of Artificial Sequence: Synthetic oligonucleotide
  Antisense strand to SEQ ID NO: 1921472
uaucaugagauucucauga

SEQ ID NO: 1921474 - RNA, 19 nt, Artificial Sequence
  Description of Artificial Sequence: Synthetic oligonucleotide
  Sense strand starting at position 3348 of SEQ ID NO: 1879635
agcagcagaguuugagauu

SEQ ID NO: 1921475 - RNA, 19 nt, Artificial Sequence
  Description of Artificial Sequence: Synthetic oligonucleotide
  Antisense strand to SEQ ID NO: 1921474
aaucucaaacucugcugcu

SEQ ID NO: 1921476 - RNA, 19 nt, Artificial Sequence
  Description of Artificial Sequence: Synthetic oligonucleotide
  Sense strand starting at position 3357 of SEQ ID NO: 1879635
guuugagauugacuccaau

SEQ ID NO: 1921477 - RNA, 19 nt, Artificial Sequence
  Description of Artificial Sequence: Synthetic oligonucleotide
  Antisense strand to SEQ ID NO: 1921476
auuggagucaaucucaaac

SEQ ID NO: 1921478 - RNA, 19 nt, Artificial Sequence
  Description of Artificial Sequence: Synthetic oligonucleotide
  Sense strand starting at position 3563 of SEQ ID NO: 1879635
ggugaaaccucagcuguac

SEQ ID NO: 1921479 - RNA, 19 nt, Artificial Sequence
  Description of Artificial Sequence: Synthetic oligonucleotide
  Antisense strand to SEQ ID NO: 1921478
guacagcugagguuucacc

SEQ ID NO: 1921480 - RNA, 19 nt, Artificial Sequence
  Description of Artificial Sequence: Synthetic oligonucleotide
  Sense strand starting at position 3783 of SEQ ID NO: 1879635
ugugacaaacuuugucuua

SEQ ID NO: 1921481 - RNA, 19 nt, Artificial Sequence
  Description of Artificial Sequence: Synthetic oligonucleotide
  Antisense strand to SEQ ID NO: 1921480
uaagacaaaguuugucaca

SEQ ID NO: 1921482 - RNA, 19 nt, Artificial Sequence
  Description of Artificial Sequence: Synthetic oligonucleotide
  Sense strand starting at position 3784 of SEQ ID NO: 1879635
gugacaaacuuugucuuau

SEQ ID NO: 1921483 - RNA, 19 nt, Artificial Sequence
  Description of Artificial Sequence: Synthetic oligonucleotide
  Antisense strand to SEQ ID NO: 1921482
auaagacaaaguuugucac

SEQ ID NO: 1921484 - RNA, 19 nt, Artificial Sequence
  Description of Artificial Sequence: Synthetic oligonucleotide
  Sense strand starting at position 18 of SEQ ID NO: 1879636
gguggugcacguguuguua

SEQ ID NO: 1921485 - RNA, 19 nt, Artificial Sequence
  Description of Artificial Sequence: Synthetic oligonucleotide
  Antisense strand to SEQ ID NO: 1921484
uaacaacacgugcaccacc

SEQ ID NO: 1921486 - RNA, 19 nt, Artificial Sequence
  Description of Artificial Sequence: Synthetic oligonucleotide
  Sense strand starting at position 37 of SEQ ID NO: 1879636
gguaccaucuaccuaucua

SEQ ID NO: 1921487 - RNA, 19 nt, Artificial Sequence
  Description of Artificial Sequence: Synthetic oligonucleotide
  Antisense strand to SEQ ID NO: 1921486
uagauagguagaugguacc

SEQ ID NO: 1921488 - RNA, 19 nt, Artificial Sequence
  Description of Artificial Sequence: Synthetic oligonucleotide
  Sense strand starting at position 157 of SEQ ID NO: 1879636
aaggauuagugcuuuaacu

SEQ ID NO: 1921489 - RNA, 19 nt, Artificial Sequence
  Description of Artificial Sequence: Synthetic oligonucleotide
  Antisense strand to SEQ ID NO: 1921488
aguuaaagcacuaauccuu

SEQ ID NO: 1921490 - RNA, 19 nt, Artificial Sequence
  Description of Artificial Sequence: Synthetic oligonucleotide
  Sense strand starting at position 159 of SEQ ID NO: 1879636
ggauuagugcuuuaacuug

SEQ ID NO: 1921491 - RNA, 19 nt, Artificial Sequence
  Description of Artificial Sequence: Synthetic oligonucleotide
  Antisense strand to SEQ ID NO: 1921490
caaguuaaagcacuaaucc

SEQ ID NO: 1921492 - RNA, 19 nt, Artificial Sequence
  Description of Artificial Sequence: Synthetic oligonucleotide
  Sense strand starting at position 308 of SEQ ID NO: 1879636
aacugcuugguugaugauu

SEQ ID NO: 1921493 - RNA, 19 nt, Artificial Sequence
  Description of Artificial Sequence: Synthetic oligonucleotide
  Antisense strand to SEQ ID NO: 1921492
aaucaucaaccaagcaguu

SEQ ID NO: 1921494 - RNA, 19 nt, Artificial Sequence
  Description of Artificial Sequence: Synthetic oligonucleotide
  Sense strand starting at position 314 of SEQ ID NO: 1879636
uugguugaugauuguuaga

SEQ ID NO: 1921495 - RNA, 19 nt, Artificial Sequence
  Description of Artificial Sequence: Synthetic oligonucleotide
  Antisense strand to SEQ ID NO: 1921494
ucuaacaaucaucaaccaa

SEQ ID NO: 1921496 - RNA, 19 nt, Artificial Sequence
  Description of Artificial Sequence: Synthetic oligonucleotide
  Sense strand starting at position 316 of SEQ ID NO: 1879636
gguugaugauuguuagacc

SEQ ID NO: 1921497 - RNA, 19 nt, Artificial Sequence
  Description of Artificial Sequence: Synthetic oligonucleotide
  Antisense strand to SEQ ID NO: 1921496
ggucuaacaaucaucaacc

SEQ ID NO: 1921498 - RNA, 19 nt, Artificial Sequence
  Description of Artificial Sequence: Synthetic oligonucleotide
  Sense strand starting at position 476 of SEQ ID NO: 1879636
auguuaaauugaccaguaa

SEQ ID NO: 1921499 - RNA, 19 nt, Artificial Sequence
  Description of Artificial Sequence: Synthetic oligonucleotide
  Antisense strand to SEQ ID NO: 1921498
uuacuggucaauuuaacau

SEQ ID NO: 1921500 - RNA, 19 nt, Artificial Sequence
  Description of Artificial Sequence: Synthetic oligonucleotide
  Sense strand starting at position 505 of SEQ ID NO: 1879636
acuagaagaaaguguaugu

SEQ ID NO: 1921501 - RNA, 19 nt, Artificial Sequence
  Description of Artificial Sequence: Synthetic oligonucleotide
  Antisense strand to SEQ ID NO: 1921500
acauacacuuucuucuagu

SEQ ID NO: 1921502 - RNA, 19 nt, Artificial Sequence
  Description of Artificial Sequence: Synthetic oligonucleotide
  Sense strand starting at position 509 of SEQ ID NO: 1879636
gaagaaaguguauguaacu

SEQ ID NO: 1921503 - RNA, 19 nt, Artificial Sequence
  Description of Artificial Sequence: Synthetic oligonucleotide
  Antisense strand to SEQ ID NO: 1921502
aguuacauacacuuucuuc

SEQ ID NO: 1921504 - RNA, 19 nt, Artificial Sequence
  Description of Artificial Sequence: Synthetic oligonucleotide
  Sense strand starting at position 514 of SEQ ID NO: 1879636
aaguguauguaacuagaua

SEQ ID NO: 1921505 - RNA, 19 nt, Artificial Sequence
  Description of Artificial Sequence: Synthetic oligonucleotide
  Antisense strand to SEQ ID NO: 1921504
uaucuaguuacauacacuu

SEQ ID NO: 1921506 - RNA, 19 nt, Artificial Sequence
  Description of Artificial Sequence: Synthetic oligonucleotide
  Sense strand starting at position 515 of SEQ ID NO: 1879636
aguguauguaacuagauau

SEQ ID NO: 1921507 - RNA, 19 nt, Artificial Sequence
  Description of Artificial Sequence: Synthetic oligonucleotide
  Antisense strand to SEQ ID NO: 1921506
auaucuaguuacauacacu

SEQ ID NO: 1921508 - RNA, 19 nt, Artificial Sequence
  Description of Artificial Sequence: Synthetic oligonucleotide
  Sense strand starting at position 644 of SEQ ID NO: 1879636
gauagagcucuauagcgau

SEQ ID NO: 1921509 - RNA, 19 nt, Artificial Sequence
  Description of Artificial Sequence: Synthetic oligonucleotide
  Antisense strand to SEQ ID NO: 1921508
aucgcuauagagcucuauc

SEQ ID NO: 1921510 - RNA, 19 nt, Artificial Sequence
  Description of Artificial Sequence: Synthetic oligonucleotide
  Sense strand starting at position 682 of SEQ ID NO: 1879636
aaugauguuguccaaguaa

SEQ ID NO: 1921511 - RNA, 19 nt, Artificial Sequence
  Description of Artificial Sequence: Synthetic oligonucleotide
  Antisense strand to SEQ ID NO: 1921510
uuacuuggacaacaucauu

SEQ ID NO: 1921512 - RNA, 19 nt, Artificial Sequence
  Description of Artificial Sequence: Synthetic oligonucleotide
  Sense strand starting at position 793 of SEQ ID NO: 1879636
ucaagaagugccugaagau

SEQ ID NO: 1921513 - RNA, 19 nt, Artificial Sequence
  Description of Artificial Sequence: Synthetic oligonucleotide
  Antisense strand to SEQ ID NO: 1921512
aucuucaggcacuucuuga

SEQ ID NO: 1921514 - RNA, 19 nt, Artificial Sequence
  Description of Artificial Sequence: Synthetic oligonucleotide
  Sense strand starting at position 921 of SEQ ID NO: 1879636
auaccaagucaguaaguaa

SEQ ID NO: 1921515 - RNA, 19 nt, Artificial Sequence
  Description of Artificial Sequence: Synthetic oligonucleotide
  Antisense strand to SEQ ID NO: 1921514
uuacuuacugacuugguau

SEQ ID NO: 1921516 - RNA, 19 nt, Artificial Sequence
  Description of Artificial Sequence: Synthetic oligonucleotide
  Sense strand starting at position 1008 of SEQ ID NO: 1879636
aaagaagacuggccaugua

SEQ ID NO: 1921517 - RNA, 19 nt, Artificial Sequence
  Description of Artificial Sequence: Synthetic oligonucleotide
  Antisense strand to SEQ ID NO: 1921516
uacauggccagucuucuuu

SEQ ID NO: 1921518 - RNA, 19 nt, Artificial Sequence
  Description of Artificial Sequence: Synthetic oligonucleotide
  Sense strand starting at position 1043 of SEQ ID NO: 1879636
ugacaacuuccguaccauu

SEQ ID NO: 1921519 - RNA, 19 nt, Artificial Sequence
  Description of Artificial Sequence: Synthetic oligonucleotide
  Antisense strand to SEQ ID NO: 1921518
aaugguacggaaguuguca

SEQ ID NO: 1921520 - RNA, 19 nt, Artificial Sequence
  Description of Artificial Sequence: Synthetic oligonucleotide
  Sense strand starting at position 1170 of SEQ ID NO: 1879636
aagggagaauuugaaguuu

SEQ ID NO: 1921521 - RNA, 19 nt, Artificial Sequence
  Description of Artificial Sequence: Synthetic oligonucleotide
  Antisense strand to SEQ ID NO: 1921520
aaacuucaaauucucccuu

SEQ ID NO: 1921522 - RNA, 19 nt, Artificial Sequence
  Description of Artificial Sequence: Synthetic oligonucleotide
  Sense strand starting at position 1627 of SEQ ID NO: 1879636
uaaagaagacauggucgua

SEQ ID NO: 1921523 - RNA, 19 nt, Artificial Sequence
  Description of Artificial Sequence: Synthetic oligonucleotide
  Antisense strand to SEQ ID NO: 1921522
uacgaccaugucuucuuua

SEQ ID NO: 1921524 - RNA, 19 nt, Artificial Sequence
  Description of Artificial Sequence: Synthetic oligonucleotide
  Sense strand starting at position 1630 of SEQ ID NO: 1879636
agaagacauggucguaaau

SEQ ID NO: 1921525 - RNA, 19 nt, Artificial Sequence
  Description of Artificial Sequence: Synthetic oligonucleotide
  Antisense strand to SEQ ID NO: 1921524
auuuacgaccaugucuucu

SEQ ID NO: 1921526 - RNA, 19 nt, Artificial Sequence
  Description of Artificial Sequence: Synthetic oligonucleotide
  Sense strand starting at position 1807 of SEQ ID NO: 1879636
ccaucauagcagggauagu

SEQ ID NO: 1921527 - RNA, 19 nt, Artificial Sequence
  Description of Artificial Sequence: Synthetic oligonucleotide
  Antisense strand to SEQ ID NO: 1921526
acuaucccugcuaugaugg

SEQ ID NO: 1921528 - RNA, 19 nt, Artificial Sequence
  Description of Artificial Sequence: Synthetic oligonucleotide
  Sense strand starting at position 1816 of SEQ ID NO: 1879636
cagggauaguucuuauagu

SEQ ID NO: 1921529 - RNA, 19 nt, Artificial Sequence
  Description of Artificial Sequence: Synthetic oligonucleotide
  Antisense strand to SEQ ID NO: 1921528
acuauaagaacuaucccug

SEQ ID NO: 1921530 - RNA, 19 nt, Artificial Sequence
  Description of Artificial Sequence: Synthetic oligonucleotide
  Sense strand starting at position 1911 of SEQ ID NO: 1879636
ucacaauucuuguugaagg

SEQ ID NO: 1921531 - RNA, 19 nt, Artificial Sequence
  Description of Artificial Sequence: Synthetic oligonucleotide
  Antisense strand to SEQ ID NO: 1921530
ccuucaacaagaauuguga

SEQ ID NO: 1921532 - RNA, 19 nt, Artificial Sequence
  Description of Artificial Sequence: Synthetic oligonucleotide
  Sense strand starting at position 1944 of SEQ ID NO: 1879636
ccagaaggauucuuugacu

SEQ ID NO: 1921533 - RNA, 19 nt, Artificial Sequence
  Description of Artificial Sequence: Synthetic oligonucleotide
  Antisense strand to SEQ ID NO: 1921532
agucaaagaauccuucugg

SEQ ID NO: 1921534 - RNA, 19 nt, Artificial Sequence
  Description of Artificial Sequence: Synthetic oligonucleotide
  Sense strand starting at position 1982 of SEQ ID NO: 1879636
acccaucaccauuguagau

SEQ ID NO: 1921535 - RNA, 19 nt, Artificial Sequence
  Description of Artificial Sequence: Synthetic oligonucleotide
  Antisense strand to SEQ ID NO: 1921534
aucuacaauggugaugggu

SEQ ID NO: 1921536 - RNA, 19 nt, Artificial Sequence
  Description of Artificial Sequence: Synthetic oligonucleotide
  Sense strand starting at position 2231 of SEQ ID NO: 1879636
cuagaaauuuguuauacag

SEQ ID NO: 1921537 - RNA, 19 nt, Artificial Sequence
  Description of Artificial Sequence: Synthetic oligonucleotide
  Antisense strand to SEQ ID NO: 1921536
cuguauaacaaauuucuag

SEQ ID NO: 1921538 - RNA, 19 nt, Artificial Sequence
  Description of Artificial Sequence: Synthetic oligonucleotide
  Sense strand starting at position 2671 of SEQ ID NO: 1879636
ggguauacuaaguguauga

SEQ ID NO: 1921539 - RNA, 19 nt, Artificial Sequence
  Description of Artificial Sequence: Synthetic oligonucleotide
  Antisense strand to SEQ ID NO: 1921538
ucauacacuuaguauaccc

SEQ ID NO: 1921540 - RNA, 19 nt, Artificial Sequence
  Description of Artificial Sequence: Synthetic oligonucleotide
  Sense strand starting at position 2673 of SEQ ID NO: 1879636
guauacuaaguguaugacu

SEQ ID NO: 1921541 - RNA, 19 nt, Artificial Sequence
  Description of Artificial Sequence: Synthetic oligonucleotide
  Antisense strand to SEQ ID NO: 1921540
agucauacacuuaguauac

SEQ ID NO: 1921542 - RNA, 19 nt, Artificial Sequence
  Description of Artificial Sequence: Synthetic oligonucleotide
  Sense strand starting at position 2695 of SEQ ID NO: 1879636
aguuguaaucauuagagug

SEQ ID NO: 1921543 - RNA, 19 nt, Artificial Sequence
  Description of Artificial Sequence: Synthetic oligonucleotide
  Antisense strand to SEQ ID NO: 1921542
cacucuaaugauuacaacu

SEQ ID NO: 1921544 - RNA, 19 nt, Artificial Sequence
  Description of Artificial Sequence: Synthetic oligonucleotide
  Sense strand starting at position 2791 of SEQ ID NO: 1879636
aaugguauauuugggaaag

SEQ ID NO: 1921545 - RNA, 19 nt, Artificial Sequence
  Description of Artificial Sequence: Synthetic oligonucleotide
  Antisense strand to SEQ ID NO: 1921544
cuuucccaaauauaccauu

SEQ ID NO: 1921546 - RNA, 19 nt, Artificial Sequence
  Description of Artificial Sequence: Synthetic oligonucleotide
  Sense strand starting at position 2889 of SEQ ID NO: 1879636
gucuaauaccaucagguaa

SEQ ID NO: 1921547 - RNA, 19 nt, Artificial Sequence
  Description of Artificial Sequence: Synthetic oligonucleotide
  Antisense strand to SEQ ID NO: 1921546
uuaccugaugguauuagac

SEQ ID NO: 1921548 - RNA, 19 nt, Artificial Sequence
  Description of Artificial Sequence: Synthetic oligonucleotide
  Sense strand starting at position 3215 of SEQ ID NO: 1879636
aucuaugagucucuagauu

SEQ ID NO: 1921549 - RNA, 19 nt, Artificial Sequence
  Description of Artificial Sequence: Synthetic oligonucleotide
  Antisense strand to SEQ ID NO: 1921548
aaucuagagacucauagau

SEQ ID NO: 1921550 - RNA, 19 nt, Artificial Sequence
  Description of Artificial Sequence: Synthetic oligonucleotide
  Sense strand starting at position 3258 of SEQ ID NO: 1879636
gcucuuacagacuauuguu

SEQ ID NO: 1921551 - RNA, 19 nt, Artificial Sequence
  Description of Artificial Sequence: Synthetic oligonucleotide
  Antisense strand to SEQ ID NO: 1921550
aacaauagucuguaagagc

SEQ ID NO: 1921552 - RNA, 19 nt, Artificial Sequence
  Description of Artificial Sequence: Synthetic oligonucleotide
  Sense strand starting at position 3296 of SEQ ID NO: 1879636
gaaguugaacuccgaguga

SEQ ID NO: 1921553 - RNA, 19 nt, Artificial Sequence
  Description of Artificial Sequence: Synthetic oligonucleotide
  Antisense strand to SEQ ID NO: 1921552
ucacucggaguucaacuuc

SEQ ID NO: 1921554 - RNA, 19 nt, Artificial Sequence
  Description of Artificial Sequence: Synthetic oligonucleotide
  Sense strand starting at position 3531 of SEQ ID NO: 1879636
uggaaauagcaucaagucu

SEQ ID NO: 1921555 - RNA, 19 nt, Artificial Sequence
  Description of Artificial Sequence: Synthetic oligonucleotide
  Antisense strand to SEQ ID NO: 1921554
agacuugaugcuauuucca

SEQ ID NO: 1921556 - RNA, 19 nt, Artificial Sequence
  Description of Artificial Sequence: Synthetic oligonucleotide
  Sense strand starting at position 3543 of SEQ ID NO: 1879636
caagucucauagguugaaa

SEQ ID NO: 1921557 - RNA, 19 nt, Artificial Sequence
  Description of Artificial Sequence: Synthetic oligonucleotide
  Antisense strand to SEQ ID NO: 1921556
uuucaaccuaugagacuug

SEQ ID NO: 1921558 - RNA, 19 nt, Artificial Sequence
  Description of Artificial Sequence: Synthetic oligonucleotide
  Sense strand starting at position 3546 of SEQ ID NO: 1879636
gucucauagguugaaagcu

SEQ ID NO: 1921559 - RNA, 19 nt, Artificial Sequence
  Description of Artificial Sequence: Synthetic oligonucleotide
  Antisense strand to SEQ ID NO: 1921558
agcuuucaaccuaugagac

SEQ ID NO: 1921560 - RNA, 19 nt, Artificial Sequence
  Description of Artificial Sequence: Synthetic oligonucleotide
  Sense strand starting at position 3650 of SEQ ID NO: 1879636
ccuccuuaggauugauuga

SEQ ID NO: 1921561 - RNA, 19 nt, Artificial Sequence
  Description of Artificial Sequence: Synthetic oligonucleotide
  Antisense strand to SEQ ID NO: 1921560
ucaaucaauccuaaggagg

SEQ ID NO: 1921562 - RNA, 19 nt, Artificial Sequence
  Description of Artificial Sequence: Synthetic oligonucleotide
  Sense strand starting at position 3707 of SEQ ID NO: 1879636
acuuaugcacguuauaaag

SEQ ID NO: 1921563 - RNA, 19 nt, Artificial Sequence
  Description of Artificial Sequence: Synthetic oligonucleotide
  Antisense strand to SEQ ID NO: 1921562
cuuuauaacgugcauaagu

SEQ ID NO: 1921564 - RNA, 19 nt, Artificial Sequence
  Description of Artificial Sequence: Synthetic oligonucleotide
  Sense strand starting at position 163 of SEQ ID NO: 1879637
uuaauagcaucaucgcuau

SEQ ID NO: 1921565 - RNA, 19 nt, Artificial Sequence
  Description of Artificial Sequence: Synthetic oligonucleotide
  Antisense strand to SEQ ID NO: 1921564
auagcgaugaugcuauuaa

SEQ ID NO: 1921566 - RNA, 19 nt, Artificial Sequence
  Description of Artificial Sequence: Synthetic oligonucleotide
  Sense strand starting at position 262 of SEQ ID NO: 1879637
gagaucuccugucucguuu

SEQ ID NO: 1921567 - RNA, 19 nt, Artificial Sequence
  Description of Artificial Sequence: Synthetic oligonucleotide
  Antisense strand to SEQ ID NO: 1921566
aaacgagacaggagaucuc

SEQ ID NO: 1921568 - RNA, 19 nt, Artificial Sequence
  Description of Artificial Sequence: Synthetic oligonucleotide
  Sense strand starting at position 273 of SEQ ID NO: 1879637
ucucguuugcuagcacuua

SEQ ID NO: 1921569 - RNA, 19 nt, Artificial Sequence
  Description of Artificial Sequence: Synthetic oligonucleotide
  Antisense strand to SEQ ID NO: 1921568
uaagugcuagcaaacgaga

SEQ ID NO: 1921570 - RNA, 19 nt, Artificial Sequence
  Description of Artificial Sequence: Synthetic oligonucleotide
  Sense strand starting at position 352 of SEQ ID NO: 1879637
aguugugagaauuaucugu

SEQ ID NO: 1921571 - RNA, 19 nt, Artificial Sequence
  Description of Artificial Sequence: Synthetic oligonucleotide
  Antisense strand to SEQ ID NO: 1921570
acagauaauucucacaacu

SEQ ID NO: 1921572 - RNA, 19 nt, Artificial Sequence
  Description of Artificial Sequence: Synthetic oligonucleotide
  Sense strand starting at position 354 of SEQ ID NO: 1879637
uugugagaauuaucuguuu

SEQ ID NO: 1921573 - RNA, 19 nt, Artificial Sequence
  Description of Artificial Sequence: Synthetic oligonucleotide
  Antisense strand to SEQ ID NO: 1921572
aaacagauaauucucacaa

SEQ ID NO: 1921574 - RNA, 19 nt, Artificial Sequence
  Description of Artificial Sequence: Synthetic oligonucleotide
  Sense strand starting at position 357 of SEQ ID NO: 1879637
ugagaauuaucuguuuaag

SEQ ID NO: 1921575 - RNA, 19 nt, Artificial Sequence
  Description of Artificial Sequence: Synthetic oligonucleotide
  Antisense strand to SEQ ID NO: 1921574
cuuaaacagauaauucuca

SEQ ID NO: 1921576 - RNA, 19 nt, Artificial Sequence
  Description of Artificial Sequence: Synthetic oligonucleotide
  Sense strand starting at position 571 of SEQ ID NO: 1879637
aucaauggagcaugacuua

SEQ ID NO: 1921577 - RNA, 19 nt, Artificial Sequence
  Description of Artificial Sequence: Synthetic oligonucleotide
  Antisense strand to SEQ ID NO: 1921576
uaagucaugcuccauugau

SEQ ID NO: 1921578 - RNA, 19 nt, Artificial Sequence
  Description of Artificial Sequence: Synthetic oligonucleotide
  Sense strand starting at position 593 of SEQ ID NO: 1879637
ucacuaguugaguacuaug

SEQ ID NO: 1921579 - RNA, 19 nt, Artificial Sequence
  Description of Artificial Sequence: Synthetic oligonucleotide
  Antisense strand to SEQ ID NO: 1921578
cauaguacucaacuaguga

SEQ ID NO: 1921580 - RNA, 19 nt, Artificial Sequence
  Description of Artificial Sequence: Synthetic oligonucleotide
  Sense strand starting at position 598 of SEQ ID NO: 1879637
aguugaguacuaugccaag

SEQ ID NO: 1921581 - RNA, 19 nt, Artificial Sequence
  Description of Artificial Sequence: Synthetic oligonucleotide
  Antisense strand to SEQ ID NO: 1921580
cuuggcauaguacucaacu

SEQ ID NO: 1921582 - RNA, 19 nt, Artificial Sequence
  Description of Artificial Sequence: Synthetic oligonucleotide
  Sense strand starting at position 670 of SEQ ID NO: 1879637
ccgaguucccucugaaaua

SEQ ID NO: 1921583 - RNA, 19 nt, Artificial Sequence
  Description of Artificial Sequence: Synthetic oligonucleotide
  Antisense strand to SEQ ID NO: 1921582
uauuucagagggaacucgg

SEQ ID NO: 1921584 - RNA, 19 nt, Artificial Sequence
  Description of Artificial Sequence: Synthetic oligonucleotide
  Sense strand starting at position 796 of SEQ ID NO: 1879637
accauaaauguuggaguca

SEQ ID NO: 1921585 - RNA, 19 nt, Artificial Sequence
  Description of Artificial Sequence: Synthetic oligonucleotide
  Antisense strand to SEQ ID NO: 1921584
ugacuccaacauuuauggu

SEQ ID NO: 1921586 - RNA, 19 nt, Artificial Sequence
  Description of Artificial Sequence: Synthetic oligonucleotide
  Sense strand starting at position 807 of SEQ ID NO: 1879637
uggagucaucuuugucacu

SEQ ID NO: 1921587 - RNA, 19 nt, Artificial Sequence
  Description of Artificial Sequence: Synthetic oligonucleotide
  Antisense strand to SEQ ID NO: 1921586
agugacaaagaugacucca

SEQ ID NO: 1921588 - RNA, 19 nt, Artificial Sequence
  Description of Artificial Sequence: Synthetic oligonucleotide
  Sense strand starting at position 808 of SEQ ID NO: 1879637
ggagucaucuuugucacua

SEQ ID NO: 1921589 - RNA, 19 nt, Artificial Sequence
  Description of Artificial Sequence: Synthetic oligonucleotide
  Antisense strand to SEQ ID NO: 1921588
uagugacaaagaugacucc

SEQ ID NO: 1921590 - RNA, 19 nt, Artificial Sequence
  Description of Artificial Sequence: Synthetic oligonucleotide
  Sense strand starting at position 816 of SEQ ID NO: 1879637
cuuugucacuacucuuuga

SEQ ID NO: 1921591 - RNA, 19 nt, Artificial Sequence
  Description of Artificial Sequence: Synthetic oligonucleotide
  Antisense strand to SEQ ID NO: 1921590
ucaaagaguagugacaaag

SEQ ID NO: 1921592 - RNA, 19 nt, Artificial Sequence
  Description of Artificial Sequence: Synthetic oligonucleotide
  Sense strand starting at position 876 of SEQ ID NO: 1879637
ggaaacuucuaagauauaa

SEQ ID NO: 1921593 - RNA, 19 nt, Artificial Sequence
  Description of Artificial Sequence: Synthetic oligonucleotide
  Antisense strand to SEQ ID NO: 1921592
uuauaucuuagaaguuucc

SEQ ID NO: 1921594 - RNA, 19 nt, Artificial Sequence
  Description of Artificial Sequence: Synthetic oligonucleotide
  Sense strand starting at position 1032 of SEQ ID NO: 1879637
uaaacagaguuguaugaaa

SEQ ID NO: 1921595 - RNA, 19 nt, Artificial Sequence
  Description of Artificial Sequence: Synthetic oligonucleotide
  Antisense strand to SEQ ID NO: 1921594
uuucauacaacucuguuua

SEQ ID NO: 1921596 - RNA, 19 nt, Artificial Sequence
  Description of Artificial Sequence: Synthetic oligonucleotide
  Sense strand starting at position 1034 of SEQ ID NO: 1879637
aacagaguuguaugaaaca

SEQ ID NO: 1921597 - RNA, 19 nt, Artificial Sequence
  Description of Artificial Sequence: Synthetic oligonucleotide
  Antisense strand to SEQ ID NO: 1921596
uguuucauacaacucuguu

SEQ ID NO: 1921598 - RNA, 19 nt, Artificial Sequence
  Description of Artificial Sequence: Synthetic oligonucleotide
  Sense strand starting at position 1124 of SEQ ID NO: 1879637
auuuguugauuuggguuaa

SEQ ID NO: 1921599 - RNA, 19 nt, Artificial Sequence
  Description of Artificial Sequence: Synthetic oligonucleotide
  Antisense strand to SEQ ID NO: 1921598
uuaacccaaaucaacaaau

SEQ ID NO: 1921600 - RNA, 19 nt, Artificial Sequence
  Description of Artificial Sequence: Synthetic oligonucleotide
  Sense strand starting at position 1265 of SEQ ID NO: 1879637
guucucuuguuccuaacau

SEQ ID NO: 1921601 - RNA, 19 nt, Artificial Sequence
  Description of Artificial Sequence: Synthetic oligonucleotide
  Antisense strand to SEQ ID NO: 1921600
auguuaggaacaagagaac

SEQ ID NO: 1921602 - RNA, 19 nt, Artificial Sequence
  Description of Artificial Sequence: Synthetic oligonucleotide
  Sense strand starting at position 1435 of SEQ ID NO: 1879637
gcauacaucuagucuguau

SEQ ID NO: 1921603 - RNA, 19 nt, Artificial Sequence
  Description of Artificial Sequence: Synthetic oligonucleotide
  Antisense strand to SEQ ID NO: 1921602
auacagacuagauguaugc

SEQ ID NO: 1921604 - RNA, 19 nt, Artificial Sequence
  Description of Artificial Sequence: Synthetic oligonucleotide
  Sense strand starting at position 1446 of SEQ ID NO: 1879637
gucuguauagccuguauaa

SEQ ID NO: 1921605 - RNA, 19 nt, Artificial Sequence
  Description of Artificial Sequence: Synthetic oligonucleotide
  Antisense strand to SEQ ID NO: 1921604
uuauacaggcuauacagac

SEQ ID NO: 1921606 - RNA, 19 nt, Artificial Sequence
  Description of Artificial Sequence: Synthetic oligonucleotide
  Sense strand starting at position 1480 of SEQ ID NO: 1879637
ccaaauagucaaugaaagu

SEQ ID NO: 1921607 - RNA, 19 nt, Artificial Sequence
  Description of Artificial Sequence: Synthetic oligonucleotide
  Antisense strand to SEQ ID NO: 1921606
acuuucauugacuauuugg

SEQ ID NO: 1921608 - RNA, 19 nt, Artificial Sequence
  Description of Artificial Sequence: Synthetic oligonucleotide
  Sense strand starting at position 1817 of SEQ ID NO: 1879637
gaggguaaguucuuuacag

SEQ ID NO: 1921609 - RNA, 19 nt, Artificial Sequence
  Description of Artificial Sequence: Synthetic oligonucleotide
  Antisense strand to SEQ ID NO: 1921608
cuguaaagaacuuacccuc

SEQ ID NO: 1921610 - RNA, 19 nt, Artificial Sequence
  Description of Artificial Sequence: Synthetic oligonucleotide
  Sense strand starting at position 1818 of SEQ ID NO: 1879637
aggguaaguucuuuacaga

SEQ ID NO: 1921611 - RNA, 19 nt, Artificial Sequence
  Description of Artificial Sequence: Synthetic oligonucleotide
  Antisense strand to SEQ ID NO: 1921610
ucuguaaagaacuuacccu

SEQ ID NO: 1921612 - RNA, 19 nt, Artificial Sequence
  Description of Artificial Sequence: Synthetic oligonucleotide
  Sense strand starting at position 2208 of SEQ ID NO: 1879637
uuuagaucugacuaccagu

SEQ ID NO: 1921613 - RNA, 19 nt, Artificial Sequence
  Description of Artificial Sequence: Synthetic oligonucleotide
  Antisense strand to SEQ ID NO: 1921612
acugguagucagaucuaaa

SEQ ID NO: 1921614 - RNA, 19 nt, Artificial Sequence
  Description of Artificial Sequence: Synthetic oligonucleotide
  Sense strand starting at position 2690 of SEQ ID NO: 1879637
agacuugcguuauuuauca

SEQ ID NO: 1921615 - RNA, 19 nt, Artificial Sequence
  Description of Artificial Sequence: Synthetic oligonucleotide
  Antisense strand to SEQ ID NO: 1921614
ugauaaauaacgcaagucu

SEQ ID NO: 1921616 - RNA, 19 nt, Artificial Sequence
  Description of Artificial Sequence: Synthetic oligonucleotide
  Sense strand starting at position 2694 of SEQ ID NO: 1879637
uugcguuauuuaucaacca

SEQ ID NO: 1921617 - RNA, 19 nt, Artificial Sequence
  Description of Artificial Sequence: Synthetic oligonucleotide
  Antisense strand to SEQ ID NO: 1921616
ugguugauaaauaacgcaa

SEQ ID NO: 1921618 - RNA, 19 nt, Artificial Sequence
  Description of Artificial Sequence: Synthetic oligonucleotide
  Sense strand starting at position 2963 of SEQ ID NO: 1879637
ggacucauguaaucuucca

SEQ ID NO: 1921619 - RNA, 19 nt, Artificial Sequence
  Description of Artificial Sequence: Synthetic oligonucleotide
  Antisense strand to SEQ ID NO: 1921618
uggaagauuacaugagucc

SEQ ID NO: 1921620 - RNA, 19 nt, Artificial Sequence
  Description of Artificial Sequence: Synthetic oligonucleotide
  Sense strand starting at position 3065 of SEQ ID NO: 1879637
ugaagauaggcuggguauu

SEQ ID NO: 1921621 - RNA, 19 nt, Artificial Sequence
  Description of Artificial Sequence: Synthetic oligonucleotide
  Antisense strand to SEQ ID NO: 1921620
aauacccagccuaucuuca

SEQ ID NO: 1921622 - RNA, 19 nt, Artificial Sequence
  Description of Artificial Sequence: Synthetic oligonucleotide
  Sense strand starting at position 3066 of SEQ ID NO: 1879637
gaagauaggcuggguauua

SEQ ID NO: 1921623 - RNA, 19 nt, Artificial Sequence
  Description of Artificial Sequence: Synthetic oligonucleotide
  Antisense strand to SEQ ID NO: 1921622
uaauacccagccuaucuuc

SEQ ID NO: 1921624 - RNA, 19 nt, Artificial Sequence
  Description of Artificial Sequence: Synthetic oligonucleotide
  Sense strand starting at position 3136 of SEQ ID NO: 1879637
uugauaguuguugaauacu

SEQ ID NO: 1921625 - RNA, 19 nt, Artificial Sequence
  Description of Artificial Sequence: Synthetic oligonucleotide
  Antisense strand to SEQ ID NO: 1921624
aguauucaacaacuaucaa

SEQ ID NO: 1921626 - RNA, 19 nt, Artificial Sequence
  Description of Artificial Sequence: Synthetic oligonucleotide
  Sense strand starting at position 3200 of SEQ ID NO: 1879637
guguucuaccuaggaccua

SEQ ID NO: 1921627 - RNA, 19 nt, Artificial Sequence
  Description of Artificial Sequence: Synthetic oligonucleotide
  Antisense strand to SEQ ID NO: 1921626
uagguccuagguagaacac

SEQ ID NO: 1921628 - RNA, 19 nt, Artificial Sequence
  Description of Artificial Sequence: Synthetic oligonucleotide
  Sense strand starting at position 3217 of SEQ ID NO: 1879637
uaccaaaguguugaauguu

SEQ ID NO: 1921629 - RNA, 19 nt, Artificial Sequence
  Description of Artificial Sequence: Synthetic oligonucleotide
  Antisense strand to SEQ ID NO: 1921628
aacauucaacacuuuggua

SEQ ID NO: 1921630 - RNA, 19 nt, Artificial Sequence
  Description of Artificial Sequence: Synthetic oligonucleotide
  Sense strand starting at position 3220 of SEQ ID NO: 1879637
caaaguguugaauguuaca

SEQ ID NO: 1921631 - RNA, 19 nt, Artificial Sequence
  Description of Artificial Sequence: Synthetic oligonucleotide
  Antisense strand to SEQ ID NO: 1921630
uguaacauucaacacuuug

SEQ ID NO: 1921632 - RNA, 19 nt, Artificial Sequence
  Description of Artificial Sequence: Synthetic oligonucleotide
  Sense strand starting at position 3265 of SEQ ID NO: 1879637
cuuggugggcuuuagauau

SEQ ID NO: 1921633 - RNA, 19 nt, Artificial Sequence
  Description of Artificial Sequence: Synthetic oligonucleotide
  Antisense strand to SEQ ID NO: 1921632
auaucuaaagcccaccaag

SEQ ID NO: 1921634 - RNA, 19 nt, Artificial Sequence
  Description of Artificial Sequence: Synthetic oligonucleotide
  Sense strand starting at position 3504 of SEQ ID NO: 1879637
ccauucugcuguucucaca

SEQ ID NO: 1921635 - RNA, 19 nt, Artificial Sequence
  Description of Artificial Sequence: Synthetic oligonucleotide
  Antisense strand to SEQ ID NO: 1921634
ugugagaacagcagaaugg

SEQ ID NO: 1921636 - RNA, 19 nt, Artificial Sequence
  Description of Artificial Sequence: Synthetic oligonucleotide
  Sense strand starting at position 3533 of SEQ ID NO: 1879637
gcuugcuuugucuauccau

SEQ ID NO: 1921637 - RNA, 19 nt, Artificial Sequence
  Description of Artificial Sequence: Synthetic oligonucleotide
  Antisense strand to SEQ ID NO: 1921636
auggauagacaaagcaagc

SEQ ID NO: 1921638 - RNA, 19 nt, Artificial Sequence
  Description of Artificial Sequence: Synthetic oligonucleotide
  Sense strand starting at position 3733 of SEQ ID NO: 1879637
uuauccaauuaggugaauu

SEQ ID NO: 1921639 - RNA, 19 nt, Artificial Sequence
  Description of Artificial Sequence: Synthetic oligonucleotide
  Antisense strand to SEQ ID NO: 1921638
aauucaccuaauuggauaa

SEQ ID NO: 1921640 - RNA, 19 nt, Artificial Sequence
  Description of Artificial Sequence: Synthetic oligonucleotide
  Sense strand starting at position 3741 of SEQ ID NO: 1879637
uuaggugaauuaucccuuu

SEQ ID NO: 1921641 - RNA, 19 nt, Artificial Sequence
  Description of Artificial Sequence: Synthetic oligonucleotide
  Antisense strand to SEQ ID NO: 1921640
aaagggauaauucaccuaa

SEQ ID NO: 1921642 - RNA, 19 nt, Artificial Sequence
  Description of Artificial Sequence: Synthetic oligonucleotide
  Sense strand starting at position 3906 of SEQ ID NO: 1879637
aguguucugcaacauaaac

SEQ ID NO: 1921643 - RNA, 19 nt, Artificial Sequence
  Description of Artificial Sequence: Synthetic oligonucleotide
  Antisense strand to SEQ ID NO: 1921642
guuuauguugcagaacacu

SEQ ID NO: 1921644 - RNA, 19 nt, Artificial Sequence
  Description of Artificial Sequence: Synthetic oligonucleotide
  Sense strand starting at position 390 of SEQ ID NO: 1879638
auguaauaagcguugcuuu

SEQ ID NO: 1921645 - RNA, 19 nt, Artificial Sequence
  Description of Artificial Sequence: Synthetic oligonucleotide
  Antisense strand to SEQ ID NO: 1921644
aaagcaacgcuuauuacau

SEQ ID NO: 1921646 - RNA, 19 nt, Artificial Sequence
  Description of Artificial Sequence: Synthetic oligonucleotide
  Sense strand starting at position 439 of SEQ ID NO: 1879638
uuuguauguguguacugga

SEQ ID NO: 1921647 - RNA, 19 nt, Artificial Sequence
  Description of Artificial Sequence: Synthetic oligonucleotide
  Antisense strand to SEQ ID NO: 1921646
uccaguacacacauacaaa

SEQ ID NO: 1921648 - RNA, 19 nt, Artificial Sequence
  Description of Artificial Sequence: Synthetic oligonucleotide
  Sense strand starting at position 561 of SEQ ID NO: 1879638
aaaggugaccaguguaacu

SEQ ID NO: 1921649 - RNA, 19 nt, Artificial Sequence
  Description of Artificial Sequence: Synthetic oligonucleotide
  Antisense strand to SEQ ID NO: 1921648
aguuacacuggucaccuuu

SEQ ID NO: 1921650 - RNA, 19 nt, Artificial Sequence
  Description of Artificial Sequence: Synthetic oligonucleotide
  Sense strand starting at position 563 of SEQ ID NO: 1879638
aggugaccaguguaacuua

SEQ ID NO: 1921651 - RNA, 19 nt, Artificial Sequence
  Description of Artificial Sequence: Synthetic oligonucleotide
  Antisense strand to SEQ ID NO: 1921650
uaaguuacacuggucaccu

SEQ ID NO: 1921652 - RNA, 19 nt, Artificial Sequence
  Description of Artificial Sequence: Synthetic oligonucleotide
  Sense strand starting at position 568 of SEQ ID NO: 1879638
accaguguaacuuagagua

SEQ ID NO: 1921653 - RNA, 19 nt, Artificial Sequence
  Description of Artificial Sequence: Synthetic oligonucleotide
  Antisense strand to SEQ ID NO: 1921652
uacucuaaguuacacuggu

SEQ ID NO: 1921654 - RNA, 19 nt, Artificial Sequence
  Description of Artificial Sequence: Synthetic oligonucleotide
  Sense strand starting at position 578 of SEQ ID NO: 1879638
cuuagaguagucugaggaa

SEQ ID NO: 1921655 - RNA, 19 nt, Artificial Sequence
  Description of Artificial Sequence: Synthetic oligonucleotide
  Antisense strand to SEQ ID NO: 1921654
uuccucagacuacucuaag

SEQ ID NO: 1921656 - RNA, 19 nt, Artificial Sequence
  Description of Artificial Sequence: Synthetic oligonucleotide
  Sense strand starting at position 606 of SEQ ID NO: 1879638
agguaugggacuuagccua

SEQ ID NO: 1921657 - RNA, 19 nt, Artificial Sequence
  Description of Artificial Sequence: Synthetic oligonucleotide
  Antisense strand to SEQ ID NO: 1921656
uaggcuaagucccauaccu

SEQ ID NO: 1921658 - RNA, 19 nt, Artificial Sequence
  Description of Artificial Sequence: Synthetic oligonucleotide
  Sense strand starting at position 614 of SEQ ID NO: 1879638
gacuuagccuaguucuuga

SEQ ID NO: 1921659 - RNA, 19 nt, Artificial Sequence
  Description of Artificial Sequence: Synthetic oligonucleotide
  Antisense strand to SEQ ID NO: 1921658
ucaagaacuaggcuaaguc

SEQ ID NO: 1921660 - RNA, 19 nt, Artificial Sequence
  Description of Artificial Sequence: Synthetic oligonucleotide
  Sense strand starting at position 617 of SEQ ID NO: 1879638
uuagccuaguucuugaaag

SEQ ID NO: 1921661 - RNA, 19 nt, Artificial Sequence
  Description of Artificial Sequence: Synthetic oligonucleotide
  Antisense strand to SEQ ID NO: 1921660
cuuucaagaacuaggcuaa

SEQ ID NO: 1921662 - RNA, 19 nt, Artificial Sequence
  Description of Artificial Sequence: Synthetic oligonucleotide
  Sense strand starting at position 619 of SEQ ID NO: 1879638
agccuaguucuugaaagau

SEQ ID NO: 1921663 - RNA, 19 nt, Artificial Sequence
  Description of Artificial Sequence: Synthetic oligonucleotide
  Antisense strand to SEQ ID NO: 1921662
aucuuucaagaacuaggcu

SEQ ID NO: 1921664 - RNA, 19 nt, Artificial Sequence
  Description of Artificial Sequence: Synthetic oligonucleotide
  Sense strand starting at position 662 of SEQ ID NO: 1879638
gaggguauaucaggagaua

SEQ ID NO: 1921665 - RNA, 19 nt, Artificial Sequence
  Description of Artificial Sequence: Synthetic oligonucleotide
  Antisense strand to SEQ ID NO: 1921664
uaucuccugauauacccuc

SEQ ID NO: 1921666 - RNA, 19 nt, Artificial Sequence
  Description of Artificial Sequence: Synthetic oligonucleotide
  Sense strand starting at position 674 of SEQ ID NO: 1879638
ggagauaggcagcauaagu

SEQ ID NO: 1921667 - RNA, 19 nt, Artificial Sequence
  Description of Artificial Sequence: Synthetic oligonucleotide
  Antisense strand to SEQ ID NO: 1921666
acuuaugcugccuaucucc

SEQ ID NO: 1921668 - RNA, 19 nt, Artificial Sequence
  Description of Artificial Sequence: Synthetic oligonucleotide
  Sense strand starting at position 722 of SEQ ID NO: 1879638
cugugacuuaguuguguua

SEQ ID NO: 1921669 - RNA, 19 nt, Artificial Sequence
  Description of Artificial Sequence: Synthetic oligonucleotide
  Antisense strand to SEQ ID NO: 1921668
uaacacaacuaagucacag

SEQ ID NO: 1921670 - RNA, 19 nt, Artificial Sequence
  Description of Artificial Sequence: Synthetic oligonucleotide
  Sense strand starting at position 813 of SEQ ID NO: 1879638
ucacgagaucuggagguua

SEQ ID NO: 1921671 - RNA, 19 nt, Artificial Sequence
  Description of Artificial Sequence: Synthetic oligonucleotide
  Antisense strand to SEQ ID NO: 1921670
uaaccuccagaucucguga

SEQ ID NO: 1921672 - RNA, 19 nt, Artificial Sequence
  Description of Artificial Sequence: Synthetic oligonucleotide
  Sense strand starting at position 815 of SEQ ID NO: 1879638
acgagaucuggagguuaag

SEQ ID NO: 1921673 - RNA, 19 nt, Artificial Sequence
  Description of Artificial Sequence: Synthetic oligonucleotide
  Antisense strand to SEQ ID NO: 1921672
cuuaaccuccagaucucgu

SEQ ID NO: 1921674 - RNA, 19 nt, Artificial Sequence
  Description of Artificial Sequence: Synthetic oligonucleotide
  Sense strand starting at position 1339 of SEQ ID NO: 1879638
guagaaugccuguaguccu

SEQ ID NO: 1921675 - RNA, 19 nt, Artificial Sequence
  Description of Artificial Sequence: Synthetic oligonucleotide
  Antisense strand to SEQ ID NO: 1921674
aggacuacaggcauucuac

SEQ ID NO: 1921676 - RNA, 19 nt, Artificial Sequence
  Description of Artificial Sequence: Synthetic oligonucleotide
  Sense strand starting at position 1364 of SEQ ID NO: 1879638
ucgguaggaucgcuagagu

SEQ ID NO: 1921677 - RNA, 19 nt, Artificial Sequence
  Description of Artificial Sequence: Synthetic oligonucleotide
  Antisense strand to SEQ ID NO: 1921676
acucuagcgauccuaccga

SEQ ID NO: 1921678 - RNA, 19 nt, Artificial Sequence
  Description of Artificial Sequence: Synthetic oligonucleotide
  Sense strand starting at position 1482 of SEQ ID NO: 1879638
uacaguguugucuagucaa

SEQ ID NO: 1921679 - RNA, 19 nt, Artificial Sequence
  Description of Artificial Sequence: Synthetic oligonucleotide
  Antisense strand to SEQ ID NO: 1921678
uugacuagacaacacugua

SEQ ID NO: 1921680 - RNA, 19 nt, Artificial Sequence
  Description of Artificial Sequence: Synthetic oligonucleotide
  Sense strand starting at position 1485 of SEQ ID NO: 1879638
aguguugucuagucaauau

SEQ ID NO: 1921681 - RNA, 19 nt, Artificial Sequence
  Description of Artificial Sequence: Synthetic oligonucleotide
  Antisense strand to SEQ ID NO: 1921680
auauugacuagacaacacu

SEQ ID NO: 1921682 - RNA, 19 nt, Artificial Sequence
  Description of Artificial Sequence: Synthetic oligonucleotide
  Sense strand starting at position 1558 of SEQ ID NO: 1879638
aaaguacacuggccagaua

SEQ ID NO: 1921683 - RNA, 19 nt, Artificial Sequence
  Description of Artificial Sequence: Synthetic oligonucleotide
  Antisense strand to SEQ ID NO: 1921682
uaucuggccaguguacuuu

SEQ ID NO: 1921684 - RNA, 19 nt, Artificial Sequence
  Description of Artificial Sequence: Synthetic oligonucleotide
  Sense strand starting at position 1569 of SEQ ID NO: 1879638
gccagauaggcacaucauu

SEQ ID NO: 1921685 - RNA, 19 nt, Artificial Sequence
  Description of Artificial Sequence: Synthetic oligonucleotide
  Antisense strand to SEQ ID NO: 1921684
aaugaugugccuaucuggc

SEQ ID NO: 1921686 - RNA, 19 nt, Artificial Sequence
  Description of Artificial Sequence: Synthetic oligonucleotide
  Sense strand starting at position 1690 of SEQ ID NO: 1879638
gguuuagacaacugugcuu

SEQ ID NO: 1921687 - RNA, 19 nt, Artificial Sequence
  Description of Artificial Sequence: Synthetic oligonucleotide
  Antisense strand to SEQ ID NO: 1921686
aagcacaguugucuaaacc

SEQ ID NO: 1921688 - RNA, 19 nt, Artificial Sequence
  Description of Artificial Sequence: Synthetic oligonucleotide
  Sense strand starting at position 1750 of SEQ ID NO: 1879638
aagguuugacugcauuaau

SEQ ID NO: 1921689 - RNA, 19 nt, Artificial Sequence
  Description of Artificial Sequence: Synthetic oligonucleotide
  Antisense strand to SEQ ID NO: 1921688
auuaaugcagucaaaccuu

SEQ ID NO: 1921690 - RNA, 19 nt, Artificial Sequence
  Description of Artificial Sequence: Synthetic oligonucleotide
  Sense strand starting at position 1789 of SEQ ID NO: 1879638
acuguccaccuguguuaga

SEQ ID NO: 1921691 - RNA, 19 nt, Artificial Sequence
  Description of Artificial Sequence: Synthetic oligonucleotide
  Antisense strand to SEQ ID NO: 1921690
ucuaacacagguggacagu

SEQ ID NO: 1921692 - RNA, 19 nt, Artificial Sequence
  Description of Artificial Sequence: Synthetic oligonucleotide
  Sense strand starting at position 1790 of SEQ ID NO: 1879638
cuguccaccuguguuagaa

SEQ ID NO: 1921693 - RNA, 19 nt, Artificial Sequence
  Description of Artificial Sequence: Synthetic oligonucleotide
  Antisense strand to SEQ ID NO: 1921692
uucuaacacagguggacag

SEQ ID NO: 1921694 - RNA, 19 nt, Artificial Sequence
  Description of Artificial Sequence: Synthetic oligonucleotide
  Sense strand starting at position 2204 of SEQ ID NO: 1879638
cgcucagcccacugguaaa

SEQ ID NO: 1921695 - RNA, 19 nt, Artificial Sequence
  Description of Artificial Sequence: Synthetic oligonucleotide
  Antisense strand to SEQ ID NO: 1921694
uuuaccagugggcugagcg

SEQ ID NO: 1921696 - RNA, 19 nt, Artificial Sequence
  Description of Artificial Sequence: Synthetic oligonucleotide
  Sense strand starting at position 2424 of SEQ ID NO: 1879638
gccuaugagcuuuaguacu

SEQ ID NO: 1921697 - RNA, 19 nt, Artificial Sequence
  Description of Artificial Sequence: Synthetic oligonucleotide
  Antisense strand to SEQ ID NO: 1921696
aguacuaaagcucauaggc

SEQ ID NO: 1921698 - RNA, 19 nt, Artificial Sequence
  Description of Artificial Sequence: Synthetic oligonucleotide
  Sense strand starting at position 2432 of SEQ ID NO: 1879638
gcuuuaguacugcccggua

SEQ ID NO: 1921699 - RNA, 19 nt, Artificial Sequence
  Description of Artificial Sequence: Synthetic oligonucleotide
  Antisense strand to SEQ ID NO: 1921698
uaccgggcaguacuaaagc

SEQ ID NO: 1921700 - RNA, 19 nt, Artificial Sequence
  Description of Artificial Sequence: Synthetic oligonucleotide
  Sense strand starting at position 2521 of SEQ ID NO: 1879638
cgaggcguccuggagaaga

SEQ ID NO: 1921701 - RNA, 19 nt, Artificial Sequence
  Description of Artificial Sequence: Synthetic oligonucleotide
  Antisense strand to SEQ ID NO: 1921700
ucuucuccaggacgccucg

SEQ ID NO: 1921702 - RNA, 19 nt, Artificial Sequence
  Description of Artificial Sequence: Synthetic oligonucleotide
  Sense strand starting at position 2531 of SEQ ID NO: 1879638
uggagaagauccgaucuga

SEQ ID NO: 1921703 - RNA, 19 nt, Artificial Sequence
  Description of Artificial Sequence: Synthetic oligonucleotide
  Antisense strand to SEQ ID NO: 1921702
ucagaucggaucuucucca

SEQ ID NO: 1921704 - RNA, 19 nt, Artificial Sequence
  Description of Artificial Sequence: Synthetic oligonucleotide
  Sense strand starting at position 2661 of SEQ ID NO: 1879638
gcaguuuggcauuaaggag

SEQ ID NO: 1921705 - RNA, 19 nt, Artificial Sequence
  Description of Artificial Sequence: Synthetic oligonucleotide
  Antisense strand to SEQ ID NO: 1921704
cuccuuaaugccaaacugc

SEQ ID NO: 1921706 - RNA, 19 nt, Artificial Sequence
  Description of Artificial Sequence: Synthetic oligonucleotide
  Sense strand starting at position 2953 of SEQ ID NO: 1879638
aggugagauccuuggauua

SEQ ID NO: 1921707 - RNA, 19 nt, Artificial Sequence
  Description of Artificial Sequence: Synthetic oligonucleotide
  Antisense strand to SEQ ID NO: 1921706
uaauccaaggaucucaccu

SEQ ID NO: 1921708 - RNA, 19 nt, Artificial Sequence
  Description of Artificial Sequence: Synthetic oligonucleotide
  Sense strand starting at position 3058 of SEQ ID NO: 1879638
cccagagauuccgcagagu

SEQ ID NO: 1921709 - RNA, 19 nt, Artificial Sequence
  Description of Artificial Sequence: Synthetic oligonucleotide
  Antisense strand to SEQ ID NO: 1921708
acucugcggaaucucuggg

SEQ ID NO: 1921710 - RNA, 19 nt, Artificial Sequence
  Description of Artificial Sequence: Synthetic oligonucleotide
  Sense strand starting at position 3061 of SEQ ID NO: 1879638
agagauuccgcagaguaca

SEQ ID NO: 1921711 - RNA, 19 nt, Artificial Sequence
  Description of Artificial Sequence: Synthetic oligonucleotide
  Antisense strand to SEQ ID NO: 1921710
uguacucugcggaaucucu

SEQ ID NO: 1921712 - RNA, 19 nt, Artificial Sequence
  Description of Artificial Sequence: Synthetic oligonucleotide
  Sense strand starting at position 3200 of SEQ ID NO: 1879638
cucgguuuaccuuggucau

SEQ ID NO: 1921713 - RNA, 19 nt, Artificial Sequence
  Description of Artificial Sequence: Synthetic oligonucleotide
  Antisense strand to SEQ ID NO: 1921712
augaccaagguaaaccgag

SEQ ID NO: 1921714 - RNA, 19 nt, Artificial Sequence
  Description of Artificial Sequence: Synthetic oligonucleotide
  Sense strand starting at position 3462 of SEQ ID NO: 1879638
gagcguucucuagcccuua

SEQ ID NO: 1921715 - RNA, 19 nt, Artificial Sequence
  Description of Artificial Sequence: Synthetic oligonucleotide
  Antisense strand to SEQ ID NO: 1921714
uaagggcuagagaacgcuc

SEQ ID NO: 1921716 - RNA, 19 nt, Artificial Sequence
  Description of Artificial Sequence: Synthetic oligonucleotide
  Sense strand starting at position 3625 of SEQ ID NO: 1879638
gcggacucaugaaagguga

SEQ ID NO: 1921717 - RNA, 19 nt, Artificial Sequence
  Description of Artificial Sequence: Synthetic oligonucleotide
  Antisense strand to SEQ ID NO: 1921716
ucaccuuucaugaguccgc

SEQ ID NO: 1921718 - RNA, 19 nt, Artificial Sequence
  Description of Artificial Sequence: Synthetic oligonucleotide
  Sense strand starting at position 3700 of SEQ ID NO: 1879638
ggcaguugagagugaauuc

SEQ ID NO: 1921719 - RNA, 19 nt, Artificial Sequence
  Description of Artificial Sequence: Synthetic oligonucleotide
  Antisense strand to SEQ ID NO: 1921718
gaauucacucucaacugcc

SEQ ID NO: 1921720 - RNA, 19 nt, Artificial Sequence
  Description of Artificial Sequence: Synthetic oligonucleotide
  Sense strand starting at position 3774 of SEQ ID NO: 1879638
uggauacaaugucuaaauc

SEQ ID NO: 1921721 - RNA, 19 nt, Artificial Sequence
  Description of Artificial Sequence: Synthetic oligonucleotide
  Antisense strand to SEQ ID NO: 1921720
gauuuagacauuguaucca

SEQ ID NO: 1921722 - RNA, 19 nt, Artificial Sequence
  Description of Artificial Sequence: Synthetic oligonucleotide
  Sense strand starting at position 3909 of SEQ ID NO: 1879638
cuuccauguuuauuggaga

SEQ ID NO: 1921723 - RNA, 19 nt, Artificial Sequence
  Description of Artificial Sequence: Synthetic oligonucleotide
  Antisense strand to SEQ ID NO: 1921722
ucuccaauaaacauggaag

SEQ ID NO: 1921724 - RNA, 19 nt, Artificial Sequence
  Description of Artificial Sequence: Synthetic oligonucleotide
  Sense strand starting at position 2 of SEQ ID NO: 1879639
uuagucaugcaguaaucua

SEQ ID NO: 1921725 - RNA, 19 nt, Artificial Sequence
  Description of Artificial Sequence: Synthetic oligonucleotide
  Antisense strand to SEQ ID NO: 1921724
uagauuacugcaugacuaa

SEQ ID NO: 1921726 - RNA, 19 nt, Artificial Sequence
  Description of Artificial Sequence: Synthetic oligonucleotide
  Sense strand starting at position 41 of SEQ ID NO: 1879639
uauguuggcucagugaagu

SEQ ID NO: 1921727 - RNA, 19 nt, Artificial Sequence
  Description of Artificial Sequence: Synthetic oligonucleotide
  Antisense strand to SEQ ID NO: 1921726
acuucacugagccaacaua

SEQ ID NO: 1921728 - RNA, 19 nt, Artificial Sequence
  Description of Artificial Sequence: Synthetic oligonucleotide
  Sense strand starting at position 138 of SEQ ID NO: 1879639
guuagaacuccugaaguua

SEQ ID NO: 1921729 - RNA, 19 nt, Artificial Sequence
  Description of Artificial Sequence: Synthetic oligonucleotide
  Antisense strand to SEQ ID NO: 1921728
uaacuucaggaguucuaac

SEQ ID NO: 1921730 - RNA, 19 nt, Artificial Sequence
  Description of Artificial Sequence: Synthetic oligonucleotide
  Sense strand starting at position 312 of SEQ ID NO: 1879639
uuuguagugagucacuaga

SEQ ID NO: 1921731 - RNA, 19 nt, Artificial Sequence
  Description of Artificial Sequence: Synthetic oligonucleotide
  Antisense strand to SEQ ID NO: 1921730
ucuagugacucacuacaaa

SEQ ID NO: 1921732 - RNA, 19 nt, Artificial Sequence
  Description of Artificial Sequence: Synthetic oligonucleotide
  Sense strand starting at position 314 of SEQ ID NO: 1879639
uguagugagucacuagaca

SEQ ID NO: 1921733 - RNA, 19 nt, Artificial Sequence
  Description of Artificial Sequence: Synthetic oligonucleotide
  Antisense strand to SEQ ID NO: 1921732
ugucuagugacucacuaca

SEQ ID NO: 1921734 - RNA, 19 nt, Artificial Sequence
  Description of Artificial Sequence: Synthetic oligonucleotide
  Sense strand starting at position 344 of SEQ ID NO: 1879639
ggguucuucucccuugacu

SEQ ID NO: 1921735 - RNA, 19 nt, Artificial Sequence
  Description of Artificial Sequence: Synthetic oligonucleotide
  Antisense strand to SEQ ID NO: 1921734
agucaagggagaagaaccc

SEQ ID NO: 1921736 - RNA, 19 nt, Artificial Sequence
  Description of Artificial Sequence: Synthetic oligonucleotide
  Sense strand starting at position 440 of SEQ ID NO: 1879639
agaucuaaauguucuaugu

SEQ ID NO: 1921737 - RNA, 19 nt, Artificial Sequence
  Description of Artificial Sequence: Synthetic oligonucleotide
  Antisense strand to SEQ ID NO: 1921736
acauagaacauuuagaucu

SEQ ID NO: 1921738 - RNA, 19 nt, Artificial Sequence
  Description of Artificial Sequence: Synthetic oligonucleotide
  Sense strand starting at position 857 of SEQ ID NO: 1879639
agccaaguauaguuacauu

SEQ ID NO: 1921739 - RNA, 19 nt, Artificial Sequence
  Description of Artificial Sequence: Synthetic oligonucleotide
  Antisense strand to SEQ ID NO: 1921738
aauguaacuauacuuggcu

SEQ ID NO: 1921740 - RNA, 19 nt, Artificial Sequence
  Description of Artificial Sequence: Synthetic oligonucleotide
  Sense strand starting at position 968 of SEQ ID NO: 1879639
cccucagagugcuuccagu

SEQ ID NO: 1921741 - RNA, 19 nt, Artificial Sequence
  Description of Artificial Sequence: Synthetic oligonucleotide
  Antisense strand to SEQ ID NO: 1921740
acuggaagcacucugaggg

SEQ ID NO: 1921742 - RNA, 19 nt, Artificial Sequence
  Description of Artificial Sequence: Synthetic oligonucleotide
  Sense strand starting at position 976 of SEQ ID NO: 1879639
gugcuuccagucuaaccua

SEQ ID NO: 1921743 - RNA, 19 nt, Artificial Sequence
  Description of Artificial Sequence: Synthetic oligonucleotide
  Antisense strand to SEQ ID NO: 1921742
uagguuagacuggaagcac

SEQ ID NO: 1921744 - RNA, 19 nt, Artificial Sequence
  Description of Artificial Sequence: Synthetic oligonucleotide
  Sense strand starting at position 1023 of SEQ ID NO: 1879639
aguacagaaugucuugaca

SEQ ID NO: 1921745 - RNA, 19 nt, Artificial Sequence
  Description of Artificial Sequence: Synthetic oligonucleotide
  Antisense strand to SEQ ID NO: 1921744
ugucaagacauucuguacu

SEQ ID NO: 1921746 - RNA, 19 nt, Artificial Sequence
  Description of Artificial Sequence: Synthetic oligonucleotide
  Sense strand starting at position 1108 of SEQ ID NO: 1879639
aguucuuauggaugaguag

SEQ ID NO: 1921747 - RNA, 19 nt, Artificial Sequence
  Description of Artificial Sequence: Synthetic oligonucleotide
  Antisense strand to SEQ ID NO: 1921746
cuacucauccauaagaacu

SEQ ID NO: 1921748 - RNA, 19 nt, Artificial Sequence
  Description of Artificial Sequence: Synthetic oligonucleotide
  Sense strand starting at position 1119 of SEQ ID NO: 1879639
augaguagcaguuagcaaa

SEQ ID NO: 1921749 - RNA, 19 nt, Artificial Sequence
  Description of Artificial Sequence: Synthetic oligonucleotide
  Antisense strand to SEQ ID NO: 1921748
uuugcuaacugcuacucau

SEQ ID NO: 1921750 - RNA, 19 nt, Artificial Sequence
  Description of Artificial Sequence: Synthetic oligonucleotide
  Sense strand starting at position 1221 of SEQ ID NO: 1879639
uuugguaugacauagguua

SEQ ID NO: 1921751 - RNA, 19 nt, Artificial Sequence
  Description of Artificial Sequence: Synthetic oligonucleotide
  Antisense strand to SEQ ID NO: 1921750
uaaccuaugucauaccaaa

SEQ ID NO: 1921752 - RNA, 19 nt, Artificial Sequence
  Description of Artificial Sequence: Synthetic oligonucleotide
  Sense strand starting at position 1223 of SEQ ID NO: 1879639
ugguaugacauagguuaaa

SEQ ID NO: 1921753 - RNA, 19 nt, Artificial Sequence
  Description of Artificial Sequence: Synthetic oligonucleotide
  Antisense strand to SEQ ID NO: 1921752
uuuaaccuaugucauacca

SEQ ID NO: 1921754 - RNA, 19 nt, Artificial Sequence
  Description of Artificial Sequence: Synthetic oligonucleotide
  Sense strand starting at position 1248 of SEQ ID NO: 1879639
aguggaaaguguuaaggau

SEQ ID NO: 1921755 - RNA, 19 nt, Artificial Sequence
  Description of Artificial Sequence: Synthetic oligonucleotide
  Antisense strand to SEQ ID NO: 1921754
auccuuaacacuuuccacu

SEQ ID NO: 1921756 - RNA, 19 nt, Artificial Sequence
  Description of Artificial Sequence: Synthetic oligonucleotide
  Sense strand starting at position 1411 of SEQ ID NO: 1879639
ggcgguauacgccugugau

SEQ ID NO: 1921757 - RNA, 19 nt, Artificial Sequence
  Description of Artificial Sequence: Synthetic oligonucleotide
  Antisense strand to SEQ ID NO: 1921756
aucacaggcguauaccgcc

SEQ ID NO: 1921758 - RNA, 19 nt, Artificial Sequence
  Description of Artificial Sequence: Synthetic oligonucleotide
  Sense strand starting at position 1590 of SEQ ID NO: 1879639
guaccuuagguccaaacaa

SEQ ID NO: 1921759 - RNA, 19 nt, Artificial Sequence
  Description of Artificial Sequence: Synthetic oligonucleotide
  Antisense strand to SEQ ID NO: 1921758
uuguuuggaccuaagguac

SEQ ID NO: 1921760 - RNA, 19 nt, Artificial Sequence
  Description of Artificial Sequence: Synthetic oligonucleotide
  Sense strand starting at position 1632 of SEQ ID NO: 1879639
gcgcuuacugugguaugca

SEQ ID NO: 1921761 - RNA, 19 nt, Artificial Sequence
  Description of Artificial Sequence: Synthetic oligonucleotide
  Antisense strand to SEQ ID NO: 1921760
ugcauaccacaguaagcgc

SEQ ID NO: 1921762 - RNA, 19 nt, Artificial Sequence
  Description of Artificial Sequence: Synthetic oligonucleotide
  Sense strand starting at position 1705 of SEQ ID NO: 1879639
aagguagguuccgugcauu

SEQ ID NO: 1921763 - RNA, 19 nt, Artificial Sequence
  Description of Artificial Sequence: Synthetic oligonucleotide
  Antisense strand to SEQ ID NO: 1921762
aaugcacggaaccuaccuu

SEQ ID NO: 1921764 - RNA, 19 nt, Artificial Sequence
  Description of Artificial Sequence: Synthetic oligonucleotide
  Sense strand starting at position 1708 of SEQ ID NO: 1879639
guagguuccgugcauuaca

SEQ ID NO: 1921765 - RNA, 19 nt, Artificial Sequence
  Description of Artificial Sequence: Synthetic oligonucleotide
  Antisense strand to SEQ ID NO: 1921764
uguaaugcacggaaccuac

SEQ ID NO: 1921766 - RNA, 19 nt, Artificial Sequence
  Description of Artificial Sequence: Synthetic oligonucleotide
  Sense strand starting at position 1711 of SEQ ID NO: 1879639
gguuccgugcauuacagau

SEQ ID NO: 1921767 - RNA, 19 nt, Artificial Sequence
  Description of Artificial Sequence: Synthetic oligonucleotide
  Antisense strand to SEQ ID NO: 1921766
aucuguaaugcacggaacc

SEQ ID NO: 1921768 - RNA, 19 nt, Artificial Sequence
  Description of Artificial Sequence: Synthetic oligonucleotide
  Sense strand starting at position 1715 of SEQ ID NO: 1879639
ccgugcauuacagauaaga

SEQ ID NO: 1921769 - RNA, 19 nt, Artificial Sequence
  Description of Artificial Sequence: Synthetic oligonucleotide
  Antisense strand to SEQ ID NO: 1921768
ucuuaucuguaaugcacgg

SEQ ID NO: 1921770 - RNA, 19 nt, Artificial Sequence
  Description of Artificial Sequence: Synthetic oligonucleotide
  Sense strand starting at position 1785 of SEQ ID NO: 1879639
aguaauggagcugaaaguu

SEQ ID NO: 1921771 - RNA, 19 nt, Artificial Sequence
  Description of Artificial Sequence: Synthetic oligonucleotide
  Antisense strand to SEQ ID NO: 1921770
aacuuucagcuccauuacu

SEQ ID NO: 1921772 - RNA, 19 nt, Artificial Sequence
  Description of Artificial Sequence: Synthetic oligonucleotide
  Sense strand starting at position 1795 of SEQ ID NO: 1879639
cugaaaguuuagucuaggu

SEQ ID NO: 1921773 - RNA, 19 nt, Artificial Sequence
  Description of Artificial Sequence: Synthetic oligonucleotide
  Antisense strand to SEQ ID NO: 1921772
accuagacuaaacuuucag

SEQ ID NO: 1921774 - RNA, 19 nt, Artificial Sequence
  Description of Artificial Sequence: Synthetic oligonucleotide
  Sense strand starting at position 1797 of SEQ ID NO: 1879639
gaaaguuuagucuaggucu

SEQ ID NO: 1921775 - RNA, 19 nt, Artificial Sequence
  Description of Artificial Sequence: Synthetic oligonucleotide
  Antisense strand to SEQ ID NO: 1921774
agaccuagacuaaacuuuc

SEQ ID NO: 1921776 - RNA, 19 nt, Artificial Sequence
  Description of Artificial Sequence: Synthetic oligonucleotide
  Sense strand starting at position 1800 of SEQ ID NO: 1879639
aguuuagucuaggucugga

SEQ ID NO: 1921777 - RNA, 19 nt, Artificial Sequence
  Description of Artificial Sequence: Synthetic oligonucleotide
  Antisense strand to SEQ ID NO: 1921776
uccagaccuagacuaaacu

SEQ ID NO: 1921778 - RNA, 19 nt, Artificial Sequence
  Description of Artificial Sequence: Synthetic oligonucleotide
  Sense strand starting at position 2665 of SEQ ID NO: 1879639
augaauuagcaauagcacu

SEQ ID NO: 1921779 - RNA, 19 nt, Artificial Sequence
  Description of Artificial Sequence: Synthetic oligonucleotide
  Antisense strand to SEQ ID NO: 1921778
agugcuauugcuaauucau

SEQ ID NO: 1921780 - RNA, 19 nt, Artificial Sequence
  Description of Artificial Sequence: Synthetic oligonucleotide
  Sense strand starting at position 2887 of SEQ ID NO: 1879639
gaucacaggugcucauaau

SEQ ID NO: 1921781 - RNA, 19 nt, Artificial Sequence
  Description of Artificial Sequence: Synthetic oligonucleotide
  Antisense strand to SEQ ID NO: 1921780
auuaugagcaccugugauc

SEQ ID NO: 1921782 - RNA, 19 nt, Artificial Sequence
  Description of Artificial Sequence: Synthetic oligonucleotide
  Sense strand starting at position 2899 of SEQ ID NO: 1879639
ucauaaucaugccuggcua

SEQ ID NO: 1921783 - RNA, 19 nt, Artificial Sequence
  Description of Artificial Sequence: Synthetic oligonucleotide
  Antisense strand to SEQ ID NO: 1921782
uagccaggcaugauuauga

SEQ ID NO: 1921784 - RNA, 19 nt, Artificial Sequence
  Description of Artificial Sequence: Synthetic oligonucleotide
  Sense strand starting at position 3186 of SEQ ID NO: 1879639
gcuaucaagcuaugagaaa

SEQ ID NO: 1921785 - RNA, 19 nt, Artificial Sequence
  Description of Artificial Sequence: Synthetic oligonucleotide
  Antisense strand to SEQ ID NO: 1921784
uuucucauagcuugauagc

SEQ ID NO: 1921786 - RNA, 19 nt, Artificial Sequence
  Description of Artificial Sequence: Synthetic oligonucleotide
  Sense strand starting at position 3425 of SEQ ID NO: 1879639
cuggauacaugucauuaca

SEQ ID NO: 1921787 - RNA, 19 nt, Artificial Sequence
  Description of Artificial Sequence: Synthetic oligonucleotide
  Antisense strand to SEQ ID NO: 1921786
uguaaugacauguauccag

SEQ ID NO: 1921788 - RNA, 19 nt, Artificial Sequence
  Description of Artificial Sequence: Synthetic oligonucleotide
  Sense strand starting at position 3495 of SEQ ID NO: 1879639
aauuauggucucuggguga

SEQ ID NO: 1921789 - RNA, 19 nt, Artificial Sequence
  Description of Artificial Sequence: Synthetic oligonucleotide
  Antisense strand to SEQ ID NO: 1921788
ucacccagagaccauaauu

SEQ ID NO: 1921790 - RNA, 19 nt, Artificial Sequence
  Description of Artificial Sequence: Synthetic oligonucleotide
  Sense strand starting at position 3498 of SEQ ID NO: 1879639
uauggucucugggugauaa

SEQ ID NO: 1921791 - RNA, 19 nt, Artificial Sequence
  Description of Artificial Sequence: Synthetic oligonucleotide
  Antisense strand to SEQ ID NO: 1921790
uuaucacccagagaccaua

SEQ ID NO: 1921792 - RNA, 19 nt, Artificial Sequence
  Description of Artificial Sequence: Synthetic oligonucleotide
  Sense strand starting at position 3499 of SEQ ID NO: 1879639
auggucucugggugauaau

SEQ ID NO: 1921793 - RNA, 19 nt, Artificial Sequence
  Description of Artificial Sequence: Synthetic oligonucleotide
  Antisense strand to SEQ ID NO: 1921792
auuaucacccagagaccau

SEQ ID NO: 1921794 - RNA, 19 nt, Artificial Sequence
  Description of Artificial Sequence: Synthetic oligonucleotide
  Sense strand starting at position 3591 of SEQ ID NO: 1879639
gcuauauauggagggauag

SEQ ID NO: 1921795 - RNA, 19 nt, Artificial Sequence
  Description of Artificial Sequence: Synthetic oligonucleotide
  Antisense strand to SEQ ID NO: 1921794
cuaucccuccauauauagc

SEQ ID NO: 1921796 - RNA, 19 nt, Artificial Sequence
  Description of Artificial Sequence: Synthetic oligonucleotide
  Sense strand starting at position 3891 of SEQ ID NO: 1879639
cuugaugacugauuaggua

SEQ ID NO: 1921797 - RNA, 19 nt, Artificial Sequence
  Description of Artificial Sequence: Synthetic oligonucleotide
  Antisense strand to SEQ ID NO: 1921796
uaccuaaucagucaucaag

SEQ ID NO: 1921798 - RNA, 19 nt, Artificial Sequence
  Description of Artificial Sequence: Synthetic oligonucleotide
  Sense strand starting at position 3894 of SEQ ID NO: 1879639
gaugacugauuagguaaga

SEQ ID NO: 1921799 - RNA, 19 nt, Artificial Sequence
  Description of Artificial Sequence: Synthetic oligonucleotide
  Antisense strand to SEQ ID NO: 1921798
ucuuaccuaaucagucauc

SEQ ID NO: 1921800 - RNA, 19 nt, Artificial Sequence
  Description of Artificial Sequence: Synthetic oligonucleotide
  Sense strand starting at position 3924 of SEQ ID NO: 1879639
gcuggugaguggucacauu

SEQ ID NO: 1921801 - RNA, 19 nt, Artificial Sequence
  Description of Artificial Sequence: Synthetic oligonucleotide
  Antisense strand to SEQ ID NO: 1921800
aaugugaccacucaccagc

SEQ ID NO: 1921802 - RNA, 19 nt, Artificial Sequence
  Description of Artificial Sequence: Synthetic oligonucleotide
  Sense strand starting at position 3946 of SEQ ID NO: 1879639
gagaaauggcuuugaauau

SEQ ID NO: 1921803 - RNA, 19 nt, Artificial Sequence
  Description of Artificial Sequence: Synthetic oligonucleotide
  Antisense strand to SEQ ID NO: 1921802
auauucaaagccauuucuc

SEQ ID NO: 1921804 - RNA, 19 nt, Artificial Sequence
  Description of Artificial Sequence: Synthetic oligonucleotide
  Sense strand starting at position 37 of SEQ ID NO: 1879640
ugacuucugguguaaguaa

SEQ ID NO: 1921805 - RNA, 19 nt, Artificial Sequence
  Description of Artificial Sequence: Synthetic oligonucleotide
  Antisense strand to SEQ ID NO: 1921804
uuacuuacaccagaaguca

SEQ ID NO: 1921806 - RNA, 19 nt, Artificial Sequence
  Description of Artificial Sequence: Synthetic oligonucleotide
  Sense strand starting at position 44 of SEQ ID NO: 1879640
ugguguaaguaaucaauaa

SEQ ID NO: 1921807 - RNA, 19 nt, Artificial Sequence
  Description of Artificial Sequence: Synthetic oligonucleotide
  Antisense strand to SEQ ID NO: 1921806
uuauugauuacuuacacca

SEQ ID NO: 1921808 - RNA, 19 nt, Artificial Sequence
  Description of Artificial Sequence: Synthetic oligonucleotide
  Sense strand starting at position 114 of SEQ ID NO: 1879640
agaccaacaugguaauaga

SEQ ID NO: 1921809 - RNA, 19 nt, Artificial Sequence
  Description of Artificial Sequence: Synthetic oligonucleotide
  Antisense strand to SEQ ID NO: 1921808
ucuauuaccauguuggucu

SEQ ID NO: 1921810 - RNA, 19 nt, Artificial Sequence
  Description of Artificial Sequence: Synthetic oligonucleotide
  Sense strand starting at position 182 of SEQ ID NO: 1879640
ccacacauguucuuacgaa

SEQ ID NO: 1921811 - RNA, 19 nt, Artificial Sequence
  Description of Artificial Sequence: Synthetic oligonucleotide
  Antisense strand to SEQ ID NO: 1921810
uucguaagaacaugugugg

SEQ ID NO: 1921812 - RNA, 19 nt, Artificial Sequence
  Description of Artificial Sequence: Synthetic oligonucleotide
  Sense strand starting at position 241 of SEQ ID NO: 1879640
uguaaauguggagagcauu

SEQ ID NO: 1921813 - RNA, 19 nt, Artificial Sequence
  Description of Artificial Sequence: Synthetic oligonucleotide
  Antisense strand to SEQ ID NO: 1921812
aaugcucuccacauuuaca

SEQ ID NO: 1921814 - RNA, 19 nt, Artificial Sequence
  Description of Artificial Sequence: Synthetic oligonucleotide
  Sense strand starting at position 517 of SEQ ID NO: 1879640
cuacaauucuagguaucag

SEQ ID NO: 1921815 - RNA, 19 nt, Artificial Sequence
  Description of Artificial Sequence: Synthetic oligonucleotide
  Antisense strand to SEQ ID NO: 1921814
cugauaccuagaauuguag

SEQ ID NO: 1921816 - RNA, 19 nt, Artificial Sequence
  Description of Artificial Sequence: Synthetic oligonucleotide
  Sense strand starting at position 565 of SEQ ID NO: 1879640
uggcuacguaaagauaaua

SEQ ID NO: 1921817 - RNA, 19 nt, Artificial Sequence
  Description of Artificial Sequence: Synthetic oligonucleotide
  Antisense strand to SEQ ID NO: 1921816
uauuaucuuuacguagcca

SEQ ID NO: 1921818 - RNA, 19 nt, Artificial Sequence
  Description of Artificial Sequence: Synthetic oligonucleotide
  Sense strand starting at position 670 of SEQ ID NO: 1879640
gugcucuucccauaucaua

SEQ ID NO: 1921819 - RNA, 19 nt, Artificial Sequence
  Description of Artificial Sequence: Synthetic oligonucleotide
  Antisense strand to SEQ ID NO: 1921818
uaugauaugggaagagcac

SEQ ID NO: 1921820 - RNA, 19 nt, Artificial Sequence
  Description of Artificial Sequence: Synthetic oligonucleotide
  Sense strand starting at position 732 of SEQ ID NO: 1879640
ugagaaaguuaauaaccaa

SEQ ID NO: 1921821 - RNA, 19 nt, Artificial Sequence
  Description of Artificial Sequence: Synthetic oligonucleotide
  Antisense strand to SEQ ID NO: 1921820
uugguuauuaacuuucuca

SEQ ID NO: 1921822 - RNA, 19 nt, Artificial Sequence
  Description of Artificial Sequence: Synthetic oligonucleotide
  Sense strand starting at position 888 of SEQ ID NO: 1879640
uggucauuagaacguuaga

SEQ ID NO: 1921823 - RNA, 19 nt, Artificial Sequence
  Description of Artificial Sequence: Synthetic oligonucleotide
  Antisense strand to SEQ ID NO: 1921822
ucuaacguucuaaugacca

SEQ ID NO: 1921824 - RNA, 19 nt, Artificial Sequence
  Description of Artificial Sequence: Synthetic oligonucleotide
  Sense strand starting at position 1051 of SEQ ID NO: 1879640
ugguaacccugauccaguu

SEQ ID NO: 1921825 - RNA, 19 nt, Artificial Sequence
  Description of Artificial Sequence: Synthetic oligonucleotide
  Antisense strand to SEQ ID NO: 1921824
aacuggaucaggguuacca

SEQ ID NO: 1921826 - RNA, 19 nt, Artificial Sequence
  Description of Artificial Sequence: Synthetic oligonucleotide
  Sense strand starting at position 1064 of SEQ ID NO: 1879640
ccaguuuaauguccacauu

SEQ ID NO: 1921827 - RNA, 19 nt, Artificial Sequence
  Description of Artificial Sequence: Synthetic oligonucleotide
  Antisense strand to SEQ ID NO: 1921826
aauguggacauuaaacugg

SEQ ID NO: 1921828 - RNA, 19 nt, Artificial Sequence
  Description of Artificial Sequence: Synthetic oligonucleotide
  Sense strand starting at position 1408 of SEQ ID NO: 1879640
agcacaguuccuuauagau

SEQ ID NO: 1921829 - RNA, 19 nt, Artificial Sequence
  Description of Artificial Sequence: Synthetic oligonucleotide
  Antisense strand to SEQ ID NO: 1921828
aucuauaaggaacugugcu

SEQ ID NO: 1921830 - RNA, 19 nt, Artificial Sequence
  Description of Artificial Sequence: Synthetic oligonucleotide
  Sense strand starting at position 1467 of SEQ ID NO: 1879640
accauagcuguuuauguaa

SEQ ID NO: 1921831 - RNA, 19 nt, Artificial Sequence
  Description of Artificial Sequence: Synthetic oligonucleotide
  Antisense strand to SEQ ID NO: 1921830
uuacauaaacagcuauggu

SEQ ID NO: 1921832 - RNA, 19 nt, Artificial Sequence
  Description of Artificial Sequence: Synthetic oligonucleotide
  Sense strand starting at position 1574 of SEQ ID NO: 1879640
ggacuucugccauguugaa

SEQ ID NO: 1921833 - RNA, 19 nt, Artificial Sequence
  Description of Artificial Sequence: Synthetic oligonucleotide
  Antisense strand to SEQ ID NO: 1921832
uucaacauggcagaagucc

SEQ ID NO: 1921834 - RNA, 19 nt, Artificial Sequence
  Description of Artificial Sequence: Synthetic oligonucleotide
  Sense strand starting at position 1602 of SEQ ID NO: 1879640
auaauuagacugugauguu

SEQ ID NO: 1921835 - RNA, 19 nt, Artificial Sequence
  Description of Artificial Sequence: Synthetic oligonucleotide
  Antisense strand to SEQ ID NO: 1921834
aacaucacagucuaauuau

SEQ ID NO: 1921836 - RNA, 19 nt, Artificial Sequence
  Description of Artificial Sequence: Synthetic oligonucleotide
  Sense strand starting at position 1705 of SEQ ID NO: 1879640
ggcagaaugcuugaggcca

SEQ ID NO: 1921837 - RNA, 19 nt, Artificial Sequence
  Description of Artificial Sequence: Synthetic oligonucleotide
  Antisense strand to SEQ ID NO: 1921836
uggccucaagcauucugcc

SEQ ID NO: 1921838 - RNA, 19 nt, Artificial Sequence
  Description of Artificial Sequence: Synthetic oligonucleotide
  Sense strand starting at position 1844 of SEQ ID NO: 1879640
auagcagaauggcuagaaa

SEQ ID NO: 1921839 - RNA, 19 nt, Artificial Sequence
  Description of Artificial Sequence: Synthetic oligonucleotide
  Antisense strand to SEQ ID NO: 1921838
uuucuagccauucugcuau

SEQ ID NO: 1921840 - RNA, 19 nt, Artificial Sequence
  Description of Artificial Sequence: Synthetic oligonucleotide
  Sense strand starting at position 1918 of SEQ ID NO: 1879640
agccuauucgcucauagau

SEQ ID NO: 1921841 - RNA, 19 nt, Artificial Sequence
  Description of Artificial Sequence: Synthetic oligonucleotide
  Antisense strand to SEQ ID NO: 1921840
aucuaugagcgaauaggcu

SEQ ID NO: 1921842 - RNA, 19 nt, Artificial Sequence
  Description of Artificial Sequence: Synthetic oligonucleotide
  Sense strand starting at position 2002 of SEQ ID NO: 1879640
acgauuacaugaguuaaua

SEQ ID NO: 1921843 - RNA, 19 nt, Artificial Sequence
  Description of Artificial Sequence: Synthetic oligonucleotide
  Antisense strand to SEQ ID NO: 1921842
uauuaacucauguaaucgu

SEQ ID NO: 1921844 - RNA, 19 nt, Artificial Sequence
  Description of Artificial Sequence: Synthetic oligonucleotide
  Sense strand starting at position 2161 of SEQ ID NO: 1879640
cacagcucugagcaguaaa

SEQ ID NO: 1921845 - RNA, 19 nt, Artificial Sequence
  Description of Artificial Sequence: Synthetic oligonucleotide
  Antisense strand to SEQ ID NO: 1921844
uuuacugcucagagcugug

SEQ ID NO: 1921846 - RNA, 19 nt, Artificial Sequence
  Description of Artificial Sequence: Synthetic oligonucleotide
  Sense strand starting at position 2164 of SEQ ID NO: 1879640
agcucugagcaguaaagca

SEQ ID NO: 1921847 - RNA, 19 nt, Artificial Sequence
  Description of Artificial Sequence: Synthetic oligonucleotide
  Antisense strand to SEQ ID NO: 1921846
ugcuuuacugcucagagcu

SEQ ID NO: 1921848 - RNA, 19 nt, Artificial Sequence
  Description of Artificial Sequence: Synthetic oligonucleotide
  Sense strand starting at position 2406 of SEQ ID NO: 1879640
gaaagaauucuguagccug

SEQ ID NO: 1921849 - RNA, 19 nt, Artificial Sequence
  Description of Artificial Sequence: Synthetic oligonucleotide
  Antisense strand to SEQ ID NO: 1921848
caggcuacagaauucuuuc

SEQ ID NO: 1921850 - RNA, 19 nt, Artificial Sequence
  Description of Artificial Sequence: Synthetic oligonucleotide
  Sense strand starting at position 2728 of SEQ ID NO: 1879640
auagcuugcaugugagaga

SEQ ID NO: 1921851 - RNA, 19 nt, Artificial Sequence
  Description of Artificial Sequence: Synthetic oligonucleotide
  Antisense strand to SEQ ID NO: 1921850
ucucucacaugcaagcuau

SEQ ID NO: 1921852 - RNA, 19 nt, Artificial Sequence
  Description of Artificial Sequence: Synthetic oligonucleotide
  Sense strand starting at position 2733 of SEQ ID NO: 1879640
uugcaugugagagagcuaa

SEQ ID NO: 1921853 - RNA, 19 nt, Artificial Sequence
  Description of Artificial Sequence: Synthetic oligonucleotide
  Antisense strand to SEQ ID NO: 1921852
uuagcucucucacaugcaa

SEQ ID NO: 1921854 - RNA, 19 nt, Artificial Sequence
  Description of Artificial Sequence: Synthetic oligonucleotide
  Sense strand starting at position 2956 of SEQ ID NO: 1879640
cagcucguuugacuauaaa

SEQ ID NO: 1921855 - RNA, 19 nt, Artificial Sequence
  Description of Artificial Sequence: Synthetic oligonucleotide
  Antisense strand to SEQ ID NO: 1921854
uuuauagucaaacgagcug

SEQ ID NO: 1921856 - RNA, 19 nt, Artificial Sequence
  Description of Artificial Sequence: Synthetic oligonucleotide
  Sense strand starting at position 3041 of SEQ ID NO: 1879640
caagacauaccuugaguag

SEQ ID NO: 1921857 - RNA, 19 nt, Artificial Sequence
  Description of Artificial Sequence: Synthetic oligonucleotide
  Antisense strand to SEQ ID NO: 1921856
cuacucaagguaugucuug

SEQ ID NO: 1921858 - RNA, 19 nt, Artificial Sequence
  Description of Artificial Sequence: Synthetic oligonucleotide
  Sense strand starting at position 3044 of SEQ ID NO: 1879640
gacauaccuugaguagauc

SEQ ID NO: 1921859 - RNA, 19 nt, Artificial Sequence
  Description of Artificial Sequence: Synthetic oligonucleotide
  Antisense strand to SEQ ID NO: 1921858
gaucuacucaagguauguc

SEQ ID NO: 1921860 - RNA, 19 nt, Artificial Sequence
  Description of Artificial Sequence: Synthetic oligonucleotide
  Sense strand starting at position 3104 of SEQ ID NO: 1879640
gccgauguugcugaagaca

SEQ ID NO: 1921861 - RNA, 19 nt, Artificial Sequence
  Description of Artificial Sequence: Synthetic oligonucleotide
  Antisense strand to SEQ ID NO: 1921860
ugucuucagcaacaucggc

SEQ ID NO: 1921862 - RNA, 19 nt, Artificial Sequence
  Description of Artificial Sequence: Synthetic oligonucleotide
  Sense strand starting at position 3132 of SEQ ID NO: 1879640
ucacguaaggauuacuauu

SEQ ID NO: 1921863 - RNA, 19 nt, Artificial Sequence
  Description of Artificial Sequence: Synthetic oligonucleotide
  Antisense strand to SEQ ID NO: 1921862
aauaguaauccuuacguga

SEQ ID NO: 1921864 - RNA, 19 nt, Artificial Sequence
  Description of Artificial Sequence: Synthetic oligonucleotide
  Sense strand starting at position 3178 of SEQ ID NO: 1879640
agugaaaugcuuuagguuu

SEQ ID NO: 1921865 - RNA, 19 nt, Artificial Sequence
  Description of Artificial Sequence: Synthetic oligonucleotide
  Antisense strand to SEQ ID NO: 1921864
aaaccuaaagcauuucacu

SEQ ID NO: 1921866 - RNA, 19 nt, Artificial Sequence
  Description of Artificial Sequence: Synthetic oligonucleotide
  Sense strand starting at position 3331 of SEQ ID NO: 1879640
gcuuacaaauuacugagau

SEQ ID NO: 1921867 - RNA, 19 nt, Artificial Sequence
  Description of Artificial Sequence: Synthetic oligonucleotide
  Antisense strand to SEQ ID NO: 1921866
aucucaguaauuuguaagc

SEQ ID NO: 1921868 - RNA, 19 nt, Artificial Sequence
  Description of Artificial Sequence: Synthetic oligonucleotide
  Sense strand starting at position 3335 of SEQ ID NO: 1879640
acaaauuacugagaugauc

SEQ ID NO: 1921869 - RNA, 19 nt, Artificial Sequence
  Description of Artificial Sequence: Synthetic oligonucleotide
  Antisense strand to SEQ ID NO: 1921868
gaucaucucaguaauuugu

SEQ ID NO: 1921870 - RNA, 19 nt, Artificial Sequence
  Description of Artificial Sequence: Synthetic oligonucleotide
  Sense strand starting at position 3663 of SEQ ID NO: 1879640
ucuagaguuucuuucugua

SEQ ID NO: 1921871 - RNA, 19 nt, Artificial Sequence
  Description of Artificial Sequence: Synthetic oligonucleotide
  Antisense strand to SEQ ID NO: 1921870
uacagaaagaaacucuaga

SEQ ID NO: 1921872 - RNA, 19 nt, Artificial Sequence
  Description of Artificial Sequence: Synthetic oligonucleotide
  Sense strand starting at position 3665 of SEQ ID NO: 1879640
uagaguuucuuucuguaga

SEQ ID NO: 1921873 - RNA, 19 nt, Artificial Sequence
  Description of Artificial Sequence: Synthetic oligonucleotide
  Antisense strand to SEQ ID NO: 1921872
ucuacagaaagaaacucua

SEQ ID NO: 1921874 - RNA, 19 nt, Artificial Sequence
  Description of Artificial Sequence: Synthetic oligonucleotide
  Sense strand starting at position 3667 of SEQ ID NO: 1879640
gaguuucuuucuguagaua

SEQ ID NO: 1921875 - RNA, 19 nt, Artificial Sequence
  Description of Artificial Sequence: Synthetic oligonucleotide
  Antisense strand to SEQ ID NO: 1921874
uaucuacagaaagaaacuc

SEQ ID NO: 1921876 - RNA, 19 nt, Artificial Sequence
  Description of Artificial Sequence: Synthetic oligonucleotide
  Sense strand starting at position 3668 of SEQ ID NO: 1879640
aguuucuuucuguagauau

SEQ ID NO: 1921877 - RNA, 19 nt, Artificial Sequence
  Description of Artificial Sequence: Synthetic oligonucleotide
  Antisense strand to SEQ ID NO: 1921876
auaucuacagaaagaaacu

SEQ ID NO: 1921878 - RNA, 19 nt, Artificial Sequence
  Description of Artificial Sequence: Synthetic oligonucleotide
  Sense strand starting at position 3670 of SEQ ID NO: 1879640
uuucuuucuguagauauga

SEQ ID NO: 1921879 - RNA, 19 nt, Artificial Sequence
  Description of Artificial Sequence: Synthetic oligonucleotide
  Antisense strand to SEQ ID NO: 1921878
ucauaucuacagaaagaaa

SEQ ID NO: 1921880 - RNA, 19 nt, Artificial Sequence
  Description of Artificial Sequence: Synthetic oligonucleotide
  Sense strand starting at position 3793 of SEQ ID NO: 1879640
cccuccauaucaguaagua

SEQ ID NO: 1921881 - RNA, 19 nt, Artificial Sequence
  Description of Artificial Sequence: Synthetic oligonucleotide
  Antisense strand to SEQ ID NO: 1921880
uacuuacugauauggaggg

SEQ ID NO: 1921882 - RNA, 19 nt, Artificial Sequence
  Description of Artificial Sequence: Synthetic oligonucleotide
  Sense strand starting at position 3794 of SEQ ID NO: 1879640
ccuccauaucaguaaguag

SEQ ID NO: 1921883 - RNA, 19 nt, Artificial Sequence
  Description of Artificial Sequence: Synthetic oligonucleotide
  Antisense strand to SEQ ID NO: 1921882
cuacuuacugauauggagg

SEQ ID NO: 1921884 - RNA, 19 nt, Artificial Sequence
  Description of Artificial Sequence: Synthetic oligonucleotide
  Sense strand starting at position 93 of SEQ ID NO: 1879641
gucugaaucugacucaggu

SEQ ID NO: 1921885 - RNA, 19 nt, Artificial Sequence
  Description of Artificial Sequence: Synthetic oligonucleotide
  Antisense strand to SEQ ID NO: 1921884
accugagucagauucagac

SEQ ID NO: 1921886 - RNA, 19 nt, Artificial Sequence
  Description of Artificial Sequence: Synthetic oligonucleotide
  Sense strand starting at position 103 of SEQ ID NO: 1879641
gacucagguuucccugaaa

SEQ ID NO: 1921887 - RNA, 19 nt, Artificial Sequence
  Description of Artificial Sequence: Synthetic oligonucleotide
  Antisense strand to SEQ ID NO: 1921886
uuucagggaaaccugaguc

SEQ ID NO: 1921888 - RNA, 19 nt, Artificial Sequence
  Description of Artificial Sequence: Synthetic oligonucleotide
  Sense strand starting at position 238 of SEQ ID NO: 1879641
ggaaguugucagggcuaca

SEQ ID NO: 1921889 - RNA, 19 nt, Artificial Sequence
  Description of Artificial Sequence: Synthetic oligonucleotide
  Antisense strand to SEQ ID NO: 1921888
uguagcccugacaacuucc

SEQ ID NO: 1921890 - RNA, 19 nt, Artificial Sequence
  Description of Artificial Sequence: Synthetic oligonucleotide
  Sense strand starting at position 241 of SEQ ID NO: 1879641
aguugucagggcuacaaau

SEQ ID NO: 1921891 - RNA, 19 nt, Artificial Sequence
  Description of Artificial Sequence: Synthetic oligonucleotide
  Antisense strand to SEQ ID NO: 1921890
auuuguagcccugacaacu

SEQ ID NO: 1921892 - RNA, 19 nt, Artificial Sequence
  Description of Artificial Sequence: Synthetic oligonucleotide
  Sense strand starting at position 378 of SEQ ID NO: 1879641
aggagaugucagggcuaca

SEQ ID NO: 1921893 - RNA, 19 nt, Artificial Sequence
  Description of Artificial Sequence: Synthetic oligonucleotide
  Antisense strand to SEQ ID NO: 1921892
uguagcccugacaucuccu

SEQ ID NO: 1921894 - RNA, 19 nt, Artificial Sequence
  Description of Artificial Sequence: Synthetic oligonucleotide
  Sense strand starting at position 381 of SEQ ID NO: 1879641
agaugucagggcuacaagu

SEQ ID NO: 1921895 - RNA, 19 nt, Artificial Sequence
  Description of Artificial Sequence: Synthetic oligonucleotide
  Antisense strand to SEQ ID NO: 1921894
acuuguagcccugacaucu

SEQ ID NO: 1921896 - RNA, 19 nt, Artificial Sequence
  Description of Artificial Sequence: Synthetic oligonucleotide
  Sense strand starting at position 445 of SEQ ID NO: 1879641
accagaugucaggguugca

SEQ ID NO: 1921897 - RNA, 19 nt, Artificial Sequence
  Description of Artificial Sequence: Synthetic oligonucleotide
  Antisense strand to SEQ ID NO: 1921896
ugcaacccugacaucuggu

SEQ ID NO: 1921898 - RNA, 19 nt, Artificial Sequence
  Description of Artificial Sequence: Synthetic oligonucleotide
  Sense strand starting at position 448 of SEQ ID NO: 1879641
agaugucaggguugcaagu

SEQ ID NO: 1921899 - RNA, 19 nt, Artificial Sequence
  Description of Artificial Sequence: Synthetic oligonucleotide
  Antisense strand to SEQ ID NO: 1921898
acuugcaacccugacaucu

SEQ ID NO: 1921900 - RNA, 19 nt, Artificial Sequence
  Description of Artificial Sequence: Synthetic oligonucleotide
  Sense strand starting at position 464 of SEQ ID NO: 1879641
aguacugggaucugaucua

SEQ ID NO: 1921901 - RNA, 19 nt, Artificial Sequence
  Description of Artificial Sequence: Synthetic oligonucleotide
  Antisense strand to SEQ ID NO: 1921900
uagaucagaucccaguacu

SEQ ID NO: 1921902 - RNA, 19 nt, Artificial Sequence
  Description of Artificial Sequence: Synthetic oligonucleotide
  Sense strand starting at position 515 of SEQ ID NO: 1879641
aggagaugucaggguugca

SEQ ID NO: 1921903 - RNA, 19 nt, Artificial Sequence
  Description of Artificial Sequence: Synthetic oligonucleotide
  Antisense strand to SEQ ID NO: 1921902
ugcaacccugacaucuccu

SEQ ID NO: 1921904 - RNA, 19 nt, Artificial Sequence
  Description of Artificial Sequence: Synthetic oligonucleotide
  Sense strand starting at position 901 of SEQ ID NO: 1879641
uccucucugcuugagaugu

SEQ ID NO: 1921905 - RNA, 19 nt, Artificial Sequence
  Description of Artificial Sequence: Synthetic oligonucleotide
  Antisense strand to SEQ ID NO: 1921904
acaucucaagcagagagga

SEQ ID NO: 1921906 - RNA, 19 nt, Artificial Sequence
  Description of Artificial Sequence: Synthetic oligonucleotide
  Sense strand starting at position 1014 of SEQ ID NO: 1879641
auuauagagcucugacuga

SEQ ID NO: 1921907 - RNA, 19 nt, Artificial Sequence
  Description of Artificial Sequence: Synthetic oligonucleotide
  Antisense strand to SEQ ID NO: 1921906
ucagucagagcucuauaau

SEQ ID NO: 1921908 - RNA, 19 nt, Artificial Sequence
  Description of Artificial Sequence: Synthetic oligonucleotide
  Sense strand starting at position 1149 of SEQ ID NO: 1879641
acaaucaaugcaugagugu

SEQ ID NO: 1921909 - RNA, 19 nt, Artificial Sequence
  Description of Artificial Sequence: Synthetic oligonucleotide
  Antisense strand to SEQ ID NO: 1921908
acacucaugcauugauugu

SEQ ID NO: 1921910 - RNA, 19 nt, Artificial Sequence
  Description of Artificial Sequence: Synthetic oligonucleotide
  Sense strand starting at position 1205 of SEQ ID NO: 1879641
gccagugcucuucugcuau

SEQ ID NO: 1921911 - RNA, 19 nt, Artificial Sequence
  Description of Artificial Sequence: Synthetic oligonucleotide
  Antisense strand to SEQ ID NO: 1921910
auagcagaagagcacuggc

SEQ ID NO: 1921912 - RNA, 19 nt, Artificial Sequence
  Description of Artificial Sequence: Synthetic oligonucleotide
  Sense strand starting at position 1307 of SEQ ID NO: 1879641
aggaaauuaucuuugcuuc

SEQ ID NO: 1921913 - RNA, 19 nt, Artificial Sequence
  Description of Artificial Sequence: Synthetic oligonucleotide
  Antisense strand to SEQ ID NO: 1921912
gaagcaaagauaauuuccu

SEQ ID NO: 1921914 - RNA, 19 nt, Artificial Sequence
  Description of Artificial Sequence: Synthetic oligonucleotide
  Sense strand starting at position 1352 of SEQ ID NO: 1879641
uuaucuggagccugauaag

SEQ ID NO: 1921915 - RNA, 19 nt, Artificial Sequence
  Description of Artificial Sequence: Synthetic oligonucleotide
  Antisense strand to SEQ ID NO: 1921914
cuuaucaggcuccagauaa

SEQ ID NO: 1921916 - RNA, 19 nt, Artificial Sequence
  Description of Artificial Sequence: Synthetic oligonucleotide
  Sense strand starting at position 1361 of SEQ ID NO: 1879641
gccugauaaggcuaauccu

SEQ ID NO: 1921917 - RNA, 19 nt, Artificial Sequence
  Description of Artificial Sequence: Synthetic oligonucleotide
  Antisense strand to SEQ ID NO: 1921916
aggauuagccuuaucaggc

SEQ ID NO: 1921918 - RNA, 19 nt, Artificial Sequence
  Description of Artificial Sequence: Synthetic oligonucleotide
  Sense strand starting at position 1658 of SEQ ID NO: 1879641
uugcuuguacccgggaaga

SEQ ID NO: 1921919 - RNA, 19 nt, Artificial Sequence
  Description of Artificial Sequence: Synthetic oligonucleotide
  Antisense strand to SEQ ID NO: 1921918
ucuucccggguacaagcaa

SEQ ID NO: 1921920 - RNA, 19 nt, Artificial Sequence
  Description of Artificial Sequence: Synthetic oligonucleotide
  Sense strand starting at position 1852 of SEQ ID NO: 1879641
gcauuaaccuaagugagac

SEQ ID NO: 1921921 - RNA, 19 nt, Artificial Sequence
  Description of Artificial Sequence: Synthetic oligonucleotide
  Antisense strand to SEQ ID NO: 1921920
gucucacuuagguuaaugc

SEQ ID NO: 1921922 - RNA, 19 nt, Artificial Sequence
  Description of Artificial Sequence: Synthetic oligonucleotide
  Sense strand starting at position 1893 of SEQ ID NO: 1879641
cacauaagcguaugaggaa

SEQ ID NO: 1921923 - RNA, 19 nt, Artificial Sequence
  Description of Artificial Sequence: Synthetic oligonucleotide
  Antisense strand to SEQ ID NO: 1921922
uuccucauacgcuuaugug

SEQ ID NO: 1921924 - RNA, 19 nt, Artificial Sequence
  Description of Artificial Sequence: Synthetic oligonucleotide
  Sense strand starting at position 2056 of SEQ ID NO: 1879641
caacuuguucggcaaauuc

SEQ ID NO: 1921925 - RNA, 19 nt, Artificial Sequence
  Description of Artificial Sequence: Synthetic oligonucleotide
  Antisense strand to SEQ ID NO: 1921924
gaauuugccgaacaaguug

SEQ ID NO: 1921926 - RNA, 19 nt, Artificial Sequence
  Description of Artificial Sequence: Synthetic oligonucleotide
  Sense strand starting at position 2342 of SEQ ID NO: 1879641
ccaagaucuggccacuaua

SEQ ID NO: 1921927 - RNA, 19 nt, Artificial Sequence
  Description of Artificial Sequence: Synthetic oligonucleotide
  Antisense strand to SEQ ID NO: 1921926
uauaguggccagaucuugg

SEQ ID NO: 1921928 - RNA, 19 nt, Artificial Sequence
  Description of Artificial Sequence: Synthetic oligonucleotide
  Sense strand starting at position 2416 of SEQ ID NO: 1879641
acgaaacacucuguucuga

SEQ ID NO: 1921929 - RNA, 19 nt, Artificial Sequence
  Description of Artificial Sequence: Synthetic oligonucleotide
  Antisense strand to SEQ ID NO: 1921928
ucagaacagaguguuucgu

SEQ ID NO: 1921930 - RNA, 19 nt, Artificial Sequence
  Description of Artificial Sequence: Synthetic oligonucleotide
  Sense strand starting at position 2449 of SEQ ID NO: 1879641
gggacacucgaccguagaa

SEQ ID NO: 1921931 - RNA, 19 nt, Artificial Sequence
  Description of Artificial Sequence: Synthetic oligonucleotide
  Antisense strand to SEQ ID NO: 1921930
uucuacggucgaguguccc

SEQ ID NO: 1921932 - RNA, 19 nt, Artificial Sequence
  Description of Artificial Sequence: Synthetic oligonucleotide
  Sense strand starting at position 2459 of SEQ ID NO: 1879641
accguagaaugaucuguuu

SEQ ID NO: 1921933 - RNA, 19 nt, Artificial Sequence
  Description of Artificial Sequence: Synthetic oligonucleotide
  Antisense strand to SEQ ID NO: 1921932
aaacagaucauucuacggu

SEQ ID NO: 1921934 - RNA, 19 nt, Artificial Sequence
  Description of Artificial Sequence: Synthetic oligonucleotide
  Sense strand starting at position 2461 of SEQ ID NO: 1879641
cguagaaugaucuguuuac

SEQ ID NO: 1921935 - RNA, 19 nt, Artificial Sequence
  Description of Artificial Sequence: Synthetic oligonucleotide
  Antisense strand to SEQ ID NO: 1921934
guaaacagaucauucuacg

SEQ ID NO: 1921936 - RNA, 19 nt, Artificial Sequence
  Description of Artificial Sequence: Synthetic oligonucleotide
  Sense strand starting at position 2462 of SEQ ID NO: 1879641
guagaaugaucuguuuacg

SEQ ID NO: 1921937 - RNA, 19 nt, Artificial Sequence
  Description of Artificial Sequence: Synthetic oligonucleotide
  Antisense strand to SEQ ID NO: 1921936
cguaaacagaucauucuac

SEQ ID NO: 1921938 - RNA, 19 nt, Artificial Sequence
  Description of Artificial Sequence: Synthetic oligonucleotide
  Sense strand starting at position 2465 of SEQ ID NO: 1879641
gaaugaucuguuuacggau

SEQ ID NO: 1921939 - RNA, 19 nt, Artificial Sequence
  Description of Artificial Sequence: Synthetic oligonucleotide
  Antisense strand to SEQ ID NO: 1921938
auccguaaacagaucauuc

SEQ ID NO: 1921940 - RNA, 19 nt, Artificial Sequence
  Description of Artificial Sequence: Synthetic oligonucleotide
  Sense strand starting at position 2471 of SEQ ID NO: 1879641
ucuguuuacggaugagguu

SEQ ID NO: 1921941 - RNA, 19 nt, Artificial Sequence
  Description of Artificial Sequence: Synthetic oligonucleotide
  Antisense strand to SEQ ID NO: 1921940
aaccucauccguaaacaga

SEQ ID NO: 1921942 - RNA, 19 nt, Artificial Sequence
  Description of Artificial Sequence: Synthetic oligonucleotide
  Sense strand starting at position 2478 of SEQ ID NO: 1879641
acggaugagguucagaguu

SEQ ID NO: 1921943 - RNA, 19 nt, Artificial Sequence
  Description of Artificial Sequence: Synthetic oligonucleotide
  Antisense strand to SEQ ID NO: 1921942
aacucugaaccucauccgu

SEQ ID NO: 1921944 - RNA, 19 nt, Artificial Sequence
  Description of Artificial Sequence: Synthetic oligonucleotide
  Sense strand starting at position 3259 of SEQ ID NO: 1879641
gaggacaucugaguuccau

SEQ ID NO: 1921945 - RNA, 19 nt, Artificial Sequence
  Description of Artificial Sequence: Synthetic oligonucleotide
  Antisense strand to SEQ ID NO: 1921944
auggaacucagauguccuc

SEQ ID NO: 1921946 - RNA, 19 nt, Artificial Sequence
  Description of Artificial Sequence: Synthetic oligonucleotide
  Sense strand starting at position 3317 of SEQ ID NO: 1879641
cugucuugauauuccugau

SEQ ID NO: 1921947 - RNA, 19 nt, Artificial Sequence
  Description of Artificial Sequence: Synthetic oligonucleotide
  Antisense strand to SEQ ID NO: 1921946
aucaggaauaucaagacag

SEQ ID NO: 1921948 - RNA, 19 nt, Artificial Sequence
  Description of Artificial Sequence: Synthetic oligonucleotide
  Sense strand starting at position 3321 of SEQ ID NO: 1879641
cuugauauuccugaucgaa

SEQ ID NO: 1921949 - RNA, 19 nt, Artificial Sequence
  Description of Artificial Sequence: Synthetic oligonucleotide
  Antisense strand to SEQ ID NO: 1921948
uucgaucaggaauaucaag

SEQ ID NO: 1921950 - RNA, 19 nt, Artificial Sequence
  Description of Artificial Sequence: Synthetic oligonucleotide
  Sense strand starting at position 3323 of SEQ ID NO: 1879641
ugauauuccugaucgaaga

SEQ ID NO: 1921951 - RNA, 19 nt, Artificial Sequence
  Description of Artificial Sequence: Synthetic oligonucleotide
  Antisense strand to SEQ ID NO: 1921950
ucuucgaucaggaauauca

SEQ ID NO: 1921952 - RNA, 19 nt, Artificial Sequence
  Description of Artificial Sequence: Synthetic oligonucleotide
  Sense strand starting at position 3324 of SEQ ID NO: 1879641
gauauuccugaucgaagau

SEQ ID NO: 1921953 - RNA, 19 nt, Artificial Sequence
  Description of Artificial Sequence: Synthetic oligonucleotide
  Antisense strand to SEQ ID NO: 1921952
aucuucgaucaggaauauc

SEQ ID NO: 1921954 - RNA, 19 nt, Artificial Sequence
  Description of Artificial Sequence: Synthetic oligonucleotide
  Sense strand starting at position 3431 of SEQ ID NO: 1879641
aagugcuuuccauguauga

SEQ ID NO: 1921955 - RNA, 19 nt, Artificial Sequence
  Description of Artificial Sequence: Synthetic oligonucleotide
  Antisense strand to SEQ ID NO: 1921954
ucauacauggaaagcacuu

SEQ ID NO: 1921956 - RNA, 19 nt, Artificial Sequence
  Description of Artificial Sequence: Synthetic oligonucleotide
  Sense strand starting at position 3433 of SEQ ID NO: 1879641
gugcuuuccauguaugaga

SEQ ID NO: 1921957 - RNA, 19 nt, Artificial Sequence
  Description of Artificial Sequence: Synthetic oligonucleotide
  Antisense strand to SEQ ID NO: 1921956
ucucauacauggaaagcac

SEQ ID NO: 1921958 - RNA, 19 nt, Artificial Sequence
  Description of Artificial Sequence: Synthetic oligonucleotide
  Sense strand starting at position 3726 of SEQ ID NO: 1879641
acuuuagaagugugaugau

SEQ ID NO: 1921959 - RNA, 19 nt, Artificial Sequence
  Description of Artificial Sequence: Synthetic oligonucleotide
  Antisense strand to SEQ ID NO: 1921958
aucaucacacuucuaaagu

SEQ ID NO: 1921960 - RNA, 19 nt, Artificial Sequence
  Description of Artificial Sequence: Synthetic oligonucleotide
  Sense strand starting at position 3820 of SEQ ID NO: 1879641
ugaucacaucaccgcuaau

SEQ ID NO: 1921961 - RNA, 19 nt, Artificial Sequence
  Description of Artificial Sequence: Synthetic oligonucleotide
  Antisense strand to SEQ ID NO: 1921960
auuagcggugaugugauca

SEQ ID NO: 1921962 - RNA, 19 nt, Artificial Sequence
  Description of Artificial Sequence: Synthetic oligonucleotide
  Sense strand starting at position 3852 of SEQ ID NO: 1879641
ugcuacguggcuguuaaua

SEQ ID NO: 1921963 - RNA, 19 nt, Artificial Sequence
  Description of Artificial Sequence: Synthetic oligonucleotide
  Antisense strand to SEQ ID NO: 1921962
uauuaacagccacguagca

SEQ ID NO: 1921964 - RNA, 19 nt, Artificial Sequence
  Description of Artificial Sequence: Synthetic oligonucleotide
  Sense strand starting at position 286 of SEQ ID NO: 1879642
ucuuauacacagugaucuu

SEQ ID NO: 1921965 - RNA, 19 nt, Artificial Sequence
  Description of Artificial Sequence: Synthetic oligonucleotide
  Antisense strand to SEQ ID NO: 1921964
aagaucacuguguauaaga

SEQ ID NO: 1921966 - RNA, 19 nt, Artificial Sequence
  Description of Artificial Sequence: Synthetic oligonucleotide
  Sense strand starting at position 335 of SEQ ID NO: 1879642
caagacguugcugaagaua

SEQ ID NO: 1921967 - RNA, 19 nt, Artificial Sequence
  Description of Artificial Sequence: Synthetic oligonucleotide
  Antisense strand to SEQ ID NO: 1921966
uaucuucagcaacgucuug

SEQ ID NO: 1921968 - RNA, 19 nt, Artificial Sequence
  Description of Artificial Sequence: Synthetic oligonucleotide
  Sense strand starting at position 338 of SEQ ID NO: 1879642
gacguugcugaagauagaa

SEQ ID NO: 1921969 - RNA, 19 nt, Artificial Sequence
  Description of Artificial Sequence: Synthetic oligonucleotide
  Antisense strand to SEQ ID NO: 1921968
uucuaucuucagcaacguc

SEQ ID NO: 1921970 - RNA, 19 nt, Artificial Sequence
  Description of Artificial Sequence: Synthetic oligonucleotide
  Sense strand starting at position 362 of SEQ ID NO: 1879642
ugcugauauggcuauugag

SEQ ID NO: 1921971 - RNA, 19 nt, Artificial Sequence
  Description of Artificial Sequence: Synthetic oligonucleotide
  Antisense strand to SEQ ID NO: 1921970
cucaauagccauaucagca

SEQ ID NO: 1921972 - RNA, 19 nt, Artificial Sequence
  Description of Artificial Sequence: Synthetic oligonucleotide
  Sense strand starting at position 575 of SEQ ID NO: 1879642
aggaauuuguccuacugga

SEQ ID NO: 1921973 - RNA, 19 nt, Artificial Sequence
  Description of Artificial Sequence: Synthetic oligonucleotide
  Antisense strand to SEQ ID NO: 1921972
uccaguaggacaaauuccu

SEQ ID NO: 1921974 - RNA, 19 nt, Artificial Sequence
  Description of Artificial Sequence: Synthetic oligonucleotide
  Sense strand starting at position 601 of SEQ ID NO: 1879642
auugcuugggauuagugau

SEQ ID NO: 1921975 - RNA, 19 nt, Artificial Sequence
  Description of Artificial Sequence: Synthetic oligonucleotide
  Antisense strand to SEQ ID NO: 1921974
aucacuaaucccaagcaau

SEQ ID NO: 1921976 - RNA, 19 nt, Artificial Sequence
  Description of Artificial Sequence: Synthetic oligonucleotide
  Sense strand starting at position 648 of SEQ ID NO: 1879642
guuaaaugggaaugucgau

SEQ ID NO: 1921977 - RNA, 19 nt, Artificial Sequence
  Description of Artificial Sequence: Synthetic oligonucleotide
  Antisense strand to SEQ ID NO: 1921976
aucgacauucccauuuaac

SEQ ID NO: 1921978 - RNA, 19 nt, Artificial Sequence
  Description of Artificial Sequence: Synthetic oligonucleotide
  Sense strand starting at position 654 of SEQ ID NO: 1879642
ugggaaugucgauaacggu

SEQ ID NO: 1921979 - RNA, 19 nt, Artificial Sequence
  Description of Artificial Sequence: Synthetic oligonucleotide
  Antisense strand to SEQ ID NO: 1921978
accguuaucgacauuccca

SEQ ID NO: 1921980 - RNA, 19 nt, Artificial Sequence
  Description of Artificial Sequence: Synthetic oligonucleotide
  Sense strand starting at position 874 of SEQ ID NO: 1879642
cugcuauggguugagacuu

SEQ ID NO: 1921981 - RNA, 19 nt, Artificial Sequence
  Description of Artificial Sequence: Synthetic oligonucleotide
  Antisense strand to SEQ ID NO: 1921980
aagucucaacccauagcag

SEQ ID NO: 1921982 - RNA, 19 nt, Artificial Sequence
  Description of Artificial Sequence: Synthetic oligonucleotide
  Sense strand starting at position 896 of SEQ ID NO: 1879642
ggauguugggauuggguua

SEQ ID NO: 1921983 - RNA, 19 nt, Artificial Sequence
  Description of Artificial Sequence: Synthetic oligonucleotide
  Antisense strand to SEQ ID NO: 1921982
uaacccaaucccaacaucc

SEQ ID NO: 1921984 - RNA, 19 nt, Artificial Sequence
  Description of Artificial Sequence: Synthetic oligonucleotide
  Sense strand starting at position 897 of SEQ ID NO: 1879642
gauguugggauuggguuaa

SEQ ID NO: 1921985 - RNA, 19 nt, Artificial Sequence
  Description of Artificial Sequence: Synthetic oligonucleotide
  Antisense strand to SEQ ID NO: 1921984
uuaacccaaucccaacauc

SEQ ID NO: 1921986 - RNA, 19 nt, Artificial Sequence
  Description of Artificial Sequence: Synthetic oligonucleotide
  Sense strand starting at position 901 of SEQ ID NO: 1879642
uugggauuggguuaaugua

SEQ ID NO: 1921987 - RNA, 19 nt, Artificial Sequence
  Description of Artificial Sequence: Synthetic oligonucleotide
  Antisense strand to SEQ ID NO: 1921986
uacauuaacccaaucccaa

SEQ ID NO: 1921988 - RNA, 19 nt, Artificial Sequence
  Description of Artificial Sequence: Synthetic oligonucleotide
  Sense strand starting at position 965 of SEQ ID NO: 1879642
ccuguaauaggcugaacaa

SEQ ID NO: 1921989 - RNA, 19 nt, Artificial Sequence
  Description of Artificial Sequence: Synthetic oligonucleotide
  Antisense strand to SEQ ID NO: 1921988
uuguucagccuauuacagg

SEQ ID NO: 1921990 - RNA, 19 nt, Artificial Sequence
  Description of Artificial Sequence: Synthetic oligonucleotide
  Sense strand starting at position 966 of SEQ ID NO: 1879642
cuguaauaggcugaacaau

SEQ ID NO: 1921991 - RNA, 19 nt, Artificial Sequence
  Description of Artificial Sequence: Synthetic oligonucleotide
  Antisense strand to SEQ ID NO: 1921990
auuguucagccuauuacag

SEQ ID NO: 1921992 - RNA, 19 nt, Artificial Sequence
  Description of Artificial Sequence: Synthetic oligonucleotide
  Sense strand starting at position 1426 of SEQ ID NO: 1879642
uacugauagugauucccga

SEQ ID NO: 1921993 - RNA, 19 nt, Artificial Sequence
  Description of Artificial Sequence: Synthetic oligonucleotide
  Antisense strand to SEQ ID NO: 1921992
ucgggaaucacuaucagua

SEQ ID NO: 1921994 - RNA, 19 nt, Artificial Sequence
  Description of Artificial Sequence: Synthetic oligonucleotide
  Sense strand starting at position 1446 of SEQ ID NO: 1879642
ugcugacuucuagaacugu

SEQ ID NO: 1921995 - RNA, 19 nt, Artificial Sequence
  Description of Artificial Sequence: Synthetic oligonucleotide
  Antisense strand to SEQ ID NO: 1921994
acaguucuagaagucagca

SEQ ID NO: 1921996 - RNA, 19 nt, Artificial Sequence
  Description of Artificial Sequence: Synthetic oligonucleotide
  Sense strand starting at position 1624 of SEQ ID NO: 1879642
acuagaagucugcagcaau

SEQ ID NO: 1921997 - RNA, 19 nt, Artificial Sequence
  Description of Artificial Sequence: Synthetic oligonucleotide
  Antisense strand to SEQ ID NO: 1921996
auugcugcagacuucuagu

SEQ ID NO: 1921998 - RNA, 19 nt, Artificial Sequence
  Description of Artificial Sequence: Synthetic oligonucleotide
  Sense strand starting at position 1636 of SEQ ID NO: 1879642
cagcaauaggcuuaguauu

SEQ ID NO: 1921999 - RNA, 19 nt, Artificial Sequence
  Description of Artificial Sequence: Synthetic oligonucleotide
  Antisense strand to SEQ ID NO: 1921998
aauacuaagccuauugcug

SEQ ID NO: 1922000 - RNA, 19 nt, Artificial Sequence
  Description of Artificial Sequence: Synthetic oligonucleotide
  Sense strand starting at position 1873 of SEQ ID NO: 1879642
gaucuagagccacgaugau

SEQ ID NO: 1922001 - RNA, 19 nt, Artificial Sequence
  Description of Artificial Sequence: Synthetic oligonucleotide
  Antisense strand to SEQ ID NO: 1922000
aucaucguggcucuagauc

SEQ ID NO: 1922002 - RNA, 19 nt, Artificial Sequence
  Description of Artificial Sequence: Synthetic oligonucleotide
  Sense strand starting at position 1903 of SEQ ID NO: 1879642
accuucuuuggucacagaa

SEQ ID NO: 1922003 - RNA, 19 nt, Artificial Sequence
  Description of Artificial Sequence: Synthetic oligonucleotide
  Antisense strand to SEQ ID NO: 1922002
uucugugaccaaagaaggu

SEQ ID NO: 1922004 - RNA, 19 nt, Artificial Sequence
  Description of Artificial Sequence: Synthetic oligonucleotide
  Sense strand starting at position 2447 of SEQ ID NO: 1879642
ucaguuagaugagcucuaa

SEQ ID NO: 1922005 - RNA, 19 nt, Artificial Sequence
  Description of Artificial Sequence: Synthetic oligonucleotide
  Antisense strand to SEQ ID NO: 1922004
uuagagcucaucuaacuga

SEQ ID NO: 1922006 - RNA, 19 nt, Artificial Sequence
  Description of Artificial Sequence: Synthetic oligonucleotide
  Sense strand starting at position 2758 of SEQ ID NO: 1879642
ugaacucuacauugugacu

SEQ ID NO: 1922007 - RNA, 19 nt, Artificial Sequence
  Description of Artificial Sequence: Synthetic oligonucleotide
  Antisense strand to SEQ ID NO: 1922006
agucacaauguagaguuca

SEQ ID NO: 1922008 - RNA, 19 nt, Artificial Sequence
  Description of Artificial Sequence: Synthetic oligonucleotide
  Sense strand starting at position 2763 of SEQ ID NO: 1879642
ucuacauugugacugacaa

SEQ ID NO: 1922009 - RNA, 19 nt, Artificial Sequence
  Description of Artificial Sequence: Synthetic oligonucleotide
  Antisense strand to SEQ ID NO: 1922008
uugucagucacaauguaga

SEQ ID NO: 1922010 - RNA, 19 nt, Artificial Sequence
  Description of Artificial Sequence: Synthetic oligonucleotide
  Sense strand starting at position 2764 of SEQ ID NO: 1879642
cuacauugugacugacaaa

SEQ ID NO: 1922011 - RNA, 19 nt, Artificial Sequence
  Description of Artificial Sequence: Synthetic oligonucleotide
  Antisense strand to SEQ ID NO: 1922010
uuugucagucacaauguag

SEQ ID NO: 1922012 - RNA, 19 nt, Artificial Sequence
  Description of Artificial Sequence: Synthetic oligonucleotide
  Sense strand starting at position 3023 of SEQ ID NO: 1879642
guucuauaauuccuuagag

SEQ ID NO: 1922013 - RNA, 19 nt, Artificial Sequence
  Description of Artificial Sequence: Synthetic oligonucleotide
  Antisense strand to SEQ ID NO: 1922012
cucuaaggaauuauagaac

SEQ ID NO: 1922014 - RNA, 19 nt, Artificial Sequence
  Description of Artificial Sequence: Synthetic oligonucleotide
  Sense strand starting at position 3123 of SEQ ID NO: 1879642
ccauaaauucuguguuaga

SEQ ID NO: 1922015 - RNA, 19 nt, Artificial Sequence
  Description of Artificial Sequence: Synthetic oligonucleotide
  Antisense strand to SEQ ID NO: 1922014
ucuaacacagaauuuaugg

SEQ ID NO: 1922016 - RNA, 19 nt, Artificial Sequence
  Description of Artificial Sequence: Synthetic oligonucleotide
  Sense strand starting at position 3294 of SEQ ID NO: 1879642
ugcucaugaguugacacau

SEQ ID NO: 1922017 - RNA, 19 nt, Artificial Sequence
  Description of Artificial Sequence: Synthetic oligonucleotide
  Antisense strand to SEQ ID NO: 1922016
augugucaacucaugagca

SEQ ID NO: 1922018 - RNA, 19 nt, Artificial Sequence
  Description of Artificial Sequence: Synthetic oligonucleotide
  Sense strand starting at position 3310 of SEQ ID NO: 1879642
cauugaaauuaugcaaggu

SEQ ID NO: 1922019 - RNA, 19 nt, Artificial Sequence
  Description of Artificial Sequence: Synthetic oligonucleotide
  Antisense strand to SEQ ID NO: 1922018
accuugcauaauuucaaug

SEQ ID NO: 1922020 - RNA, 19 nt, Artificial Sequence
  Description of Artificial Sequence: Synthetic oligonucleotide
  Sense strand starting at position 3314 of SEQ ID NO: 1879642
gaaauuaugcaagguugaa

SEQ ID NO: 1922021 - RNA, 19 nt, Artificial Sequence
  Description of Artificial Sequence: Synthetic oligonucleotide
  Antisense strand to SEQ ID NO: 1922020
uucaaccuugcauaauuuc

SEQ ID NO: 1922022 - RNA, 19 nt, Artificial Sequence
  Description of Artificial Sequence: Synthetic oligonucleotide
  Sense strand starting at position 3385 of SEQ ID NO: 1879642
cuaguuacauaggccuaaa

SEQ ID NO: 1922023 - RNA, 19 nt, Artificial Sequence
  Description of Artificial Sequence: Synthetic oligonucleotide
  Antisense strand to SEQ ID NO: 1922022
uuuaggccuauguaacuag

SEQ ID NO: 1922024 - RNA, 19 nt, Artificial Sequence
  Description of Artificial Sequence: Synthetic oligonucleotide
  Sense strand starting at position 3477 of SEQ ID NO: 1879642
gguauucuuccauauccua

SEQ ID NO: 1922025 - RNA, 19 nt, Artificial Sequence
  Description of Artificial Sequence: Synthetic oligonucleotide
  Antisense strand to SEQ ID NO: 1922024
uaggauauggaagaauacc

SEQ ID NO: 1922026 - RNA, 19 nt, Artificial Sequence
  Description of Artificial Sequence: Synthetic oligonucleotide
  Sense strand starting at position 3523 of SEQ ID NO: 1879642
gcaucaauuguugaaguga

SEQ ID NO: 1922027 - RNA, 19 nt, Artificial Sequence
  Description of Artificial Sequence: Synthetic oligonucleotide
  Antisense strand to SEQ ID NO: 1922026
ucacuucaacaauugaugc

SEQ ID NO: 1922028 - RNA, 19 nt, Artificial Sequence
  Description of Artificial Sequence: Synthetic oligonucleotide
  Sense strand starting at position 3777 of SEQ ID NO: 1879642
aaaguaucuguauauaggu

SEQ ID NO: 1922029 - RNA, 19 nt, Artificial Sequence
  Description of Artificial Sequence: Synthetic oligonucleotide
  Antisense strand to SEQ ID NO: 1922028
accuauauacagauacuuu

SEQ ID NO: 1922030 - RNA, 19 nt, Artificial Sequence
  Description of Artificial Sequence: Synthetic oligonucleotide
  Sense strand starting at position 3779 of SEQ ID NO: 1879642
aguaucuguauauagguua

SEQ ID NO: 1922031 - RNA, 19 nt, Artificial Sequence
  Description of Artificial Sequence: Synthetic oligonucleotide
  Antisense strand to SEQ ID NO: 1922030
uaaccuauauacagauacu

SEQ ID NO: 1922032 - RNA, 19 nt, Artificial Sequence
  Description of Artificial Sequence: Synthetic oligonucleotide
  Sense strand starting at position 3784 of SEQ ID NO: 1879642
cuguauauagguuauacga

SEQ ID NO: 1922033 - RNA, 19 nt, Artificial Sequence
  Description of Artificial Sequence: Synthetic oligonucleotide
  Antisense strand to SEQ ID NO: 1922032
ucguauaaccuauauacag

SEQ ID NO: 1922034 - RNA, 19 nt, Artificial Sequence
  Description of Artificial Sequence: Synthetic oligonucleotide
  Sense strand starting at position 3890 of SEQ ID NO: 1879642
ggaugacuguaauuacuug

SEQ ID NO: 1922035 - RNA, 19 nt, Artificial Sequence
  Description of Artificial Sequence: Synthetic oligonucleotide
  Antisense strand to SEQ ID NO: 1922034
caaguaauuacagucaucc

SEQ ID NO: 1922036 - RNA, 19 nt, Artificial Sequence
  Description of Artificial Sequence: Synthetic oligonucleotide
  Sense strand starting at position 3894 of SEQ ID NO: 1879642
gacuguaauuacuuggaac

SEQ ID NO: 1922037 - RNA, 19 nt, Artificial Sequence
  Description of Artificial Sequence: Synthetic oligonucleotide
  Antisense strand to SEQ ID NO: 1922036
guuccaaguaauuacaguc

SEQ ID NO: 1922038 - RNA, 19 nt, Artificial Sequence
  Description of Artificial Sequence: Synthetic oligonucleotide
  Sense strand starting at position 3896 of SEQ ID NO: 1879642
cuguaauuacuuggaacca

SEQ ID NO: 1922039 - RNA, 19 nt, Artificial Sequence
  Description of Artificial Sequence: Synthetic oligonucleotide
  Antisense strand to SEQ ID NO: 1922038
ugguuccaaguaauuacag

SEQ ID NO: 1922040 - RNA, 19 nt, Artificial Sequence
  Description of Artificial Sequence: Synthetic oligonucleotide
  Sense strand starting at position 3916 of SEQ ID NO: 1879642
cccugaccaugaucaguau

SEQ ID NO: 1922041 - RNA, 19 nt, Artificial Sequence
  Description of Artificial Sequence: Synthetic oligonucleotide
  Antisense strand to SEQ ID NO: 1922040
auacugaucauggucaggg

SEQ ID NO: 1922042 - RNA, 19 nt, Artificial Sequence
  Description of Artificial Sequence: Synthetic oligonucleotide
  Sense strand starting at position 3919 of SEQ ID NO: 1879642
ugaccaugaucaguauacu

SEQ ID NO: 1922043 - RNA, 19 nt, Artificial Sequence
  Description of Artificial Sequence: Synthetic oligonucleotide
  Antisense strand to SEQ ID NO: 1922042
aguauacugaucaugguca

SEQ ID NO: 1922044 - RNA, 19 nt, Artificial Sequence
  Description of Artificial Sequence: Synthetic oligonucleotide
  Sense strand starting at position 46 of SEQ ID NO: 1879643
uugguaucuauggaagguu

SEQ ID NO: 1922045 - RNA, 19 nt, Artificial Sequence
  Description of Artificial Sequence: Synthetic oligonucleotide
  Antisense strand to SEQ ID NO: 1922044
aaccuuccauagauaccaa

SEQ ID NO: 1922046 - RNA, 19 nt, Artificial Sequence
  Description of Artificial Sequence: Synthetic oligonucleotide
  Sense strand starting at position 274 of SEQ ID NO: 1879643
aaaucaaugguggguugaa

SEQ ID NO: 1922047 - RNA, 19 nt, Artificial Sequence
  Description of Artificial Sequence: Synthetic oligonucleotide
  Antisense strand to SEQ ID NO: 1922046
uucaacccaccauugauuu

SEQ ID NO: 1922048 - RNA, 19 nt, Artificial Sequence
  Description of Artificial Sequence: Synthetic oligonucleotide
  Sense strand starting at position 275 of SEQ ID NO: 1879643
aaucaaugguggguugaau

SEQ ID NO: 1922049 - RNA, 19 nt, Artificial Sequence
  Description of Artificial Sequence: Synthetic oligonucleotide
  Antisense strand to SEQ ID NO: 1922048
auucaacccaccauugauu

SEQ ID NO: 1922050 - RNA, 19 nt, Artificial Sequence
  Description of Artificial Sequence: Synthetic oligonucleotide
  Sense strand starting at position 322 of SEQ ID NO: 1879643
uggccaaguguauacuuau

SEQ ID NO: 1922051 - RNA, 19 nt, Artificial Sequence
  Description of Artificial Sequence: Synthetic oligonucleotide
  Antisense strand to SEQ ID NO: 1922050
auaaguauacacuuggcca

SEQ ID NO: 1922052 - RNA, 19 nt, Artificial Sequence
  Description of Artificial Sequence: Synthetic oligonucleotide
  Sense strand starting at position 329 of SEQ ID NO: 1879643
guguauacuuauuugaguc

SEQ ID NO: 1922053 - RNA, 19 nt, Artificial Sequence
  Description of Artificial Sequence: Synthetic oligonucleotide
  Antisense strand to SEQ ID NO: 1922052
gacucaaauaaguauacac

SEQ ID NO: 1922054 - RNA, 19 nt, Artificial Sequence
  Description of Artificial Sequence: Synthetic oligonucleotide
  Sense strand starting at position 342 of SEQ ID NO: 1879643
ugagucauccuuuauccac

SEQ ID NO: 1922055 - RNA, 19 nt, Artificial Sequence
  Description of Artificial Sequence: Synthetic oligonucleotide
  Antisense strand to SEQ ID NO: 1922054
guggauaaaggaugacuca

SEQ ID NO: 1922056 - RNA, 19 nt, Artificial Sequence
  Description of Artificial Sequence: Synthetic oligonucleotide
  Sense strand starting at position 359 of SEQ ID NO: 1879643
acaguaaauucgguaagac

SEQ ID NO: 1922057 - RNA, 19 nt, Artificial Sequence
  Description of Artificial Sequence: Synthetic oligonucleotide
  Antisense strand to SEQ ID NO: 1922056
gucuuaccgaauuuacugu

SEQ ID NO: 1922058 - RNA, 19 nt, Artificial Sequence
  Description of Artificial Sequence: Synthetic oligonucleotide
  Sense strand starting at position 360 of SEQ ID NO: 1879643
caguaaauucgguaagaca

SEQ ID NO: 1922059 - RNA, 19 nt, Artificial Sequence
  Description of Artificial Sequence: Synthetic oligonucleotide
  Antisense strand to SEQ ID NO: 1922058
ugucuuaccgaauuuacug

SEQ ID NO: 1922060 - RNA, 19 nt, Artificial Sequence
  Description of Artificial Sequence: Synthetic oligonucleotide
  Sense strand starting at position 534 of SEQ ID NO: 1879643
aggccuauguaacuagaau

SEQ ID NO: 1922061 - RNA, 19 nt, Artificial Sequence
  Description of Artificial Sequence: Synthetic oligonucleotide
  Antisense strand to SEQ ID NO: 1922060
auucuaguuacauaggccu

SEQ ID NO: 1922062 - RNA, 19 nt, Artificial Sequence
  Description of Artificial Sequence: Synthetic oligonucleotide
  Sense strand starting at position 624 of SEQ ID NO: 1879643
gugucaacucaugagcaca

SEQ ID NO: 1922063 - RNA, 19 nt, Artificial Sequence
  Description of Artificial Sequence: Synthetic oligonucleotide
  Antisense strand to SEQ ID NO: 1922062
ugugcucaugaguugacac

SEQ ID NO: 1922064 - RNA, 19 nt, Artificial Sequence
  Description of Artificial Sequence: Synthetic oligonucleotide
  Sense strand starting at position 681 of SEQ ID NO: 1879643
agagguugcaacuauugau

SEQ ID NO: 1922065 - RNA, 19 nt, Artificial Sequence
  Description of Artificial Sequence: Synthetic oligonucleotide
  Antisense strand to SEQ ID NO: 1922064
aucaauaguugcaaccucu

SEQ ID NO: 1922066 - RNA, 19 nt, Artificial Sequence
  Description of Artificial Sequence: Synthetic oligonucleotide
  Sense strand starting at position 687 of SEQ ID NO: 1879643
ugcaacuauugaucagauu

SEQ ID NO: 1922067 - RNA, 19 nt, Artificial Sequence
  Description of Artificial Sequence: Synthetic oligonucleotide
  Antisense strand to SEQ ID NO: 1922066
aaucugaucaauaguugca

SEQ ID NO: 1922068 - RNA, 19 nt, Artificial Sequence
  Description of Artificial Sequence: Synthetic oligonucleotide
  Sense strand starting at position 830 of SEQ ID NO: 1879643
gcacuuauguaaguaacaa

SEQ ID NO: 1922069 - RNA, 19 nt, Artificial Sequence
  Description of Artificial Sequence: Synthetic oligonucleotide
  Antisense strand to SEQ ID NO: 1922068
uuguuacuuacauaagugc

SEQ ID NO: 1922070 - RNA, 19 nt, Artificial Sequence
  Description of Artificial Sequence: Synthetic oligonucleotide
  Sense strand starting at position 932 of SEQ ID NO: 1879643
ggaaauguuaagugaugau

SEQ ID NO: 1922071 - RNA, 19 nt, Artificial Sequence
  Description of Artificial Sequence: Synthetic oligonucleotide
  Antisense strand to SEQ ID NO: 1922070
aucaucacuuaacauuucc

SEQ ID NO: 1922072 - RNA, 19 nt, Artificial Sequence
  Description of Artificial Sequence: Synthetic oligonucleotide
  Sense strand starting at position 1034 of SEQ ID NO: 1879643
ugaaauaaacugggagcuu

SEQ ID NO: 1922073 - RNA, 19 nt, Artificial Sequence
  Description of Artificial Sequence: Synthetic oligonucleotide
  Antisense strand to SEQ ID NO: 1922072
aagcucccaguuuauuuca

SEQ ID NO: 1922074 - RNA, 19 nt, Artificial Sequence
  Description of Artificial Sequence: Synthetic oligonucleotide
  Sense strand starting at position 1097 of SEQ ID NO: 1879643
uuuaauugacagcaaguuu

SEQ ID NO: 1922075 - RNA, 19 nt, Artificial Sequence
  Description of Artificial Sequence: Synthetic oligonucleotide
  Antisense strand to SEQ ID NO: 1922074
aaacuugcugucaauuaaa

SEQ ID NO: 1922076 - RNA, 19 nt, Artificial Sequence
  Description of Artificial Sequence: Synthetic oligonucleotide
  Sense strand starting at position 1156 of SEQ ID NO: 1879643
ucagucacaauguagaguu

SEQ ID NO: 1922077 - RNA, 19 nt, Artificial Sequence
  Description of Artificial Sequence: Synthetic oligonucleotide
  Antisense strand to SEQ ID NO: 1922076
aacucuacauugugacuga

SEQ ID NO: 1922078 - RNA, 19 nt, Artificial Sequence
  Description of Artificial Sequence: Synthetic oligonucleotide
  Sense strand starting at position 1213 of SEQ ID NO: 1879643
uguggaagagcuuaccaua

SEQ ID NO: 1922079 - RNA, 19 nt, Artificial Sequence
  Description of Artificial Sequence: Synthetic oligonucleotide
  Antisense strand to SEQ ID NO: 1922078
uaugguaagcucuuccaca

SEQ ID NO: 1922080 - RNA, 19 nt, Artificial Sequence
  Description of Artificial Sequence: Synthetic oligonucleotide
  Sense strand starting at position 1263 of SEQ ID NO: 1879643
aagcaagcuguugaaugaa

SEQ ID NO: 1922081 - RNA, 19 nt, Artificial Sequence
  Description of Artificial Sequence: Synthetic oligonucleotide
  Antisense strand to SEQ ID NO: 1922080
uucauucaacagcuugcuu

SEQ ID NO: 1922082 - RNA, 19 nt, Artificial Sequence
  Description of Artificial Sequence: Synthetic oligonucleotide
  Sense strand starting at position 1312 of SEQ ID NO: 1879643
guuggagcaugauuaggaa

SEQ ID NO: 1922083 - RNA, 19 nt, Artificial Sequence
  Description of Artificial Sequence: Synthetic oligonucleotide
  Antisense strand to SEQ ID NO: 1922082
uuccuaaucaugcuccaac

SEQ ID NO: 1922084 - RNA, 19 nt, Artificial Sequence
  Description of Artificial Sequence: Synthetic oligonucleotide
  Sense strand starting at position 1367 of SEQ ID NO: 1879643
agguacuuauaucucaagu

SEQ ID NO: 1922085 - RNA, 19 nt, Artificial Sequence
  Description of Artificial Sequence: Synthetic oligonucleotide
  Antisense strand to SEQ ID NO: 1922084
acuugagauauaaguaccu

SEQ ID NO: 1922086 - RNA, 19 nt, Artificial Sequence
  Description of Artificial Sequence: Synthetic oligonucleotide
  Sense strand starting at position 1403 of SEQ ID NO: 1879643
gauuguagaucucuaugug

SEQ ID NO: 1922087 - RNA, 19 nt, Artificial Sequence
  Description of Artificial Sequence: Synthetic oligonucleotide
  Antisense strand to SEQ ID NO: 1922086
cacauagagaucuacaauc

SEQ ID NO: 1922088 - RNA, 19 nt, Artificial Sequence
  Description of Artificial Sequence: Synthetic oligonucleotide
  Sense strand starting at position 1587 of SEQ ID NO: 1879643
aauuaauuggcagauuagu

SEQ ID NO: 1922089 - RNA, 19 nt, Artificial Sequence
  Description of Artificial Sequence: Synthetic oligonucleotide
  Antisense strand to SEQ ID NO: 1922088
acuaaucugccaauuaauu

SEQ ID NO: 1922090 - RNA, 19 nt, Artificial Sequence
  Description of Artificial Sequence: Synthetic oligonucleotide
  Sense strand starting at position 1732 of SEQ ID NO: 1879643
ugaguuggguaaguuuaaa

SEQ ID NO: 1922091 - RNA, 19 nt, Artificial Sequence
  Description of Artificial Sequence: Synthetic oligonucleotide
  Antisense strand to SEQ ID NO: 1922090
uuuaaacuuacccaacuca

SEQ ID NO: 1922092 - RNA, 19 nt, Artificial Sequence
  Description of Artificial Sequence: Synthetic oligonucleotide
  Sense strand starting at position 1989 of SEQ ID NO: 1879643
gcagaucugggugaaaugu

SEQ ID NO: 1922093 - RNA, 19 nt, Artificial Sequence
  Description of Artificial Sequence: Synthetic oligonucleotide
  Antisense strand to SEQ ID NO: 1922092
acauuucacccagaucugc

SEQ ID NO: 1922094 - RNA, 19 nt, Artificial Sequence
  Description of Artificial Sequence: Synthetic oligonucleotide
  Sense strand starting at position 2009 of SEQ ID NO: 1879643
cuccuucugugaccaaaga

SEQ ID NO: 1922095 - RNA, 19 nt, Artificial Sequence
  Description of Artificial Sequence: Synthetic oligonucleotide
  Antisense strand to SEQ ID NO: 1922094
ucuuuggucacagaaggag

SEQ ID NO: 1922096 - RNA, 19 nt, Artificial Sequence
  Description of Artificial Sequence: Synthetic oligonucleotide
  Sense strand starting at position 2052 of SEQ ID NO: 1879643
gcucuagaucaggguuaga

SEQ ID NO: 1922097 - RNA, 19 nt, Artificial Sequence
  Description of Artificial Sequence: Synthetic oligonucleotide
  Antisense strand to SEQ ID NO: 1922096
ucuaacccugaucuagagc

SEQ ID NO: 1922098 - RNA, 19 nt, Artificial Sequence
  Description of Artificial Sequence: Synthetic oligonucleotide
  Sense strand starting at position 2090 of SEQ ID NO: 1879643
uagaaagugcuguaguaaa

SEQ ID NO: 1922099 - RNA, 19 nt, Artificial Sequence
  Description of Artificial Sequence: Synthetic oligonucleotide
  Antisense strand to SEQ ID NO: 1922098
uuuacuacagcacuuucua

SEQ ID NO: 1922100 - RNA, 19 nt, Artificial Sequence
  Description of Artificial Sequence: Synthetic oligonucleotide
  Sense strand starting at position 2163 of SEQ ID NO: 1879643
auguuuggaucucucugaa

SEQ ID NO: 1922101 - RNA, 19 nt, Artificial Sequence
  Description of Artificial Sequence: Synthetic oligonucleotide
  Antisense strand to SEQ ID NO: 1922100
uucagagagauccaaacau

SEQ ID NO: 1922102 - RNA, 19 nt, Artificial Sequence
  Description of Artificial Sequence: Synthetic oligonucleotide
  Sense strand starting at position 2166 of SEQ ID NO: 1879643
uuuggaucucucugaaauu

SEQ ID NO: 1922103 - RNA, 19 nt, Artificial Sequence
  Description of Artificial Sequence: Synthetic oligonucleotide
  Antisense strand to SEQ ID NO: 1922102
aauuucagagagauccaaa

SEQ ID NO: 1922104 - RNA, 19 nt, Artificial Sequence
  Description of Artificial Sequence: Synthetic oligonucleotide
  Sense strand starting at position 2167 of SEQ ID NO: 1879643
uuggaucucucugaaauuu

SEQ ID NO: 1922105 - RNA, 19 nt, Artificial Sequence
  Description of Artificial Sequence: Synthetic oligonucleotide
  Antisense strand to SEQ ID NO: 1922104
aaauuucagagagauccaa

SEQ ID NO: 1922106 - RNA, 19 nt, Artificial Sequence
  Description of Artificial Sequence: Synthetic oligonucleotide
  Sense strand starting at position 2301 of SEQ ID NO: 1879643
gacuucuagugaucugaga

SEQ ID NO: 1922107 - RNA, 19 nt, Artificial Sequence
  Description of Artificial Sequence: Synthetic oligonucleotide
  Antisense strand to SEQ ID NO: 1922106
ucucagaucacuagaaguc

SEQ ID NO: 1922108 - RNA, 19 nt, Artificial Sequence
  Description of Artificial Sequence: Synthetic oligonucleotide
  Sense strand starting at position 2660 of SEQ ID NO: 1879643
ucuggccaucaucaaagau

SEQ ID NO: 1922109 - RNA, 19 nt, Artificial Sequence
  Description of Artificial Sequence: Synthetic oligonucleotide
  Antisense strand to SEQ ID NO: 1922108
aucuuugaugauggccaga

SEQ ID NO: 1922110 - RNA, 19 nt, Artificial Sequence
  Description of Artificial Sequence: Synthetic oligonucleotide
  Sense strand starting at position 2707 of SEQ ID NO: 1879643
uucuguugaggucaucaca

SEQ ID NO: 1922111 - RNA, 19 nt, Artificial Sequence
  Description of Artificial Sequence: Synthetic oligonucleotide
  Antisense strand to SEQ ID NO: 1922110
ugugaugaccucaacagaa

SEQ ID NO: 1922112 - RNA, 19 nt, Artificial Sequence
  Description of Artificial Sequence: Synthetic oligonucleotide
  Sense strand starting at position 2710 of SEQ ID NO: 1879643
uguugaggucaucacauca

SEQ ID NO: 1922113 - RNA, 19 nt, Artificial Sequence
  Description of Artificial Sequence: Synthetic oligonucleotide
  Antisense strand to SEQ ID NO: 1922112
ugaugugaugaccucaaca

SEQ ID NO: 1922114 - RNA, 19 nt, Artificial Sequence
  Description of Artificial Sequence: Synthetic oligonucleotide
  Sense strand starting at position 2911 of SEQ ID NO: 1879643
gaauuuggaugugauaucu

SEQ ID NO: 1922115 - RNA, 19 nt, Artificial Sequence
  Description of Artificial Sequence: Synthetic oligonucleotide
  Antisense strand to SEQ ID NO: 1922114
agauaucacauccaaauuc

SEQ ID NO: 1922116 - RNA, 19 nt, Artificial Sequence
  Description of Artificial Sequence: Synthetic oligonucleotide
  Sense strand starting at position 2919 of SEQ ID NO: 1879643
augugauaucuuugaggag

SEQ ID NO: 1922117 - RNA, 19 nt, Artificial Sequence
  Description of Artificial Sequence: Synthetic oligonucleotide
  Antisense strand to SEQ ID NO: 1922116
cuccucaaagauaucacau

SEQ ID NO: 1922118 - RNA, 19 nt, Artificial Sequence
  Description of Artificial Sequence: Synthetic oligonucleotide
  Sense strand starting at position 3617 of SEQ ID NO: 1879643
ugaggcuuugguuaagauc

SEQ ID NO: 1922119 - RNA, 19 nt, Artificial Sequence
  Description of Artificial Sequence: Synthetic oligonucleotide
  Antisense strand to SEQ ID NO: 1922118
gaucuuaaccaaagccuca

SEQ ID NO: 1922120 - RNA, 19 nt, Artificial Sequence
  Description of Artificial Sequence: Synthetic oligonucleotide
  Sense strand starting at position 3628 of SEQ ID NO: 1879643
uuaagaucacuguguauaa

SEQ ID NO: 1922121 - RNA, 19 nt, Artificial Sequence
  Description of Artificial Sequence: Synthetic oligonucleotide
  Antisense strand to SEQ ID NO: 1922120
uuauacacagugaucuuaa

SEQ ID NO: 1922122 - RNA, 19 nt, Artificial Sequence
  Description of Artificial Sequence: Synthetic oligonucleotide
  Sense strand starting at position 3629 of SEQ ID NO: 1879643
uaagaucacuguguauaag

SEQ ID NO: 1922123 - RNA, 19 nt, Artificial Sequence
  Description of Artificial Sequence: Synthetic oligonucleotide
  Antisense strand to SEQ ID NO: 1922122
cuuauacacagugaucuua

SEQ ID NO: 1922124 - RNA, 19 nt, Artificial Sequence
  Description of Artificial Sequence: Synthetic oligonucleotide
  Sense strand starting at position 73 of SEQ ID NO: 1879648
gagguauaaucucuggaau

SEQ ID NO: 1922125 - RNA, 19 nt, Artificial Sequence
  Description of Artificial Sequence: Synthetic oligonucleotide
  Antisense strand to SEQ ID NO: 1922124
auuccagagauuauaccuc

SEQ ID NO: 1922126 - RNA, 19 nt, Artificial Sequence
  Description of Artificial Sequence: Synthetic oligonucleotide
  Sense strand starting at position 74 of SEQ ID NO: 1879648
agguauaaucucuggaaug

SEQ ID NO: 1922127 - RNA, 19 nt, Artificial Sequence
  Description of Artificial Sequence: Synthetic oligonucleotide
  Antisense strand to SEQ ID NO: 1922126
cauuccagagauuauaccu

SEQ ID NO: 1922128 - RNA, 19 nt, Artificial Sequence
  Description of Artificial Sequence: Synthetic oligonucleotide
  Sense strand starting at position 215 of SEQ ID NO: 1879648
uggcuuuccaguuaggaga

SEQ ID NO: 1922129 - RNA, 19 nt, Artificial Sequence
  Description of Artificial Sequence: Synthetic oligonucleotide
  Antisense strand to SEQ ID NO: 1922128
ucuccuaacuggaaagcca

SEQ ID NO: 1922130 - RNA, 19 nt, Artificial Sequence
  Description of Artificial Sequence: Synthetic oligonucleotide
  Sense strand starting at position 360 of SEQ ID NO: 1879648
cugaacucugggugagaga

SEQ ID NO: 1922131 - RNA, 19 nt, Artificial Sequence
  Description of Artificial Sequence: Synthetic oligonucleotide
  Antisense strand to SEQ ID NO: 1922130
ucucucacccagaguucag

SEQ ID NO: 1922132 - RNA, 19 nt, Artificial Sequence
  Description of Artificial Sequence: Synthetic oligonucleotide
  Sense strand starting at position 392 of SEQ ID NO: 1879648
guaagaaacccuggccaau

SEQ ID NO: 1922133 - RNA, 19 nt, Artificial Sequence
  Description of Artificial Sequence: Synthetic oligonucleotide
  Antisense strand to SEQ ID NO: 1922132
auuggccaggguuucuuac

SEQ ID NO: 1922134 - RNA, 19 nt, Artificial Sequence
  Description of Artificial Sequence: Synthetic oligonucleotide
  Sense strand starting at position 495 of SEQ ID NO: 1879648
ugggauuucucuuugcuuc

SEQ ID NO: 1922135 - RNA, 19 nt, Artificial Sequence
  Description of Artificial Sequence: Synthetic oligonucleotide
  Antisense strand to SEQ ID NO: 1922134
gaagcaaagagaaauccca

SEQ ID NO: 1922136 - RNA, 19 nt, Artificial Sequence
  Description of Artificial Sequence: Synthetic oligonucleotide
  Sense strand starting at position 496 of SEQ ID NO: 1879648
gggauuucucuuugcuucu

SEQ ID NO: 1922137 - RNA, 19 nt, Artificial Sequence
  Description of Artificial Sequence: Synthetic oligonucleotide
  Antisense strand to SEQ ID NO: 1922136
agaagcaaagagaaauccc

SEQ ID NO: 1922138 - RNA, 19 nt, Artificial Sequence
  Description of Artificial Sequence: Synthetic oligonucleotide
  Sense strand starting at position 541 of SEQ ID NO: 1879648
cccgaccuccugugggaaa

SEQ ID NO: 1922139 - RNA, 19 nt, Artificial Sequence
  Description of Artificial Sequence: Synthetic oligonucleotide
  Antisense strand to SEQ ID NO: 1922138
uuucccacaggaggucggg

SEQ ID NO: 1922140 - RNA, 19 nt, Artificial Sequence
  Description of Artificial Sequence: Synthetic oligonucleotide
  Sense strand starting at position 607 of SEQ ID NO: 1879648
ccaauuuguggacgugcau

SEQ ID NO: 1922141 - RNA, 19 nt, Artificial Sequence
  Description of Artificial Sequence: Synthetic oligonucleotide
  Antisense strand to SEQ ID NO: 1922140
augcacguccacaaauugg

SEQ ID NO: 1922142 - RNA, 19 nt, Artificial Sequence
  Description of Artificial Sequence: Synthetic oligonucleotide
  Sense strand starting at position 618 of SEQ ID NO: 1879648
acgugcauccaauagagau

SEQ ID NO: 1922143 - RNA, 19 nt, Artificial Sequence
  Description of Artificial Sequence: Synthetic oligonucleotide
  Antisense strand to SEQ ID NO: 1922142
aucucuauuggaugcacgu

SEQ ID NO: 1922144 - RNA, 19 nt, Artificial Sequence
  Description of Artificial Sequence: Synthetic oligonucleotide
  Sense strand starting at position 826 of SEQ ID NO: 1879648
cucccugugccucagaauu

SEQ ID NO: 1922145 - RNA, 19 nt, Artificial Sequence
  Description of Artificial Sequence: Synthetic oligonucleotide
  Antisense strand to SEQ ID NO: 1922144
aauucugaggcacagggag

SEQ ID NO: 1922146 - RNA, 19 nt, Artificial Sequence
  Description of Artificial Sequence: Synthetic oligonucleotide
  Sense strand starting at position 834 of SEQ ID NO: 1879648
gccucagaauucccauaag

SEQ ID NO: 1922147 - RNA, 19 nt, Artificial Sequence
  Description of Artificial Sequence: Synthetic oligonucleotide
  Antisense strand to SEQ ID NO: 1922146
cuuaugggaauucugaggc

SEQ ID NO: 1922148 - RNA, 19 nt, Artificial Sequence
  Description of Artificial Sequence: Synthetic oligonucleotide
  Sense strand starting at position 878 of SEQ ID NO: 1879648
cugucuugaggaugaaaug

SEQ ID NO: 1922149 - RNA, 19 nt, Artificial Sequence
  Description of Artificial Sequence: Synthetic oligonucleotide
  Antisense strand to SEQ ID NO: 1922148
cauuucauccucaagacag

SEQ ID NO: 1922150 - RNA, 19 nt, Artificial Sequence
  Description of Artificial Sequence: Synthetic oligonucleotide
  Sense strand starting at position 885 of SEQ ID NO: 1879648
gaggaugaaauggguuagu

SEQ ID NO: 1922151 - RNA, 19 nt, Artificial Sequence
  Description of Artificial Sequence: Synthetic oligonucleotide
  Antisense strand to SEQ ID NO: 1922150
acuaacccauuucauccuc

SEQ ID NO: 1922152 - RNA, 19 nt, Artificial Sequence
  Description of Artificial Sequence: Synthetic oligonucleotide
  Sense strand starting at position 888 of SEQ ID NO: 1879648
gaugaaauggguuagugca

SEQ ID NO: 1922153 - RNA, 19 nt, Artificial Sequence
  Description of Artificial Sequence: Synthetic oligonucleotide
  Antisense strand to SEQ ID NO: 1922152
ugcacuaacccauuucauc

SEQ ID NO: 1922154 - RNA, 19 nt, Artificial Sequence
  Description of Artificial Sequence: Synthetic oligonucleotide
  Sense strand starting at position 937 of SEQ ID NO: 1879648
guagguacccaguaagugu

SEQ ID NO: 1922155 - RNA, 19 nt, Artificial Sequence
  Description of Artificial Sequence: Synthetic oligonucleotide
  Antisense strand to SEQ ID NO: 1922154
acacuuacuggguaccuac

SEQ ID NO: 1922156 - RNA, 19 nt, Artificial Sequence
  Description of Artificial Sequence: Synthetic oligonucleotide
  Sense strand starting at position 950 of SEQ ID NO: 1879648
aaguguugguuggugaaau

SEQ ID NO: 1922157 - RNA, 19 nt, Artificial Sequence
  Description of Artificial Sequence: Synthetic oligonucleotide
  Antisense strand to SEQ ID NO: 1922156
auuucaccaaccaacacuu

SEQ ID NO: 1922158 - RNA, 19 nt, Artificial Sequence
  Description of Artificial Sequence: Synthetic oligonucleotide
  Sense strand starting at position 966 of SEQ ID NO: 1879648
aauuaagggcucugagaua

SEQ ID NO: 1922159 - RNA, 19 nt, Artificial Sequence
  Description of Artificial Sequence: Synthetic oligonucleotide
  Antisense strand to SEQ ID NO: 1922158
uaucucagagcccuuaauu

SEQ ID NO: 1922160 - RNA, 19 nt, Artificial Sequence
  Description of Artificial Sequence: Synthetic oligonucleotide
  Sense strand starting at position 1099 of SEQ ID NO: 1879648
gaggaugcuuccucuucca

SEQ ID NO: 1922161 - RNA, 19 nt, Artificial Sequence
  Description of Artificial Sequence: Synthetic oligonucleotide
  Antisense strand to SEQ ID NO: 1922160
uggaagaggaagcauccuc

SEQ ID NO: 1922162 - RNA, 19 nt, Artificial Sequence
  Description of Artificial Sequence: Synthetic oligonucleotide
  Sense strand starting at position 1507 of SEQ ID NO: 1879648
gagugaaggagugagguuu

SEQ ID NO: 1922163 - RNA, 19 nt, Artificial Sequence
  Description of Artificial Sequence: Synthetic oligonucleotide
  Antisense strand to SEQ ID NO: 1922162
aaaccucacuccuucacuc

SEQ ID NO: 1922164 - RNA, 19 nt, Artificial Sequence
  Description of Artificial Sequence: Synthetic oligonucleotide
  Sense strand starting at position 1586 of SEQ ID NO: 1879648
ccaaaucucuggccauaag

SEQ ID NO: 1922165 - RNA, 19 nt, Artificial Sequence
  Description of Artificial Sequence: Synthetic oligonucleotide
  Antisense strand to SEQ ID NO: 1922164
cuuauggccagagauuugg

SEQ ID NO: 1922166 - RNA, 19 nt, Artificial Sequence
  Description of Artificial Sequence: Synthetic oligonucleotide
  Sense strand starting at position 1601 of SEQ ID NO: 1879648
uaagccaggccucaguaau

SEQ ID NO: 1922167 - RNA, 19 nt, Artificial Sequence
  Description of Artificial Sequence: Synthetic oligonucleotide
  Antisense strand to SEQ ID NO: 1922166
auuacugaggccuggcuua

SEQ ID NO: 1922168 - RNA, 19 nt, Artificial Sequence
  Description of Artificial Sequence: Synthetic oligonucleotide
  Sense strand starting at position 1609 of SEQ ID NO: 1879648
gccucaguaauuuggcaag

SEQ ID NO: 1922169 - RNA, 19 nt, Artificial Sequence
  Description of Artificial Sequence: Synthetic oligonucleotide
  Antisense strand to SEQ ID NO: 1922168
cuugccaaauuacugaggc

SEQ ID NO: 1922170 - RNA, 19 nt, Artificial Sequence
  Description of Artificial Sequence: Synthetic oligonucleotide
  Sense strand starting at position 1688 of SEQ ID NO: 1879648
ggaaucucccucuggaauc

SEQ ID NO: 1922171 - RNA, 19 nt, Artificial Sequence
  Description of Artificial Sequence: Synthetic oligonucleotide
  Antisense strand to SEQ ID NO: 1922170
gauuccagagggagauucc

SEQ ID NO: 1922172 - RNA, 19 nt, Artificial Sequence
  Description of Artificial Sequence: Synthetic oligonucleotide
  Sense strand starting at position 1940 of SEQ ID NO: 1879648
ccuacaugaguuugggaca

SEQ ID NO: 1922173 - RNA, 19 nt, Artificial Sequence
  Description of Artificial Sequence: Synthetic oligonucleotide
  Antisense strand to SEQ ID NO: 1922172
ugucccaaacucauguagg

SEQ ID NO: 1922174 - RNA, 19 nt, Artificial Sequence
  Description of Artificial Sequence: Synthetic oligonucleotide
  Sense strand starting at position 2168 of SEQ ID NO: 1879648
aagccaucccaguaaugag

SEQ ID NO: 1922175 - RNA, 19 nt, Artificial Sequence
  Description of Artificial Sequence: Synthetic oligonucleotide
  Antisense strand to SEQ ID NO: 1922174
cucauuacugggauggcuu

SEQ ID NO: 1922176 - RNA, 19 nt, Artificial Sequence
  Description of Artificial Sequence: Synthetic oligonucleotide
  Sense strand starting at position 2252 of SEQ ID NO: 1879648
gcuuccuggccauaaagga

SEQ ID NO: 1922177 - RNA, 19 nt, Artificial Sequence
  Description of Artificial Sequence: Synthetic oligonucleotide
  Antisense strand to SEQ ID NO: 1922176
uccuuuauggccaggaagc

SEQ ID NO: 1922178 - RNA, 19 nt, Artificial Sequence
  Description of Artificial Sequence: Synthetic oligonucleotide
  Sense strand starting at position 2306 of SEQ ID NO: 1879648
ugcccaggguccuuaacua

SEQ ID NO: 1922179 - RNA, 19 nt, Artificial Sequence
  Description of Artificial Sequence: Synthetic oligonucleotide
  Antisense strand to SEQ ID NO: 1922178
uaguuaaggacccugggca

SEQ ID NO: 1922180 - RNA, 19 nt, Artificial Sequence
  Description of Artificial Sequence: Synthetic oligonucleotide
  Sense strand starting at position 2336 of SEQ ID NO: 1879648
gagaauaaggccggaucuu

SEQ ID NO: 1922181 - RNA, 19 nt, Artificial Sequence
  Description of Artificial Sequence: Synthetic oligonucleotide
  Antisense strand to SEQ ID NO: 1922180
aagauccggccuuauucuc

SEQ ID NO: 1922182 - RNA, 19 nt, Artificial Sequence
  Description of Artificial Sequence: Synthetic oligonucleotide
  Sense strand starting at position 2337 of SEQ ID NO: 1879648
agaauaaggccggaucuuu

SEQ ID NO: 1922183 - RNA, 19 nt, Artificial Sequence
  Description of Artificial Sequence: Synthetic oligonucleotide
  Antisense strand to SEQ ID NO: 1922182
aaagauccggccuuauucu

SEQ ID NO: 1922184 - RNA, 19 nt, Artificial Sequence
  Description of Artificial Sequence: Synthetic oligonucleotide
  Sense strand starting at position 2517 of SEQ ID NO: 1879648
uuaaauagguuucuugagu

SEQ ID NO: 1922185 - RNA, 19 nt, Artificial Sequence
  Description of Artificial Sequence: Synthetic oligonucleotide
  Antisense strand to SEQ ID NO: 1922184
acucaagaaaccuauuuaa

SEQ ID NO: 1922186 - RNA, 19 nt, Artificial Sequence
  Description of Artificial Sequence: Synthetic oligonucleotide
  Sense strand starting at position 2518 of SEQ ID NO: 1879648
uaaauagguuucuugagug

SEQ ID NO: 1922187 - RNA, 19 nt, Artificial Sequence
  Description of Artificial Sequence: Synthetic oligonucleotide
  Antisense strand to SEQ ID NO: 1922186
cacucaagaaaccuauuua

SEQ ID NO: 1922188 - RNA, 19 nt, Artificial Sequence
  Description of Artificial Sequence: Synthetic oligonucleotide
  Sense strand starting at position 2569 of SEQ ID NO: 1879648
agaccagucugggugguua

SEQ ID NO: 1922189 - RNA, 19 nt, Artificial Sequence
  Description of Artificial Sequence: Synthetic oligonucleotide
  Antisense strand to SEQ ID NO: 1922188
uaaccacccagacuggucu

SEQ ID NO: 1922190 - RNA, 19 nt, Artificial Sequence
  Description of Artificial Sequence: Synthetic oligonucleotide
  Sense strand starting at position 2597 of SEQ ID NO: 1879648
cccauucuugcauaguuua

SEQ ID NO: 1922191 - RNA, 19 nt, Artificial Sequence
  Description of Artificial Sequence: Synthetic oligonucleotide
  Antisense strand to SEQ ID NO: 1922190
uaaacuaugcaagaauggg

SEQ ID NO: 1922192 - RNA, 19 nt, Artificial Sequence
  Description of Artificial Sequence: Synthetic oligonucleotide
  Sense strand starting at position 2621 of SEQ ID NO: 1879648
gagugagaucucugucucc

SEQ ID NO: 1922193 - RNA, 19 nt, Artificial Sequence
  Description of Artificial Sequence: Synthetic oligonucleotide
  Antisense strand to SEQ ID NO: 1922192
ggagacagagaucucacuc

SEQ ID NO: 1922194 - RNA, 19 nt, Artificial Sequence
  Description of Artificial Sequence: Synthetic oligonucleotide
  Sense strand starting at position 2624 of SEQ ID NO: 1879648
ugagaucucugucuccaga

SEQ ID NO: 1922195 - RNA, 19 nt, Artificial Sequence
  Description of Artificial Sequence: Synthetic oligonucleotide
  Antisense strand to SEQ ID NO: 1922194
ucuggagacagagaucuca

SEQ ID NO: 1922196 - RNA, 19 nt, Artificial Sequence
  Description of Artificial Sequence: Synthetic oligonucleotide
  Sense strand starting at position 2811 of SEQ ID NO: 1879648
cugaguuaaggcgaaccaa

SEQ ID NO: 1922197 - RNA, 19 nt, Artificial Sequence
  Description of Artificial Sequence: Synthetic oligonucleotide
  Antisense strand to SEQ ID NO: 1922196
uugguucgccuuaacucag

SEQ ID NO: 1922198 - RNA, 19 nt, Artificial Sequence
  Description of Artificial Sequence: Synthetic oligonucleotide
  Sense strand starting at position 2851 of SEQ ID NO: 1879648
guguguucuaaucacaagu

SEQ ID NO: 1922199 - RNA, 19 nt, Artificial Sequence
  Description of Artificial Sequence: Synthetic oligonucleotide
  Antisense strand to SEQ ID NO: 1922198
acuugugauuagaacacac

SEQ ID NO: 1922200 - RNA, 19 nt, Artificial Sequence
  Description of Artificial Sequence: Synthetic oligonucleotide
  Sense strand starting at position 3762 of SEQ ID NO: 1879648
cugacuugggccugaguaa

SEQ ID NO: 1922201 - RNA, 19 nt, Artificial Sequence
  Description of Artificial Sequence: Synthetic oligonucleotide
  Antisense strand to SEQ ID NO: 1922200
uuacucaggcccaagucag

SEQ ID NO: 1922202 - RNA, 19 nt, Artificial Sequence
  Description of Artificial Sequence: Synthetic oligonucleotide
  Sense strand starting at position 3862 of SEQ ID NO: 1879648
cugaaccagccauguauua

SEQ ID NO: 1922203 - RNA, 19 nt, Artificial Sequence
  Description of Artificial Sequence: Synthetic oligonucleotide
  Antisense strand to SEQ ID NO: 1922202
uaauacauggcugguucag

SEQ ID NO: 1922204 - RNA, 19 nt, Artificial Sequence
  Description of Artificial Sequence: Synthetic oligonucleotide
  Sense strand starting at position 3 of SEQ ID NO: 1879649
uagaaugucgaaugcaaag

SEQ ID NO: 1922205 - RNA, 19 nt, Artificial Sequence
  Description of Artificial Sequence: Synthetic oligonucleotide
  Antisense strand to SEQ ID NO: 1922204
cuuugcauucgacauucua

SEQ ID NO: 1922206 - RNA, 19 nt, Artificial Sequence
  Description of Artificial Sequence: Synthetic oligonucleotide
  Sense strand starting at position 113 of SEQ ID NO: 1879649
agacgacaauguucuuuga

SEQ ID NO: 1922207 - RNA, 19 nt, Artificial Sequence
  Description of Artificial Sequence: Synthetic oligonucleotide
  Antisense strand to SEQ ID NO: 1922206
ucaaagaacauugucgucu

SEQ ID NO: 1922208 - RNA, 19 nt, Artificial Sequence
  Description of Artificial Sequence: Synthetic oligonucleotide
  Sense strand starting at position 148 of SEQ ID NO: 1879649
uauagauacccugggagua

SEQ ID NO: 1922209 - RNA, 19 nt, Artificial Sequence
  Description of Artificial Sequence: Synthetic oligonucleotide
  Antisense strand to SEQ ID NO: 1922208
uacucccaggguaucuaua

SEQ ID NO: 1922210 - RNA, 19 nt, Artificial Sequence
  Description of Artificial Sequence: Synthetic oligonucleotide
  Sense strand starting at position 161 of SEQ ID NO: 1879649
ggaguaauugugggaucag

SEQ ID NO: 1922211 - RNA, 19 nt, Artificial Sequence
  Description of Artificial Sequence: Synthetic oligonucleotide
  Antisense strand to SEQ ID NO: 1922210
cugaucccacaauuacucc

SEQ ID NO: 1922212 - RNA, 19 nt, Artificial Sequence
  Description of Artificial Sequence: Synthetic oligonucleotide
  Sense strand starting at position 376 of SEQ ID NO: 1879649
cacuucgugccugagaaag

SEQ ID NO: 1922213 - RNA, 19 nt, Artificial Sequence
  Description of Artificial Sequence: Synthetic oligonucleotide
  Antisense strand to SEQ ID NO: 1922212
cuuucucaggcacgaagug

SEQ ID NO: 1922214 - RNA, 19 nt, Artificial Sequence
  Description of Artificial Sequence: Synthetic oligonucleotide
  Sense strand starting at position 415 of SEQ ID NO: 1879649
agguaucugagauguagcu

SEQ ID NO: 1922215 - RNA, 19 nt, Artificial Sequence
  Description of Artificial Sequence: Synthetic oligonucleotide
  Antisense strand to SEQ ID NO: 1922214
agcuacaucucagauaccu

SEQ ID NO: 1922216 - RNA, 19 nt, Artificial Sequence
  Description of Artificial Sequence: Synthetic oligonucleotide
  Sense strand starting at position 417 of SEQ ID NO: 1879649
guaucugagauguagcuca

SEQ ID NO: 1922217 - RNA, 19 nt, Artificial Sequence
  Description of Artificial Sequence: Synthetic oligonucleotide
  Antisense strand to SEQ ID NO: 1922216
ugagcuacaucucagauac

SEQ ID NO: 1922218 - RNA, 19 nt, Artificial Sequence
  Description of Artificial Sequence: Synthetic oligonucleotide
  Sense strand starting at position 422 of SEQ ID NO: 1879649
ugagauguagcucagcuua

SEQ ID NO: 1922219 - RNA, 19 nt, Artificial Sequence
  Description of Artificial Sequence: Synthetic oligonucleotide
  Antisense strand to SEQ ID NO: 1922218
uaagcugagcuacaucuca

SEQ ID NO: 1922220 - RNA, 19 nt, Artificial Sequence
  Description of Artificial Sequence: Synthetic oligonucleotide
  Sense strand starting at position 424 of SEQ ID NO: 1879649
agauguagcucagcuuaga

SEQ ID NO: 1922221 - RNA, 19 nt, Artificial Sequence
  Description of Artificial Sequence: Synthetic oligonucleotide
  Antisense strand to SEQ ID NO: 1922220
ucuaagcugagcuacaucu

SEQ ID NO: 1922222 - RNA, 19 nt, Artificial Sequence
  Description of Artificial Sequence: Synthetic oligonucleotide
  Sense strand starting at position 509 of SEQ ID NO: 1879649
guuuccauuucucaggaau

SEQ ID NO: 1922223 - RNA, 19 nt, Artificial Sequence
  Description of Artificial Sequence: Synthetic oligonucleotide
  Antisense strand to SEQ ID NO: 1922222
auuccugagaaauggaaac

SEQ ID NO: 1922224 - RNA, 19 nt, Artificial Sequence
  Description of Artificial Sequence: Synthetic oligonucleotide
  Sense strand starting at position 575 of SEQ ID NO: 1879649
gaggaaaccuggucuuagu

SEQ ID NO: 1922225 - RNA, 19 nt, Artificial Sequence
  Description of Artificial Sequence: Synthetic oligonucleotide
  Antisense strand to SEQ ID NO: 1922224
acuaagaccagguuuccuc

SEQ ID NO: 1922226 - RNA, 19 nt, Artificial Sequence
  Description of Artificial Sequence: Synthetic oligonucleotide
  Sense strand starting at position 891 of SEQ ID NO: 1879649
gguggcuuccucuucgcua

SEQ ID NO: 1922227 - RNA, 19 nt, Artificial Sequence
  Description of Artificial Sequence: Synthetic oligonucleotide
  Antisense strand to SEQ ID NO: 1922226
uagcgaagaggaagccacc

SEQ ID NO: 1922228 - RNA, 19 nt, Artificial Sequence
  Description of Artificial Sequence: Synthetic oligonucleotide
  Sense strand starting at position 904 of SEQ ID NO: 1879649
ucgcuaggaggugacaaau

SEQ ID NO: 1922229 - RNA, 19 nt, Artificial Sequence
  Description of Artificial Sequence: Synthetic oligonucleotide
  Antisense strand to SEQ ID NO: 1922228
auuugucaccuccuagcga

SEQ ID NO: 1922230 - RNA, 19 nt, Artificial Sequence
  Description of Artificial Sequence: Synthetic oligonucleotide
  Sense strand starting at position 1070 of SEQ ID NO: 1879649
guuugagacucguccuaaa

SEQ ID NO: 1922231 - RNA, 19 nt, Artificial Sequence
  Description of Artificial Sequence: Synthetic oligonucleotide
  Antisense strand to SEQ ID NO: 1922230
uuuaggacgagucucaaac

SEQ ID NO: 1922232 - RNA, 19 nt, Artificial Sequence
  Description of Artificial Sequence: Synthetic oligonucleotide
  Sense strand starting at position 1257 of SEQ ID NO: 1879649
aaauaugcguuccugagag

SEQ ID NO: 1922233 - RNA, 19 nt, Artificial Sequence
  Description of Artificial Sequence: Synthetic oligonucleotide
  Antisense strand to SEQ ID NO: 1922232
cucucaggaacgcauauuu

SEQ ID NO: 1922234 - RNA, 19 nt, Artificial Sequence
  Description of Artificial Sequence: Synthetic oligonucleotide
  Sense strand starting at position 1259 of SEQ ID NO: 1879649
auaugcguuccugagagac

SEQ ID NO: 1922235 - RNA, 19 nt, Artificial Sequence
  Description of Artificial Sequence: Synthetic oligonucleotide
  Antisense strand to SEQ ID NO: 1922234
gucucucaggaacgcauau

SEQ ID NO: 1922236 - RNA, 19 nt, Artificial Sequence
  Description of Artificial Sequence: Synthetic oligonucleotide
  Sense strand starting at position 1943 of SEQ ID NO: 1879649
caacguaauccguauuauc

SEQ ID NO: 1922237 - RNA, 19 nt, Artificial Sequence
  Description of Artificial Sequence: Synthetic oligonucleotide
  Antisense strand to SEQ ID NO: 1922236
gauaauacggauuacguug

SEQ ID NO: 1922238 - RNA, 19 nt, Artificial Sequence
  Description of Artificial Sequence: Synthetic oligonucleotide
  Sense strand starting at position 1967 of SEQ ID NO: 1879649
aagaauacccgucaccgaa

SEQ ID NO: 1922239 - RNA, 19 nt, Artificial Sequence
  Description of Artificial Sequence: Synthetic oligonucleotide
  Antisense strand to SEQ ID NO: 1922238
uucggugacggguauucuu

SEQ ID NO: 1922240 - RNA, 19 nt, Artificial Sequence
  Description of Artificial Sequence: Synthetic oligonucleotide
  Sense strand starting at position 2118 of SEQ ID NO: 1879649
gagcuugaccgggaccaua

SEQ ID NO: 1922241 - RNA, 19 nt, Artificial Sequence
  Description of Artificial Sequence: Synthetic oligonucleotide
  Antisense strand to SEQ ID NO: 1922240
uauggucccggucaagcuc

SEQ ID NO: 1922242 - RNA, 19 nt, Artificial Sequence
  Description of Artificial Sequence: Synthetic oligonucleotide
  Sense strand starting at position 2446 of SEQ ID NO: 1879649
gccagagaacccuguaaga

SEQ ID NO: 1922243 - RNA, 19 nt, Artificial Sequence
  Description of Artificial Sequence: Synthetic oligonucleotide
  Antisense strand to SEQ ID NO: 1922242
ucuuacaggguucucuggc

SEQ ID NO: 1922244 - RNA, 19 nt, Artificial Sequence
  Description of Artificial Sequence: Synthetic oligonucleotide
  Sense strand starting at position 2455 of SEQ ID NO: 1879649
cccuguaagagacgugaau

SEQ ID NO: 1922245 - RNA, 19 nt, Artificial Sequence
  Description of Artificial Sequence: Synthetic oligonucleotide
  Antisense strand to SEQ ID NO: 1922244
auucacgucucuuacaggg

SEQ ID NO: 1922246 - RNA, 19 nt, Artificial Sequence
  Description of Artificial Sequence: Synthetic oligonucleotide
  Sense strand starting at position 2457 of SEQ ID NO: 1879649
cuguaagagacgugaauag

SEQ ID NO: 1922247 - RNA, 19 nt, Artificial Sequence
  Description of Artificial Sequence: Synthetic oligonucleotide
  Antisense strand to SEQ ID NO: 1922246
cuauucacgucucuuacag

SEQ ID NO: 1922248 - RNA, 19 nt, Artificial Sequence
  Description of Artificial Sequence: Synthetic oligonucleotide
  Sense strand starting at position 2468 of SEQ ID NO: 1879649
gugaauaguuacccacaca

SEQ ID NO: 1922249 - RNA, 19 nt, Artificial Sequence
  Description of Artificial Sequence: Synthetic oligonucleotide
  Antisense strand to SEQ ID NO: 1922248
uguguggguaacuauucac

SEQ ID NO: 1922250 - RNA, 19 nt, Artificial Sequence
  Description of Artificial Sequence: Synthetic oligonucleotide
  Sense strand starting at position 2543 of SEQ ID NO: 1879649
aggucaugcaugggugaaa

SEQ ID NO: 1922251 - RNA, 19 nt, Artificial Sequence
  Description of Artificial Sequence: Synthetic oligonucleotide
  Antisense strand to SEQ ID NO: 1922250
uuucacccaugcaugaccu

SEQ ID NO: 1922252 - RNA, 19 nt, Artificial Sequence
  Description of Artificial Sequence: Synthetic oligonucleotide
  Sense strand starting at position 2544 of SEQ ID NO: 1879649
ggucaugcaugggugaaau

SEQ ID NO: 1922253 - RNA, 19 nt, Artificial Sequence
  Description of Artificial Sequence: Synthetic oligonucleotide
  Antisense strand to SEQ ID NO: 1922252
auuucacccaugcaugacc

SEQ ID NO: 1922254 - RNA, 19 nt, Artificial Sequence
  Description of Artificial Sequence: Synthetic oligonucleotide
  Sense strand starting at position 2683 of SEQ ID NO: 1879649
cuuugaaggccuuauagcu

SEQ ID NO: 1922255 - RNA, 19 nt, Artificial Sequence
  Description of Artificial Sequence: Synthetic oligonucleotide
  Antisense strand to SEQ ID NO: 1922254
agcuauaaggccuucaaag

SEQ ID NO: 1922256 - RNA, 19 nt, Artificial Sequence
  Description of Artificial Sequence: Synthetic oligonucleotide
  Sense strand starting at position 2798 of SEQ ID NO: 1879649
cugguagacuuucuaugau

SEQ ID NO: 1922257 - RNA, 19 nt, Artificial Sequence
  Description of Artificial Sequence: Synthetic oligonucleotide
  Antisense strand to SEQ ID NO: 1922256
aucauagaaagucuaccag

SEQ ID NO: 1922258 - RNA, 19 nt, Artificial Sequence
  Description of Artificial Sequence: Synthetic oligonucleotide
  Sense strand starting at position 2984 of SEQ ID NO: 1879649
uuugcaaagugacuguaau

SEQ ID NO: 1922259 - RNA, 19 nt, Artificial Sequence
  Description of Artificial Sequence: Synthetic oligonucleotide
  Antisense strand to SEQ ID NO: 1922258
auuacagucacuuugcaaa

SEQ ID NO: 1922260 - RNA, 19 nt, Artificial Sequence
  Description of Artificial Sequence: Synthetic oligonucleotide
  Sense strand starting at position 3016 of SEQ ID NO: 1879649
gagagaaucucugugauuc

SEQ ID NO: 1922261 - RNA, 19 nt, Artificial Sequence
  Description of Artificial Sequence: Synthetic oligonucleotide
  Antisense strand to SEQ ID NO: 1922260
gaaucacagagauucucuc

SEQ ID NO: 1922262 - RNA, 19 nt, Artificial Sequence
  Description of Artificial Sequence: Synthetic oligonucleotide
  Sense strand starting at position 3017 of SEQ ID NO: 1879649
agagaaucucugugauucu

SEQ ID NO: 1922263 - RNA, 19 nt, Artificial Sequence
  Description of Artificial Sequence: Synthetic oligonucleotide
  Antisense strand to SEQ ID NO: 1922262
agaaucacagagauucucu

SEQ ID NO: 1922264 - RNA, 19 nt, Artificial Sequence
  Description of Artificial Sequence: Synthetic oligonucleotide
  Sense strand starting at position 3024 of SEQ ID NO: 1879649
cucugugauucuuugauga

SEQ ID NO: 1922265 - RNA, 19 nt, Artificial Sequence
  Description of Artificial Sequence: Synthetic oligonucleotide
  Antisense strand to SEQ ID NO: 1922264
ucaucaaagaaucacagag

SEQ ID NO: 1922266 - RNA, 19 nt, Artificial Sequence
  Description of Artificial Sequence: Synthetic oligonucleotide
  Sense strand starting at position 3077 of SEQ ID NO: 1879649
agauccugcaguggauauu

SEQ ID NO: 1922267 - RNA, 19 nt, Artificial Sequence
  Description of Artificial Sequence: Synthetic oligonucleotide
  Antisense strand to SEQ ID NO: 1922266
aauauccacugcaggaucu

SEQ ID NO: 1922268 - RNA, 19 nt, Artificial Sequence
  Description of Artificial Sequence: Synthetic oligonucleotide
  Sense strand starting at position 3083 of SEQ ID NO: 1879649
ugcaguggauauucugaua

SEQ ID NO: 1922269 - RNA, 19 nt, Artificial Sequence
  Description of Artificial Sequence: Synthetic oligonucleotide
  Antisense strand to SEQ ID NO: 1922268
uaucagaauauccacugca

SEQ ID NO: 1922270 - RNA, 19 nt, Artificial Sequence
  Description of Artificial Sequence: Synthetic oligonucleotide
  Sense strand starting at position 3161 of SEQ ID NO: 1879649
gguguagcuuccuuagaaa

SEQ ID NO: 1922271 - RNA, 19 nt, Artificial Sequence
  Description of Artificial Sequence: Synthetic oligonucleotide
  Antisense strand to SEQ ID NO: 1922270
uuucuaaggaagcuacacc

SEQ ID NO: 1922272 - RNA, 19 nt, Artificial Sequence
  Description of Artificial Sequence: Synthetic oligonucleotide
  Sense strand starting at position 3173 of SEQ ID NO: 1879649
uuagaaaguucucaauuug

SEQ ID NO: 1922273 - RNA, 19 nt, Artificial Sequence
  Description of Artificial Sequence: Synthetic oligonucleotide
  Antisense strand to SEQ ID NO: 1922272
caaauugagaacuuucuaa

SEQ ID NO: 1922274 - RNA, 19 nt, Artificial Sequence
  Description of Artificial Sequence: Synthetic oligonucleotide
  Sense strand starting at position 3364 of SEQ ID NO: 1879649
aacugaccugguugcaauu

SEQ ID NO: 1922275 - RNA, 19 nt, Artificial Sequence
  Description of Artificial Sequence: Synthetic oligonucleotide
  Antisense strand to SEQ ID NO: 1922274
aauugcaaccaggucaguu

SEQ ID NO: 1922276 - RNA, 19 nt, Artificial Sequence
  Description of Artificial Sequence: Synthetic oligonucleotide
  Sense strand starting at position 3461 of SEQ ID NO: 1879649
uugacauguuacuuacaga

SEQ ID NO: 1922277 - RNA, 19 nt, Artificial Sequence
  Description of Artificial Sequence: Synthetic oligonucleotide
  Antisense strand to SEQ ID NO: 1922276
ucuguaaguaacaugucaa

SEQ ID NO: 1922278 - RNA, 19 nt, Artificial Sequence
  Description of Artificial Sequence: Synthetic oligonucleotide
  Sense strand starting at position 3797 of SEQ ID NO: 1879649
ugcaauagucuaugagcaa

SEQ ID NO: 1922279 - RNA, 19 nt, Artificial Sequence
  Description of Artificial Sequence: Synthetic oligonucleotide
  Antisense strand to SEQ ID NO: 1922278
uugcucauagacuauugca

SEQ ID NO: 1922280 - RNA, 19 nt, Artificial Sequence
  Description of Artificial Sequence: Synthetic oligonucleotide
  Sense strand starting at position 3800 of SEQ ID NO: 1879649
aauagucuaugagcaaagu

SEQ ID NO: 1922281 - RNA, 19 nt, Artificial Sequence
  Description of Artificial Sequence: Synthetic oligonucleotide
  Antisense strand to SEQ ID NO: 1922280
acuuugcucauagacuauu

SEQ ID NO: 1922282 - RNA, 19 nt, Artificial Sequence
  Description of Artificial Sequence: Synthetic oligonucleotide
  Sense strand starting at position 3906 of SEQ ID NO: 1879649
uaguaaauggaacguuaua

SEQ ID NO: 1922283 - RNA, 19 nt, Artificial Sequence
  Description of Artificial Sequence: Synthetic oligonucleotide
  Antisense strand to SEQ ID NO: 1922282
uauaacguuccauuuacua

SEQ ID NO: 1922284 - RNA, 19 nt, Artificial Sequence
  Description of Artificial Sequence: Synthetic oligonucleotide
  Sense strand starting at position 278 of SEQ ID NO: 1879650
aauagucuaugagcaaagu

SEQ ID NO: 1922285 - RNA, 19 nt, Artificial Sequence
  Description of Artificial Sequence: Synthetic oligonucleotide
  Antisense strand to SEQ ID NO: 1922284
acuuugcucauagacuauu

SEQ ID NO: 1922286 - RNA, 19 nt, Artificial Sequence
  Description of Artificial Sequence: Synthetic oligonucleotide
  Sense strand starting at position 384 of SEQ ID NO: 1879650
uaguaaauggaacguuaua

SEQ ID NO: 1922287 - RNA, 19 nt, Artificial Sequence
  Description of Artificial Sequence: Synthetic oligonucleotide
  Antisense strand to SEQ ID NO: 1922286
uauaacguuccauuuacua

SEQ ID NO: 1922288 - RNA, 19 nt, Artificial Sequence
  Description of Artificial Sequence: Synthetic oligonucleotide
  Sense strand starting at position 822 of SEQ ID NO: 1879650
accauuuccuacgagacca

SEQ ID NO: 1922289 - RNA, 19 nt, Artificial Sequence
  Description of Artificial Sequence: Synthetic oligonucleotide
  Antisense strand to SEQ ID NO: 1922288
uggucucguaggaaauggu

SEQ ID NO: 1922290 - RNA, 19 nt, Artificial Sequence
  Description of Artificial Sequence: Synthetic oligonucleotide
  Sense strand starting at position 1077 of SEQ ID NO: 1879650
gcaagccauguuuauuaga

SEQ ID NO: 1922291 - RNA, 19 nt, Artificial Sequence
  Description of Artificial Sequence: Synthetic oligonucleotide
  Antisense strand to SEQ ID NO: 1922290
ucuaauaaacauggcuugc

SEQ ID NO: 1922292 - RNA, 19 nt, Artificial Sequence
  Description of Artificial Sequence: Synthetic oligonucleotide
  Sense strand starting at position 1116 of SEQ ID NO: 1879650
ccaauaacuagaggugugu

SEQ ID NO: 1922293 - RNA, 19 nt, Artificial Sequence
  Description of Artificial Sequence: Synthetic oligonucleotide
  Antisense strand to SEQ ID NO: 1922292
acacaccucuaguuauugg

SEQ ID NO: 1922294 - RNA, 19 nt, Artificial Sequence
  Description of Artificial Sequence: Synthetic oligonucleotide
  Sense strand starting at position 1242 of SEQ ID NO: 1879650
ccaguuaaucgcuucgcaa

SEQ ID NO: 1922295 - RNA, 19 nt, Artificial Sequence
  Description of Artificial Sequence: Synthetic oligonucleotide
  Antisense strand to SEQ ID NO: 1922294
uugcgaagcgauuaacugg

SEQ ID NO: 1922296 - RNA, 19 nt, Artificial Sequence
  Description of Artificial Sequence: Synthetic oligonucleotide
  Sense strand starting at position 1243 of SEQ ID NO: 1879650
caguuaaucgcuucgcaau

SEQ ID NO: 1922297 - RNA, 19 nt, Artificial Sequence
  Description of Artificial Sequence: Synthetic oligonucleotide
  Antisense strand to SEQ ID NO: 1922296
auugcgaagcgauuaacug

SEQ ID NO: 1922298 - RNA, 19 nt, Artificial Sequence
  Description of Artificial Sequence: Synthetic oligonucleotide
  Sense strand starting at position 1294 of SEQ ID NO: 1879650
aagcaauggguuugaggaa

SEQ ID NO: 1922299 - RNA, 19 nt, Artificial Sequence
  Description of Artificial Sequence: Synthetic oligonucleotide
  Antisense strand to SEQ ID NO: 1922298
uuccucaaacccauugcuu

SEQ ID NO: 1922300 - RNA, 19 nt, Artificial Sequence
  Description of Artificial Sequence: Synthetic oligonucleotide
  Sense strand starting at position 1512 of SEQ ID NO: 1879650
guauacacaucuuuacuga

SEQ ID NO: 1922301 - RNA, 19 nt, Artificial Sequence
  Description of Artificial Sequence: Synthetic oligonucleotide
  Antisense strand to SEQ ID NO: 1922300
ucaguaaagauguguauac

SEQ ID NO: 1922302 - RNA, 19 nt, Artificial Sequence
  Description of Artificial Sequence: Synthetic oligonucleotide
  Sense strand starting at position 1526 of SEQ ID NO: 1879650
acugaauaauacucucguu

SEQ ID NO: 1922303 - RNA, 19 nt, Artificial Sequence
  Description of Artificial Sequence: Synthetic oligonucleotide
  Antisense strand to SEQ ID NO: 1922302
aacgagaguauuauucagu

SEQ ID NO: 1922304 - RNA, 19 nt, Artificial Sequence
  Description of Artificial Sequence: Synthetic oligonucleotide
  Sense strand starting at position 1534 of SEQ ID NO: 1879650
auacucucguucucagaca

SEQ ID NO: 1922305 - RNA, 19 nt, Artificial Sequence
  Description of Artificial Sequence: Synthetic oligonucleotide
  Antisense strand to SEQ ID NO: 1922304
ugucugagaacgagaguau

SEQ ID NO: 1922306 - RNA, 19 nt, Artificial Sequence
  Description of Artificial Sequence: Synthetic oligonucleotide
  Sense strand starting at position 1619 of SEQ ID NO: 1879650
ugcugagauuugucuugcu

SEQ ID NO: 1922307 - RNA, 19 nt, Artificial Sequence
  Description of Artificial Sequence: Synthetic oligonucleotide
  Antisense strand to SEQ ID NO: 1922306
agcaagacaaaucucagca

SEQ ID NO: 1922308 - RNA, 19 nt, Artificial Sequence
  Description of Artificial Sequence: Synthetic oligonucleotide
  Sense strand starting at position 1710 of SEQ ID NO: 1879650
acuccaacuguguguagaa

SEQ ID NO: 1922309 - RNA, 19 nt, Artificial Sequence
  Description of Artificial Sequence: Synthetic oligonucleotide
  Antisense strand to SEQ ID NO: 1922308
uucuacacacaguuggagu

SEQ ID NO: 1922310 - RNA, 19 nt, Artificial Sequence
  Description of Artificial Sequence: Synthetic oligonucleotide
  Sense strand starting at position 1731 of SEQ ID NO: 1879650
cagggagucaucugaugug

SEQ ID NO: 1922311 - RNA, 19 nt, Artificial Sequence
  Description of Artificial Sequence: Synthetic oligonucleotide
  Antisense strand to SEQ ID NO: 1922310
cacaucagaugacucccug

SEQ ID NO: 1922312 - RNA, 19 nt, Artificial Sequence
  Description of Artificial Sequence: Synthetic oligonucleotide
  Sense strand starting at position 2059 of SEQ ID NO: 1879650
gaggguuggucugcaaaga

SEQ ID NO: 1922313 - RNA, 19 nt, Artificial Sequence
  Description of Artificial Sequence: Synthetic oligonucleotide
  Antisense strand to SEQ ID NO: 1922312
ucuuugcagaccaacccuc

SEQ ID NO: 1922314 - RNA, 19 nt, Artificial Sequence
  Description of Artificial Sequence: Synthetic oligonucleotide
  Sense strand starting at position 2088 of SEQ ID NO: 1879650
agcagagcauaauucgaua

SEQ ID NO: 1922315 - RNA, 19 nt, Artificial Sequence
  Description of Artificial Sequence: Synthetic oligonucleotide
  Antisense strand to SEQ ID NO: 1922314
uaucgaauuaugcucugcu

SEQ ID NO: 1922316 - RNA, 19 nt, Artificial Sequence
  Description of Artificial Sequence: Synthetic oligonucleotide
  Sense strand starting at position 2093 of SEQ ID NO: 1879650
agcauaauucgauaugguc

SEQ ID NO: 1922317 - RNA, 19 nt, Artificial Sequence
  Description of Artificial Sequence: Synthetic oligonucleotide
  Antisense strand to SEQ ID NO: 1922316
gaccauaucgaauuaugcu

SEQ ID NO: 1922318 - RNA, 19 nt, Artificial Sequence
  Description of Artificial Sequence: Synthetic oligonucleotide
  Sense strand starting at position 2162 of SEQ ID NO: 1879650
caugcuaaugguggauuaa

SEQ ID NO: 1922319 - RNA, 19 nt, Artificial Sequence
  Description of Artificial Sequence: Synthetic oligonucleotide
  Antisense strand to SEQ ID NO: 1922318
uuaauccaccauuagcaug

SEQ ID NO: 1922320 - RNA, 19 nt, Artificial Sequence
  Description of Artificial Sequence: Synthetic oligonucleotide
  Sense strand starting at position 2163 of SEQ ID NO: 1879650
augcuaaugguggauuaau

SEQ ID NO: 1922321 - RNA, 19 nt, Artificial Sequence
  Description of Artificial Sequence: Synthetic oligonucleotide
  Antisense strand to SEQ ID NO: 1922320
auuaauccaccauuagcau

SEQ ID NO: 1922322 - RNA, 19 nt, Artificial Sequence
  Description of Artificial Sequence: Synthetic oligonucleotide
  Sense strand starting at position 2241 of SEQ ID NO: 1879650
ggaccaaugccuuguggga

SEQ ID NO: 1922323 - RNA, 19 nt, Artificial Sequence
  Description of Artificial Sequence: Synthetic oligonucleotide
  Antisense strand to SEQ ID NO: 1922322
ucccacaaggcauuggucc

SEQ ID NO: 1922324 - RNA, 19 nt, Artificial Sequence
  Description of Artificial Sequence: Synthetic oligonucleotide
  Sense strand starting at position 2447 of SEQ ID NO: 1879650
augaucucuuuaccauagu

SEQ ID NO: 1922325 - RNA, 19 nt, Artificial Sequence
  Description of Artificial Sequence: Synthetic oligonucleotide
  Antisense strand to SEQ ID NO: 1922324
acuaugguaaagagaucau

SEQ ID NO: 1922326 - RNA, 19 nt, Artificial Sequence
  Description of Artificial Sequence: Synthetic oligonucleotide
  Sense strand starting at position 2580 of SEQ ID NO: 1879650
uccuuacugugaucaaagu

SEQ ID NO: 1922327 - RNA, 19 nt, Artificial Sequence
  Description of Artificial Sequence: Synthetic oligonucleotide
  Antisense strand to SEQ ID NO: 1922326
acuuugaucacaguaagga

SEQ ID NO: 1922328 - RNA, 19 nt, Artificial Sequence
  Description of Artificial Sequence: Synthetic oligonucleotide
  Sense strand starting at position 2581 of SEQ ID NO: 1879650
ccuuacugugaucaaagua

SEQ ID NO: 1922329 - RNA, 19 nt, Artificial Sequence
  Description of Artificial Sequence: Synthetic oligonucleotide
  Antisense strand to SEQ ID NO: 1922328
uacuuugaucacaguaagg

SEQ ID NO: 1922330 - RNA, 19 nt, Artificial Sequence
  Description of Artificial Sequence: Synthetic oligonucleotide
  Sense strand starting at position 2608 of SEQ ID NO: 1879650
gcaugugcaguauacagaa

SEQ ID NO: 1922331 - RNA, 19 nt, Artificial Sequence
  Description of Artificial Sequence: Synthetic oligonucleotide
  Antisense strand to SEQ ID NO: 1922330
uucuguauacugcacaugc

SEQ ID NO: 1922332 - RNA, 19 nt, Artificial Sequence
  Description of Artificial Sequence: Synthetic oligonucleotide
  Sense strand starting at position 2760 of SEQ ID NO: 1879650
guaugauugcagugaggag

SEQ ID NO: 1922333 - RNA, 19 nt, Artificial Sequence
  Description of Artificial Sequence: Synthetic oligonucleotide
  Antisense strand to SEQ ID NO: 1922332
cuccucacugcaaucauac

SEQ ID NO: 1922334 - RNA, 19 nt, Artificial Sequence
  Description of Artificial Sequence: Synthetic oligonucleotide
  Sense strand starting at position 2846 of SEQ ID NO: 1879650
ccagucuucccagaucagu

SEQ ID NO: 1922335 - RNA, 19 nt, Artificial Sequence
  Description of Artificial Sequence: Synthetic oligonucleotide
  Antisense strand to SEQ ID NO: 1922334
acugaucugggaagacugg

SEQ ID NO: 1922336 - RNA, 19 nt, Artificial Sequence
  Description of Artificial Sequence: Synthetic oligonucleotide
  Sense strand starting at position 2920 of SEQ ID NO: 1879650
gagaguguggauuaucgau

SEQ ID NO: 1922337 - RNA, 19 nt, Artificial Sequence
  Description of Artificial Sequence: Synthetic oligonucleotide
  Antisense strand to SEQ ID NO: 1922336
aucgauaauccacacucuc

SEQ ID NO: 1922338 - RNA, 19 nt, Artificial Sequence
  Description of Artificial Sequence: Synthetic oligonucleotide
  Sense strand starting at position 2922 of SEQ ID NO: 1879650
gaguguggauuaucgauag

SEQ ID NO: 1922339 - RNA, 19 nt, Artificial Sequence
  Description of Artificial Sequence: Synthetic oligonucleotide
  Antisense strand to SEQ ID NO: 1922338
cuaucgauaauccacacuc

SEQ ID NO: 1922340 - RNA, 19 nt, Artificial Sequence
  Description of Artificial Sequence: Synthetic oligonucleotide
  Sense strand starting at position 2926 of SEQ ID NO: 1879650
guggauuaucgauagccaa

SEQ ID NO: 1922341 - RNA, 19 nt, Artificial Sequence
  Description of Artificial Sequence: Synthetic oligonucleotide
  Antisense strand to SEQ ID NO: 1922340
uuggcuaucgauaauccac

SEQ ID NO: 1922342 - RNA, 19 nt, Artificial Sequence
  Description of Artificial Sequence: Synthetic oligonucleotide
  Sense strand starting at position 3136 of SEQ ID NO: 1879650
uaggguuuauuaucuagau

SEQ ID NO: 1922343 - RNA, 19 nt, Artificial Sequence
  Description of Artificial Sequence: Synthetic oligonucleotide
  Antisense strand to SEQ ID NO: 1922342
aucuagauaauaaacccua

SEQ ID NO: 1922344 - RNA, 19 nt, Artificial Sequence
  Description of Artificial Sequence: Synthetic oligonucleotide
  Sense strand starting at position 3137 of SEQ ID NO: 1879650
aggguuuauuaucuagaua

SEQ ID NO: 1922345 - RNA, 19 nt, Artificial Sequence
  Description of Artificial Sequence: Synthetic oligonucleotide
  Antisense strand to SEQ ID NO: 1922344
uaucuagauaauaaacccu

SEQ ID NO: 1922346 - RNA, 19 nt, Artificial Sequence
  Description of Artificial Sequence: Synthetic oligonucleotide
  Sense strand starting at position 3145 of SEQ ID NO: 1879650
uuaucuagauaugugacua

SEQ ID NO: 1922347 - RNA, 19 nt, Artificial Sequence
  Description of Artificial Sequence: Synthetic oligonucleotide
  Antisense strand to SEQ ID NO: 1922346
uagucacauaucuagauaa

SEQ ID NO: 1922348 - RNA, 19 nt, Artificial Sequence
  Description of Artificial Sequence: Synthetic oligonucleotide
  Sense strand starting at position 3149 of SEQ ID NO: 1879650
cuagauaugugacuaucuu

SEQ ID NO: 1922349 - RNA, 19 nt, Artificial Sequence
  Description of Artificial Sequence: Synthetic oligonucleotide
  Antisense strand to SEQ ID NO: 1922348
aagauagucacauaucuag

SEQ ID NO: 1922350 - RNA, 19 nt, Artificial Sequence
  Description of Artificial Sequence: Synthetic oligonucleotide
  Sense strand starting at position 3290 of SEQ ID NO: 1879650
guaguaaacaauuaguguu

SEQ ID NO: 1922351 - RNA, 19 nt, Artificial Sequence
  Description of Artificial Sequence: Synthetic oligonucleotide
  Antisense strand to SEQ ID NO: 1922350
aacacuaauuguuuacuac

SEQ ID NO: 1922352 - RNA, 19 nt, Artificial Sequence
  Description of Artificial Sequence: Synthetic oligonucleotide
  Sense strand starting at position 3484 of SEQ ID NO: 1879650
acaacauuccagggucaua

SEQ ID NO: 1922353 - RNA, 19 nt, Artificial Sequence
  Description of Artificial Sequence: Synthetic oligonucleotide
  Antisense strand to SEQ ID NO: 1922352
uaugacccuggaauguugu

SEQ ID NO: 1922354 - RNA, 19 nt, Artificial Sequence
  Description of Artificial Sequence: Synthetic oligonucleotide
  Sense strand starting at position 3539 of SEQ ID NO: 1879650
uugucauucgugucaagcu

SEQ ID NO: 1922355 - RNA, 19 nt, Artificial Sequence
  Description of Artificial Sequence: Synthetic oligonucleotide
  Antisense strand to SEQ ID NO: 1922354
agcuugacacgaaugacaa

SEQ ID NO: 1922356 - RNA, 19 nt, Artificial Sequence
  Description of Artificial Sequence: Synthetic oligonucleotide
  Sense strand starting at position 3598 of SEQ ID NO: 1879650
uggccaaguccucaggaaa

SEQ ID NO: 1922357 - RNA, 19 nt, Artificial Sequence
  Description of Artificial Sequence: Synthetic oligonucleotide
  Antisense strand to SEQ ID NO: 1922356
uuuccugaggacuuggcca

SEQ ID NO: 1922358 - RNA, 19 nt, Artificial Sequence
  Description of Artificial Sequence: Synthetic oligonucleotide
  Sense strand starting at position 3804 of SEQ ID NO: 1879650
uugugauacaaggagcauu

SEQ ID NO: 1922359 - RNA, 19 nt, Artificial Sequence
  Description of Artificial Sequence: Synthetic oligonucleotide
  Antisense strand to SEQ ID NO: 1922358
aaugcuccuuguaucacaa

SEQ ID NO: 1922360 - RNA, 19 nt, Artificial Sequence
  Description of Artificial Sequence: Synthetic oligonucleotide
  Sense strand starting at position 3937 of SEQ ID NO: 1879650
auauauagcccugggcaau

SEQ ID NO: 1922361 - RNA, 19 nt, Artificial Sequence
  Description of Artificial Sequence: Synthetic oligonucleotide
  Antisense strand to SEQ ID NO: 1922360
auugcccagggcuauauau

SEQ ID NO: 1922362 - RNA, 19 nt, Artificial Sequence
  Description of Artificial Sequence: Synthetic oligonucleotide
  Sense strand starting at position 3975 of SEQ ID NO: 1879650
gguagacucaaugaagugu

SEQ ID NO: 1922363 - RNA, 19 nt, Artificial Sequence
  Description of Artificial Sequence: Synthetic oligonucleotide
  Antisense strand to SEQ ID NO: 1922362
acacuucauugagucuacc

SEQ ID NO: 1922364 - RNA, 19 nt, Artificial Sequence
  Description of Artificial Sequence: Synthetic oligonucleotide
  Sense strand starting at position 723 of SEQ ID NO: 1879651
ugaucaaauuccucuugga

SEQ ID NO: 1922365 - RNA, 19 nt, Artificial Sequence
  Description of Artificial Sequence: Synthetic oligonucleotide
  Antisense strand to SEQ ID NO: 1922364
uccaagaggaauuugauca

SEQ ID NO: 1922366 - RNA, 19 nt, Artificial Sequence
  Description of Artificial Sequence: Synthetic oligonucleotide
  Sense strand starting at position 997 of SEQ ID NO: 1879651
ugaacuugcuucucugaag

SEQ ID NO: 1922367 - RNA, 19 nt, Artificial Sequence
  Description of Artificial Sequence: Synthetic oligonucleotide
  Antisense strand to SEQ ID NO: 1922366
cuucagagaagcaaguuca

SEQ ID NO: 1922368 - RNA, 19 nt, Artificial Sequence
  Description of Artificial Sequence: Synthetic oligonucleotide
  Sense strand starting at position 1008 of SEQ ID NO: 1879651
cucugaagagugcauuaag

SEQ ID NO: 1922369 - RNA, 19 nt, Artificial Sequence
  Description of Artificial Sequence: Synthetic oligonucleotide
  Antisense strand to SEQ ID NO: 1922368
cuuaaugcacucuucagag

SEQ ID NO: 1922370 - RNA, 19 nt, Artificial Sequence
  Description of Artificial Sequence: Synthetic oligonucleotide
  Sense strand starting at position 1028 of SEQ ID NO: 1879651
agcaucugacuagaaguca

SEQ ID NO: 1922371 - RNA, 19 nt, Artificial Sequence
  Description of Artificial Sequence: Synthetic oligonucleotide
  Antisense strand to SEQ ID NO: 1922370
ugacuucuagucagaugcu

SEQ ID NO: 1922372 - RNA, 19 nt, Artificial Sequence
  Description of Artificial Sequence: Synthetic oligonucleotide
  Sense strand starting at position 1050 of SEQ ID NO: 1879651
ugucauguauucuuaggaa

SEQ ID NO: 1922373 - RNA, 19 nt, Artificial Sequence
  Description of Artificial Sequence: Synthetic oligonucleotide
  Antisense strand to SEQ ID NO: 1922372
uuccuaagaauacaugaca

SEQ ID NO: 1922374 - RNA, 19 nt, Artificial Sequence
  Description of Artificial Sequence: Synthetic oligonucleotide
  Sense strand starting at position 1077 of SEQ ID NO: 1879651
uguggucuccaguuccgua

SEQ ID NO: 1922375 - RNA, 19 nt, Artificial Sequence
  Description of Artificial Sequence: Synthetic oligonucleotide
  Antisense strand to SEQ ID NO: 1922374
uacggaacuggagaccaca

SEQ ID NO: 1922376 - RNA, 19 nt, Artificial Sequence
  Description of Artificial Sequence: Synthetic oligonucleotide
  Sense strand starting at position 1084 of SEQ ID NO: 1879651
uccaguuccguagauacua

SEQ ID NO: 1922377 - RNA, 19 nt, Artificial Sequence
  Description of Artificial Sequence: Synthetic oligonucleotide
  Antisense strand to SEQ ID NO: 1922376
uaguaucuacggaacugga

SEQ ID NO: 1922378 - RNA, 19 nt, Artificial Sequence
  Description of Artificial Sequence: Synthetic oligonucleotide
  Sense strand starting at position 1346 of SEQ ID NO: 1879651
gauaguaccacguaaggca

SEQ ID NO: 1922379 - RNA, 19 nt, Artificial Sequence
  Description of Artificial Sequence: Synthetic oligonucleotide
  Antisense strand to SEQ ID NO: 1922378
ugccuuacgugguacuauc

SEQ ID NO: 1922380 - RNA, 19 nt, Artificial Sequence
  Description of Artificial Sequence: Synthetic oligonucleotide
  Sense strand starting at position 1377 of SEQ ID NO: 1879651
guuagacauguugagguaa

SEQ ID NO: 1922381 - RNA, 19 nt, Artificial Sequence
  Description of Artificial Sequence: Synthetic oligonucleotide
  Antisense strand to SEQ ID NO: 1922380
uuaccucaacaugucuaac

SEQ ID NO: 1922382 - RNA, 19 nt, Artificial Sequence
  Description of Artificial Sequence: Synthetic oligonucleotide
  Sense strand starting at position 1447 of SEQ ID NO: 1879651
ucaaguauacuguaguuua

SEQ ID NO: 1922383 - RNA, 19 nt, Artificial Sequence
  Description of Artificial Sequence: Synthetic oligonucleotide
  Antisense strand to SEQ ID NO: 1922382
uaaacuacaguauacuuga

SEQ ID NO: 1922384 - RNA, 19 nt, Artificial Sequence
  Description of Artificial Sequence: Synthetic oligonucleotide
  Sense strand starting at position 1554 of SEQ ID NO: 1879651
acguaacugccauacucaa

SEQ ID NO: 1922385 - RNA, 19 nt, Artificial Sequence
  Description of Artificial Sequence: Synthetic oligonucleotide
  Antisense strand to SEQ ID NO: 1922384
uugaguauggcaguuacgu

SEQ ID NO: 1922386 - RNA, 19 nt, Artificial Sequence
  Description of Artificial Sequence: Synthetic oligonucleotide
  Sense strand starting at position 1603 of SEQ ID NO: 1879651
gugacaaguugauugacaa

SEQ ID NO: 1922387 - RNA, 19 nt, Artificial Sequence
  Description of Artificial Sequence: Synthetic oligonucleotide
  Antisense strand to SEQ ID NO: 1922386
uugucaaucaacuugucac

SEQ ID NO: 1922388 - RNA, 19 nt, Artificial Sequence
  Description of Artificial Sequence: Synthetic oligonucleotide
  Sense strand starting at position 1604 of SEQ ID NO: 1879651
ugacaaguugauugacaau

SEQ ID NO: 1922389 - RNA, 19 nt, Artificial Sequence
  Description of Artificial Sequence: Synthetic oligonucleotide
  Antisense strand to SEQ ID NO: 1922388
auugucaaucaacuuguca

SEQ ID NO: 1922390 - RNA, 19 nt, Artificial Sequence
  Description of Artificial Sequence: Synthetic oligonucleotide
  Sense strand starting at position 1632 of SEQ ID NO: 1879651
cugccagaguucgcauuua

SEQ ID NO: 1922391 - RNA, 19 nt, Artificial Sequence
  Description of Artificial Sequence: Synthetic oligonucleotide
  Antisense strand to SEQ ID NO: 1922390
uaaaugcgaacucuggcag

SEQ ID NO: 1922392 - RNA, 19 nt, Artificial Sequence
  Description of Artificial Sequence: Synthetic oligonucleotide
  Sense strand starting at position 1700 of SEQ ID NO: 1879651
uuaaacgaucucuggguua

SEQ ID NO: 1922393 - RNA, 19 nt, Artificial Sequence
  Description of Artificial Sequence: Synthetic oligonucleotide
  Antisense strand to SEQ ID NO: 1922392
uaacccagagaucguuuaa

SEQ ID NO: 1922394 - RNA, 19 nt, Artificial Sequence
  Description of Artificial Sequence: Synthetic oligonucleotide
  Sense strand starting at position 1702 of SEQ ID NO: 1879651
aaacgaucucuggguuaau

SEQ ID NO: 1922395 - RNA, 19 nt, Artificial Sequence
  Description of Artificial Sequence: Synthetic oligonucleotide
  Antisense strand to SEQ ID NO: 1922394
auuaacccagagaucguuu

SEQ ID NO: 1922396 - RNA, 19 nt, Artificial Sequence
  Description of Artificial Sequence: Synthetic oligonucleotide
  Sense strand starting at position 1703 of SEQ ID NO: 1879651
aacgaucucuggguuaaug

SEQ ID NO: 1922397 - RNA, 19 nt, Artificial Sequence
  Description of Artificial Sequence: Synthetic oligonucleotide
  Antisense strand to SEQ ID NO: 1922396
cauuaacccagagaucguu

SEQ ID NO: 1922398 - RNA, 19 nt, Artificial Sequence
  Description of Artificial Sequence: Synthetic oligonucleotide
  Sense strand starting at position 1705 of SEQ ID NO: 1879651
cgaucucuggguuaaugac

SEQ ID NO: 1922399 - RNA, 19 nt, Artificial Sequence
  Description of Artificial Sequence: Synthetic oligonucleotide
  Antisense strand to SEQ ID NO: 1922398
gucauuaacccagagaucg

SEQ ID NO: 1922400 - RNA, 19 nt, Artificial Sequence
  Description of Artificial Sequence: Synthetic oligonucleotide
  Sense strand starting at position 1761 of SEQ ID NO: 1879651
gcagacagcaguuaagaga

SEQ ID NO: 1922401 - RNA, 19 nt, Artificial Sequence
  Description of Artificial Sequence: Synthetic oligonucleotide
  Antisense strand to SEQ ID NO: 1922400
ucucuuaacugcugucugc

SEQ ID NO: 1922402 - RNA, 19 nt, Artificial Sequence
  Description of Artificial Sequence: Synthetic oligonucleotide
  Sense strand starting at position 1764 of SEQ ID NO: 1879651
gacagcaguuaagagauuu

SEQ ID NO: 1922403 - RNA, 19 nt, Artificial Sequence
  Description of Artificial Sequence: Synthetic oligonucleotide
  Antisense strand to SEQ ID NO: 1922402
aaaucucuuaacugcuguc

SEQ ID NO: 1922404 - RNA, 19 nt, Artificial Sequence
  Description of Artificial Sequence: Synthetic oligonucleotide
  Sense strand starting at position 1796 of SEQ ID NO: 1879651
ggacuuaacagcuaggucu

SEQ ID NO: 1922405 - RNA, 19 nt, Artificial Sequence
  Description of Artificial Sequence: Synthetic oligonucleotide
  Antisense strand to SEQ ID NO: 1922404
agaccuagcuguuaagucc

SEQ ID NO: 1922406 - RNA, 19 nt, Artificial Sequence
  Description of Artificial Sequence: Synthetic oligonucleotide
  Sense strand starting at position 1922 of SEQ ID NO: 1879651
uuaggucuggcacaacuua

SEQ ID NO: 1922407 - RNA, 19 nt, Artificial Sequence
  Description of Artificial Sequence: Synthetic oligonucleotide
  Antisense strand to SEQ ID NO: 1922406
uaaguugugccagaccuaa

SEQ ID NO: 1922408 - RNA, 19 nt, Artificial Sequence
  Description of Artificial Sequence: Synthetic oligonucleotide
  Sense strand starting at position 2238 of SEQ ID NO: 1879651
gguuaagaauuggcucuga

SEQ ID NO: 1922409 - RNA, 19 nt, Artificial Sequence
  Description of Artificial Sequence: Synthetic oligonucleotide
  Antisense strand to SEQ ID NO: 1922408
ucagagccaauucuuaacc

SEQ ID NO: 1922410 - RNA, 19 nt, Artificial Sequence
  Description of Artificial Sequence: Synthetic oligonucleotide
  Sense strand starting at position 2254 of SEQ ID NO: 1879651
ugaacuagauguucuauau

SEQ ID NO: 1922411 - RNA, 19 nt, Artificial Sequence
  Description of Artificial Sequence: Synthetic oligonucleotide
  Antisense strand to SEQ ID NO: 1922410
auauagaacaucuaguuca

SEQ ID NO: 1922412 - RNA, 19 nt, Artificial Sequence
  Description of Artificial Sequence: Synthetic oligonucleotide
  Sense strand starting at position 2313 of SEQ ID NO: 1879651
ggaaauaaaugguugugcu

SEQ ID NO: 1922413 - RNA, 19 nt, Artificial Sequence
  Description of Artificial Sequence: Synthetic oligonucleotide
  Antisense strand to SEQ ID NO: 1922412
agcacaaccauuuauuucc

SEQ ID NO: 1922414 - RNA, 19 nt, Artificial Sequence
  Description of Artificial Sequence: Synthetic oligonucleotide
  Sense strand starting at position 2505 of SEQ ID NO: 1879651
ggcccagaaagguguacau

SEQ ID NO: 1922415 - RNA, 19 nt, Artificial Sequence
  Description of Artificial Sequence: Synthetic oligonucleotide
  Antisense strand to SEQ ID NO: 1922414
auguacaccuuucugggcc

SEQ ID NO: 1922416 - RNA, 19 nt, Artificial Sequence
  Description of Artificial Sequence: Synthetic oligonucleotide
  Sense strand starting at position 2591 of SEQ ID NO: 1879651
ccaugaaaucuugguuaac

SEQ ID NO: 1922417 - RNA, 19 nt, Artificial Sequence
  Description of Artificial Sequence: Synthetic oligonucleotide
  Antisense strand to SEQ ID NO: 1922416
guuaaccaagauuucaugg

SEQ ID NO: 1922418 - RNA, 19 nt, Artificial Sequence
  Description of Artificial Sequence: Synthetic oligonucleotide
  Sense strand starting at position 2593 of SEQ ID NO: 1879651
augaaaucuugguuaacau

SEQ ID NO: 1922419 - RNA, 19 nt, Artificial Sequence
  Description of Artificial Sequence: Synthetic oligonucleotide
  Antisense strand to SEQ ID NO: 1922418
auguuaaccaagauuucau

SEQ ID NO: 1922420 - RNA, 19 nt, Artificial Sequence
  Description of Artificial Sequence: Synthetic oligonucleotide
  Sense strand starting at position 2682 of SEQ ID NO: 1879651
caaagcuggccaggaaaua

SEQ ID NO: 1922421 - RNA, 19 nt, Artificial Sequence
  Description of Artificial Sequence: Synthetic oligonucleotide
  Antisense strand to SEQ ID NO: 1922420
uauuuccuggccagcuuug

SEQ ID NO: 1922422 - RNA, 19 nt, Artificial Sequence
  Description of Artificial Sequence: Synthetic oligonucleotide
  Sense strand starting at position 2840 of SEQ ID NO: 1879651
ucaggaagaaccuguguuu

SEQ ID NO: 1922423 - RNA, 19 nt, Artificial Sequence
  Description of Artificial Sequence: Synthetic oligonucleotide
  Antisense strand to SEQ ID NO: 1922422
aaacacagguucuuccuga

SEQ ID NO: 1922424 - RNA, 19 nt, Artificial Sequence
  Description of Artificial Sequence: Synthetic oligonucleotide
  Sense strand starting at position 2891 of SEQ ID NO: 1879651
gagauauuguagcuauaga

SEQ ID NO: 1922425 - RNA, 19 nt, Artificial Sequence
  Description of Artificial Sequence: Synthetic oligonucleotide
  Antisense strand to SEQ ID NO: 1922424
ucuauagcuacaauaucuc

SEQ ID NO: 1922426 - RNA, 19 nt, Artificial Sequence
  Description of Artificial Sequence: Synthetic oligonucleotide
  Sense strand starting at position 2981 of SEQ ID NO: 1879651
uuagaaggaaugugcuaga

SEQ ID NO: 1922427 - RNA, 19 nt, Artificial Sequence
  Description of Artificial Sequence: Synthetic oligonucleotide
  Antisense strand to SEQ ID NO: 1922426
ucuagcacauuccuucuaa

SEQ ID NO: 1922428 - RNA, 19 nt, Artificial Sequence
  Description of Artificial Sequence: Synthetic oligonucleotide
  Sense strand starting at position 2986 of SEQ ID NO: 1879651
aggaaugugcuagauguuu

SEQ ID NO: 1922429 - RNA, 19 nt, Artificial Sequence
  Description of Artificial Sequence: Synthetic oligonucleotide
  Antisense strand to SEQ ID NO: 1922428
aaacaucuagcacauuccu

SEQ ID NO: 1922430 - RNA, 19 nt, Artificial Sequence
  Description of Artificial Sequence: Synthetic oligonucleotide
  Sense strand starting at position 3068 of SEQ ID NO: 1879651
augauaaucuggcuaacac

SEQ ID NO: 1922431 - RNA, 19 nt, Artificial Sequence
  Description of Artificial Sequence: Synthetic oligonucleotide
  Antisense strand to SEQ ID NO: 1922430
guguuagccagauuaucau

SEQ ID NO: 1922432 - RNA, 19 nt, Artificial Sequence
  Description of Artificial Sequence: Synthetic oligonucleotide
  Sense strand starting at position 3078 of SEQ ID NO: 1879651
ggcuaacaccuacagugau

SEQ ID NO: 1922433 - RNA, 19 nt, Artificial Sequence
  Description of Artificial Sequence: Synthetic oligonucleotide
  Antisense strand to SEQ ID NO: 1922432
aucacuguagguguuagcc

SEQ ID NO: 1922434 - RNA, 19 nt, Artificial Sequence
  Description of Artificial Sequence: Synthetic oligonucleotide
  Sense strand starting at position 3120 of SEQ ID NO: 1879651
uuguaagcacucuagguaa

SEQ ID NO: 1922435 - RNA, 19 nt, Artificial Sequence
  Description of Artificial Sequence: Synthetic oligonucleotide
  Antisense strand to SEQ ID NO: 1922434
uuaccuagagugcuuacaa

SEQ ID NO: 1922436 - RNA, 19 nt, Artificial Sequence
  Description of Artificial Sequence: Synthetic oligonucleotide
  Sense strand starting at position 3180 of SEQ ID NO: 1879651
acauuauuaucccuaguug

SEQ ID NO: 1922437 - RNA, 19 nt, Artificial Sequence
  Description of Artificial Sequence: Synthetic oligonucleotide
  Antisense strand to SEQ ID NO: 1922436
caacuagggauaauaaugu

SEQ ID NO: 1922438 - RNA, 19 nt, Artificial Sequence
  Description of Artificial Sequence: Synthetic oligonucleotide
  Sense strand starting at position 3573 of SEQ ID NO: 1879651
gcuguaguuguugcgaaua

SEQ ID NO: 1922439 - RNA, 19 nt, Artificial Sequence
  Description of Artificial Sequence: Synthetic oligonucleotide
  Antisense strand to SEQ ID NO: 1922438
uauucgcaacaacuacagc

SEQ ID NO: 1922440 - RNA, 19 nt, Artificial Sequence
  Description of Artificial Sequence: Synthetic oligonucleotide
  Sense strand starting at position 3835 of SEQ ID NO: 1879651
acucauaucccuuggaaug

SEQ ID NO: 1922441 - RNA, 19 nt, Artificial Sequence
  Description of Artificial Sequence: Synthetic oligonucleotide
  Antisense strand to SEQ ID NO: 1922440
cauuccaagggauaugagu

SEQ ID NO: 1922442 - RNA, 19 nt, Artificial Sequence
  Description of Artificial Sequence: Synthetic oligonucleotide
  Sense strand starting at position 3836 of SEQ ID NO: 1879651
cucauaucccuuggaauga

SEQ ID NO: 1922443 - RNA, 19 nt, Artificial Sequence
  Description of Artificial Sequence: Synthetic oligonucleotide
  Antisense strand to SEQ ID NO: 1922442
ucauuccaagggauaugag

SEQ ID NO: 1922444 - RNA, 19 nt, Artificial Sequence
  Description of Artificial Sequence: Synthetic oligonucleotide
  Sense strand starting at position 9 of SEQ ID NO: 1879652
gaaugauguuaugcacaag

SEQ ID NO: 1922445 - RNA, 19 nt, Artificial Sequence
  Description of Artificial Sequence: Synthetic oligonucleotide
  Antisense strand to SEQ ID NO: 1922444
cuugugcauaacaucauuc

SEQ ID NO: 1922446 - RNA, 19 nt, Artificial Sequence
  Description of Artificial Sequence: Synthetic oligonucleotide
  Sense strand starting at position 164 of SEQ ID NO: 1879652
ggguaaguaacuugaggau

SEQ ID NO: 1922447 - RNA, 19 nt, Artificial Sequence
  Description of Artificial Sequence: Synthetic oligonucleotide
  Antisense strand to SEQ ID NO: 1922446
auccucaaguuacuuaccc

SEQ ID NO: 1922448 - RNA, 19 nt, Artificial Sequence
  Description of Artificial Sequence: Synthetic oligonucleotide
  Sense strand starting at position 527 of SEQ ID NO: 1879652
gaagaaaugcugggucaga

SEQ ID NO: 1922449 - RNA, 19 nt, Artificial Sequence
  Description of Artificial Sequence: Synthetic oligonucleotide
  Antisense strand to SEQ ID NO: 1922448
ucugacccagcauuucuuc

SEQ ID NO: 1922450 - RNA, 19 nt, Artificial Sequence
  Description of Artificial Sequence: Synthetic oligonucleotide
  Sense strand starting at position 593 of SEQ ID NO: 1879652
uguccauaugaugauguga

SEQ ID NO: 1922451 - RNA, 19 nt, Artificial Sequence
  Description of Artificial Sequence: Synthetic oligonucleotide
  Antisense strand to SEQ ID NO: 1922450
ucacaucaucauauggaca

SEQ ID NO: 1922452 - RNA, 19 nt, Artificial Sequence
  Description of Artificial Sequence: Synthetic oligonucleotide
  Sense strand starting at position 643 of SEQ ID NO: 1879652
gacaguugccuuggagaua

SEQ ID NO: 1922453 - RNA, 19 nt, Artificial Sequence
  Description of Artificial Sequence: Synthetic oligonucleotide
  Antisense strand to SEQ ID NO: 1922452
uaucuccaaggcaacuguc

SEQ ID NO: 1922454 - RNA, 19 nt, Artificial Sequence
  Description of Artificial Sequence: Synthetic oligonucleotide
  Sense strand starting at position 659 of SEQ ID NO: 1879652
auaagagaaugagaaacua

SEQ ID NO: 1922455 - RNA, 19 nt, Artificial Sequence
  Description of Artificial Sequence: Synthetic oligonucleotide
  Antisense strand to SEQ ID NO: 1922454
uaguuucucauucucuuau

SEQ ID NO: 1922456 - RNA, 19 nt, Artificial Sequence
  Description of Artificial Sequence: Synthetic oligonucleotide
  Sense strand starting at position 712 of SEQ ID NO: 1879652
agauaucgaaugugguaaa

SEQ ID NO: 1922457 - RNA, 19 nt, Artificial Sequence
  Description of Artificial Sequence: Synthetic oligonucleotide
  Antisense strand to SEQ ID NO: 1922456
uuuaccacauucgauaucu

SEQ ID NO: 1922458 - RNA, 19 nt, Artificial Sequence
  Description of Artificial Sequence: Synthetic oligonucleotide
  Sense strand starting at position 792 of SEQ ID NO: 1879652
guuaaaggcaaaugggauu

SEQ ID NO: 1922459 - RNA, 19 nt, Artificial Sequence
  Description of Artificial Sequence: Synthetic oligonucleotide
  Antisense strand to SEQ ID NO: 1922458
aaucccauuugccuuuaac

SEQ ID NO: 1922460 - RNA, 19 nt, Artificial Sequence
  Description of Artificial Sequence: Synthetic oligonucleotide
  Sense strand starting at position 1026 of SEQ ID NO: 1879652
ccaugauaugcauaggcuu

SEQ ID NO: 1922461 - RNA, 19 nt, Artificial Sequence
  Description of Artificial Sequence: Synthetic oligonucleotide
  Antisense strand to SEQ ID NO: 1922460
aagccuaugcauaucaugg

SEQ ID NO: 1922462 - RNA, 19 nt, Artificial Sequence
  Description of Artificial Sequence: Synthetic oligonucleotide
  Sense strand starting at position 1050 of SEQ ID NO: 1879652
ugcaaagucagaugaguaa

SEQ ID NO: 1922463 - RNA, 19 nt, Artificial Sequence
  Description of Artificial Sequence: Synthetic oligonucleotide
  Antisense strand to SEQ ID NO: 1922462
uuacucaucugacuuugca

SEQ ID NO: 1922464 - RNA, 19 nt, Artificial Sequence
  Description of Artificial Sequence: Synthetic oligonucleotide
  Sense strand starting at position 1122 of SEQ ID NO: 1879652
cauagaaaguggguaaagu

SEQ ID NO: 1922465 - RNA, 19 nt, Artificial Sequence
  Description of Artificial Sequence: Synthetic oligonucleotide
  Antisense strand to SEQ ID NO: 1922464
acuuuacccacuuucuaug

SEQ ID NO: 1922466 - RNA, 19 nt, Artificial Sequence
  Description of Artificial Sequence: Synthetic oligonucleotide
  Sense strand starting at position 1173 of SEQ ID NO: 1879652
cuacuauaugacugucaug

SEQ ID NO: 1922467 - RNA, 19 nt, Artificial Sequence
  Description of Artificial Sequence: Synthetic oligonucleotide
  Antisense strand to SEQ ID NO: 1922466
caugacagucauauaguag

SEQ ID NO: 1922468 - RNA, 19 nt, Artificial Sequence
  Description of Artificial Sequence: Synthetic oligonucleotide
  Sense strand starting at position 1179 of SEQ ID NO: 1879652
uaugacugucaugaguguu

SEQ ID NO: 1922469 - RNA, 19 nt, Artificial Sequence
  Description of Artificial Sequence: Synthetic oligonucleotide
  Antisense strand to SEQ ID NO: 1922468
aacacucaugacagucaua

SEQ ID NO: 1922470 - RNA, 19 nt, Artificial Sequence
  Description of Artificial Sequence: Synthetic oligonucleotide
  Sense strand starting at position 1233 of SEQ ID NO: 1879652
ucguauuuagcauguuaca

SEQ ID NO: 1922471 - RNA, 19 nt, Artificial Sequence
  Description of Artificial Sequence: Synthetic oligonucleotide
  Antisense strand to SEQ ID NO: 1922470
uguaacaugcuaaauacga

SEQ ID NO: 1922472 - RNA, 19 nt, Artificial Sequence
  Description of Artificial Sequence: Synthetic oligonucleotide
  Sense strand starting at position 1562 of SEQ ID NO: 1879652
uuguuuaaaccagagucuu

SEQ ID NO: 1922473 - RNA, 19 nt, Artificial Sequence
  Description of Artificial Sequence: Synthetic oligonucleotide
  Antisense strand to SEQ ID NO: 1922472
aagacucugguuuaaacaa

SEQ ID NO: 1922474 - RNA, 19 nt, Artificial Sequence
  Description of Artificial Sequence: Synthetic oligonucleotide
  Sense strand starting at position 1690 of SEQ ID NO: 1879652
gauggaauaucuguugauu

SEQ ID NO: 1922475 - RNA, 19 nt, Artificial Sequence
  Description of Artificial Sequence: Synthetic oligonucleotide
  Antisense strand to SEQ ID NO: 1922474
aaucaacagauauuccauc

SEQ ID NO: 1922476 - RNA, 19 nt, Artificial Sequence
  Description of Artificial Sequence: Synthetic oligonucleotide
  Sense strand starting at position 1693 of SEQ ID NO: 1879652
ggaauaucuguugauugug

SEQ ID NO: 1922477 - RNA, 19 nt, Artificial Sequence
  Description of Artificial Sequence: Synthetic oligonucleotide
  Antisense strand to SEQ ID NO: 1922476
cacaaucaacagauauucc

SEQ ID NO: 1922478 - RNA, 19 nt, Artificial Sequence
  Description of Artificial Sequence: Synthetic oligonucleotide
  Sense strand starting at position 1779 of SEQ ID NO: 1879652
gacagcaaugaauguugau

SEQ ID NO: 1922479 - RNA, 19 nt, Artificial Sequence
  Description of Artificial Sequence: Synthetic oligonucleotide
  Antisense strand to SEQ ID NO: 1922478
aucaacauucauugcuguc

SEQ ID NO: 1922480 - RNA, 19 nt, Artificial Sequence
  Description of Artificial Sequence: Synthetic oligonucleotide
  Sense strand starting at position 1895 of SEQ ID NO: 1879652
guagaugaugguuagccau

SEQ ID NO: 1922481 - RNA, 19 nt, Artificial Sequence
  Description of Artificial Sequence: Synthetic oligonucleotide
  Antisense strand to SEQ ID NO: 1922480
auggcuaaccaucaucuac

SEQ ID NO: 1922482 - RNA, 19 nt, Artificial Sequence
  Description of Artificial Sequence: Synthetic oligonucleotide
  Sense strand starting at position 1901 of SEQ ID NO: 1879652
gaugguuagccauagggua

SEQ ID NO: 1922483 - RNA, 19 nt, Artificial Sequence
  Description of Artificial Sequence: Synthetic oligonucleotide
  Antisense strand to SEQ ID NO: 1922482
uacccuauggcuaaccauc

SEQ ID NO: 1922484 - RNA, 19 nt, Artificial Sequence
  Description of Artificial Sequence: Synthetic oligonucleotide
  Sense strand starting at position 2165 of SEQ ID NO: 1879652
uccacaucacauuguauga

SEQ ID NO: 1922485 - RNA, 19 nt, Artificial Sequence
  Description of Artificial Sequence: Synthetic oligonucleotide
  Antisense strand to SEQ ID NO: 1922484
ucauacaaugugaugugga

SEQ ID NO: 1922486 - RNA, 19 nt, Artificial Sequence
  Description of Artificial Sequence: Synthetic oligonucleotide
  Sense strand starting at position 2169 of SEQ ID NO: 1879652
caucacauuguaugagaga

SEQ ID NO: 1922487 - RNA, 19 nt, Artificial Sequence
  Description of Artificial Sequence: Synthetic oligonucleotide
  Antisense strand to SEQ ID NO: 1922486
ucucucauacaaugugaug

SEQ ID NO: 1922488 - RNA, 19 nt, Artificial Sequence
  Description of Artificial Sequence: Synthetic oligonucleotide
  Sense strand starting at position 2227 of SEQ ID NO: 1879652
gggcuaguuccagagaugg

SEQ ID NO: 1922489 - RNA, 19 nt, Artificial Sequence
  Description of Artificial Sequence: Synthetic oligonucleotide
  Antisense strand to SEQ ID NO: 1922488
ccaucucuggaacuagccc

SEQ ID NO: 1922490 - RNA, 19 nt, Artificial Sequence
  Description of Artificial Sequence: Synthetic oligonucleotide
  Sense strand starting at position 2244 of SEQ ID NO: 1879652
ggaauuaucucacuguuaa

SEQ ID NO: 1922491 - RNA, 19 nt, Artificial Sequence
  Description of Artificial Sequence: Synthetic oligonucleotide
  Antisense strand to SEQ ID NO: 1922490
uuaacagugagauaauucc

SEQ ID NO: 1922492 - RNA, 19 nt, Artificial Sequence
  Description of Artificial Sequence: Synthetic oligonucleotide
  Sense strand starting at position 2407 of SEQ ID NO: 1879652
ucaaauuggcauugaugau

SEQ ID NO: 1922493 - RNA, 19 nt, Artificial Sequence
  Description of Artificial Sequence: Synthetic oligonucleotide
  Antisense strand to SEQ ID NO: 1922492
aucaucaaugccaauuuga

SEQ ID NO: 1922494 - RNA, 19 nt, Artificial Sequence
  Description of Artificial Sequence: Synthetic oligonucleotide
  Sense strand starting at position 2670 of SEQ ID NO: 1879652
cuaacaucucuuuaugggu

SEQ ID NO: 1922495 - RNA, 19 nt, Artificial Sequence
  Description of Artificial Sequence: Synthetic oligonucleotide
  Antisense strand to SEQ ID NO: 1922494
acccauaaagagauguuag

SEQ ID NO: 1922496 - RNA, 19 nt, Artificial Sequence
  Description of Artificial Sequence: Synthetic oligonucleotide
  Sense strand starting at position 2899 of SEQ ID NO: 1879652
guuauagaguaauuaucug

SEQ ID NO: 1922497 - RNA, 19 nt, Artificial Sequence
  Description of Artificial Sequence: Synthetic oligonucleotide
  Antisense strand to SEQ ID NO: 1922496
cagauaauuacucuauaac

SEQ ID NO: 1922498 - RNA, 19 nt, Artificial Sequence
  Description of Artificial Sequence: Synthetic oligonucleotide
  Sense strand starting at position 2904 of SEQ ID NO: 1879652
agaguaauuaucuguagga

SEQ ID NO: 1922499 - RNA, 19 nt, Artificial Sequence
  Description of Artificial Sequence: Synthetic oligonucleotide
  Antisense strand to SEQ ID NO: 1922498
uccuacagauaauuacucu

SEQ ID NO: 1922500 - RNA, 19 nt, Artificial Sequence
  Description of Artificial Sequence: Synthetic oligonucleotide
  Sense strand starting at position 2905 of SEQ ID NO: 1879652
gaguaauuaucuguaggag

SEQ ID NO: 1922501 - RNA, 19 nt, Artificial Sequence
  Description of Artificial Sequence: Synthetic oligonucleotide
  Antisense strand to SEQ ID NO: 1922500
cuccuacagauaauuacuc

SEQ ID NO: 1922502 - RNA, 19 nt, Artificial Sequence
  Description of Artificial Sequence: Synthetic oligonucleotide
  Sense strand starting at position 2941 of SEQ ID NO: 1879652
uuggaaugcuacuuugaag

SEQ ID NO: 1922503 - RNA, 19 nt, Artificial Sequence
  Description of Artificial Sequence: Synthetic oligonucleotide
  Antisense strand to SEQ ID NO: 1922502
cuucaaaguagcauuccaa

SEQ ID NO: 1922504 - RNA, 19 nt, Artificial Sequence
  Description of Artificial Sequence: Synthetic oligonucleotide
  Sense strand starting at position 2958 of SEQ ID NO: 1879652
aggugauaauggucuauuc

SEQ ID NO: 1922505 - RNA, 19 nt, Artificial Sequence
  Description of Artificial Sequence: Synthetic oligonucleotide
  Antisense strand to SEQ ID NO: 1922504
gaauagaccauuaucaccu

SEQ ID NO: 1922506 - RNA, 19 nt, Artificial Sequence
  Description of Artificial Sequence: Synthetic oligonucleotide
  Sense strand starting at position 2996 of SEQ ID NO: 1879652
cgaaauguuagugaaauau

SEQ ID NO: 1922507 - RNA, 19 nt, Artificial Sequence
  Description of Artificial Sequence: Synthetic oligonucleotide
  Antisense strand to SEQ ID NO: 1922506
auauuucacuaacauuucg

SEQ ID NO: 1922508 - RNA, 19 nt, Artificial Sequence
  Description of Artificial Sequence: Synthetic oligonucleotide
  Sense strand starting at position 3268 of SEQ ID NO: 1879652
acccuagaagaaugcuuua

SEQ ID NO: 1922509 - RNA, 19 nt, Artificial Sequence
  Description of Artificial Sequence: Synthetic oligonucleotide
  Antisense strand to SEQ ID NO: 1922508
uaaagcauucuucuagggu

SEQ ID NO: 1922510 - RNA, 19 nt, Artificial Sequence
  Description of Artificial Sequence: Synthetic oligonucleotide
  Sense strand starting at position 3271 of SEQ ID NO: 1879652
cuagaagaaugcuuuauca

SEQ ID NO: 1922511 - RNA, 19 nt, Artificial Sequence
  Description of Artificial Sequence: Synthetic oligonucleotide
  Antisense strand to SEQ ID NO: 1922510
ugauaaagcauucuucuag

SEQ ID NO: 1922512 - RNA, 19 nt, Artificial Sequence
  Description of Artificial Sequence: Synthetic oligonucleotide
  Sense strand starting at position 3273 of SEQ ID NO: 1879652
agaagaaugcuuuaucagu

SEQ ID NO: 1922513 - RNA, 19 nt, Artificial Sequence
  Description of Artificial Sequence: Synthetic oligonucleotide
  Antisense strand to SEQ ID NO: 1922512
acugauaaagcauucuucu

SEQ ID NO: 1922514 - RNA, 19 nt, Artificial Sequence
  Description of Artificial Sequence: Synthetic oligonucleotide
  Sense strand starting at position 3275 of SEQ ID NO: 1879652
aagaaugcuuuaucaguag

SEQ ID NO: 1922515 - RNA, 19 nt, Artificial Sequence
  Description of Artificial Sequence: Synthetic oligonucleotide
  Antisense strand to SEQ ID NO: 1922514
cuacugauaaagcauucuu

SEQ ID NO: 1922516 - RNA, 19 nt, Artificial Sequence
  Description of Artificial Sequence: Synthetic oligonucleotide
  Sense strand starting at position 3281 of SEQ ID NO: 1879652
gcuuuaucaguaggcauuu

SEQ ID NO: 1922517 - RNA, 19 nt, Artificial Sequence
  Description of Artificial Sequence: Synthetic oligonucleotide
  Antisense strand to SEQ ID NO: 1922516
aaaugccuacugauaaagc

SEQ ID NO: 1922518 - RNA, 19 nt, Artificial Sequence
  Description of Artificial Sequence: Synthetic oligonucleotide
  Sense strand starting at position 3415 of SEQ ID NO: 1879652
gugucaggucaauauacaa

SEQ ID NO: 1922519 - RNA, 19 nt, Artificial Sequence
  Description of Artificial Sequence: Synthetic oligonucleotide
  Antisense strand to SEQ ID NO: 1922518
uuguauauugaccugacac

SEQ ID NO: 1922520 - RNA, 19 nt, Artificial Sequence
  Description of Artificial Sequence: Synthetic oligonucleotide
  Sense strand starting at position 3632 of SEQ ID NO: 1879652
ccuagaagucuuuggaaga

SEQ ID NO: 1922521 - RNA, 19 nt, Artificial Sequence
  Description of Artificial Sequence: Synthetic oligonucleotide
  Antisense strand to SEQ ID NO: 1922520
ucuuccaaagacuucuagg

SEQ ID NO: 1922522 - RNA, 19 nt, Artificial Sequence
  Description of Artificial Sequence: Synthetic oligonucleotide
  Sense strand starting at position 3834 of SEQ ID NO: 1879652
cuuuccuugggcuaaucau

SEQ ID NO: 1922523 - RNA, 19 nt, Artificial Sequence
  Description of Artificial Sequence: Synthetic oligonucleotide
  Antisense strand to SEQ ID NO: 1922522
augauuagcccaaggaaag

SEQ ID NO: 1922524 - RNA, 19 nt, Artificial Sequence
  Description of Artificial Sequence: Synthetic oligonucleotide
  Sense strand starting at position 11 of SEQ ID NO: 1879653
ucugauaagaucuguugag

SEQ ID NO: 1922525 - RNA, 19 nt, Artificial Sequence
  Description of Artificial Sequence: Synthetic oligonucleotide
  Antisense strand to SEQ ID NO: 1922524
cucaacagaucuuaucaga

SEQ ID NO: 1922526 - RNA, 19 nt, Artificial Sequence
  Description of Artificial Sequence: Synthetic oligonucleotide
  Sense strand starting at position 12 of SEQ ID NO: 1879653
cugauaagaucuguugaga

SEQ ID NO: 1922527 - RNA, 19 nt, Artificial Sequence
  Description of Artificial Sequence: Synthetic oligonucleotide
  Antisense strand to SEQ ID NO: 1922526
ucucaacagaucuuaucag

SEQ ID NO: 1922528 - RNA, 19 nt, Artificial Sequence
  Description of Artificial Sequence: Synthetic oligonucleotide
  Sense strand starting at position 28 of SEQ ID NO: 1879653
agaugagauuucuacacca

SEQ ID NO: 1922529 - RNA, 19 nt, Artificial Sequence
  Description of Artificial Sequence: Synthetic oligonucleotide
  Antisense strand to SEQ ID NO: 1922528
ugguguagaaaucucaucu

SEQ ID NO: 1922530 - RNA, 19 nt, Artificial Sequence
  Description of Artificial Sequence: Synthetic oligonucleotide
  Sense strand starting at position 162 of SEQ ID NO: 1879653
ggcugucuaggguaagaga

SEQ ID NO: 1922531 - RNA, 19 nt, Artificial Sequence
  Description of Artificial Sequence: Synthetic oligonucleotide
  Antisense strand to SEQ ID NO: 1922530
ucucuuacccuagacagcc

SEQ ID NO: 1922532 - RNA, 19 nt, Artificial Sequence
  Description of Artificial Sequence: Synthetic oligonucleotide
  Sense strand starting at position 274 of SEQ ID NO: 1879653
gcgugcaagcuccuugauu

SEQ ID NO: 1922533 - RNA, 19 nt, Artificial Sequence
  Description of Artificial Sequence: Synthetic oligonucleotide
  Antisense strand to SEQ ID NO: 1922532
aaucaaggagcuugcacgc

SEQ ID NO: 1922534 - RNA, 19 nt, Artificial Sequence
  Description of Artificial Sequence: Synthetic oligonucleotide
  Sense strand starting at position 564 of SEQ ID NO: 1879653
auaauuaguuaugucugga

SEQ ID NO: 1922535 - RNA, 19 nt, Artificial Sequence
  Description of Artificial Sequence: Synthetic oligonucleotide
  Antisense strand to SEQ ID NO: 1922534
uccagacauaacuaauuau

SEQ ID NO: 1922536 - RNA, 19 nt, Artificial Sequence
  Description of Artificial Sequence: Synthetic oligonucleotide
  Sense strand starting at position 601 of SEQ ID NO: 1879653
ucaauaauugauggaguua

SEQ ID NO: 1922537 - RNA, 19 nt, Artificial Sequence
  Description of Artificial Sequence: Synthetic oligonucleotide
  Antisense strand to SEQ ID NO: 1922536
uaacuccaucaauuauuga

SEQ ID NO: 1922538 - RNA, 19 nt, Artificial Sequence
  Description of Artificial Sequence: Synthetic oligonucleotide
  Sense strand starting at position 713 of SEQ ID NO: 1879653
acuggugugauuugccuuu

SEQ ID NO: 1922539 - RNA, 19 nt, Artificial Sequence
  Description of Artificial Sequence: Synthetic oligonucleotide
  Antisense strand to SEQ ID NO: 1922538
aaaggcaaaucacaccagu

SEQ ID NO: 1922540 - RNA, 19 nt, Artificial Sequence
  Description of Artificial Sequence: Synthetic oligonucleotide
  Sense strand starting at position 808 of SEQ ID NO: 1879653
agauuacuguagcugaaua

SEQ ID NO: 1922541 - RNA, 19 nt, Artificial Sequence
  Description of Artificial Sequence: Synthetic oligonucleotide
  Antisense strand to SEQ ID NO: 1922540
uauucagcuacaguaaucu

SEQ ID NO: 1922542 - RNA, 19 nt, Artificial Sequence
  Description of Artificial Sequence: Synthetic oligonucleotide
  Sense strand starting at position 810 of SEQ ID NO: 1879653
auuacuguagcugaauaua

SEQ ID NO: 1922543 - RNA, 19 nt, Artificial Sequence
  Description of Artificial Sequence: Synthetic oligonucleotide
  Antisense strand to SEQ ID NO: 1922542
uauauucagcuacaguaau

SEQ ID NO: 1922544 - RNA, 19 nt, Artificial Sequence
  Description of Artificial Sequence: Synthetic oligonucleotide
  Sense strand starting at position 837 of SEQ ID NO: 1879653
gcaguaaugcaggaacauu

SEQ ID NO: 1922545 - RNA, 19 nt, Artificial Sequence
  Description of Artificial Sequence: Synthetic oligonucleotide
  Antisense strand to SEQ ID NO: 1922544
aauguuccugcauuacugc

SEQ ID NO: 1922546 - RNA, 19 nt, Artificial Sequence
  Description of Artificial Sequence: Synthetic oligonucleotide
  Sense strand starting at position 1212 of SEQ ID NO: 1879653
ucacauuguguggacuaca

SEQ ID NO: 1922547 - RNA, 19 nt, Artificial Sequence
  Description of Artificial Sequence: Synthetic oligonucleotide
  Antisense strand to SEQ ID NO: 1922546
uguaguccacacaauguga

SEQ ID NO: 1922548 - RNA, 19 nt, Artificial Sequence
  Description of Artificial Sequence: Synthetic oligonucleotide
  Sense strand starting at position 1215 of SEQ ID NO: 1879653
cauuguguggacuacaaca

SEQ ID NO: 1922549 - RNA, 19 nt, Artificial Sequence
  Description of Artificial Sequence: Synthetic oligonucleotide
  Antisense strand to SEQ ID NO: 1922548
uguuguaguccacacaaug

SEQ ID NO: 1922550 - RNA, 19 nt, Artificial Sequence
  Description of Artificial Sequence: Synthetic oligonucleotide
  Sense strand starting at position 1382 of SEQ ID NO: 1879653
acugucagaugucuggaaa

SEQ ID NO: 1922551 - RNA, 19 nt, Artificial Sequence
  Description of Artificial Sequence: Synthetic oligonucleotide
  Antisense strand to SEQ ID NO: 1922550
uuuccagacaucugacagu

SEQ ID NO: 1922552 - RNA, 19 nt, Artificial Sequence
  Description of Artificial Sequence: Synthetic oligonucleotide
  Sense strand starting at position 1383 of SEQ ID NO: 1879653
cugucagaugucuggaaag

SEQ ID NO: 1922553 - RNA, 19 nt, Artificial Sequence
  Description of Artificial Sequence: Synthetic oligonucleotide
  Antisense strand to SEQ ID NO: 1922552
cuuuccagacaucugacag

SEQ ID NO: 1922554 - RNA, 19 nt, Artificial Sequence
  Description of Artificial Sequence: Synthetic oligonucleotide
  Sense strand starting at position 1385 of SEQ ID NO: 1879653
gucagaugucuggaaaguc

SEQ ID NO: 1922555 - RNA, 19 nt, Artificial Sequence
  Description of Artificial Sequence: Synthetic oligonucleotide
  Antisense strand to SEQ ID NO: 1922554
gacuuuccagacaucugac

SEQ ID NO: 1922556 - RNA, 19 nt, Artificial Sequence
  Description of Artificial Sequence: Synthetic oligonucleotide
  Sense strand starting at position 1649 of SEQ ID NO: 1879653
acaauugucccuggaauau

SEQ ID NO: 1922557 - RNA, 19 nt, Artificial Sequence
  Description of Artificial Sequence: Synthetic oligonucleotide
  Antisense strand to SEQ ID NO: 1922556
auauuccagggacaauugu

SEQ ID NO: 1922558 - RNA, 19 nt, Artificial Sequence
  Description of Artificial Sequence: Synthetic oligonucleotide
  Sense strand starting at position 1805 of SEQ ID NO: 1879653
aacgguuauuugcucuagu

SEQ ID NO: 1922559 - RNA, 19 nt, Artificial Sequence
  Description of Artificial Sequence: Synthetic oligonucleotide
  Antisense strand to SEQ ID NO: 1922558
acuagagcaaauaaccguu

SEQ ID NO: 1922560 - RNA, 19 nt, Artificial Sequence
  Description of Artificial Sequence: Synthetic oligonucleotide
  Sense strand starting at position 1808 of SEQ ID NO: 1879653
gguuauuugcucuaguuuc

SEQ ID NO: 1922561 - RNA, 19 nt, Artificial Sequence
  Description of Artificial Sequence: Synthetic oligonucleotide
  Antisense strand to SEQ ID NO: 1922560
gaaacuagagcaaauaacc

SEQ ID NO: 1922562 - RNA, 19 nt, Artificial Sequence
  Description of Artificial Sequence: Synthetic oligonucleotide
  Sense strand starting at position 2039 of SEQ ID NO: 1879653
cagugagucaugugagaga

SEQ ID NO: 1922563 - RNA, 19 nt, Artificial Sequence
  Description of Artificial Sequence: Synthetic oligonucleotide
  Antisense strand to SEQ ID NO: 1922562
ucucucacaugacucacug

SEQ ID NO: 1922564 - RNA, 19 nt, Artificial Sequence
  Description of Artificial Sequence: Synthetic oligonucleotide
  Sense strand starting at position 2107 of SEQ ID NO: 1879653
uuuccaccauuggugaaua

SEQ ID NO: 1922565 - RNA, 19 nt, Artificial Sequence
  Description of Artificial Sequence: Synthetic oligonucleotide
  Antisense strand to SEQ ID NO: 1922564
uauucaccaaugguggaaa

SEQ ID NO: 1922566 - RNA, 19 nt, Artificial Sequence
  Description of Artificial Sequence: Synthetic oligonucleotide
  Sense strand starting at position 2157 of SEQ ID NO: 1879653
ugagcuuauuuguccucua

SEQ ID NO: 1922567 - RNA, 19 nt, Artificial Sequence
  Description of Artificial Sequence: Synthetic oligonucleotide
  Antisense strand to SEQ ID NO: 1922566
uagaggacaaauaagcuca

SEQ ID NO: 1922568 - RNA, 19 nt, Artificial Sequence
  Description of Artificial Sequence: Synthetic oligonucleotide
  Sense strand starting at position 2170 of SEQ ID NO: 1879653
ccucuauguguggaagaau

SEQ ID NO: 1922569 - RNA, 19 nt, Artificial Sequence
  Description of Artificial Sequence: Synthetic oligonucleotide
  Antisense strand to SEQ ID NO: 1922568
auucuuccacacauagagg

SEQ ID NO: 1922570 - RNA, 19 nt, Artificial Sequence
  Description of Artificial Sequence: Synthetic oligonucleotide
  Sense strand starting at position 2206 of SEQ ID NO: 1879653
gugacagaauuaguuaaga

SEQ ID NO: 1922571 - RNA, 19 nt, Artificial Sequence
  Description of Artificial Sequence: Synthetic oligonucleotide
  Antisense strand to SEQ ID NO: 1922570
ucuuaacuaauucugucac

SEQ ID NO: 1922572 - RNA, 19 nt, Artificial Sequence
  Description of Artificial Sequence: Synthetic oligonucleotide
  Sense strand starting at position 2327 of SEQ ID NO: 1879653
gucuauaauuugccuguuu

SEQ ID NO: 1922573 - RNA, 19 nt, Artificial Sequence
  Description of Artificial Sequence: Synthetic oligonucleotide
  Antisense strand to SEQ ID NO: 1922572
aaacaggcaaauuauagac

SEQ ID NO: 1922574 - RNA, 19 nt, Artificial Sequence
  Description of Artificial Sequence: Synthetic oligonucleotide
  Sense strand starting at position 2859 of SEQ ID NO: 1879653
uguaaacuaccuuagaagu

SEQ ID NO: 1922575 - RNA, 19 nt, Artificial Sequence
  Description of Artificial Sequence: Synthetic oligonucleotide
  Antisense strand to SEQ ID NO: 1922574
acuucuaagguaguuuaca

SEQ ID NO: 1922576 - RNA, 19 nt, Artificial Sequence
  Description of Artificial Sequence: Synthetic oligonucleotide
  Sense strand starting at position 2869 of SEQ ID NO: 1879653
cuuagaagucaucaagucu

SEQ ID NO: 1922577 - RNA, 19 nt, Artificial Sequence
  Description of Artificial Sequence: Synthetic oligonucleotide
  Antisense strand to SEQ ID NO: 1922576
agacuugaugacuucuaag

SEQ ID NO: 1922578 - RNA, 19 nt, Artificial Sequence
  Description of Artificial Sequence: Synthetic oligonucleotide
  Sense strand starting at position 2896 of SEQ ID NO: 1879653
cuauguuaaaggugaggaa

SEQ ID NO: 1922579 - RNA, 19 nt, Artificial Sequence
  Description of Artificial Sequence: Synthetic oligonucleotide
  Antisense strand to SEQ ID NO: 1922578
uuccucaccuuuaacauag

SEQ ID NO: 1922580 - RNA, 19 nt, Artificial Sequence
  Description of Artificial Sequence: Synthetic oligonucleotide
  Sense strand starting at position 2908 of SEQ ID NO: 1879653
ugaggaauguagccucuga

SEQ ID NO: 1922581 - RNA, 19 nt, Artificial Sequence
  Description of Artificial Sequence: Synthetic oligonucleotide
  Antisense strand to SEQ ID NO: 1922580
ucagaggcuacauuccuca

SEQ ID NO: 1922582 - RNA, 19 nt, Artificial Sequence
  Description of Artificial Sequence: Synthetic oligonucleotide
  Sense strand starting at position 3003 of SEQ ID NO: 1879653
guuugcucugucuuacgua

SEQ ID NO: 1922583 - RNA, 19 nt, Artificial Sequence
  Description of Artificial Sequence: Synthetic oligonucleotide
  Antisense strand to SEQ ID NO: 1922582
uacguaagacagagcaaac

SEQ ID NO: 1922584 - RNA, 19 nt, Artificial Sequence
  Description of Artificial Sequence: Synthetic oligonucleotide
  Sense strand starting at position 3134 of SEQ ID NO: 1879653
caugguagugccuggauuu

SEQ ID NO: 1922585 - RNA, 19 nt, Artificial Sequence
  Description of Artificial Sequence: Synthetic oligonucleotide
  Antisense strand to SEQ ID NO: 1922584
aaauccaggcacuaccaug

SEQ ID NO: 1922586 - RNA, 19 nt, Artificial Sequence
  Description of Artificial Sequence: Synthetic oligonucleotide
  Sense strand starting at position 3209 of SEQ ID NO: 1879653
aauaaugaugguugucacu

SEQ ID NO: 1922587 - RNA, 19 nt, Artificial Sequence
  Description of Artificial Sequence: Synthetic oligonucleotide
  Antisense strand to SEQ ID NO: 1922586
agugacaaccaucauuauu

SEQ ID NO: 1922588 - RNA, 19 nt, Artificial Sequence
  Description of Artificial Sequence: Synthetic oligonucleotide
  Sense strand starting at position 3341 of SEQ ID NO: 1879653
gaggaaaugagguguauac

SEQ ID NO: 1922589 - RNA, 19 nt, Artificial Sequence
  Description of Artificial Sequence: Synthetic oligonucleotide
  Antisense strand to SEQ ID NO: 1922588
guauacaccucauuuccuc

SEQ ID NO: 1922590 - RNA, 19 nt, Artificial Sequence
  Description of Artificial Sequence: Synthetic oligonucleotide
  Sense strand starting at position 3364 of SEQ ID NO: 1879653
caguauuauguagauggua

SEQ ID NO: 1922591 - RNA, 19 nt, Artificial Sequence
  Description of Artificial Sequence: Synthetic oligonucleotide
  Antisense strand to SEQ ID NO: 1922590
uaccaucuacauaauacug

SEQ ID NO: 1922592 - RNA, 19 nt, Artificial Sequence
  Description of Artificial Sequence: Synthetic oligonucleotide
  Sense strand starting at position 3520 of SEQ ID NO: 1879653
gaauauuaacuguggucau

SEQ ID NO: 1922593 - RNA, 19 nt, Artificial Sequence
  Description of Artificial Sequence: Synthetic oligonucleotide
  Antisense strand to SEQ ID NO: 1922592
augaccacaguuaauauuc

SEQ ID NO: 1922594 - RNA, 19 nt, Artificial Sequence
  Description of Artificial Sequence: Synthetic oligonucleotide
  Sense strand starting at position 3577 of SEQ ID NO: 1879653
accauuaagugauccauag

SEQ ID NO: 1922595 - RNA, 19 nt, Artificial Sequence
  Description of Artificial Sequence: Synthetic oligonucleotide
  Antisense strand to SEQ ID NO: 1922594
cuauggaucacuuaauggu

SEQ ID NO: 1922596 - RNA, 19 nt, Artificial Sequence
  Description of Artificial Sequence: Synthetic oligonucleotide
  Sense strand starting at position 3671 of SEQ ID NO: 1879653
gggucuugcaaucauagga

SEQ ID NO: 1922597 - RNA, 19 nt, Artificial Sequence
  Description of Artificial Sequence: Synthetic oligonucleotide
  Antisense strand to SEQ ID NO: 1922596
uccuaugauugcaagaccc

SEQ ID NO: 1922598 - RNA, 19 nt, Artificial Sequence
  Description of Artificial Sequence: Synthetic oligonucleotide
  Sense strand starting at position 3723 of SEQ ID NO: 1879653
agaacaucagccuggguau

SEQ ID NO: 1922599 - RNA, 19 nt, Artificial Sequence
  Description of Artificial Sequence: Synthetic oligonucleotide
  Antisense strand to SEQ ID NO: 1922598
auacccaggcugauguucu

SEQ ID NO: 1922600 - RNA, 19 nt, Artificial Sequence
  Description of Artificial Sequence: Synthetic oligonucleotide
  Sense strand starting at position 3777 of SEQ ID NO: 1879653
cacuguuuagcagaauaag

SEQ ID NO: 1922601 - RNA, 19 nt, Artificial Sequence
  Description of Artificial Sequence: Synthetic oligonucleotide
  Antisense strand to SEQ ID NO: 1922600
cuuauucugcuaaacagug

SEQ ID NO: 1922602 - RNA, 19 nt, Artificial Sequence
  Description of Artificial Sequence: Synthetic oligonucleotide
  Sense strand starting at position 3898 of SEQ ID NO: 1879653
ucauacaaaugggaaauuu

SEQ ID NO: 1922603 - RNA, 19 nt, Artificial Sequence
  Description of Artificial Sequence: Synthetic oligonucleotide
  Antisense strand to SEQ ID NO: 1922602
aaauuucccauuuguauga

SEQ ID NO: 1922604 - RNA, 19 nt, Artificial Sequence
  Description of Artificial Sequence: Synthetic oligonucleotide
  Sense strand starting at position 57 of SEQ ID NO: 1879654
ggaagaaguggucagcugu

SEQ ID NO: 1922605 - RNA, 19 nt, Artificial Sequence
  Description of Artificial Sequence: Synthetic oligonucleotide
  Antisense strand to SEQ ID NO: 1922604
acagcugaccacuucuucc

SEQ ID NO: 1922606 - RNA, 19 nt, Artificial Sequence
  Description of Artificial Sequence: Synthetic oligonucleotide
  Sense strand starting at position 122 of SEQ ID NO: 1879654
ugauuuguauuuggcaaua

SEQ ID NO: 1922607 - RNA, 19 nt, Artificial Sequence
  Description of Artificial Sequence: Synthetic oligonucleotide
  Antisense strand to SEQ ID NO: 1922606
uauugccaaauacaaauca

SEQ ID NO: 1922608 - RNA, 19 nt, Artificial Sequence
  Description of Artificial Sequence: Synthetic oligonucleotide
  Sense strand starting at position 124 of SEQ ID NO: 1879654
auuuguauuuggcaauaug

SEQ ID NO: 1922609 - RNA, 19 nt, Artificial Sequence
  Description of Artificial Sequence: Synthetic oligonucleotide
  Antisense strand to SEQ ID NO: 1922608
cauauugccaaauacaaau

SEQ ID NO: 1922610 - RNA, 19 nt, Artificial Sequence
  Description of Artificial Sequence: Synthetic oligonucleotide
  Sense strand starting at position 180 of SEQ ID NO: 1879654
gaaugauguuaugcacaag

SEQ ID NO: 1922611 - RNA, 19 nt, Artificial Sequence
  Description of Artificial Sequence: Synthetic oligonucleotide
  Antisense strand to SEQ ID NO: 1922610
cuugugcauaacaucauuc

SEQ ID NO: 1922612 - RNA, 19 nt, Artificial Sequence
  Description of Artificial Sequence: Synthetic oligonucleotide
  Sense strand starting at position 335 of SEQ ID NO: 1879654
ggguaaguaacuugaggau

SEQ ID NO: 1922613 - RNA, 19 nt, Artificial Sequence
  Description of Artificial Sequence: Synthetic oligonucleotide
  Antisense strand to SEQ ID NO: 1922612
auccucaaguuacuuaccc

SEQ ID NO: 1922614 - RNA, 19 nt, Artificial Sequence
  Description of Artificial Sequence: Synthetic oligonucleotide
  Sense strand starting at position 698 of SEQ ID NO: 1879654
gaagaaaugcugggucaga

SEQ ID NO: 1922615 - RNA, 19 nt, Artificial Sequence
  Description of Artificial Sequence: Synthetic oligonucleotide
  Antisense strand to SEQ ID NO: 1922614
ucugacccagcauuucuuc

SEQ ID NO: 1922616 - RNA, 19 nt, Artificial Sequence
  Description of Artificial Sequence: Synthetic oligonucleotide
  Sense strand starting at position 764 of SEQ ID NO: 1879654
uguccauaugaugauguga

SEQ ID NO: 1922617 - RNA, 19 nt, Artificial Sequence
  Description of Artificial Sequence: Synthetic oligonucleotide
  Antisense strand to SEQ ID NO: 1922616
ucacaucaucauauggaca

SEQ ID NO: 1922618 - RNA, 19 nt, Artificial Sequence
  Description of Artificial Sequence: Synthetic oligonucleotide
  Sense strand starting at position 830 of SEQ ID NO: 1879654
auaagagaaugagaaacua

SEQ ID NO: 1922619 - RNA, 19 nt, Artificial Sequence
  Description of Artificial Sequence: Synthetic oligonucleotide
  Antisense strand to SEQ ID NO: 1922618
uaguuucucauucucuuau

SEQ ID NO: 1922620 - RNA, 19 nt, Artificial Sequence
  Description of Artificial Sequence: Synthetic oligonucleotide
  Sense strand starting at position 883 of SEQ ID NO: 1879654
agauaucgaaugugguaaa

SEQ ID NO: 1922621 - RNA, 19 nt, Artificial Sequence
  Description of Artificial Sequence: Synthetic oligonucleotide
  Antisense strand to SEQ ID NO: 1922620
uuuaccacauucgauaucu

SEQ ID NO: 1922622 - RNA, 19 nt, Artificial Sequence
  Description of Artificial Sequence: Synthetic oligonucleotide
  Sense strand starting at position 963 of SEQ ID NO: 1879654
guuaaaggcaaaugggauu

SEQ ID NO: 1922623 - RNA, 19 nt, Artificial Sequence
  Description of Artificial Sequence: Synthetic oligonucleotide
  Antisense strand to SEQ ID NO: 1922622
aaucccauuugccuuuaac

SEQ ID NO: 1922624 - RNA, 19 nt, Artificial Sequence
  Description of Artificial Sequence: Synthetic oligonucleotide
  Sense strand starting at position 1197 of SEQ ID NO: 1879654
ccaugauaugcauaggcuu

SEQ ID NO: 1922625 - RNA, 19 nt, Artificial Sequence
  Description of Artificial Sequence: Synthetic oligonucleotide
  Antisense strand to SEQ ID NO: 1922624
aagccuaugcauaucaugg

SEQ ID NO: 1922626 - RNA, 19 nt, Artificial Sequence
  Description of Artificial Sequence: Synthetic oligonucleotide
  Sense strand starting at position 1221 of SEQ ID NO: 1879654
ugcaaagucagaugaguaa

SEQ ID NO: 1922627 - RNA, 19 nt, Artificial Sequence
  Description of Artificial Sequence: Synthetic oligonucleotide
  Antisense strand to SEQ ID NO: 1922626
uuacucaucugacuuugca

SEQ ID NO: 1922628 - RNA, 19 nt, Artificial Sequence
  Description of Artificial Sequence: Synthetic oligonucleotide
  Sense strand starting at position 1293 of SEQ ID NO: 1879654
cauagaaaguggguaaagu

SEQ ID NO: 1922629 - RNA, 19 nt, Artificial Sequence
  Description of Artificial Sequence: Synthetic oligonucleotide
  Antisense strand to SEQ ID NO: 1922628
acuuuacccacuuucuaug

SEQ ID NO: 1922630 - RNA, 19 nt, Artificial Sequence
  Description of Artificial Sequence: Synthetic oligonucleotide
  Sense strand starting at position 1344 of SEQ ID NO: 1879654
cuacuauaugacugucaug

SEQ ID NO: 1922631 - RNA, 19 nt, Artificial Sequence
  Description of Artificial Sequence: Synthetic oligonucleotide
  Antisense strand to SEQ ID NO: 1922630
caugacagucauauaguag

SEQ ID NO: 1922632 - RNA, 19 nt, Artificial Sequence
  Description of Artificial Sequence: Synthetic oligonucleotide
  Sense strand starting at position 1404 of SEQ ID NO: 1879654
ucguauuuagcauguuaca

SEQ ID NO: 1922633 - RNA, 19 nt, Artificial Sequence
  Description of Artificial Sequence: Synthetic oligonucleotide
  Antisense strand to SEQ ID NO: 1922632
uguaacaugcuaaauacga

SEQ ID NO: 1922634 - RNA, 19 nt, Artificial Sequence
  Description of Artificial Sequence: Synthetic oligonucleotide
  Sense strand starting at position 1733 of SEQ ID NO: 1879654
uuguuuaaaccagagucuu

SEQ ID NO: 1922635 - RNA, 19 nt, Artificial Sequence
  Description of Artificial Sequence: Synthetic oligonucleotide
  Antisense strand to SEQ ID NO: 1922634
aagacucugguuuaaacaa

SEQ ID NO: 1922636 - RNA, 19 nt, Artificial Sequence
  Description of Artificial Sequence: Synthetic oligonucleotide
  Sense strand starting at position 1861 of SEQ ID NO: 1879654
gauggaauaucuguugauu

SEQ ID NO: 1922637 - RNA, 19 nt, Artificial Sequence
  Description of Artificial Sequence: Synthetic oligonucleotide
  Antisense strand to SEQ ID NO: 1922636
aaucaacagauauuccauc

SEQ ID NO: 1922638 - RNA, 19 nt, Artificial Sequence
  Description of Artificial Sequence: Synthetic oligonucleotide
  Sense strand starting at position 1864 of SEQ ID NO: 1879654
ggaauaucuguugauugug

SEQ ID NO: 1922639 - RNA, 19 nt, Artificial Sequence
  Description of Artificial Sequence: Synthetic oligonucleotide
  Antisense strand to SEQ ID NO: 1922638
cacaaucaacagauauucc

SEQ ID NO: 1922640 - RNA, 19 nt, Artificial Sequence
  Description of Artificial Sequence: Synthetic oligonucleotide
  Sense strand starting at position 1950 of SEQ ID NO: 1879654
gacagcaaugaauguugau

SEQ ID NO: 1922641 - RNA, 19 nt, Artificial Sequence
  Description of Artificial Sequence: Synthetic oligonucleotide
  Antisense strand to SEQ ID NO: 1922640
aucaacauucauugcuguc

SEQ ID NO: 1922642 - RNA, 19 nt, Artificial Sequence
  Description of Artificial Sequence: Synthetic oligonucleotide
  Sense strand starting at position 2066 of SEQ ID NO: 1879654
guagaugaugguuagccau

SEQ ID NO: 1922643 - RNA, 19 nt, Artificial Sequence
  Description of Artificial Sequence: Synthetic oligonucleotide
  Antisense strand to SEQ ID NO: 1922642
auggcuaaccaucaucuac

SEQ ID NO: 1922644 - RNA, 19 nt, Artificial Sequence
  Description of Artificial Sequence: Synthetic oligonucleotide
  Sense strand starting at position 2072 of SEQ ID NO: 1879654
gaugguuagccauagggua

SEQ ID NO: 1922645 - RNA, 19 nt, Artificial Sequence
  Description of Artificial Sequence: Synthetic oligonucleotide
  Antisense strand to SEQ ID NO: 1922644
uacccuauggcuaaccauc

SEQ ID NO: 1922646 - RNA, 19 nt, Artificial Sequence
  Description of Artificial Sequence: Synthetic oligonucleotide
  Sense strand starting at position 2336 of SEQ ID NO: 1879654
uccacaucacauuguauga

SEQ ID NO: 1922647 - RNA, 19 nt, Artificial Sequence
  Description of Artificial Sequence: Synthetic oligonucleotide
  Antisense strand to SEQ ID NO: 1922646
ucauacaaugugaugugga

SEQ ID NO: 1922648 - RNA, 19 nt, Artificial Sequence
  Description of Artificial Sequence: Synthetic oligonucleotide
  Sense strand starting at position 2340 of SEQ ID NO: 1879654
caucacauuguaugagaga

SEQ ID NO: 1922649 - RNA, 19 nt, Artificial Sequence
  Description of Artificial Sequence: Synthetic oligonucleotide
  Antisense strand to SEQ ID NO: 1922648
ucucucauacaaugugaug

SEQ ID NO: 1922650 - RNA, 19 nt, Artificial Sequence
  Description of Artificial Sequence: Synthetic oligonucleotide
  Sense strand starting at position 2398 of SEQ ID NO: 1879654
gggcuaguuccagagaugg

SEQ ID NO: 1922651 - RNA, 19 nt, Artificial Sequence
  Description of Artificial Sequence: Synthetic oligonucleotide
  Antisense strand to SEQ ID NO: 1922650
ccaucucuggaacuagccc

SEQ ID NO: 1922652 - RNA, 19 nt, Artificial Sequence
  Description of Artificial Sequence: Synthetic oligonucleotide
  Sense strand starting at position 2415 of SEQ ID NO: 1879654
ggaauuaucucacuguuaa

SEQ ID NO: 1922653 - RNA, 19 nt, Artificial Sequence
  Description of Artificial Sequence: Synthetic oligonucleotide
  Antisense strand to SEQ ID NO: 1922652
uuaacagugagauaauucc

SEQ ID NO: 1922654 - RNA, 19 nt, Artificial Sequence
  Description of Artificial Sequence: Synthetic oligonucleotide
  Sense strand starting at position 2578 of SEQ ID NO: 1879654
ucaaauuggcauugaugau

SEQ ID NO: 1922655 - RNA, 19 nt, Artificial Sequence
  Description of Artificial Sequence: Synthetic oligonucleotide
  Antisense strand to SEQ ID NO: 1922654
aucaucaaugccaauuuga

SEQ ID NO: 1922656 - RNA, 19 nt, Artificial Sequence
  Description of Artificial Sequence: Synthetic oligonucleotide
  Sense strand starting at position 2841 of SEQ ID NO: 1879654
cuaacaucucuuuaugggu

SEQ ID NO: 1922657 - RNA, 19 nt, Artificial Sequence
  Description of Artificial Sequence: Synthetic oligonucleotide
  Antisense strand to SEQ ID NO: 1922656
acccauaaagagauguuag

SEQ ID NO: 1922658 - RNA, 19 nt, Artificial Sequence
  Description of Artificial Sequence: Synthetic oligonucleotide
  Sense strand starting at position 3070 of SEQ ID NO: 1879654
guuauagaguaauuaucug

SEQ ID NO: 1922659 - RNA, 19 nt, Artificial Sequence
  Description of Artificial Sequence: Synthetic oligonucleotide
  Antisense strand to SEQ ID NO: 1922658
cagauaauuacucuauaac

SEQ ID NO: 1922660 - RNA, 19 nt, Artificial Sequence
  Description of Artificial Sequence: Synthetic oligonucleotide
  Sense strand starting at position 3075 of SEQ ID NO: 1879654
agaguaauuaucuguagga

SEQ ID NO: 1922661 - RNA, 19 nt, Artificial Sequence
  Description of Artificial Sequence: Synthetic oligonucleotide
  Antisense strand to SEQ ID NO: 1922660
uccuacagauaauuacucu

SEQ ID NO: 1922662 - RNA, 19 nt, Artificial Sequence
  Description of Artificial Sequence: Synthetic oligonucleotide
  Sense strand starting at position 3076 of SEQ ID NO: 1879654
gaguaauuaucuguaggag

SEQ ID NO: 1922663 - RNA, 19 nt, Artificial Sequence
  Description of Artificial Sequence: Synthetic oligonucleotide
  Antisense strand to SEQ ID NO: 1922662
cuccuacagauaauuacuc

SEQ ID NO: 1922664 - RNA, 19 nt, Artificial Sequence
  Description of Artificial Sequence: Synthetic oligonucleotide
  Sense strand starting at position 3112 of SEQ ID NO: 1879654
uuggaaugcuacuuugaag

SEQ ID NO: 1922665 - RNA, 19 nt, Artificial Sequence
  Description of Artificial Sequence: Synthetic oligonucleotide
  Antisense strand to SEQ ID NO: 1922664
cuucaaaguagcauuccaa

SEQ ID NO: 1922666 - RNA, 19 nt, Artificial Sequence
  Description of Artificial Sequence: Synthetic oligonucleotide
  Sense strand starting at position 3129 of SEQ ID NO: 1879654
aggugauaauggucuauuc

SEQ ID NO: 1922667 - RNA, 19 nt, Artificial Sequence
  Description of Artificial Sequence: Synthetic oligonucleotide
  Antisense strand to SEQ ID NO: 1922666
gaauagaccauuaucaccu

SEQ ID NO: 1922668 - RNA, 19 nt, Artificial Sequence
  Description of Artificial Sequence: Synthetic oligonucleotide
  Sense strand starting at position 3167 of SEQ ID NO: 1879654
cgaaauguuagugaaauau

SEQ ID NO: 1922669 - RNA, 19 nt, Artificial Sequence
  Description of Artificial Sequence: Synthetic oligonucleotide
  Antisense strand to SEQ ID NO: 1922668
auauuucacuaacauuucg

SEQ ID NO: 1922670 - RNA, 19 nt, Artificial Sequence
  Description of Artificial Sequence: Synthetic oligonucleotide
  Sense strand starting at position 3439 of SEQ ID NO: 1879654
acccuagaagaaugcuuua

SEQ ID NO: 1922671 - RNA, 19 nt, Artificial Sequence
  Description of Artificial Sequence: Synthetic oligonucleotide
  Antisense strand to SEQ ID NO: 1922670
uaaagcauucuucuagggu

SEQ ID NO: 1922672 - RNA, 19 nt, Artificial Sequence
  Description of Artificial Sequence: Synthetic oligonucleotide
  Sense strand starting at position 3442 of SEQ ID NO: 1879654
cuagaagaaugcuuuauca

SEQ ID NO: 1922673 - RNA, 19 nt, Artificial Sequence
  Description of Artificial Sequence: Synthetic oligonucleotide
  Antisense strand to SEQ ID NO: 1922672
ugauaaagcauucuucuag

SEQ ID NO: 1922674 - RNA, 19 nt, Artificial Sequence
  Description of Artificial Sequence: Synthetic oligonucleotide
  Sense strand starting at position 3444 of SEQ ID NO: 1879654
agaagaaugcuuuaucagu

SEQ ID NO: 1922675 - RNA, 19 nt, Artificial Sequence
  Description of Artificial Sequence: Synthetic oligonucleotide
  Antisense strand to SEQ ID NO: 1922674
acugauaaagcauucuucu

SEQ ID NO: 1922676 - RNA, 19 nt, Artificial Sequence
  Description of Artificial Sequence: Synthetic oligonucleotide
  Sense strand starting at position 3446 of SEQ ID NO: 1879654
aagaaugcuuuaucaguag

SEQ ID NO: 1922677 - RNA, 19 nt, Artificial Sequence
  Description of Artificial Sequence: Synthetic oligonucleotide
  Antisense strand to SEQ ID NO: 1922676
cuacugauaaagcauucuu

SEQ ID NO: 1922678 - RNA, 19 nt, Artificial Sequence
  Description of Artificial Sequence: Synthetic oligonucleotide
  Sense strand starting at position 3452 of SEQ ID NO: 1879654
gcuuuaucaguaggcauuu

SEQ ID NO: 1922679 - RNA, 19 nt, Artificial Sequence
  Description of Artificial Sequence: Synthetic oligonucleotide
  Antisense strand to SEQ ID NO: 1922678
aaaugccuacugauaaagc

SEQ ID NO: 1922680 - RNA, 19 nt, Artificial Sequence
  Description of Artificial Sequence: Synthetic oligonucleotide
  Sense strand starting at position 3586 of SEQ ID NO: 1879654
gugucaggucaauauacaa

SEQ ID NO: 1922681 - RNA, 19 nt, Artificial Sequence
  Description of Artificial Sequence: Synthetic oligonucleotide
  Antisense strand to SEQ ID NO: 1922680
uuguauauugaccugacac

SEQ ID NO: 1922682 - RNA, 19 nt, Artificial Sequence
  Description of Artificial Sequence: Synthetic oligonucleotide
  Sense strand starting at position 3803 of SEQ ID NO: 1879654
ccuagaagucuuuggaaga

SEQ ID NO: 1922683 - RNA, 19 nt, Artificial Sequence
  Description of Artificial Sequence: Synthetic oligonucleotide
  Antisense strand to SEQ ID NO: 1922682
ucuuccaaagacuucuagg

SEQ ID NO: 1922684 - RNA, 19 nt, Artificial Sequence
  Description of Artificial Sequence: Synthetic oligonucleotide
  Sense strand starting at position 89 of SEQ ID NO: 1879655
gauuauauguggcuaagau

SEQ ID NO: 1922685 - RNA, 19 nt, Artificial Sequence
  Description of Artificial Sequence: Synthetic oligonucleotide
  Antisense strand to SEQ ID NO: 1922684
aucuuagccacauauaauc

SEQ ID NO: 1922686 - RNA, 19 nt, Artificial Sequence
  Description of Artificial Sequence: Synthetic oligonucleotide
  Sense strand starting at position 90 of SEQ ID NO: 1879655
auuauauguggcuaagaua

SEQ ID NO: 1922687 - RNA, 19 nt, Artificial Sequence
  Description of Artificial Sequence: Synthetic oligonucleotide
  Antisense strand to SEQ ID NO: 1922686
uaucuuagccacauauaau

SEQ ID NO: 1922688 - RNA, 19 nt, Artificial Sequence
  Description of Artificial Sequence: Synthetic oligonucleotide
  Sense strand starting at position 250 of SEQ ID NO: 1879655
cuaaucauucuguacaagu

SEQ ID NO: 1922689 - RNA, 19 nt, Artificial Sequence
  Description of Artificial Sequence: Synthetic oligonucleotide
  Antisense strand to SEQ ID NO: 1922688
acuuguacagaaugauuag

SEQ ID NO: 1922690 - RNA, 19 nt, Artificial Sequence
  Description of Artificial Sequence: Synthetic oligonucleotide
  Sense strand starting at position 634 of SEQ ID NO: 1879655
auauuuaaaugaggacaga

SEQ ID NO: 1922691 - RNA, 19 nt, Artificial Sequence
  Description of Artificial Sequence: Synthetic oligonucleotide
  Antisense strand to SEQ ID NO: 1922690
ucuguccucauuuaaauau

SEQ ID NO: 1922692 - RNA, 19 nt, Artificial Sequence
  Description of Artificial Sequence: Synthetic oligonucleotide
  Sense strand starting at position 678 of SEQ ID NO: 1879655
uuuauuagaugcucuagaa

SEQ ID NO: 1922693 - RNA, 19 nt, Artificial Sequence
  Description of Artificial Sequence: Synthetic oligonucleotide
  Antisense strand to SEQ ID NO: 1922692
uucuagagcaucuaauaaa

SEQ ID NO: 1922694 - RNA, 19 nt, Artificial Sequence
  Description of Artificial Sequence: Synthetic oligonucleotide
  Sense strand starting at position 682 of SEQ ID NO: 1879655
uuagaugcucuagaauucu

SEQ ID NO: 1922695 - RNA, 19 nt, Artificial Sequence
  Description of Artificial Sequence: Synthetic oligonucleotide
  Antisense strand to SEQ ID NO: 1922694
agaauucuagagcaucuaa

SEQ ID NO: 1922696 - RNA, 19 nt, Artificial Sequence
  Description of Artificial Sequence: Synthetic oligonucleotide
  Sense strand starting at position 688 of SEQ ID NO: 1879655
gcucuagaauucuugacua

SEQ ID NO: 1922697 - RNA, 19 nt, Artificial Sequence
  Description of Artificial Sequence: Synthetic oligonucleotide
  Antisense strand to SEQ ID NO: 1922696
uagucaagaauucuagagc

SEQ ID NO: 1922698 - RNA, 19 nt, Artificial Sequence
  Description of Artificial Sequence: Synthetic oligonucleotide
  Sense strand starting at position 713 of SEQ ID NO: 1879655
uuuaaagaagccuaaguau

SEQ ID NO: 1922699 - RNA, 19 nt, Artificial Sequence
  Description of Artificial Sequence: Synthetic oligonucleotide
  Antisense strand to SEQ ID NO: 1922698
auacuuaggcuucuuuaaa

SEQ ID NO: 1922700 - RNA, 19 nt, Artificial Sequence
  Description of Artificial Sequence: Synthetic oligonucleotide
  Sense strand starting at position 796 of SEQ ID NO: 1879655
aaccgagaguuggcuauaa

SEQ ID NO: 1922701 - RNA, 19 nt, Artificial Sequence
  Description of Artificial Sequence: Synthetic oligonucleotide
  Antisense strand to SEQ ID NO: 1922700
uuauagccaacucucgguu

SEQ ID NO: 1922702 - RNA, 19 nt, Artificial Sequence
  Description of Artificial Sequence: Synthetic oligonucleotide
  Sense strand starting at position 853 of SEQ ID NO: 1879655
aucaaagaaugguuugauc

SEQ ID NO: 1922703 - RNA, 19 nt, Artificial Sequence
  Description of Artificial Sequence: Synthetic oligonucleotide
  Antisense strand to SEQ ID NO: 1922702
gaucaaaccauucuuugau

SEQ ID NO: 1922704 - RNA, 19 nt, Artificial Sequence
  Description of Artificial Sequence: Synthetic oligonucleotide
  Sense strand starting at position 855 of SEQ ID NO: 1879655
caaagaaugguuugaucua

SEQ ID NO: 1922705 - RNA, 19 nt, Artificial Sequence
  Description of Artificial Sequence: Synthetic oligonucleotide
  Antisense strand to SEQ ID NO: 1922704
uagaucaaaccauucuuug

SEQ ID NO: 1922706 - RNA, 19 nt, Artificial Sequence
  Description of Artificial Sequence: Synthetic oligonucleotide
  Sense strand starting at position 862 of SEQ ID NO: 1879655
ugguuugaucuacaauucu

SEQ ID NO: 1922707 - RNA, 19 nt, Artificial Sequence
  Description of Artificial Sequence: Synthetic oligonucleotide
  Antisense strand to SEQ ID NO: 1922706
agaauuguagaucaaacca

SEQ ID NO: 1922708 - RNA, 19 nt, Artificial Sequence
  Description of Artificial Sequence: Synthetic oligonucleotide
  Sense strand starting at position 904 of SEQ ID NO: 1879655
ggauaagcaaaguaauguu

SEQ ID NO: 1922709 - RNA, 19 nt, Artificial Sequence
  Description of Artificial Sequence: Synthetic oligonucleotide
  Antisense strand to SEQ ID NO: 1922708
aacauuacuuugcuuaucc

SEQ ID NO: 1922710 - RNA, 19 nt, Artificial Sequence
  Description of Artificial Sequence: Synthetic oligonucleotide
  Sense strand starting at position 981 of SEQ ID NO: 1879655
aacccuugacuaggaaagu

SEQ ID NO: 1922711 - RNA, 19 nt, Artificial Sequence
  Description of Artificial Sequence: Synthetic oligonucleotide
  Antisense strand to SEQ ID NO: 1922710
acuuuccuagucaaggguu

SEQ ID NO: 1922712 - RNA, 19 nt, Artificial Sequence
  Description of Artificial Sequence: Synthetic oligonucleotide
  Sense strand starting at position 992 of SEQ ID NO: 1879655
aggaaaguuuacuuuaucu

SEQ ID NO: 1922713 - RNA, 19 nt, Artificial Sequence
  Description of Artificial Sequence: Synthetic oligonucleotide
  Antisense strand to SEQ ID NO: 1922712
agauaaaguaaacuuuccu

SEQ ID NO: 1922714 - RNA, 19 nt, Artificial Sequence
  Description of Artificial Sequence: Synthetic oligonucleotide
  Sense strand starting at position 1532 of SEQ ID NO: 1879655
agcagauaacugcauuaac

SEQ ID NO: 1922715 - RNA, 19 nt, Artificial Sequence
  Description of Artificial Sequence: Synthetic oligonucleotide
  Antisense strand to SEQ ID NO: 1922714
guuaaugcaguuaucugcu

SEQ ID NO: 1922716 - RNA, 19 nt, Artificial Sequence
  Description of Artificial Sequence: Synthetic oligonucleotide
  Sense strand starting at position 1541 of SEQ ID NO: 1879655
cugcauuaacaggacuuua

SEQ ID NO: 1922717 - RNA, 19 nt, Artificial Sequence
  Description of Artificial Sequence: Synthetic oligonucleotide
  Antisense strand to SEQ ID NO: 1922716
uaaaguccuguuaaugcag

SEQ ID NO: 1922718 - RNA, 19 nt, Artificial Sequence
  Description of Artificial Sequence: Synthetic oligonucleotide
  Sense strand starting at position 1552 of SEQ ID NO: 1879655
ggacuuuacguuuaggaac

SEQ ID NO: 1922719 - RNA, 19 nt, Artificial Sequence
  Description of Artificial Sequence: Synthetic oligonucleotide
  Antisense strand to SEQ ID NO: 1922718
guuccuaaacguaaagucc

SEQ ID NO: 1922720 - RNA, 19 nt, Artificial Sequence
  Description of Artificial Sequence: Synthetic oligonucleotide
  Sense strand starting at position 1574 of SEQ ID NO: 1879655
auccuuccauuugaggauu

SEQ ID NO: 1922721 - RNA, 19 nt, Artificial Sequence
  Description of Artificial Sequence: Synthetic oligonucleotide
  Antisense strand to SEQ ID NO: 1922720
aauccucaaauggaaggau

SEQ ID NO: 1922722 - RNA, 19 nt, Artificial Sequence
  Description of Artificial Sequence: Synthetic oligonucleotide
  Sense strand starting at position 1809 of SEQ ID NO: 1879655
ugaaauaugaaguguugac

SEQ ID NO: 1922723 - RNA, 19 nt, Artificial Sequence
  Description of Artificial Sequence: Synthetic oligonucleotide
  Antisense strand to SEQ ID NO: 1922722
gucaacacuucauauuuca

SEQ ID NO: 1922724 - RNA, 19 nt, Artificial Sequence
  Description of Artificial Sequence: Synthetic oligonucleotide
  Sense strand starting at position 1842 of SEQ ID NO: 1879655
gguagaaguaaaugugcaa

SEQ ID NO: 1922725 - RNA, 19 nt, Artificial Sequence
  Description of Artificial Sequence: Synthetic oligonucleotide
  Antisense strand to SEQ ID NO: 1922724
uugcacauuuacuucuacc

SEQ ID NO: 1922726 - RNA, 19 nt, Artificial Sequence
  Description of Artificial Sequence: Synthetic oligonucleotide
  Sense strand starting at position 1846 of SEQ ID NO: 1879655
gaaguaaaugugcaaaugu

SEQ ID NO: 1922727 - RNA, 19 nt, Artificial Sequence
  Description of Artificial Sequence: Synthetic oligonucleotide
  Antisense strand to SEQ ID NO: 1922726
acauuugcacauuuacuuc

SEQ ID NO: 1922728 - RNA, 19 nt, Artificial Sequence
  Description of Artificial Sequence: Synthetic oligonucleotide
  Sense strand starting at position 2017 of SEQ ID NO: 1879655
gaagaauaugauggguguu

SEQ ID NO: 1922729 - RNA, 19 nt, Artificial Sequence
  Description of Artificial Sequence: Synthetic oligonucleotide
  Antisense strand to SEQ ID NO: 1922728
aacacccaucauauucuuc

SEQ ID NO: 1922730 - RNA, 19 nt, Artificial Sequence
  Description of Artificial Sequence: Synthetic oligonucleotide
  Sense strand starting at position 2027 of SEQ ID NO: 1879655
auggguguucuguaaaccu

SEQ ID NO: 1922731 - RNA, 19 nt, Artificial Sequence
  Description of Artificial Sequence: Synthetic oligonucleotide
  Antisense strand to SEQ ID NO: 1922730
agguuuacagaacacccau

SEQ ID NO: 1922732 - RNA, 19 nt, Artificial Sequence
  Description of Artificial Sequence: Synthetic oligonucleotide
  Sense strand starting at position 2094 of SEQ ID NO: 1879655
cuauaaagcgcuuaaauau

SEQ ID NO: 1922733 - RNA, 19 nt, Artificial Sequence
  Description of Artificial Sequence: Synthetic oligonucleotide
  Antisense strand to SEQ ID NO: 1922732
auauuuaagcgcuuuauag

SEQ ID NO: 1922734 - RNA, 19 nt, Artificial Sequence
  Description of Artificial Sequence: Synthetic oligonucleotide
  Sense strand starting at position 2460 of SEQ ID NO: 1879655
uucuuauuggcuuauaaug

SEQ ID NO: 1922735 - RNA, 19 nt, Artificial Sequence
  Description of Artificial Sequence: Synthetic oligonucleotide
  Antisense strand to SEQ ID NO: 1922734
cauuauaagccaauaagaa

SEQ ID NO: 1922736 - RNA, 19 nt, Artificial Sequence
  Description of Artificial Sequence: Synthetic oligonucleotide
  Sense strand starting at position 2639 of SEQ ID NO: 1879655
uuuagaugccuuuagguca

SEQ ID NO: 1922737 - RNA, 19 nt, Artificial Sequence
  Description of Artificial Sequence: Synthetic oligonucleotide
  Antisense strand to SEQ ID NO: 1922736
ugaccuaaaggcaucuaaa

SEQ ID NO: 1922738 - RNA, 19 nt, Artificial Sequence
  Description of Artificial Sequence: Synthetic oligonucleotide
  Sense strand starting at position 2642 of SEQ ID NO: 1879655
agaugccuuuaggucauaa

SEQ ID NO: 1922739 - RNA, 19 nt, Artificial Sequence
  Description of Artificial Sequence: Synthetic oligonucleotide
  Antisense strand to SEQ ID NO: 1922738
uuaugaccuaaaggcaucu

SEQ ID NO: 1922740 - RNA, 19 nt, Artificial Sequence
  Description of Artificial Sequence: Synthetic oligonucleotide
  Sense strand starting at position 2644 of SEQ ID NO: 1879655
augccuuuaggucauaaua

SEQ ID NO: 1922741 - RNA, 19 nt, Artificial Sequence
  Description of Artificial Sequence: Synthetic oligonucleotide
  Antisense strand to SEQ ID NO: 1922740
uauuaugaccuaaaggcau

SEQ ID NO: 1922742 - RNA, 19 nt, Artificial Sequence
  Description of Artificial Sequence: Synthetic oligonucleotide
  Sense strand starting at position 2899 of SEQ ID NO: 1879655
auguauauacaguacucua

SEQ ID NO: 1922743 - RNA, 19 nt, Artificial Sequence
  Description of Artificial Sequence: Synthetic oligonucleotide
  Antisense strand to SEQ ID NO: 1922742
uagaguacuguauauacau

SEQ ID NO: 1922744 - RNA, 19 nt, Artificial Sequence
  Description of Artificial Sequence: Synthetic oligonucleotide
  Sense strand starting at position 3094 of SEQ ID NO: 1879655
uugagacacuccucuguca

SEQ ID NO: 1922745 - RNA, 19 nt, Artificial Sequence
  Description of Artificial Sequence: Synthetic oligonucleotide
  Antisense strand to SEQ ID NO: 1922744
ugacagaggagugucucaa

SEQ ID NO: 1922746 - RNA, 19 nt, Artificial Sequence
  Description of Artificial Sequence: Synthetic oligonucleotide
  Sense strand starting at position 3253 of SEQ ID NO: 1879655
auacuagagauguggcgau

SEQ ID NO: 1922747 - RNA, 19 nt, Artificial Sequence
  Description of Artificial Sequence: Synthetic oligonucleotide
  Antisense strand to SEQ ID NO: 1922746
aucgccacaucucuaguau

SEQ ID NO: 1922748 - RNA, 19 nt, Artificial Sequence
  Description of Artificial Sequence: Synthetic oligonucleotide
  Sense strand starting at position 3257 of SEQ ID NO: 1879655
uagagauguggcgauaaga

SEQ ID NO: 1922749 - RNA, 19 nt, Artificial Sequence
  Description of Artificial Sequence: Synthetic oligonucleotide
  Antisense strand to SEQ ID NO: 1922748
ucuuaucgccacaucucua

SEQ ID NO: 1922750 - RNA, 19 nt, Artificial Sequence
  Description of Artificial Sequence: Synthetic oligonucleotide
  Sense strand starting at position 3363 of SEQ ID NO: 1879655
gggaaugucuuggcacacu

SEQ ID NO: 1922751 - RNA, 19 nt, Artificial Sequence
  Description of Artificial Sequence: Synthetic oligonucleotide
  Antisense strand to SEQ ID NO: 1922750
agugugccaagacauuccc

SEQ ID NO: 1922752 - RNA, 19 nt, Artificial Sequence
  Description of Artificial Sequence: Synthetic oligonucleotide
  Sense strand starting at position 3531 of SEQ ID NO: 1879655
gcuuuacagagagaugcua

SEQ ID NO: 1922753 - RNA, 19 nt, Artificial Sequence
  Description of Artificial Sequence: Synthetic oligonucleotide
  Antisense strand to SEQ ID NO: 1922752
uagcaucucucuguaaagc

SEQ ID NO: 1922754 - RNA, 19 nt, Artificial Sequence
  Description of Artificial Sequence: Synthetic oligonucleotide
  Sense strand starting at position 3539 of SEQ ID NO: 1879655
gagagaugcuaccucauuc

SEQ ID NO: 1922755 - RNA, 19 nt, Artificial Sequence
  Description of Artificial Sequence: Synthetic oligonucleotide
  Antisense strand to SEQ ID NO: 1922754
gaaugagguagcaucucuc

SEQ ID NO: 1922756 - RNA, 19 nt, Artificial Sequence
  Description of Artificial Sequence: Synthetic oligonucleotide
  Sense strand starting at position 3682 of SEQ ID NO: 1879655
ccauuuaauugagcuuugu

SEQ ID NO: 1922757 - RNA, 19 nt, Artificial Sequence
  Description of Artificial Sequence: Synthetic oligonucleotide
  Antisense strand to SEQ ID NO: 1922756
acaaagcucaauuaaaugg

SEQ ID NO: 1922758 - RNA, 19 nt, Artificial Sequence
  Description of Artificial Sequence: Synthetic oligonucleotide
  Sense strand starting at position 3839 of SEQ ID NO: 1879655
cuuuccaggugauuaaauu

SEQ ID NO: 1922759 - RNA, 19 nt, Artificial Sequence
  Description of Artificial Sequence: Synthetic oligonucleotide
  Antisense strand to SEQ ID NO: 1922758
aauuuaaucaccuggaaag

SEQ ID NO: 1922760 - RNA, 19 nt, Artificial Sequence
  Description of Artificial Sequence: Synthetic oligonucleotide
  Sense strand starting at position 3913 of SEQ ID NO: 1879655
ugaauacuuuguuuacaag

SEQ ID NO: 1922761 - RNA, 19 nt, Artificial Sequence
  Description of Artificial Sequence: Synthetic oligonucleotide
  Antisense strand to SEQ ID NO: 1922760
cuuguaaacaaaguauuca

SEQ ID NO: 1922762 - RNA, 19 nt, Artificial Sequence
  Description of Artificial Sequence: Synthetic oligonucleotide
  Sense strand starting at position 3934 of SEQ ID NO: 1879655
acuagaagcuacccagaau

SEQ ID NO: 1922763 - RNA, 19 nt, Artificial Sequence
  Description of Artificial Sequence: Synthetic oligonucleotide
  Antisense strand to SEQ ID NO: 1922762
auucuggguagcuucuagu

SEQ ID NO: 1922764 - RNA, 19 nt, Artificial Sequence
  Description of Artificial Sequence: Synthetic oligonucleotide
  Sense strand starting at position 373 of SEQ ID NO: 1879656
agacuugagucuuuaucug

SEQ ID NO: 1922765 - RNA, 19 nt, Artificial Sequence
  Description of Artificial Sequence: Synthetic oligonucleotide
  Antisense strand to SEQ ID NO: 1922764
cagauaaagacucaagucu

SEQ ID NO: 1922766 - RNA, 19 nt, Artificial Sequence
  Description of Artificial Sequence: Synthetic oligonucleotide
  Sense strand starting at position 661 of SEQ ID NO: 1879656
agagaaguguacuuuggca

SEQ ID NO: 1922767 - RNA, 19 nt, Artificial Sequence
  Description of Artificial Sequence: Synthetic oligonucleotide
  Antisense strand to SEQ ID NO: 1922766
ugccaaaguacacuucucu

SEQ ID NO: 1922768 - RNA, 19 nt, Artificial Sequence
  Description of Artificial Sequence: Synthetic oligonucleotide
  Sense strand starting at position 837 of SEQ ID NO: 1879656
gaggucacucaugauccuu

SEQ ID NO: 1922769 - RNA, 19 nt, Artificial Sequence
  Description of Artificial Sequence: Synthetic oligonucleotide
  Antisense strand to SEQ ID NO: 1922768
aaggaucaugagugaccuc

SEQ ID NO: 1922770 - RNA, 19 nt, Artificial Sequence
  Description of Artificial Sequence: Synthetic oligonucleotide
  Sense strand starting at position 839 of SEQ ID NO: 1879656
ggucacucaugauccuuaa

SEQ ID NO: 1922771 - RNA, 19 nt, Artificial Sequence
  Description of Artificial Sequence: Synthetic oligonucleotide
  Antisense strand to SEQ ID NO: 1922770
uuaaggaucaugagugacc

SEQ ID NO: 1922772 - RNA, 19 nt, Artificial Sequence
  Description of Artificial Sequence: Synthetic oligonucleotide
  Sense strand starting at position 1204 of SEQ ID NO: 1879656
ucguaaucaucauuaucag

SEQ ID NO: 1922773 - RNA, 19 nt, Artificial Sequence
  Description of Artificial Sequence: Synthetic oligonucleotide
  Antisense strand to SEQ ID NO: 1922772
cugauaaugaugauuacga

SEQ ID NO: 1922774 - RNA, 19 nt, Artificial Sequence
  Description of Artificial Sequence: Synthetic oligonucleotide
  Sense strand starting at position 1236 of SEQ ID NO: 1879656
aguuuaguuccagaccaug

SEQ ID NO: 1922775 - RNA, 19 nt, Artificial Sequence
  Description of Artificial Sequence: Synthetic oligonucleotide
  Antisense strand to SEQ ID NO: 1922774
cauggucuggaacuaaacu

SEQ ID NO: 1922776 - RNA, 19 nt, Artificial Sequence
  Description of Artificial Sequence: Synthetic oligonucleotide
  Sense strand starting at position 1383 of SEQ ID NO: 1879656
uauaaauggcucuaguuag

SEQ ID NO: 1922777 - RNA, 19 nt, Artificial Sequence
  Description of Artificial Sequence: Synthetic oligonucleotide
  Antisense strand to SEQ ID NO: 1922776
cuaacuagagccauuuaua

SEQ ID NO: 1922778 - RNA, 19 nt, Artificial Sequence
  Description of Artificial Sequence: Synthetic oligonucleotide
  Sense strand starting at position 1390 of SEQ ID NO: 1879656
ggcucuaguuagucauuua

SEQ ID NO: 1922779 - RNA, 19 nt, Artificial Sequence
  Description of Artificial Sequence: Synthetic oligonucleotide
  Antisense strand to SEQ ID NO: 1922778
uaaaugacuaacuagagcc

SEQ ID NO: 1922780 - RNA, 19 nt, Artificial Sequence
  Description of Artificial Sequence: Synthetic oligonucleotide
  Sense strand starting at position 1393 of SEQ ID NO: 1879656
ucuaguuagucauuuaugu

SEQ ID NO: 1922781 - RNA, 19 nt, Artificial Sequence
  Description of Artificial Sequence: Synthetic oligonucleotide
  Antisense strand to SEQ ID NO: 1922780
acauaaaugacuaacuaga

SEQ ID NO: 1922782 - RNA, 19 nt, Artificial Sequence
  Description of Artificial Sequence: Synthetic oligonucleotide
  Sense strand starting at position 1488 of SEQ ID NO: 1879656
gcuggaguccacuauugag

SEQ ID NO: 1922783 - RNA, 19 nt, Artificial Sequence
  Description of Artificial Sequence: Synthetic oligonucleotide
  Antisense strand to SEQ ID NO: 1922782
cucaauaguggacuccagc

SEQ ID NO: 1922784 - RNA, 19 nt, Artificial Sequence
  Description of Artificial Sequence: Synthetic oligonucleotide
  Sense strand starting at position 1512 of SEQ ID NO: 1879656
ccagucacuagagguagau

SEQ ID NO: 1922785 - RNA, 19 nt, Artificial Sequence
  Description of Artificial Sequence: Synthetic oligonucleotide
  Antisense strand to SEQ ID NO: 1922784
aucuaccucuagugacugg

SEQ ID NO: 1922786 - RNA, 19 nt, Artificial Sequence
  Description of Artificial Sequence: Synthetic oligonucleotide
  Sense strand starting at position 1581 of SEQ ID NO: 1879656
cuccuuucucuggagauua

SEQ ID NO: 1922787 - RNA, 19 nt, Artificial Sequence
  Description of Artificial Sequence: Synthetic oligonucleotide
  Antisense strand to SEQ ID NO: 1922786
uaaucuccagagaaaggag

SEQ ID NO: 1922788 - RNA, 19 nt, Artificial Sequence
  Description of Artificial Sequence: Synthetic oligonucleotide
  Sense strand starting at position 1784 of SEQ ID NO: 1879656
cagcccucuuagguuaaga

SEQ ID NO: 1922789 - RNA, 19 nt, Artificial Sequence
  Description of Artificial Sequence: Synthetic oligonucleotide
  Antisense strand to SEQ ID NO: 1922788
ucuuaaccuaagagggcug

SEQ ID NO: 1922790 - RNA, 19 nt, Artificial Sequence
  Description of Artificial Sequence: Synthetic oligonucleotide
  Sense strand starting at position 1786 of SEQ ID NO: 1879656
gcccucuuagguuaagauu

SEQ ID NO: 1922791 - RNA, 19 nt, Artificial Sequence
  Description of Artificial Sequence: Synthetic oligonucleotide
  Antisense strand to SEQ ID NO: 1922790
aaucuuaaccuaagagggc

SEQ ID NO: 1922792 - RNA, 19 nt, Artificial Sequence
  Description of Artificial Sequence: Synthetic oligonucleotide
  Sense strand starting at position 1940 of SEQ ID NO: 1879656
guuugacauuuaguugguu

SEQ ID NO: 1922793 - RNA, 19 nt, Artificial Sequence
  Description of Artificial Sequence: Synthetic oligonucleotide
  Antisense strand to SEQ ID NO: 1922792
aaccaacuaaaugucaaac

SEQ ID NO: 1922794 - RNA, 19 nt, Artificial Sequence
  Description of Artificial Sequence: Synthetic oligonucleotide
  Sense strand starting at position 1952 of SEQ ID NO: 1879656
guugguuccuaauuaaaca

SEQ ID NO: 1922795 - RNA, 19 nt, Artificial Sequence
  Description of Artificial Sequence: Synthetic oligonucleotide
  Antisense strand to SEQ ID NO: 1922794
uguuuaauuaggaaccaac

SEQ ID NO: 1922796 - RNA, 19 nt, Artificial Sequence
  Description of Artificial Sequence: Synthetic oligonucleotide
  Sense strand starting at position 2073 of SEQ ID NO: 1879656
aaucaugucuagguggaga

SEQ ID NO: 1922797 - RNA, 19 nt, Artificial Sequence
  Description of Artificial Sequence: Synthetic oligonucleotide
  Antisense strand to SEQ ID NO: 1922796
ucuccaccuagacaugauu

SEQ ID NO: 1922798 - RNA, 19 nt, Artificial Sequence
  Description of Artificial Sequence: Synthetic oligonucleotide
  Sense strand starting at position 2089 of SEQ ID NO: 1879656
agagccaucuccuugagga

SEQ ID NO: 1922799 - RNA, 19 nt, Artificial Sequence
  Description of Artificial Sequence: Synthetic oligonucleotide
  Antisense strand to SEQ ID NO: 1922798
uccucaaggagauggcucu

SEQ ID NO: 1922800 - RNA, 19 nt, Artificial Sequence
  Description of Artificial Sequence: Synthetic oligonucleotide
  Sense strand starting at position 2090 of SEQ ID NO: 1879656
gagccaucuccuugaggaa

SEQ ID NO: 1922801 - RNA, 19 nt, Artificial Sequence
  Description of Artificial Sequence: Synthetic oligonucleotide
  Antisense strand to SEQ ID NO: 1922800
uuccucaaggagauggcuc

SEQ ID NO: 1922802 - RNA, 19 nt, Artificial Sequence
  Description of Artificial Sequence: Synthetic oligonucleotide
  Sense strand starting at position 2268 of SEQ ID NO: 1879656
caacuaucguucccuagag

SEQ ID NO: 1922803 - RNA, 19 nt, Artificial Sequence
  Description of Artificial Sequence: Synthetic oligonucleotide
  Antisense strand to SEQ ID NO: 1922802
cucuagggaacgauaguug

SEQ ID NO: 1922804 - RNA, 19 nt, Artificial Sequence
  Description of Artificial Sequence: Synthetic oligonucleotide
  Sense strand starting at position 2680 of SEQ ID NO: 1879656
caucgugggcuccagaaga

SEQ ID NO: 1922805 - RNA, 19 nt, Artificial Sequence
  Description of Artificial Sequence: Synthetic oligonucleotide
  Antisense strand to SEQ ID NO: 1922804
ucuucuggagcccacgaug

SEQ ID NO: 1922806 - RNA, 19 nt, Artificial Sequence
  Description of Artificial Sequence: Synthetic oligonucleotide
  Sense strand starting at position 2742 of SEQ ID NO: 1879656
aggcuuuagacugagggua

SEQ ID NO: 1922807 - RNA, 19 nt, Artificial Sequence
  Description of Artificial Sequence: Synthetic oligonucleotide
  Antisense strand to SEQ ID NO: 1922806
uacccucagucuaaagccu

SEQ ID NO: 1922808 - RNA, 19 nt, Artificial Sequence
  Description of Artificial Sequence: Synthetic oligonucleotide
  Sense strand starting at position 2764 of SEQ ID NO: 1879656
gaggaaacuucugccagga

SEQ ID NO: 1922809 - RNA, 19 nt, Artificial Sequence
  Description of Artificial Sequence: Synthetic oligonucleotide
  Antisense strand to SEQ ID NO: 1922808
uccuggcagaaguuuccuc

SEQ ID NO: 1922810 - RNA, 19 nt, Artificial Sequence
  Description of Artificial Sequence: Synthetic oligonucleotide
  Sense strand starting at position 2879 of SEQ ID NO: 1879656
gccggauucccacauggga

SEQ ID NO: 1922811 - RNA, 19 nt, Artificial Sequence
  Description of Artificial Sequence: Synthetic oligonucleotide
  Antisense strand to SEQ ID NO: 1922810
ucccaugugggaauccggc

SEQ ID NO: 1922812 - RNA, 19 nt, Artificial Sequence
  Description of Artificial Sequence: Synthetic oligonucleotide
  Sense strand starting at position 2881 of SEQ ID NO: 1879656
cggauucccacaugggaaa

SEQ ID NO: 1922813 - RNA, 19 nt, Artificial Sequence
  Description of Artificial Sequence: Synthetic oligonucleotide
  Antisense strand to SEQ ID NO: 1922812
uuucccaugugggaauccg

SEQ ID NO: 1922814 - RNA, 19 nt, Artificial Sequence
  Description of Artificial Sequence: Synthetic oligonucleotide
  Sense strand starting at position 2913 of SEQ ID NO: 1879656
gagaaucaggucuguugaa

SEQ ID NO: 1922815 - RNA, 19 nt, Artificial Sequence
  Description of Artificial Sequence: Synthetic oligonucleotide
  Antisense strand to SEQ ID NO: 1922814
uucaacagaccugauucuc

SEQ ID NO: 1922816 - RNA, 19 nt, Artificial Sequence
  Description of Artificial Sequence: Synthetic oligonucleotide
  Sense strand starting at position 2914 of SEQ ID NO: 1879656
agaaucaggucuguugaau

SEQ ID NO: 1922817 - RNA, 19 nt, Artificial Sequence
  Description of Artificial Sequence: Synthetic oligonucleotide
  Antisense strand to SEQ ID NO: 1922816
auucaacagaccugauucu

SEQ ID NO: 1922818 - RNA, 19 nt, Artificial Sequence
  Description of Artificial Sequence: Synthetic oligonucleotide
  Sense strand starting at position 3132 of SEQ ID NO: 1879656
guccuugaucuagaucaau

SEQ ID NO: 1922819 - RNA, 19 nt, Artificial Sequence
  Description of Artificial Sequence: Synthetic oligonucleotide
  Antisense strand to SEQ ID NO: 1922818
auugaucuagaucaaggac

SEQ ID NO: 1922820 - RNA, 19 nt, Artificial Sequence
  Description of Artificial Sequence: Synthetic oligonucleotide
  Sense strand starting at position 3143 of SEQ ID NO: 1879656
agaucaauagcuuguccca

SEQ ID NO: 1922821 - RNA, 19 nt, Artificial Sequence
  Description of Artificial Sequence: Synthetic oligonucleotide
  Antisense strand to SEQ ID NO: 1922820
ugggacaagcuauugaucu

SEQ ID NO: 1922822 - RNA, 19 nt, Artificial Sequence
  Description of Artificial Sequence: Synthetic oligonucleotide
  Sense strand starting at position 3208 of SEQ ID NO: 1879656
acuaacaaaucggcauaua

SEQ ID NO: 1922823 - RNA, 19 nt, Artificial Sequence
  Description of Artificial Sequence: Synthetic oligonucleotide
  Antisense strand to SEQ ID NO: 1922822
uauaugccgauuuguuagu

SEQ ID NO: 1922824 - RNA, 19 nt, Artificial Sequence
  Description of Artificial Sequence: Synthetic oligonucleotide
  Sense strand starting at position 3295 of SEQ ID NO: 1879656
guguauguaauuuguacuu

SEQ ID NO: 1922825 - RNA, 19 nt, Artificial Sequence
  Description of Artificial Sequence: Synthetic oligonucleotide
  Antisense strand to SEQ ID NO: 1922824
aaguacaaauuacauacac

SEQ ID NO: 1922826 - RNA, 19 nt, Artificial Sequence
  Description of Artificial Sequence: Synthetic oligonucleotide
  Sense strand starting at position 3350 of SEQ ID NO: 1879656
cuaguucccuucucugaga

SEQ ID NO: 1922827 - RNA, 19 nt, Artificial Sequence
  Description of Artificial Sequence: Synthetic oligonucleotide
  Antisense strand to SEQ ID NO: 1922826
ucucagagaagggaacuag

SEQ ID NO: 1922828 - RNA, 19 nt, Artificial Sequence
  Description of Artificial Sequence: Synthetic oligonucleotide
  Sense strand starting at position 3363 of SEQ ID NO: 1879656
cugagaagcuuacccacau

SEQ ID NO: 1922829 - RNA, 19 nt, Artificial Sequence
  Description of Artificial Sequence: Synthetic oligonucleotide
  Antisense strand to SEQ ID NO: 1922828
auguggguaagcuucucag

SEQ ID NO: 1922830 - RNA, 19 nt, Artificial Sequence
  Description of Artificial Sequence: Synthetic oligonucleotide
  Sense strand starting at position 3364 of SEQ ID NO: 1879656
ugagaagcuuacccacauu

SEQ ID NO: 1922831 - RNA, 19 nt, Artificial Sequence
  Description of Artificial Sequence: Synthetic oligonucleotide
  Antisense strand to SEQ ID NO: 1922830
aauguggguaagcuucuca

SEQ ID NO: 1922832 - RNA, 19 nt, Artificial Sequence
  Description of Artificial Sequence: Synthetic oligonucleotide
  Sense strand starting at position 3531 of SEQ ID NO: 1879656
uggcauaccuaggcagaaa

SEQ ID NO: 1922833 - RNA, 19 nt, Artificial Sequence
  Description of Artificial Sequence: Synthetic oligonucleotide
  Antisense strand to SEQ ID NO: 1922832
uuucugccuagguaugcca

SEQ ID NO: 1922834 - RNA, 19 nt, Artificial Sequence
  Description of Artificial Sequence: Synthetic oligonucleotide
  Sense strand starting at position 3552 of SEQ ID NO: 1879656
ucagauggccuuugauaca

SEQ ID NO: 1922835 - RNA, 19 nt, Artificial Sequence
  Description of Artificial Sequence: Synthetic oligonucleotide
  Antisense strand to SEQ ID NO: 1922834
uguaucaaaggccaucuga

SEQ ID NO: 1922836 - RNA, 19 nt, Artificial Sequence
  Description of Artificial Sequence: Synthetic oligonucleotide
  Sense strand starting at position 3572 of SEQ ID NO: 1879656
gccguuuagcucuccugga

SEQ ID NO: 1922837 - RNA, 19 nt, Artificial Sequence
  Description of Artificial Sequence: Synthetic oligonucleotide
  Antisense strand to SEQ ID NO: 1922836
uccaggagagcuaaacggc

SEQ ID NO: 1922838 - RNA, 19 nt, Artificial Sequence
  Description of Artificial Sequence: Synthetic oligonucleotide
  Sense strand starting at position 3576 of SEQ ID NO: 1879656
uuuagcucuccuggaaaua

SEQ ID NO: 1922839 - RNA, 19 nt, Artificial Sequence
  Description of Artificial Sequence: Synthetic oligonucleotide
  Antisense strand to SEQ ID NO: 1922838
uauuuccaggagagcuaaa

SEQ ID NO: 1922840 - RNA, 19 nt, Artificial Sequence
  Description of Artificial Sequence: Synthetic oligonucleotide
  Sense strand starting at position 3577 of SEQ ID NO: 1879656
uuagcucuccuggaaauau

SEQ ID NO: 1922841 - RNA, 19 nt, Artificial Sequence
  Description of Artificial Sequence: Synthetic oligonucleotide
  Antisense strand to SEQ ID NO: 1922840
auauuuccaggagagcuaa

SEQ ID NO: 1922842 - RNA, 19 nt, Artificial Sequence
  Description of Artificial Sequence: Synthetic oligonucleotide
  Sense strand starting at position 3908 of SEQ ID NO: 1879656
gggagucugguuggaggua

SEQ ID NO: 1922843 - RNA, 19 nt, Artificial Sequence
  Description of Artificial Sequence: Synthetic oligonucleotide
  Antisense strand to SEQ ID NO: 1922842
uaccuccaaccagacuccc

SEQ ID NO: 1922844 - RNA, 19 nt, Artificial Sequence
  Description of Artificial Sequence: Synthetic oligonucleotide
  Sense strand starting at position 8 of SEQ ID NO: 1879657
guacgugucagugcuagga

SEQ ID NO: 1922845 - RNA, 19 nt, Artificial Sequence
  Description of Artificial Sequence: Synthetic oligonucleotide
  Antisense strand to SEQ ID NO: 1922844
uccuagcacugacacguac

SEQ ID NO: 1922846 - RNA, 19 nt, Artificial Sequence
  Description of Artificial Sequence: Synthetic oligonucleotide
  Sense strand starting at position 74 of SEQ ID NO: 1879657
augagauaauagucuagcu

SEQ ID NO: 1922847 - RNA, 19 nt, Artificial Sequence
  Description of Artificial Sequence: Synthetic oligonucleotide
  Antisense strand to SEQ ID NO: 1922846
agcuagacuauuaucucau

SEQ ID NO: 1922848 - RNA, 19 nt, Artificial Sequence
  Description of Artificial Sequence: Synthetic oligonucleotide
  Sense strand starting at position 181 of SEQ ID NO: 1879657
aggaacacauuccagauuu

SEQ ID NO: 1922849 - RNA, 19 nt, Artificial Sequence
  Description of Artificial Sequence: Synthetic oligonucleotide
  Antisense strand to SEQ ID NO: 1922848
aaaucuggaauguguuccu

SEQ ID NO: 1922850 - RNA, 19 nt, Artificial Sequence
  Description of Artificial Sequence: Synthetic oligonucleotide
  Sense strand starting at position 369 of SEQ ID NO: 1879657
auaaguuggaucugaggua

SEQ ID NO: 1922851 - RNA, 19 nt, Artificial Sequence
  Description of Artificial Sequence: Synthetic oligonucleotide
  Antisense strand to SEQ ID NO: 1922850
uaccucagauccaacuuau

SEQ ID NO: 1922852 - RNA, 19 nt, Artificial Sequence
  Description of Artificial Sequence: Synthetic oligonucleotide
  Sense strand starting at position 429 of SEQ ID NO: 1879657
uacagagcuuggucagaug

SEQ ID NO: 1922853 - RNA, 19 nt, Artificial Sequence
  Description of Artificial Sequence: Synthetic oligonucleotide
  Antisense strand to SEQ ID NO: 1922852
caucugaccaagcucugua

SEQ ID NO: 1922854 - RNA, 19 nt, Artificial Sequence
  Description of Artificial Sequence: Synthetic oligonucleotide
  Sense strand starting at position 834 of SEQ ID NO: 1879657
aagugauuauaccugagac

SEQ ID NO: 1922855 - RNA, 19 nt, Artificial Sequence
  Description of Artificial Sequence: Synthetic oligonucleotide
  Antisense strand to SEQ ID NO: 1922854
gucucagguauaaucacuu

SEQ ID NO: 1922856 - RNA, 19 nt, Artificial Sequence
  Description of Artificial Sequence: Synthetic oligonucleotide
  Sense strand starting at position 835 of SEQ ID NO: 1879657
agugauuauaccugagacg

SEQ ID NO: 1922857 - RNA, 19 nt, Artificial Sequence
  Description of Artificial Sequence: Synthetic oligonucleotide
  Antisense strand to SEQ ID NO: 1922856
cgucucagguauaaucacu

SEQ ID NO: 1922858 - RNA, 19 nt, Artificial Sequence
  Description of Artificial Sequence: Synthetic oligonucleotide
  Sense strand starting at position 847 of SEQ ID NO: 1879657
ugagacgaguuuccacaaa

SEQ ID NO: 1922859 - RNA, 19 nt, Artificial Sequence
  Description of Artificial Sequence: Synthetic oligonucleotide
  Antisense strand to SEQ ID NO: 1922858
uuuguggaaacucgucuca

SEQ ID NO: 1922860 - RNA, 19 nt, Artificial Sequence
  Description of Artificial Sequence: Synthetic oligonucleotide
  Sense strand starting at position 1283 of SEQ ID NO: 1879657
gcaagaugucuagggaauu

SEQ ID NO: 1922861 - RNA, 19 nt, Artificial Sequence
  Description of Artificial Sequence: Synthetic oligonucleotide
  Antisense strand to SEQ ID NO: 1922860
aauucccuagacaucuugc

SEQ ID NO: 1922862 - RNA, 19 nt, Artificial Sequence
  Description of Artificial Sequence: Synthetic oligonucleotide
  Sense strand starting at position 1362 of SEQ ID NO: 1879657
guggaucauauguauguau

SEQ ID NO: 1922863 - RNA, 19 nt, Artificial Sequence
  Description of Artificial Sequence: Synthetic oligonucleotide
  Antisense strand to SEQ ID NO: 1922862
auacauacauaugauccac

SEQ ID NO: 1922864 - RNA, 19 nt, Artificial Sequence
  Description of Artificial Sequence: Synthetic oligonucleotide
  Sense strand starting at position 1364 of SEQ ID NO: 1879657
ggaucauauguauguauua

SEQ ID NO: 1922865 - RNA, 19 nt, Artificial Sequence
  Description of Artificial Sequence: Synthetic oligonucleotide
  Antisense strand to SEQ ID NO: 1922864
uaauacauacauaugaucc

SEQ ID NO: 1922866 - RNA, 19 nt, Artificial Sequence
  Description of Artificial Sequence: Synthetic oligonucleotide
  Sense strand starting at position 1389 of SEQ ID NO: 1879657
auagcaaacugguuuaauu

SEQ ID NO: 1922867 - RNA, 19 nt, Artificial Sequence
  Description of Artificial Sequence: Synthetic oligonucleotide
  Antisense strand to SEQ ID NO: 1922866
aauuaaaccaguuugcuau

SEQ ID NO: 1922868 - RNA, 19 nt, Artificial Sequence
  Description of Artificial Sequence: Synthetic oligonucleotide
  Sense strand starting at position 1391 of SEQ ID NO: 1879657
agcaaacugguuuaauuga

SEQ ID NO: 1922869 - RNA, 19 nt, Artificial Sequence
  Description of Artificial Sequence: Synthetic oligonucleotide
  Antisense strand to SEQ ID NO: 1922868
ucaauuaaaccaguuugcu

SEQ ID NO: 1922870 - RNA, 19 nt, Artificial Sequence
  Description of Artificial Sequence: Synthetic oligonucleotide
  Sense strand starting at position 1439 of SEQ ID NO: 1879657
uugacuggucaguaaguua

SEQ ID NO: 1922871 - RNA, 19 nt, Artificial Sequence
  Description of Artificial Sequence: Synthetic oligonucleotide
  Antisense strand to SEQ ID NO: 1922870
uaacuuacugaccagucaa

SEQ ID NO: 1922872 - RNA, 19 nt, Artificial Sequence
  Description of Artificial Sequence: Synthetic oligonucleotide
  Sense strand starting at position 1466 of SEQ ID NO: 1879657
aaauaugagcuuugucaga

SEQ ID NO: 1922873 - RNA, 19 nt, Artificial Sequence
  Description of Artificial Sequence: Synthetic oligonucleotide
  Antisense strand to SEQ ID NO: 1922872
ucugacaaagcucauauuu

SEQ ID NO: 1922874 - RNA, 19 nt, Artificial Sequence
  Description of Artificial Sequence: Synthetic oligonucleotide
  Sense strand starting at position 1468 of SEQ ID NO: 1879657
auaugagcuuugucagaaa

SEQ ID NO: 1922875 - RNA, 19 nt, Artificial Sequence
  Description of Artificial Sequence: Synthetic oligonucleotide
  Antisense strand to SEQ ID NO: 1922874
uuucugacaaagcucauau

SEQ ID NO: 1922876 - RNA, 19 nt, Artificial Sequence
  Description of Artificial Sequence: Synthetic oligonucleotide
  Sense strand starting at position 1541 of SEQ ID NO: 1879657
gguaguguuacagauuauc

SEQ ID NO: 1922877 - RNA, 19 nt, Artificial Sequence
  Description of Artificial Sequence: Synthetic oligonucleotide
  Antisense strand to SEQ ID NO: 1922876
gauaaucuguaacacuacc

SEQ ID NO: 1922878 - RNA, 19 nt, Artificial Sequence
  Description of Artificial Sequence: Synthetic oligonucleotide
  Sense strand starting at position 1594 of SEQ ID NO: 1879657
guuagucgauuucugauau

SEQ ID NO: 1922879 - RNA, 19 nt, Artificial Sequence
  Description of Artificial Sequence: Synthetic oligonucleotide
  Antisense strand to SEQ ID NO: 1922878
auaucagaaaucgacuaac

SEQ ID NO: 1922880 - RNA, 19 nt, Artificial Sequence
  Description of Artificial Sequence: Synthetic oligonucleotide
  Sense strand starting at position 1843 of SEQ ID NO: 1879657
gcuggaaucaaaugagagu

SEQ ID NO: 1922881 - RNA, 19 nt, Artificial Sequence
  Description of Artificial Sequence: Synthetic oligonucleotide
  Antisense strand to SEQ ID NO: 1922880
acucucauuugauuccagc

SEQ ID NO: 1922882 - RNA, 19 nt, Artificial Sequence
  Description of Artificial Sequence: Synthetic oligonucleotide
  Sense strand starting at position 1859 of SEQ ID NO: 1879657
aguccaagugaccacaauu

SEQ ID NO: 1922883 - RNA, 19 nt, Artificial Sequence
  Description of Artificial Sequence: Synthetic oligonucleotide
  Antisense strand to SEQ ID NO: 1922882
aauuguggucacuuggacu

SEQ ID NO: 1922884 - RNA, 19 nt, Artificial Sequence
  Description of Artificial Sequence: Synthetic oligonucleotide
  Sense strand starting at position 1978 of SEQ ID NO: 1879657
gcuguuacacuugauaaca

SEQ ID NO: 1922885 - RNA, 19 nt, Artificial Sequence
  Description of Artificial Sequence: Synthetic oligonucleotide
  Antisense strand to SEQ ID NO: 1922884
uguuaucaaguguaacagc

SEQ ID NO: 1922886 - RNA, 19 nt, Artificial Sequence
  Description of Artificial Sequence: Synthetic oligonucleotide
  Sense strand starting at position 2041 of SEQ ID NO: 1879657
guacgauaucucuaaguau

SEQ ID NO: 1922887 - RNA, 19 nt, Artificial Sequence
  Description of Artificial Sequence: Synthetic oligonucleotide
  Antisense strand to SEQ ID NO: 1922886
auacuuagagauaucguac

SEQ ID NO: 1922888 - RNA, 19 nt, Artificial Sequence
  Description of Artificial Sequence: Synthetic oligonucleotide
  Sense strand starting at position 2104 of SEQ ID NO: 1879657
aaguuuagggacugguaga

SEQ ID NO: 1922889 - RNA, 19 nt, Artificial Sequence
  Description of Artificial Sequence: Synthetic oligonucleotide
  Antisense strand to SEQ ID NO: 1922888
ucuaccagucccuaaacuu

SEQ ID NO: 1922890 - RNA, 19 nt, Artificial Sequence
  Description of Artificial Sequence: Synthetic oligonucleotide
  Sense strand starting at position 2105 of SEQ ID NO: 1879657
aguuuagggacugguagau

SEQ ID NO: 1922891 - RNA, 19 nt, Artificial Sequence
  Description of Artificial Sequence: Synthetic oligonucleotide
  Antisense strand to SEQ ID NO: 1922890
aucuaccagucccuaaacu

SEQ ID NO: 1922892 - RNA, 19 nt, Artificial Sequence
  Description of Artificial Sequence: Synthetic oligonucleotide
  Sense strand starting at position 2155 of SEQ ID NO: 1879657
uuaauagugucauuugcau

SEQ ID NO: 1922893 - RNA, 19 nt, Artificial Sequence
  Description of Artificial Sequence: Synthetic oligonucleotide
  Antisense strand to SEQ ID NO: 1922892
augcaaaugacacuauuaa

SEQ ID NO: 1922894 - RNA, 19 nt, Artificial Sequence
  Description of Artificial Sequence: Synthetic oligonucleotide
  Sense strand starting at position 2280 of SEQ ID NO: 1879657
aucuguuacuagucaauaa

SEQ ID NO: 1922895 - RNA, 19 nt, Artificial Sequence
  Description of Artificial Sequence: Synthetic oligonucleotide
  Antisense strand to SEQ ID NO: 1922894
uuauugacuaguaacagau

SEQ ID NO: 1922896 - RNA, 19 nt, Artificial Sequence
  Description of Artificial Sequence: Synthetic oligonucleotide
  Sense strand starting at position 2931 of SEQ ID NO: 1879657
ucagaaugauuggcugaug

SEQ ID NO: 1922897 - RNA, 19 nt, Artificial Sequence
  Description of Artificial Sequence: Synthetic oligonucleotide
  Antisense strand to SEQ ID NO: 1922896
caucagccaaucauucuga

SEQ ID NO: 1922898 - RNA, 19 nt, Artificial Sequence
  Description of Artificial Sequence: Synthetic oligonucleotide
  Sense strand starting at position 2932 of SEQ ID NO: 1879657
cagaaugauuggcugaugu

SEQ ID NO: 1922899 - RNA, 19 nt, Artificial Sequence
  Description of Artificial Sequence: Synthetic oligonucleotide
  Antisense strand to SEQ ID NO: 1922898
acaucagccaaucauucug

SEQ ID NO: 1922900 - RNA, 19 nt, Artificial Sequence
  Description of Artificial Sequence: Synthetic oligonucleotide
  Sense strand starting at position 2934 of SEQ ID NO: 1879657
gaaugauuggcugauguca

SEQ ID NO: 1922901 - RNA, 19 nt, Artificial Sequence
  Description of Artificial Sequence: Synthetic oligonucleotide
  Antisense strand to SEQ ID NO: 1922900
ugacaucagccaaucauuc

SEQ ID NO: 1922902 - RNA, 19 nt, Artificial Sequence
  Description of Artificial Sequence: Synthetic oligonucleotide
  Sense strand starting at position 3010 of SEQ ID NO: 1879657
aaugcauguguugagauaa

SEQ ID NO: 1922903 - RNA, 19 nt, Artificial Sequence
  Description of Artificial Sequence: Synthetic oligonucleotide
  Antisense strand to SEQ ID NO: 1922902
uuaucucaacacaugcauu

SEQ ID NO: 1922904 - RNA, 19 nt, Artificial Sequence
  Description of Artificial Sequence: Synthetic oligonucleotide
  Sense strand starting at position 3023 of SEQ ID NO: 1879657
agauaaggccuuugaguaa

SEQ ID NO: 1922905 - RNA, 19 nt, Artificial Sequence
  Description of Artificial Sequence: Synthetic oligonucleotide
  Antisense strand to SEQ ID NO: 1922904
uuacucaaaggccuuaucu

SEQ ID NO: 1922906 - RNA, 19 nt, Artificial Sequence
  Description of Artificial Sequence: Synthetic oligonucleotide
  Sense strand starting at position 3027 of SEQ ID NO: 1879657
aaggccuuugaguaaagua

SEQ ID NO: 1922907 - RNA, 19 nt, Artificial Sequence
  Description of Artificial Sequence: Synthetic oligonucleotide
  Antisense strand to SEQ ID NO: 1922906
uacuuuacucaaaggccuu

SEQ ID NO: 1922908 - RNA, 19 nt, Artificial Sequence
  Description of Artificial Sequence: Synthetic oligonucleotide
  Sense strand starting at position 3152 of SEQ ID NO: 1879657
uauacugaucuuuggguua

SEQ ID NO: 1922909 - RNA, 19 nt, Artificial Sequence
  Description of Artificial Sequence: Synthetic oligonucleotide
  Antisense strand to SEQ ID NO: 1922908
uaacccaaagaucaguaua

SEQ ID NO: 1922910 - RNA, 19 nt, Artificial Sequence
  Description of Artificial Sequence: Synthetic oligonucleotide
  Sense strand starting at position 3155 of SEQ ID NO: 1879657
acugaucuuuggguuauag

SEQ ID NO: 1922911 - RNA, 19 nt, Artificial Sequence
  Description of Artificial Sequence: Synthetic oligonucleotide
  Antisense strand to SEQ ID NO: 1922910
cuauaacccaaagaucagu

SEQ ID NO: 1922912 - RNA, 19 nt, Artificial Sequence
  Description of Artificial Sequence: Synthetic oligonucleotide
  Sense strand starting at position 3157 of SEQ ID NO: 1879657
ugaucuuuggguuauaggu

SEQ ID NO: 1922913 - RNA, 19 nt, Artificial Sequence
  Description of Artificial Sequence: Synthetic oligonucleotide
  Antisense strand to SEQ ID NO: 1922912
accuauaacccaaagauca

SEQ ID NO: 1922914 - RNA, 19 nt, Artificial Sequence
  Description of Artificial Sequence: Synthetic oligonucleotide
  Sense strand starting at position 3164 of SEQ ID NO: 1879657
uggguuauagguuaacuau

SEQ ID NO: 1922915 - RNA, 19 nt, Artificial Sequence
  Description of Artificial Sequence: Synthetic oligonucleotide
  Antisense strand to SEQ ID NO: 1922914
auaguuaaccuauaaccca

SEQ ID NO: 1922916 - RNA, 19 nt, Artificial Sequence
  Description of Artificial Sequence: Synthetic oligonucleotide
  Sense strand starting at position 3170 of SEQ ID NO: 1879657
auagguuaacuaugaguuu

SEQ ID NO: 1922917 - RNA, 19 nt, Artificial Sequence
  Description of Artificial Sequence: Synthetic oligonucleotide
  Antisense strand to SEQ ID NO: 1922916
aaacucauaguuaaccuau

SEQ ID NO: 1922918 - RNA, 19 nt, Artificial Sequence
  Description of Artificial Sequence: Synthetic oligonucleotide
  Sense strand starting at position 3187 of SEQ ID NO: 1879657
uuguguuaaguauacaaug

SEQ ID NO: 1922919 - RNA, 19 nt, Artificial Sequence
  Description of Artificial Sequence: Synthetic oligonucleotide
  Antisense strand to SEQ ID NO: 1922918
cauuguauacuuaacacaa

SEQ ID NO: 1922920 - RNA, 19 nt, Artificial Sequence
  Description of Artificial Sequence: Synthetic oligonucleotide
  Sense strand starting at position 3459 of SEQ ID NO: 1879657
ccaauacaguuguuuauaa

SEQ ID NO: 1922921 - RNA, 19 nt, Artificial Sequence
  Description of Artificial Sequence: Synthetic oligonucleotide
  Antisense strand to SEQ ID NO: 1922920
uuauaaacaacuguauugg

SEQ ID NO: 1922922 - RNA, 19 nt, Artificial Sequence
  Description of Artificial Sequence: Synthetic oligonucleotide
  Sense strand starting at position 3529 of SEQ ID NO: 1879657
augaauauguaccuguuaa

SEQ ID NO: 1922923 - RNA, 19 nt, Artificial Sequence
  Description of Artificial Sequence: Synthetic oligonucleotide
  Antisense strand to SEQ ID NO: 1922922
uuaacagguacauauucau

SEQ ID NO: 1922924 - RNA, 19 nt, Artificial Sequence
  Description of Artificial Sequence: Synthetic oligonucleotide
  Sense strand starting at position 46 of SEQ ID NO: 1879658
ugggacaggucuucugaca

SEQ ID NO: 1922925 - RNA, 19 nt, Artificial Sequence
  Description of Artificial Sequence: Synthetic oligonucleotide
  Antisense strand to SEQ ID NO: 1922924
ugucagaagaccuguccca

SEQ ID NO: 1922926 - RNA, 19 nt, Artificial Sequence
  Description of Artificial Sequence: Synthetic oligonucleotide
  Sense strand starting at position 53 of SEQ ID NO: 1879658
ggucuucugacaggucuua

SEQ ID NO: 1922927 - RNA, 19 nt, Artificial Sequence
  Description of Artificial Sequence: Synthetic oligonucleotide
  Antisense strand to SEQ ID NO: 1922926
uaagaccugucagaagacc

SEQ ID NO: 1922928 - RNA, 19 nt, Artificial Sequence
  Description of Artificial Sequence: Synthetic oligonucleotide
  Sense strand starting at position 106 of SEQ ID NO: 1879658
gguuguauuuaguccucuu

SEQ ID NO: 1922929 - RNA, 19 nt, Artificial Sequence
  Description of Artificial Sequence: Synthetic oligonucleotide
  Antisense strand to SEQ ID NO: 1922928
aagaggacuaaauacaacc

SEQ ID NO: 1922930 - RNA, 19 nt, Artificial Sequence
  Description of Artificial Sequence: Synthetic oligonucleotide
  Sense strand starting at position 109 of SEQ ID NO: 1879658
uguauuuaguccucuucuu

SEQ ID NO: 1922931 - RNA, 19 nt, Artificial Sequence
  Description of Artificial Sequence: Synthetic oligonucleotide
  Antisense strand to SEQ ID NO: 1922930
aagaagaggacuaaauaca

SEQ ID NO: 1922932 - RNA, 19 nt, Artificial Sequence
  Description of Artificial Sequence: Synthetic oligonucleotide
  Sense strand starting at position 210 of SEQ ID NO: 1879658
aguguucaucuuggaggau

SEQ ID NO: 1922933 - RNA, 19 nt, Artificial Sequence
  Description of Artificial Sequence: Synthetic oligonucleotide
  Antisense strand to SEQ ID NO: 1922932
auccuccaagaugaacacu

SEQ ID NO: 1922934 - RNA, 19 nt, Artificial Sequence
  Description of Artificial Sequence: Synthetic oligonucleotide
  Sense strand starting at position 213 of SEQ ID NO: 1879658
guucaucuuggaggauaga

SEQ ID NO: 1922935 - RNA, 19 nt, Artificial Sequence
  Description of Artificial Sequence: Synthetic oligonucleotide
  Antisense strand to SEQ ID NO: 1922934
ucuauccuccaagaugaac

SEQ ID NO: 1922936 - RNA, 19 nt, Artificial Sequence
  Description of Artificial Sequence: Synthetic oligonucleotide
  Sense strand starting at position 263 of SEQ ID NO: 1879658
uugggaucugccuauauuc

SEQ ID NO: 1922937 - RNA, 19 nt, Artificial Sequence
  Description of Artificial Sequence: Synthetic oligonucleotide
  Antisense strand to SEQ ID NO: 1922936
gaauauaggcagaucccaa

SEQ ID NO: 1922938 - RNA, 19 nt, Artificial Sequence
  Description of Artificial Sequence: Synthetic oligonucleotide
  Sense strand starting at position 312 of SEQ ID NO: 1879658
cuggcaagucuacaugaaa

SEQ ID NO: 1922939 - RNA, 19 nt, Artificial Sequence
  Description of Artificial Sequence: Synthetic oligonucleotide
  Antisense strand to SEQ ID NO: 1922938
uuucauguagacuugccag

SEQ ID NO: 1922940 - RNA, 19 nt, Artificial Sequence
  Description of Artificial Sequence: Synthetic oligonucleotide
  Sense strand starting at position 413 of SEQ ID NO: 1879658
ugggcucucccaugauuaa

SEQ ID NO: 1922941 - RNA, 19 nt, Artificial Sequence
  Description of Artificial Sequence: Synthetic oligonucleotide
  Antisense strand to SEQ ID NO: 1922940
uuaaucaugggagagccca

SEQ ID NO: 1922942 - RNA, 19 nt, Artificial Sequence
  Description of Artificial Sequence: Synthetic oligonucleotide
  Sense strand starting at position 414 of SEQ ID NO: 1879658
gggcucucccaugauuaaa

SEQ ID NO: 1922943 - RNA, 19 nt, Artificial Sequence
  Description of Artificial Sequence: Synthetic oligonucleotide
  Antisense strand to SEQ ID NO: 1922942
uuuaaucaugggagagccc

SEQ ID NO: 1922944 - RNA, 19 nt, Artificial Sequence
  Description of Artificial Sequence: Synthetic oligonucleotide
  Sense strand starting at position 515 of SEQ ID NO: 1879658
cccaacgauuguucccaaa

SEQ ID NO: 1922945 - RNA, 19 nt, Artificial Sequence
  Description of Artificial Sequence: Synthetic oligonucleotide
  Antisense strand to SEQ ID NO: 1922944
uuugggaacaaucguuggg

SEQ ID NO: 1922946 - RNA, 19 nt, Artificial Sequence
  Description of Artificial Sequence: Synthetic oligonucleotide
  Sense strand starting at position 538 of SEQ ID NO: 1879658
acauguuagagcugcagaa

SEQ ID NO: 1922947 - RNA, 19 nt, Artificial Sequence
  Description of Artificial Sequence: Synthetic oligonucleotide
  Antisense strand to SEQ ID NO: 1922946
uucugcagcucuaacaugu

SEQ ID NO: 1922948 - RNA, 19 nt, Artificial Sequence
  Description of Artificial Sequence: Synthetic oligonucleotide
  Sense strand starting at position 976 of SEQ ID NO: 1879658
auccaaagccugugaugau

SEQ ID NO: 1922949 - RNA, 19 nt, Artificial Sequence
  Description of Artificial Sequence: Synthetic oligonucleotide
  Antisense strand to SEQ ID NO: 1922948
aucaucacaggcuuuggau

SEQ ID NO: 1922950 - RNA, 19 nt, Artificial Sequence
  Description of Artificial Sequence: Synthetic oligonucleotide
  Sense strand starting at position 1104 of SEQ ID NO: 1879658
ucucuaaaucguggacauu

SEQ ID NO: 1922951 - RNA, 19 nt, Artificial Sequence
  Description of Artificial Sequence: Synthetic oligonucleotide
  Antisense strand to SEQ ID NO: 1922950
aauguccacgauuuagaga

SEQ ID NO: 1922952 - RNA, 19 nt, Artificial Sequence
  Description of Artificial Sequence: Synthetic oligonucleotide
  Sense strand starting at position 1273 of SEQ ID NO: 1879658
ccuagcauagcaugauuaa

SEQ ID NO: 1922953 - RNA, 19 nt, Artificial Sequence
  Description of Artificial Sequence: Synthetic oligonucleotide
  Antisense strand to SEQ ID NO: 1922952
uuaaucaugcuaugcuagg

SEQ ID NO: 1922954 - RNA, 19 nt, Artificial Sequence
  Description of Artificial Sequence: Synthetic oligonucleotide
  Sense strand starting at position 1274 of SEQ ID NO: 1879658
cuagcauagcaugauuaaa

SEQ ID NO: 1922955 - RNA, 19 nt, Artificial Sequence
  Description of Artificial Sequence: Synthetic oligonucleotide
  Antisense strand to SEQ ID NO: 1922954
uuuaaucaugcuaugcuag

SEQ ID NO: 1922956 - RNA, 19 nt, Artificial Sequence
  Description of Artificial Sequence: Synthetic oligonucleotide
  Sense strand starting at position 1276 of SEQ ID NO: 1879658
agcauagcaugauuaaaga

SEQ ID NO: 1922957 - RNA, 19 nt, Artificial Sequence
  Description of Artificial Sequence: Synthetic oligonucleotide
  Antisense strand to SEQ ID NO: 1922956
ucuuuaaucaugcuaugcu

SEQ ID NO: 1922958 - RNA, 19 nt, Artificial Sequence
  Description of Artificial Sequence: Synthetic oligonucleotide
  Sense strand starting at position 1887 of SEQ ID NO: 1879658
cacucuauacuuggagaug

SEQ ID NO: 1922959 - RNA, 19 nt, Artificial Sequence
  Description of Artificial Sequence: Synthetic oligonucleotide
  Antisense strand to SEQ ID NO: 1922958
caucuccaaguauagagug

SEQ ID NO: 1922960 - RNA, 19 nt, Artificial Sequence
  Description of Artificial Sequence: Synthetic oligonucleotide
  Sense strand starting at position 1899 of SEQ ID NO: 1879658
ggagaugugccguagacca

SEQ ID NO: 1922961 - RNA, 19 nt, Artificial Sequence
  Description of Artificial Sequence: Synthetic oligonucleotide
  Antisense strand to SEQ ID NO: 1922960
uggucuacggcacaucucc

SEQ ID NO: 1922962 - RNA, 19 nt, Artificial Sequence
  Description of Artificial Sequence: Synthetic oligonucleotide
  Sense strand starting at position 1901 of SEQ ID NO: 1879658
agaugugccguagaccaaa

SEQ ID NO: 1922963 - RNA, 19 nt, Artificial Sequence
  Description of Artificial Sequence: Synthetic oligonucleotide
  Antisense strand to SEQ ID NO: 1922962
uuuggucuacggcacaucu

SEQ ID NO: 1922964 - RNA, 19 nt, Artificial Sequence
  Description of Artificial Sequence: Synthetic oligonucleotide
  Sense strand starting at position 2094 of SEQ ID NO: 1879658
aaacauuucugugagguca

SEQ ID NO: 1922965 - RNA, 19 nt, Artificial Sequence
  Description of Artificial Sequence: Synthetic oligonucleotide
  Antisense strand to SEQ ID NO: 1922964
ugaccucacagaaauguuu

SEQ ID NO: 1922966 - RNA, 19 nt, Artificial Sequence
  Description of Artificial Sequence: Synthetic oligonucleotide
  Sense strand starting at position 2166 of SEQ ID NO: 1879658
gcacuaguauaagcagaaa

SEQ ID NO: 1922967 - RNA, 19 nt, Artificial Sequence
  Description of Artificial Sequence: Synthetic oligonucleotide
  Antisense strand to SEQ ID NO: 1922966
uuucugcuuauacuagugc

SEQ ID NO: 1922968 - RNA, 19 nt, Artificial Sequence
  Description of Artificial Sequence: Synthetic oligonucleotide
  Sense strand starting at position 2285 of SEQ ID NO: 1879658
aaaugaauaugggcaaagu

SEQ ID NO: 1922969 - RNA, 19 nt, Artificial Sequence
  Description of Artificial Sequence: Synthetic oligonucleotide
  Antisense strand to SEQ ID NO: 1922968
acuuugcccauauucauuu

SEQ ID NO: 1922970 - RNA, 19 nt, Artificial Sequence
  Description of Artificial Sequence: Synthetic oligonucleotide
  Sense strand starting at position 2378 of SEQ ID NO: 1879658
guauaauccugaguaucau

SEQ ID NO: 1922971 - RNA, 19 nt, Artificial Sequence
  Description of Artificial Sequence: Synthetic oligonucleotide
  Antisense strand to SEQ ID NO: 1922970
augauacucaggauuauac

SEQ ID NO: 1922972 - RNA, 19 nt, Artificial Sequence
  Description of Artificial Sequence: Synthetic oligonucleotide
  Sense strand starting at position 2424 of SEQ ID NO: 1879658
uuauuucuaucugaugaga

SEQ ID NO: 1922973 - RNA, 19 nt, Artificial Sequence
  Description of Artificial Sequence: Synthetic oligonucleotide
  Antisense strand to SEQ ID NO: 1922972
ucucaucagauagaaauaa

SEQ ID NO: 1922974 - RNA, 19 nt, Artificial Sequence
  Description of Artificial Sequence: Synthetic oligonucleotide
  Sense strand starting at position 2426 of SEQ ID NO: 1879658
auuucuaucugaugagaac

SEQ ID NO: 1922975 - RNA, 19 nt, Artificial Sequence
  Description of Artificial Sequence: Synthetic oligonucleotide
  Antisense strand to SEQ ID NO: 1922974
guucucaucagauagaaau

SEQ ID NO: 1922976 - RNA, 19 nt, Artificial Sequence
  Description of Artificial Sequence: Synthetic oligonucleotide
  Sense strand starting at position 2473 of SEQ ID NO: 1879658
uuuaguccaucuuuagaua

SEQ ID NO: 1922977 - RNA, 19 nt, Artificial Sequence
  Description of Artificial Sequence: Synthetic oligonucleotide
  Antisense strand to SEQ ID NO: 1922976
uaucuaaagauggacuaaa

SEQ ID NO: 1922978 - RNA, 19 nt, Artificial Sequence
  Description of Artificial Sequence: Synthetic oligonucleotide
  Sense strand starting at position 2649 of SEQ ID NO: 1879658
acaggugauuucuuguguu

SEQ ID NO: 1922979 - RNA, 19 nt, Artificial Sequence
  Description of Artificial Sequence: Synthetic oligonucleotide
  Antisense strand to SEQ ID NO: 1922978
aacacaagaaaucaccugu

SEQ ID NO: 1922980 - RNA, 19 nt, Artificial Sequence
  Description of Artificial Sequence: Synthetic oligonucleotide
  Sense strand starting at position 2671 of SEQ ID NO: 1879658
uuguaucuacuggaaaucu

SEQ ID NO: 1922981 - RNA, 19 nt, Artificial Sequence
  Description of Artificial Sequence: Synthetic oligonucleotide
  Antisense strand to SEQ ID NO: 1922980
agauuuccaguagauacaa

SEQ ID NO: 1922982 - RNA, 19 nt, Artificial Sequence
  Description of Artificial Sequence: Synthetic oligonucleotide
  Sense strand starting at position 2779 of SEQ ID NO: 1879658
acagauaaaccagguuguu

SEQ ID NO: 1922983 - RNA, 19 nt, Artificial Sequence
  Description of Artificial Sequence: Synthetic oligonucleotide
  Antisense strand to SEQ ID NO: 1922982
aacaaccugguuuaucugu

SEQ ID NO: 1922984 - RNA, 19 nt, Artificial Sequence
  Description of Artificial Sequence: Synthetic oligonucleotide
  Sense strand starting at position 2866 of SEQ ID NO: 1879658
aucccagcaguguauuaau

SEQ ID NO: 1922985 - RNA, 19 nt, Artificial Sequence
  Description of Artificial Sequence: Synthetic oligonucleotide
  Antisense strand to SEQ ID NO: 1922984
auuaauacacugcugggau

SEQ ID NO: 1922986 - RNA, 19 nt, Artificial Sequence
  Description of Artificial Sequence: Synthetic oligonucleotide
  Sense strand starting at position 2912 of SEQ ID NO: 1879658
uugugauucucacuagauu

SEQ ID NO: 1922987 - RNA, 19 nt, Artificial Sequence
  Description of Artificial Sequence: Synthetic oligonucleotide
  Antisense strand to SEQ ID NO: 1922986
aaucuagugagaaucacaa

SEQ ID NO: 1922988 - RNA, 19 nt, Artificial Sequence
  Description of Artificial Sequence: Synthetic oligonucleotide
  Sense strand starting at position 3042 of SEQ ID NO: 1879658
gcuagcuuugcuuucucua

SEQ ID NO: 1922989 - RNA, 19 nt, Artificial Sequence
  Description of Artificial Sequence: Synthetic oligonucleotide
  Antisense strand to SEQ ID NO: 1922988
uagagaaagcaaagcuagc

SEQ ID NO: 1922990 - RNA, 19 nt, Artificial Sequence
  Description of Artificial Sequence: Synthetic oligonucleotide
  Sense strand starting at position 3241 of SEQ ID NO: 1879658
guauccaaaguguaggaau

SEQ ID NO: 1922991 - RNA, 19 nt, Artificial Sequence
  Description of Artificial Sequence: Synthetic oligonucleotide
  Antisense strand to SEQ ID NO: 1922990
auuccuacacuuuggauac

SEQ ID NO: 1922992 - RNA, 19 nt, Artificial Sequence
  Description of Artificial Sequence: Synthetic oligonucleotide
  Sense strand starting at position 3254 of SEQ ID NO: 1879658
aggaauguuaugugaccca

SEQ ID NO: 1922993 - RNA, 19 nt, Artificial Sequence
  Description of Artificial Sequence: Synthetic oligonucleotide
  Antisense strand to SEQ ID NO: 1922992
ugggucacauaacauuccu

SEQ ID NO: 1922994 - RNA, 19 nt, Artificial Sequence
  Description of Artificial Sequence: Synthetic oligonucleotide
  Sense strand starting at position 3259 of SEQ ID NO: 1879658
uguuaugugacccaacagu

SEQ ID NO: 1922995 - RNA, 19 nt, Artificial Sequence
  Description of Artificial Sequence: Synthetic oligonucleotide
  Antisense strand to SEQ ID NO: 1922994
acuguugggucacauaaca

SEQ ID NO: 1922996 - RNA, 19 nt, Artificial Sequence
  Description of Artificial Sequence: Synthetic oligonucleotide
  Sense strand starting at position 3345 of SEQ ID NO: 1879658
auagaucacucacuaguga

SEQ ID NO: 1922997 - RNA, 19 nt, Artificial Sequence
  Description of Artificial Sequence: Synthetic oligonucleotide
  Antisense strand to SEQ ID NO: 1922996
ucacuagugagugaucuau

SEQ ID NO: 1922998 - RNA, 19 nt, Artificial Sequence
  Description of Artificial Sequence: Synthetic oligonucleotide
  Sense strand starting at position 3368 of SEQ ID NO: 1879658
gagcuuauuugugcacuga

SEQ ID NO: 1922999 - RNA, 19 nt, Artificial Sequence
  Description of Artificial Sequence: Synthetic oligonucleotide
  Antisense strand to SEQ ID NO: 1922998
ucagugcacaaauaagcuc

SEQ ID NO: 1923000 - RNA, 19 nt, Artificial Sequence
  Description of Artificial Sequence: Synthetic oligonucleotide
  Sense strand starting at position 3372 of SEQ ID NO: 1879658
uuauuugugcacugaaguu

SEQ ID NO: 1923001 - RNA, 19 nt, Artificial Sequence
  Description of Artificial Sequence: Synthetic oligonucleotide
  Antisense strand to SEQ ID NO: 1923000
aacuucagugcacaaauaa

SEQ ID NO: 1923002 - RNA, 19 nt, Artificial Sequence
  Description of Artificial Sequence: Synthetic oligonucleotide
  Sense strand starting at position 3714 of SEQ ID NO: 1879658
cuguguugaucuuuaauau

SEQ ID NO: 1923003 - RNA, 19 nt, Artificial Sequence
  Description of Artificial Sequence: Synthetic oligonucleotide
  Antisense strand to SEQ ID NO: 1923002
auauuaaagaucaacacag

SEQ ID NO: 1923004 - RNA, 19 nt, Artificial Sequence
  Description of Artificial Sequence: Synthetic oligonucleotide
  Sense strand starting at position 173 of SEQ ID NO: 1879659
agcugagcuuguucugaga

SEQ ID NO: 1923005 - RNA, 19 nt, Artificial Sequence
  Description of Artificial Sequence: Synthetic oligonucleotide
  Antisense strand to SEQ ID NO: 1923004
ucucagaacaagcucagcu

SEQ ID NO: 1923006 - RNA, 19 nt, Artificial Sequence
  Description of Artificial Sequence: Synthetic oligonucleotide
  Sense strand starting at position 448 of SEQ ID NO: 1879659
cucccauugagacgaggaa

SEQ ID NO: 1923007 - RNA, 19 nt, Artificial Sequence
  Description of Artificial Sequence: Synthetic oligonucleotide
  Antisense strand to SEQ ID NO: 1923006
uuccucgucucaaugggag

SEQ ID NO: 1923008 - RNA, 19 nt, Artificial Sequence
  Description of Artificial Sequence: Synthetic oligonucleotide
  Sense strand starting at position 519 of SEQ ID NO: 1879659
uggccucauucguuuaaca

SEQ ID NO: 1923009 - RNA, 19 nt, Artificial Sequence
  Description of Artificial Sequence: Synthetic oligonucleotide
  Antisense strand to SEQ ID NO: 1923008
uguuaaacgaaugaggcca

SEQ ID NO: 1923010 - RNA, 19 nt, Artificial Sequence
  Description of Artificial Sequence: Synthetic oligonucleotide
  Sense strand starting at position 521 of SEQ ID NO: 1879659
gccucauucguuuaacaaa

SEQ ID NO: 1923011 - RNA, 19 nt, Artificial Sequence
  Description of Artificial Sequence: Synthetic oligonucleotide
  Antisense strand to SEQ ID NO: 1923010
uuuguuaaacgaaugaggc

SEQ ID NO: 1923012 - RNA, 19 nt, Artificial Sequence
  Description of Artificial Sequence: Synthetic oligonucleotide
  Sense strand starting at position 1184 of SEQ ID NO: 1879659
agguauaauguuuaaccca

SEQ ID NO: 1923013 - RNA, 19 nt, Artificial Sequence
  Description of Artificial Sequence: Synthetic oligonucleotide
  Antisense strand to SEQ ID NO: 1923012
uggguuaaacauuauaccu

SEQ ID NO: 1923014 - RNA, 19 nt, Artificial Sequence
  Description of Artificial Sequence: Synthetic oligonucleotide
  Sense strand starting at position 1202 of SEQ ID NO: 1879659
agaggagagucucauuaga

SEQ ID NO: 1923015 - RNA, 19 nt, Artificial Sequence
  Description of Artificial Sequence: Synthetic oligonucleotide
  Antisense strand to SEQ ID NO: 1923014
ucuaaugagacucuccucu

SEQ ID NO: 1923016 - RNA, 19 nt, Artificial Sequence
  Description of Artificial Sequence: Synthetic oligonucleotide
  Sense strand starting at position 1237 of SEQ ID NO: 1879659
gggacaggguaauaauauu

SEQ ID NO: 1923017 - RNA, 19 nt, Artificial Sequence
  Description of Artificial Sequence: Synthetic oligonucleotide
  Antisense strand to SEQ ID NO: 1923016
aauauuauuacccuguccc

SEQ ID NO: 1923018 - RNA, 19 nt, Artificial Sequence
  Description of Artificial Sequence: Synthetic oligonucleotide
  Sense strand starting at position 1280 of SEQ ID NO: 1879659
cuuggaggaguccauuguu

SEQ ID NO: 1923019 - RNA, 19 nt, Artificial Sequence
  Description of Artificial Sequence: Synthetic oligonucleotide
  Antisense strand to SEQ ID NO: 1923018
aacaauggacuccuccaag

SEQ ID NO: 1923020 - RNA, 19 nt, Artificial Sequence
  Description of Artificial Sequence: Synthetic oligonucleotide
  Sense strand starting at position 1283 of SEQ ID NO: 1879659
ggaggaguccauuguuauc

SEQ ID NO: 1923021 - RNA, 19 nt, Artificial Sequence
  Description of Artificial Sequence: Synthetic oligonucleotide
  Antisense strand to SEQ ID NO: 1923020
gauaacaauggacuccucc

SEQ ID NO: 1923022 - RNA, 19 nt, Artificial Sequence
  Description of Artificial Sequence: Synthetic oligonucleotide
  Sense strand starting at position 1481 of SEQ ID NO: 1879659
ccaggauucuugcugauac

SEQ ID NO: 1923023 - RNA, 19 nt, Artificial Sequence
  Description of Artificial Sequence: Synthetic oligonucleotide
  Antisense strand to SEQ ID NO: 1923022
guaucagcaagaauccugg

SEQ ID NO: 1923024 - RNA, 19 nt, Artificial Sequence
  Description of Artificial Sequence: Synthetic oligonucleotide
  Sense strand starting at position 1483 of SEQ ID NO: 1879659
aggauucuugcugauacau

SEQ ID NO: 1923025 - RNA, 19 nt, Artificial Sequence
  Description of Artificial Sequence: Synthetic oligonucleotide
  Antisense strand to SEQ ID NO: 1923024
auguaucagcaagaauccu

SEQ ID NO: 1923026 - RNA, 19 nt, Artificial Sequence
  Description of Artificial Sequence: Synthetic oligonucleotide
  Sense strand starting at position 1519 of SEQ ID NO: 1879659
aagaauuaugcccgucccu

SEQ ID NO: 1923027 - RNA, 19 nt, Artificial Sequence
  Description of Artificial Sequence: Synthetic oligonucleotide
  Antisense strand to SEQ ID NO: 1923026
agggacgggcauaauucuu

SEQ ID NO: 1923028 - RNA, 19 nt, Artificial Sequence
  Description of Artificial Sequence: Synthetic oligonucleotide
  Sense strand starting at position 1636 of SEQ ID NO: 1879659
cugggauccuuccaaggaa

SEQ ID NO: 1923029 - RNA, 19 nt, Artificial Sequence
  Description of Artificial Sequence: Synthetic oligonucleotide
  Antisense strand to SEQ ID NO: 1923028
uuccuuggaaggaucccag

SEQ ID NO: 1923030 - RNA, 19 nt, Artificial Sequence
  Description of Artificial Sequence: Synthetic oligonucleotide
  Sense strand starting at position 2090 of SEQ ID NO: 1879659
aggugacuugcucaacguu

SEQ ID NO: 1923031 - RNA, 19 nt, Artificial Sequence
  Description of Artificial Sequence: Synthetic oligonucleotide
  Antisense strand to SEQ ID NO: 1923030
aacguugagcaagucaccu

SEQ ID NO: 1923032 - RNA, 19 nt, Artificial Sequence
  Description of Artificial Sequence: Synthetic oligonucleotide
  Sense strand starting at position 2093 of SEQ ID NO: 1879659
ugacuugcucaacguuaca

SEQ ID NO: 1923033 - RNA, 19 nt, Artificial Sequence
  Description of Artificial Sequence: Synthetic oligonucleotide
  Antisense strand to SEQ ID NO: 1923032
uguaacguugagcaaguca

SEQ ID NO: 1923034 - RNA, 19 nt, Artificial Sequence
  Description of Artificial Sequence: Synthetic oligonucleotide
  Sense strand starting at position 2147 of SEQ ID NO: 1879659
aagucugaggccugaguuu

SEQ ID NO: 1923035 - RNA, 19 nt, Artificial Sequence
  Description of Artificial Sequence: Synthetic oligonucleotide
  Antisense strand to SEQ ID NO: 1923034
aaacucaggccucagacuu

SEQ ID NO: 1923036 - RNA, 19 nt, Artificial Sequence
  Description of Artificial Sequence: Synthetic oligonucleotide
  Sense strand starting at position 2189 of SEQ ID NO: 1879659
acggcuucucgggaagaau

SEQ ID NO: 1923037 - RNA, 19 nt, Artificial Sequence
  Description of Artificial Sequence: Synthetic oligonucleotide
  Antisense strand to SEQ ID NO: 1923036
auucuucccgagaagccgu

SEQ ID NO: 1923038 - RNA, 19 nt, Artificial Sequence
  Description of Artificial Sequence: Synthetic oligonucleotide
  Sense strand starting at position 2283 of SEQ ID NO: 1879659
uccacucaccagugaguuu

SEQ ID NO: 1923039 - RNA, 19 nt, Artificial Sequence
  Description of Artificial Sequence: Synthetic oligonucleotide
  Antisense strand to SEQ ID NO: 1923038
aaacucacuggugagugga

SEQ ID NO: 1923040 - RNA, 19 nt, Artificial Sequence
  Description of Artificial Sequence: Synthetic oligonucleotide
  Sense strand starting at position 2508 of SEQ ID NO: 1879659
uuugcuaauccuugaagca

SEQ ID NO: 1923041 - RNA, 19 nt, Artificial Sequence
  Description of Artificial Sequence: Synthetic oligonucleotide
  Antisense strand to SEQ ID NO: 1923040
ugcuucaaggauuagcaaa

SEQ ID NO: 1923042 - RNA, 19 nt, Artificial Sequence
  Description of Artificial Sequence: Synthetic oligonucleotide
  Sense strand starting at position 2509 of SEQ ID NO: 1879659
uugcuaauccuugaagcaa

SEQ ID NO: 1923043 - RNA, 19 nt, Artificial Sequence
  Description of Artificial Sequence: Synthetic oligonucleotide
  Antisense strand to SEQ ID NO: 1923042
uugcuucaaggauuagcaa

SEQ ID NO: 1923044 - RNA, 19 nt, Artificial Sequence
  Description of Artificial Sequence: Synthetic oligonucleotide
  Sense strand starting at position 2517 of SEQ ID NO: 1879659
ccuugaagcaacuguguga

SEQ ID NO: 1923045 - RNA, 19 nt, Artificial Sequence
  Description of Artificial Sequence: Synthetic oligonucleotide
  Antisense strand to SEQ ID NO: 1923044
ucacacaguugcuucaagg

SEQ ID NO: 1923046 - RNA, 19 nt, Artificial Sequence
  Description of Artificial Sequence: Synthetic oligonucleotide
  Sense strand starting at position 2530 of SEQ ID NO: 1879659
gugugaggcaaguacuauu

SEQ ID NO: 1923047 - RNA, 19 nt, Artificial Sequence
  Description of Artificial Sequence: Synthetic oligonucleotide
  Antisense strand to SEQ ID NO: 1923046
aauaguacuugccucacac

SEQ ID NO: 1923048 - RNA, 19 nt, Artificial Sequence
  Description of Artificial Sequence: Synthetic oligonucleotide
  Sense strand starting at position 2599 of SEQ ID NO: 1879659
cucuacagucauugagcua

SEQ ID NO: 1923049 - RNA, 19 nt, Artificial Sequence
  Description of Artificial Sequence: Synthetic oligonucleotide
  Antisense strand to SEQ ID NO: 1923048
uagcucaaugacuguagag

SEQ ID NO: 1923050 - RNA, 19 nt, Artificial Sequence
  Description of Artificial Sequence: Synthetic oligonucleotide
  Sense strand starting at position 2602 of SEQ ID NO: 1879659
uacagucauugagcuagua

SEQ ID NO: 1923051 - RNA, 19 nt, Artificial Sequence
  Description of Artificial Sequence: Synthetic oligonucleotide
  Antisense strand to SEQ ID NO: 1923050
uacuagcucaaugacugua

SEQ ID NO: 1923052 - RNA, 19 nt, Artificial Sequence
  Description of Artificial Sequence: Synthetic oligonucleotide
  Sense strand starting at position 2705 of SEQ ID NO: 1879659
ccuggcuccuuaguuauca

SEQ ID NO: 1923053 - RNA, 19 nt, Artificial Sequence
  Description of Artificial Sequence: Synthetic oligonucleotide
  Antisense strand to SEQ ID NO: 1923052
ugauaacuaaggagccagg

SEQ ID NO: 1923054 - RNA, 19 nt, Artificial Sequence
  Description of Artificial Sequence: Synthetic oligonucleotide
  Sense strand starting at position 2706 of SEQ ID NO: 1879659
cuggcuccuuaguuaucau

SEQ ID NO: 1923055 - RNA, 19 nt, Artificial Sequence
  Description of Artificial Sequence: Synthetic oligonucleotide
  Antisense strand to SEQ ID NO: 1923054
augauaacuaaggagccag

SEQ ID NO: 1923056 - RNA, 19 nt, Artificial Sequence
  Description of Artificial Sequence: Synthetic oligonucleotide
  Sense strand starting at position 2710 of SEQ ID NO: 1879659
cuccuuaguuaucauuuga

SEQ ID NO: 1923057 - RNA, 19 nt, Artificial Sequence
  Description of Artificial Sequence: Synthetic oligonucleotide
  Antisense strand to SEQ ID NO: 1923056
ucaaaugauaacuaaggag

SEQ ID NO: 1923058 - RNA, 19 nt, Artificial Sequence
  Description of Artificial Sequence: Synthetic oligonucleotide
  Sense strand starting at position 2715 of SEQ ID NO: 1879659
uaguuaucauuugagggua

SEQ ID NO: 1923059 - RNA, 19 nt, Artificial Sequence
  Description of Artificial Sequence: Synthetic oligonucleotide
  Antisense strand to SEQ ID NO: 1923058
uacccucaaaugauaacua

SEQ ID NO: 1923060 - RNA, 19 nt, Artificial Sequence
  Description of Artificial Sequence: Synthetic oligonucleotide
  Sense strand starting at position 2753 of SEQ ID NO: 1879659
ucuauagggcuuuaucaag

SEQ ID NO: 1923061 - RNA, 19 nt, Artificial Sequence
  Description of Artificial Sequence: Synthetic oligonucleotide
  Antisense strand to SEQ ID NO: 1923060
cuugauaaagcccuauaga

SEQ ID NO: 1923062 - RNA, 19 nt, Artificial Sequence
  Description of Artificial Sequence: Synthetic oligonucleotide
  Sense strand starting at position 2801 of SEQ ID NO: 1879659
gucacacuagauuagcaaa

SEQ ID NO: 1923063 - RNA, 19 nt, Artificial Sequence
  Description of Artificial Sequence: Synthetic oligonucleotide
  Antisense strand to SEQ ID NO: 1923062
uuugcuaaucuagugugac

SEQ ID NO: 1923064 - RNA, 19 nt, Artificial Sequence
  Description of Artificial Sequence: Synthetic oligonucleotide
  Sense strand starting at position 2850 of SEQ ID NO: 1879659
guaccuggcccuugguaau

SEQ ID NO: 1923065 - RNA, 19 nt, Artificial Sequence
  Description of Artificial Sequence: Synthetic oligonucleotide
  Antisense strand to SEQ ID NO: 1923064
auuaccaagggccagguac

SEQ ID NO: 1923066 - RNA, 19 nt, Artificial Sequence
  Description of Artificial Sequence: Synthetic oligonucleotide
  Sense strand starting at position 2977 of SEQ ID NO: 1879659
ucaggauggcccuguccua

SEQ ID NO: 1923067 - RNA, 19 nt, Artificial Sequence
  Description of Artificial Sequence: Synthetic oligonucleotide
  Antisense strand to SEQ ID NO: 1923066
uaggacagggccauccuga

SEQ ID NO: 1923068 - RNA, 19 nt, Artificial Sequence
  Description of Artificial Sequence: Synthetic oligonucleotide
  Sense strand starting at position 3181 of SEQ ID NO: 1879659
gggaccuccucuuccuuaa

SEQ ID NO: 1923069 - RNA, 19 nt, Artificial Sequence
  Description of Artificial Sequence: Synthetic oligonucleotide
  Antisense strand to SEQ ID NO: 1923068
uuaaggaagaggagguccc

SEQ ID NO: 1923070 - RNA, 19 nt, Artificial Sequence
  Description of Artificial Sequence: Synthetic oligonucleotide
  Sense strand starting at position 3294 of SEQ ID NO: 1879659
uacaaaggauuugaaguau

SEQ ID NO: 1923071 - RNA, 19 nt, Artificial Sequence
  Description of Artificial Sequence: Synthetic oligonucleotide
  Antisense strand to SEQ ID NO: 1923070
auacuucaaauccuuugua

SEQ ID NO: 1923072 - RNA, 19 nt, Artificial Sequence
  Description of Artificial Sequence: Synthetic oligonucleotide
  Sense strand starting at position 3431 of SEQ ID NO: 1879659
gugcuuugcagccaugaac

SEQ ID NO: 1923073 - RNA, 19 nt, Artificial Sequence
  Description of Artificial Sequence: Synthetic oligonucleotide
  Antisense strand to SEQ ID NO: 1923072
guucauggcugcaaagcac

SEQ ID NO: 1923074 - RNA, 19 nt, Artificial Sequence
  Description of Artificial Sequence: Synthetic oligonucleotide
  Sense strand starting at position 3530 of SEQ ID NO: 1879659
guguauacagaauaguacu

SEQ ID NO: 1923075 - RNA, 19 nt, Artificial Sequence
  Description of Artificial Sequence: Synthetic oligonucleotide
  Antisense strand to SEQ ID NO: 1923074
aguacuauucuguauacac

SEQ ID NO: 1923076 - RNA, 19 nt, Artificial Sequence
  Description of Artificial Sequence: Synthetic oligonucleotide
  Sense strand starting at position 3575 of SEQ ID NO: 1879659
augaacauauaucggauuu

SEQ ID NO: 1923077 - RNA, 19 nt, Artificial Sequence
  Description of Artificial Sequence: Synthetic oligonucleotide
  Antisense strand to SEQ ID NO: 1923076
aaauccgauauauguucau

SEQ ID NO: 1923078 - RNA, 19 nt, Artificial Sequence
  Description of Artificial Sequence: Synthetic oligonucleotide
  Sense strand starting at position 3577 of SEQ ID NO: 1879659
gaacauauaucggauuugu

SEQ ID NO: 1923079 - RNA, 19 nt, Artificial Sequence
  Description of Artificial Sequence: Synthetic oligonucleotide
  Antisense strand to SEQ ID NO: 1923078
acaaauccgauauauguuc

SEQ ID NO: 1923080 - RNA, 19 nt, Artificial Sequence
  Description of Artificial Sequence: Synthetic oligonucleotide
  Sense strand starting at position 3601 of SEQ ID NO: 1879659
aaagaaacaugggaaaguu

SEQ ID NO: 1923081 - RNA, 19 nt, Artificial Sequence
  Description of Artificial Sequence: Synthetic oligonucleotide
  Antisense strand to SEQ ID NO: 1923080
aacuuucccauguuucuuu

SEQ ID NO: 1923082 - RNA, 19 nt, Artificial Sequence
  Description of Artificial Sequence: Synthetic oligonucleotide
  Sense strand starting at position 3645 of SEQ ID NO: 1879659
accuauagaugggaauaga

SEQ ID NO: 1923083 - RNA, 19 nt, Artificial Sequence
  Description of Artificial Sequence: Synthetic oligonucleotide
  Antisense strand to SEQ ID NO: 1923082
ucuauucccaucuauaggu

SEQ ID NO: 1923084 - RNA, 19 nt, Artificial Sequence
  Description of Artificial Sequence: Synthetic oligonucleotide
  Sense strand starting at position 355 of SEQ ID NO: 1879660
aagugaaaguagcuaaauu

SEQ ID NO: 1923085 - RNA, 19 nt, Artificial Sequence
  Description of Artificial Sequence: Synthetic oligonucleotide
  Antisense strand to SEQ ID NO: 1923084
aauuuagcuacuuucacuu

SEQ ID NO: 1923086 - RNA, 19 nt, Artificial Sequence
  Description of Artificial Sequence: Synthetic oligonucleotide
  Sense strand starting at position 450 of SEQ ID NO: 1879660
gggugaucagaaggguaau

SEQ ID NO: 1923087 - RNA, 19 nt, Artificial Sequence
  Description of Artificial Sequence: Synthetic oligonucleotide
  Antisense strand to SEQ ID NO: 1923086
auuacccuucugaucaccc

SEQ ID NO: 1923088 - RNA, 19 nt, Artificial Sequence
  Description of Artificial Sequence: Synthetic oligonucleotide
  Sense strand starting at position 451 of SEQ ID NO: 1879660
ggugaucagaaggguaauu

SEQ ID NO: 1923089 - RNA, 19 nt, Artificial Sequence
  Description of Artificial Sequence: Synthetic oligonucleotide
  Antisense strand to SEQ ID NO: 1923088
aauuacccuucugaucacc

SEQ ID NO: 1923090 - RNA, 19 nt, Artificial Sequence
  Description of Artificial Sequence: Synthetic oligonucleotide
  Sense strand starting at position 675 of SEQ ID NO: 1879660
uauauagaauuguuucgga

SEQ ID NO: 1923091 - RNA, 19 nt, Artificial Sequence
  Description of Artificial Sequence: Synthetic oligonucleotide
  Antisense strand to SEQ ID NO: 1923090
uccgaaacaauucuauaua

SEQ ID NO: 1923092 - RNA, 19 nt, Artificial Sequence
  Description of Artificial Sequence: Synthetic oligonucleotide
  Sense strand starting at position 958 of SEQ ID NO: 1879660
aucaguggguuucuagaca

SEQ ID NO: 1923093 - RNA, 19 nt, Artificial Sequence
  Description of Artificial Sequence: Synthetic oligonucleotide
  Antisense strand to SEQ ID NO: 1923092
ugucuagaaacccacugau

SEQ ID NO: 1923094 - RNA, 19 nt, Artificial Sequence
  Description of Artificial Sequence: Synthetic oligonucleotide
  Sense strand starting at position 1319 of SEQ ID NO: 1879660
gcaaguauucuuuacuuug

SEQ ID NO: 1923095 - RNA, 19 nt, Artificial Sequence
  Description of Artificial Sequence: Synthetic oligonucleotide
  Antisense strand to SEQ ID NO: 1923094
caaaguaaagaauacuugc

SEQ ID NO: 1923096 - RNA, 19 nt, Artificial Sequence
  Description of Artificial Sequence: Synthetic oligonucleotide
  Sense strand starting at position 1351 of SEQ ID NO: 1879660
ucaguccugggauguuaaa

SEQ ID NO: 1923097 - RNA, 19 nt, Artificial Sequence
  Description of Artificial Sequence: Synthetic oligonucleotide
  Antisense strand to SEQ ID NO: 1923096
uuuaacaucccaggacuga

SEQ ID NO: 1923098 - RNA, 19 nt, Artificial Sequence
  Description of Artificial Sequence: Synthetic oligonucleotide
  Sense strand starting at position 1453 of SEQ ID NO: 1879660
auucuuaagugucuggaau

SEQ ID NO: 1923099 - RNA, 19 nt, Artificial Sequence
  Description of Artificial Sequence: Synthetic oligonucleotide
  Antisense strand to SEQ ID NO: 1923098
auuccagacacuuaagaau

SEQ ID NO: 1923100 - RNA, 19 nt, Artificial Sequence
  Description of Artificial Sequence: Synthetic oligonucleotide
  Sense strand starting at position 1557 of SEQ ID NO: 1879660
acaguaaaucgcuauauac

SEQ ID NO: 1923101 - RNA, 19 nt, Artificial Sequence
  Description of Artificial Sequence: Synthetic oligonucleotide
  Antisense strand to SEQ ID NO: 1923100
guauauagcgauuuacugu

SEQ ID NO: 1923102 - RNA, 19 nt, Artificial Sequence
  Description of Artificial Sequence: Synthetic oligonucleotide
  Sense strand starting at position 1559 of SEQ ID NO: 1879660
aguaaaucgcuauauacca

SEQ ID NO: 1923103 - RNA, 19 nt, Artificial Sequence
  Description of Artificial Sequence: Synthetic oligonucleotide
  Antisense strand to SEQ ID NO: 1923102
ugguauauagcgauuuacu

SEQ ID NO: 1923104 - RNA, 19 nt, Artificial Sequence
  Description of Artificial Sequence: Synthetic oligonucleotide
  Sense strand starting at position 1841 of SEQ ID NO: 1879660
augucuucuccuuggaaac

SEQ ID NO: 1923105 - RNA, 19 nt, Artificial Sequence
  Description of Artificial Sequence: Synthetic oligonucleotide
  Antisense strand to SEQ ID NO: 1923104
guuuccaaggagaagacau

SEQ ID NO: 1923106 - RNA, 19 nt, Artificial Sequence
  Description of Artificial Sequence: Synthetic oligonucleotide
  Sense strand starting at position 1842 of SEQ ID NO: 1879660
ugucuucuccuuggaaaca

SEQ ID NO: 1923107 - RNA, 19 nt, Artificial Sequence
  Description of Artificial Sequence: Synthetic oligonucleotide
  Antisense strand to SEQ ID NO: 1923106
uguuuccaaggagaagaca

SEQ ID NO: 1923108 - RNA, 19 nt, Artificial Sequence
  Description of Artificial Sequence: Synthetic oligonucleotide
  Sense strand starting at position 1979 of SEQ ID NO: 1879660
gcaggaucuccagaagcuu

SEQ ID NO: 1923109 - RNA, 19 nt, Artificial Sequence
  Description of Artificial Sequence: Synthetic oligonucleotide
  Antisense strand to SEQ ID NO: 1923108
aagcuucuggagauccugc

SEQ ID NO: 1923110 - RNA, 19 nt, Artificial Sequence
  Description of Artificial Sequence: Synthetic oligonucleotide
  Sense strand starting at position 2080 of SEQ ID NO: 1879660
cugaauucugcugcgcuga

SEQ ID NO: 1923111 - RNA, 19 nt, Artificial Sequence
  Description of Artificial Sequence: Synthetic oligonucleotide
  Antisense strand to SEQ ID NO: 1923110
ucagcgcagcagaauucag

SEQ ID NO: 1923112 - RNA, 19 nt, Artificial Sequence
  Description of Artificial Sequence: Synthetic oligonucleotide
  Sense strand starting at position 2106 of SEQ ID NO: 1879660
acacucaagggcugugauu

SEQ ID NO: 1923113 - RNA, 19 nt, Artificial Sequence
  Description of Artificial Sequence: Synthetic oligonucleotide
  Antisense strand to SEQ ID NO: 1923112
aaucacagcccuugagugu

SEQ ID NO: 1923114 - RNA, 19 nt, Artificial Sequence
  Description of Artificial Sequence: Synthetic oligonucleotide
  Sense strand starting at position 2211 of SEQ ID NO: 1879660
aguccauauaugggaugau

SEQ ID NO: 1923115 - RNA, 19 nt, Artificial Sequence
  Description of Artificial Sequence: Synthetic oligonucleotide
  Antisense strand to SEQ ID NO: 1923114
aucaucccauauauggacu

SEQ ID NO: 1923116 - RNA, 19 nt, Artificial Sequence
  Description of Artificial Sequence: Synthetic oligonucleotide
  Sense strand starting at position 2214 of SEQ ID NO: 1879660
ccauauaugggaugauguc

SEQ ID NO: 1923117 - RNA, 19 nt, Artificial Sequence
  Description of Artificial Sequence: Synthetic oligonucleotide
  Antisense strand to SEQ ID NO: 1923116
gacaucaucccauauaugg

SEQ ID NO: 1923118 - RNA, 19 nt, Artificial Sequence
  Description of Artificial Sequence: Synthetic oligonucleotide
  Sense strand starting at position 2429 of SEQ ID NO: 1879660
agagucaagauguacaguu

SEQ ID NO: 1923119 - RNA, 19 nt, Artificial Sequence
  Description of Artificial Sequence: Synthetic oligonucleotide
  Antisense strand to SEQ ID NO: 1923118
aacuguacaucuugacucu

SEQ ID NO: 1923120 - RNA, 19 nt, Artificial Sequence
  Description of Artificial Sequence: Synthetic oligonucleotide
  Sense strand starting at position 2456 of SEQ ID NO: 1879660
gccaacugaaagugaguua

SEQ ID NO: 1923121 - RNA, 19 nt, Artificial Sequence
  Description of Artificial Sequence: Synthetic oligonucleotide
  Antisense strand to SEQ ID NO: 1923120
uaacucacuuucaguuggc

SEQ ID NO: 1923122 - RNA, 19 nt, Artificial Sequence
  Description of Artificial Sequence: Synthetic oligonucleotide
  Sense strand starting at position 2461 of SEQ ID NO: 1879660
cugaaagugaguuagugua

SEQ ID NO: 1923123 - RNA, 19 nt, Artificial Sequence
  Description of Artificial Sequence: Synthetic oligonucleotide
  Antisense strand to SEQ ID NO: 1923122
uacacuaacucacuuucag

SEQ ID NO: 1923124 - RNA, 19 nt, Artificial Sequence
  Description of Artificial Sequence: Synthetic oligonucleotide
  Sense strand starting at position 2463 of SEQ ID NO: 1879660
gaaagugaguuaguguaga

SEQ ID NO: 1923125 - RNA, 19 nt, Artificial Sequence
  Description of Artificial Sequence: Synthetic oligonucleotide
  Antisense strand to SEQ ID NO: 1923124
ucuacacuaacucacuuuc

SEQ ID NO: 1923126 - RNA, 19 nt, Artificial Sequence
  Description of Artificial Sequence: Synthetic oligonucleotide
  Sense strand starting at position 2829 of SEQ ID NO: 1879660
ugcucuagacuugaacagu

SEQ ID NO: 1923127 - RNA, 19 nt, Artificial Sequence
  Description of Artificial Sequence: Synthetic oligonucleotide
  Antisense strand to SEQ ID NO: 1923126
acuguucaagucuagagca

SEQ ID NO: 1923128 - RNA, 19 nt, Artificial Sequence
  Description of Artificial Sequence: Synthetic oligonucleotide
  Sense strand starting at position 2892 of SEQ ID NO: 1879660
gagaaauguucuuugucau

SEQ ID NO: 1923129 - RNA, 19 nt, Artificial Sequence
  Description of Artificial Sequence: Synthetic oligonucleotide
  Antisense strand to SEQ ID NO: 1923128
augacaaagaacauuucuc

SEQ ID NO: 1923130 - RNA, 19 nt, Artificial Sequence
  Description of Artificial Sequence: Synthetic oligonucleotide
  Sense strand starting at position 2893 of SEQ ID NO: 1879660
agaaauguucuuugucaug

SEQ ID NO: 1923131 - RNA, 19 nt, Artificial Sequence
  Description of Artificial Sequence: Synthetic oligonucleotide
  Antisense strand to SEQ ID NO: 1923130
caugacaaagaacauuucu

SEQ ID NO: 1923132 - RNA, 19 nt, Artificial Sequence
  Description of Artificial Sequence: Synthetic oligonucleotide
  Sense strand starting at position 2905 of SEQ ID NO: 1879660
ugucauggccucuacauga

SEQ ID NO: 1923133 - RNA, 19 nt, Artificial Sequence
  Description of Artificial Sequence: Synthetic oligonucleotide
  Antisense strand to SEQ ID NO: 1923132
ucauguagaggccaugaca

SEQ ID NO: 1923134 - RNA, 19 nt, Artificial Sequence
  Description of Artificial Sequence: Synthetic oligonucleotide
  Sense strand starting at position 2910 of SEQ ID NO: 1879660
uggccucuacaugaguaau

SEQ ID NO: 1923135 - RNA, 19 nt, Artificial Sequence
  Description of Artificial Sequence: Synthetic oligonucleotide
  Antisense strand to SEQ ID NO: 1923134
auuacucauguagaggcca

SEQ ID NO: 1923136 - RNA, 19 nt, Artificial Sequence
  Description of Artificial Sequence: Synthetic oligonucleotide
  Sense strand starting at position 2920 of SEQ ID NO: 1879660
augaguaauuaguuccaca

SEQ ID NO: 1923137 - RNA, 19 nt, Artificial Sequence
  Description of Artificial Sequence: Synthetic oligonucleotide
  Antisense strand to SEQ ID NO: 1923136
uguggaacuaauuacucau

SEQ ID NO: 1923138 - RNA, 19 nt, Artificial Sequence
  Description of Artificial Sequence: Synthetic oligonucleotide
  Sense strand starting at position 2991 of SEQ ID NO: 1879660
gcuauaguuugaccuaaag

SEQ ID NO: 1923139 - RNA, 19 nt, Artificial Sequence
  Description of Artificial Sequence: Synthetic oligonucleotide
  Antisense strand to SEQ ID NO: 1923138
cuuuaggucaaacuauagc

SEQ ID NO: 1923140 - RNA, 19 nt, Artificial Sequence
  Description of Artificial Sequence: Synthetic oligonucleotide
  Sense strand starting at position 3029 of SEQ ID NO: 1879660
ugaagcauccacuacgaaa

SEQ ID NO: 1923141 - RNA, 19 nt, Artificial Sequence
  Description of Artificial Sequence: Synthetic oligonucleotide
  Antisense strand to SEQ ID NO: 1923140
uuucguaguggaugcuuca

SEQ ID NO: 1923142 - RNA, 19 nt, Artificial Sequence
  Description of Artificial Sequence: Synthetic oligonucleotide
  Sense strand starting at position 3117 of SEQ ID NO: 1879660
cuuguaauuccugauucug

SEQ ID NO: 1923143 - RNA, 19 nt, Artificial Sequence
  Description of Artificial Sequence: Synthetic oligonucleotide
  Antisense strand to SEQ ID NO: 1923142
cagaaucaggaauuacaag

SEQ ID NO: 1923144 - RNA, 19 nt, Artificial Sequence
  Description of Artificial Sequence: Synthetic oligonucleotide
  Sense strand starting at position 3345 of SEQ ID NO: 1879660
auaggauucugaucaaagc

SEQ ID NO: 1923145 - RNA, 19 nt, Artificial Sequence
  Description of Artificial Sequence: Synthetic oligonucleotide
  Antisense strand to SEQ ID NO: 1923144
gcuuugaucagaauccuau

SEQ ID NO: 1923146 - RNA, 19 nt, Artificial Sequence
  Description of Artificial Sequence: Synthetic oligonucleotide
  Sense strand starting at position 3378 of SEQ ID NO: 1879660
acaagagcuugauuaauug

SEQ ID NO: 1923147 - RNA, 19 nt, Artificial Sequence
  Description of Artificial Sequence: Synthetic oligonucleotide
  Antisense strand to SEQ ID NO: 1923146
caauuaaucaagcucuugu

SEQ ID NO: 1923148 - RNA, 19 nt, Artificial Sequence
  Description of Artificial Sequence: Synthetic oligonucleotide
  Sense strand starting at position 3395 of SEQ ID NO: 1879660
ugcccuucugaagaucaaa

SEQ ID NO: 1923149 - RNA, 19 nt, Artificial Sequence
  Description of Artificial Sequence: Synthetic oligonucleotide
  Antisense strand to SEQ ID NO: 1923148
uuugaucuucagaagggca

SEQ ID NO: 1923150 - RNA, 19 nt, Artificial Sequence
  Description of Artificial Sequence: Synthetic oligonucleotide
  Sense strand starting at position 3741 of SEQ ID NO: 1879660
ggcaucuuaggauggaaca

SEQ ID NO: 1923151 - RNA, 19 nt, Artificial Sequence
  Description of Artificial Sequence: Synthetic oligonucleotide
  Antisense strand to SEQ ID NO: 1923150
uguuccauccuaagaugcc

SEQ ID NO: 1923152 - RNA, 19 nt, Artificial Sequence
  Description of Artificial Sequence: Synthetic oligonucleotide
  Sense strand starting at position 3821 of SEQ ID NO: 1879660
augacuuuauaucucugua

SEQ ID NO: 1923153 - RNA, 19 nt, Artificial Sequence
  Description of Artificial Sequence: Synthetic oligonucleotide
  Antisense strand to SEQ ID NO: 1923152
uacagagauauaaagucau

SEQ ID NO: 1923154 - RNA, 19 nt, Artificial Sequence
  Description of Artificial Sequence: Synthetic oligonucleotide
  Sense strand starting at position 3847 of SEQ ID NO: 1879660
uuccauauuugugucuuua

SEQ ID NO: 1923155 - RNA, 19 nt, Artificial Sequence
  Description of Artificial Sequence: Synthetic oligonucleotide
  Antisense strand to SEQ ID NO: 1923154
uaaagacacaaauauggaa

SEQ ID NO: 1923156 - RNA, 19 nt, Artificial Sequence
  Description of Artificial Sequence: Synthetic oligonucleotide
  Sense strand starting at position 3946 of SEQ ID NO: 1879660
augaucuaagugugacuaa

SEQ ID NO: 1923157 - RNA, 19 nt, Artificial Sequence
  Description of Artificial Sequence: Synthetic oligonucleotide
  Antisense strand to SEQ ID NO: 1923156
uuagucacacuuagaucau

SEQ ID NO: 1923158 - RNA, 19 nt, Artificial Sequence
  Description of Artificial Sequence: Synthetic oligonucleotide
  Sense strand starting at position 3949 of SEQ ID NO: 1879660
aucuaagugugacuaaaua

SEQ ID NO: 1923159 - RNA, 19 nt, Artificial Sequence
  Description of Artificial Sequence: Synthetic oligonucleotide
  Antisense strand to SEQ ID NO: 1923158
uauuuagucacacuuagau

SEQ ID NO: 1923160 - RNA, 19 nt, Artificial Sequence
  Description of Artificial Sequence: Synthetic oligonucleotide
  Sense strand starting at position 3978 of SEQ ID NO: 1879660
cuuguauuauauguggaua

SEQ ID NO: 1923161 - RNA, 19 nt, Artificial Sequence
  Description of Artificial Sequence: Synthetic oligonucleotide
  Antisense strand to SEQ ID NO: 1923160
uauccacauauaauacaag

SEQ ID NO: 1923162 - RNA, 19 nt, Artificial Sequence
  Description of Artificial Sequence: Synthetic oligonucleotide
  Sense strand starting at position 3981 of SEQ ID NO: 1879660
guauuauauguggauacca

SEQ ID NO: 1923163 - RNA, 19 nt, Artificial Sequence
  Description of Artificial Sequence: Synthetic oligonucleotide
  Antisense strand to SEQ ID NO: 1923162
ugguauccacauauaauac

SEQ ID NO: 1923164 - RNA, 19 nt, Artificial Sequence
  Description of Artificial Sequence: Synthetic oligonucleotide
  Sense strand starting at position 59 of SEQ ID NO: 1879661
gaaagagggucuggagaua

SEQ ID NO: 1923165 - RNA, 19 nt, Artificial Sequence
  Description of Artificial Sequence: Synthetic oligonucleotide
  Antisense strand to SEQ ID NO: 1923164
uaucuccagacccucuuuc

SEQ ID NO: 1923166 - RNA, 19 nt, Artificial Sequence
  Description of Artificial Sequence: Synthetic oligonucleotide
  Sense strand starting at position 269 of SEQ ID NO: 1879661
gggagaguguggucugcau

SEQ ID NO: 1923167 - RNA, 19 nt, Artificial Sequence
  Description of Artificial Sequence: Synthetic oligonucleotide
  Antisense strand to SEQ ID NO: 1923166
augcagaccacacucuccc

SEQ ID NO: 1923168 - RNA, 19 nt, Artificial Sequence
  Description of Artificial Sequence: Synthetic oligonucleotide
  Sense strand starting at position 273 of SEQ ID NO: 1879661
gaguguggucugcauccca

SEQ ID NO: 1923169 - RNA, 19 nt, Artificial Sequence
  Description of Artificial Sequence: Synthetic oligonucleotide
  Antisense strand to SEQ ID NO: 1923168
ugggaugcagaccacacuc

SEQ ID NO: 1923170 - RNA, 19 nt, Artificial Sequence
  Description of Artificial Sequence: Synthetic oligonucleotide
  Sense strand starting at position 1123 of SEQ ID NO: 1879661
gaagcucggucggguuaau

SEQ ID NO: 1923171 - RNA, 19 nt, Artificial Sequence
  Description of Artificial Sequence: Synthetic oligonucleotide
  Antisense strand to SEQ ID NO: 1923170
auuaacccgaccgagcuuc

SEQ ID NO: 1923172 - RNA, 19 nt, Artificial Sequence
  Description of Artificial Sequence: Synthetic oligonucleotide
  Sense strand starting at position 1129 of SEQ ID NO: 1879661
cggucggguuaaugaguaa

SEQ ID NO: 1923173 - RNA, 19 nt, Artificial Sequence
  Description of Artificial Sequence: Synthetic oligonucleotide
  Antisense strand to SEQ ID NO: 1923172
uuacucauuaacccgaccg

SEQ ID NO: 1923174 - RNA, 19 nt, Artificial Sequence
  Description of Artificial Sequence: Synthetic oligonucleotide
  Sense strand starting at position 1133 of SEQ ID NO: 1879661
cggguuaaugaguaacagu

SEQ ID NO: 1923175 - RNA, 19 nt, Artificial Sequence
  Description of Artificial Sequence: Synthetic oligonucleotide
  Antisense strand to SEQ ID NO: 1923174
acuguuacucauuaacccg

SEQ ID NO: 1923176 - RNA, 19 nt, Artificial Sequence
  Description of Artificial Sequence: Synthetic oligonucleotide
  Sense strand starting at position 1136 of SEQ ID NO: 1879661
guuaaugaguaacagugaa

SEQ ID NO: 1923177 - RNA, 19 nt, Artificial Sequence
  Description of Artificial Sequence: Synthetic oligonucleotide
  Antisense strand to SEQ ID NO: 1923176
uucacuguuacucauuaac

SEQ ID NO: 1923178 - RNA, 19 nt, Artificial Sequence
  Description of Artificial Sequence: Synthetic oligonucleotide
  Sense strand starting at position 1280 of SEQ ID NO: 1879661
ggacaaaguuccuguucuu

SEQ ID NO: 1923179 - RNA, 19 nt, Artificial Sequence
  Description of Artificial Sequence: Synthetic oligonucleotide
  Antisense strand to SEQ ID NO: 1923178
aagaacaggaacuuugucc

SEQ ID NO: 1923180 - RNA, 19 nt, Artificial Sequence
  Description of Artificial Sequence: Synthetic oligonucleotide
  Sense strand starting at position 1616 of SEQ ID NO: 1879661
ggguccucaaggugucaga

SEQ ID NO: 1923181 - RNA, 19 nt, Artificial Sequence
  Description of Artificial Sequence: Synthetic oligonucleotide
  Antisense strand to SEQ ID NO: 1923180
ucugacaccuugaggaccc

SEQ ID NO: 1923182 - RNA, 19 nt, Artificial Sequence
  Description of Artificial Sequence: Synthetic oligonucleotide
  Sense strand starting at position 2253 of SEQ ID NO: 1879661
ggaagauggcuguggccaa

SEQ ID NO: 1923183 - RNA, 19 nt, Artificial Sequence
  Description of Artificial Sequence: Synthetic oligonucleotide
  Antisense strand to SEQ ID NO: 1923182
uuggccacagccaucuucc

SEQ ID NO: 1923184 - RNA, 19 nt, Artificial Sequence
  Description of Artificial Sequence: Synthetic oligonucleotide
  Sense strand starting at position 3220 of SEQ ID NO: 1879661
cgaggcucucgagacagaa

SEQ ID NO: 1923185 - RNA, 19 nt, Artificial Sequence
  Description of Artificial Sequence: Synthetic oligonucleotide
  Antisense strand to SEQ ID NO: 1923184
uucugucucgagagccucg

SEQ ID NO: 1923186 - RNA, 19 nt, Artificial Sequence
  Description of Artificial Sequence: Synthetic oligonucleotide
  Sense strand starting at position 364 of SEQ ID NO: 1879662
gaagcucggucggguuaau

SEQ ID NO: 1923187 - RNA, 19 nt, Artificial Sequence
  Description of Artificial Sequence: Synthetic oligonucleotide
  Antisense strand to SEQ ID NO: 1923186
auuaacccgaccgagcuuc

SEQ ID NO: 1923188 - RNA, 19 nt, Artificial Sequence
  Description of Artificial Sequence: Synthetic oligonucleotide
  Sense strand starting at position 370 of SEQ ID NO: 1879662
cggucggguuaaugaguaa

SEQ ID NO: 1923189 - RNA, 19 nt, Artificial Sequence
  Description of Artificial Sequence: Synthetic oligonucleotide
  Antisense strand to SEQ ID NO: 1923188
uuacucauuaacccgaccg

SEQ ID NO: 1923190 - RNA, 19 nt, Artificial Sequence
  Description of Artificial Sequence: Synthetic oligonucleotide
  Sense strand starting at position 374 of SEQ ID NO: 1879662
cggguuaaugaguaacagu

SEQ ID NO: 1923191 - RNA, 19 nt, Artificial Sequence
  Description of Artificial Sequence: Synthetic oligonucleotide
  Antisense strand to SEQ ID NO: 1923190
acuguuacucauuaacccg

SEQ ID NO: 1923192 - RNA, 19 nt, Artificial Sequence
  Description of Artificial Sequence: Synthetic oligonucleotide
  Sense strand starting at position 377 of SEQ ID NO: 1879662
guuaaugaguaacagugaa

SEQ ID NO: 1923193 - RNA, 19 nt, Artificial Sequence
  Description of Artificial Sequence: Synthetic oligonucleotide
  Antisense strand to SEQ ID NO: 1923192
uucacuguuacucauuaac

SEQ ID NO: 1923194 - RNA, 19 nt, Artificial Sequence
  Description of Artificial Sequence: Synthetic oligonucleotide
  Sense strand starting at position 521 of SEQ ID NO: 1879662
ggacaaaguuccuguucuu

SEQ ID NO: 1923195 - RNA, 19 nt, Artificial Sequence
  Description of Artificial Sequence: Synthetic oligonucleotide
  Antisense strand to SEQ ID NO: 1923194
aagaacaggaacuuugucc

SEQ ID NO: 1923196 - RNA, 19 nt, Artificial Sequence
  Description of Artificial Sequence: Synthetic oligonucleotide
  Sense strand starting at position 857 of SEQ ID NO: 1879662
ggguccucaaggugucaga

SEQ ID NO: 1923197 - RNA, 19 nt, Artificial Sequence
  Description of Artificial Sequence: Synthetic oligonucleotide
  Antisense strand to SEQ ID NO: 1923196
ucugacaccuugaggaccc

SEQ ID NO: 1923198 - RNA, 19 nt, Artificial Sequence
  Description of Artificial Sequence: Synthetic oligonucleotide
  Sense strand starting at position 1494 of SEQ ID NO: 1879662
ggaagauggcuguggccaa

SEQ ID NO: 1923199 - RNA, 19 nt, Artificial Sequence
  Description of Artificial Sequence: Synthetic oligonucleotide
  Antisense strand to SEQ ID NO: 1923198
uuggccacagccaucuucc

SEQ ID NO: 1923200 - RNA, 19 nt, Artificial Sequence
  Description of Artificial Sequence: Synthetic oligonucleotide
  Sense strand starting at position 2461 of SEQ ID NO: 1879662
cgaggcucucgagacagaa

SEQ ID NO: 1923201 - RNA, 19 nt, Artificial Sequence
  Description of Artificial Sequence: Synthetic oligonucleotide
  Antisense strand to SEQ ID NO: 1923200
uucugucucgagagccucg

SEQ ID NO: 1923202 - RNA, 19 nt, Artificial Sequence
  Description of Artificial Sequence: Synthetic oligonucleotide
  Sense strand starting at position 3550 of SEQ ID NO: 1879662
gggccagccuucucaggaa

SEQ ID NO: 1923203 - RNA, 19 nt, Artificial Sequence
  Description of Artificial Sequence: Synthetic oligonucleotide
  Antisense strand to SEQ ID NO: 1923202
uuccugagaaggcuggccc

SEQ ID NO: 1923204 - RNA, 19 nt, Artificial Sequence
  Description of Artificial Sequence: Synthetic oligonucleotide
  Sense strand starting at position 3603 of SEQ ID NO: 1879662
gcucaucagucauugcguu

SEQ ID NO: 1923205 - RNA, 19 nt, Artificial Sequence
  Description of Artificial Sequence: Synthetic oligonucleotide
  Antisense strand to SEQ ID NO: 1923204
aacgcaaugacugaugagc

SEQ ID NO: 1923206 - RNA, 19 nt, Artificial Sequence
  Description of Artificial Sequence: Synthetic oligonucleotide
  Sense strand starting at position 3607 of SEQ ID NO: 1879662
aucagucauugcguucuca

SEQ ID NO: 1923207 - RNA, 19 nt, Artificial Sequence
  Description of Artificial Sequence: Synthetic oligonucleotide
  Antisense strand to SEQ ID NO: 1923206
ugagaacgcaaugacugau

SEQ ID NO: 1923208 - RNA, 19 nt, Artificial Sequence
  Description of Artificial Sequence: Synthetic oligonucleotide
  Sense strand starting at position 3918 of SEQ ID NO: 1879662
gagucuuaccguggccaca

SEQ ID NO: 1923209 - RNA, 19 nt, Artificial Sequence
  Description of Artificial Sequence: Synthetic oligonucleotide
  Antisense strand to SEQ ID NO: 1923208
uguggccacgguaagacuc

SEQ ID NO: 1923210 - RNA, 19 nt, Artificial Sequence
  Description of Artificial Sequence: Synthetic oligonucleotide
  Sense strand starting at position 150 of SEQ ID NO: 1879663
ggucauagggcucaaacca

SEQ ID NO: 1923211 - RNA, 19 nt, Artificial Sequence
  Description of Artificial Sequence: Synthetic oligonucleotide
  Antisense strand to SEQ ID NO: 1923210
ugguuugagcccuaugacc

SEQ ID NO: 1923212 - RNA, 19 nt, Artificial Sequence
  Description of Artificial Sequence: Synthetic oligonucleotide
  Sense strand starting at position 239 of SEQ ID NO: 1879663
ccuugaaugggagguguuu

SEQ ID NO: 1923213 - RNA, 19 nt, Artificial Sequence
  Description of Artificial Sequence: Synthetic oligonucleotide
  Antisense strand to SEQ ID NO: 1923212
aaacaccucccauucaagg

SEQ ID NO: 1923214 - RNA, 19 nt, Artificial Sequence
  Description of Artificial Sequence: Synthetic oligonucleotide
  Sense strand starting at position 300 of SEQ ID NO: 1879663
uuggauuugcuacgcaauu

SEQ ID NO: 1923215 - RNA, 19 nt, Artificial Sequence
  Description of Artificial Sequence: Synthetic oligonucleotide
  Antisense strand to SEQ ID NO: 1923214
aauugcguagcaaauccaa

SEQ ID NO: 1923216 - RNA, 19 nt, Artificial Sequence
  Description of Artificial Sequence: Synthetic oligonucleotide
  Sense strand starting at position 462 of SEQ ID NO: 1879663
gagaaagguuuauuccuuu

SEQ ID NO: 1923217 - RNA, 19 nt, Artificial Sequence
  Description of Artificial Sequence: Synthetic oligonucleotide
  Antisense strand to SEQ ID NO: 1923216
aaaggaauaaaccuuucuc

SEQ ID NO: 1923218 - RNA, 19 nt, Artificial Sequence
  Description of Artificial Sequence: Synthetic oligonucleotide
  Sense strand starting at position 597 of SEQ ID NO: 1879663
ucaagugaucgguauccau

SEQ ID NO: 1923219 - RNA, 19 nt, Artificial Sequence
  Description of Artificial Sequence: Synthetic oligonucleotide
  Antisense strand to SEQ ID NO: 1923218
auggauaccgaucacuuga

SEQ ID NO: 1923220 - RNA, 19 nt, Artificial Sequence
  Description of Artificial Sequence: Synthetic oligonucleotide
  Sense strand starting at position 623 of SEQ ID NO: 1879663
gcuggaaucuccuuuagag

SEQ ID NO: 1923221 - RNA, 19 nt, Artificial Sequence
  Description of Artificial Sequence: Synthetic oligonucleotide
  Antisense strand to SEQ ID NO: 1923220
cucuaaaggagauuccagc

SEQ ID NO: 1923222 - RNA, 19 nt, Artificial Sequence
  Description of Artificial Sequence: Synthetic oligonucleotide
  Sense strand starting at position 633 of SEQ ID NO: 1879663
ccuuuagagugagcuccua

SEQ ID NO: 1923223 - RNA, 19 nt, Artificial Sequence
  Description of Artificial Sequence: Synthetic oligonucleotide
  Antisense strand to SEQ ID NO: 1923222
uaggagcucacucuaaagg

SEQ ID NO: 1923224 - RNA, 19 nt, Artificial Sequence
  Description of Artificial Sequence: Synthetic oligonucleotide
  Sense strand starting at position 701 of SEQ ID NO: 1879663
gcacauucuggaggugaaa

SEQ ID NO: 1923225 - RNA, 19 nt, Artificial Sequence
  Description of Artificial Sequence: Synthetic oligonucleotide
  Antisense strand to SEQ ID NO: 1923224
uuucaccuccagaaugugc

SEQ ID NO: 1923226 - RNA, 19 nt, Artificial Sequence
  Description of Artificial Sequence: Synthetic oligonucleotide
  Sense strand starting at position 884 of SEQ ID NO: 1879663
uuaggaacuuucucuuguu

SEQ ID NO: 1923227 - RNA, 19 nt, Artificial Sequence
  Description of Artificial Sequence: Synthetic oligonucleotide
  Antisense strand to SEQ ID NO: 1923226
aacaagagaaaguuccuaa

SEQ ID NO: 1923228 - RNA, 19 nt, Artificial Sequence
  Description of Artificial Sequence: Synthetic oligonucleotide
  Sense strand starting at position 1029 of SEQ ID NO: 1879663
ucuaucaaagcguaucaua

SEQ ID NO: 1923229 - RNA, 19 nt, Artificial Sequence
  Description of Artificial Sequence: Synthetic oligonucleotide
  Antisense strand to SEQ ID NO: 1923228
uaugauacgcuuugauaga

SEQ ID NO: 1923230 - RNA, 19 nt, Artificial Sequence
  Description of Artificial Sequence: Synthetic oligonucleotide
  Sense strand starting at position 1055 of SEQ ID NO: 1879663
acagcugagagguauuauu

SEQ ID NO: 1923231 - RNA, 19 nt, Artificial Sequence
  Description of Artificial Sequence: Synthetic oligonucleotide
  Antisense strand to SEQ ID NO: 1923230
aauaauaccucucagcugu

SEQ ID NO: 1923232 - RNA, 19 nt, Artificial Sequence
  Description of Artificial Sequence: Synthetic oligonucleotide
  Sense strand starting at position 1148 of SEQ ID NO: 1879663
ggcaauuacaauuggugaa

SEQ ID NO: 1923233 - RNA, 19 nt, Artificial Sequence
  Description of Artificial Sequence: Synthetic oligonucleotide
  Antisense strand to SEQ ID NO: 1923232
uucaccaauuguaauugcc

SEQ ID NO: 1923234 - RNA, 19 nt, Artificial Sequence
  Description of Artificial Sequence: Synthetic oligonucleotide
  Sense strand starting at position 1158 of SEQ ID NO: 1879663
auuggugaaugauuaaugu

SEQ ID NO: 1923235 - RNA, 19 nt, Artificial Sequence
  Description of Artificial Sequence: Synthetic oligonucleotide
  Antisense strand to SEQ ID NO: 1923234
acauuaaucauucaccaau

SEQ ID NO: 1923236 - RNA, 19 nt, Artificial Sequence
  Description of Artificial Sequence: Synthetic oligonucleotide
  Sense strand starting at position 1172 of SEQ ID NO: 1879663
aauguuggaucugacauuu

SEQ ID NO: 1923237 - RNA, 19 nt, Artificial Sequence
  Description of Artificial Sequence: Synthetic oligonucleotide
  Antisense strand to SEQ ID NO: 1923236
aaaugucagauccaacauu

SEQ ID NO: 1923238 - RNA, 19 nt, Artificial Sequence
  Description of Artificial Sequence: Synthetic oligonucleotide
  Sense strand starting at position 1196 of SEQ ID NO: 1879663
ugucaaauauguuuaacug

SEQ ID NO: 1923239 - RNA, 19 nt, Artificial Sequence
  Description of Artificial Sequence: Synthetic oligonucleotide
  Antisense strand to SEQ ID NO: 1923238
caguuaaacauauuugaca

SEQ ID NO: 1923240 - RNA, 19 nt, Artificial Sequence
  Description of Artificial Sequence: Synthetic oligonucleotide
  Sense strand starting at position 1213 of SEQ ID NO: 1879663
ugcauuaaccuuugcagaa

SEQ ID NO: 1923241 - RNA, 19 nt, Artificial Sequence
  Description of Artificial Sequence: Synthetic oligonucleotide
  Antisense strand to SEQ ID NO: 1923240
uucugcaaagguuaaugca

SEQ ID NO: 1923242 - RNA, 19 nt, Artificial Sequence
  Description of Artificial Sequence: Synthetic oligonucleotide
  Sense strand starting at position 1257 of SEQ ID NO: 1879663
cuuguauagcaucggaaau

SEQ ID NO: 1923243 - RNA, 19 nt, Artificial Sequence
  Description of Artificial Sequence: Synthetic oligonucleotide
  Antisense strand to SEQ ID NO: 1923242
auuuccgaugcuauacaag

SEQ ID NO: 1923244 - RNA, 19 nt, Artificial Sequence
  Description of Artificial Sequence: Synthetic oligonucleotide
  Sense strand starting at position 1258 of SEQ ID NO: 1879663
uuguauagcaucggaaaua

SEQ ID NO: 1923245 - RNA, 19 nt, Artificial Sequence
  Description of Artificial Sequence: Synthetic oligonucleotide
  Antisense strand to SEQ ID NO: 1923244
uauuuccgaugcuauacaa

SEQ ID NO: 1923246 - RNA, 19 nt, Artificial Sequence
  Description of Artificial Sequence: Synthetic oligonucleotide
  Sense strand starting at position 1268 of SEQ ID NO: 1879663
ucggaaauaucugcaaucu

SEQ ID NO: 1923247 - RNA, 19 nt, Artificial Sequence
  Description of Artificial Sequence: Synthetic oligonucleotide
  Antisense strand to SEQ ID NO: 1923246
agauugcagauauuuccga

SEQ ID NO: 1923248 - RNA, 19 nt, Artificial Sequence
  Description of Artificial Sequence: Synthetic oligonucleotide
  Sense strand starting at position 1269 of SEQ ID NO: 1879663
cggaaauaucugcaaucug

SEQ ID NO: 1923249 - RNA, 19 nt, Artificial Sequence
  Description of Artificial Sequence: Synthetic oligonucleotide
  Antisense strand to SEQ ID NO: 1923248
cagauugcagauauuuccg

SEQ ID NO: 1923250 - RNA, 19 nt, Artificial Sequence
  Description of Artificial Sequence: Synthetic oligonucleotide
  Sense strand starting at position 1470 of SEQ ID NO: 1879663
agaggaagccagugucaau

SEQ ID NO: 1923251 - RNA, 19 nt, Artificial Sequence
  Description of Artificial Sequence: Synthetic oligonucleotide
  Antisense strand to SEQ ID NO: 1923250
auugacacuggcuuccucu

SEQ ID NO: 1923252 - RNA, 19 nt, Artificial Sequence
  Description of Artificial Sequence: Synthetic oligonucleotide
  Sense strand starting at position 2044 of SEQ ID NO: 1879663
acugcauuaccuggccaaa

SEQ ID NO: 1923253 - RNA, 19 nt, Artificial Sequence
  Description of Artificial Sequence: Synthetic oligonucleotide
  Antisense strand to SEQ ID NO: 1923252
uuuggccagguaaugcagu

SEQ ID NO: 1923254 - RNA, 19 nt, Artificial Sequence
  Description of Artificial Sequence: Synthetic oligonucleotide
  Sense strand starting at position 2274 of SEQ ID NO: 1879663
cagauaaguccauguggaa

SEQ ID NO: 1923255 - RNA, 19 nt, Artificial Sequence
  Description of Artificial Sequence: Synthetic oligonucleotide
  Antisense strand to SEQ ID NO: 1923254
uuccacauggacuuaucug

SEQ ID NO: 1923256 - RNA, 19 nt, Artificial Sequence
  Description of Artificial Sequence: Synthetic oligonucleotide
  Sense strand starting at position 2415 of SEQ ID NO: 1879663
gguguucugcaauugcuuu

SEQ ID NO: 1923257 - RNA, 19 nt, Artificial Sequence
  Description of Artificial Sequence: Synthetic oligonucleotide
  Antisense strand to SEQ ID NO: 1923256
aaagcaauugcagaacacc

SEQ ID NO: 1923258 - RNA, 19 nt, Artificial Sequence
  Description of Artificial Sequence: Synthetic oligonucleotide
  Sense strand starting at position 2489 of SEQ ID NO: 1879663
gggcauuccucuccacaag

SEQ ID NO: 1923259 - RNA, 19 nt, Artificial Sequence
  Description of Artificial Sequence: Synthetic oligonucleotide
  Antisense strand to SEQ ID NO: 1923258
cuuguggagaggaaugccc

SEQ ID NO: 1923260 - RNA, 19 nt, Artificial Sequence
  Description of Artificial Sequence: Synthetic oligonucleotide
  Sense strand starting at position 2746 of SEQ ID NO: 1879663
acuauuucuuuguugguca

SEQ ID NO: 1923261 - RNA, 19 nt, Artificial Sequence
  Description of Artificial Sequence: Synthetic oligonucleotide
  Antisense strand to SEQ ID NO: 1923260
ugaccaacaaagaaauagu

SEQ ID NO: 1923262 - RNA, 19 nt, Artificial Sequence
  Description of Artificial Sequence: Synthetic oligonucleotide
  Sense strand starting at position 2836 of SEQ ID NO: 1879663
acgcaaaguaucuaagagu

SEQ ID NO: 1923263 - RNA, 19 nt, Artificial Sequence
  Description of Artificial Sequence: Synthetic oligonucleotide
  Antisense strand to SEQ ID NO: 1923262
acucuuagauacuuugcgu

SEQ ID NO: 1923264 - RNA, 19 nt, Artificial Sequence
  Description of Artificial Sequence: Synthetic oligonucleotide
  Sense strand starting at position 3116 of SEQ ID NO: 1879663
ggcauugggucucucugaa

SEQ ID NO: 1923265 - RNA, 19 nt, Artificial Sequence
  Description of Artificial Sequence: Synthetic oligonucleotide
  Antisense strand to SEQ ID NO: 1923264
uucagagagacccaaugcc

SEQ ID NO: 1923266 - RNA, 19 nt, Artificial Sequence
  Description of Artificial Sequence: Synthetic oligonucleotide
  Sense strand starting at position 3212 of SEQ ID NO: 1879663
gacucuuugccagggugaa

SEQ ID NO: 1923267 - RNA, 19 nt, Artificial Sequence
  Description of Artificial Sequence: Synthetic oligonucleotide
  Antisense strand to SEQ ID NO: 1923266
uucacccuggcaaagaguc

SEQ ID NO: 1923268 - RNA, 19 nt, Artificial Sequence
  Description of Artificial Sequence: Synthetic oligonucleotide
  Sense strand starting at position 3213 of SEQ ID NO: 1879663
acucuuugccagggugaac

SEQ ID NO: 1923269 - RNA, 19 nt, Artificial Sequence
  Description of Artificial Sequence: Synthetic oligonucleotide
  Antisense strand to SEQ ID NO: 1923268
guucacccuggcaaagagu

SEQ ID NO: 1923270 - RNA, 19 nt, Artificial Sequence
  Description of Artificial Sequence: Synthetic oligonucleotide
  Sense strand starting at position 3238 of SEQ ID NO: 1879663
cuuguuggcaggcagagau

SEQ ID NO: 1923271 - RNA, 19 nt, Artificial Sequence
  Description of Artificial Sequence: Synthetic oligonucleotide
  Antisense strand to SEQ ID NO: 1923270
aucucugccugccaacaag

SEQ ID NO: 1923272 - RNA, 19 nt, Artificial Sequence
  Description of Artificial Sequence: Synthetic oligonucleotide
  Sense strand starting at position 3248 of SEQ ID NO: 1879663
ggcagagaucuggguagug

SEQ ID NO: 1923273 - RNA, 19 nt, Artificial Sequence
  Description of Artificial Sequence: Synthetic oligonucleotide
  Antisense strand to SEQ ID NO: 1923272
cacuacccagaucucugcc

SEQ ID NO: 1923274 - RNA, 19 nt, Artificial Sequence
  Description of Artificial Sequence: Synthetic oligonucleotide
  Sense strand starting at position 3325 of SEQ ID NO: 1879663
ucucaauaaugagaggaaa

SEQ ID NO: 1923275 - RNA, 19 nt, Artificial Sequence
  Description of Artificial Sequence: Synthetic oligonucleotide
  Antisense strand to SEQ ID NO: 1923274
uuuccucucauuauugaga

SEQ ID NO: 1923276 - RNA, 19 nt, Artificial Sequence
  Description of Artificial Sequence: Synthetic oligonucleotide
  Sense strand starting at position 3353 of SEQ ID NO: 1879663
gcuugugaauuaucuggac

SEQ ID NO: 1923277 - RNA, 19 nt, Artificial Sequence
  Description of Artificial Sequence: Synthetic oligonucleotide
  Antisense strand to SEQ ID NO: 1923276
guccagauaauucacaagc

SEQ ID NO: 1923278 - RNA, 19 nt, Artificial Sequence
  Description of Artificial Sequence: Synthetic oligonucleotide
  Sense strand starting at position 3431 of SEQ ID NO: 1879663
gucuguuggcuguaauaaa

SEQ ID NO: 1923279 - RNA, 19 nt, Artificial Sequence
  Description of Artificial Sequence: Synthetic oligonucleotide
  Antisense strand to SEQ ID NO: 1923278
uuuauuacagccaacagac

SEQ ID NO: 1923280 - RNA, 19 nt, Artificial Sequence
  Description of Artificial Sequence: Synthetic oligonucleotide
  Sense strand starting at position 3602 of SEQ ID NO: 1879663
uguacaguccacuagauua

SEQ ID NO: 1923281 - RNA, 19 nt, Artificial Sequence
  Description of Artificial Sequence: Synthetic oligonucleotide
  Antisense strand to SEQ ID NO: 1923280
uaaucuaguggacuguaca

SEQ ID NO: 1923282 - RNA, 19 nt, Artificial Sequence
  Description of Artificial Sequence: Synthetic oligonucleotide
  Sense strand starting at position 3698 of SEQ ID NO: 1879663
agaugacagugucugcaaa

SEQ ID NO: 1923283 - RNA, 19 nt, Artificial Sequence
  Description of Artificial Sequence: Synthetic oligonucleotide
  Antisense strand to SEQ ID NO: 1923282
uuugcagacacugucaucu

SEQ ID NO: 1923284 - RNA, 19 nt, Artificial Sequence
  Description of Artificial Sequence: Synthetic oligonucleotide
  Sense strand starting at position 3752 of SEQ ID NO: 1879663
ccagaaaggugaguucuuu

SEQ ID NO: 1923285 - RNA, 19 nt, Artificial Sequence
  Description of Artificial Sequence: Synthetic oligonucleotide
  Antisense strand to SEQ ID NO: 1923284
aaagaacucaccuuucugg

SEQ ID NO: 1923286 - RNA, 19 nt, Artificial Sequence
  Description of Artificial Sequence: Synthetic oligonucleotide
  Sense strand starting at position 3756 of SEQ ID NO: 1879663
aaaggugaguucuuuccuu

SEQ ID NO: 1923287 - RNA, 19 nt, Artificial Sequence
  Description of Artificial Sequence: Synthetic oligonucleotide
  Antisense strand to SEQ ID NO: 1923286
aaggaaagaacucaccuuu

SEQ ID NO: 1923288 - RNA, 19 nt, Artificial Sequence
  Description of Artificial Sequence: Synthetic oligonucleotide
  Sense strand starting at position 3761 of SEQ ID NO: 1879663
ugaguucuuuccuuaucac

SEQ ID NO: 1923289 - RNA, 19 nt, Artificial Sequence
  Description of Artificial Sequence: Synthetic oligonucleotide
  Antisense strand to SEQ ID NO: 1923288
gugauaaggaaagaacuca

SEQ ID NO: 1923290 - RNA, 19 nt, Artificial Sequence
  Description of Artificial Sequence: Synthetic oligonucleotide
  Sense strand starting at position 85 of SEQ ID NO: 1879664
ccuggagugccucaccuua

SEQ ID NO: 1923291 - RNA, 19 nt, Artificial Sequence
  Description of Artificial Sequence: Synthetic oligonucleotide
  Antisense strand to SEQ ID NO: 1923290
uaaggugaggcacuccagg

SEQ ID NO: 1923292 - RNA, 19 nt, Artificial Sequence
  Description of Artificial Sequence: Synthetic oligonucleotide
  Sense strand starting at position 131 of SEQ ID NO: 1879664
cccuuuggagucugaagga

SEQ ID NO: 1923293 - RNA, 19 nt, Artificial Sequence
  Description of Artificial Sequence: Synthetic oligonucleotide
  Antisense strand to SEQ ID NO: 1923292
uccuucagacuccaaaggg

SEQ ID NO: 1923294 - RNA, 19 nt, Artificial Sequence
  Description of Artificial Sequence: Synthetic oligonucleotide
  Sense strand starting at position 165 of SEQ ID NO: 1879664
uaauguucuggcuagguca

SEQ ID NO: 1923295 - RNA, 19 nt, Artificial Sequence
  Description of Artificial Sequence: Synthetic oligonucleotide
  Antisense strand to SEQ ID NO: 1923294
ugaccuagccagaacauua

SEQ ID NO: 1923296 - RNA, 19 nt, Artificial Sequence
  Description of Artificial Sequence: Synthetic oligonucleotide
  Sense strand starting at position 309 of SEQ ID NO: 1879664
gaacgaugucgauauucug

SEQ ID NO: 1923297 - RNA, 19 nt, Artificial Sequence
  Description of Artificial Sequence: Synthetic oligonucleotide
  Antisense strand to SEQ ID NO: 1923296
cagaauaucgacaucguuc

SEQ ID NO: 1923298 - RNA, 19 nt, Artificial Sequence
  Description of Artificial Sequence: Synthetic oligonucleotide
  Sense strand starting at position 371 of SEQ ID NO: 1879664
guaaguauuguuuaggacu

SEQ ID NO: 1923299 - RNA, 19 nt, Artificial Sequence
  Description of Artificial Sequence: Synthetic oligonucleotide
  Antisense strand to SEQ ID NO: 1923298
aguccuaaacaauacuuac

SEQ ID NO: 1923300 - RNA, 19 nt, Artificial Sequence
  Description of Artificial Sequence: Synthetic oligonucleotide
  Sense strand starting at position 486 of SEQ ID NO: 1879664
gccauaagacaagauuguu

SEQ ID NO: 1923301 - RNA, 19 nt, Artificial Sequence
  Description of Artificial Sequence: Synthetic oligonucleotide
  Antisense strand to SEQ ID NO: 1923300
aacaaucuugucuuauggc

SEQ ID NO: 1923302 - RNA, 19 nt, Artificial Sequence
  Description of Artificial Sequence: Synthetic oligonucleotide
  Sense strand starting at position 529 of SEQ ID NO: 1879664
ucauauuugugcuuuguag

SEQ ID NO: 1923303 - RNA, 19 nt, Artificial Sequence
  Description of Artificial Sequence: Synthetic oligonucleotide
  Antisense strand to SEQ ID NO: 1923302
cuacaaagcacaaauauga

SEQ ID NO: 1923304 - RNA, 19 nt, Artificial Sequence
  Description of Artificial Sequence: Synthetic oligonucleotide
  Sense strand starting at position 531 of SEQ ID NO: 1879664
auauuugugcuuuguaguu

SEQ ID NO: 1923305 - RNA, 19 nt, Artificial Sequence
  Description of Artificial Sequence: Synthetic oligonucleotide
  Antisense strand to SEQ ID NO: 1923304
aacuacaaagcacaaauau

SEQ ID NO: 1923306 - RNA, 19 nt, Artificial Sequence
  Description of Artificial Sequence: Synthetic oligonucleotide
  Sense strand starting at position 634 of SEQ ID NO: 1879664
cugggaucuuagcuuuaag

SEQ ID NO: 1923307 - RNA, 19 nt, Artificial Sequence
  Description of Artificial Sequence: Synthetic oligonucleotide
  Antisense strand to SEQ ID NO: 1923306
cuuaaagcuaagaucccag

SEQ ID NO: 1923308 - RNA, 19 nt, Artificial Sequence
  Description of Artificial Sequence: Synthetic oligonucleotide
  Sense strand starting at position 637 of SEQ ID NO: 1879664
ggaucuuagcuuuaagacu

SEQ ID NO: 1923309 - RNA, 19 nt, Artificial Sequence
  Description of Artificial Sequence: Synthetic oligonucleotide
  Antisense strand to SEQ ID NO: 1923308
agucuuaaagcuaagaucc

SEQ ID NO: 1923310 - RNA, 19 nt, Artificial Sequence
  Description of Artificial Sequence: Synthetic oligonucleotide
  Sense strand starting at position 789 of SEQ ID NO: 1879664
accagaaucuaagaaagau

SEQ ID NO: 1923311 - RNA, 19 nt, Artificial Sequence
  Description of Artificial Sequence: Synthetic oligonucleotide
  Antisense strand to SEQ ID NO: 1923310
aucuuucuuagauucuggu

SEQ ID NO: 1923312 - RNA, 19 nt, Artificial Sequence
  Description of Artificial Sequence: Synthetic oligonucleotide
  Sense strand starting at position 968 of SEQ ID NO: 1879664
uaaacugaaguuuggauau

SEQ ID NO: 1923313 - RNA, 19 nt, Artificial Sequence
  Description of Artificial Sequence: Synthetic oligonucleotide
  Antisense strand to SEQ ID NO: 1923312
auauccaaacuucaguuua

SEQ ID NO: 1923314 - RNA, 19 nt, Artificial Sequence
  Description of Artificial Sequence: Synthetic oligonucleotide
  Sense strand starting at position 970 of SEQ ID NO: 1879664
aacugaaguuuggauauuu

SEQ ID NO: 1923315 - RNA, 19 nt, Artificial Sequence
  Description of Artificial Sequence: Synthetic oligonucleotide
  Antisense strand to SEQ ID NO: 1923314
aaauauccaaacuucaguu

SEQ ID NO: 1923316 - RNA, 19 nt, Artificial Sequence
  Description of Artificial Sequence: Synthetic oligonucleotide
  Sense strand starting at position 1145 of SEQ ID NO: 1879664
cuccuagaacuguagcaua

SEQ ID NO: 1923317 - RNA, 19 nt, Artificial Sequence
  Description of Artificial Sequence: Synthetic oligonucleotide
  Antisense strand to SEQ ID NO: 1923316
uaugcuacaguucuaggag

SEQ ID NO: 1923318 - RNA, 19 nt, Artificial Sequence
  Description of Artificial Sequence: Synthetic oligonucleotide
  Sense strand starting at position 1283 of SEQ ID NO: 1879664
guugaacacuaguuggaaa

SEQ ID NO: 1923319 - RNA, 19 nt, Artificial Sequence
  Description of Artificial Sequence: Synthetic oligonucleotide
  Antisense strand to SEQ ID NO: 1923318
uuuccaacuaguguucaac

SEQ ID NO: 1923320 - RNA, 19 nt, Artificial Sequence
  Description of Artificial Sequence: Synthetic oligonucleotide
  Sense strand starting at position 1290 of SEQ ID NO: 1879664
acuaguuggaaauaguagu

SEQ ID NO: 1923321 - RNA, 19 nt, Artificial Sequence
  Description of Artificial Sequence: Synthetic oligonucleotide
  Antisense strand to SEQ ID NO: 1923320
acuacuauuuccaacuagu

SEQ ID NO: 1923322 - RNA, 19 nt, Artificial Sequence
  Description of Artificial Sequence: Synthetic oligonucleotide
  Sense strand starting at position 1351 of SEQ ID NO: 1879664
cccagacuggcagaguuaa

SEQ ID NO: 1923323 - RNA, 19 nt, Artificial Sequence
  Description of Artificial Sequence: Synthetic oligonucleotide
  Antisense strand to SEQ ID NO: 1923322
uuaacucugccagucuggg

SEQ ID NO: 1923324 - RNA, 19 nt, Artificial Sequence
  Description of Artificial Sequence: Synthetic oligonucleotide
  Sense strand starting at position 1375 of SEQ ID NO: 1879664
agcacuugauccuuuggaa

SEQ ID NO: 1923325 - RNA, 19 nt, Artificial Sequence
  Description of Artificial Sequence: Synthetic oligonucleotide
  Antisense strand to SEQ ID NO: 1923324
uuccaaaggaucaagugcu

SEQ ID NO: 1923326 - RNA, 19 nt, Artificial Sequence
  Description of Artificial Sequence: Synthetic oligonucleotide
  Sense strand starting at position 1532 of SEQ ID NO: 1879664
uaagcaucagacugaaguu

SEQ ID NO: 1923327 - RNA, 19 nt, Artificial Sequence
  Description of Artificial Sequence: Synthetic oligonucleotide
  Antisense strand to SEQ ID NO: 1923326
aacuucagucugaugcuua

SEQ ID NO: 1923328 - RNA, 19 nt, Artificial Sequence
  Description of Artificial Sequence: Synthetic oligonucleotide
  Sense strand starting at position 1599 of SEQ ID NO: 1879664
agcuguguacaauaaaggu

SEQ ID NO: 1923329 - RNA, 19 nt, Artificial Sequence
  Description of Artificial Sequence: Synthetic oligonucleotide
  Antisense strand to SEQ ID NO: 1923328
accuuuauuguacacagcu

SEQ ID NO: 1923330 - RNA, 19 nt, Artificial Sequence
  Description of Artificial Sequence: Synthetic oligonucleotide
  Sense strand starting at position 1852 of SEQ ID NO: 1879664
gugugagggcugcuuucuu

SEQ ID NO: 1923331 - RNA, 19 nt, Artificial Sequence
  Description of Artificial Sequence: Synthetic oligonucleotide
  Antisense strand to SEQ ID NO: 1923330
aagaaagcagcccucacac

SEQ ID NO: 1923332 - RNA, 19 nt, Artificial Sequence
  Description of Artificial Sequence: Synthetic oligonucleotide
  Sense strand starting at position 2191 of SEQ ID NO: 1879664
augugcuaacauggauaau

SEQ ID NO: 1923333 - RNA, 19 nt, Artificial Sequence
  Description of Artificial Sequence: Synthetic oligonucleotide
  Antisense strand to SEQ ID NO: 1923332
auuauccauguuagcacau

SEQ ID NO: 1923334 - RNA, 19 nt, Artificial Sequence
  Description of Artificial Sequence: Synthetic oligonucleotide
  Sense strand starting at position 2301 of SEQ ID NO: 1879664
cccacauguagucagaguu

SEQ ID NO: 1923335 - RNA, 19 nt, Artificial Sequence
  Description of Artificial Sequence: Synthetic oligonucleotide
  Antisense strand to SEQ ID NO: 1923334
aacucugacuacauguggg

SEQ ID NO: 1923336 - RNA, 19 nt, Artificial Sequence
  Description of Artificial Sequence: Synthetic oligonucleotide
  Sense strand starting at position 2322 of SEQ ID NO: 1879664
gcguaauugaaccagaugu

SEQ ID NO: 1923337 - RNA, 19 nt, Artificial Sequence
  Description of Artificial Sequence: Synthetic oligonucleotide
  Antisense strand to SEQ ID NO: 1923336
acaucugguucaauuacgc

SEQ ID NO: 1923338 - RNA, 19 nt, Artificial Sequence
  Description of Artificial Sequence: Synthetic oligonucleotide
  Sense strand starting at position 2540 of SEQ ID NO: 1879664
auuugaugcucugauaaua

SEQ ID NO: 1923339 - RNA, 19 nt, Artificial Sequence
  Description of Artificial Sequence: Synthetic oligonucleotide
  Antisense strand to SEQ ID NO: 1923338
uauuaucagagcaucaaau

SEQ ID NO: 1923340 - RNA, 19 nt, Artificial Sequence
  Description of Artificial Sequence: Synthetic oligonucleotide
  Sense strand starting at position 2647 of SEQ ID NO: 1879664
uuuauaacuguggauguga

SEQ ID NO: 1923341 - RNA, 19 nt, Artificial Sequence
  Description of Artificial Sequence: Synthetic oligonucleotide
  Antisense strand to SEQ ID NO: 1923340
ucacauccacaguuauaaa

SEQ ID NO: 1923342 - RNA, 19 nt, Artificial Sequence
  Description of Artificial Sequence: Synthetic oligonucleotide
  Sense strand starting at position 2649 of SEQ ID NO: 1879664
uauaacuguggaugugaaa

SEQ ID NO: 1923343 - RNA, 19 nt, Artificial Sequence
  Description of Artificial Sequence: Synthetic oligonucleotide
  Antisense strand to SEQ ID NO: 1923342
uuucacauccacaguuaua

SEQ ID NO: 1923344 - RNA, 19 nt, Artificial Sequence
  Description of Artificial Sequence: Synthetic oligonucleotide
  Sense strand starting at position 2766 of SEQ ID NO: 1879664
cacagugaugcucagaaug

SEQ ID NO: 1923345 - RNA, 19 nt, Artificial Sequence
  Description of Artificial Sequence: Synthetic oligonucleotide
  Antisense strand to SEQ ID NO: 1923344
cauucugagcaucacugug

SEQ ID NO: 1923346 - RNA, 19 nt, Artificial Sequence
  Description of Artificial Sequence: Synthetic oligonucleotide
  Sense strand starting at position 2801 of SEQ ID NO: 1879664
agugcaauauaguuacaaa

SEQ ID NO: 1923347 - RNA, 19 nt, Artificial Sequence
  Description of Artificial Sequence: Synthetic oligonucleotide
  Antisense strand to SEQ ID NO: 1923346
uuuguaacuauauugcacu

SEQ ID NO: 1923348 - RNA, 19 nt, Artificial Sequence
  Description of Artificial Sequence: Synthetic oligonucleotide
  Sense strand starting at position 2944 of SEQ ID NO: 1879664
uuuaauucuggugaguuga

SEQ ID NO: 1923349 - RNA, 19 nt, Artificial Sequence
  Description of Artificial Sequence: Synthetic oligonucleotide
  Antisense strand to SEQ ID NO: 1923348
ucaacucaccagaauuaaa

SEQ ID NO: 1923350 - RNA, 19 nt, Artificial Sequence
  Description of Artificial Sequence: Synthetic oligonucleotide
  Sense strand starting at position 2946 of SEQ ID NO: 1879664
uaauucuggugaguugaga

SEQ ID NO: 1923351 - RNA, 19 nt, Artificial Sequence
  Description of Artificial Sequence: Synthetic oligonucleotide
  Antisense strand to SEQ ID NO: 1923350
ucucaacucaccagaauua

SEQ ID NO: 1923352 - RNA, 19 nt, Artificial Sequence
  Description of Artificial Sequence: Synthetic oligonucleotide
  Sense strand starting at position 2954 of SEQ ID NO: 1879664
gugaguugagaguaauucu

SEQ ID NO: 1923353 - RNA, 19 nt, Artificial Sequence
  Description of Artificial Sequence: Synthetic oligonucleotide
  Antisense strand to SEQ ID NO: 1923352
agaauuacucucaacucac

SEQ ID NO: 1923354 - RNA, 19 nt, Artificial Sequence
  Description of Artificial Sequence: Synthetic oligonucleotide
  Sense strand starting at position 2957 of SEQ ID NO: 1879664
aguugagaguaauucuauu

SEQ ID NO: 1923355 - RNA, 19 nt, Artificial Sequence
  Description of Artificial Sequence: Synthetic oligonucleotide
  Antisense strand to SEQ ID NO: 1923354
aauagaauuacucucaacu

SEQ ID NO: 1923356 - RNA, 19 nt, Artificial Sequence
  Description of Artificial Sequence: Synthetic oligonucleotide
  Sense strand starting at position 3106 of SEQ ID NO: 1879664
cacaguauuguccaaggau

SEQ ID NO: 1923357 - RNA, 19 nt, Artificial Sequence
  Description of Artificial Sequence: Synthetic oligonucleotide
  Antisense strand to SEQ ID NO: 1923356
auccuuggacaauacugug

SEQ ID NO: 1923358 - RNA, 19 nt, Artificial Sequence
  Description of Artificial Sequence: Synthetic oligonucleotide
  Sense strand starting at position 3113 of SEQ ID NO: 1879664
uuguccaaggauuguauaa

SEQ ID NO: 1923359 - RNA, 19 nt, Artificial Sequence
  Description of Artificial Sequence: Synthetic oligonucleotide
  Antisense strand to SEQ ID NO: 1923358
uuauacaauccuuggacaa

SEQ ID NO: 1923360 - RNA, 19 nt, Artificial Sequence
  Description of Artificial Sequence: Synthetic oligonucleotide
  Sense strand starting at position 3285 of SEQ ID NO: 1879664
uuaugcagugauuagguaa

SEQ ID NO: 1923361 - RNA, 19 nt, Artificial Sequence
  Description of Artificial Sequence: Synthetic oligonucleotide
  Antisense strand to SEQ ID NO: 1923360
uuaccuaaucacugcauaa

SEQ ID NO: 1923362 - RNA, 19 nt, Artificial Sequence
  Description of Artificial Sequence: Synthetic oligonucleotide
  Sense strand starting at position 3474 of SEQ ID NO: 1879664
aagguuagaguaugccaaa

SEQ ID NO: 1923363 - RNA, 19 nt, Artificial Sequence
  Description of Artificial Sequence: Synthetic oligonucleotide
  Antisense strand to SEQ ID NO: 1923362
uuuggcauacucuaaccuu

SEQ ID NO: 1923364 - RNA, 19 nt, Artificial Sequence
  Description of Artificial Sequence: Synthetic oligonucleotide
  Sense strand starting at position 3576 of SEQ ID NO: 1879664
gaguauauugguggaaauu

SEQ ID NO: 1923365 - RNA, 19 nt, Artificial Sequence
  Description of Artificial Sequence: Synthetic oligonucleotide
  Antisense strand to SEQ ID NO: 1923364
aauuuccaccaauauacuc

SEQ ID NO: 1923366 - RNA, 19 nt, Artificial Sequence
  Description of Artificial Sequence: Synthetic oligonucleotide
  Sense strand starting at position 3704 of SEQ ID NO: 1879664
agaaauauuugugaguuug

SEQ ID NO: 1923367 - RNA, 19 nt, Artificial Sequence
  Description of Artificial Sequence: Synthetic oligonucleotide
  Antisense strand to SEQ ID NO: 1923366
caaacucacaaauauuucu

SEQ ID NO: 1923368 - RNA, 19 nt, Artificial Sequence
  Description of Artificial Sequence: Synthetic oligonucleotide
  Sense strand starting at position 3710 of SEQ ID NO: 1879664
auuugugaguuuguauguu

SEQ ID NO: 1923369 - RNA, 19 nt, Artificial Sequence
  Description of Artificial Sequence: Synthetic oligonucleotide
  Antisense strand to SEQ ID NO: 1923368
aacauacaaacucacaaau

SEQ ID NO: 1923370 - RNA, 19 nt, Artificial Sequence
  Description of Artificial Sequence: Synthetic oligonucleotide
  Sense strand starting at position 287 of SEQ ID NO: 1879665
guacgugucagugcuagga

SEQ ID NO: 1923371 - RNA, 19 nt, Artificial Sequence
  Description of Artificial Sequence: Synthetic oligonucleotide
  Antisense strand to SEQ ID NO: 1923370
uccuagcacugacacguac

SEQ ID NO: 1923372 - RNA, 19 nt, Artificial Sequence
  Description of Artificial Sequence: Synthetic oligonucleotide
  Sense strand starting at position 353 of SEQ ID NO: 1879665
augagauaauagucuagcu

SEQ ID NO: 1923373 - RNA, 19 nt, Artificial Sequence
  Description of Artificial Sequence: Synthetic oligonucleotide
  Antisense strand to SEQ ID NO: 1923372
agcuagacuauuaucucau

SEQ ID NO: 1923374 - RNA, 19 nt, Artificial Sequence
  Description of Artificial Sequence: Synthetic oligonucleotide
  Sense strand starting at position 460 of SEQ ID NO: 1879665
aggaacacauuccagauuu

SEQ ID NO: 1923375 - RNA, 19 nt, Artificial Sequence
  Description of Artificial Sequence: Synthetic oligonucleotide
  Antisense strand to SEQ ID NO: 1923374
aaaucuggaauguguuccu

SEQ ID NO: 1923376 - RNA, 19 nt, Artificial Sequence
  Description of Artificial Sequence: Synthetic oligonucleotide
  Sense strand starting at position 648 of SEQ ID NO: 1879665
auaaguuggaucugaggua

SEQ ID NO: 1923377 - RNA, 19 nt, Artificial Sequence
  Description of Artificial Sequence: Synthetic oligonucleotide
  Antisense strand to SEQ ID NO: 1923376
uaccucagauccaacuuau

SEQ ID NO: 1923378 - RNA, 19 nt, Artificial Sequence
  Description of Artificial Sequence: Synthetic oligonucleotide
  Sense strand starting at position 708 of SEQ ID NO: 1879665
uacagagcuuggucagaug

SEQ ID NO: 1923379 - RNA, 19 nt, Artificial Sequence
  Description of Artificial Sequence: Synthetic oligonucleotide
  Antisense strand to SEQ ID NO: 1923378
caucugaccaagcucugua

SEQ ID NO: 1923380 - RNA, 19 nt, Artificial Sequence
  Description of Artificial Sequence: Synthetic oligonucleotide
  Sense strand starting at position 1113 of SEQ ID NO: 1879665
aagugauuauaccugagac

SEQ ID NO: 1923381 - RNA, 19 nt, Artificial Sequence
  Description of Artificial Sequence: Synthetic oligonucleotide
  Antisense strand to SEQ ID NO: 1923380
gucucagguauaaucacuu

SEQ ID NO: 1923382 - RNA, 19 nt, Artificial Sequence
  Description of Artificial Sequence: Synthetic oligonucleotide
  Sense strand starting at position 1114 of SEQ ID NO: 1879665
agugauuauaccugagacg

SEQ ID NO: 1923383 - RNA, 19 nt, Artificial Sequence
  Description of Artificial Sequence: Synthetic oligonucleotide
  Antisense strand to SEQ ID NO: 1923382
cgucucagguauaaucacu

SEQ ID NO: 1923384 - RNA, 19 nt, Artificial Sequence
  Description of Artificial Sequence: Synthetic oligonucleotide
  Sense strand starting at position 1126 of SEQ ID NO: 1879665
ugagacgaguuuccacaaa

SEQ ID NO: 1923385 - RNA, 19 nt, Artificial Sequence
  Description of Artificial Sequence: Synthetic oligonucleotide
  Antisense strand to SEQ ID NO: 1923384
uuuguggaaacucgucuca

SEQ ID NO: 1923386 - RNA, 19 nt, Artificial Sequence
  Description of Artificial Sequence: Synthetic oligonucleotide
  Sense strand starting at position 1562 of SEQ ID NO: 1879665
gcaagaugucuagggaauu

SEQ ID NO: 1923387 - RNA, 19 nt, Artificial Sequence
  Description of Artificial Sequence: Synthetic oligonucleotide
  Antisense strand to SEQ ID NO: 1923386
aauucccuagacaucuugc

SEQ ID NO: 1923388 - RNA, 19 nt, Artificial Sequence
  Description of Artificial Sequence: Synthetic oligonucleotide
  Sense strand starting at position 1641 of SEQ ID NO: 1879665
guggaucauauguauguau

SEQ ID NO: 1923389 - RNA, 19 nt, Artificial Sequence
  Description of Artificial Sequence: Synthetic oligonucleotide
  Antisense strand to SEQ ID NO: 1923388
auacauacauaugauccac

SEQ ID NO: 1923390 - RNA, 19 nt, Artificial Sequence
  Description of Artificial Sequence: Synthetic oligonucleotide
  Sense strand starting at position 1643 of SEQ ID NO: 1879665
ggaucauauguauguauua

SEQ ID NO: 1923391 - RNA, 19 nt, Artificial Sequence
  Description of Artificial Sequence: Synthetic oligonucleotide
  Antisense strand to SEQ ID NO: 1923390
uaauacauacauaugaucc

SEQ ID NO: 1923392 - RNA, 19 nt, Artificial Sequence
  Description of Artificial Sequence: Synthetic oligonucleotide
  Sense strand starting at position 1668 of SEQ ID NO: 1879665
auagcaaacugguuuaauu

SEQ ID NO: 1923393 - RNA, 19 nt, Artificial Sequence
  Description of Artificial Sequence: Synthetic oligonucleotide
  Antisense strand to SEQ ID NO: 1923392
aauuaaaccaguuugcuau

SEQ ID NO: 1923394 - RNA, 19 nt, Artificial Sequence
  Description of Artificial Sequence: Synthetic oligonucleotide
  Sense strand starting at position 1670 of SEQ ID NO: 1879665
agcaaacugguuuaauuga

SEQ ID NO: 1923395 - RNA, 19 nt, Artificial Sequence
  Description of Artificial Sequence: Synthetic oligonucleotide
  Antisense strand to SEQ ID NO: 1923394
ucaauuaaaccaguuugcu

SEQ ID NO: 1923396 - RNA, 19 nt, Artificial Sequence
  Description of Artificial Sequence: Synthetic oligonucleotide
  Sense strand starting at position 1718 of SEQ ID NO: 1879665
uugacuggucaguaaguua

SEQ ID NO: 1923397 - RNA, 19 nt, Artificial Sequence
  Description of Artificial Sequence: Synthetic oligonucleotide
  Antisense strand to SEQ ID NO: 1923396
uaacuuacugaccagucaa

SEQ ID NO: 1923398 - RNA, 19 nt, Artificial Sequence
  Description of Artificial Sequence: Synthetic oligonucleotide
  Sense strand starting at position 1745 of SEQ ID NO: 1879665
aaauaugagcuuugucaga

SEQ ID NO: 1923399 - RNA, 19 nt, Artificial Sequence
  Description of Artificial Sequence: Synthetic oligonucleotide
  Antisense strand to SEQ ID NO: 1923398
ucugacaaagcucauauuu

SEQ ID NO: 1923400 - RNA, 19 nt, Artificial Sequence
  Description of Artificial Sequence: Synthetic oligonucleotide
  Sense strand starting at position 1747 of SEQ ID NO: 1879665
auaugagcuuugucagaaa

SEQ ID NO: 1923401 - RNA, 19 nt, Artificial Sequence
  Description of Artificial Sequence: Synthetic oligonucleotide
  Antisense strand to SEQ ID NO: 1923400
uuucugacaaagcucauau

SEQ ID NO: 1923402 - RNA, 19 nt, Artificial Sequence
  Description of Artificial Sequence: Synthetic oligonucleotide
  Sense strand starting at position 1820 of SEQ ID NO: 1879665
gguaguguuacagauuauc

SEQ ID NO: 1923403 - RNA, 19 nt, Artificial Sequence
  Description of Artificial Sequence: Synthetic oligonucleotide
  Antisense strand to SEQ ID NO: 1923402
gauaaucuguaacacuacc

SEQ ID NO: 1923404 - RNA, 19 nt, Artificial Sequence
  Description of Artificial Sequence: Synthetic oligonucleotide
  Sense strand starting at position 1873 of SEQ ID NO: 1879665
guuagucgauuucugauau

SEQ ID NO: 1923405 - RNA, 19 nt, Artificial Sequence
  Description of Artificial Sequence: Synthetic oligonucleotide
  Antisense strand to SEQ ID NO: 1923404
auaucagaaaucgacuaac

SEQ ID NO: 1923406 - RNA, 19 nt, Artificial Sequence
  Description of Artificial Sequence: Synthetic oligonucleotide
  Sense strand starting at position 2122 of SEQ ID NO: 1879665
gcuggaaucaaaugagagu

SEQ ID NO: 1923407 - RNA, 19 nt, Artificial Sequence
  Description of Artificial Sequence: Synthetic oligonucleotide
  Antisense strand to SEQ ID NO: 1923406
acucucauuugauuccagc

SEQ ID NO: 1923408 - RNA, 19 nt, Artificial Sequence
  Description of Artificial Sequence: Synthetic oligonucleotide
  Sense strand starting at position 2138 of SEQ ID NO: 1879665
aguccaagugaccacaauu

SEQ ID NO: 1923409 - RNA, 19 nt, Artificial Sequence
  Description of Artificial Sequence: Synthetic oligonucleotide
  Antisense strand to SEQ ID NO: 1923408
aauuguggucacuuggacu

SEQ ID NO: 1923410 - RNA, 19 nt, Artificial Sequence
  Description of Artificial Sequence: Synthetic oligonucleotide
  Sense strand starting at position 2257 of SEQ ID NO: 1879665
gcuguuacacuugauaaca

SEQ ID NO: 1923411 - RNA, 19 nt, Artificial Sequence
  Description of Artificial Sequence: Synthetic oligonucleotide
  Antisense strand to SEQ ID NO: 1923410
uguuaucaaguguaacagc

SEQ ID NO: 1923412 - RNA, 19 nt, Artificial Sequence
  Description of Artificial Sequence: Synthetic oligonucleotide
  Sense strand starting at position 2320 of SEQ ID NO: 1879665
guacgauaucucuaaguau

SEQ ID NO: 1923413 - RNA, 19 nt, Artificial Sequence
  Description of Artificial Sequence: Synthetic oligonucleotide
  Antisense strand to SEQ ID NO: 1923412
auacuuagagauaucguac

SEQ ID NO: 1923414 - RNA, 19 nt, Artificial Sequence
  Description of Artificial Sequence: Synthetic oligonucleotide
  Sense strand starting at position 2383 of SEQ ID NO: 1879665
aaguuuagggacugguaga

SEQ ID NO: 1923415 - RNA, 19 nt, Artificial Sequence
  Description of Artificial Sequence: Synthetic oligonucleotide
  Antisense strand to SEQ ID NO: 1923414
ucuaccagucccuaaacuu

SEQ ID NO: 1923416 - RNA, 19 nt, Artificial Sequence
  Description of Artificial Sequence: Synthetic oligonucleotide
  Sense strand starting at position 2384 of SEQ ID NO: 1879665
aguuuagggacugguagau

SEQ ID NO: 1923417 - RNA, 19 nt, Artificial Sequence
  Description of Artificial Sequence: Synthetic oligonucleotide
  Antisense strand to SEQ ID NO: 1923416
aucuaccagucccuaaacu

SEQ ID NO: 1923418 - RNA, 19 nt, Artificial Sequence
  Description of Artificial Sequence: Synthetic oligonucleotide
  Sense strand starting at position 2434 of SEQ ID NO: 1879665
uuaauagugucauuugcau

SEQ ID NO: 1923419 - RNA, 19 nt, Artificial Sequence
  Description of Artificial Sequence: Synthetic oligonucleotide
  Antisense strand to SEQ ID NO: 1923418
augcaaaugacacuauuaa

SEQ ID NO: 1923420 - RNA, 19 nt, Artificial Sequence
  Description of Artificial Sequence: Synthetic oligonucleotide
  Sense strand starting at position 2559 of SEQ ID NO: 1879665
aucuguuacuagucaauaa

SEQ ID NO: 1923421 - RNA, 19 nt, Artificial Sequence
  Description of Artificial Sequence: Synthetic oligonucleotide
  Antisense strand to SEQ ID NO: 1923420
uuauugacuaguaacagau

SEQ ID NO: 1923422 - RNA, 19 nt, Artificial Sequence
  Description of Artificial Sequence: Synthetic oligonucleotide
  Sense strand starting at position 3210 of SEQ ID NO: 1879665
ucagaaugauuggcugaug

SEQ ID NO: 1923423 - RNA, 19 nt, Artificial Sequence
  Description of Artificial Sequence: Synthetic oligonucleotide
  Antisense strand to SEQ ID NO: 1923422
caucagccaaucauucuga

SEQ ID NO: 1923424 - RNA, 19 nt, Artificial Sequence
  Description of Artificial Sequence: Synthetic oligonucleotide
  Sense strand starting at position 3211 of SEQ ID NO: 1879665
cagaaugauuggcugaugu

SEQ ID NO: 1923425 - RNA, 19 nt, Artificial Sequence
  Description of Artificial Sequence: Synthetic oligonucleotide
  Antisense strand to SEQ ID NO: 1923424
acaucagccaaucauucug

SEQ ID NO: 1923426 - RNA, 19 nt, Artificial Sequence
  Description of Artificial Sequence: Synthetic oligonucleotide
  Sense strand starting at position 3213 of SEQ ID NO: 1879665
gaaugauuggcugauguca

SEQ ID NO: 1923427 - RNA, 19 nt, Artificial Sequence
  Description of Artificial Sequence: Synthetic oligonucleotide
  Antisense strand to SEQ ID NO: 1923426
ugacaucagccaaucauuc

SEQ ID NO: 1923428 - RNA, 19 nt, Artificial Sequence
  Description of Artificial Sequence: Synthetic oligonucleotide
  Sense strand starting at position 3289 of SEQ ID NO: 1879665
aaugcauguguugagauaa

SEQ ID NO: 1923429 - RNA, 19 nt, Artificial Sequence
  Description of Artificial Sequence: Synthetic oligonucleotide
  Antisense strand to SEQ ID NO: 1923428
uuaucucaacacaugcauu

SEQ ID NO: 1923430 - RNA, 19 nt, Artificial Sequence
  Description of Artificial Sequence: Synthetic oligonucleotide
  Sense strand starting at position 3302 of SEQ ID NO: 1879665
agauaaggccuuugaguaa

SEQ ID NO: 1923431 - RNA, 19 nt, Artificial Sequence
  Description of Artificial Sequence: Synthetic oligonucleotide
  Antisense strand to SEQ ID NO: 1923430
uuacucaaaggccuuaucu

SEQ ID NO: 1923432 - RNA, 19 nt, Artificial Sequence
  Description of Artificial Sequence: Synthetic oligonucleotide
  Sense strand starting at position 3306 of SEQ ID NO: 1879665
aaggccuuugaguaaagua

SEQ ID NO: 1923433 - RNA, 19 nt, Artificial Sequence
  Description of Artificial Sequence: Synthetic oligonucleotide
  Antisense strand to SEQ ID NO: 1923432
uacuuuacucaaaggccuu

SEQ ID NO: 1923434 - RNA, 19 nt, Artificial Sequence
  Description of Artificial Sequence: Synthetic oligonucleotide
  Sense strand starting at position 3431 of SEQ ID NO: 1879665
uauacugaucuuuggguua

SEQ ID NO: 1923435 - RNA, 19 nt, Artificial Sequence
  Description of Artificial Sequence: Synthetic oligonucleotide
  Antisense strand to SEQ ID NO: 1923434
uaacccaaagaucaguaua

SEQ ID NO: 1923436 - RNA, 19 nt, Artificial Sequence
  Description of Artificial Sequence: Synthetic oligonucleotide
  Sense strand starting at position 3434 of SEQ ID NO: 1879665
acugaucuuuggguuauag

SEQ ID NO: 1923437 - RNA, 19 nt, Artificial Sequence
  Description of Artificial Sequence: Synthetic oligonucleotide
  Antisense strand to SEQ ID NO: 1923436
cuauaacccaaagaucagu

SEQ ID NO: 1923438 - RNA, 19 nt, Artificial Sequence
  Description of Artificial Sequence: Synthetic oligonucleotide
  Sense strand starting at position 3436 of SEQ ID NO: 1879665
ugaucuuuggguuauaggu

SEQ ID NO: 1923439 - RNA, 19 nt, Artificial Sequence
  Description of Artificial Sequence: Synthetic oligonucleotide
  Antisense strand to SEQ ID NO: 1923438
accuauaacccaaagauca

SEQ ID NO: 1923440 - RNA, 19 nt, Artificial Sequence
  Description of Artificial Sequence: Synthetic oligonucleotide
  Sense strand starting at position 3443 of SEQ ID NO: 1879665
uggguuauagguuaacuau

SEQ ID NO: 1923441 - RNA, 19 nt, Artificial Sequence
  Description of Artificial Sequence: Synthetic oligonucleotide
  Antisense strand to SEQ ID NO: 1923440
auaguuaaccuauaaccca

SEQ ID NO: 1923442 - RNA, 19 nt, Artificial Sequence
  Description of Artificial Sequence: Synthetic oligonucleotide
  Sense strand starting at position 3449 of SEQ ID NO: 1879665
auagguuaacuaugaguuu

SEQ ID NO: 1923443 - RNA, 19 nt, Artificial Sequence
  Description of Artificial Sequence: Synthetic oligonucleotide
  Antisense strand to SEQ ID NO: 1923442
aaacucauaguuaaccuau

SEQ ID NO: 1923444 - RNA, 19 nt, Artificial Sequence
  Description of Artificial Sequence: Synthetic oligonucleotide
  Sense strand starting at position 3466 of SEQ ID NO: 1879665
uuguguuaaguauacaaug

SEQ ID NO: 1923445 - RNA, 19 nt, Artificial Sequence
  Description of Artificial Sequence: Synthetic oligonucleotide
  Antisense strand to SEQ ID NO: 1923444
cauuguauacuuaacacaa

SEQ ID NO: 1923446 - RNA, 19 nt, Artificial Sequence
  Description of Artificial Sequence: Synthetic oligonucleotide
  Sense strand starting at position 3738 of SEQ ID NO: 1879665
ccaauacaguuguuuauaa

SEQ ID NO: 1923447 - RNA, 19 nt, Artificial Sequence
  Description of Artificial Sequence: Synthetic oligonucleotide
  Antisense strand to SEQ ID NO: 1923446
uuauaaacaacuguauugg

SEQ ID NO: 1923448 - RNA, 19 nt, Artificial Sequence
  Description of Artificial Sequence: Synthetic oligonucleotide
  Sense strand starting at position 3808 of SEQ ID NO: 1879665
augaauauguaccuguuaa

SEQ ID NO: 1923449 - RNA, 19 nt, Artificial Sequence
  Description of Artificial Sequence: Synthetic oligonucleotide
  Antisense strand to SEQ ID NO: 1923448
uuaacagguacauauucau

SEQ ID NO: 1923450 - RNA, 19 nt, Artificial Sequence
  Description of Artificial Sequence: Synthetic oligonucleotide
  Sense strand starting at position 12 of SEQ ID NO: 1879666
cuuuaaucauggcuaugga

SEQ ID NO: 1923451 - RNA, 19 nt, Artificial Sequence
  Description of Artificial Sequence: Synthetic oligonucleotide
  Antisense strand to SEQ ID NO: 1923450
uccauagccaugauuaaag

SEQ ID NO: 1923452 - RNA, 19 nt, Artificial Sequence
  Description of Artificial Sequence: Synthetic oligonucleotide
  Sense strand starting at position 182 of SEQ ID NO: 1879666
aggugugaugauggaacau

SEQ ID NO: 1923453 - RNA, 19 nt, Artificial Sequence
  Description of Artificial Sequence: Synthetic oligonucleotide
  Antisense strand to SEQ ID NO: 1923452
auguuccaucaucacaccu

SEQ ID NO: 1923454 - RNA, 19 nt, Artificial Sequence
  Description of Artificial Sequence: Synthetic oligonucleotide
  Sense strand starting at position 331 of SEQ ID NO: 1879666
guuaacuaugaguagaggu

SEQ ID NO: 1923455 - RNA, 19 nt, Artificial Sequence
  Description of Artificial Sequence: Synthetic oligonucleotide
  Antisense strand to SEQ ID NO: 1923454
accucuacucauaguuaac

SEQ ID NO: 1923456 - RNA, 19 nt, Artificial Sequence
  Description of Artificial Sequence: Synthetic oligonucleotide
  Sense strand starting at position 341 of SEQ ID NO: 1879666
aguagagguuuccuuuaga

SEQ ID NO: 1923457 - RNA, 19 nt, Artificial Sequence
  Description of Artificial Sequence: Synthetic oligonucleotide
  Antisense strand to SEQ ID NO: 1923456
ucuaaaggaaaccucuacu

SEQ ID NO: 1923458 - RNA, 19 nt, Artificial Sequence
  Description of Artificial Sequence: Synthetic oligonucleotide
  Sense strand starting at position 624 of SEQ ID NO: 1879666
gaacuagaguauguagcuu

SEQ ID NO: 1923459 - RNA, 19 nt, Artificial Sequence
  Description of Artificial Sequence: Synthetic oligonucleotide
  Antisense strand to SEQ ID NO: 1923458
aagcuacauacucuaguuc

SEQ ID NO: 1923460 - RNA, 19 nt, Artificial Sequence
  Description of Artificial Sequence: Synthetic oligonucleotide
  Sense strand starting at position 742 of SEQ ID NO: 1879666
acugguagaucccuagaga

SEQ ID NO: 1923461 - RNA, 19 nt, Artificial Sequence
  Description of Artificial Sequence: Synthetic oligonucleotide
  Antisense strand to SEQ ID NO: 1923460
ucucuagggaucuaccagu

SEQ ID NO: 1923462 - RNA, 19 nt, Artificial Sequence
  Description of Artificial Sequence: Synthetic oligonucleotide
  Sense strand starting at position 809 of SEQ ID NO: 1879666
ucucuugcuggugauagaa

SEQ ID NO: 1923463 - RNA, 19 nt, Artificial Sequence
  Description of Artificial Sequence: Synthetic oligonucleotide
  Antisense strand to SEQ ID NO: 1923462
uucuaucaccagcaagaga

SEQ ID NO: 1923464 - RNA, 19 nt, Artificial Sequence
  Description of Artificial Sequence: Synthetic oligonucleotide
  Sense strand starting at position 823 of SEQ ID NO: 1879666
uagaaugucgaaugcaaag

SEQ ID NO: 1923465 - RNA, 19 nt, Artificial Sequence
  Description of Artificial Sequence: Synthetic oligonucleotide
  Antisense strand to SEQ ID NO: 1923464
cuuugcauucgacauucua

SEQ ID NO: 1923466 - RNA, 19 nt, Artificial Sequence
  Description of Artificial Sequence: Synthetic oligonucleotide
  Sense strand starting at position 933 of SEQ ID NO: 1879666
agacgacaauguucuuuga

SEQ ID NO: 1923467 - RNA, 19 nt, Artificial Sequence
  Description of Artificial Sequence: Synthetic oligonucleotide
  Antisense strand to SEQ ID NO: 1923466
ucaaagaacauugucgucu

SEQ ID NO: 1923468 - RNA, 19 nt, Artificial Sequence
  Description of Artificial Sequence: Synthetic oligonucleotide
  Sense strand starting at position 968 of SEQ ID NO: 1879666
uauagauacccugggagua

SEQ ID NO: 1923469 - RNA, 19 nt, Artificial Sequence
  Description of Artificial Sequence: Synthetic oligonucleotide
  Antisense strand to SEQ ID NO: 1923468
uacucccaggguaucuaua

SEQ ID NO: 1923470 - RNA, 19 nt, Artificial Sequence
  Description of Artificial Sequence: Synthetic oligonucleotide
  Sense strand starting at position 981 of SEQ ID NO: 1879666
ggaguaauugugggaucag

SEQ ID NO: 1923471 - RNA, 19 nt, Artificial Sequence
  Description of Artificial Sequence: Synthetic oligonucleotide
  Antisense strand to SEQ ID NO: 1923470
cugaucccacaauuacucc

SEQ ID NO: 1923472 - RNA, 19 nt, Artificial Sequence
  Description of Artificial Sequence: Synthetic oligonucleotide
  Sense strand starting at position 1196 of SEQ ID NO: 1879666
cacuucgugccugagaaag

SEQ ID NO: 1923473 - RNA, 19 nt, Artificial Sequence
  Description of Artificial Sequence: Synthetic oligonucleotide
  Antisense strand to SEQ ID NO: 1923472
cuuucucaggcacgaagug

SEQ ID NO: 1923474 - RNA, 19 nt, Artificial Sequence
  Description of Artificial Sequence: Synthetic oligonucleotide
  Sense strand starting at position 1235 of SEQ ID NO: 1879666
agguaucugagauguagcu

SEQ ID NO: 1923475 - RNA, 19 nt, Artificial Sequence
  Description of Artificial Sequence: Synthetic oligonucleotide
  Antisense strand to SEQ ID NO: 1923474
agcuacaucucagauaccu

SEQ ID NO: 1923476 - RNA, 19 nt, Artificial Sequence
  Description of Artificial Sequence: Synthetic oligonucleotide
  Sense strand starting at position 1237 of SEQ ID NO: 1879666
guaucugagauguagcuca

SEQ ID NO: 1923477 - RNA, 19 nt, Artificial Sequence
  Description of Artificial Sequence: Synthetic oligonucleotide
  Antisense strand to SEQ ID NO: 1923476
ugagcuacaucucagauac

SEQ ID NO: 1923478 - RNA, 19 nt, Artificial Sequence
  Description of Artificial Sequence: Synthetic oligonucleotide
  Sense strand starting at position 1242 of SEQ ID NO: 1879666
ugagauguagcucagcuua

SEQ ID NO: 1923479 - RNA, 19 nt, Artificial Sequence
  Description of Artificial Sequence: Synthetic oligonucleotide
  Antisense strand to SEQ ID NO: 1923478
uaagcugagcuacaucuca

SEQ ID NO: 1923480 - RNA, 19 nt, Artificial Sequence
  Description of Artificial Sequence: Synthetic oligonucleotide
  Sense strand starting at position 1244 of SEQ ID NO: 1879666
agauguagcucagcuuaga

SEQ ID NO: 1923481 - RNA, 19 nt, Artificial Sequence
  Description of Artificial Sequence: Synthetic oligonucleotide
  Antisense strand to SEQ ID NO: 1923480
ucuaagcugagcuacaucu

SEQ ID NO: 1923482 - RNA, 19 nt, Artificial Sequence
  Description of Artificial Sequence: Synthetic oligonucleotide
  Sense strand starting at position 1395 of SEQ ID NO: 1879666
gaggaaaccuggucuuagu

SEQ ID NO: 1923483 - RNA, 19 nt, Artificial Sequence
  Description of Artificial Sequence: Synthetic oligonucleotide
  Antisense strand to SEQ ID NO: 1923482
acuaagaccagguuuccuc

SEQ ID NO: 1923484 - RNA, 19 nt, Artificial Sequence
  Description of Artificial Sequence: Synthetic oligonucleotide
  Sense strand starting at position 1711 of SEQ ID NO: 1879666
gguggcuuccucuucgcua

SEQ ID NO: 1923485 - RNA, 19 nt, Artificial Sequence
  Description of Artificial Sequence: Synthetic oligonucleotide
  Antisense strand to SEQ ID NO: 1923484
uagcgaagaggaagccacc

SEQ ID NO: 1923486 - RNA, 19 nt, Artificial Sequence
  Description of Artificial Sequence: Synthetic oligonucleotide
  Sense strand starting at position 1724 of SEQ ID NO: 1879666
ucgcuaggaggugacaaau

SEQ ID NO: 1923487 - RNA, 19 nt, Artificial Sequence
  Description of Artificial Sequence: Synthetic oligonucleotide
  Antisense strand to SEQ ID NO: 1923486
auuugucaccuccuagcga

SEQ ID NO: 1923488 - RNA, 19 nt, Artificial Sequence
  Description of Artificial Sequence: Synthetic oligonucleotide
  Sense strand starting at position 1890 of SEQ ID NO: 1879666
guuugagacucguccuaaa

SEQ ID NO: 1923489 - RNA, 19 nt, Artificial Sequence
  Description of Artificial Sequence: Synthetic oligonucleotide
  Antisense strand to SEQ ID NO: 1923488
uuuaggacgagucucaaac

SEQ ID NO: 1923490 - RNA, 19 nt, Artificial Sequence
  Description of Artificial Sequence: Synthetic oligonucleotide
  Sense strand starting at position 2077 of SEQ ID NO: 1879666
aaauaugcguuccugagag

SEQ ID NO: 1923491 - RNA, 19 nt, Artificial Sequence
  Description of Artificial Sequence: Synthetic oligonucleotide
  Antisense strand to SEQ ID NO: 1923490
cucucaggaacgcauauuu

SEQ ID NO: 1923492 - RNA, 19 nt, Artificial Sequence
  Description of Artificial Sequence: Synthetic oligonucleotide
  Sense strand starting at position 2079 of SEQ ID NO: 1879666
auaugcguuccugagagac

SEQ ID NO: 1923493 - RNA, 19 nt, Artificial Sequence
  Description of Artificial Sequence: Synthetic oligonucleotide
  Antisense strand to SEQ ID NO: 1923492
gucucucaggaacgcauau

SEQ ID NO: 1923494 - RNA, 19 nt, Artificial Sequence
  Description of Artificial Sequence: Synthetic oligonucleotide
  Sense strand starting at position 2763 of SEQ ID NO: 1879666
caacguaauccguauuauc

SEQ ID NO: 1923495 - RNA, 19 nt, Artificial Sequence
  Description of Artificial Sequence: Synthetic oligonucleotide
  Antisense strand to SEQ ID NO: 1923494
gauaauacggauuacguug

SEQ ID NO: 1923496 - RNA, 19 nt, Artificial Sequence
  Description of Artificial Sequence: Synthetic oligonucleotide
  Sense strand starting at position 2787 of SEQ ID NO: 1879666
aagaauacccgucaccgaa

SEQ ID NO: 1923497 - RNA, 19 nt, Artificial Sequence
  Description of Artificial Sequence: Synthetic oligonucleotide
  Antisense strand to SEQ ID NO: 1923496
uucggugacggguauucuu

SEQ ID NO: 1923498 - RNA, 19 nt, Artificial Sequence
  Description of Artificial Sequence: Synthetic oligonucleotide
  Sense strand starting at position 2938 of SEQ ID NO: 1879666
gagcuugaccgggaccaua

SEQ ID NO: 1923499 - RNA, 19 nt, Artificial Sequence
  Description of Artificial Sequence: Synthetic oligonucleotide
  Antisense strand to SEQ ID NO: 1923498
uauggucccggucaagcuc

SEQ ID NO: 1923500 - RNA, 19 nt, Artificial Sequence
  Description of Artificial Sequence: Synthetic oligonucleotide
  Sense strand starting at position 3266 of SEQ ID NO: 1879666
gccagagaacccuguaaga

SEQ ID NO: 1923501 - RNA, 19 nt, Artificial Sequence
  Description of Artificial Sequence: Synthetic oligonucleotide
  Antisense strand to SEQ ID NO: 1923500
ucuuacaggguucucuggc

SEQ ID NO: 1923502 - RNA, 19 nt, Artificial Sequence
  Description of Artificial Sequence: Synthetic oligonucleotide
  Sense strand starting at position 3275 of SEQ ID NO: 1879666
cccuguaagagacgugaau

SEQ ID NO: 1923503 - RNA, 19 nt, Artificial Sequence
  Description of Artificial Sequence: Synthetic oligonucleotide
  Antisense strand to SEQ ID NO: 1923502
auucacgucucuuacaggg

SEQ ID NO: 1923504 - RNA, 19 nt, Artificial Sequence
  Description of Artificial Sequence: Synthetic oligonucleotide
  Sense strand starting at position 3277 of SEQ ID NO: 1879666
cuguaagagacgugaauag

SEQ ID NO: 1923505 - RNA, 19 nt, Artificial Sequence
  Description of Artificial Sequence: Synthetic oligonucleotide
  Antisense strand to SEQ ID NO: 1923504
cuauucacgucucuuacag

SEQ ID NO: 1923506 - RNA, 19 nt, Artificial Sequence
  Description of Artificial Sequence: Synthetic oligonucleotide
  Sense strand starting at position 3288 of SEQ ID NO: 1879666
gugaauaguuacccacaca

SEQ ID NO: 1923507 - RNA, 19 nt, Artificial Sequence
  Description of Artificial Sequence: Synthetic oligonucleotide
  Antisense strand to SEQ ID NO: 1923506
uguguggguaacuauucac

SEQ ID NO: 1923508 - RNA, 19 nt, Artificial Sequence
  Description of Artificial Sequence: Synthetic oligonucleotide
  Sense strand starting at position 3363 of SEQ ID NO: 1879666
aggucaugcaugggugaaa

SEQ ID NO: 1923509 - RNA, 19 nt, Artificial Sequence
  Description of Artificial Sequence: Synthetic oligonucleotide
  Antisense strand to SEQ ID NO: 1923508
uuucacccaugcaugaccu

SEQ ID NO: 1923510 - RNA, 19 nt, Artificial Sequence
  Description of Artificial Sequence: Synthetic oligonucleotide
  Sense strand starting at position 3364 of SEQ ID NO: 1879666
ggucaugcaugggugaaau

SEQ ID NO: 1923511 - RNA, 19 nt, Artificial Sequence
  Description of Artificial Sequence: Synthetic oligonucleotide
  Antisense strand to SEQ ID NO: 1923510
auuucacccaugcaugacc

SEQ ID NO: 1923512 - RNA, 19 nt, Artificial Sequence
  Description of Artificial Sequence: Synthetic oligonucleotide
  Sense strand starting at position 3503 of SEQ ID NO: 1879666
cuuugaaggccuuauagcu

SEQ ID NO: 1923513 - RNA, 19 nt, Artificial Sequence
  Description of Artificial Sequence: Synthetic oligonucleotide
  Antisense strand to SEQ ID NO: 1923512
agcuauaaggccuucaaag

SEQ ID NO: 1923514 - RNA, 19 nt, Artificial Sequence
  Description of Artificial Sequence: Synthetic oligonucleotide
  Sense strand starting at position 3618 of SEQ ID NO: 1879666
cugguagacuuucuaugau

SEQ ID NO: 1923515 - RNA, 19 nt, Artificial Sequence
  Description of Artificial Sequence: Synthetic oligonucleotide
  Antisense strand to SEQ ID NO: 1923514
aucauagaaagucuaccag

SEQ ID NO: 1923516 - RNA, 19 nt, Artificial Sequence
  Description of Artificial Sequence: Synthetic oligonucleotide
  Sense strand starting at position 3804 of SEQ ID NO: 1879666
uuugcaaagugacuguaau

SEQ ID NO: 1923517 - RNA, 19 nt, Artificial Sequence
  Description of Artificial Sequence: Synthetic oligonucleotide
  Antisense strand to SEQ ID NO: 1923516
auuacagucacuuugcaaa

SEQ ID NO: 1923518 - RNA, 19 nt, Artificial Sequence
  Description of Artificial Sequence: Synthetic oligonucleotide
  Sense strand starting at position 3836 of SEQ ID NO: 1879666
gagagaaucucugugauuc

SEQ ID NO: 1923519 - RNA, 19 nt, Artificial Sequence
  Description of Artificial Sequence: Synthetic oligonucleotide
  Antisense strand to SEQ ID NO: 1923518
gaaucacagagauucucuc

SEQ ID NO: 1923520 - RNA, 19 nt, Artificial Sequence
  Description of Artificial Sequence: Synthetic oligonucleotide
  Sense strand starting at position 3837 of SEQ ID NO: 1879666
agagaaucucugugauucu

SEQ ID NO: 1923521 - RNA, 19 nt, Artificial Sequence
  Description of Artificial Sequence: Synthetic oligonucleotide
  Antisense strand to SEQ ID NO: 1923520
agaaucacagagauucucu

SEQ ID NO: 1923522 - RNA, 19 nt, Artificial Sequence
  Description of Artificial Sequence: Synthetic oligonucleotide
  Sense strand starting at position 3844 of SEQ ID NO: 1879666
cucugugauucuuugauga

SEQ ID NO: 1923523 - RNA, 19 nt, Artificial Sequence
  Description of Artificial Sequence: Synthetic oligonucleotide
  Antisense strand to SEQ ID NO: 1923522
ucaucaaagaaucacagag

SEQ ID NO: 1923524 - RNA, 19 nt, Artificial Sequence
  Description of Artificial Sequence: Synthetic oligonucleotide
  Sense strand starting at position 3897 of SEQ ID NO: 1879666
agauccugcaguggauauu

SEQ ID NO: 1923525 - RNA, 19 nt, Artificial Sequence
  Description of Artificial Sequence: Synthetic oligonucleotide
  Antisense strand to SEQ ID NO: 1923524
aauauccacugcaggaucu

SEQ ID NO: 1923526 - RNA, 19 nt, Artificial Sequence
  Description of Artificial Sequence: Synthetic oligonucleotide
  Sense strand starting at position 3903 of SEQ ID NO: 1879666
ugcaguggauauucugaua

SEQ ID NO: 1923527 - RNA, 19 nt, Artificial Sequence
  Description of Artificial Sequence: Synthetic oligonucleotide
  Antisense strand to SEQ ID NO: 1923526
uaucagaauauccacugca

SEQ ID NO: 1923528 - RNA, 19 nt, Artificial Sequence
  Description of Artificial Sequence: Synthetic oligonucleotide
  Sense strand starting at position 3981 of SEQ ID NO: 1879666
gguguagcuuccuuagaaa

SEQ ID NO: 1923529 - RNA, 19 nt, Artificial Sequence
  Description of Artificial Sequence: Synthetic oligonucleotide
  Antisense strand to SEQ ID NO: 1923528
uuucuaaggaagcuacacc

SEQ ID NO: 1923530 - RNA, 19 nt, Artificial Sequence
  Description of Artificial Sequence: Synthetic oligonucleotide
  Sense strand starting at position 22 of SEQ ID NO: 1879667
guggcugauuugccaucau

SEQ ID NO: 1923531 - RNA, 19 nt, Artificial Sequence
  Description of Artificial Sequence: Synthetic oligonucleotide
  Antisense strand to SEQ ID NO: 1923530
augauggcaaaucagccac

SEQ ID NO: 1923532 - RNA, 19 nt, Artificial Sequence
  Description of Artificial Sequence: Synthetic oligonucleotide
  Sense strand starting at position 66 of SEQ ID NO: 1879667
aguucuacugaggguaguu

SEQ ID NO: 1923533 - RNA, 19 nt, Artificial Sequence
  Description of Artificial Sequence: Synthetic oligonucleotide
  Antisense strand to SEQ ID NO: 1923532
aacuacccucaguagaacu

SEQ ID NO: 1923534 - RNA, 19 nt, Artificial Sequence
  Description of Artificial Sequence: Synthetic oligonucleotide
  Sense strand starting at position 179 of SEQ ID NO: 1879667
ucuggcuaaucucugaaua

SEQ ID NO: 1923535 - RNA, 19 nt, Artificial Sequence
  Description of Artificial Sequence: Synthetic oligonucleotide
  Antisense strand to SEQ ID NO: 1923534
uauucagagauuagccaga

SEQ ID NO: 1923536 - RNA, 19 nt, Artificial Sequence
  Description of Artificial Sequence: Synthetic oligonucleotide
  Sense strand starting at position 180 of SEQ ID NO: 1879667
cuggcuaaucucugaauag

SEQ ID NO: 1923537 - RNA, 19 nt, Artificial Sequence
  Description of Artificial Sequence: Synthetic oligonucleotide
  Antisense strand to SEQ ID NO: 1923536
cuauucagagauuagccag

SEQ ID NO: 1923538 - RNA, 19 nt, Artificial Sequence
  Description of Artificial Sequence: Synthetic oligonucleotide
  Sense strand starting at position 904 of SEQ ID NO: 1879667
gcaagaucugcacagccaa

SEQ ID NO: 1923539 - RNA, 19 nt, Artificial Sequence
  Description of Artificial Sequence: Synthetic oligonucleotide
  Antisense strand to SEQ ID NO: 1923538
uuggcugugcagaucuugc

SEQ ID NO: 1923540 - RNA, 19 nt, Artificial Sequence
  Description of Artificial Sequence: Synthetic oligonucleotide
  Sense strand starting at position 1016 of SEQ ID NO: 1879667
uauuaaggucaggaugcau

SEQ ID NO: 1923541 - RNA, 19 nt, Artificial Sequence
  Description of Artificial Sequence: Synthetic oligonucleotide
  Antisense strand to SEQ ID NO: 1923540
augcauccugaccuuaaua

SEQ ID NO: 1923542 - RNA, 19 nt, Artificial Sequence
  Description of Artificial Sequence: Synthetic oligonucleotide
  Sense strand starting at position 1388 of SEQ ID NO: 1879667
ggagaaaucggucagccug

SEQ ID NO: 1923543 - RNA, 19 nt, Artificial Sequence
  Description of Artificial Sequence: Synthetic oligonucleotide
  Antisense strand to SEQ ID NO: 1923542
caggcugaccgauuucucc

SEQ ID NO: 1923544 - RNA, 19 nt, Artificial Sequence
  Description of Artificial Sequence: Synthetic oligonucleotide
  Sense strand starting at position 1484 of SEQ ID NO: 1879667
gcaaucaacgccgaauacu

SEQ ID NO: 1923545 - RNA, 19 nt, Artificial Sequence
  Description of Artificial Sequence: Synthetic oligonucleotide
  Antisense strand to SEQ ID NO: 1923544
aguauucggcguugauugc

SEQ ID NO: 1923546 - RNA, 19 nt, Artificial Sequence
  Description of Artificial Sequence: Synthetic oligonucleotide
  Sense strand starting at position 1675 of SEQ ID NO: 1879667
gcugcuaggagucaacaga

SEQ ID NO: 1923547 - RNA, 19 nt, Artificial Sequence
  Description of Artificial Sequence: Synthetic oligonucleotide
  Antisense strand to SEQ ID NO: 1923546
ucuguugacuccuagcagc

SEQ ID NO: 1923548 - RNA, 19 nt, Artificial Sequence
  Description of Artificial Sequence: Synthetic oligonucleotide
  Sense strand starting at position 1809 of SEQ ID NO: 1879667
ucaaguucuucccuggacu

SEQ ID NO: 1923549 - RNA, 19 nt, Artificial Sequence
  Description of Artificial Sequence: Synthetic oligonucleotide
  Antisense strand to SEQ ID NO: 1923548
aguccagggaagaacuuga

SEQ ID NO: 1923550 - RNA, 19 nt, Artificial Sequence
  Description of Artificial Sequence: Synthetic oligonucleotide
  Sense strand starting at position 1999 of SEQ ID NO: 1879667
agaagaggaucucaaugaa

SEQ ID NO: 1923551 - RNA, 19 nt, Artificial Sequence
  Description of Artificial Sequence: Synthetic oligonucleotide
  Antisense strand to SEQ ID NO: 1923550
uucauugagauccucuucu

SEQ ID NO: 1923552 - RNA, 19 nt, Artificial Sequence
  Description of Artificial Sequence: Synthetic oligonucleotide
  Sense strand starting at position 2061 of SEQ ID NO: 1879667
ggagaaauaucuucuugua

SEQ ID NO: 1923553 - RNA, 19 nt, Artificial Sequence
  Description of Artificial Sequence: Synthetic oligonucleotide
  Antisense strand to SEQ ID NO: 1923552
uacaagaagauauuucucc

SEQ ID NO: 1923554 - RNA, 19 nt, Artificial Sequence
  Description of Artificial Sequence: Synthetic oligonucleotide
  Sense strand starting at position 2063 of SEQ ID NO: 1879667
agaaauaucuucuuguagu

SEQ ID NO: 1923555 - RNA, 19 nt, Artificial Sequence
  Description of Artificial Sequence: Synthetic oligonucleotide
  Antisense strand to SEQ ID NO: 1923554
acuacaagaagauauuucu

SEQ ID NO: 1923556 - RNA, 19 nt, Artificial Sequence
  Description of Artificial Sequence: Synthetic oligonucleotide
  Sense strand starting at position 2076 of SEQ ID NO: 1879667
uguaguucuacuugugaua

SEQ ID NO: 1923557 - RNA, 19 nt, Artificial Sequence
  Description of Artificial Sequence: Synthetic oligonucleotide
  Antisense strand to SEQ ID NO: 1923556
uaucacaaguagaacuaca

SEQ ID NO: 1923558 - RNA, 19 nt, Artificial Sequence
  Description of Artificial Sequence: Synthetic oligonucleotide
  Sense strand starting at position 2175 of SEQ ID NO: 1879667
ucaaauagaugagagcaau

SEQ ID NO: 1923559 - RNA, 19 nt, Artificial Sequence
  Description of Artificial Sequence: Synthetic oligonucleotide
  Antisense strand to SEQ ID NO: 1923558
auugcucucaucuauuuga

SEQ ID NO: 1923560 - RNA, 19 nt, Artificial Sequence
  Description of Artificial Sequence: Synthetic oligonucleotide
  Sense strand starting at position 2392 of SEQ ID NO: 1879667
acccuaucugccuguggaa

SEQ ID NO: 1923561 - RNA, 19 nt, Artificial Sequence
  Description of Artificial Sequence: Synthetic oligonucleotide
  Antisense strand to SEQ ID NO: 1923560
uuccacaggcagauagggu

SEQ ID NO: 1923562 - RNA, 19 nt, Artificial Sequence
  Description of Artificial Sequence: Synthetic oligonucleotide
  Sense strand starting at position 2587 of SEQ ID NO: 1879667
acugguacccuauaauugu

SEQ ID NO: 1923563 - RNA, 19 nt, Artificial Sequence
  Description of Artificial Sequence: Synthetic oligonucleotide
  Antisense strand to SEQ ID NO: 1923562
acaauuauaggguaccagu

SEQ ID NO: 1923564 - RNA, 19 nt, Artificial Sequence
  Description of Artificial Sequence: Synthetic oligonucleotide
  Sense strand starting at position 2602 of SEQ ID NO: 1879667
uuguauuaagcagauaauc

SEQ ID NO: 1923565 - RNA, 19 nt, Artificial Sequence
  Description of Artificial Sequence: Synthetic oligonucleotide
  Antisense strand to SEQ ID NO: 1923564
gauuaucugcuuaauacaa

SEQ ID NO: 1923566 - RNA, 19 nt, Artificial Sequence
  Description of Artificial Sequence: Synthetic oligonucleotide
  Sense strand starting at position 2728 of SEQ ID NO: 1879667
gugguuugaagcuaagaaa

SEQ ID NO: 1923567 - RNA, 19 nt, Artificial Sequence
  Description of Artificial Sequence: Synthetic oligonucleotide
  Antisense strand to SEQ ID NO: 1923566
uuucuuagcuucaaaccac

SEQ ID NO: 1923568 - RNA, 19 nt, Artificial Sequence
  Description of Artificial Sequence: Synthetic oligonucleotide
  Sense strand starting at position 2751 of SEQ ID NO: 1879667
guguauuuccucugauacc

SEQ ID NO: 1923569 - RNA, 19 nt, Artificial Sequence
  Description of Artificial Sequence: Synthetic oligonucleotide
  Antisense strand to SEQ ID NO: 1923568
gguaucagaggaaauacac

SEQ ID NO: 1923570 - RNA, 19 nt, Artificial Sequence
  Description of Artificial Sequence: Synthetic oligonucleotide
  Sense strand starting at position 2752 of SEQ ID NO: 1879667
uguauuuccucugauacca

SEQ ID NO: 1923571 - RNA, 19 nt, Artificial Sequence
  Description of Artificial Sequence: Synthetic oligonucleotide
  Antisense strand to SEQ ID NO: 1923570
ugguaucagaggaaauaca

SEQ ID NO: 1923572 - RNA, 19 nt, Artificial Sequence
  Description of Artificial Sequence: Synthetic oligonucleotide
  Sense strand starting at position 2789 of SEQ ID NO: 1879667
cagaguagacacuguauau

SEQ ID NO: 1923573 - RNA, 19 nt, Artificial Sequence
  Description of Artificial Sequence: Synthetic oligonucleotide
  Antisense strand to SEQ ID NO: 1923572
auauacagugucuacucug

SEQ ID NO: 1923574 - RNA, 19 nt, Artificial Sequence
  Description of Artificial Sequence: Synthetic oligonucleotide
  Sense strand starting at position 2868 of SEQ ID NO: 1879667
caguauguguugcuagaag

SEQ ID NO: 1923575 - RNA, 19 nt, Artificial Sequence
  Description of Artificial Sequence: Synthetic oligonucleotide
  Antisense strand to SEQ ID NO: 1923574
cuucuagcaacacauacug

SEQ ID NO: 1923576 - RNA, 19 nt, Artificial Sequence
  Description of Artificial Sequence: Synthetic oligonucleotide
  Sense strand starting at position 2920 of SEQ ID NO: 1879667
gguguuuaauucucacaac

SEQ ID NO: 1923577 - RNA, 19 nt, Artificial Sequence
  Description of Artificial Sequence: Synthetic oligonucleotide
  Antisense strand to SEQ ID NO: 1923576
guugugagaauuaaacacc

SEQ ID NO: 1923578 - RNA, 19 nt, Artificial Sequence
  Description of Artificial Sequence: Synthetic oligonucleotide
  Sense strand starting at position 3059 of SEQ ID NO: 1879667
uguguuucugcccuuguau

SEQ ID NO: 1923579 - RNA, 19 nt, Artificial Sequence
  Description of Artificial Sequence: Synthetic oligonucleotide
  Antisense strand to SEQ ID NO: 1923578
auacaagggcagaaacaca

SEQ ID NO: 1923580 - RNA, 19 nt, Artificial Sequence
  Description of Artificial Sequence: Synthetic oligonucleotide
  Sense strand starting at position 3160 of SEQ ID NO: 1879667
aggaaauuccuaggcgaua

SEQ ID NO: 1923581 - RNA, 19 nt, Artificial Sequence
  Description of Artificial Sequence: Synthetic oligonucleotide
  Antisense strand to SEQ ID NO: 1923580
uaucgccuaggaauuuccu

SEQ ID NO: 1923582 - RNA, 19 nt, Artificial Sequence
  Description of Artificial Sequence: Synthetic oligonucleotide
  Sense strand starting at position 3161 of SEQ ID NO: 1879667
ggaaauuccuaggcgauac

SEQ ID NO: 1923583 - RNA, 19 nt, Artificial Sequence
  Description of Artificial Sequence: Synthetic oligonucleotide
  Antisense strand to SEQ ID NO: 1923582
guaucgccuaggaauuucc

SEQ ID NO: 1923584 - RNA, 19 nt, Artificial Sequence
  Description of Artificial Sequence: Synthetic oligonucleotide
  Sense strand starting at position 3172 of SEQ ID NO: 1879667
ggcgauacuucugcacuga

SEQ ID NO: 1923585 - RNA, 19 nt, Artificial Sequence
  Description of Artificial Sequence: Synthetic oligonucleotide
  Antisense strand to SEQ ID NO: 1923584
ucagugcagaaguaucgcc

SEQ ID NO: 1923586 - RNA, 19 nt, Artificial Sequence
  Description of Artificial Sequence: Synthetic oligonucleotide
  Sense strand starting at position 3173 of SEQ ID NO: 1879667
gcgauacuucugcacugaa

SEQ ID NO: 1923587 - RNA, 19 nt, Artificial Sequence
  Description of Artificial Sequence: Synthetic oligonucleotide
  Antisense strand to SEQ ID NO: 1923586
uucagugcagaaguaucgc

SEQ ID NO: 1923588 - RNA, 19 nt, Artificial Sequence
  Description of Artificial Sequence: Synthetic oligonucleotide
  Sense strand starting at position 3462 of SEQ ID NO: 1879667
agggcucucagugaugaca

SEQ ID NO: 1923589 - RNA, 19 nt, Artificial Sequence
  Description of Artificial Sequence: Synthetic oligonucleotide
  Antisense strand to SEQ ID NO: 1923588
ugucaucacugagagcccu

SEQ ID NO: 1923590 - RNA, 19 nt, Artificial Sequence
  Description of Artificial Sequence: Synthetic oligonucleotide
  Sense strand starting at position 3473 of SEQ ID NO: 1879667
ugaugacaccuguagccaa

SEQ ID NO: 1923591 - RNA, 19 nt, Artificial Sequence
  Description of Artificial Sequence: Synthetic oligonucleotide
  Antisense strand to SEQ ID NO: 1923590
uuggcuacaggugucauca

SEQ ID NO: 1923592 - RNA, 19 nt, Artificial Sequence
  Description of Artificial Sequence: Synthetic oligonucleotide
  Sense strand starting at position 3498 of SEQ ID NO: 1879667
gggcuuguuaaccagguaa

SEQ ID NO: 1923593 - RNA, 19 nt, Artificial Sequence
  Description of Artificial Sequence: Synthetic oligonucleotide
  Antisense strand to SEQ ID NO: 1923592
uuaccugguuaacaagccc

SEQ ID NO: 1923594 - RNA, 19 nt, Artificial Sequence
  Description of Artificial Sequence: Synthetic oligonucleotide
  Sense strand starting at position 3500 of SEQ ID NO: 1879667
gcuuguuaaccagguaaca

SEQ ID NO: 1923595 - RNA, 19 nt, Artificial Sequence
  Description of Artificial Sequence: Synthetic oligonucleotide
  Antisense strand to SEQ ID NO: 1923594
uguuaccugguuaacaagc

SEQ ID NO: 1923596 - RNA, 19 nt, Artificial Sequence
  Description of Artificial Sequence: Synthetic oligonucleotide
  Sense strand starting at position 3523 of SEQ ID NO: 1879667
ggguuguaaggucaggagu

SEQ ID NO: 1923597 - RNA, 19 nt, Artificial Sequence
  Description of Artificial Sequence: Synthetic oligonucleotide
  Antisense strand to SEQ ID NO: 1923596
acuccugaccuuacaaccc

SEQ ID NO: 1923598 - RNA, 19 nt, Artificial Sequence
  Description of Artificial Sequence: Synthetic oligonucleotide
  Sense strand starting at position 3536 of SEQ ID NO: 1879667
aggagugaguguuuaagga

SEQ ID NO: 1923599 - RNA, 19 nt, Artificial Sequence
  Description of Artificial Sequence: Synthetic oligonucleotide
  Antisense strand to SEQ ID NO: 1923598
uccuuaaacacucacuccu

SEQ ID NO: 1923600 - RNA, 19 nt, Artificial Sequence
  Description of Artificial Sequence: Synthetic oligonucleotide
  Sense strand starting at position 3676 of SEQ ID NO: 1879667
ugagcuaucacacaggugu

SEQ ID NO: 1923601 - RNA, 19 nt, Artificial Sequence
  Description of Artificial Sequence: Synthetic oligonucleotide
  Antisense strand to SEQ ID NO: 1923600
acaccugugugauagcuca

SEQ ID NO: 1923602 - RNA, 19 nt, Artificial Sequence
  Description of Artificial Sequence: Synthetic oligonucleotide
  Sense strand starting at position 3687 of SEQ ID NO: 1879667
acaggugucccgcagugau

SEQ ID NO: 1923603 - RNA, 19 nt, Artificial Sequence
  Description of Artificial Sequence: Synthetic oligonucleotide
  Antisense strand to SEQ ID NO: 1923602
aucacugcgggacaccugu

SEQ ID NO: 1923604 - RNA, 19 nt, Artificial Sequence
  Description of Artificial Sequence: Synthetic oligonucleotide
  Sense strand starting at position 3751 of SEQ ID NO: 1879667
uugucucuucuggaauacu

SEQ ID NO: 1923605 - RNA, 19 nt, Artificial Sequence
  Description of Artificial Sequence: Synthetic oligonucleotide
  Antisense strand to SEQ ID NO: 1923604
aguauuccagaagagacaa

SEQ ID NO: 1923606 - RNA, 19 nt, Artificial Sequence
  Description of Artificial Sequence: Synthetic oligonucleotide
  Sense strand starting at position 3945 of SEQ ID NO: 1879667
cuuggucaucagugugauu

SEQ ID NO: 1923607 - RNA, 19 nt, Artificial Sequence
  Description of Artificial Sequence: Synthetic oligonucleotide
  Antisense strand to SEQ ID NO: 1923606
aaucacacugaugaccaag

SEQ ID NO: 1923608 - RNA, 19 nt, Artificial Sequence
  Description of Artificial Sequence: Synthetic oligonucleotide
  Sense strand starting at position 3947 of SEQ ID NO: 1879667
uggucaucagugugauuau

SEQ ID NO: 1923609 - RNA, 19 nt, Artificial Sequence
  Description of Artificial Sequence: Synthetic oligonucleotide
  Antisense strand to SEQ ID NO: 1923608
auaaucacacugaugacca

SEQ ID NO: 1923610 - RNA, 19 nt, Artificial Sequence
  Description of Artificial Sequence: Synthetic oligonucleotide
  Sense strand starting at position 73 of SEQ ID NO: 1879668
augagagugcuauaaacuu

SEQ ID NO: 1923611 - RNA, 19 nt, Artificial Sequence
  Description of Artificial Sequence: Synthetic oligonucleotide
  Antisense strand to SEQ ID NO: 1923610
aaguuuauagcacucucau

SEQ ID NO: 1923612 - RNA, 19 nt, Artificial Sequence
  Description of Artificial Sequence: Synthetic oligonucleotide
  Sense strand starting at position 129 of SEQ ID NO: 1879668
gcuuuaaugcugcacucaa

SEQ ID NO: 1923613 - RNA, 19 nt, Artificial Sequence
  Description of Artificial Sequence: Synthetic oligonucleotide
  Antisense strand to SEQ ID NO: 1923612
uugagugcagcauuaaagc

SEQ ID NO: 1923614 - RNA, 19 nt, Artificial Sequence
  Description of Artificial Sequence: Synthetic oligonucleotide
  Sense strand starting at position 153 of SEQ ID NO: 1879668
cacuuacucguuugaggac

SEQ ID NO: 1923615 - RNA, 19 nt, Artificial Sequence
  Description of Artificial Sequence: Synthetic oligonucleotide
  Antisense strand to SEQ ID NO: 1923614
guccucaaacgaguaagug

SEQ ID NO: 1923616 - RNA, 19 nt, Artificial Sequence
  Description of Artificial Sequence: Synthetic oligonucleotide
  Sense strand starting at position 160 of SEQ ID NO: 1879668
ucguuugaggacuggaauc

SEQ ID NO: 1923617 - RNA, 19 nt, Artificial Sequence
  Description of Artificial Sequence: Synthetic oligonucleotide
  Antisense strand to SEQ ID NO: 1923616
gauuccaguccucaaacga

SEQ ID NO: 1923618 - RNA, 19 nt, Artificial Sequence
  Description of Artificial Sequence: Synthetic oligonucleotide
  Sense strand starting at position 197 of SEQ ID NO: 1879668
aaaucugucgucuguauuu

SEQ ID NO: 1923619 - RNA, 19 nt, Artificial Sequence
  Description of Artificial Sequence: Synthetic oligonucleotide
  Antisense strand to SEQ ID NO: 1923618
aaauacagacgacagauuu

SEQ ID NO: 1923620 - RNA, 19 nt, Artificial Sequence
  Description of Artificial Sequence: Synthetic oligonucleotide
  Sense strand starting at position 203 of SEQ ID NO: 1879668
gucgucuguauuugcaaca

SEQ ID NO: 1923621 - RNA, 19 nt, Artificial Sequence
  Description of Artificial Sequence: Synthetic oligonucleotide
  Antisense strand to SEQ ID NO: 1923620
uguugcaaauacagacgac

SEQ ID NO: 1923622 - RNA, 19 nt, Artificial Sequence
  Description of Artificial Sequence: Synthetic oligonucleotide
  Sense strand starting at position 260 of SEQ ID NO: 1879668
acuguuuaauugguaggua

SEQ ID NO: 1923623 - RNA, 19 nt, Artificial Sequence
  Description of Artificial Sequence: Synthetic oligonucleotide
  Antisense strand to SEQ ID NO: 1923622
uaccuaccaauuaaacagu

SEQ ID NO: 1923624 - RNA, 19 nt, Artificial Sequence
  Description of Artificial Sequence: Synthetic oligonucleotide
  Sense strand starting at position 263 of SEQ ID NO: 1879668
guuuaauugguagguagua

SEQ ID NO: 1923625 - RNA, 19 nt, Artificial Sequence
  Description of Artificial Sequence: Synthetic oligonucleotide
  Antisense strand to SEQ ID NO: 1923624
uacuaccuaccaauuaaac

SEQ ID NO: 1923626 - RNA, 19 nt, Artificial Sequence
  Description of Artificial Sequence: Synthetic oligonucleotide
  Sense strand starting at position 297 of SEQ ID NO: 1879668
augucugaccuauagguau

SEQ ID NO: 1923627 - RNA, 19 nt, Artificial Sequence
  Description of Artificial Sequence: Synthetic oligonucleotide
  Antisense strand to SEQ ID NO: 1923626
auaccuauaggucagacau

SEQ ID NO: 1923628 - RNA, 19 nt, Artificial Sequence
  Description of Artificial Sequence: Synthetic oligonucleotide
  Sense strand starting at position 328 of SEQ ID NO: 1879668
uagccuaucucagugggaa

SEQ ID NO: 1923629 - RNA, 19 nt, Artificial Sequence
  Description of Artificial Sequence: Synthetic oligonucleotide
  Antisense strand to SEQ ID NO: 1923628
uucccacugagauaggcua

SEQ ID NO: 1923630 - RNA, 19 nt, Artificial Sequence
  Description of Artificial Sequence: Synthetic oligonucleotide
  Sense strand starting at position 329 of SEQ ID NO: 1879668
agccuaucucagugggaag

SEQ ID NO: 1923631 - RNA, 19 nt, Artificial Sequence
  Description of Artificial Sequence: Synthetic oligonucleotide
  Antisense strand to SEQ ID NO: 1923630
cuucccacugagauaggcu

SEQ ID NO: 1923632 - RNA, 19 nt, Artificial Sequence
  Description of Artificial Sequence: Synthetic oligonucleotide
  Sense strand starting at position 330 of SEQ ID NO: 1879668
gccuaucucagugggaagu

SEQ ID NO: 1923633 - RNA, 19 nt, Artificial Sequence
  Description of Artificial Sequence: Synthetic oligonucleotide
  Antisense strand to SEQ ID NO: 1923632
acuucccacugagauaggc

SEQ ID NO: 1923634 - RNA, 19 nt, Artificial Sequence
  Description of Artificial Sequence: Synthetic oligonucleotide
  Sense strand starting at position 492 of SEQ ID NO: 1879668
uggcaagucuucccagcaa

SEQ ID NO: 1923635 - RNA, 19 nt, Artificial Sequence
  Description of Artificial Sequence: Synthetic oligonucleotide
  Antisense strand to SEQ ID NO: 1923634
uugcugggaagacuugcca

SEQ ID NO: 1923636 - RNA, 19 nt, Artificial Sequence
  Description of Artificial Sequence: Synthetic oligonucleotide
  Sense strand starting at position 606 of SEQ ID NO: 1879668
guggcugauuugccaucau

SEQ ID NO: 1923637 - RNA, 19 nt, Artificial Sequence
  Description of Artificial Sequence: Synthetic oligonucleotide
  Antisense strand to SEQ ID NO: 1923636
augauggcaaaucagccac

SEQ ID NO: 1923638 - RNA, 19 nt, Artificial Sequence
  Description of Artificial Sequence: Synthetic oligonucleotide
  Sense strand starting at position 650 of SEQ ID NO: 1879668
aguucuacugaggguaguu

SEQ ID NO: 1923639 - RNA, 19 nt, Artificial Sequence
  Description of Artificial Sequence: Synthetic oligonucleotide
  Antisense strand to SEQ ID NO: 1923638
aacuacccucaguagaacu

SEQ ID NO: 1923640 - RNA, 19 nt, Artificial Sequence
  Description of Artificial Sequence: Synthetic oligonucleotide
  Sense strand starting at position 763 of SEQ ID NO: 1879668
ucuggcuaaucucugaaua

SEQ ID NO: 1923641 - RNA, 19 nt, Artificial Sequence
  Description of Artificial Sequence: Synthetic oligonucleotide
  Antisense strand to SEQ ID NO: 1923640
uauucagagauuagccaga

SEQ ID NO: 1923642 - RNA, 19 nt, Artificial Sequence
  Description of Artificial Sequence: Synthetic oligonucleotide
  Sense strand starting at position 764 of SEQ ID NO: 1879668
cuggcuaaucucugaauag

SEQ ID NO: 1923643 - RNA, 19 nt, Artificial Sequence
  Description of Artificial Sequence: Synthetic oligonucleotide
  Antisense strand to SEQ ID NO: 1923642
cuauucagagauuagccag

SEQ ID NO: 1923644 - RNA, 19 nt, Artificial Sequence
  Description of Artificial Sequence: Synthetic oligonucleotide
  Sense strand starting at position 1488 of SEQ ID NO: 1879668
gcaagaucugcacagccaa

SEQ ID NO: 1923645 - RNA, 19 nt, Artificial Sequence
  Description of Artificial Sequence: Synthetic oligonucleotide
  Antisense strand to SEQ ID NO: 1923644
uuggcugugcagaucuugc

SEQ ID NO: 1923646 - RNA, 19 nt, Artificial Sequence
  Description of Artificial Sequence: Synthetic oligonucleotide
  Sense strand starting at position 1600 of SEQ ID NO: 1879668
uauuaaggucaggaugcau

SEQ ID NO: 1923647 - RNA, 19 nt, Artificial Sequence
  Description of Artificial Sequence: Synthetic oligonucleotide
  Antisense strand to SEQ ID NO: 1923646
augcauccugaccuuaaua

SEQ ID NO: 1923648 - RNA, 19 nt, Artificial Sequence
  Description of Artificial Sequence: Synthetic oligonucleotide
  Sense strand starting at position 1972 of SEQ ID NO: 1879668
ggagaaaucggucagccug

SEQ ID NO: 1923649 - RNA, 19 nt, Artificial Sequence
  Description of Artificial Sequence: Synthetic oligonucleotide
  Antisense strand to SEQ ID NO: 1923648
caggcugaccgauuucucc

SEQ ID NO: 1923650 - RNA, 19 nt, Artificial Sequence
  Description of Artificial Sequence: Synthetic oligonucleotide
  Sense strand starting at position 2068 of SEQ ID NO: 1879668
gcaaucaacgccgaauacu

SEQ ID NO: 1923651 - RNA, 19 nt, Artificial Sequence
  Description of Artificial Sequence: Synthetic oligonucleotide
  Antisense strand to SEQ ID NO: 1923650
aguauucggcguugauugc

SEQ ID NO: 1923652 - RNA, 19 nt, Artificial Sequence
  Description of Artificial Sequence: Synthetic oligonucleotide
  Sense strand starting at position 2259 of SEQ ID NO: 1879668
gcugcuaggagucaacaga

SEQ ID NO: 1923653 - RNA, 19 nt, Artificial Sequence
  Description of Artificial Sequence: Synthetic oligonucleotide
  Antisense strand to SEQ ID NO: 1923652
ucuguugacuccuagcagc

SEQ ID NO: 1923654 - RNA, 19 nt, Artificial Sequence
  Description of Artificial Sequence: Synthetic oligonucleotide
  Sense strand starting at position 2393 of SEQ ID NO: 1879668
ucaaguucuucccuggacu

SEQ ID NO: 1923655 - RNA, 19 nt, Artificial Sequence
  Description of Artificial Sequence: Synthetic oligonucleotide
  Antisense strand to SEQ ID NO: 1923654
aguccagggaagaacuuga

SEQ ID NO: 1923656 - RNA, 19 nt, Artificial Sequence
  Description of Artificial Sequence: Synthetic oligonucleotide
  Sense strand starting at position 2583 of SEQ ID NO: 1879668
agaagaggaucucaaugaa

SEQ ID NO: 1923657 - RNA, 19 nt, Artificial Sequence
  Description of Artificial Sequence: Synthetic oligonucleotide
  Antisense strand to SEQ ID NO: 1923656
uucauugagauccucuucu

SEQ ID NO: 1923658 - RNA, 19 nt, Artificial Sequence
  Description of Artificial Sequence: Synthetic oligonucleotide
  Sense strand starting at position 2645 of SEQ ID NO: 1879668
ggagaaauaucuucuugua

SEQ ID NO: 1923659 - RNA, 19 nt, Artificial Sequence
  Description of Artificial Sequence: Synthetic oligonucleotide
  Antisense strand to SEQ ID NO: 1923658
uacaagaagauauuucucc

SEQ ID NO: 1923660 - RNA, 19 nt, Artificial Sequence
  Description of Artificial Sequence: Synthetic oligonucleotide
  Sense strand starting at position 2647 of SEQ ID NO: 1879668
agaaauaucuucuuguagu

SEQ ID NO: 1923661 - RNA, 19 nt, Artificial Sequence
  Description of Artificial Sequence: Synthetic oligonucleotide
  Antisense strand to SEQ ID NO: 1923660
acuacaagaagauauuucu

SEQ ID NO: 1923662 - RNA, 19 nt, Artificial Sequence
  Description of Artificial Sequence: Synthetic oligonucleotide
  Sense strand starting at position 2660 of SEQ ID NO: 1879668
uguaguucuacuugugaua

SEQ ID NO: 1923663 - RNA, 19 nt, Artificial Sequence
  Description of Artificial Sequence: Synthetic oligonucleotide
  Antisense strand to SEQ ID NO: 1923662
uaucacaaguagaacuaca

SEQ ID NO: 1923664 - RNA, 19 nt, Artificial Sequence
  Description of Artificial Sequence: Synthetic oligonucleotide
  Sense strand starting at position 2976 of SEQ ID NO: 1879668
acccuaucugccuguggaa

SEQ ID NO: 1923665 - RNA, 19 nt, Artificial Sequence
  Description of Artificial Sequence: Synthetic oligonucleotide
  Antisense strand to SEQ ID NO: 1923664
uuccacaggcagauagggu

SEQ ID NO: 1923666 - RNA, 19 nt, Artificial Sequence
  Description of Artificial Sequence: Synthetic oligonucleotide
  Sense strand starting at position 3171 of SEQ ID NO: 1879668
acugguacccuauaauugu

SEQ ID NO: 1923667 - RNA, 19 nt, Artificial Sequence
  Description of Artificial Sequence: Synthetic oligonucleotide
  Antisense strand to SEQ ID NO: 1923666
acaauuauaggguaccagu

SEQ ID NO: 1923668 - RNA, 19 nt, Artificial Sequence
  Description of Artificial Sequence: Synthetic oligonucleotide
  Sense strand starting at position 3186 of SEQ ID NO: 1879668
uuguauuaagcagauaauc

SEQ ID NO: 1923669 - RNA, 19 nt, Artificial Sequence
  Description of Artificial Sequence: Synthetic oligonucleotide
  Antisense strand to SEQ ID NO: 1923668
gauuaucugcuuaauacaa

SEQ ID NO: 1923670 - RNA, 19 nt, Artificial Sequence
  Description of Artificial Sequence: Synthetic oligonucleotide
  Sense strand starting at position 3312 of SEQ ID NO: 1879668
gugguuugaagcuaagaaa

SEQ ID NO: 1923671 - RNA, 19 nt, Artificial Sequence
  Description of Artificial Sequence: Synthetic oligonucleotide
  Antisense strand to SEQ ID NO: 1923670
uuucuuagcuucaaaccac

SEQ ID NO: 1923672 - RNA, 19 nt, Artificial Sequence
  Description of Artificial Sequence: Synthetic oligonucleotide
  Sense strand starting at position 3335 of SEQ ID NO: 1879668
guguauuuccucugauacc

SEQ ID NO: 1923673 - RNA, 19 nt, Artificial Sequence
  Description of Artificial Sequence: Synthetic oligonucleotide
  Antisense strand to SEQ ID NO: 1923672
gguaucagaggaaauacac

SEQ ID NO: 1923674 - RNA, 19 nt, Artificial Sequence
  Description of Artificial Sequence: Synthetic oligonucleotide
  Sense strand starting at position 3336 of SEQ ID NO: 1879668
uguauuuccucugauacca

SEQ ID NO: 1923675 - RNA, 19 nt, Artificial Sequence
  Description of Artificial Sequence: Synthetic oligonucleotide
  Antisense strand to SEQ ID NO: 1923674
ugguaucagaggaaauaca

SEQ ID NO: 1923676 - RNA, 19 nt, Artificial Sequence
  Description of Artificial Sequence: Synthetic oligonucleotide
  Sense strand starting at position 3373 of SEQ ID NO: 1879668
cagaguagacacuguauau

SEQ ID NO: 1923677 - RNA, 19 nt, Artificial Sequence
  Description of Artificial Sequence: Synthetic oligonucleotide
  Antisense strand to SEQ ID NO: 1923676
auauacagugucuacucug

SEQ ID NO: 1923678 - RNA, 19 nt, Artificial Sequence
  Description of Artificial Sequence: Synthetic oligonucleotide
  Sense strand starting at position 3452 of SEQ ID NO: 1879668
caguauguguugcuagaag

SEQ ID NO: 1923679 - RNA, 19 nt, Artificial Sequence
  Description of Artificial Sequence: Synthetic oligonucleotide
  Antisense strand to SEQ ID NO: 1923678
cuucuagcaacacauacug

SEQ ID NO: 1923680 - RNA, 19 nt, Artificial Sequence
  Description of Artificial Sequence: Synthetic oligonucleotide
  Sense strand starting at position 3504 of SEQ ID NO: 1879668
gguguuuaauucucacaac

SEQ ID NO: 1923681 - RNA, 19 nt, Artificial Sequence
  Description of Artificial Sequence: Synthetic oligonucleotide
  Antisense strand to SEQ ID NO: 1923680
guugugagaauuaaacacc

SEQ ID NO: 1923682 - RNA, 19 nt, Artificial Sequence
  Description of Artificial Sequence: Synthetic oligonucleotide
  Sense strand starting at position 3643 of SEQ ID NO: 1879668
uguguuucugcccuuguau

SEQ ID NO: 1923683 - RNA, 19 nt, Artificial Sequence
  Description of Artificial Sequence: Synthetic oligonucleotide
  Antisense strand to SEQ ID NO: 1923682
auacaagggcagaaacaca

SEQ ID NO: 1923684 - RNA, 19 nt, Artificial Sequence
  Description of Artificial Sequence: Synthetic oligonucleotide
  Sense strand starting at position 3744 of SEQ ID NO: 1879668
aggaaauuccuaggcgaua

SEQ ID NO: 1923685 - RNA, 19 nt, Artificial Sequence
  Description of Artificial Sequence: Synthetic oligonucleotide
  Antisense strand to SEQ ID NO: 1923684
uaucgccuaggaauuuccu

SEQ ID NO: 1923686 - RNA, 19 nt, Artificial Sequence
  Description of Artificial Sequence: Synthetic oligonucleotide
  Sense strand starting at position 3745 of SEQ ID NO: 1879668
ggaaauuccuaggcgauac

SEQ ID NO: 1923687 - RNA, 19 nt, Artificial Sequence
  Description of Artificial Sequence: Synthetic oligonucleotide
  Antisense strand to SEQ ID NO: 1923686
guaucgccuaggaauuucc

SEQ ID NO: 1923688 - RNA, 19 nt, Artificial Sequence
  Description of Artificial Sequence: Synthetic oligonucleotide
  Sense strand starting at position 3757 of SEQ ID NO: 1879668
gcgauacuucugcacugaa

SEQ ID NO: 1923689 - RNA, 19 nt, Artificial Sequence
  Description of Artificial Sequence: Synthetic oligonucleotide
  Antisense strand to SEQ ID NO: 1923688
uucagugcagaaguaucgc

SEQ ID NO: 1923690 - RNA, 19 nt, Artificial Sequence
  Description of Artificial Sequence: Synthetic oligonucleotide
  Sense strand starting at position 249 of SEQ ID NO: 1879669
ugguacaaccuuuaaguau

SEQ ID NO: 1923691 - RNA, 19 nt, Artificial Sequence
  Description of Artificial Sequence: Synthetic oligonucleotide
  Antisense strand to SEQ ID NO: 1923690
auacuuaaagguuguacca

SEQ ID NO: 1923692 - RNA, 19 nt, Artificial Sequence
  Description of Artificial Sequence: Synthetic oligonucleotide
  Sense strand starting at position 499 of SEQ ID NO: 1879669
gagaaagaguccucugauu

SEQ ID NO: 1923693 - RNA, 19 nt, Artificial Sequence
  Description of Artificial Sequence: Synthetic oligonucleotide
  Antisense strand to SEQ ID NO: 1923692
aaucagaggacucuuucuc

SEQ ID NO: 1923694 - RNA, 19 nt, Artificial Sequence
  Description of Artificial Sequence: Synthetic oligonucleotide
  Sense strand starting at position 501 of SEQ ID NO: 1879669
gaaagaguccucugauuac

SEQ ID NO: 1923695 - RNA, 19 nt, Artificial Sequence
  Description of Artificial Sequence: Synthetic oligonucleotide
  Antisense strand to SEQ ID NO: 1923694
guaaucagaggacucuuuc

SEQ ID NO: 1923696 - RNA, 19 nt, Artificial Sequence
  Description of Artificial Sequence: Synthetic oligonucleotide
  Sense strand starting at position 504 of SEQ ID NO: 1879669
agaguccucugauuacuau

SEQ ID NO: 1923697 - RNA, 19 nt, Artificial Sequence
  Description of Artificial Sequence: Synthetic oligonucleotide
  Antisense strand to SEQ ID NO: 1923696
auaguaaucagaggacucu

SEQ ID NO: 1923698 - RNA, 19 nt, Artificial Sequence
  Description of Artificial Sequence: Synthetic oligonucleotide
  Sense strand starting at position 592 of SEQ ID NO: 1879669
uggcaaugauaccuaaucu

SEQ ID NO: 1923699 - RNA, 19 nt, Artificial Sequence
  Description of Artificial Sequence: Synthetic oligonucleotide
  Antisense strand to SEQ ID NO: 1923698
agauuagguaucauugcca

SEQ ID NO: 1923700 - RNA, 19 nt, Artificial Sequence
  Description of Artificial Sequence: Synthetic oligonucleotide
  Sense strand starting at position 880 of SEQ ID NO: 1879669
uccagugcucuauaaugau

SEQ ID NO: 1923701 - RNA, 19 nt, Artificial Sequence
  Description of Artificial Sequence: Synthetic oligonucleotide
  Antisense strand to SEQ ID NO: 1923700
aucauuauagagcacugga

SEQ ID NO: 1923702 - RNA, 19 nt, Artificial Sequence
  Description of Artificial Sequence: Synthetic oligonucleotide
  Sense strand starting at position 1318 of SEQ ID NO: 1879669
gagaccaguuaugcuaaau

SEQ ID NO: 1923703 - RNA, 19 nt, Artificial Sequence
  Description of Artificial Sequence: Synthetic oligonucleotide
  Antisense strand to SEQ ID NO: 1923702
auuuagcauaacuggucuc

SEQ ID NO: 1923704 - RNA, 19 nt, Artificial Sequence
  Description of Artificial Sequence: Synthetic oligonucleotide
  Sense strand starting at position 1464 of SEQ ID NO: 1879669
ccagcagugcuugucagua

SEQ ID NO: 1923705 - RNA, 19 nt, Artificial Sequence
  Description of Artificial Sequence: Synthetic oligonucleotide
  Antisense strand to SEQ ID NO: 1923704
uacugacaagcacugcugg

SEQ ID NO: 1923706 - RNA, 19 nt, Artificial Sequence
  Description of Artificial Sequence: Synthetic oligonucleotide
  Sense strand starting at position 1491 of SEQ ID NO: 1879669
caaggccugugaucugaga

SEQ ID NO: 1923707 - RNA, 19 nt, Artificial Sequence
  Description of Artificial Sequence: Synthetic oligonucleotide
  Antisense strand to SEQ ID NO: 1923706
ucucagaucacaggccuug

SEQ ID NO: 1923708 - RNA, 19 nt, Artificial Sequence
  Description of Artificial Sequence: Synthetic oligonucleotide
  Sense strand starting at position 1493 of SEQ ID NO: 1879669
aggccugugaucugagaac

SEQ ID NO: 1923709 - RNA, 19 nt, Artificial Sequence
  Description of Artificial Sequence: Synthetic oligonucleotide
  Antisense strand to SEQ ID NO: 1923708
guucucagaucacaggccu

SEQ ID NO: 1923710 - RNA, 19 nt, Artificial Sequence
  Description of Artificial Sequence: Synthetic oligonucleotide
  Sense strand starting at position 1502 of SEQ ID NO: 1879669
aucugagaacagugcuaau

SEQ ID NO: 1923711 - RNA, 19 nt, Artificial Sequence
  Description of Artificial Sequence: Synthetic oligonucleotide
  Antisense strand to SEQ ID NO: 1923710
auuagcacuguucucagau

SEQ ID NO: 1923712 - RNA, 19 nt, Artificial Sequence
  Description of Artificial Sequence: Synthetic oligonucleotide
  Sense strand starting at position 1519 of SEQ ID NO: 1879669
auugcaaguguugggaaga

SEQ ID NO: 1923713 - RNA, 19 nt, Artificial Sequence
  Description of Artificial Sequence: Synthetic oligonucleotide
  Antisense strand to SEQ ID NO: 1923712
ucuucccaacacuugcaau

SEQ ID NO: 1923714 - RNA, 19 nt, Artificial Sequence
  Description of Artificial Sequence: Synthetic oligonucleotide
  Sense strand starting at position 1524 of SEQ ID NO: 1879669
aaguguugggaagaugcua

SEQ ID NO: 1923715 - RNA, 19 nt, Artificial Sequence
  Description of Artificial Sequence: Synthetic oligonucleotide
  Antisense strand to SEQ ID NO: 1923714
uagcaucuucccaacacuu

SEQ ID NO: 1923716 - RNA, 19 nt, Artificial Sequence
  Description of Artificial Sequence: Synthetic oligonucleotide
  Sense strand starting at position 1987 of SEQ ID NO: 1879669
acacuacagcaugguuaua

SEQ ID NO: 1923717 - RNA, 19 nt, Artificial Sequence
  Description of Artificial Sequence: Synthetic oligonucleotide
  Antisense strand to SEQ ID NO: 1923716
uauaaccaugcuguagugu

SEQ ID NO: 1923718 - RNA, 19 nt, Artificial Sequence
  Description of Artificial Sequence: Synthetic oligonucleotide
  Sense strand starting at position 2066 of SEQ ID NO: 1879669
gagugaccugugugacaca

SEQ ID NO: 1923719 - RNA, 19 nt, Artificial Sequence
  Description of Artificial Sequence: Synthetic oligonucleotide
  Antisense strand to SEQ ID NO: 1923718
ugugucacacaggucacuc

SEQ ID NO: 1923720 - RNA, 19 nt, Artificial Sequence
  Description of Artificial Sequence: Synthetic oligonucleotide
  Sense strand starting at position 2342 of SEQ ID NO: 1879669
cuguccucacaguauacau

SEQ ID NO: 1923721 - RNA, 19 nt, Artificial Sequence
  Description of Artificial Sequence: Synthetic oligonucleotide
  Antisense strand to SEQ ID NO: 1923720
auguauacugugaggacag

SEQ ID NO: 1923722 - RNA, 19 nt, Artificial Sequence
  Description of Artificial Sequence: Synthetic oligonucleotide
  Sense strand starting at position 2532 of SEQ ID NO: 1879669
gaaaguaguucucugaauc

SEQ ID NO: 1923723 - RNA, 19 nt, Artificial Sequence
  Description of Artificial Sequence: Synthetic oligonucleotide
  Antisense strand to SEQ ID NO: 1923722
gauucagagaacuacuuuc

SEQ ID NO: 1923724 - RNA, 19 nt, Artificial Sequence
  Description of Artificial Sequence: Synthetic oligonucleotide
  Sense strand starting at position 2548 of SEQ ID NO: 1879669
auccaacuugcugauauga

SEQ ID NO: 1923725 - RNA, 19 nt, Artificial Sequence
  Description of Artificial Sequence: Synthetic oligonucleotide
  Antisense strand to SEQ ID NO: 1923724
ucauaucagcaaguuggau

SEQ ID NO: 1923726 - RNA, 19 nt, Artificial Sequence
  Description of Artificial Sequence: Synthetic oligonucleotide
  Sense strand starting at position 2681 of SEQ ID NO: 1879669
guggaacagagcugaguau

SEQ ID NO: 1923727 - RNA, 19 nt, Artificial Sequence
  Description of Artificial Sequence: Synthetic oligonucleotide
  Antisense strand to SEQ ID NO: 1923726
auacucagcucuguuccac

SEQ ID NO: 1923728 - RNA, 19 nt, Artificial Sequence
  Description of Artificial Sequence: Synthetic oligonucleotide
  Sense strand starting at position 2761 of SEQ ID NO: 1879669
cugagaaacaugggucucu

SEQ ID NO: 1923729 - RNA, 19 nt, Artificial Sequence
  Description of Artificial Sequence: Synthetic oligonucleotide
  Antisense strand to SEQ ID NO: 1923728
agagacccauguuucucag

SEQ ID NO: 1923730 - RNA, 19 nt, Artificial Sequence
  Description of Artificial Sequence: Synthetic oligonucleotide
  Sense strand starting at position 2780 of SEQ ID NO: 1879669
gcaugacaugguuacuuga

SEQ ID NO: 1923731 - RNA, 19 nt, Artificial Sequence
  Description of Artificial Sequence: Synthetic oligonucleotide
  Antisense strand to SEQ ID NO: 1923730
ucaaguaaccaugucaugc

SEQ ID NO: 1923732 - RNA, 19 nt, Artificial Sequence
  Description of Artificial Sequence: Synthetic oligonucleotide
  Sense strand starting at position 2782 of SEQ ID NO: 1879669
augacaugguuacuugaca

SEQ ID NO: 1923733 - RNA, 19 nt, Artificial Sequence
  Description of Artificial Sequence: Synthetic oligonucleotide
  Antisense strand to SEQ ID NO: 1923732
ugucaaguaaccaugucau

SEQ ID NO: 1923734 - RNA, 19 nt, Artificial Sequence
  Description of Artificial Sequence: Synthetic oligonucleotide
  Sense strand starting at position 2837 of SEQ ID NO: 1879669
cuggguuucuaaguuaaua

SEQ ID NO: 1923735 - RNA, 19 nt, Artificial Sequence
  Description of Artificial Sequence: Synthetic oligonucleotide
  Antisense strand to SEQ ID NO: 1923734
uauuaacuuagaaacccag

SEQ ID NO: 1923736 - RNA, 19 nt, Artificial Sequence
  Description of Artificial Sequence: Synthetic oligonucleotide
  Sense strand starting at position 3017 of SEQ ID NO: 1879669
aaauaaaugucagccugga

SEQ ID NO: 1923737 - RNA, 19 nt, Artificial Sequence
  Description of Artificial Sequence: Synthetic oligonucleotide
  Antisense strand to SEQ ID NO: 1923736
uccaggcugacauuuauuu

SEQ ID NO: 1923738 - RNA, 19 nt, Artificial Sequence
  Description of Artificial Sequence: Synthetic oligonucleotide
  Sense strand starting at position 3021 of SEQ ID NO: 1879669
aaaugucagccuggaaacu

SEQ ID NO: 1923739 - RNA, 19 nt, Artificial Sequence
  Description of Artificial Sequence: Synthetic oligonucleotide
  Antisense strand to SEQ ID NO: 1923738
aguuuccaggcugacauuu

SEQ ID NO: 1923740 - RNA, 19 nt, Artificial Sequence
  Description of Artificial Sequence: Synthetic oligonucleotide
  Sense strand starting at position 3022 of SEQ ID NO: 1879669
aaugucagccuggaaacua

SEQ ID NO: 1923741 - RNA, 19 nt, Artificial Sequence
  Description of Artificial Sequence: Synthetic oligonucleotide
  Antisense strand to SEQ ID NO: 1923740
uaguuuccaggcugacauu

SEQ ID NO: 1923742 - RNA, 19 nt, Artificial Sequence
  Description of Artificial Sequence: Synthetic oligonucleotide
  Sense strand starting at position 3220 of SEQ ID NO: 1879669
uggguaaugagaggguaua

SEQ ID NO: 1923743 - RNA, 19 nt, Artificial Sequence
  Description of Artificial Sequence: Synthetic oligonucleotide
  Antisense strand to SEQ ID NO: 1923742
uauacccucucauuaccca

SEQ ID NO: 1923744 - RNA, 19 nt, Artificial Sequence
  Description of Artificial Sequence: Synthetic oligonucleotide
  Sense strand starting at position 3568 of SEQ ID NO: 1879669
aggcacaacuguucucaaa

SEQ ID NO: 1923745 - RNA, 19 nt, Artificial Sequence
  Description of Artificial Sequence: Synthetic oligonucleotide
  Antisense strand to SEQ ID NO: 1923744
uuugagaacaguugugccu

SEQ ID NO: 1923746 - RNA, 19 nt, Artificial Sequence
  Description of Artificial Sequence: Synthetic oligonucleotide
  Sense strand starting at position 3578 of SEQ ID NO: 1879669
guucucaaaucacuggaau

SEQ ID NO: 1923747 - RNA, 19 nt, Artificial Sequence
  Description of Artificial Sequence: Synthetic oligonucleotide
  Antisense strand to SEQ ID NO: 1923746
auuccagugauuugagaac

SEQ ID NO: 1923748 - RNA, 19 nt, Artificial Sequence
  Description of Artificial Sequence: Synthetic oligonucleotide
  Sense strand starting at position 3579 of SEQ ID NO: 1879669
uucucaaaucacuggaaug

SEQ ID NO: 1923749 - RNA, 19 nt, Artificial Sequence
  Description of Artificial Sequence: Synthetic oligonucleotide
  Antisense strand to SEQ ID NO: 1923748
cauuccagugauuugagaa

SEQ ID NO: 1923750 - RNA, 19 nt, Artificial Sequence
  Description of Artificial Sequence: Synthetic oligonucleotide
  Sense strand starting at position 3616 of SEQ ID NO: 1879669
gcucuucugcauuaugaag

SEQ ID NO: 1923751 - RNA, 19 nt, Artificial Sequence
  Description of Artificial Sequence: Synthetic oligonucleotide
  Antisense strand to SEQ ID NO: 1923750
cuucauaaugcagaagagc

SEQ ID NO: 1923752 - RNA, 19 nt, Artificial Sequence
  Description of Artificial Sequence: Synthetic oligonucleotide
  Sense strand starting at position 3622 of SEQ ID NO: 1879669
cugcauuaugaagacucau

SEQ ID NO: 1923753 - RNA, 19 nt, Artificial Sequence
  Description of Artificial Sequence: Synthetic oligonucleotide
  Antisense strand to SEQ ID NO: 1923752
augagucuucauaaugcag

SEQ ID NO: 1923754 - RNA, 19 nt, Artificial Sequence
  Description of Artificial Sequence: Synthetic oligonucleotide
  Sense strand starting at position 3672 of SEQ ID NO: 1879669
ugauuaugcuugguuuaaa

SEQ ID NO: 1923755 - RNA, 19 nt, Artificial Sequence
  Description of Artificial Sequence: Synthetic oligonucleotide
  Antisense strand to SEQ ID NO: 1923754
uuuaaaccaagcauaauca

SEQ ID NO: 1923756 - RNA, 19 nt, Artificial Sequence
  Description of Artificial Sequence: Synthetic oligonucleotide
  Sense strand starting at position 3673 of SEQ ID NO: 1879669
gauuaugcuugguuuaaag

SEQ ID NO: 1923757 - RNA, 19 nt, Artificial Sequence
  Description of Artificial Sequence: Synthetic oligonucleotide
  Antisense strand to SEQ ID NO: 1923756
cuuuaaaccaagcauaauc

SEQ ID NO: 1923758 - RNA, 19 nt, Artificial Sequence
  Description of Artificial Sequence: Synthetic oligonucleotide
  Sense strand starting at position 3675 of SEQ ID NO: 1879669
uuaugcuugguuuaaagaa

SEQ ID NO: 1923759 - RNA, 19 nt, Artificial Sequence
  Description of Artificial Sequence: Synthetic oligonucleotide
  Antisense strand to SEQ ID NO: 1923758
uucuuuaaaccaagcauaa

SEQ ID NO: 1923760 - RNA, 19 nt, Artificial Sequence
  Description of Artificial Sequence: Synthetic oligonucleotide
  Sense strand starting at position 3683 of SEQ ID NO: 1879669
gguuuaaagaaauggguga

SEQ ID NO: 1923761 - RNA, 19 nt, Artificial Sequence
  Description of Artificial Sequence: Synthetic oligonucleotide
  Antisense strand to SEQ ID NO: 1923760
ucacccauuucuuuaaacc

SEQ ID NO: 1923762 - RNA, 19 nt, Artificial Sequence
  Description of Artificial Sequence: Synthetic oligonucleotide
  Sense strand starting at position 3828 of SEQ ID NO: 1879669
ucucaaguaucuuugagaa

SEQ ID NO: 1923763 - RNA, 19 nt, Artificial Sequence
  Description of Artificial Sequence: Synthetic oligonucleotide
  Antisense strand to SEQ ID NO: 1923762
uucucaaagauacuugaga

SEQ ID NO: 1923764 - RNA, 19 nt, Artificial Sequence
  Description of Artificial Sequence: Synthetic oligonucleotide
  Sense strand starting at position 3851 of SEQ ID NO: 1879669
gggccuuggacucacaauu

SEQ ID NO: 1923765 - RNA, 19 nt, Artificial Sequence
  Description of Artificial Sequence: Synthetic oligonucleotide
  Antisense strand to SEQ ID NO: 1923764
aauugugaguccaaggccc

SEQ ID NO: 1923766 - RNA, 19 nt, Artificial Sequence
  Description of Artificial Sequence: Synthetic oligonucleotide
  Sense strand starting at position 3921 of SEQ ID NO: 1879669
gcagaacaaugcuuuaaug

SEQ ID NO: 1923767 - RNA, 19 nt, Artificial Sequence
  Description of Artificial Sequence: Synthetic oligonucleotide
  Antisense strand to SEQ ID NO: 1923766
cauuaaagcauuguucugc

SEQ ID NO: 1923768 - RNA, 19 nt, Artificial Sequence
  Description of Artificial Sequence: Synthetic oligonucleotide
  Sense strand starting at position 3930 of SEQ ID NO: 1879669
ugcuuuaaugacuggauca

SEQ ID NO: 1923769 - RNA, 19 nt, Artificial Sequence
  Description of Artificial Sequence: Synthetic oligonucleotide
  Antisense strand to SEQ ID NO: 1923768
ugauccagucauuaaagca

SEQ ID NO: 1923770 - RNA, 19 nt, Artificial Sequence
  Description of Artificial Sequence: Synthetic oligonucleotide
  Sense strand starting at position 88 of SEQ ID NO: 1879670
aaauaaaugucagccugga

SEQ ID NO: 1923771 - RNA, 19 nt, Artificial Sequence
  Description of Artificial Sequence: Synthetic oligonucleotide
  Antisense strand to SEQ ID NO: 1923770
uccaggcugacauuuauuu

SEQ ID NO: 1923772 - RNA, 19 nt, Artificial Sequence
  Description of Artificial Sequence: Synthetic oligonucleotide
  Sense strand starting at position 92 of SEQ ID NO: 1879670
aaaugucagccuggaaacu

SEQ ID NO: 1923773 - RNA, 19 nt, Artificial Sequence
  Description of Artificial Sequence: Synthetic oligonucleotide
  Antisense strand to SEQ ID NO: 1923772
aguuuccaggcugacauuu

SEQ ID NO: 1923774 - RNA, 19 nt, Artificial Sequence
  Description of Artificial Sequence: Synthetic oligonucleotide
  Sense strand starting at position 93 of SEQ ID NO: 1879670
aaugucagccuggaaacua

SEQ ID NO: 1923775 - RNA, 19 nt, Artificial Sequence
  Description of Artificial Sequence: Synthetic oligonucleotide
  Antisense strand to SEQ ID NO: 1923774
uaguuuccaggcugacauu

SEQ ID NO: 1923776 - RNA, 19 nt, Artificial Sequence
  Description of Artificial Sequence: Synthetic oligonucleotide
  Sense strand starting at position 291 of SEQ ID NO: 1879670
uggguaaugagaggguaua

SEQ ID NO: 1923777 - RNA, 19 nt, Artificial Sequence
  Description of Artificial Sequence: Synthetic oligonucleotide
  Antisense strand to SEQ ID NO: 1923776
uauacccucucauuaccca

SEQ ID NO: 1923778 - RNA, 19 nt, Artificial Sequence
  Description of Artificial Sequence: Synthetic oligonucleotide
  Sense strand starting at position 639 of SEQ ID NO: 1879670
aggcacaacuguucucaaa

SEQ ID NO: 1923779 - RNA, 19 nt, Artificial Sequence
  Description of Artificial Sequence: Synthetic oligonucleotide
  Antisense strand to SEQ ID NO: 1923778
uuugagaacaguugugccu

SEQ ID NO: 1923780 - RNA, 19 nt, Artificial Sequence
  Description of Artificial Sequence: Synthetic oligonucleotide
  Sense strand starting at position 649 of SEQ ID NO: 1879670
guucucaaaucacuggaau

SEQ ID NO: 1923781 - RNA, 19 nt, Artificial Sequence
  Description of Artificial Sequence: Synthetic oligonucleotide
  Antisense strand to SEQ ID NO: 1923780
auuccagugauuugagaac

SEQ ID NO: 1923782 - RNA, 19 nt, Artificial Sequence
  Description of Artificial Sequence: Synthetic oligonucleotide
  Sense strand starting at position 650 of SEQ ID NO: 1879670
uucucaaaucacuggaaug

SEQ ID NO: 1923783 - RNA, 19 nt, Artificial Sequence
  Description of Artificial Sequence: Synthetic oligonucleotide
  Antisense strand to SEQ ID NO: 1923782
cauuccagugauuugagaa

SEQ ID NO: 1923784 - RNA, 19 nt, Artificial Sequence
  Description of Artificial Sequence: Synthetic oligonucleotide
  Sense strand starting at position 693 of SEQ ID NO: 1879670
cugcauuaugaagacucau

SEQ ID NO: 1923785 - RNA, 19 nt, Artificial Sequence
  Description of Artificial Sequence: Synthetic oligonucleotide
  Antisense strand to SEQ ID NO: 1923784
augagucuucauaaugcag

SEQ ID NO: 1923786 - RNA, 19 nt, Artificial Sequence
  Description of Artificial Sequence: Synthetic oligonucleotide
  Sense strand starting at position 746 of SEQ ID NO: 1879670
uuaugcuugguuuaaagaa

SEQ ID NO: 1923787 - RNA, 19 nt, Artificial Sequence
  Description of Artificial Sequence: Synthetic oligonucleotide
  Antisense strand to SEQ ID NO: 1923786
uucuuuaaaccaagcauaa

SEQ ID NO: 1923788 - RNA, 19 nt, Artificial Sequence
  Description of Artificial Sequence: Synthetic oligonucleotide
  Sense strand starting at position 754 of SEQ ID NO: 1879670
gguuuaaagaaauggguga

SEQ ID NO: 1923789 - RNA, 19 nt, Artificial Sequence
  Description of Artificial Sequence: Synthetic oligonucleotide
  Antisense strand to SEQ ID NO: 1923788
ucacccauuucuuuaaacc

SEQ ID NO: 1923790 - RNA, 19 nt, Artificial Sequence
  Description of Artificial Sequence: Synthetic oligonucleotide
  Sense strand starting at position 899 of SEQ ID NO: 1879670
ucucaaguaucuuugagaa

SEQ ID NO: 1923791 - RNA, 19 nt, Artificial Sequence
  Description of Artificial Sequence: Synthetic oligonucleotide
  Antisense strand to SEQ ID NO: 1923790
uucucaaagauacuugaga

SEQ ID NO: 1923792 - RNA, 19 nt, Artificial Sequence
  Description of Artificial Sequence: Synthetic oligonucleotide
  Sense strand starting at position 922 of SEQ ID NO: 1879670
gggccuuggacucacaauu

SEQ ID NO: 1923793 - RNA, 19 nt, Artificial Sequence
  Description of Artificial Sequence: Synthetic oligonucleotide
  Antisense strand to SEQ ID NO: 1923792
aauugugaguccaaggccc

SEQ ID NO: 1923794 - RNA, 19 nt, Artificial Sequence
  Description of Artificial Sequence: Synthetic oligonucleotide
  Sense strand starting at position 992 of SEQ ID NO: 1879670
gcagaacaaugcuuuaaug

SEQ ID NO: 1923795 - RNA, 19 nt, Artificial Sequence
  Description of Artificial Sequence: Synthetic oligonucleotide
  Antisense strand to SEQ ID NO: 1923794
cauuaaagcauuguucugc

SEQ ID NO: 1923796 - RNA, 19 nt, Artificial Sequence
  Description of Artificial Sequence: Synthetic oligonucleotide
  Sense strand starting at position 1001 of SEQ ID NO: 1879670
ugcuuuaaugacuggauca

SEQ ID NO: 1923797 - RNA, 19 nt, Artificial Sequence
  Description of Artificial Sequence: Synthetic oligonucleotide
  Antisense strand to SEQ ID NO: 1923796
ugauccagucauuaaagca

SEQ ID NO: 1923798 - RNA, 19 nt, Artificial Sequence
  Description of Artificial Sequence: Synthetic oligonucleotide
  Sense strand starting at position 1385 of SEQ ID NO: 1879670
gcagcagcugucccgaaua

SEQ ID NO: 1923799 - RNA, 19 nt, Artificial Sequence
  Description of Artificial Sequence: Synthetic oligonucleotide
  Antisense strand to SEQ ID NO: 1923798
uauucgggacagcugcugc

SEQ ID NO: 1923800 - RNA, 19 nt, Artificial Sequence
  Description of Artificial Sequence: Synthetic oligonucleotide
  Sense strand starting at position 1522 of SEQ ID NO: 1879670
ggaauaaggagcuguauga

SEQ ID NO: 1923801 - RNA, 19 nt, Artificial Sequence
  Description of Artificial Sequence: Synthetic oligonucleotide
  Antisense strand to SEQ ID NO: 1923800
ucauacagcuccuuauucc

SEQ ID NO: 1923802 - RNA, 19 nt, Artificial Sequence
  Description of Artificial Sequence: Synthetic oligonucleotide
  Sense strand starting at position 1643 of SEQ ID NO: 1879670
gaguuagcacaaugagagu

SEQ ID NO: 1923803 - RNA, 19 nt, Artificial Sequence
  Description of Artificial Sequence: Synthetic oligonucleotide
  Antisense strand to SEQ ID NO: 1923802
acucucauugugcuaacuc

SEQ ID NO: 1923804 - RNA, 19 nt, Artificial Sequence
  Description of Artificial Sequence: Synthetic oligonucleotide
  Sense strand starting at position 1649 of SEQ ID NO: 1879670
gcacaaugagagugagcaa

SEQ ID NO: 1923805 - RNA, 19 nt, Artificial Sequence
  Description of Artificial Sequence: Synthetic oligonucleotide
  Antisense strand to SEQ ID NO: 1923804
uugcucacucucauugugc

SEQ ID NO: 1923806 - RNA, 19 nt, Artificial Sequence
  Description of Artificial Sequence: Synthetic oligonucleotide
  Sense strand starting at position 1746 of SEQ ID NO: 1879670
aaggaaagcagguguauga

SEQ ID NO: 1923807 - RNA, 19 nt, Artificial Sequence
  Description of Artificial Sequence: Synthetic oligonucleotide
  Antisense strand to SEQ ID NO: 1923806
ucauacaccugcuuuccuu

SEQ ID NO: 1923808 - RNA, 19 nt, Artificial Sequence
  Description of Artificial Sequence: Synthetic oligonucleotide
  Sense strand starting at position 1761 of SEQ ID NO: 1879670
augauacucuuuguucuga

SEQ ID NO: 1923809 - RNA, 19 nt, Artificial Sequence
  Description of Artificial Sequence: Synthetic oligonucleotide
  Antisense strand to SEQ ID NO: 1923808
ucagaacaaagaguaucau

SEQ ID NO: 1923810 - RNA, 19 nt, Artificial Sequence
  Description of Artificial Sequence: Synthetic oligonucleotide
  Sense strand starting at position 1762 of SEQ ID NO: 1879670
ugauacucuuuguucugaa

SEQ ID NO: 1923811 - RNA, 19 nt, Artificial Sequence
  Description of Artificial Sequence: Synthetic oligonucleotide
  Antisense strand to SEQ ID NO: 1923810
uucagaacaaagaguauca

SEQ ID NO: 1923812 - RNA, 19 nt, Artificial Sequence
  Description of Artificial Sequence: Synthetic oligonucleotide
  Sense strand starting at position 1769 of SEQ ID NO: 1879670
cuuuguucugaaggaagau

SEQ ID NO: 1923813 - RNA, 19 nt, Artificial Sequence
  Description of Artificial Sequence: Synthetic oligonucleotide
  Antisense strand to SEQ ID NO: 1923812
aucuuccuucagaacaaag

SEQ ID NO: 1923814 - RNA, 19 nt, Artificial Sequence
  Description of Artificial Sequence: Synthetic oligonucleotide
  Sense strand starting at position 1782 of SEQ ID NO: 1879670
gaagauaaauggccugagu

SEQ ID NO: 1923815 - RNA, 19 nt, Artificial Sequence
  Description of Artificial Sequence: Synthetic oligonucleotide
  Antisense strand to SEQ ID NO: 1923814
acucaggccauuuaucuuc

SEQ ID NO: 1923816 - RNA, 19 nt, Artificial Sequence
  Description of Artificial Sequence: Synthetic oligonucleotide
  Sense strand starting at position 1784 of SEQ ID NO: 1879670
agauaaauggccugaguuc

SEQ ID NO: 1923817 - RNA, 19 nt, Artificial Sequence
  Description of Artificial Sequence: Synthetic oligonucleotide
  Antisense strand to SEQ ID NO: 1923816
gaacucaggccauuuaucu

SEQ ID NO: 1923818 - RNA, 19 nt, Artificial Sequence
  Description of Artificial Sequence: Synthetic oligonucleotide
  Sense strand starting at position 1785 of SEQ ID NO: 1879670
gauaaauggccugaguucu

SEQ ID NO: 1923819 - RNA, 19 nt, Artificial Sequence
  Description of Artificial Sequence: Synthetic oligonucleotide
  Antisense strand to SEQ ID NO: 1923818
agaacucaggccauuuauc

SEQ ID NO: 1923820 - RNA, 19 nt, Artificial Sequence
  Description of Artificial Sequence: Synthetic oligonucleotide
  Sense strand starting at position 2132 of SEQ ID NO: 1879670
uucucugacugguuauuaa

SEQ ID NO: 1923821 - RNA, 19 nt, Artificial Sequence
  Description of Artificial Sequence: Synthetic oligonucleotide
  Antisense strand to SEQ ID NO: 1923820
uuaauaaccagucagagaa

SEQ ID NO: 1923822 - RNA, 19 nt, Artificial Sequence
  Description of Artificial Sequence: Synthetic oligonucleotide
  Sense strand starting at position 2170 of SEQ ID NO: 1879670
aauggcugucacugaauga

SEQ ID NO: 1923823 - RNA, 19 nt, Artificial Sequence
  Description of Artificial Sequence: Synthetic oligonucleotide
  Antisense strand to SEQ ID NO: 1923822
ucauucagugacagccauu

SEQ ID NO: 1923824 - RNA, 19 nt, Artificial Sequence
  Description of Artificial Sequence: Synthetic oligonucleotide
  Sense strand starting at position 2181 of SEQ ID NO: 1879670
cugaaugacugcuucuaag

SEQ ID NO: 1923825 - RNA, 19 nt, Artificial Sequence
  Description of Artificial Sequence: Synthetic oligonucleotide
  Antisense strand to SEQ ID NO: 1923824
cuuagaagcagucauucag

SEQ ID NO: 1923826 - RNA, 19 nt, Artificial Sequence
  Description of Artificial Sequence: Synthetic oligonucleotide
  Sense strand starting at position 2305 of SEQ ID NO: 1879670
guggcaccuagugaaucau

SEQ ID NO: 1923827 - RNA, 19 nt, Artificial Sequence
  Description of Artificial Sequence: Synthetic oligonucleotide
  Antisense strand to SEQ ID NO: 1923826
augauucacuaggugccac

SEQ ID NO: 1923828 - RNA, 19 nt, Artificial Sequence
  Description of Artificial Sequence: Synthetic oligonucleotide
  Sense strand starting at position 2420 of SEQ ID NO: 1879670
uagugugaccuuuggagag

SEQ ID NO: 1923829 - RNA, 19 nt, Artificial Sequence
  Description of Artificial Sequence: Synthetic oligonucleotide
  Antisense strand to SEQ ID NO: 1923828
cucuccaaaggucacacua

SEQ ID NO: 1923830 - RNA, 19 nt, Artificial Sequence
  Description of Artificial Sequence: Synthetic oligonucleotide
  Sense strand starting at position 2791 of SEQ ID NO: 1879670
cugggaauauucuccuauc

SEQ ID NO: 1923831 - RNA, 19 nt, Artificial Sequence
  Description of Artificial Sequence: Synthetic oligonucleotide
  Antisense strand to SEQ ID NO: 1923830
gauaggagaauauucccag

SEQ ID NO: 1923832 - RNA, 19 nt, Artificial Sequence
  Description of Artificial Sequence: Synthetic oligonucleotide
  Sense strand starting at position 2846 of SEQ ID NO: 1879670
uugaaaugagcuuaacuuu

SEQ ID NO: 1923833 - RNA, 19 nt, Artificial Sequence
  Description of Artificial Sequence: Synthetic oligonucleotide
  Antisense strand to SEQ ID NO: 1923832
aaaguuaagcucauuucaa

SEQ ID NO: 1923834 - RNA, 19 nt, Artificial Sequence
  Description of Artificial Sequence: Synthetic oligonucleotide
  Sense strand starting at position 2922 of SEQ ID NO: 1879670
uucggaggcacugaguuaa

SEQ ID NO: 1923835 - RNA, 19 nt, Artificial Sequence
  Description of Artificial Sequence: Synthetic oligonucleotide
  Antisense strand to SEQ ID NO: 1923834
uuaacucagugccuccgaa

SEQ ID NO: 1923836 - RNA, 19 nt, Artificial Sequence
  Description of Artificial Sequence: Synthetic oligonucleotide
  Sense strand starting at position 3019 of SEQ ID NO: 1879670
augacuugugcugagagag

SEQ ID NO: 1923837 - RNA, 19 nt, Artificial Sequence
  Description of Artificial Sequence: Synthetic oligonucleotide
  Antisense strand to SEQ ID NO: 1923836
cucucucagcacaagucau

SEQ ID NO: 1923838 - RNA, 19 nt, Artificial Sequence
  Description of Artificial Sequence: Synthetic oligonucleotide
  Sense strand starting at position 3044 of SEQ ID NO: 1879670
cguaucugacaccaguaua

SEQ ID NO: 1923839 - RNA, 19 nt, Artificial Sequence
  Description of Artificial Sequence: Synthetic oligonucleotide
  Antisense strand to SEQ ID NO: 1923838
uauacuggugucagauacg

SEQ ID NO: 1923840 - RNA, 19 nt, Artificial Sequence
  Description of Artificial Sequence: Synthetic oligonucleotide
  Sense strand starting at position 3213 of SEQ ID NO: 1879670
aaagaagagcggugugaaa

SEQ ID NO: 1923841 - RNA, 19 nt, Artificial Sequence
  Description of Artificial Sequence: Synthetic oligonucleotide
  Antisense strand to SEQ ID NO: 1923840
uuucacaccgcucuucuuu

SEQ ID NO: 1923842 - RNA, 19 nt, Artificial Sequence
  Description of Artificial Sequence: Synthetic oligonucleotide
  Sense strand starting at position 3530 of SEQ ID NO: 1879670
cauucuguggguuagcaaa

SEQ ID NO: 1923843 - RNA, 19 nt, Artificial Sequence
  Description of Artificial Sequence: Synthetic oligonucleotide
  Antisense strand to SEQ ID NO: 1923842
uuugcuaacccacagaaug

SEQ ID NO: 1923844 - RNA, 19 nt, Artificial Sequence
  Description of Artificial Sequence: Synthetic oligonucleotide
  Sense strand starting at position 3721 of SEQ ID NO: 1879670
auacuuaaaccauggguuu

SEQ ID NO: 1923845 - RNA, 19 nt, Artificial Sequence
  Description of Artificial Sequence: Synthetic oligonucleotide
  Antisense strand to SEQ ID NO: 1923844
aaacccaugguuuaaguau

SEQ ID NO: 1923846 - RNA, 19 nt, Artificial Sequence
  Description of Artificial Sequence: Synthetic oligonucleotide
  Sense strand starting at position 3954 of SEQ ID NO: 1879670
ccaacauauuauguauagu

SEQ ID NO: 1923847 - RNA, 19 nt, Artificial Sequence
  Description of Artificial Sequence: Synthetic oligonucleotide
  Antisense strand to SEQ ID NO: 1923846
acuauacauaauauguugg

SEQ ID NO: 1923848 - RNA, 19 nt, Artificial Sequence
  Description of Artificial Sequence: Synthetic oligonucleotide
  Sense strand starting at position 3979 of SEQ ID NO: 1879670
uuguguacuuuacuaaaga

SEQ ID NO: 1923849 - RNA, 19 nt, Artificial Sequence
  Description of Artificial Sequence: Synthetic oligonucleotide
  Antisense strand to SEQ ID NO: 1923848
ucuuuaguaaaguacacaa

SEQ ID NO: 1923850 - RNA, 19 nt, Artificial Sequence
  Description of Artificial Sequence: Synthetic oligonucleotide
  Sense strand starting at position 80 of SEQ ID NO: 1879671
ggguguaaggaauagucuu

SEQ ID NO: 1923851 - RNA, 19 nt, Artificial Sequence
  Description of Artificial Sequence: Synthetic oligonucleotide
  Antisense strand to SEQ ID NO: 1923850
aagacuauuccuuacaccc

SEQ ID NO: 1923852 - RNA, 19 nt, Artificial Sequence
  Description of Artificial Sequence: Synthetic oligonucleotide
  Sense strand starting at position 86 of SEQ ID NO: 1879671
aaggaauagucuuugcacu

SEQ ID NO: 1923853 - RNA, 19 nt, Artificial Sequence
  Description of Artificial Sequence: Synthetic oligonucleotide
  Antisense strand to SEQ ID NO: 1923852
agugcaaagacuauuccuu

SEQ ID NO: 1923854 - RNA, 19 nt, Artificial Sequence
  Description of Artificial Sequence: Synthetic oligonucleotide
  Sense strand starting at position 87 of SEQ ID NO: 1879671
aggaauagucuuugcacua

SEQ ID NO: 1923855 - RNA, 19 nt, Artificial Sequence
  Description of Artificial Sequence: Synthetic oligonucleotide
  Antisense strand to SEQ ID NO: 1923854
uagugcaaagacuauuccu

SEQ ID NO: 1923856 - RNA, 19 nt, Artificial Sequence
  Description of Artificial Sequence: Synthetic oligonucleotide
  Sense strand starting at position 88 of SEQ ID NO: 1879671
ggaauagucuuugcacuaa

SEQ ID NO: 1923857 - RNA, 19 nt, Artificial Sequence
  Description of Artificial Sequence: Synthetic oligonucleotide
  Antisense strand to SEQ ID NO: 1923856
uuagugcaaagacuauucc

SEQ ID NO: 1923858 - RNA, 19 nt, Artificial Sequence
  Description of Artificial Sequence: Synthetic oligonucleotide
  Sense strand starting at position 92 of SEQ ID NO: 1879671
uagucuuugcacuaagaag

SEQ ID NO: 1923859 - RNA, 19 nt, Artificial Sequence
  Description of Artificial Sequence: Synthetic oligonucleotide
  Antisense strand to SEQ ID NO: 1923858
cuucuuagugcaaagacua

SEQ ID NO: 1923860 - RNA, 19 nt, Artificial Sequence
  Description of Artificial Sequence: Synthetic oligonucleotide
  Sense strand starting at position 107 of SEQ ID NO: 1879671
gaagcaagaucccuggguu

SEQ ID NO: 1923861 - RNA, 19 nt, Artificial Sequence
  Description of Artificial Sequence: Synthetic oligonucleotide
  Antisense strand to SEQ ID NO: 1923860
aacccagggaucuugcuuc

SEQ ID NO: 1923862 - RNA, 19 nt, Artificial Sequence
  Description of Artificial Sequence: Synthetic oligonucleotide
  Sense strand starting at position 121 of SEQ ID NO: 1879671
ggguucuccuucuccagaa

SEQ ID NO: 1923863 - RNA, 19 nt, Artificial Sequence
  Description of Artificial Sequence: Synthetic oligonucleotide
  Antisense strand to SEQ ID NO: 1923862
uucuggagaaggagaaccc

SEQ ID NO: 1923864 - RNA, 19 nt, Artificial Sequence
  Description of Artificial Sequence: Synthetic oligonucleotide
  Sense strand starting at position 319 of SEQ ID NO: 1879671
agauaugauccuggcacca

SEQ ID NO: 1923865 - RNA, 19 nt, Artificial Sequence
  Description of Artificial Sequence: Synthetic oligonucleotide
  Antisense strand to SEQ ID NO: 1923864
uggugccaggaucauaucu

SEQ ID NO: 1923866 - RNA, 19 nt, Artificial Sequence
  Description of Artificial Sequence: Synthetic oligonucleotide
  Sense strand starting at position 335 of SEQ ID NO: 1879671
ccaagauacccaugagggu

SEQ ID NO: 1923867 - RNA, 19 nt, Artificial Sequence
  Description of Artificial Sequence: Synthetic oligonucleotide
  Antisense strand to SEQ ID NO: 1923866
acccucauggguaucuugg

SEQ ID NO: 1923868 - RNA, 19 nt, Artificial Sequence
  Description of Artificial Sequence: Synthetic oligonucleotide
  Sense strand starting at position 372 of SEQ ID NO: 1879671
gaagaauguugaucucuua

SEQ ID NO: 1923869 - RNA, 19 nt, Artificial Sequence
  Description of Artificial Sequence: Synthetic oligonucleotide
  Antisense strand to SEQ ID NO: 1923868
uaagagaucaacauucuuc

SEQ ID NO: 1923870 - RNA, 19 nt, Artificial Sequence
  Description of Artificial Sequence: Synthetic oligonucleotide
  Sense strand starting at position 423 of SEQ ID NO: 1879671
acaaaugcaugcuucugaa

SEQ ID NO: 1923871 - RNA, 19 nt, Artificial Sequence
  Description of Artificial Sequence: Synthetic oligonucleotide
  Antisense strand to SEQ ID NO: 1923870
uucagaagcaugcauuugu

SEQ ID NO: 1923872 - RNA, 19 nt, Artificial Sequence
  Description of Artificial Sequence: Synthetic oligonucleotide
  Sense strand starting at position 444 of SEQ ID NO: 1879671
ugacaaagauuggaagaga

SEQ ID NO: 1923873 - RNA, 19 nt, Artificial Sequence
  Description of Artificial Sequence: Synthetic oligonucleotide
  Antisense strand to SEQ ID NO: 1923872
ucucuuccaaucuuuguca

SEQ ID NO: 1923874 - RNA, 19 nt, Artificial Sequence
  Description of Artificial Sequence: Synthetic oligonucleotide
  Sense strand starting at position 704 of SEQ ID NO: 1879671
ucaacaguuccauggaaga

SEQ ID NO: 1923875 - RNA, 19 nt, Artificial Sequence
  Description of Artificial Sequence: Synthetic oligonucleotide
  Antisense strand to SEQ ID NO: 1923874
ucuuccauggaacuguuga

SEQ ID NO: 1923876 - RNA, 19 nt, Artificial Sequence
  Description of Artificial Sequence: Synthetic oligonucleotide
  Sense strand starting at position 722 of SEQ ID NO: 1879671
aucuaauugugcgucauuu

SEQ ID NO: 1923877 - RNA, 19 nt, Artificial Sequence
  Description of Artificial Sequence: Synthetic oligonucleotide
  Antisense strand to SEQ ID NO: 1923876
aaaugacgcacaauuagau

SEQ ID NO: 1923878 - RNA, 19 nt, Artificial Sequence
  Description of Artificial Sequence: Synthetic oligonucleotide
  Sense strand starting at position 724 of SEQ ID NO: 1879671
cuaauugugcgucauuuga

SEQ ID NO: 1923879 - RNA, 19 nt, Artificial Sequence
  Description of Artificial Sequence: Synthetic oligonucleotide
  Antisense strand to SEQ ID NO: 1923878
ucaaaugacgcacaauuag

SEQ ID NO: 1923880 - RNA, 19 nt, Artificial Sequence
  Description of Artificial Sequence: Synthetic oligonucleotide
  Sense strand starting at position 726 of SEQ ID NO: 1879671
aauugugcgucauuugaug

SEQ ID NO: 1923881 - RNA, 19 nt, Artificial Sequence
  Description of Artificial Sequence: Synthetic oligonucleotide
  Antisense strand to SEQ ID NO: 1923880
caucaaaugacgcacaauu

SEQ ID NO: 1923882 - RNA, 19 nt, Artificial Sequence
  Description of Artificial Sequence: Synthetic oligonucleotide
  Sense strand starting at position 728 of SEQ ID NO: 1879671
uugugcgucauuugaugaa

SEQ ID NO: 1923883 - RNA, 19 nt, Artificial Sequence
  Description of Artificial Sequence: Synthetic oligonucleotide
  Antisense strand to SEQ ID NO: 1923882
uucaucaaaugacgcacaa

SEQ ID NO: 1923884 - RNA, 19 nt, Artificial Sequence
  Description of Artificial Sequence: Synthetic oligonucleotide
  Sense strand starting at position 761 of SEQ ID NO: 1879671
guuuauaugccacagaucu

SEQ ID NO: 1923885 - RNA, 19 nt, Artificial Sequence
  Description of Artificial Sequence: Synthetic oligonucleotide
  Antisense strand to SEQ ID NO: 1923884
agaucuguggcauauaaac

SEQ ID NO: 1923886 - RNA, 19 nt, Artificial Sequence
  Description of Artificial Sequence: Synthetic oligonucleotide
  Sense strand starting at position 781 of SEQ ID NO: 1879671
gacucugaacaggguuuaa

SEQ ID NO: 1923887 - RNA, 19 nt, Artificial Sequence
  Description of Artificial Sequence: Synthetic oligonucleotide
  Antisense strand to SEQ ID NO: 1923886
uuaaacccuguucagaguc

SEQ ID NO: 1923888 - RNA, 19 nt, Artificial Sequence
  Description of Artificial Sequence: Synthetic oligonucleotide
  Sense strand starting at position 792 of SEQ ID NO: 1879671
ggguuuaauucugcuaaga

SEQ ID NO: 1923889 - RNA, 19 nt, Artificial Sequence
  Description of Artificial Sequence: Synthetic oligonucleotide
  Antisense strand to SEQ ID NO: 1923888
ucuuagcagaauuaaaccc

SEQ ID NO: 1923890 - RNA, 19 nt, Artificial Sequence
  Description of Artificial Sequence: Synthetic oligonucleotide
  Sense strand starting at position 805 of SEQ ID NO: 1879671
cuaagauaaccauguacug

SEQ ID NO: 1923891 - RNA, 19 nt, Artificial Sequence
  Description of Artificial Sequence: Synthetic oligonucleotide
  Antisense strand to SEQ ID NO: 1923890
caguacaugguuaucuuag

SEQ ID NO: 1923892 - RNA, 19 nt, Artificial Sequence
  Description of Artificial Sequence: Synthetic oligonucleotide
  Sense strand starting at position 831 of SEQ ID NO: 1879671
accugcaauccuugggaca

SEQ ID NO: 1923893 - RNA, 19 nt, Artificial Sequence
  Description of Artificial Sequence: Synthetic oligonucleotide
  Antisense strand to SEQ ID NO: 1923892
ugucccaaggauugcaggu

SEQ ID NO: 1923894 - RNA, 19 nt, Artificial Sequence
  Description of Artificial Sequence: Synthetic oligonucleotide
  Sense strand starting at position 1035 of SEQ ID NO: 1879671
ugaaguagugccuauucca

SEQ ID NO: 1923895 - RNA, 19 nt, Artificial Sequence
  Description of Artificial Sequence: Synthetic oligonucleotide
  Antisense strand to SEQ ID NO: 1923894
uggaauaggcacuacuuca

SEQ ID NO: 1923896 - RNA, 19 nt, Artificial Sequence
  Description of Artificial Sequence: Synthetic oligonucleotide
  Sense strand starting at position 1144 of SEQ ID NO: 1879671
uuuggauugcugggauaaa

SEQ ID NO: 1923897 - RNA, 19 nt, Artificial Sequence
  Description of Artificial Sequence: Synthetic oligonucleotide
  Antisense strand to SEQ ID NO: 1923896
uuuaucccagcaauccaaa

SEQ ID NO: 1923898 - RNA, 19 nt, Artificial Sequence
  Description of Artificial Sequence: Synthetic oligonucleotide
  Sense strand starting at position 1399 of SEQ ID NO: 1879671
uccucugacuaguccuaga

SEQ ID NO: 1923899 - RNA, 19 nt, Artificial Sequence
  Description of Artificial Sequence: Synthetic oligonucleotide
  Antisense strand to SEQ ID NO: 1923898
ucuaggacuagucagagga

SEQ ID NO: 1923900 - RNA, 19 nt, Artificial Sequence
  Description of Artificial Sequence: Synthetic oligonucleotide
  Sense strand starting at position 1422 of SEQ ID NO: 1879671
cucucagucccguuuguuu

SEQ ID NO: 1923901 - RNA, 19 nt, Artificial Sequence
  Description of Artificial Sequence: Synthetic oligonucleotide
  Antisense strand to SEQ ID NO: 1923900
aaacaaacgggacugagag

SEQ ID NO: 1923902 - RNA, 19 nt, Artificial Sequence
  Description of Artificial Sequence: Synthetic oligonucleotide
  Sense strand starting at position 1487 of SEQ ID NO: 1879671
ugcuguauuucucuuuaag

SEQ ID NO: 1923903 - RNA, 19 nt, Artificial Sequence
  Description of Artificial Sequence: Synthetic oligonucleotide
  Antisense strand to SEQ ID NO: 1923902
cuuaaagagaaauacagca

SEQ ID NO: 1923904 - RNA, 19 nt, Artificial Sequence
  Description of Artificial Sequence: Synthetic oligonucleotide
  Sense strand starting at position 1523 of SEQ ID NO: 1879671
gucuauguucuauaucaug

SEQ ID NO: 1923905 - RNA, 19 nt, Artificial Sequence
  Description of Artificial Sequence: Synthetic oligonucleotide
  Antisense strand to SEQ ID NO: 1923904
caugauauagaacauagac

SEQ ID NO: 1923906 - RNA, 19 nt, Artificial Sequence
  Description of Artificial Sequence: Synthetic oligonucleotide
  Sense strand starting at position 2000 of SEQ ID NO: 1879671
gagagcuccuucuucugga

SEQ ID NO: 1923907 - RNA, 19 nt, Artificial Sequence
  Description of Artificial Sequence: Synthetic oligonucleotide
  Antisense strand to SEQ ID NO: 1923906
uccagaagaaggagcucuc

SEQ ID NO: 1923908 - RNA, 19 nt, Artificial Sequence
  Description of Artificial Sequence: Synthetic oligonucleotide
  Sense strand starting at position 2001 of SEQ ID NO: 1879671
agagcuccuucuucuggaa

SEQ ID NO: 1923909 - RNA, 19 nt, Artificial Sequence
  Description of Artificial Sequence: Synthetic oligonucleotide
  Antisense strand to SEQ ID NO: 1923908
uuccagaagaaggagcucu

SEQ ID NO: 1923910 - RNA, 19 nt, Artificial Sequence
  Description of Artificial Sequence: Synthetic oligonucleotide
  Sense strand starting at position 2018 of SEQ ID NO: 1879671
aaucaaggcccagggaauu

SEQ ID NO: 1923911 - RNA, 19 nt, Artificial Sequence
  Description of Artificial Sequence: Synthetic oligonucleotide
  Antisense strand to SEQ ID NO: 1923910
aauucccugggccuugauu

SEQ ID NO: 1923912 - RNA, 19 nt, Artificial Sequence
  Description of Artificial Sequence: Synthetic oligonucleotide
  Sense strand starting at position 2053 of SEQ ID NO: 1879671
aauucuggucaggaaguuu

SEQ ID NO: 1923913 - RNA, 19 nt, Artificial Sequence
  Description of Artificial Sequence: Synthetic oligonucleotide
  Antisense strand to SEQ ID NO: 1923912
aaacuuccugaccagaauu

SEQ ID NO: 1923914 - RNA, 19 nt, Artificial Sequence
  Description of Artificial Sequence: Synthetic oligonucleotide
  Sense strand starting at position 2082 of SEQ ID NO: 1879671
uguugauucuuguugaaag

SEQ ID NO: 1923915 - RNA, 19 nt, Artificial Sequence
  Description of Artificial Sequence: Synthetic oligonucleotide
  Antisense strand to SEQ ID NO: 1923914
cuuucaacaagaaucaaca

SEQ ID NO: 1923916 - RNA, 19 nt, Artificial Sequence
  Description of Artificial Sequence: Synthetic oligonucleotide
  Sense strand starting at position 2470 of SEQ ID NO: 1879671
ugccaaguacuguagauaa

SEQ ID NO: 1923917 - RNA, 19 nt, Artificial Sequence
  Description of Artificial Sequence: Synthetic oligonucleotide
  Antisense strand to SEQ ID NO: 1923916
uuaucuacaguacuuggca

SEQ ID NO: 1923918 - RNA, 19 nt, Artificial Sequence
  Description of Artificial Sequence: Synthetic oligonucleotide
  Sense strand starting at position 2644 of SEQ ID NO: 1879671
agaauagauugucuucuga

SEQ ID NO: 1923919 - RNA, 19 nt, Artificial Sequence
  Description of Artificial Sequence: Synthetic oligonucleotide
  Antisense strand to SEQ ID NO: 1923918
ucagaagacaaucuauucu

SEQ ID NO: 1923920 - RNA, 19 nt, Artificial Sequence
  Description of Artificial Sequence: Synthetic oligonucleotide
  Sense strand starting at position 2862 of SEQ ID NO: 1879671
ccauuugaguuagaaggga

SEQ ID NO: 1923921 - RNA, 19 nt, Artificial Sequence
  Description of Artificial Sequence: Synthetic oligonucleotide
  Antisense strand to SEQ ID NO: 1923920
ucccuucuaacucaaaugg

SEQ ID NO: 1923922 - RNA, 19 nt, Artificial Sequence
  Description of Artificial Sequence: Synthetic oligonucleotide
  Sense strand starting at position 2931 of SEQ ID NO: 1879671
augauauuagaauguguug

SEQ ID NO: 1923923 - RNA, 19 nt, Artificial Sequence
  Description of Artificial Sequence: Synthetic oligonucleotide
  Antisense strand to SEQ ID NO: 1923922
caacacauucuaauaucau

SEQ ID NO: 1923924 - RNA, 19 nt, Artificial Sequence
  Description of Artificial Sequence: Synthetic oligonucleotide
  Sense strand starting at position 2953 of SEQ ID NO: 1879671
gaagauacaugcucuguua

SEQ ID NO: 1923925 - RNA, 19 nt, Artificial Sequence
  Description of Artificial Sequence: Synthetic oligonucleotide
  Antisense strand to SEQ ID NO: 1923924
uaacagagcauguaucuuc

SEQ ID NO: 1923926 - RNA, 19 nt, Artificial Sequence
  Description of Artificial Sequence: Synthetic oligonucleotide
  Sense strand starting at position 3113 of SEQ ID NO: 1879671
ugaagagacgaucggguua

SEQ ID NO: 1923927 - RNA, 19 nt, Artificial Sequence
  Description of Artificial Sequence: Synthetic oligonucleotide
  Antisense strand to SEQ ID NO: 1923926
uaacccgaucgucucuuca

SEQ ID NO: 1923928 - RNA, 19 nt, Artificial Sequence
  Description of Artificial Sequence: Synthetic oligonucleotide
  Sense strand starting at position 3118 of SEQ ID NO: 1879671
agacgaucggguuacuaaa

SEQ ID NO: 1923929 - RNA, 19 nt, Artificial Sequence
  Description of Artificial Sequence: Synthetic oligonucleotide
  Antisense strand to SEQ ID NO: 1923928
uuuaguaacccgaucgucu

SEQ ID NO: 1923930 - RNA, 19 nt, Artificial Sequence
  Description of Artificial Sequence: Synthetic oligonucleotide
  Sense strand starting at position 62 of SEQ ID NO: 1879672
uaaauuaaugcaggguuau

SEQ ID NO: 1923931 - RNA, 19 nt, Artificial Sequence
  Description of Artificial Sequence: Synthetic oligonucleotide
  Antisense strand to SEQ ID NO: 1923930
auaacccugcauuaauuua

SEQ ID NO: 1923932 - RNA, 19 nt, Artificial Sequence
  Description of Artificial Sequence: Synthetic oligonucleotide
  Sense strand starting at position 63 of SEQ ID NO: 1879672
aaauuaaugcaggguuaug

SEQ ID NO: 1923933 - RNA, 19 nt, Artificial Sequence
  Description of Artificial Sequence: Synthetic oligonucleotide
  Antisense strand to SEQ ID NO: 1923932
cauaacccugcauuaauuu

SEQ ID NO: 1923934 - RNA, 19 nt, Artificial Sequence
  Description of Artificial Sequence: Synthetic oligonucleotide
  Sense strand starting at position 597 of SEQ ID NO: 1879672
gcaacauuugcagggcuaa

SEQ ID NO: 1923935 - RNA, 19 nt, Artificial Sequence
  Description of Artificial Sequence: Synthetic oligonucleotide
  Antisense strand to SEQ ID NO: 1923934
uuagcccugcaaauguugc

SEQ ID NO: 1923936 - RNA, 19 nt, Artificial Sequence
  Description of Artificial Sequence: Synthetic oligonucleotide
  Sense strand starting at position 1179 of SEQ ID NO: 1879672
aaggcuuaaugagccagau

SEQ ID NO: 1923937 - RNA, 19 nt, Artificial Sequence
  Description of Artificial Sequence: Synthetic oligonucleotide
  Antisense strand to SEQ ID NO: 1923936
aucuggcucauuaagccuu

SEQ ID NO: 1923938 - RNA, 19 nt, Artificial Sequence
  Description of Artificial Sequence: Synthetic oligonucleotide
  Sense strand starting at position 1181 of SEQ ID NO: 1879672
ggcuuaaugagccagaucu

SEQ ID NO: 1923939 - RNA, 19 nt, Artificial Sequence
  Description of Artificial Sequence: Synthetic oligonucleotide
  Antisense strand to SEQ ID NO: 1923938
agaucuggcucauuaagcc

SEQ ID NO: 1923940 - RNA, 19 nt, Artificial Sequence
  Description of Artificial Sequence: Synthetic oligonucleotide
  Sense strand starting at position 1487 of SEQ ID NO: 1879672
ugauuuaugccucguuccu

SEQ ID NO: 1923941 - RNA, 19 nt, Artificial Sequence
  Description of Artificial Sequence: Synthetic oligonucleotide
  Antisense strand to SEQ ID NO: 1923940
aggaacgaggcauaaauca

SEQ ID NO: 1923942 - RNA, 19 nt, Artificial Sequence
  Description of Artificial Sequence: Synthetic oligonucleotide
  Sense strand starting at position 1579 of SEQ ID NO: 1879672
agcugaagauacucuguca

SEQ ID NO: 1923943 - RNA, 19 nt, Artificial Sequence
  Description of Artificial Sequence: Synthetic oligonucleotide
  Antisense strand to SEQ ID NO: 1923942
ugacagaguaucuucagcu

SEQ ID NO: 1923944 - RNA, 19 nt, Artificial Sequence
  Description of Artificial Sequence: Synthetic oligonucleotide
  Sense strand starting at position 1582 of SEQ ID NO: 1879672
ugaagauacucugucagug

SEQ ID NO: 1923945 - RNA, 19 nt, Artificial Sequence
  Description of Artificial Sequence: Synthetic oligonucleotide
  Antisense strand to SEQ ID NO: 1923944
cacugacagaguaucuuca

SEQ ID NO: 1923946 - RNA, 19 nt, Artificial Sequence
  Description of Artificial Sequence: Synthetic oligonucleotide
  Sense strand starting at position 1596 of SEQ ID NO: 1879672
cagugugaucuguacauga

SEQ ID NO: 1923947 - RNA, 19 nt, Artificial Sequence
  Description of Artificial Sequence: Synthetic oligonucleotide
  Antisense strand to SEQ ID NO: 1923946
ucauguacagaucacacug

SEQ ID NO: 1923948 - RNA, 19 nt, Artificial Sequence
  Description of Artificial Sequence: Synthetic oligonucleotide
  Sense strand starting at position 1598 of SEQ ID NO: 1879672
gugugaucuguacaugaag

SEQ ID NO: 1923949 - RNA, 19 nt, Artificial Sequence
  Description of Artificial Sequence: Synthetic oligonucleotide
  Antisense strand to SEQ ID NO: 1923948
cuucauguacagaucacac

SEQ ID NO: 1923950 - RNA, 19 nt, Artificial Sequence
  Description of Artificial Sequence: Synthetic oligonucleotide
  Sense strand starting at position 1697 of SEQ ID NO: 1879672
uggacuuugaagugacuua

SEQ ID NO: 1923951 - RNA, 19 nt, Artificial Sequence
  Description of Artificial Sequence: Synthetic oligonucleotide
  Antisense strand to SEQ ID NO: 1923950
uaagucacuucaaagucca

SEQ ID NO: 1923952 - RNA, 19 nt, Artificial Sequence
  Description of Artificial Sequence: Synthetic oligonucleotide
  Sense strand starting at position 1752 of SEQ ID NO: 1879672
ggauguuuagagcaucaac

SEQ ID NO: 1923953 - RNA, 19 nt, Artificial Sequence
  Description of Artificial Sequence: Synthetic oligonucleotide
  Antisense strand to SEQ ID NO: 1923952
guugaugcucuaaacaucc

SEQ ID NO: 1923954 - RNA, 19 nt, Artificial Sequence
  Description of Artificial Sequence: Synthetic oligonucleotide
  Sense strand starting at position 1755 of SEQ ID NO: 1879672
uguuuagagcaucaacacu

SEQ ID NO: 1923955 - RNA, 19 nt, Artificial Sequence
  Description of Artificial Sequence: Synthetic oligonucleotide
  Antisense strand to SEQ ID NO: 1923954
aguguugaugcucuaaaca

SEQ ID NO: 1923956 - RNA, 19 nt, Artificial Sequence
  Description of Artificial Sequence: Synthetic oligonucleotide
  Sense strand starting at position 1807 of SEQ ID NO: 1879672
ugcauuugguagguuaauu

SEQ ID NO: 1923957 - RNA, 19 nt, Artificial Sequence
  Description of Artificial Sequence: Synthetic oligonucleotide
  Antisense strand to SEQ ID NO: 1923956
aauuaaccuaccaaaugca

SEQ ID NO: 1923958 - RNA, 19 nt, Artificial Sequence
  Description of Artificial Sequence: Synthetic oligonucleotide
  Sense strand starting at position 1882 of SEQ ID NO: 1879672
ccagcuacaucagugacau

SEQ ID NO: 1923959 - RNA, 19 nt, Artificial Sequence
  Description of Artificial Sequence: Synthetic oligonucleotide
  Antisense strand to SEQ ID NO: 1923958
augucacugauguagcugg

SEQ ID NO: 1923960 - RNA, 19 nt, Artificial Sequence
  Description of Artificial Sequence: Synthetic oligonucleotide
  Sense strand starting at position 1993 of SEQ ID NO: 1879672
ucaauaaagugcuugauga

SEQ ID NO: 1923961 - RNA, 19 nt, Artificial Sequence
  Description of Artificial Sequence: Synthetic oligonucleotide
  Antisense strand to SEQ ID NO: 1923960
ucaucaagcacuuuauuga

SEQ ID NO: 1923962 - RNA, 19 nt, Artificial Sequence
  Description of Artificial Sequence: Synthetic oligonucleotide
  Sense strand starting at position 2059 of SEQ ID NO: 1879672
ugaguaacucaggguagaa

SEQ ID NO: 1923963 - RNA, 19 nt, Artificial Sequence
  Description of Artificial Sequence: Synthetic oligonucleotide
  Antisense strand to SEQ ID NO: 1923962
uucuacccugaguuacuca

SEQ ID NO: 1923964 - RNA, 19 nt, Artificial Sequence
  Description of Artificial Sequence: Synthetic oligonucleotide
  Sense strand starting at position 2556 of SEQ ID NO: 1879672
gcaguuaagaaauauaggu

SEQ ID NO: 1923965 - RNA, 19 nt, Artificial Sequence
  Description of Artificial Sequence: Synthetic oligonucleotide
  Antisense strand to SEQ ID NO: 1923964
accuauauuucuuaacugc

SEQ ID NO: 1923966 - RNA, 19 nt, Artificial Sequence
  Description of Artificial Sequence: Synthetic oligonucleotide
  Sense strand starting at position 2685 of SEQ ID NO: 1879672
agguaacugcuccagaacu

SEQ ID NO: 1923967 - RNA, 19 nt, Artificial Sequence
  Description of Artificial Sequence: Synthetic oligonucleotide
  Antisense strand to SEQ ID NO: 1923966
aguucuggagcaguuaccu

SEQ ID NO: 1923968 - RNA, 19 nt, Artificial Sequence
  Description of Artificial Sequence: Synthetic oligonucleotide
  Sense strand starting at position 2687 of SEQ ID NO: 1879672
guaacugcuccagaacugu

SEQ ID NO: 1923969 - RNA, 19 nt, Artificial Sequence
  Description of Artificial Sequence: Synthetic oligonucleotide
  Antisense strand to SEQ ID NO: 1923968
acaguucuggagcaguuac

SEQ ID NO: 1923970 - RNA, 19 nt, Artificial Sequence
  Description of Artificial Sequence: Synthetic oligonucleotide
  Sense strand starting at position 2714 of SEQ ID NO: 1879672
aagauucugucaguggaaa

SEQ ID NO: 1923971 - RNA, 19 nt, Artificial Sequence
  Description of Artificial Sequence: Synthetic oligonucleotide
  Antisense strand to SEQ ID NO: 1923970
uuuccacugacagaaucuu

SEQ ID NO: 1923972 - RNA, 19 nt, Artificial Sequence
  Description of Artificial Sequence: Synthetic oligonucleotide
  Sense strand starting at position 2715 of SEQ ID NO: 1879672
agauucugucaguggaaag

SEQ ID NO: 1923973 - RNA, 19 nt, Artificial Sequence
  Description of Artificial Sequence: Synthetic oligonucleotide
  Antisense strand to SEQ ID NO: 1923972
cuuuccacugacagaaucu

SEQ ID NO: 1923974 - RNA, 19 nt, Artificial Sequence
  Description of Artificial Sequence: Synthetic oligonucleotide
  Sense strand starting at position 2801 of SEQ ID NO: 1879672
ugcacugugcuuucuaguu

SEQ ID NO: 1923975 - RNA, 19 nt, Artificial Sequence
  Description of Artificial Sequence: Synthetic oligonucleotide
  Antisense strand to SEQ ID NO: 1923974
aacuagaaagcacagugca

SEQ ID NO: 1923976 - RNA, 19 nt, Artificial Sequence
  Description of Artificial Sequence: Synthetic oligonucleotide
  Sense strand starting at position 2923 of SEQ ID NO: 1879672
agugacauauuugaaauca

SEQ ID NO: 1923977 - RNA, 19 nt, Artificial Sequence
  Description of Artificial Sequence: Synthetic oligonucleotide
  Antisense strand to SEQ ID NO: 1923976
ugauuucaaauaugucacu

SEQ ID NO: 1923978 - RNA, 19 nt, Artificial Sequence
  Description of Artificial Sequence: Synthetic oligonucleotide
  Sense strand starting at position 2939 of SEQ ID NO: 1879672
ucacacugcuaauuagaga

SEQ ID NO: 1923979 - RNA, 19 nt, Artificial Sequence
  Description of Artificial Sequence: Synthetic oligonucleotide
  Antisense strand to SEQ ID NO: 1923978
ucucuaauuagcaguguga

SEQ ID NO: 1923980 - RNA, 19 nt, Artificial Sequence
  Description of Artificial Sequence: Synthetic oligonucleotide
  Sense strand starting at position 2968 of SEQ ID NO: 1879672
accggaagucaauaguuga

SEQ ID NO: 1923981 - RNA, 19 nt, Artificial Sequence
  Description of Artificial Sequence: Synthetic oligonucleotide
  Antisense strand to SEQ ID NO: 1923980
ucaacuauugacuuccggu

SEQ ID NO: 1923982 - RNA, 19 nt, Artificial Sequence
  Description of Artificial Sequence: Synthetic oligonucleotide
  Sense strand starting at position 2979 of SEQ ID NO: 1879672
auaguugaagaaugcuaca

SEQ ID NO: 1923983 - RNA, 19 nt, Artificial Sequence
  Description of Artificial Sequence: Synthetic oligonucleotide
  Antisense strand to SEQ ID NO: 1923982
uguagcauucuucaacuau

SEQ ID NO: 1923984 - RNA, 19 nt, Artificial Sequence
  Description of Artificial Sequence: Synthetic oligonucleotide
  Sense strand starting at position 2998 of SEQ ID NO: 1879672
agcuuaaaguguuuaucaa

SEQ ID NO: 1923985 - RNA, 19 nt, Artificial Sequence
  Description of Artificial Sequence: Synthetic oligonucleotide
  Antisense strand to SEQ ID NO: 1923984
uugauaaacacuuuaagcu

SEQ ID NO: 1923986 - RNA, 19 nt, Artificial Sequence
  Description of Artificial Sequence: Synthetic oligonucleotide
  Sense strand starting at position 2999 of SEQ ID NO: 1879672
gcuuaaaguguuuaucaaa

SEQ ID NO: 1923987 - RNA, 19 nt, Artificial Sequence
  Description of Artificial Sequence: Synthetic oligonucleotide
  Antisense strand to SEQ ID NO: 1923986
uuugauaaacacuuuaagc

SEQ ID NO: 1923988 - RNA, 19 nt, Artificial Sequence
  Description of Artificial Sequence: Synthetic oligonucleotide
  Sense strand starting at position 3020 of SEQ ID NO: 1879672
gcugauaggcaaugauucu

SEQ ID NO: 1923989 - RNA, 19 nt, Artificial Sequence
  Description of Artificial Sequence: Synthetic oligonucleotide
  Antisense strand to SEQ ID NO: 1923988
agaaucauugccuaucagc

SEQ ID NO: 1923990 - RNA, 19 nt, Artificial Sequence
  Description of Artificial Sequence: Synthetic oligonucleotide
  Sense strand starting at position 3119 of SEQ ID NO: 1879672
ucaccuaggcuguaauagu

SEQ ID NO: 1923991 - RNA, 19 nt, Artificial Sequence
  Description of Artificial Sequence: Synthetic oligonucleotide
  Antisense strand to SEQ ID NO: 1923990
acuauuacagccuagguga

SEQ ID NO: 1923992 - RNA, 19 nt, Artificial Sequence
  Description of Artificial Sequence: Synthetic oligonucleotide
  Sense strand starting at position 3583 of SEQ ID NO: 1879672
uggucaaugggauguaaac

SEQ ID NO: 1923993 - RNA, 19 nt, Artificial Sequence
  Description of Artificial Sequence: Synthetic oligonucleotide
  Antisense strand to SEQ ID NO: 1923992
guuuacaucccauugacca

SEQ ID NO: 1923994 - RNA, 19 nt, Artificial Sequence
  Description of Artificial Sequence: Synthetic oligonucleotide
  Sense strand starting at position 3659 of SEQ ID NO: 1879672
cuucucacugcuuggaaua

SEQ ID NO: 1923995 - RNA, 19 nt, Artificial Sequence
  Description of Artificial Sequence: Synthetic oligonucleotide
  Antisense strand to SEQ ID NO: 1923994
uauuccaagcagugagaag

SEQ ID NO: 1923996 - RNA, 19 nt, Artificial Sequence
  Description of Artificial Sequence: Synthetic oligonucleotide
  Sense strand starting at position 3670 of SEQ ID NO: 1879672
uuggaauacagauguguug

SEQ ID NO: 1923997 - RNA, 19 nt, Artificial Sequence
  Description of Artificial Sequence: Synthetic oligonucleotide
  Antisense strand to SEQ ID NO: 1923996
caacacaucuguauuccaa

SEQ ID NO: 1923998 - RNA, 19 nt, Artificial Sequence
  Description of Artificial Sequence: Synthetic oligonucleotide
  Sense strand starting at position 3673 of SEQ ID NO: 1879672
gaauacagauguguuggua

SEQ ID NO: 1923999 - RNA, 19 nt, Artificial Sequence
  Description of Artificial Sequence: Synthetic oligonucleotide
  Antisense strand to SEQ ID NO: 1923998
uaccaacacaucuguauuc

SEQ ID NO: 1924000 - RNA, 19 nt, Artificial Sequence
  Description of Artificial Sequence: Synthetic oligonucleotide
  Sense strand starting at position 3676 of SEQ ID NO: 1879672
uacagauguguugguaaua

SEQ ID NO: 1924001 - RNA, 19 nt, Artificial Sequence
  Description of Artificial Sequence: Synthetic oligonucleotide
  Antisense strand to SEQ ID NO: 1924000
uauuaccaacacaucugua

SEQ ID NO: 1924002 - RNA, 19 nt, Artificial Sequence
  Description of Artificial Sequence: Synthetic oligonucleotide
  Sense strand starting at position 3677 of SEQ ID NO: 1879672
acagauguguugguaauaa

SEQ ID NO: 1924003 - RNA, 19 nt, Artificial Sequence
  Description of Artificial Sequence: Synthetic oligonucleotide
  Antisense strand to SEQ ID NO: 1924002
uuauuaccaacacaucugu

SEQ ID NO: 1924004 - RNA, 19 nt, Artificial Sequence
  Description of Artificial Sequence: Synthetic oligonucleotide
  Sense strand starting at position 3685 of SEQ ID NO: 1879672
guugguaauaacugaagca

SEQ ID NO: 1924005 - RNA, 19 nt, Artificial Sequence
  Description of Artificial Sequence: Synthetic oligonucleotide
  Antisense strand to SEQ ID NO: 1924004
ugcuucaguuauuaccaac

SEQ ID NO: 1924006 - RNA, 19 nt, Artificial Sequence
  Description of Artificial Sequence: Synthetic oligonucleotide
  Sense strand starting at position 3742 of SEQ ID NO: 1879672
gugguagaguaaucaaaua

SEQ ID NO: 1924007 - RNA, 19 nt, Artificial Sequence
  Description of Artificial Sequence: Synthetic oligonucleotide
  Antisense strand to SEQ ID NO: 1924006
uauuugauuacucuaccac

SEQ ID NO: 1924008 - RNA, 19 nt, Artificial Sequence
  Description of Artificial Sequence: Synthetic oligonucleotide
  Sense strand starting at position 3764 of SEQ ID NO: 1879672
augguauaguaaucagaua

SEQ ID NO: 1924009 - RNA, 19 nt, Artificial Sequence
  Description of Artificial Sequence: Synthetic oligonucleotide
  Antisense strand to SEQ ID NO: 1924008
uaucugauuacuauaccau

SEQ ID NO: 1924010 - RNA, 19 nt, Artificial Sequence
  Description of Artificial Sequence: Synthetic oligonucleotide
  Sense strand starting at position 14 of SEQ ID NO: 1879673
aguacugugugaguuaaga

SEQ ID NO: 1924011 - RNA, 19 nt, Artificial Sequence
  Description of Artificial Sequence: Synthetic oligonucleotide
  Antisense strand to SEQ ID NO: 1924010
ucuuaacucacacaguacu

SEQ ID NO: 1924012 - RNA, 19 nt, Artificial Sequence
  Description of Artificial Sequence: Synthetic oligonucleotide
  Sense strand starting at position 38 of SEQ ID NO: 1879673
gcucaauugcugcaagaag

SEQ ID NO: 1924013 - RNA, 19 nt, Artificial Sequence
  Description of Artificial Sequence: Synthetic oligonucleotide
  Antisense strand to SEQ ID NO: 1924012
cuucuugcagcaauugagc

SEQ ID NO: 1924014 - RNA, 19 nt, Artificial Sequence
  Description of Artificial Sequence: Synthetic oligonucleotide
  Sense strand starting at position 52 of SEQ ID NO: 1879673
agaaguucucuuuagcaua

SEQ ID NO: 1924015 - RNA, 19 nt, Artificial Sequence
  Description of Artificial Sequence: Synthetic oligonucleotide
  Antisense strand to SEQ ID NO: 1924014
uaugcuaaagagaacuucu

SEQ ID NO: 1924016 - RNA, 19 nt, Artificial Sequence
  Description of Artificial Sequence: Synthetic oligonucleotide
  Sense strand starting at position 57 of SEQ ID NO: 1879673
uucucuuuagcauaagagu

SEQ ID NO: 1924017 - RNA, 19 nt, Artificial Sequence
  Description of Artificial Sequence: Synthetic oligonucleotide
  Antisense strand to SEQ ID NO: 1924016
acucuuaugcuaaagagaa

SEQ ID NO: 1924018 - RNA, 19 nt, Artificial Sequence
  Description of Artificial Sequence: Synthetic oligonucleotide
  Sense strand starting at position 107 of SEQ ID NO: 1879673
augauauggugucuccaaa

SEQ ID NO: 1924019 - RNA, 19 nt, Artificial Sequence
  Description of Artificial Sequence: Synthetic oligonucleotide
  Antisense strand to SEQ ID NO: 1924018
uuuggagacaccauaucau

SEQ ID NO: 1924020 - RNA, 19 nt, Artificial Sequence
  Description of Artificial Sequence: Synthetic oligonucleotide
  Sense strand starting at position 202 of SEQ ID NO: 1879673
gcauccauucuuuaguuua

SEQ ID NO: 1924021 - RNA, 19 nt, Artificial Sequence
  Description of Artificial Sequence: Synthetic oligonucleotide
  Antisense strand to SEQ ID NO: 1924020
uaaacuaaagaauggaugc

SEQ ID NO: 1924022 - RNA, 19 nt, Artificial Sequence
  Description of Artificial Sequence: Synthetic oligonucleotide
  Sense strand starting at position 282 of SEQ ID NO: 1879673
ggaucuuucuccuuaggag

SEQ ID NO: 1924023 - RNA, 19 nt, Artificial Sequence
  Description of Artificial Sequence: Synthetic oligonucleotide
  Antisense strand to SEQ ID NO: 1924022
cuccuaaggagaaagaucc

SEQ ID NO: 1924024 - RNA, 19 nt, Artificial Sequence
  Description of Artificial Sequence: Synthetic oligonucleotide
  Sense strand starting at position 337 of SEQ ID NO: 1879673
ucccauugaccaggacuua

SEQ ID NO: 1924025 - RNA, 19 nt, Artificial Sequence
  Description of Artificial Sequence: Synthetic oligonucleotide
  Antisense strand to SEQ ID NO: 1924024
uaaguccuggucaauggga

SEQ ID NO: 1924026 - RNA, 19 nt, Artificial Sequence
  Description of Artificial Sequence: Synthetic oligonucleotide
  Sense strand starting at position 386 of SEQ ID NO: 1879673
uaguaaaugugguccuuag

SEQ ID NO: 1924027 - RNA, 19 nt, Artificial Sequence
  Description of Artificial Sequence: Synthetic oligonucleotide
  Antisense strand to SEQ ID NO: 1924026
cuaaggaccacauuuacua

SEQ ID NO: 1924028 - RNA, 19 nt, Artificial Sequence
  Description of Artificial Sequence: Synthetic oligonucleotide
  Sense strand starting at position 903 of SEQ ID NO: 1879673
ccuaucagcuguuugauaa

SEQ ID NO: 1924029 - RNA, 19 nt, Artificial Sequence
  Description of Artificial Sequence: Synthetic oligonucleotide
  Antisense strand to SEQ ID NO: 1924028
uuaucaaacagcugauagg

SEQ ID NO: 1924030 - RNA, 19 nt, Artificial Sequence
  Description of Artificial Sequence: Synthetic oligonucleotide
  Sense strand starting at position 904 of SEQ ID NO: 1879673
cuaucagcuguuugauaaa

SEQ ID NO: 1924031 - RNA, 19 nt, Artificial Sequence
  Description of Artificial Sequence: Synthetic oligonucleotide
  Antisense strand to SEQ ID NO: 1924030
uuuaucaaacagcugauag

SEQ ID NO: 1924032 - RNA, 19 nt, Artificial Sequence
  Description of Artificial Sequence: Synthetic oligonucleotide
  Sense strand starting at position 961 of SEQ ID NO: 1879673
gguucuaccucuuucucua

SEQ ID NO: 1924033 - RNA, 19 nt, Artificial Sequence
  Description of Artificial Sequence: Synthetic oligonucleotide
  Antisense strand to SEQ ID NO: 1924032
uagagaaagagguagaacc

SEQ ID NO: 1924034 - RNA, 19 nt, Artificial Sequence
  Description of Artificial Sequence: Synthetic oligonucleotide
  Sense strand starting at position 1009 of SEQ ID NO: 1879673
ugacauuuaugcuugguuu

SEQ ID NO: 1924035 - RNA, 19 nt, Artificial Sequence
  Description of Artificial Sequence: Synthetic oligonucleotide
  Antisense strand to SEQ ID NO: 1924034
aaaccaagcauaaauguca

SEQ ID NO: 1924036 - RNA, 19 nt, Artificial Sequence
  Description of Artificial Sequence: Synthetic oligonucleotide
  Sense strand starting at position 1080 of SEQ ID NO: 1879673
gaaugaauuuauggaugua

SEQ ID NO: 1924037 - RNA, 19 nt, Artificial Sequence
  Description of Artificial Sequence: Synthetic oligonucleotide
  Antisense strand to SEQ ID NO: 1924036
uacauccauaaauucauuc

SEQ ID NO: 1924038 - RNA, 19 nt, Artificial Sequence
  Description of Artificial Sequence: Synthetic oligonucleotide
  Sense strand starting at position 1194 of SEQ ID NO: 1879673
acagcuuuccacugacaga

SEQ ID NO: 1924039 - RNA, 19 nt, Artificial Sequence
  Description of Artificial Sequence: Synthetic oligonucleotide
  Antisense strand to SEQ ID NO: 1924038
ucugucaguggaaagcugu

SEQ ID NO: 1924040 - RNA, 19 nt, Artificial Sequence
  Description of Artificial Sequence: Synthetic oligonucleotide
  Sense strand starting at position 1210 of SEQ ID NO: 1879673
agaaucuugagguguuaca

SEQ ID NO: 1924041 - RNA, 19 nt, Artificial Sequence
  Description of Artificial Sequence: Synthetic oligonucleotide
  Antisense strand to SEQ ID NO: 1924040
uguaacaccucaagauucu

SEQ ID NO: 1924042 - RNA, 19 nt, Artificial Sequence
  Description of Artificial Sequence: Synthetic oligonucleotide
  Sense strand starting at position 1223 of SEQ ID NO: 1879673
guuacaguucuggagcagu

SEQ ID NO: 1924043 - RNA, 19 nt, Artificial Sequence
  Description of Artificial Sequence: Synthetic oligonucleotide
  Antisense strand to SEQ ID NO: 1924042
acugcuccagaacuguaac

SEQ ID NO: 1924044 - RNA, 19 nt, Artificial Sequence
  Description of Artificial Sequence: Synthetic oligonucleotide
  Sense strand starting at position 1347 of SEQ ID NO: 1879673
ucagguuacuaccuauauu

SEQ ID NO: 1924045 - RNA, 19 nt, Artificial Sequence
  Description of Artificial Sequence: Synthetic oligonucleotide
  Antisense strand to SEQ ID NO: 1924044
aauauagguaguaaccuga

SEQ ID NO: 1924046 - RNA, 19 nt, Artificial Sequence
  Description of Artificial Sequence: Synthetic oligonucleotide
  Sense strand starting at position 1927 of SEQ ID NO: 1879673
gcacuuuauugagucccua

SEQ ID NO: 1924047 - RNA, 19 nt, Artificial Sequence
  Description of Artificial Sequence: Synthetic oligonucleotide
  Antisense strand to SEQ ID NO: 1924046
uagggacucaauaaagugc

SEQ ID NO: 1924048 - RNA, 19 nt, Artificial Sequence
  Description of Artificial Sequence: Synthetic oligonucleotide
  Sense strand starting at position 2007 of SEQ ID NO: 1879673
cuaugcuuccuuuauguga

SEQ ID NO: 1924049 - RNA, 19 nt, Artificial Sequence
  Description of Artificial Sequence: Synthetic oligonucleotide
  Antisense strand to SEQ ID NO: 1924048
ucacauaaaggaagcauag

SEQ ID NO: 1924050 - RNA, 19 nt, Artificial Sequence
  Description of Artificial Sequence: Synthetic oligonucleotide
  Sense strand starting at position 2026 of SEQ ID NO: 1879673
auuaaaugucacugaugua

SEQ ID NO: 1924051 - RNA, 19 nt, Artificial Sequence
  Description of Artificial Sequence: Synthetic oligonucleotide
  Antisense strand to SEQ ID NO: 1924050
uacaucagugacauuuaau

SEQ ID NO: 1924052 - RNA, 19 nt, Artificial Sequence
  Description of Artificial Sequence: Synthetic oligonucleotide
  Sense strand starting at position 2148 of SEQ ID NO: 1879673
agaaauggacaguguugau

SEQ ID NO: 1924053 - RNA, 19 nt, Artificial Sequence
  Description of Artificial Sequence: Synthetic oligonucleotide
  Antisense strand to SEQ ID NO: 1924052
aucaacacuguccauuucu

SEQ ID NO: 1924054 - RNA, 19 nt, Artificial Sequence
  Description of Artificial Sequence: Synthetic oligonucleotide
  Sense strand starting at position 2157 of SEQ ID NO: 1879673
caguguugaugcucuaaac

SEQ ID NO: 1924055 - RNA, 19 nt, Artificial Sequence
  Description of Artificial Sequence: Synthetic oligonucleotide
  Antisense strand to SEQ ID NO: 1924054
guuuagagcaucaacacug

SEQ ID NO: 1924056 - RNA, 19 nt, Artificial Sequence
  Description of Artificial Sequence: Synthetic oligonucleotide
  Sense strand starting at position 2268 of SEQ ID NO: 1879673
augaguagaaauugcaaga

SEQ ID NO: 1924057 - RNA, 19 nt, Artificial Sequence
  Description of Artificial Sequence: Synthetic oligonucleotide
  Antisense strand to SEQ ID NO: 1924056
ucuugcaauuucuacucau

SEQ ID NO: 1924058 - RNA, 19 nt, Artificial Sequence
  Description of Artificial Sequence: Synthetic oligonucleotide
  Sense strand starting at position 2709 of SEQ ID NO: 1879673
augguaugauucuuucucu

SEQ ID NO: 1924059 - RNA, 19 nt, Artificial Sequence
  Description of Artificial Sequence: Synthetic oligonucleotide
  Antisense strand to SEQ ID NO: 1924058
agagaaagaaucauaccau

SEQ ID NO: 1924060 - RNA, 19 nt, Artificial Sequence
  Description of Artificial Sequence: Synthetic oligonucleotide
  Sense strand starting at position 2712 of SEQ ID NO: 1879673
guaugauucuuucucucag

SEQ ID NO: 1924061 - RNA, 19 nt, Artificial Sequence
  Description of Artificial Sequence: Synthetic oligonucleotide
  Antisense strand to SEQ ID NO: 1924060
cugagagaaagaaucauac

SEQ ID NO: 1924062 - RNA, 19 nt, Artificial Sequence
  Description of Artificial Sequence: Synthetic oligonucleotide
  Sense strand starting at position 2730 of SEQ ID NO: 1879673
gcagaucuggcucauuaag

SEQ ID NO: 1924063 - RNA, 19 nt, Artificial Sequence
  Description of Artificial Sequence: Synthetic oligonucleotide
  Antisense strand to SEQ ID NO: 1924062
cuuaaugagccagaucugc

SEQ ID NO: 1924064 - RNA, 19 nt, Artificial Sequence
  Description of Artificial Sequence: Synthetic oligonucleotide
  Sense strand starting at position 2802 of SEQ ID NO: 1879673
gcagaagucugacucugga

SEQ ID NO: 1924065 - RNA, 19 nt, Artificial Sequence
  Description of Artificial Sequence: Synthetic oligonucleotide
  Antisense strand to SEQ ID NO: 1924064
uccagagucagacuucugc

SEQ ID NO: 1924066 - RNA, 19 nt, Artificial Sequence
  Description of Artificial Sequence: Synthetic oligonucleotide
  Sense strand starting at position 3201 of SEQ ID NO: 1879673
cucaguaaauguuauuuga

SEQ ID NO: 1924067 - RNA, 19 nt, Artificial Sequence
  Description of Artificial Sequence: Synthetic oligonucleotide
  Antisense strand to SEQ ID NO: 1924066
ucaaauaacauuuacugag

SEQ ID NO: 1924068 - RNA, 19 nt, Artificial Sequence
  Description of Artificial Sequence: Synthetic oligonucleotide
  Sense strand starting at position 3212 of SEQ ID NO: 1879673
uuauuugaaucugaggcuu

SEQ ID NO: 1924069 - RNA, 19 nt, Artificial Sequence
  Description of Artificial Sequence: Synthetic oligonucleotide
  Antisense strand to SEQ ID NO: 1924068
aagccucagauucaaauaa

SEQ ID NO: 1924070 - RNA, 19 nt, Artificial Sequence
  Description of Artificial Sequence: Synthetic oligonucleotide
  Sense strand starting at position 3269 of SEQ ID NO: 1879673
uuaggucuugaguaauauc

SEQ ID NO: 1924071 - RNA, 19 nt, Artificial Sequence
  Description of Artificial Sequence: Synthetic oligonucleotide
  Antisense strand to SEQ ID NO: 1924070
gauauuacucaagaccuaa

SEQ ID NO: 1924072 - RNA, 19 nt, Artificial Sequence
  Description of Artificial Sequence: Synthetic oligonucleotide
  Sense strand starting at position 3334 of SEQ ID NO: 1879673
cuuuaagcuguuugaagaa

SEQ ID NO: 1924073 - RNA, 19 nt, Artificial Sequence
  Description of Artificial Sequence: Synthetic oligonucleotide
  Antisense strand to SEQ ID NO: 1924072
uucuucaaacagcuuaaag

SEQ ID NO: 1924074 - RNA, 19 nt, Artificial Sequence
  Description of Artificial Sequence: Synthetic oligonucleotide
  Sense strand starting at position 3341 of SEQ ID NO: 1879673
cuguuugaagaauguugau

SEQ ID NO: 1924075 - RNA, 19 nt, Artificial Sequence
  Description of Artificial Sequence: Synthetic oligonucleotide
  Antisense strand to SEQ ID NO: 1924074
aucaacauucuucaaacag

SEQ ID NO: 1924076 - RNA, 19 nt, Artificial Sequence
  Description of Artificial Sequence: Synthetic oligonucleotide
  Sense strand starting at position 3396 of SEQ ID NO: 1879673
cuuuaaauuccuggcuuga

SEQ ID NO: 1924077 - RNA, 19 nt, Artificial Sequence
  Description of Artificial Sequence: Synthetic oligonucleotide
  Antisense strand to SEQ ID NO: 1924076
ucaagccaggaauuuaaag

SEQ ID NO: 1924078 - RNA, 19 nt, Artificial Sequence
  Description of Artificial Sequence: Synthetic oligonucleotide
  Sense strand starting at position 3398 of SEQ ID NO: 1879673
uuaaauuccuggcuugaau

SEQ ID NO: 1924079 - RNA, 19 nt, Artificial Sequence
  Description of Artificial Sequence: Synthetic oligonucleotide
  Antisense strand to SEQ ID NO: 1924078
auucaagccaggaauuuaa

SEQ ID NO: 1924080 - RNA, 19 nt, Artificial Sequence
  Description of Artificial Sequence: Synthetic oligonucleotide
  Sense strand starting at position 3460 of SEQ ID NO: 1879673
agguauuucuacuugcuuu

SEQ ID NO: 1924081 - RNA, 19 nt, Artificial Sequence
  Description of Artificial Sequence: Synthetic oligonucleotide
  Antisense strand to SEQ ID NO: 1924080
aaagcaaguagaaauaccu

SEQ ID NO: 1924082 - RNA, 19 nt, Artificial Sequence
  Description of Artificial Sequence: Synthetic oligonucleotide
  Sense strand starting at position 3790 of SEQ ID NO: 1879673
ugcaguauacaucaguaaa

SEQ ID NO: 1924083 - RNA, 19 nt, Artificial Sequence
  Description of Artificial Sequence: Synthetic oligonucleotide
  Antisense strand to SEQ ID NO: 1924082
uuuacugauguauacugca

SEQ ID NO: 1924084 - RNA, 19 nt, Artificial Sequence
  Description of Artificial Sequence: Synthetic oligonucleotide
  Sense strand starting at position 3830 of SEQ ID NO: 1879673
aguacucaccaauggcaaa

SEQ ID NO: 1924085 - RNA, 19 nt, Artificial Sequence
  Description of Artificial Sequence: Synthetic oligonucleotide
  Antisense strand to SEQ ID NO: 1924084
uuugccauuggugaguacu

SEQ ID NO: 1924086 - RNA, 19 nt, Artificial Sequence
  Description of Artificial Sequence: Synthetic oligonucleotide
  Sense strand starting at position 3874 of SEQ ID NO: 1879673
uucugaaaucuuuguggua

SEQ ID NO: 1924087 - RNA, 19 nt, Artificial Sequence
  Description of Artificial Sequence: Synthetic oligonucleotide
  Antisense strand to SEQ ID NO: 1924086
uaccacaaagauuucagaa

SEQ ID NO: 1924088 - RNA, 19 nt, Artificial Sequence
  Description of Artificial Sequence: Synthetic oligonucleotide
  Sense strand starting at position 3875 of SEQ ID NO: 1879673
ucugaaaucuuugugguau

SEQ ID NO: 1924089 - RNA, 19 nt, Artificial Sequence
  Description of Artificial Sequence: Synthetic oligonucleotide
  Antisense strand to SEQ ID NO: 1924088
auaccacaaagauuucaga

SEQ ID NO: 1924090 - RNA, 19 nt, Artificial Sequence
  Description of Artificial Sequence: Synthetic oligonucleotide
  Sense strand starting at position 20 of SEQ ID NO: 1879674
gagagaagugauugcauca

SEQ ID NO: 1924091 - RNA, 19 nt, Artificial Sequence
  Description of Artificial Sequence: Synthetic oligonucleotide
  Antisense strand to SEQ ID NO: 1924090
ugaugcaaucacuucucuc

SEQ ID NO: 1924092 - RNA, 19 nt, Artificial Sequence
  Description of Artificial Sequence: Synthetic oligonucleotide
  Sense strand starting at position 77 of SEQ ID NO: 1879674
uggagaugccuuugggaac

SEQ ID NO: 1924093 - RNA, 19 nt, Artificial Sequence
  Description of Artificial Sequence: Synthetic oligonucleotide
  Antisense strand to SEQ ID NO: 1924092
guucccaaaggcaucucca

SEQ ID NO: 1924094 - RNA, 19 nt, Artificial Sequence
  Description of Artificial Sequence: Synthetic oligonucleotide
  Sense strand starting at position 229 of SEQ ID NO: 1879674
uugggauggucuuccacaa

SEQ ID NO: 1924095 - RNA, 19 nt, Artificial Sequence
  Description of Artificial Sequence: Synthetic oligonucleotide
  Antisense strand to SEQ ID NO: 1924094
uuguggaagaccaucccaa

SEQ ID NO: 1924096 - RNA, 19 nt, Artificial Sequence
  Description of Artificial Sequence: Synthetic oligonucleotide
  Sense strand starting at position 258 of SEQ ID NO: 1879674
gagaaacugugauuguaca

SEQ ID NO: 1924097 - RNA, 19 nt, Artificial Sequence
  Description of Artificial Sequence: Synthetic oligonucleotide
  Antisense strand to SEQ ID NO: 1924096
uguacaaucacaguuucuc

SEQ ID NO: 1924098 - RNA, 19 nt, Artificial Sequence
  Description of Artificial Sequence: Synthetic oligonucleotide
  Sense strand starting at position 259 of SEQ ID NO: 1879674
agaaacugugauuguacau

SEQ ID NO: 1924099 - RNA, 19 nt, Artificial Sequence
  Description of Artificial Sequence: Synthetic oligonucleotide
  Antisense strand to SEQ ID NO: 1924098
auguacaaucacaguuucu

SEQ ID NO: 1924100 - RNA, 19 nt, Artificial Sequence
  Description of Artificial Sequence: Synthetic oligonucleotide
  Sense strand starting at position 308 of SEQ ID NO: 1879674
gucuucucgacugauggaa

SEQ ID NO: 1924101 - RNA, 19 nt, Artificial Sequence
  Description of Artificial Sequence: Synthetic oligonucleotide
  Antisense strand to SEQ ID NO: 1924100
uuccaucagucgagaagac

SEQ ID NO: 1924102 - RNA, 19 nt, Artificial Sequence
  Description of Artificial Sequence: Synthetic oligonucleotide
  Sense strand starting at position 312 of SEQ ID NO: 1879674
ucucgacugauggaaaugu

SEQ ID NO: 1924103 - RNA, 19 nt, Artificial Sequence
  Description of Artificial Sequence: Synthetic oligonucleotide
  Antisense strand to SEQ ID NO: 1924102
acauuuccaucagucgaga

SEQ ID NO: 1924104 - RNA, 19 nt, Artificial Sequence
  Description of Artificial Sequence: Synthetic oligonucleotide
  Sense strand starting at position 399 of SEQ ID NO: 1879674
gggaucaaccaaugucgau

SEQ ID NO: 1924105 - RNA, 19 nt, Artificial Sequence
  Description of Artificial Sequence: Synthetic oligonucleotide
  Antisense strand to SEQ ID NO: 1924104
aucgacauugguugauccc

SEQ ID NO: 1924106 - RNA, 19 nt, Artificial Sequence
  Description of Artificial Sequence: Synthetic oligonucleotide
  Sense strand starting at position 413 of SEQ ID NO: 1879674
ucgauuuccuagcugcaga

SEQ ID NO: 1924107 - RNA, 19 nt, Artificial Sequence
  Description of Artificial Sequence: Synthetic oligonucleotide
  Antisense strand to SEQ ID NO: 1924106
ucugcagcuaggaaaucga

SEQ ID NO: 1924108 - RNA, 19 nt, Artificial Sequence
  Description of Artificial Sequence: Synthetic oligonucleotide
  Sense strand starting at position 414 of SEQ ID NO: 1879674
cgauuuccuagcugcagaa

SEQ ID NO: 1924109 - RNA, 19 nt, Artificial Sequence
  Description of Artificial Sequence: Synthetic oligonucleotide
  Antisense strand to SEQ ID NO: 1924108
uucugcagcuaggaaaucg

SEQ ID NO: 1924110 - RNA, 19 nt, Artificial Sequence
  Description of Artificial Sequence: Synthetic oligonucleotide
  Sense strand starting at position 499 of SEQ ID NO: 1879674
gcauauaucccauagggcu

SEQ ID NO: 1924111 - RNA, 19 nt, Artificial Sequence
  Description of Artificial Sequence: Synthetic oligonucleotide
  Antisense strand to SEQ ID NO: 1924110
agcccuaugggauauaugc

SEQ ID NO: 1924112 - RNA, 19 nt, Artificial Sequence
  Description of Artificial Sequence: Synthetic oligonucleotide
  Sense strand starting at position 762 of SEQ ID NO: 1879674
uguauuugcugacuucuau

SEQ ID NO: 1924113 - RNA, 19 nt, Artificial Sequence
  Description of Artificial Sequence: Synthetic oligonucleotide
  Antisense strand to SEQ ID NO: 1924112
auagaagucagcaaauaca

SEQ ID NO: 1924114 - RNA, 19 nt, Artificial Sequence
  Description of Artificial Sequence: Synthetic oligonucleotide
  Sense strand starting at position 948 of SEQ ID NO: 1879674
acuagaauauggccuccaa

SEQ ID NO: 1924115 - RNA, 19 nt, Artificial Sequence
  Description of Artificial Sequence: Synthetic oligonucleotide
  Antisense strand to SEQ ID NO: 1924114
uuggaggccauauucuagu

SEQ ID NO: 1924116 - RNA, 19 nt, Artificial Sequence
  Description of Artificial Sequence: Synthetic oligonucleotide
  Sense strand starting at position 952 of SEQ ID NO: 1879674
gaauauggccuccaagucu

SEQ ID NO: 1924117 - RNA, 19 nt, Artificial Sequence
  Description of Artificial Sequence: Synthetic oligonucleotide
  Antisense strand to SEQ ID NO: 1924116
agacuuggaggccauauuc

SEQ ID NO: 1924118 - RNA, 19 nt, Artificial Sequence
  Description of Artificial Sequence: Synthetic oligonucleotide
  Sense strand starting at position 977 of SEQ ID NO: 1879674
guggguagccuucagaaag

SEQ ID NO: 1924119 - RNA, 19 nt, Artificial Sequence
  Description of Artificial Sequence: Synthetic oligonucleotide
  Antisense strand to SEQ ID NO: 1924118
cuuucugaaggcuacccac

SEQ ID NO: 1924120 - RNA, 19 nt, Artificial Sequence
  Description of Artificial Sequence: Synthetic oligonucleotide
  Sense strand starting at position 1154 of SEQ ID NO: 1879674
ugcuguaaugaugaccaaa

SEQ ID NO: 1924121 - RNA, 19 nt, Artificial Sequence
  Description of Artificial Sequence: Synthetic oligonucleotide
  Antisense strand to SEQ ID NO: 1924120
uuuggucaucauuacagca

SEQ ID NO: 1924122 - RNA, 19 nt, Artificial Sequence
  Description of Artificial Sequence: Synthetic oligonucleotide
  Sense strand starting at position 1156 of SEQ ID NO: 1879674
cuguaaugaugaccaaauc

SEQ ID NO: 1924123 - RNA, 19 nt, Artificial Sequence
  Description of Artificial Sequence: Synthetic oligonucleotide
  Antisense strand to SEQ ID NO: 1924122
gauuuggucaucauuacag

SEQ ID NO: 1924124 - RNA, 19 nt, Artificial Sequence
  Description of Artificial Sequence: Synthetic oligonucleotide
  Sense strand starting at position 1175 of SEQ ID NO: 1879674
aggaaauucugguccuaac

SEQ ID NO: 1924125 - RNA, 19 nt, Artificial Sequence
  Description of Artificial Sequence: Synthetic oligonucleotide
  Antisense strand to SEQ ID NO: 1924124
guuaggaccagaauuuccu

SEQ ID NO: 1924126 - RNA, 19 nt, Artificial Sequence
  Description of Artificial Sequence: Synthetic oligonucleotide
  Sense strand starting at position 1552 of SEQ ID NO: 1879674
gcuaucacguaaguaauuu

SEQ ID NO: 1924127 - RNA, 19 nt, Artificial Sequence
  Description of Artificial Sequence: Synthetic oligonucleotide
  Antisense strand to SEQ ID NO: 1924126
aaauuacuuacgugauagc

SEQ ID NO: 1924128 - RNA, 19 nt, Artificial Sequence
  Description of Artificial Sequence: Synthetic oligonucleotide
  Sense strand starting at position 1643 of SEQ ID NO: 1879674
gagagauauugggccucua

SEQ ID NO: 1924129 - RNA, 19 nt, Artificial Sequence
  Description of Artificial Sequence: Synthetic oligonucleotide
  Antisense strand to SEQ ID NO: 1924128
uagaggcccaauaucucuc

SEQ ID NO: 1924130 - RNA, 19 nt, Artificial Sequence
  Description of Artificial Sequence: Synthetic oligonucleotide
  Sense strand starting at position 1878 of SEQ ID NO: 1879674
uuugguuuccauuaacgau

SEQ ID NO: 1924131 - RNA, 19 nt, Artificial Sequence
  Description of Artificial Sequence: Synthetic oligonucleotide
  Antisense strand to SEQ ID NO: 1924130
aucguuaauggaaaccaaa

SEQ ID NO: 1924132 - RNA, 19 nt, Artificial Sequence
  Description of Artificial Sequence: Synthetic oligonucleotide
  Sense strand starting at position 1903 of SEQ ID NO: 1879674
cugagauccaucgaauagu

SEQ ID NO: 1924133 - RNA, 19 nt, Artificial Sequence
  Description of Artificial Sequence: Synthetic oligonucleotide
  Antisense strand to SEQ ID NO: 1924132
acuauucgauggaucucag

SEQ ID NO: 1924134 - RNA, 19 nt, Artificial Sequence
  Description of Artificial Sequence: Synthetic oligonucleotide
  Sense strand starting at position 2018 of SEQ ID NO: 1879674
aguguaaauuucuuuguug

SEQ ID NO: 1924135 - RNA, 19 nt, Artificial Sequence
  Description of Artificial Sequence: Synthetic oligonucleotide
  Antisense strand to SEQ ID NO: 1924134
caacaaagaaauuuacacu

SEQ ID NO: 1924136 - RNA, 19 nt, Artificial Sequence
  Description of Artificial Sequence: Synthetic oligonucleotide
  Sense strand starting at position 2019 of SEQ ID NO: 1879674
guguaaauuucuuuguugu

SEQ ID NO: 1924137 - RNA, 19 nt, Artificial Sequence
  Description of Artificial Sequence: Synthetic oligonucleotide
  Antisense strand to SEQ ID NO: 1924136
acaacaaagaaauuuacac

SEQ ID NO: 1924138 - RNA, 19 nt, Artificial Sequence
  Description of Artificial Sequence: Synthetic oligonucleotide
  Sense strand starting at position 2068 of SEQ ID NO: 1879674
agcaaaguaaaggguaauu

SEQ ID NO: 1924139 - RNA, 19 nt, Artificial Sequence
  Description of Artificial Sequence: Synthetic oligonucleotide
  Antisense strand to SEQ ID NO: 1924138
aauuacccuuuacuuugcu

SEQ ID NO: 1924140 - RNA, 19 nt, Artificial Sequence
  Description of Artificial Sequence: Synthetic oligonucleotide
  Sense strand starting at position 2129 of SEQ ID NO: 1879674
ggucuucugaucuagugaa

SEQ ID NO: 1924141 - RNA, 19 nt, Artificial Sequence
  Description of Artificial Sequence: Synthetic oligonucleotide
  Antisense strand to SEQ ID NO: 1924140
uucacuagaucagaagacc

SEQ ID NO: 1924142 - RNA, 19 nt, Artificial Sequence
  Description of Artificial Sequence: Synthetic oligonucleotide
  Sense strand starting at position 2133 of SEQ ID NO: 1879674
uucugaucuagugaaggca

SEQ ID NO: 1924143 - RNA, 19 nt, Artificial Sequence
  Description of Artificial Sequence: Synthetic oligonucleotide
  Antisense strand to SEQ ID NO: 1924142
ugccuucacuagaucagaa

SEQ ID NO: 1924144 - RNA, 19 nt, Artificial Sequence
  Description of Artificial Sequence: Synthetic oligonucleotide
  Sense strand starting at position 2141 of SEQ ID NO: 1879674
uagugaaggcaucaucaca

SEQ ID NO: 1924145 - RNA, 19 nt, Artificial Sequence
  Description of Artificial Sequence: Synthetic oligonucleotide
  Antisense strand to SEQ ID NO: 1924144
ugugaugaugccuucacua

SEQ ID NO: 1924146 - RNA, 19 nt, Artificial Sequence
  Description of Artificial Sequence: Synthetic oligonucleotide
  Sense strand starting at position 2157 of SEQ ID NO: 1879674
acauauucugggugguuaa

SEQ ID NO: 1924147 - RNA, 19 nt, Artificial Sequence
  Description of Artificial Sequence: Synthetic oligonucleotide
  Antisense strand to SEQ ID NO: 1924146
uuaaccacccagaauaugu

SEQ ID NO: 1924148 - RNA, 19 nt, Artificial Sequence
  Description of Artificial Sequence: Synthetic oligonucleotide
  Sense strand starting at position 2167 of SEQ ID NO: 1879674
ggugguuaaugauuagaaa

SEQ ID NO: 1924149 - RNA, 19 nt, Artificial Sequence
  Description of Artificial Sequence: Synthetic oligonucleotide
  Antisense strand to SEQ ID NO: 1924148
uuucuaaucauuaaccacc

SEQ ID NO: 1924150 - RNA, 19 nt, Artificial Sequence
  Description of Artificial Sequence: Synthetic oligonucleotide
  Sense strand starting at position 2688 of SEQ ID NO: 1879674
auggcaaacuucuuaagaa

SEQ ID NO: 1924151 - RNA, 19 nt, Artificial Sequence
  Description of Artificial Sequence: Synthetic oligonucleotide
  Antisense strand to SEQ ID NO: 1924150
uucuuaagaaguuugccau

SEQ ID NO: 1924152 - RNA, 19 nt, Artificial Sequence
  Description of Artificial Sequence: Synthetic oligonucleotide
  Sense strand starting at position 3060 of SEQ ID NO: 1879674
ccauuugucuugucaguaa

SEQ ID NO: 1924153 - RNA, 19 nt, Artificial Sequence
  Description of Artificial Sequence: Synthetic oligonucleotide
  Antisense strand to SEQ ID NO: 1924152
uuacugacaagacaaaugg

SEQ ID NO: 1924154 - RNA, 19 nt, Artificial Sequence
  Description of Artificial Sequence: Synthetic oligonucleotide
  Sense strand starting at position 3072 of SEQ ID NO: 1879674
ucaguaaaugccuagugga

SEQ ID NO: 1924155 - RNA, 19 nt, Artificial Sequence
  Description of Artificial Sequence: Synthetic oligonucleotide
  Antisense strand to SEQ ID NO: 1924154
uccacuaggcauuuacuga

SEQ ID NO: 1924156 - RNA, 19 nt, Artificial Sequence
  Description of Artificial Sequence: Synthetic oligonucleotide
  Sense strand starting at position 3318 of SEQ ID NO: 1879674
cugccauuugcugagcauu

SEQ ID NO: 1924157 - RNA, 19 nt, Artificial Sequence
  Description of Artificial Sequence: Synthetic oligonucleotide
  Antisense strand to SEQ ID NO: 1924156
aaugcucagcaaauggcag

SEQ ID NO: 1924158 - RNA, 19 nt, Artificial Sequence
  Description of Artificial Sequence: Synthetic oligonucleotide
  Sense strand starting at position 3528 of SEQ ID NO: 1879674
ugagaauaaauguggcuuu

SEQ ID NO: 1924159 - RNA, 19 nt, Artificial Sequence
  Description of Artificial Sequence: Synthetic oligonucleotide
  Antisense strand to SEQ ID NO: 1924158
aaagccacauuuauucuca

SEQ ID NO: 1924160 - RNA, 19 nt, Artificial Sequence
  Description of Artificial Sequence: Synthetic oligonucleotide
  Sense strand starting at position 3640 of SEQ ID NO: 1879674
gauucugacguacagcaaa

SEQ ID NO: 1924161 - RNA, 19 nt, Artificial Sequence
  Description of Artificial Sequence: Synthetic oligonucleotide
  Antisense strand to SEQ ID NO: 1924160
uuugcuguacgucagaauc

SEQ ID NO: 1924162 - RNA, 19 nt, Artificial Sequence
  Description of Artificial Sequence: Synthetic oligonucleotide
  Sense strand starting at position 3672 of SEQ ID NO: 1879674
gcauuucuaccuggucaca

SEQ ID NO: 1924163 - RNA, 19 nt, Artificial Sequence
  Description of Artificial Sequence: Synthetic oligonucleotide
  Antisense strand to SEQ ID NO: 1924162
ugugaccagguagaaaugc

SEQ ID NO: 1924164 - RNA, 19 nt, Artificial Sequence
  Description of Artificial Sequence: Synthetic oligonucleotide
  Sense strand starting at position 3877 of SEQ ID NO: 1879674
guggaaugaaacuguuaug

SEQ ID NO: 1924165 - RNA, 19 nt, Artificial Sequence
  Description of Artificial Sequence: Synthetic oligonucleotide
  Antisense strand to SEQ ID NO: 1924164
cauaacaguuucauuccac

SEQ ID NO: 1924166 - RNA, 19 nt, Artificial Sequence
  Description of Artificial Sequence: Synthetic oligonucleotide
  Sense strand starting at position 3931 of SEQ ID NO: 1879674
ggcaauuaauucucuugga

SEQ ID NO: 1924167 - RNA, 19 nt, Artificial Sequence
  Description of Artificial Sequence: Synthetic oligonucleotide
  Antisense strand to SEQ ID NO: 1924166
uccaagagaauuaauugcc

SEQ ID NO: 1924168 - RNA, 19 nt, Artificial Sequence
  Description of Artificial Sequence: Synthetic oligonucleotide
  Sense strand starting at position 3932 of SEQ ID NO: 1879674
gcaauuaauucucuuggau

SEQ ID NO: 1924169 - RNA, 19 nt, Artificial Sequence
  Description of Artificial Sequence: Synthetic oligonucleotide
  Antisense strand to SEQ ID NO: 1924168
auccaagagaauuaauugc

SEQ ID NO: 1924170 - RNA, 19 nt, Artificial Sequence
  Description of Artificial Sequence: Synthetic oligonucleotide
  Sense strand starting at position 14 of SEQ ID NO: 1879675
ucucauucccaugagagua

SEQ ID NO: 1924171 - RNA, 19 nt, Artificial Sequence
  Description of Artificial Sequence: Synthetic oligonucleotide
  Antisense strand to SEQ ID NO: 1924170
uacucucaugggaaugaga

SEQ ID NO: 1924172 - RNA, 19 nt, Artificial Sequence
  Description of Artificial Sequence: Synthetic oligonucleotide
  Sense strand starting at position 123 of SEQ ID NO: 1879675
ugaauuaaauggccucuua

SEQ ID NO: 1924173 - RNA, 19 nt, Artificial Sequence
  Description of Artificial Sequence: Synthetic oligonucleotide
  Antisense strand to SEQ ID NO: 1924172
uaagaggccauuuaauuca

SEQ ID NO: 1924174 - RNA, 19 nt, Artificial Sequence
  Description of Artificial Sequence: Synthetic oligonucleotide
  Sense strand starting at position 149 of SEQ ID NO: 1879675
uuaauugcagaucagcaaa

SEQ ID NO: 1924175 - RNA, 19 nt, Artificial Sequence
  Description of Artificial Sequence: Synthetic oligonucleotide
  Antisense strand to SEQ ID NO: 1924174
uuugcugaucugcaauuaa

SEQ ID NO: 1924176 - RNA, 19 nt, Artificial Sequence
  Description of Artificial Sequence: Synthetic oligonucleotide
  Sense strand starting at position 152 of SEQ ID NO: 1879675
auugcagaucagcaaaguu

SEQ ID NO: 1924177 - RNA, 19 nt, Artificial Sequence
  Description of Artificial Sequence: Synthetic oligonucleotide
  Antisense strand to SEQ ID NO: 1924176
aacuuugcugaucugcaau

SEQ ID NO: 1924178 - RNA, 19 nt, Artificial Sequence
  Description of Artificial Sequence: Synthetic oligonucleotide
  Sense strand starting at position 275 of SEQ ID NO: 1879675
ggauuaaauguugguauau

SEQ ID NO: 1924179 - RNA, 19 nt, Artificial Sequence
  Description of Artificial Sequence: Synthetic oligonucleotide
  Antisense strand to SEQ ID NO: 1924178
auauaccaacauuuaaucc

SEQ ID NO: 1924180 - RNA, 19 nt, Artificial Sequence
  Description of Artificial Sequence: Synthetic oligonucleotide
  Sense strand starting at position 296 of SEQ ID NO: 1879675
gugaaauaguccuccucag

SEQ ID NO: 1924181 - RNA, 19 nt, Artificial Sequence
  Description of Artificial Sequence: Synthetic oligonucleotide
  Antisense strand to SEQ ID NO: 1924180
cugaggaggacuauuucac

SEQ ID NO: 1924182 - RNA, 19 nt, Artificial Sequence
  Description of Artificial Sequence: Synthetic oligonucleotide
  Sense strand starting at position 303 of SEQ ID NO: 1879675
aguccuccucaguaaauau

SEQ ID NO: 1924183 - RNA, 19 nt, Artificial Sequence
  Description of Artificial Sequence: Synthetic oligonucleotide
  Antisense strand to SEQ ID NO: 1924182
auauuuacugaggaggacu

SEQ ID NO: 1924184 - RNA, 19 nt, Artificial Sequence
  Description of Artificial Sequence: Synthetic oligonucleotide
  Sense strand starting at position 371 of SEQ ID NO: 1879675
uguagcuuucucuagaaca

SEQ ID NO: 1924185 - RNA, 19 nt, Artificial Sequence
  Description of Artificial Sequence: Synthetic oligonucleotide
  Antisense strand to SEQ ID NO: 1924184
uguucuagagaaagcuaca

SEQ ID NO: 1924186 - RNA, 19 nt, Artificial Sequence
  Description of Artificial Sequence: Synthetic oligonucleotide
  Sense strand starting at position 786 of SEQ ID NO: 1879675
cugaaacaucccuggcaag

SEQ ID NO: 1924187 - RNA, 19 nt, Artificial Sequence
  Description of Artificial Sequence: Synthetic oligonucleotide
  Antisense strand to SEQ ID NO: 1924186
cuugccagggauguuucag

SEQ ID NO: 1924188 - RNA, 19 nt, Artificial Sequence
  Description of Artificial Sequence: Synthetic oligonucleotide
  Sense strand starting at position 855 of SEQ ID NO: 1879675
ggaagacucagcuaugcug

SEQ ID NO: 1924189 - RNA, 19 nt, Artificial Sequence
  Description of Artificial Sequence: Synthetic oligonucleotide
  Antisense strand to SEQ ID NO: 1924188
cagcauagcugagucuucc

SEQ ID NO: 1924190 - RNA, 19 nt, Artificial Sequence
  Description of Artificial Sequence: Synthetic oligonucleotide
  Sense strand starting at position 1015 of SEQ ID NO: 1879675
acaccuagaugaguuaagu

SEQ ID NO: 1924191 - RNA, 19 nt, Artificial Sequence
  Description of Artificial Sequence: Synthetic oligonucleotide
  Antisense strand to SEQ ID NO: 1924190
acuuaacucaucuaggugu

SEQ ID NO: 1924192 - RNA, 19 nt, Artificial Sequence
  Description of Artificial Sequence: Synthetic oligonucleotide
  Sense strand starting at position 1078 of SEQ ID NO: 1879675
gaacccaggugaucuaacu

SEQ ID NO: 1924193 - RNA, 19 nt, Artificial Sequence
  Description of Artificial Sequence: Synthetic oligonucleotide
  Antisense strand to SEQ ID NO: 1924192
aguuagaucaccuggguuc

SEQ ID NO: 1924194 - RNA, 19 nt, Artificial Sequence
  Description of Artificial Sequence: Synthetic oligonucleotide
  Sense strand starting at position 1086 of SEQ ID NO: 1879675
gugaucuaacuccaugauc

SEQ ID NO: 1924195 - RNA, 19 nt, Artificial Sequence
  Description of Artificial Sequence: Synthetic oligonucleotide
  Antisense strand to SEQ ID NO: 1924194
gaucauggaguuagaucac

SEQ ID NO: 1924196 - RNA, 19 nt, Artificial Sequence
  Description of Artificial Sequence: Synthetic oligonucleotide
  Sense strand starting at position 1148 of SEQ ID NO: 1879675
uaaugugggcagcaauaua

SEQ ID NO: 1924197 - RNA, 19 nt, Artificial Sequence
  Description of Artificial Sequence: Synthetic oligonucleotide
  Antisense strand to SEQ ID NO: 1924196
uauauugcugcccacauua

SEQ ID NO: 1924198 - RNA, 19 nt, Artificial Sequence
  Description of Artificial Sequence: Synthetic oligonucleotide
  Sense strand starting at position 1221 of SEQ ID NO: 1879675
agagcauucgcuuucuguu

SEQ ID NO: 1924199 - RNA, 19 nt, Artificial Sequence
  Description of Artificial Sequence: Synthetic oligonucleotide
  Antisense strand to SEQ ID NO: 1924198
aacagaaagcgaaugcucu

SEQ ID NO: 1924200 - RNA, 19 nt, Artificial Sequence
  Description of Artificial Sequence: Synthetic oligonucleotide
  Sense strand starting at position 1222 of SEQ ID NO: 1879675
gagcauucgcuuucuguug

SEQ ID NO: 1924201 - RNA, 19 nt, Artificial Sequence
  Description of Artificial Sequence: Synthetic oligonucleotide
  Antisense strand to SEQ ID NO: 1924200
caacagaaagcgaaugcuc

SEQ ID NO: 1924202 - RNA, 19 nt, Artificial Sequence
  Description of Artificial Sequence: Synthetic oligonucleotide
  Sense strand starting at position 1309 of SEQ ID NO: 1879675
agaagcuuggugugaacaa

SEQ ID NO: 1924203 - RNA, 19 nt, Artificial Sequence
  Description of Artificial Sequence: Synthetic oligonucleotide
  Antisense strand to SEQ ID NO: 1924202
uuguucacaccaagcuucu

SEQ ID NO: 1924204 - RNA, 19 nt, Artificial Sequence
  Description of Artificial Sequence: Synthetic oligonucleotide
  Sense strand starting at position 1438 of SEQ ID NO: 1879675
gggacaacaucuccauguu

SEQ ID NO: 1924205 - RNA, 19 nt, Artificial Sequence
  Description of Artificial Sequence: Synthetic oligonucleotide
  Antisense strand to SEQ ID NO: 1924204
aacauggagauguuguccc

SEQ ID NO: 1924206 - RNA, 19 nt, Artificial Sequence
  Description of Artificial Sequence: Synthetic oligonucleotide
  Sense strand starting at position 1439 of SEQ ID NO: 1879675
ggacaacaucuccauguuu

SEQ ID NO: 1924207 - RNA, 19 nt, Artificial Sequence
  Description of Artificial Sequence: Synthetic oligonucleotide
  Antisense strand to SEQ ID NO: 1924206
aaacauggagauguugucc

SEQ ID NO: 1924208 - RNA, 19 nt, Artificial Sequence
  Description of Artificial Sequence: Synthetic oligonucleotide
  Sense strand starting at position 1627 of SEQ ID NO: 1879675
uucugugugguuuaacaga

SEQ ID NO: 1924209 - RNA, 19 nt, Artificial Sequence
  Description of Artificial Sequence: Synthetic oligonucleotide
  Antisense strand to SEQ ID NO: 1924208
ucuguuaaaccacacagaa

SEQ ID NO: 1924210 - RNA, 19 nt, Artificial Sequence
  Description of Artificial Sequence: Synthetic oligonucleotide
  Sense strand starting at position 1709 of SEQ ID NO: 1879675
augugauauuaaguuacca

SEQ ID NO: 1924211 - RNA, 19 nt, Artificial Sequence
  Description of Artificial Sequence: Synthetic oligonucleotide
  Antisense strand to SEQ ID NO: 1924210
ugguaacuuaauaucacau

SEQ ID NO: 1924212 - RNA, 19 nt, Artificial Sequence
  Description of Artificial Sequence: Synthetic oligonucleotide
  Sense strand starting at position 1760 of SEQ ID NO: 1879675
ugacgauuauaauucuagu

SEQ ID NO: 1924213 - RNA, 19 nt, Artificial Sequence
  Description of Artificial Sequence: Synthetic oligonucleotide
  Antisense strand to SEQ ID NO: 1924212
acuagaauuauaaucguca

SEQ ID NO: 1924214 - RNA, 19 nt, Artificial Sequence
  Description of Artificial Sequence: Synthetic oligonucleotide
  Sense strand starting at position 1912 of SEQ ID NO: 1879675
ggaaauuaacuauggcuuu

SEQ ID NO: 1924215 - RNA, 19 nt, Artificial Sequence
  Description of Artificial Sequence: Synthetic oligonucleotide
  Antisense strand to SEQ ID NO: 1924214
aaagccauaguuaauuucc

SEQ ID NO: 1924216 - RNA, 19 nt, Artificial Sequence
  Description of Artificial Sequence: Synthetic oligonucleotide
  Sense strand starting at position 2320 of SEQ ID NO: 1879675
cugcuuaaccuugggaaau

SEQ ID NO: 1924217 - RNA, 19 nt, Artificial Sequence
  Description of Artificial Sequence: Synthetic oligonucleotide
  Antisense strand to SEQ ID NO: 1924216
auuucccaagguuaagcag

SEQ ID NO: 1924218 - RNA, 19 nt, Artificial Sequence
  Description of Artificial Sequence: Synthetic oligonucleotide
  Sense strand starting at position 2365 of SEQ ID NO: 1879675
ucuucuucuguagaaugga

SEQ ID NO: 1924219 - RNA, 19 nt, Artificial Sequence
  Description of Artificial Sequence: Synthetic oligonucleotide
  Antisense strand to SEQ ID NO: 1924218
uccauucuacagaagaaga

SEQ ID NO: 1924220 - RNA, 19 nt, Artificial Sequence
  Description of Artificial Sequence: Synthetic oligonucleotide
  Sense strand starting at position 2404 of SEQ ID NO: 1879675
uagucaguucgauauaaau

SEQ ID NO: 1924221 - RNA, 19 nt, Artificial Sequence
  Description of Artificial Sequence: Synthetic oligonucleotide
  Antisense strand to SEQ ID NO: 1924220
auuuauaucgaacugacua

SEQ ID NO: 1924222 - RNA, 19 nt, Artificial Sequence
  Description of Artificial Sequence: Synthetic oligonucleotide
  Sense strand starting at position 2556 of SEQ ID NO: 1879675
ucgguuaaucccuauaacc

SEQ ID NO: 1924223 - RNA, 19 nt, Artificial Sequence
  Description of Artificial Sequence: Synthetic oligonucleotide
  Antisense strand to SEQ ID NO: 1924222
gguuauagggauuaaccga

SEQ ID NO: 1924224 - RNA, 19 nt, Artificial Sequence
  Description of Artificial Sequence: Synthetic oligonucleotide
  Sense strand starting at position 2706 of SEQ ID NO: 1879675
uagccuuauccugaagagu

SEQ ID NO: 1924225 - RNA, 19 nt, Artificial Sequence
  Description of Artificial Sequence: Synthetic oligonucleotide
  Antisense strand to SEQ ID NO: 1924224
acucuucaggauaaggcua

SEQ ID NO: 1924226 - RNA, 19 nt, Artificial Sequence
  Description of Artificial Sequence: Synthetic oligonucleotide
  Sense strand starting at position 2709 of SEQ ID NO: 1879675
ccuuauccugaagaguuua

SEQ ID NO: 1924227 - RNA, 19 nt, Artificial Sequence
  Description of Artificial Sequence: Synthetic oligonucleotide
  Antisense strand to SEQ ID NO: 1924226
uaaacucuucaggauaagg

SEQ ID NO: 1924228 - RNA, 19 nt, Artificial Sequence
  Description of Artificial Sequence: Synthetic oligonucleotide
  Sense strand starting at position 2714 of SEQ ID NO: 1879675
uccugaagaguuuagugua

SEQ ID NO: 1924229 - RNA, 19 nt, Artificial Sequence
  Description of Artificial Sequence: Synthetic oligonucleotide
  Antisense strand to SEQ ID NO: 1924228
uacacuaaacucuucagga

SEQ ID NO: 1924230 - RNA, 19 nt, Artificial Sequence
  Description of Artificial Sequence: Synthetic oligonucleotide
  Sense strand starting at position 2721 of SEQ ID NO: 1879675
gaguuuaguguaggagaga

SEQ ID NO: 1924231 - RNA, 19 nt, Artificial Sequence
  Description of Artificial Sequence: Synthetic oligonucleotide
  Antisense strand to SEQ ID NO: 1924230
ucucuccuacacuaaacuc

SEQ ID NO: 1924232 - RNA, 19 nt, Artificial Sequence
  Description of Artificial Sequence: Synthetic oligonucleotide
  Sense strand starting at position 2904 of SEQ ID NO: 1879675
guaggucagauagagaguu

SEQ ID NO: 1924233 - RNA, 19 nt, Artificial Sequence
  Description of Artificial Sequence: Synthetic oligonucleotide
  Antisense strand to SEQ ID NO: 1924232
aacucucuaucugaccuac

SEQ ID NO: 1924234 - RNA, 19 nt, Artificial Sequence
  Description of Artificial Sequence: Synthetic oligonucleotide
  Sense strand starting at position 2941 of SEQ ID NO: 1879675
ggaagacacucagcgagua

SEQ ID NO: 1924235 - RNA, 19 nt, Artificial Sequence
  Description of Artificial Sequence: Synthetic oligonucleotide
  Antisense strand to SEQ ID NO: 1924234
uacucgcugagugucuucc

SEQ ID NO: 1924236 - RNA, 19 nt, Artificial Sequence
  Description of Artificial Sequence: Synthetic oligonucleotide
  Sense strand starting at position 2968 of SEQ ID NO: 1879675
auagaucucuugcugaauu

SEQ ID NO: 1924237 - RNA, 19 nt, Artificial Sequence
  Description of Artificial Sequence: Synthetic oligonucleotide
  Antisense strand to SEQ ID NO: 1924236
aauucagcaagagaucuau

SEQ ID NO: 1924238 - RNA, 19 nt, Artificial Sequence
  Description of Artificial Sequence: Synthetic oligonucleotide
  Sense strand starting at position 2988 of SEQ ID NO: 1879675
gagaaaguagauugucuuu

SEQ ID NO: 1924239 - RNA, 19 nt, Artificial Sequence
  Description of Artificial Sequence: Synthetic oligonucleotide
  Antisense strand to SEQ ID NO: 1924238
aaagacaaucuacuuucuc

SEQ ID NO: 1924240 - RNA, 19 nt, Artificial Sequence
  Description of Artificial Sequence: Synthetic oligonucleotide
  Sense strand starting at position 3169 of SEQ ID NO: 1879675
uccagagacuugguaauga

SEQ ID NO: 1924241 - RNA, 19 nt, Artificial Sequence
  Description of Artificial Sequence: Synthetic oligonucleotide
  Antisense strand to SEQ ID NO: 1924240
ucauuaccaagucucugga

SEQ ID NO: 1924242 - RNA, 19 nt, Artificial Sequence
  Description of Artificial Sequence: Synthetic oligonucleotide
  Sense strand starting at position 3282 of SEQ ID NO: 1879675
ugaggaggguaacauuuau

SEQ ID NO: 1924243 - RNA, 19 nt, Artificial Sequence
  Description of Artificial Sequence: Synthetic oligonucleotide
  Antisense strand to SEQ ID NO: 1924242
auaaauguuacccuccuca

SEQ ID NO: 1924244 - RNA, 19 nt, Artificial Sequence
  Description of Artificial Sequence: Synthetic oligonucleotide
  Sense strand starting at position 3824 of SEQ ID NO: 1879675
uccugaaaugccugacaug

SEQ ID NO: 1924245 - RNA, 19 nt, Artificial Sequence
  Description of Artificial Sequence: Synthetic oligonucleotide
  Antisense strand to SEQ ID NO: 1924244
caugucaggcauuucagga

SEQ ID NO: 1924246 - RNA, 19 nt, Artificial Sequence
  Description of Artificial Sequence: Synthetic oligonucleotide
  Sense strand starting at position 3825 of SEQ ID NO: 1879675
ccugaaaugccugacaugu

SEQ ID NO: 1924247 - RNA, 19 nt, Artificial Sequence
  Description of Artificial Sequence: Synthetic oligonucleotide
  Antisense strand to SEQ ID NO: 1924246
acaugucaggcauuucagg

SEQ ID NO: 1924248 - RNA, 19 nt, Artificial Sequence
  Description of Artificial Sequence: Synthetic oligonucleotide
  Sense strand starting at position 3833 of SEQ ID NO: 1879675
gccugacauguggaagcau

SEQ ID NO: 1924249 - RNA, 19 nt, Artificial Sequence
  Description of Artificial Sequence: Synthetic oligonucleotide
  Antisense strand to SEQ ID NO: 1924248
augcuuccacaugucaggc

SEQ ID NO: 1924250 - RNA, 19 nt, Artificial Sequence
  Description of Artificial Sequence: Synthetic oligonucleotide
  Sense strand starting at position 342 of SEQ ID NO: 1879676
ggugaagugccacacaauu

SEQ ID NO: 1924251 - RNA, 19 nt, Artificial Sequence
  Description of Artificial Sequence: Synthetic oligonucleotide
  Antisense strand to SEQ ID NO: 1924250
aauuguguggcacuucacc

SEQ ID NO: 1924252 - RNA, 19 nt, Artificial Sequence
  Description of Artificial Sequence: Synthetic oligonucleotide
  Sense strand starting at position 415 of SEQ ID NO: 1879676
gcaugagggauccaucuuc

SEQ ID NO: 1924253 - RNA, 19 nt, Artificial Sequence
  Description of Artificial Sequence: Synthetic oligonucleotide
  Antisense strand to SEQ ID NO: 1924252
gaagauggaucccucaugc

SEQ ID NO: 1924254 - RNA, 19 nt, Artificial Sequence
  Description of Artificial Sequence: Synthetic oligonucleotide
  Sense strand starting at position 535 of SEQ ID NO: 1879676
ucauacaacuuguugagau

SEQ ID NO: 1924255 - RNA, 19 nt, Artificial Sequence
  Description of Artificial Sequence: Synthetic oligonucleotide
  Antisense strand to SEQ ID NO: 1924254
aucucaacaaguuguauga

SEQ ID NO: 1924256 - RNA, 19 nt, Artificial Sequence
  Description of Artificial Sequence: Synthetic oligonucleotide
  Sense strand starting at position 684 of SEQ ID NO: 1879676
ucuggugaaauccaagguu

SEQ ID NO: 1924257 - RNA, 19 nt, Artificial Sequence
  Description of Artificial Sequence: Synthetic oligonucleotide
  Antisense strand to SEQ ID NO: 1924256
aaccuuggauuucaccaga

SEQ ID NO: 1924258 - RNA, 19 nt, Artificial Sequence
  Description of Artificial Sequence: Synthetic oligonucleotide
  Sense strand starting at position 687 of SEQ ID NO: 1879676
ggugaaauccaagguuuaa

SEQ ID NO: 1924259 - RNA, 19 nt, Artificial Sequence
  Description of Artificial Sequence: Synthetic oligonucleotide
  Antisense strand to SEQ ID NO: 1924258
uuaaaccuuggauuucacc

SEQ ID NO: 1924260 - RNA, 19 nt, Artificial Sequence
  Description of Artificial Sequence: Synthetic oligonucleotide
  Sense strand starting at position 867 of SEQ ID NO: 1879676
ucaacugagggcuaguuua

SEQ ID NO: 1924261 - RNA, 19 nt, Artificial Sequence
  Description of Artificial Sequence: Synthetic oligonucleotide
  Antisense strand to SEQ ID NO: 1924260
uaaacuagcccucaguuga

SEQ ID NO: 1924262 - RNA, 19 nt, Artificial Sequence
  Description of Artificial Sequence: Synthetic oligonucleotide
  Sense strand starting at position 1160 of SEQ ID NO: 1879676
aaaguauuuguguacgucu

SEQ ID NO: 1924263 - RNA, 19 nt, Artificial Sequence
  Description of Artificial Sequence: Synthetic oligonucleotide
  Antisense strand to SEQ ID NO: 1924262
agacguacacaaauacuuu

SEQ ID NO: 1924264 - RNA, 19 nt, Artificial Sequence
  Description of Artificial Sequence: Synthetic oligonucleotide
  Sense strand starting at position 1330 of SEQ ID NO: 1879676
gaaagagcugaaugguuau

SEQ ID NO: 1924265 - RNA, 19 nt, Artificial Sequence
  Description of Artificial Sequence: Synthetic oligonucleotide
  Antisense strand to SEQ ID NO: 1924264
auaaccauucagcucuuuc

SEQ ID NO: 1924266 - RNA, 19 nt, Artificial Sequence
  Description of Artificial Sequence: Synthetic oligonucleotide
  Sense strand starting at position 1388 of SEQ ID NO: 1879676
gguaucauuuaugaaauac

SEQ ID NO: 1924267 - RNA, 19 nt, Artificial Sequence
  Description of Artificial Sequence: Synthetic oligonucleotide
  Antisense strand to SEQ ID NO: 1924266
guauuucauaaaugauacc

SEQ ID NO: 1924268 - RNA, 19 nt, Artificial Sequence
  Description of Artificial Sequence: Synthetic oligonucleotide
  Sense strand starting at position 1500 of SEQ ID NO: 1879676
uaucgaacugacuauguga

SEQ ID NO: 1924269 - RNA, 19 nt, Artificial Sequence
  Description of Artificial Sequence: Synthetic oligonucleotide
  Antisense strand to SEQ ID NO: 1924268
ucacauagucaguucgaua

SEQ ID NO: 1924270 - RNA, 19 nt, Artificial Sequence
  Description of Artificial Sequence: Synthetic oligonucleotide
  Sense strand starting at position 1502 of SEQ ID NO: 1879676
ucgaacugacuaugugaga

SEQ ID NO: 1924271 - RNA, 19 nt, Artificial Sequence
  Description of Artificial Sequence: Synthetic oligonucleotide
  Antisense strand to SEQ ID NO: 1924270
ucucacauagucaguucga

SEQ ID NO: 1924272 - RNA, 19 nt, Artificial Sequence
  Description of Artificial Sequence: Synthetic oligonucleotide
  Sense strand starting at position 1503 of SEQ ID NO: 1879676
cgaacugacuaugugagau

SEQ ID NO: 1924273 - RNA, 19 nt, Artificial Sequence
  Description of Artificial Sequence: Synthetic oligonucleotide
  Antisense strand to SEQ ID NO: 1924272
aucucacauagucaguucg

SEQ ID NO: 1924274 - RNA, 19 nt, Artificial Sequence
  Description of Artificial Sequence: Synthetic oligonucleotide
  Sense strand starting at position 1603 of SEQ ID NO: 1879676
gagugauagaucugggacu

SEQ ID NO: 1924275 - RNA, 19 nt, Artificial Sequence
  Description of Artificial Sequence: Synthetic oligonucleotide
  Antisense strand to SEQ ID NO: 1924274
agucccagaucuaucacuc

SEQ ID NO: 1924276 - RNA, 19 nt, Artificial Sequence
  Description of Artificial Sequence: Synthetic oligonucleotide
  Sense strand starting at position 1605 of SEQ ID NO: 1879676
gugauagaucugggacuug

SEQ ID NO: 1924277 - RNA, 19 nt, Artificial Sequence
  Description of Artificial Sequence: Synthetic oligonucleotide
  Antisense strand to SEQ ID NO: 1924276
caagucccagaucuaucac

SEQ ID NO: 1924278 - RNA, 19 nt, Artificial Sequence
  Description of Artificial Sequence: Synthetic oligonucleotide
  Sense strand starting at position 2140 of SEQ ID NO: 1879676
cuagaauuauaaucgucau

SEQ ID NO: 1924279 - RNA, 19 nt, Artificial Sequence
  Description of Artificial Sequence: Synthetic oligonucleotide
  Antisense strand to SEQ ID NO: 1924278
augacgauuauaauucuag

SEQ ID NO: 1924280 - RNA, 19 nt, Artificial Sequence
  Description of Artificial Sequence: Synthetic oligonucleotide
  Sense strand starting at position 2180 of SEQ ID NO: 1879676
cagagagacuugguaacuu

SEQ ID NO: 1924281 - RNA, 19 nt, Artificial Sequence
  Description of Artificial Sequence: Synthetic oligonucleotide
  Antisense strand to SEQ ID NO: 1924280
aaguuaccaagucucucug

SEQ ID NO: 1924282 - RNA, 19 nt, Artificial Sequence
  Description of Artificial Sequence: Synthetic oligonucleotide
  Sense strand starting at position 2184 of SEQ ID NO: 1879676
gagacuugguaacuuaaua

SEQ ID NO: 1924283 - RNA, 19 nt, Artificial Sequence
  Description of Artificial Sequence: Synthetic oligonucleotide
  Antisense strand to SEQ ID NO: 1924282
uauuaaguuaccaagucuc

SEQ ID NO: 1924284 - RNA, 19 nt, Artificial Sequence
  Description of Artificial Sequence: Synthetic oligonucleotide
  Sense strand starting at position 2313 of SEQ ID NO: 1879676
gggcuaagccuuuaacaau

SEQ ID NO: 1924285 - RNA, 19 nt, Artificial Sequence
  Description of Artificial Sequence: Synthetic oligonucleotide
  Antisense strand to SEQ ID NO: 1924284
auuguuaaaggcuuagccc

SEQ ID NO: 1924286 - RNA, 19 nt, Artificial Sequence
  Description of Artificial Sequence: Synthetic oligonucleotide
  Sense strand starting at position 2323 of SEQ ID NO: 1879676
uuuaacaaugucuaggagu

SEQ ID NO: 1924287 - RNA, 19 nt, Artificial Sequence
  Description of Artificial Sequence: Synthetic oligonucleotide
  Antisense strand to SEQ ID NO: 1924286
acuccuagacauuguuaaa

SEQ ID NO: 1924288 - RNA, 19 nt, Artificial Sequence
  Description of Artificial Sequence: Synthetic oligonucleotide
  Sense strand starting at position 2325 of SEQ ID NO: 1879676
uaacaaugucuaggaguaa

SEQ ID NO: 1924289 - RNA, 19 nt, Artificial Sequence
  Description of Artificial Sequence: Synthetic oligonucleotide
  Antisense strand to SEQ ID NO: 1924288
uuacuccuagacauuguua

SEQ ID NO: 1924290 - RNA, 19 nt, Artificial Sequence
  Description of Artificial Sequence: Synthetic oligonucleotide
  Sense strand starting at position 2403 of SEQ ID NO: 1879676
uguggauagcacuggaaga

SEQ ID NO: 1924291 - RNA, 19 nt, Artificial Sequence
  Description of Artificial Sequence: Synthetic oligonucleotide
  Antisense strand to SEQ ID NO: 1924290
ucuuccagugcuauccaca

SEQ ID NO: 1924292 - RNA, 19 nt, Artificial Sequence
  Description of Artificial Sequence: Synthetic oligonucleotide
  Sense strand starting at position 2404 of SEQ ID NO: 1879676
guggauagcacuggaagaa

SEQ ID NO: 1924293 - RNA, 19 nt, Artificial Sequence
  Description of Artificial Sequence: Synthetic oligonucleotide
  Antisense strand to SEQ ID NO: 1924292
uucuuccagugcuauccac

SEQ ID NO: 1924294 - RNA, 19 nt, Artificial Sequence
  Description of Artificial Sequence: Synthetic oligonucleotide
  Sense strand starting at position 2418 of SEQ ID NO: 1879676
aagaaucauugaguguuaa

SEQ ID NO: 1924295 - RNA, 19 nt, Artificial Sequence
  Description of Artificial Sequence: Synthetic oligonucleotide
  Antisense strand to SEQ ID NO: 1924294
uuaacacucaaugauucuu

SEQ ID NO: 1924296 - RNA, 19 nt, Artificial Sequence
  Description of Artificial Sequence: Synthetic oligonucleotide
  Sense strand starting at position 2419 of SEQ ID NO: 1879676
agaaucauugaguguuaag

SEQ ID NO: 1924297 - RNA, 19 nt, Artificial Sequence
  Description of Artificial Sequence: Synthetic oligonucleotide
  Antisense strand to SEQ ID NO: 1924296
cuuaacacucaaugauucu

SEQ ID NO: 1924298 - RNA, 19 nt, Artificial Sequence
  Description of Artificial Sequence: Synthetic oligonucleotide
  Sense strand starting at position 2465 of SEQ ID NO: 1879676
uggagauguugucccaaca

SEQ ID NO: 1924299 - RNA, 19 nt, Artificial Sequence
  Description of Artificial Sequence: Synthetic oligonucleotide
  Antisense strand to SEQ ID NO: 1924298
uguugggacaacaucucca

SEQ ID NO: 1924300 - RNA, 19 nt, Artificial Sequence
  Description of Artificial Sequence: Synthetic oligonucleotide
  Sense strand starting at position 2508 of SEQ ID NO: 1879676
ugguauacacacuggagau

SEQ ID NO: 1924301 - RNA, 19 nt, Artificial Sequence
  Description of Artificial Sequence: Synthetic oligonucleotide
  Antisense strand to SEQ ID NO: 1924300
aucuccaguguguauacca

SEQ ID NO: 1924302 - RNA, 19 nt, Artificial Sequence
  Description of Artificial Sequence: Synthetic oligonucleotide
  Sense strand starting at position 2509 of SEQ ID NO: 1879676
gguauacacacuggagauu

SEQ ID NO: 1924303 - RNA, 19 nt, Artificial Sequence
  Description of Artificial Sequence: Synthetic oligonucleotide
  Antisense strand to SEQ ID NO: 1924302
aaucuccaguguguauacc

SEQ ID NO: 1924304 - RNA, 19 nt, Artificial Sequence
  Description of Artificial Sequence: Synthetic oligonucleotide
  Sense strand starting at position 2622 of SEQ ID NO: 1879676
uuggcauaacuagauuauu

SEQ ID NO: 1924305 - RNA, 19 nt, Artificial Sequence
  Description of Artificial Sequence: Synthetic oligonucleotide
  Antisense strand to SEQ ID NO: 1924304
aauaaucuaguuaugccaa

SEQ ID NO: 1924306 - RNA, 19 nt, Artificial Sequence
  Description of Artificial Sequence: Synthetic oligonucleotide
  Sense strand starting at position 2823 of SEQ ID NO: 1879676
uuagaucaccuggguucua

SEQ ID NO: 1924307 - RNA, 19 nt, Artificial Sequence
  Description of Artificial Sequence: Synthetic oligonucleotide
  Antisense strand to SEQ ID NO: 1924306
uagaacccaggugaucuaa

SEQ ID NO: 1924308 - RNA, 19 nt, Artificial Sequence
  Description of Artificial Sequence: Synthetic oligonucleotide
  Sense strand starting at position 2824 of SEQ ID NO: 1879676
uagaucaccuggguucuaa

SEQ ID NO: 1924309 - RNA, 19 nt, Artificial Sequence
  Description of Artificial Sequence: Synthetic oligonucleotide
  Antisense strand to SEQ ID NO: 1924308
uuagaacccaggugaucua

SEQ ID NO: 1924310 - RNA, 19 nt, Artificial Sequence
  Description of Artificial Sequence: Synthetic oligonucleotide
  Sense strand starting at position 2862 of SEQ ID NO: 1879676
accacaagaucuuuggcaa

SEQ ID NO: 1924311 - RNA, 19 nt, Artificial Sequence
  Description of Artificial Sequence: Synthetic oligonucleotide
  Antisense strand to SEQ ID NO: 1924310
uugccaaagaucuuguggu

SEQ ID NO: 1924312 - RNA, 19 nt, Artificial Sequence
  Description of Artificial Sequence: Synthetic oligonucleotide
  Sense strand starting at position 2863 of SEQ ID NO: 1879676
ccacaagaucuuuggcaag

SEQ ID NO: 1924313 - RNA, 19 nt, Artificial Sequence
  Description of Artificial Sequence: Synthetic oligonucleotide
  Antisense strand to SEQ ID NO: 1924312
cuugccaaagaucuugugg

SEQ ID NO: 1924314 - RNA, 19 nt, Artificial Sequence
  Description of Artificial Sequence: Synthetic oligonucleotide
  Sense strand starting at position 2993 of SEQ ID NO: 1879676
gaacaaugauaggcuuguu

SEQ ID NO: 1924315 - RNA, 19 nt, Artificial Sequence
  Description of Artificial Sequence: Synthetic oligonucleotide
  Antisense strand to SEQ ID NO: 1924314
aacaagccuaucauuguuc

SEQ ID NO: 1924316 - RNA, 19 nt, Artificial Sequence
  Description of Artificial Sequence: Synthetic oligonucleotide
  Sense strand starting at position 3053 of SEQ ID NO: 1879676
ugagucuuccauuggagau

SEQ ID NO: 1924317 - RNA, 19 nt, Artificial Sequence
  Description of Artificial Sequence: Synthetic oligonucleotide
  Antisense strand to SEQ ID NO: 1924316
aucuccaauggaagacuca

SEQ ID NO: 1924318 - RNA, 19 nt, Artificial Sequence
  Description of Artificial Sequence: Synthetic oligonucleotide
  Sense strand starting at position 3523 of SEQ ID NO: 1879676
augccuguucuagagaaag

SEQ ID NO: 1924319 - RNA, 19 nt, Artificial Sequence
  Description of Artificial Sequence: Synthetic oligonucleotide
  Antisense strand to SEQ ID NO: 1924318
cuuucucuagaacaggcau

SEQ ID NO: 1924320 - RNA, 19 nt, Artificial Sequence
  Description of Artificial Sequence: Synthetic oligonucleotide
  Sense strand starting at position 3592 of SEQ ID NO: 1879676
acuaauauuuacugaggag

SEQ ID NO: 1924321 - RNA, 19 nt, Artificial Sequence
  Description of Artificial Sequence: Synthetic oligonucleotide
  Antisense strand to SEQ ID NO: 1924320
cuccucaguaaauauuagu

SEQ ID NO: 1924322 - RNA, 19 nt, Artificial Sequence
  Description of Artificial Sequence: Synthetic oligonucleotide
  Sense strand starting at position 3691 of SEQ ID NO: 1879676
uaguaacuugcagagguua

SEQ ID NO: 1924323 - RNA, 19 nt, Artificial Sequence
  Description of Artificial Sequence: Synthetic oligonucleotide
  Antisense strand to SEQ ID NO: 1924322
uaaccucugcaaguuacua

SEQ ID NO: 1924324 - RNA, 19 nt, Artificial Sequence
  Description of Artificial Sequence: Synthetic oligonucleotide
  Sense strand starting at position 3887 of SEQ ID NO: 1879676
cucucaugggaaugagagu

SEQ ID NO: 1924325 - RNA, 19 nt, Artificial Sequence
  Description of Artificial Sequence: Synthetic oligonucleotide
  Antisense strand to SEQ ID NO: 1924324
acucucauucccaugagag

SEQ ID NO: 1924326 - RNA, 19 nt, Artificial Sequence
  Description of Artificial Sequence: Synthetic oligonucleotide
  Sense strand starting at position 3976 of SEQ ID NO: 1879676
aaguuuaaaugagugaauc

SEQ ID NO: 1924327 - RNA, 19 nt, Artificial Sequence
  Description of Artificial Sequence: Synthetic oligonucleotide
  Antisense strand to SEQ ID NO: 1924326
gauucacucauuuaaacuu

SEQ ID NO: 1924328 - RNA, 19 nt, Artificial Sequence
  Description of Artificial Sequence: Synthetic oligonucleotide
  Sense strand starting at position 3977 of SEQ ID NO: 1879676
aguuuaaaugagugaauca

SEQ ID NO: 1924329 - RNA, 19 nt, Artificial Sequence
  Description of Artificial Sequence: Synthetic oligonucleotide
  Antisense strand to SEQ ID NO: 1924328
ugauucacucauuuaaacu

SEQ ID NO: 1924330 - RNA, 19 nt, Artificial Sequence
  Description of Artificial Sequence: Synthetic oligonucleotide
  Sense strand starting at position 228 of SEQ ID NO: 1879677
ccuuuaauugagcagaguu

SEQ ID NO: 1924331 - RNA, 19 nt, Artificial Sequence
  Description of Artificial Sequence: Synthetic oligonucleotide
  Antisense strand to SEQ ID NO: 1924330
aacucugcucaauuaaagg

SEQ ID NO: 1924332 - RNA, 19 nt, Artificial Sequence
  Description of Artificial Sequence: Synthetic oligonucleotide
  Sense strand starting at position 230 of SEQ ID NO: 1879677
uuuaauugagcagaguuaa

SEQ ID NO: 1924333 - RNA, 19 nt, Artificial Sequence
  Description of Artificial Sequence: Synthetic oligonucleotide
  Antisense strand to SEQ ID NO: 1924332
uuaacucugcucaauuaaa

SEQ ID NO: 1924334 - RNA, 19 nt, Artificial Sequence
  Description of Artificial Sequence: Synthetic oligonucleotide
  Sense strand starting at position 238 of SEQ ID NO: 1879677
agcagaguuaacuggauca

SEQ ID NO: 1924335 - RNA, 19 nt, Artificial Sequence
  Description of Artificial Sequence: Synthetic oligonucleotide
  Antisense strand to SEQ ID NO: 1924334
ugauccaguuaacucugcu

SEQ ID NO: 1924336 - RNA, 19 nt, Artificial Sequence
  Description of Artificial Sequence: Synthetic oligonucleotide
  Sense strand starting at position 254 of SEQ ID NO: 1879677
ucaaauuauuuaugggaga

SEQ ID NO: 1924337 - RNA, 19 nt, Artificial Sequence
  Description of Artificial Sequence: Synthetic oligonucleotide
  Antisense strand to SEQ ID NO: 1924336
ucucccauaaauaauuuga

SEQ ID NO: 1924338 - RNA, 19 nt, Artificial Sequence
  Description of Artificial Sequence: Synthetic oligonucleotide
  Sense strand starting at position 255 of SEQ ID NO: 1879677
caaauuauuuaugggagag

SEQ ID NO: 1924339 - RNA, 19 nt, Artificial Sequence
  Description of Artificial Sequence: Synthetic oligonucleotide
  Antisense strand to SEQ ID NO: 1924338
cucucccauaaauaauuug

SEQ ID NO: 1924340 - RNA, 19 nt, Artificial Sequence
  Description of Artificial Sequence: Synthetic oligonucleotide
  Sense strand starting at position 330 of SEQ ID NO: 1879677
guaagugaaucacucuaua

SEQ ID NO: 1924341 - RNA, 19 nt, Artificial Sequence
  Description of Artificial Sequence: Synthetic oligonucleotide
  Antisense strand to SEQ ID NO: 1924340
uauagagugauucacuuac

SEQ ID NO: 1924342 - RNA, 19 nt, Artificial Sequence
  Description of Artificial Sequence: Synthetic oligonucleotide
  Sense strand starting at position 503 of SEQ ID NO: 1879677
gaaagugauggccgaaaca

SEQ ID NO: 1924343 - RNA, 19 nt, Artificial Sequence
  Description of Artificial Sequence: Synthetic oligonucleotide
  Antisense strand to SEQ ID NO: 1924342
uguuucggccaucacuuuc

SEQ ID NO: 1924344 - RNA, 19 nt, Artificial Sequence
  Description of Artificial Sequence: Synthetic oligonucleotide
  Sense strand starting at position 515 of SEQ ID NO: 1879677
cgaaacagaaucggaaauu

SEQ ID NO: 1924345 - RNA, 19 nt, Artificial Sequence
  Description of Artificial Sequence: Synthetic oligonucleotide
  Antisense strand to SEQ ID NO: 1924344
aauuuccgauucuguuucg

SEQ ID NO: 1924346 - RNA, 19 nt, Artificial Sequence
  Description of Artificial Sequence: Synthetic oligonucleotide
  Sense strand starting at position 516 of SEQ ID NO: 1879677
gaaacagaaucggaaauuu

SEQ ID NO: 1924347 - RNA, 19 nt, Artificial Sequence
  Description of Artificial Sequence: Synthetic oligonucleotide
  Antisense strand to SEQ ID NO: 1924346
aaauuuccgauucuguuuc

SEQ ID NO: 1924348 - RNA, 19 nt, Artificial Sequence
  Description of Artificial Sequence: Synthetic oligonucleotide
  Sense strand starting at position 742 of SEQ ID NO: 1879677
uucuuaaaguucuuugaga

SEQ ID NO: 1924349 - RNA, 19 nt, Artificial Sequence
  Description of Artificial Sequence: Synthetic oligonucleotide
  Antisense strand to SEQ ID NO: 1924348
ucucaaagaacuuuaagaa

SEQ ID NO: 1924350 - RNA, 19 nt, Artificial Sequence
  Description of Artificial Sequence: Synthetic oligonucleotide
  Sense strand starting at position 743 of SEQ ID NO: 1879677
ucuuaaaguucuuugagaa

SEQ ID NO: 1924351 - RNA, 19 nt, Artificial Sequence
  Description of Artificial Sequence: Synthetic oligonucleotide
  Antisense strand to SEQ ID NO: 1924350
uucucaaagaacuuuaaga

SEQ ID NO: 1924352 - RNA, 19 nt, Artificial Sequence
  Description of Artificial Sequence: Synthetic oligonucleotide
  Sense strand starting at position 744 of SEQ ID NO: 1879677
cuuaaaguucuuugagaaa

SEQ ID NO: 1924353 - RNA, 19 nt, Artificial Sequence
  Description of Artificial Sequence: Synthetic oligonucleotide
  Antisense strand to SEQ ID NO: 1924352
uuucucaaagaacuuuaag

SEQ ID NO: 1924354 - RNA, 19 nt, Artificial Sequence
  Description of Artificial Sequence: Synthetic oligonucleotide
  Sense strand starting at position 1186 of SEQ ID NO: 1879677
aguuaauuaagagguggau

SEQ ID NO: 1924355 - RNA, 19 nt, Artificial Sequence
  Description of Artificial Sequence: Synthetic oligonucleotide
  Antisense strand to SEQ ID NO: 1924354
auccaccucuuaauuaacu

SEQ ID NO: 1924356 - RNA, 19 nt, Artificial Sequence
  Description of Artificial Sequence: Synthetic oligonucleotide
  Sense strand starting at position 1200 of SEQ ID NO: 1879677
uggauaacuuaagcucaca

SEQ ID NO: 1924357 - RNA, 19 nt, Artificial Sequence
  Description of Artificial Sequence: Synthetic oligonucleotide
  Antisense strand to SEQ ID NO: 1924356
ugugagcuuaaguuaucca

SEQ ID NO: 1924358 - RNA, 19 nt, Artificial Sequence
  Description of Artificial Sequence: Synthetic oligonucleotide
  Sense strand starting at position 1374 of SEQ ID NO: 1879677
caacuuggguugccaaaua

SEQ ID NO: 1924359 - RNA, 19 nt, Artificial Sequence
  Description of Artificial Sequence: Synthetic oligonucleotide
  Antisense strand to SEQ ID NO: 1924358
uauuuggcaacccaaguug

SEQ ID NO: 1924360 - RNA, 19 nt, Artificial Sequence
  Description of Artificial Sequence: Synthetic oligonucleotide
  Sense strand starting at position 1465 of SEQ ID NO: 1879677
agguuaugguacuuaucua

SEQ ID NO: 1924361 - RNA, 19 nt, Artificial Sequence
  Description of Artificial Sequence: Synthetic oligonucleotide
  Antisense strand to SEQ ID NO: 1924360
uagauaaguaccauaaccu

SEQ ID NO: 1924362 - RNA, 19 nt, Artificial Sequence
  Description of Artificial Sequence: Synthetic oligonucleotide
  Sense strand starting at position 1579 of SEQ ID NO: 1879677
gcugaacucugacuacaug

SEQ ID NO: 1924363 - RNA, 19 nt, Artificial Sequence
  Description of Artificial Sequence: Synthetic oligonucleotide
  Antisense strand to SEQ ID NO: 1924362
cauguagucagaguucagc

SEQ ID NO: 1924364 - RNA, 19 nt, Artificial Sequence
  Description of Artificial Sequence: Synthetic oligonucleotide
  Sense strand starting at position 1591 of SEQ ID NO: 1879677
cuacaugugggccaguaau

SEQ ID NO: 1924365 - RNA, 19 nt, Artificial Sequence
  Description of Artificial Sequence: Synthetic oligonucleotide
  Antisense strand to SEQ ID NO: 1924364
auuacuggcccacauguag

SEQ ID NO: 1924366 - RNA, 19 nt, Artificial Sequence
  Description of Artificial Sequence: Synthetic oligonucleotide
  Sense strand starting at position 1731 of SEQ ID NO: 1879677
guacuuucugaauaaaguc

SEQ ID NO: 1924367 - RNA, 19 nt, Artificial Sequence
  Description of Artificial Sequence: Synthetic oligonucleotide
  Antisense strand to SEQ ID NO: 1924366
gacuuuauucagaaaguac

SEQ ID NO: 1924368 - RNA, 19 nt, Artificial Sequence
  Description of Artificial Sequence: Synthetic oligonucleotide
  Sense strand starting at position 1859 of SEQ ID NO: 1879677
gauuguaucugucuaugag

SEQ ID NO: 1924369 - RNA, 19 nt, Artificial Sequence
  Description of Artificial Sequence: Synthetic oligonucleotide
  Antisense strand to SEQ ID NO: 1924368
cucauagacagauacaauc

SEQ ID NO: 1924370 - RNA, 19 nt, Artificial Sequence
  Description of Artificial Sequence: Synthetic oligonucleotide
  Sense strand starting at position 2182 of SEQ ID NO: 1879677
gugaguggugccuaugaaa

SEQ ID NO: 1924371 - RNA, 19 nt, Artificial Sequence
  Description of Artificial Sequence: Synthetic oligonucleotide
  Antisense strand to SEQ ID NO: 1924370
uuucauaggcaccacucac

SEQ ID NO: 1924372 - RNA, 19 nt, Artificial Sequence
  Description of Artificial Sequence: Synthetic oligonucleotide
  Sense strand starting at position 2278 of SEQ ID NO: 1879677
acccuugaccuuuauugua

SEQ ID NO: 1924373 - RNA, 19 nt, Artificial Sequence
  Description of Artificial Sequence: Synthetic oligonucleotide
  Antisense strand to SEQ ID NO: 1924372
uacaauaaaggucaagggu

SEQ ID NO: 1924374 - RNA, 19 nt, Artificial Sequence
  Description of Artificial Sequence: Synthetic oligonucleotide
  Sense strand starting at position 2280 of SEQ ID NO: 1879677
ccuugaccuuuauuguaca

SEQ ID NO: 1924375 - RNA, 19 nt, Artificial Sequence
  Description of Artificial Sequence: Synthetic oligonucleotide
  Antisense strand to SEQ ID NO: 1924374
uguacaauaaaggucaagg

SEQ ID NO: 1924376 - RNA, 19 nt, Artificial Sequence
  Description of Artificial Sequence: Synthetic oligonucleotide
  Sense strand starting at position 2699 of SEQ ID NO: 1879677
uaaauuuaugacugcguca

SEQ ID NO: 1924377 - RNA, 19 nt, Artificial Sequence
  Description of Artificial Sequence: Synthetic oligonucleotide
  Antisense strand to SEQ ID NO: 1924376
ugacgcagucauaaauuua

SEQ ID NO: 1924378 - RNA, 19 nt, Artificial Sequence
  Description of Artificial Sequence: Synthetic oligonucleotide
  Sense strand starting at position 2701 of SEQ ID NO: 1879677
aauuuaugacugcgucauu

SEQ ID NO: 1924379 - RNA, 19 nt, Artificial Sequence
  Description of Artificial Sequence: Synthetic oligonucleotide
  Antisense strand to SEQ ID NO: 1924378
aaugacgcagucauaaauu

SEQ ID NO: 1924380 - RNA, 19 nt, Artificial Sequence
  Description of Artificial Sequence: Synthetic oligonucleotide
  Sense strand starting at position 2727 of SEQ ID NO: 1879677
uaagaaggugcuuaugcua

SEQ ID NO: 1924381 - RNA, 19 nt, Artificial Sequence
  Description of Artificial Sequence: Synthetic oligonucleotide
  Antisense strand to SEQ ID NO: 1924380
uagcauaagcaccuucuua

SEQ ID NO: 1924382 - RNA, 19 nt, Artificial Sequence
  Description of Artificial Sequence: Synthetic oligonucleotide
  Sense strand starting at position 2858 of SEQ ID NO: 1879677
gcauaaggaaagugguuaa

SEQ ID NO: 1924383 - RNA, 19 nt, Artificial Sequence
  Description of Artificial Sequence: Synthetic oligonucleotide
  Antisense strand to SEQ ID NO: 1924382
uuaaccacuuuccuuaugc

SEQ ID NO: 1924384 - RNA, 19 nt, Artificial Sequence
  Description of Artificial Sequence: Synthetic oligonucleotide
  Sense strand starting at position 2871 of SEQ ID NO: 1879677
gguuaaugcacuugaaaug

SEQ ID NO: 1924385 - RNA, 19 nt, Artificial Sequence
  Description of Artificial Sequence: Synthetic oligonucleotide
  Antisense strand to SEQ ID NO: 1924384
cauuucaagugcauuaacc

SEQ ID NO: 1924386 - RNA, 19 nt, Artificial Sequence
  Description of Artificial Sequence: Synthetic oligonucleotide
  Sense strand starting at position 2872 of SEQ ID NO: 1879677
guuaaugcacuugaaaugu

SEQ ID NO: 1924387 - RNA, 19 nt, Artificial Sequence
  Description of Artificial Sequence: Synthetic oligonucleotide
  Antisense strand to SEQ ID NO: 1924386
acauuucaagugcauuaac

SEQ ID NO: 1924388 - RNA, 19 nt, Artificial Sequence
  Description of Artificial Sequence: Synthetic oligonucleotide
  Sense strand starting at position 2940 of SEQ ID NO: 1879677
uguuaacuggagugaaaug

SEQ ID NO: 1924389 - RNA, 19 nt, Artificial Sequence
  Description of Artificial Sequence: Synthetic oligonucleotide
  Antisense strand to SEQ ID NO: 1924388
cauuucacuccaguuaaca

SEQ ID NO: 1924390 - RNA, 19 nt, Artificial Sequence
  Description of Artificial Sequence: Synthetic oligonucleotide
  Sense strand starting at position 2955 of SEQ ID NO: 1879677
aaugauaagggauggcuuu

SEQ ID NO: 1924391 - RNA, 19 nt, Artificial Sequence
  Description of Artificial Sequence: Synthetic oligonucleotide
  Antisense strand to SEQ ID NO: 1924390
aaagccaucccuuaucauu

SEQ ID NO: 1924392 - RNA, 19 nt, Artificial Sequence
  Description of Artificial Sequence: Synthetic oligonucleotide
  Sense strand starting at position 3102 of SEQ ID NO: 1879677
uuagauucuggucaagcuu

SEQ ID NO: 1924393 - RNA, 19 nt, Artificial Sequence
  Description of Artificial Sequence: Synthetic oligonucleotide
  Antisense strand to SEQ ID NO: 1924392
aagcuugaccagaaucuaa

SEQ ID NO: 1924394 - RNA, 19 nt, Artificial Sequence
  Description of Artificial Sequence: Synthetic oligonucleotide
  Sense strand starting at position 3236 of SEQ ID NO: 1879677
augaaagucucagucuuaa

SEQ ID NO: 1924395 - RNA, 19 nt, Artificial Sequence
  Description of Artificial Sequence: Synthetic oligonucleotide
  Antisense strand to SEQ ID NO: 1924394
uuaagacugagacuuucau

SEQ ID NO: 1924396 - RNA, 19 nt, Artificial Sequence
  Description of Artificial Sequence: Synthetic oligonucleotide
  Sense strand starting at position 3257 of SEQ ID NO: 1879677
cuaagaucccagugaguuu

SEQ ID NO: 1924397 - RNA, 19 nt, Artificial Sequence
  Description of Artificial Sequence: Synthetic oligonucleotide
  Antisense strand to SEQ ID NO: 1924396
aaacucacugggaucuuag

SEQ ID NO: 1924398 - RNA, 19 nt, Artificial Sequence
  Description of Artificial Sequence: Synthetic oligonucleotide
  Sense strand starting at position 3308 of SEQ ID NO: 1879677
cugacauuauaguuucuuu

SEQ ID NO: 1924399 - RNA, 19 nt, Artificial Sequence
  Description of Artificial Sequence: Synthetic oligonucleotide
  Antisense strand to SEQ ID NO: 1924398
aaagaaacuauaaugucag

SEQ ID NO: 1924400 - RNA, 19 nt, Artificial Sequence
  Description of Artificial Sequence: Synthetic oligonucleotide
  Sense strand starting at position 3362 of SEQ ID NO: 1879677
gcacaaauaugauuaaagu

SEQ ID NO: 1924401 - RNA, 19 nt, Artificial Sequence
  Description of Artificial Sequence: Synthetic oligonucleotide
  Antisense strand to SEQ ID NO: 1924400
acuuuaaucauauuugugc

SEQ ID NO: 1924402 - RNA, 19 nt, Artificial Sequence
  Description of Artificial Sequence: Synthetic oligonucleotide
  Sense strand starting at position 3407 of SEQ ID NO: 1879677
gucuuauggcaauauguca

SEQ ID NO: 1924403 - RNA, 19 nt, Artificial Sequence
  Description of Artificial Sequence: Synthetic oligonucleotide
  Antisense strand to SEQ ID NO: 1924402
ugacauauugccauaagac

SEQ ID NO: 1924404 - RNA, 19 nt, Artificial Sequence
  Description of Artificial Sequence: Synthetic oligonucleotide
  Sense strand starting at position 3443 of SEQ ID NO: 1879677
cugcuucugcaagauacau

SEQ ID NO: 1924405 - RNA, 19 nt, Artificial Sequence
  Description of Artificial Sequence: Synthetic oligonucleotide
  Antisense strand to SEQ ID NO: 1924404
auguaucuugcagaagcag

SEQ ID NO: 1924406 - RNA, 19 nt, Artificial Sequence
  Description of Artificial Sequence: Synthetic oligonucleotide
  Sense strand starting at position 3574 of SEQ ID NO: 1879677
acagaauaucgacaucguu

SEQ ID NO: 1924407 - RNA, 19 nt, Artificial Sequence
  Description of Artificial Sequence: Synthetic oligonucleotide
  Antisense strand to SEQ ID NO: 1924406
aacgaugucgauauucugu

SEQ ID NO: 1924408 - RNA, 19 nt, Artificial Sequence
  Description of Artificial Sequence: Synthetic oligonucleotide
  Sense strand starting at position 3626 of SEQ ID NO: 1879677
gcaaaugcugccuaugaga

SEQ ID NO: 1924409 - RNA, 19 nt, Artificial Sequence
  Description of Artificial Sequence: Synthetic oligonucleotide
  Antisense strand to SEQ ID NO: 1924408
ucucauaggcagcauuugc

SEQ ID NO: 1924410 - RNA, 19 nt, Artificial Sequence
  Description of Artificial Sequence: Synthetic oligonucleotide
  Sense strand starting at position 203 of SEQ ID NO: 1879678
cuuagaagugucuguauga

SEQ ID NO: 1924411 - RNA, 19 nt, Artificial Sequence
  Description of Artificial Sequence: Synthetic oligonucleotide
  Antisense strand to SEQ ID NO: 1924410
ucauacagacacuucuaag

SEQ ID NO: 1924412 - RNA, 19 nt, Artificial Sequence
  Description of Artificial Sequence: Synthetic oligonucleotide
  Sense strand starting at position 204 of SEQ ID NO: 1879678
uuagaagugucuguaugau

SEQ ID NO: 1924413 - RNA, 19 nt, Artificial Sequence
  Description of Artificial Sequence: Synthetic oligonucleotide
  Antisense strand to SEQ ID NO: 1924412
aucauacagacacuucuaa

SEQ ID NO: 1924414 - RNA, 19 nt, Artificial Sequence
  Description of Artificial Sequence: Synthetic oligonucleotide
  Sense strand starting at position 643 of SEQ ID NO: 1879678
ggguacauguucucaagac

SEQ ID NO: 1924415 - RNA, 19 nt, Artificial Sequence
  Description of Artificial Sequence: Synthetic oligonucleotide
  Antisense strand to SEQ ID NO: 1924414
gucuugagaacauguaccc

SEQ ID NO: 1924416 - RNA, 19 nt, Artificial Sequence
  Description of Artificial Sequence: Synthetic oligonucleotide
  Sense strand starting at position 997 of SEQ ID NO: 1879678
agaacugauuaggaggaua

SEQ ID NO: 1924417 - RNA, 19 nt, Artificial Sequence
  Description of Artificial Sequence: Synthetic oligonucleotide
  Antisense strand to SEQ ID NO: 1924416
uauccuccuaaucaguucu

SEQ ID NO: 1924418 - RNA, 19 nt, Artificial Sequence
  Description of Artificial Sequence: Synthetic oligonucleotide
  Sense strand starting at position 1032 of SEQ ID NO: 1879678
ugcagaacugcucacauaa

SEQ ID NO: 1924419 - RNA, 19 nt, Artificial Sequence
  Description of Artificial Sequence: Synthetic oligonucleotide
  Antisense strand to SEQ ID NO: 1924418
uuaugugagcaguucugca

SEQ ID NO: 1924420 - RNA, 19 nt, Artificial Sequence
  Description of Artificial Sequence: Synthetic oligonucleotide
  Sense strand starting at position 1173 of SEQ ID NO: 1879678
gagguaaaguuaucuguuc

SEQ ID NO: 1924421 - RNA, 19 nt, Artificial Sequence
  Description of Artificial Sequence: Synthetic oligonucleotide
  Antisense strand to SEQ ID NO: 1924420
gaacagauaacuuuaccuc

SEQ ID NO: 1924422 - RNA, 19 nt, Artificial Sequence
  Description of Artificial Sequence: Synthetic oligonucleotide
  Sense strand starting at position 1287 of SEQ ID NO: 1879678
ucagguuaggucugacaga

SEQ ID NO: 1924423 - RNA, 19 nt, Artificial Sequence
  Description of Artificial Sequence: Synthetic oligonucleotide
  Antisense strand to SEQ ID NO: 1924422
ucugucagaccuaaccuga

SEQ ID NO: 1924424 - RNA, 19 nt, Artificial Sequence
  Description of Artificial Sequence: Synthetic oligonucleotide
  Sense strand starting at position 1385 of SEQ ID NO: 1879678
gguuauaauuuggaauaag

SEQ ID NO: 1924425 - RNA, 19 nt, Artificial Sequence
  Description of Artificial Sequence: Synthetic oligonucleotide
  Antisense strand to SEQ ID NO: 1924424
cuuauuccaaauuauaacc

SEQ ID NO: 1924426 - RNA, 19 nt, Artificial Sequence
  Description of Artificial Sequence: Synthetic oligonucleotide
  Sense strand starting at position 1490 of SEQ ID NO: 1879678
uuguuccagccauaggaaa

SEQ ID NO: 1924427 - RNA, 19 nt, Artificial Sequence
  Description of Artificial Sequence: Synthetic oligonucleotide
  Antisense strand to SEQ ID NO: 1924426
uuuccuauggcuggaacaa

SEQ ID NO: 1924428 - RNA, 19 nt, Artificial Sequence
  Description of Artificial Sequence: Synthetic oligonucleotide
  Sense strand starting at position 1515 of SEQ ID NO: 1879678
gugcaaaggcccuaugaug

SEQ ID NO: 1924429 - RNA, 19 nt, Artificial Sequence
  Description of Artificial Sequence: Synthetic oligonucleotide
  Antisense strand to SEQ ID NO: 1924428
caucauagggccuuugcac

SEQ ID NO: 1924430 - RNA, 19 nt, Artificial Sequence
  Description of Artificial Sequence: Synthetic oligonucleotide
  Sense strand starting at position 1534 of SEQ ID NO: 1879678
aggguaugcacagaauguu

SEQ ID NO: 1924431 - RNA, 19 nt, Artificial Sequence
  Description of Artificial Sequence: Synthetic oligonucleotide
  Antisense strand to SEQ ID NO: 1924430
aacauucugugcauacccu

SEQ ID NO: 1924432 - RNA, 19 nt, Artificial Sequence
  Description of Artificial Sequence: Synthetic oligonucleotide
  Sense strand starting at position 1537 of SEQ ID NO: 1879678
guaugcacagaauguuaga

SEQ ID NO: 1924433 - RNA, 19 nt, Artificial Sequence
  Description of Artificial Sequence: Synthetic oligonucleotide
  Antisense strand to SEQ ID NO: 1924432
ucuaacauucugugcauac

SEQ ID NO: 1924434 - RNA, 19 nt, Artificial Sequence
  Description of Artificial Sequence: Synthetic oligonucleotide
  Sense strand starting at position 1638 of SEQ ID NO: 1879678
ggcgguugagcaagcauua

SEQ ID NO: 1924435 - RNA, 19 nt, Artificial Sequence
  Description of Artificial Sequence: Synthetic oligonucleotide
  Antisense strand to SEQ ID NO: 1924434
uaaugcuugcucaaccgcc

SEQ ID NO: 1924436 - RNA, 19 nt, Artificial Sequence
  Description of Artificial Sequence: Synthetic oligonucleotide
  Sense strand starting at position 1678 of SEQ ID NO: 1879678
ugagaucagcaauagcauu

SEQ ID NO: 1924437 - RNA, 19 nt, Artificial Sequence
  Description of Artificial Sequence: Synthetic oligonucleotide
  Antisense strand to SEQ ID NO: 1924436
aaugcuauugcugaucuca

SEQ ID NO: 1924438 - RNA, 19 nt, Artificial Sequence
  Description of Artificial Sequence: Synthetic oligonucleotide
  Sense strand starting at position 1790 of SEQ ID NO: 1879678
gaagucaaaugguuuaauc

SEQ ID NO: 1924439 - RNA, 19 nt, Artificial Sequence
  Description of Artificial Sequence: Synthetic oligonucleotide
  Antisense strand to SEQ ID NO: 1924438
gauuaaaccauuugacuuc

SEQ ID NO: 1924440 - RNA, 19 nt, Artificial Sequence
  Description of Artificial Sequence: Synthetic oligonucleotide
  Sense strand starting at position 1792 of SEQ ID NO: 1879678
agucaaaugguuuaauccu

SEQ ID NO: 1924441 - RNA, 19 nt, Artificial Sequence
  Description of Artificial Sequence: Synthetic oligonucleotide
  Antisense strand to SEQ ID NO: 1924440
aggauuaaaccauuugacu

SEQ ID NO: 1924442 - RNA, 19 nt, Artificial Sequence
  Description of Artificial Sequence: Synthetic oligonucleotide
  Sense strand starting at position 1905 of SEQ ID NO: 1879678
ugcuguguuagagaacuua

SEQ ID NO: 1924443 - RNA, 19 nt, Artificial Sequence
  Description of Artificial Sequence: Synthetic oligonucleotide
  Antisense strand to SEQ ID NO: 1924442
uaaguucucuaacacagca

SEQ ID NO: 1924444 - RNA, 19 nt, Artificial Sequence
  Description of Artificial Sequence: Synthetic oligonucleotide
  Sense strand starting at position 1940 of SEQ ID NO: 1879678
ugccuacucuauuuaaggu

SEQ ID NO: 1924445 - RNA, 19 nt, Artificial Sequence
  Description of Artificial Sequence: Synthetic oligonucleotide
  Antisense strand to SEQ ID NO: 1924444
accuuaaauagaguaggca

SEQ ID NO: 1924446 - RNA, 19 nt, Artificial Sequence
  Description of Artificial Sequence: Synthetic oligonucleotide
  Sense strand starting at position 1956 of SEQ ID NO: 1879678
gguacagggugucuuaaau

SEQ ID NO: 1924447 - RNA, 19 nt, Artificial Sequence
  Description of Artificial Sequence: Synthetic oligonucleotide
  Antisense strand to SEQ ID NO: 1924446
auuuaagacacccuguacc

SEQ ID NO: 1924448 - RNA, 19 nt, Artificial Sequence
  Description of Artificial Sequence: Synthetic oligonucleotide
  Sense strand starting at position 2006 of SEQ ID NO: 1879678
gcaauaagacaagguuguu

SEQ ID NO: 1924449 - RNA, 19 nt, Artificial Sequence
  Description of Artificial Sequence: Synthetic oligonucleotide
  Antisense strand to SEQ ID NO: 1924448
aacaaccuugucuuauugc

SEQ ID NO: 1924450 - RNA, 19 nt, Artificial Sequence
  Description of Artificial Sequence: Synthetic oligonucleotide
  Sense strand starting at position 2092 of SEQ ID NO: 1879678
aagagauagcuauggucca

SEQ ID NO: 1924451 - RNA, 19 nt, Artificial Sequence
  Description of Artificial Sequence: Synthetic oligonucleotide
  Antisense strand to SEQ ID NO: 1924450
uggaccauagcuaucucuu

SEQ ID NO: 1924452 - RNA, 19 nt, Artificial Sequence
  Description of Artificial Sequence: Synthetic oligonucleotide
  Sense strand starting at position 2102 of SEQ ID NO: 1879678
uaugguccacuugguaauu

SEQ ID NO: 1924453 - RNA, 19 nt, Artificial Sequence
  Description of Artificial Sequence: Synthetic oligonucleotide
  Antisense strand to SEQ ID NO: 1924452
aauuaccaaguggaccaua

SEQ ID NO: 1924454 - RNA, 19 nt, Artificial Sequence
  Description of Artificial Sequence: Synthetic oligonucleotide
  Sense strand starting at position 2103 of SEQ ID NO: 1879678
augguccacuugguaauua

SEQ ID NO: 1924455 - RNA, 19 nt, Artificial Sequence
  Description of Artificial Sequence: Synthetic oligonucleotide
  Antisense strand to SEQ ID NO: 1924454
uaauuaccaaguggaccau

SEQ ID NO: 1924456 - RNA, 19 nt, Artificial Sequence
  Description of Artificial Sequence: Synthetic oligonucleotide
  Sense strand starting at position 2113 of SEQ ID NO: 1879678
ugguaauuauuugcuguga

SEQ ID NO: 1924457 - RNA, 19 nt, Artificial Sequence
  Description of Artificial Sequence: Synthetic oligonucleotide
  Antisense strand to SEQ ID NO: 1924456
ucacagcaaauaauuacca

SEQ ID NO: 1924458 - RNA, 19 nt, Artificial Sequence
  Description of Artificial Sequence: Synthetic oligonucleotide
  Sense strand starting at position 2218 of SEQ ID NO: 1879678
aagcaaguuuagguuuaca

SEQ ID NO: 1924459 - RNA, 19 nt, Artificial Sequence
  Description of Artificial Sequence: Synthetic oligonucleotide
  Antisense strand to SEQ ID NO: 1924458
uguaaaccuaaacuugcuu

SEQ ID NO: 1924460 - RNA, 19 nt, Artificial Sequence
  Description of Artificial Sequence: Synthetic oligonucleotide
  Sense strand starting at position 2344 of SEQ ID NO: 1879678
agcugaugagccuauauua

SEQ ID NO: 1924461 - RNA, 19 nt, Artificial Sequence
  Description of Artificial Sequence: Synthetic oligonucleotide
  Antisense strand to SEQ ID NO: 1924460
uaauauaggcucaucagcu

SEQ ID NO: 1924462 - RNA, 19 nt, Artificial Sequence
  Description of Artificial Sequence: Synthetic oligonucleotide
  Sense strand starting at position 2561 of SEQ ID NO: 1879678
acggcaacuagugaucuuu

SEQ ID NO: 1924463 - RNA, 19 nt, Artificial Sequence
  Description of Artificial Sequence: Synthetic oligonucleotide
  Antisense strand to SEQ ID NO: 1924462
aaagaucacuaguugccgu

SEQ ID NO: 1924464 - RNA, 19 nt, Artificial Sequence
  Description of Artificial Sequence: Synthetic oligonucleotide
  Sense strand starting at position 2776 of SEQ ID NO: 1879678
guauuuaacucaguagugu

SEQ ID NO: 1924465 - RNA, 19 nt, Artificial Sequence
  Description of Artificial Sequence: Synthetic oligonucleotide
  Antisense strand to SEQ ID NO: 1924464
acacuacugaguuaaauac

SEQ ID NO: 1924466 - RNA, 19 nt, Artificial Sequence
  Description of Artificial Sequence: Synthetic oligonucleotide
  Sense strand starting at position 2837 of SEQ ID NO: 1879678
cuugacucuuuaccguaaa

SEQ ID NO: 1924467 - RNA, 19 nt, Artificial Sequence
  Description of Artificial Sequence: Synthetic oligonucleotide
  Antisense strand to SEQ ID NO: 1924466
uuuacgguaaagagucaag

SEQ ID NO: 1924468 - RNA, 19 nt, Artificial Sequence
  Description of Artificial Sequence: Synthetic oligonucleotide
  Sense strand starting at position 2855 of SEQ ID NO: 1879678
augggauucugggagauaa

SEQ ID NO: 1924469 - RNA, 19 nt, Artificial Sequence
  Description of Artificial Sequence: Synthetic oligonucleotide
  Antisense strand to SEQ ID NO: 1924468
uuaucucccagaaucccau

SEQ ID NO: 1924470 - RNA, 19 nt, Artificial Sequence
  Description of Artificial Sequence: Synthetic oligonucleotide
  Sense strand starting at position 3292 of SEQ ID NO: 1879678
caguuuauggcccaagcau

SEQ ID NO: 1924471 - RNA, 19 nt, Artificial Sequence
  Description of Artificial Sequence: Synthetic oligonucleotide
  Antisense strand to SEQ ID NO: 1924470
augcuugggccauaaacug

SEQ ID NO: 1924472 - RNA, 19 nt, Artificial Sequence
  Description of Artificial Sequence: Synthetic oligonucleotide
  Sense strand starting at position 3313 of SEQ ID NO: 1879678
ucuguuaucuugguuauga

SEQ ID NO: 1924473 - RNA, 19 nt, Artificial Sequence
  Description of Artificial Sequence: Synthetic oligonucleotide
  Antisense strand to SEQ ID NO: 1924472
ucauaaccaagauaacaga

SEQ ID NO: 1924474 - RNA, 19 nt, Artificial Sequence
  Description of Artificial Sequence: Synthetic oligonucleotide
  Sense strand starting at position 3314 of SEQ ID NO: 1879678
cuguuaucuugguuaugau

SEQ ID NO: 1924475 - RNA, 19 nt, Artificial Sequence
  Description of Artificial Sequence: Synthetic oligonucleotide
  Antisense strand to SEQ ID NO: 1924474
aucauaaccaagauaacag

SEQ ID NO: 1924476 - RNA, 19 nt, Artificial Sequence
  Description of Artificial Sequence: Synthetic oligonucleotide
  Sense strand starting at position 3315 of SEQ ID NO: 1879678
uguuaucuugguuaugauu

SEQ ID NO: 1924477 - RNA, 19 nt, Artificial Sequence
  Description of Artificial Sequence: Synthetic oligonucleotide
  Antisense strand to SEQ ID NO: 1924476
aaucauaaccaagauaaca

SEQ ID NO: 1924478 - RNA, 19 nt, Artificial Sequence
  Description of Artificial Sequence: Synthetic oligonucleotide
  Sense strand starting at position 3323 of SEQ ID NO: 1879678
ugguuaugauucucuguau

SEQ ID NO: 1924479 - RNA, 19 nt, Artificial Sequence
  Description of Artificial Sequence: Synthetic oligonucleotide
  Antisense strand to SEQ ID NO: 1924478
auacagagaaucauaacca

SEQ ID NO: 1924480 - RNA, 19 nt, Artificial Sequence
  Description of Artificial Sequence: Synthetic oligonucleotide
  Sense strand starting at position 3324 of SEQ ID NO: 1879678
gguuaugauucucuguauu

SEQ ID NO: 1924481 - RNA, 19 nt, Artificial Sequence
  Description of Artificial Sequence: Synthetic oligonucleotide
  Antisense strand to SEQ ID NO: 1924480
aauacagagaaucauaacc

SEQ ID NO: 1924482 - RNA, 19 nt, Artificial Sequence
  Description of Artificial Sequence: Synthetic oligonucleotide
  Sense strand starting at position 3387 of SEQ ID NO: 1879678
ucaaucucugauggaucua

SEQ ID NO: 1924483 - RNA, 19 nt, Artificial Sequence
  Description of Artificial Sequence: Synthetic oligonucleotide
  Antisense strand to SEQ ID NO: 1924482
uagauccaucagagauuga

SEQ ID NO: 1924484 - RNA, 19 nt, Artificial Sequence
  Description of Artificial Sequence: Synthetic oligonucleotide
  Sense strand starting at position 3427 of SEQ ID NO: 1879678
uuggucagauuacuguuau

SEQ ID NO: 1924485 - RNA, 19 nt, Artificial Sequence
  Description of Artificial Sequence: Synthetic oligonucleotide
  Antisense strand to SEQ ID NO: 1924484
auaacaguaaucugaccaa

SEQ ID NO: 1924486 - RNA, 19 nt, Artificial Sequence
  Description of Artificial Sequence: Synthetic oligonucleotide
  Sense strand starting at position 3481 of SEQ ID NO: 1879678
acauguugaggcugaaacu

SEQ ID NO: 1924487 - RNA, 19 nt, Artificial Sequence
  Description of Artificial Sequence: Synthetic oligonucleotide
  Antisense strand to SEQ ID NO: 1924486
aguuucagccucaacaugu

SEQ ID NO: 1924488 - RNA, 19 nt, Artificial Sequence
  Description of Artificial Sequence: Synthetic oligonucleotide
  Sense strand starting at position 3588 of SEQ ID NO: 1879678
uuccuuuauggagguccaa

SEQ ID NO: 1924489 - RNA, 19 nt, Artificial Sequence
  Description of Artificial Sequence: Synthetic oligonucleotide
  Antisense strand to SEQ ID NO: 1924488
uuggaccuccauaaaggaa

SEQ ID NO: 1924490 - RNA, 19 nt, Artificial Sequence
  Description of Artificial Sequence: Synthetic oligonucleotide
  Sense strand starting at position 134 of SEQ ID NO: 1879679
aauucuaggcuugggauga

SEQ ID NO: 1924491 - RNA, 19 nt, Artificial Sequence
  Description of Artificial Sequence: Synthetic oligonucleotide
  Antisense strand to SEQ ID NO: 1924490
ucaucccaagccuagaauu

SEQ ID NO: 1924492 - RNA, 19 nt, Artificial Sequence
  Description of Artificial Sequence: Synthetic oligonucleotide
  Sense strand starting at position 208 of SEQ ID NO: 1879679
ugcuauuuccuuugagcac

SEQ ID NO: 1924493 - RNA, 19 nt, Artificial Sequence
  Description of Artificial Sequence: Synthetic oligonucleotide
  Antisense strand to SEQ ID NO: 1924492
gugcucaaaggaaauagca

SEQ ID NO: 1924494 - RNA, 19 nt, Artificial Sequence
  Description of Artificial Sequence: Synthetic oligonucleotide
  Sense strand starting at position 245 of SEQ ID NO: 1879679
auauaugauguuugagaug

SEQ ID NO: 1924495 - RNA, 19 nt, Artificial Sequence
  Description of Artificial Sequence: Synthetic oligonucleotide
  Antisense strand to SEQ ID NO: 1924494
caucucaaacaucauauau

SEQ ID NO: 1924496 - RNA, 19 nt, Artificial Sequence
  Description of Artificial Sequence: Synthetic oligonucleotide
  Sense strand starting at position 341 of SEQ ID NO: 1879679
uaguaagucccaugaagau

SEQ ID NO: 1924497 - RNA, 19 nt, Artificial Sequence
  Description of Artificial Sequence: Synthetic oligonucleotide
  Antisense strand to SEQ ID NO: 1924496
aucuucaugggacuuacua

SEQ ID NO: 1924498 - RNA, 19 nt, Artificial Sequence
  Description of Artificial Sequence: Synthetic oligonucleotide
  Sense strand starting at position 803 of SEQ ID NO: 1879679
cuuaaagugucacuauaaa

SEQ ID NO: 1924499 - RNA, 19 nt, Artificial Sequence
  Description of Artificial Sequence: Synthetic oligonucleotide
  Antisense strand to SEQ ID NO: 1924498
uuuauagugacacuuuaag

SEQ ID NO: 1924500 - RNA, 19 nt, Artificial Sequence
  Description of Artificial Sequence: Synthetic oligonucleotide
  Sense strand starting at position 847 of SEQ ID NO: 1879679
uucuuucuggaguaucuaa

SEQ ID NO: 1924501 - RNA, 19 nt, Artificial Sequence
  Description of Artificial Sequence: Synthetic oligonucleotide
  Antisense strand to SEQ ID NO: 1924500
uuagauacuccagaaagaa

SEQ ID NO: 1924502 - RNA, 19 nt, Artificial Sequence
  Description of Artificial Sequence: Synthetic oligonucleotide
  Sense strand starting at position 1095 of SEQ ID NO: 1879679
auccuacauuuaggaaaga

SEQ ID NO: 1924503 - RNA, 19 nt, Artificial Sequence
  Description of Artificial Sequence: Synthetic oligonucleotide
  Antisense strand to SEQ ID NO: 1924502
ucuuuccuaaauguaggau

SEQ ID NO: 1924504 - RNA, 19 nt, Artificial Sequence
  Description of Artificial Sequence: Synthetic oligonucleotide
  Sense strand starting at position 1096 of SEQ ID NO: 1879679
uccuacauuuaggaaagaa

SEQ ID NO: 1924505 - RNA, 19 nt, Artificial Sequence
  Description of Artificial Sequence: Synthetic oligonucleotide
  Antisense strand to SEQ ID NO: 1924504
uucuuuccuaaauguagga

SEQ ID NO: 1924506 - RNA, 19 nt, Artificial Sequence
  Description of Artificial Sequence: Synthetic oligonucleotide
  Sense strand starting at position 1155 of SEQ ID NO: 1879679
gcauaauaccauuauggua

SEQ ID NO: 1924507 - RNA, 19 nt, Artificial Sequence
  Description of Artificial Sequence: Synthetic oligonucleotide
  Antisense strand to SEQ ID NO: 1924506
uaccauaaugguauuaugc

SEQ ID NO: 1924508 - RNA, 19 nt, Artificial Sequence
  Description of Artificial Sequence: Synthetic oligonucleotide
  Sense strand starting at position 1188 of SEQ ID NO: 1879679
cagaauaugccugaguaau

SEQ ID NO: 1924509 - RNA, 19 nt, Artificial Sequence
  Description of Artificial Sequence: Synthetic oligonucleotide
  Antisense strand to SEQ ID NO: 1924508
auuacucaggcauauucug

SEQ ID NO: 1924510 - RNA, 19 nt, Artificial Sequence
  Description of Artificial Sequence: Synthetic oligonucleotide
  Sense strand starting at position 1343 of SEQ ID NO: 1879679
uuuacaaaccuuugugaag

SEQ ID NO: 1924511 - RNA, 19 nt, Artificial Sequence
  Description of Artificial Sequence: Synthetic oligonucleotide
  Antisense strand to SEQ ID NO: 1924510
cuucacaaagguuuguaaa

SEQ ID NO: 1924512 - RNA, 19 nt, Artificial Sequence
  Description of Artificial Sequence: Synthetic oligonucleotide
  Sense strand starting at position 1492 of SEQ ID NO: 1879679
gauagaggccuuugaauuc

SEQ ID NO: 1924513 - RNA, 19 nt, Artificial Sequence
  Description of Artificial Sequence: Synthetic oligonucleotide
  Antisense strand to SEQ ID NO: 1924512
gaauucaaaggccucuauc

SEQ ID NO: 1924514 - RNA, 19 nt, Artificial Sequence
  Description of Artificial Sequence: Synthetic oligonucleotide
  Sense strand starting at position 1618 of SEQ ID NO: 1879679
uucuguuacuaaucugaga

SEQ ID NO: 1924515 - RNA, 19 nt, Artificial Sequence
  Description of Artificial Sequence: Synthetic oligonucleotide
  Antisense strand to SEQ ID NO: 1924514
ucucagauuaguaacagaa

SEQ ID NO: 1924516 - RNA, 19 nt, Artificial Sequence
  Description of Artificial Sequence: Synthetic oligonucleotide
  Sense strand starting at position 1682 of SEQ ID NO: 1879679
acacaaggauaguccuuau

SEQ ID NO: 1924517 - RNA, 19 nt, Artificial Sequence
  Description of Artificial Sequence: Synthetic oligonucleotide
  Antisense strand to SEQ ID NO: 1924516
auaaggacuauccuugugu

SEQ ID NO: 1924518 - RNA, 19 nt, Artificial Sequence
  Description of Artificial Sequence: Synthetic oligonucleotide
  Sense strand starting at position 1709 of SEQ ID NO: 1879679
aggacaaccuagccauaua

SEQ ID NO: 1924519 - RNA, 19 nt, Artificial Sequence
  Description of Artificial Sequence: Synthetic oligonucleotide
  Antisense strand to SEQ ID NO: 1924518
uauauggcuagguuguccu

SEQ ID NO: 1924520 - RNA, 19 nt, Artificial Sequence
  Description of Artificial Sequence: Synthetic oligonucleotide
  Sense strand starting at position 1773 of SEQ ID NO: 1879679
gugguaaacuuucuggaag

SEQ ID NO: 1924521 - RNA, 19 nt, Artificial Sequence
  Description of Artificial Sequence: Synthetic oligonucleotide
  Antisense strand to SEQ ID NO: 1924520
cuuccagaaaguuuaccac

SEQ ID NO: 1924522 - RNA, 19 nt, Artificial Sequence
  Description of Artificial Sequence: Synthetic oligonucleotide
  Sense strand starting at position 1788 of SEQ ID NO: 1879679
gaaggauguuauccauccu

SEQ ID NO: 1924523 - RNA, 19 nt, Artificial Sequence
  Description of Artificial Sequence: Synthetic oligonucleotide
  Antisense strand to SEQ ID NO: 1924522
aggauggauaacauccuuc

SEQ ID NO: 1924524 - RNA, 19 nt, Artificial Sequence
  Description of Artificial Sequence: Synthetic oligonucleotide
  Sense strand starting at position 1795 of SEQ ID NO: 1879679
guuauccauccuuaaguag

SEQ ID NO: 1924525 - RNA, 19 nt, Artificial Sequence
  Description of Artificial Sequence: Synthetic oligonucleotide
  Antisense strand to SEQ ID NO: 1924524
cuacuuaaggauggauaac

SEQ ID NO: 1924526 - RNA, 19 nt, Artificial Sequence
  Description of Artificial Sequence: Synthetic oligonucleotide
  Sense strand starting at position 1809 of SEQ ID NO: 1879679
aguagucaacucgacaacu

SEQ ID NO: 1924527 - RNA, 19 nt, Artificial Sequence
  Description of Artificial Sequence: Synthetic oligonucleotide
  Antisense strand to SEQ ID NO: 1924526
aguugucgaguugacuacu

SEQ ID NO: 1924528 - RNA, 19 nt, Artificial Sequence
  Description of Artificial Sequence: Synthetic oligonucleotide
  Sense strand starting at position 1993 of SEQ ID NO: 1879679
agagcuggucacuaacuuu

SEQ ID NO: 1924529 - RNA, 19 nt, Artificial Sequence
  Description of Artificial Sequence: Synthetic oligonucleotide
  Antisense strand to SEQ ID NO: 1924528
aaaguuagugaccagcucu

SEQ ID NO: 1924530 - RNA, 19 nt, Artificial Sequence
  Description of Artificial Sequence: Synthetic oligonucleotide
  Sense strand starting at position 2238 of SEQ ID NO: 1879679
cuguacaugugacuaagaa

SEQ ID NO: 1924531 - RNA, 19 nt, Artificial Sequence
  Description of Artificial Sequence: Synthetic oligonucleotide
  Antisense strand to SEQ ID NO: 1924530
uucuuagucacauguacag

SEQ ID NO: 1924532 - RNA, 19 nt, Artificial Sequence
  Description of Artificial Sequence: Synthetic oligonucleotide
  Sense strand starting at position 2272 of SEQ ID NO: 1879679
aucagaugccaccaguuau

SEQ ID NO: 1924533 - RNA, 19 nt, Artificial Sequence
  Description of Artificial Sequence: Synthetic oligonucleotide
  Antisense strand to SEQ ID NO: 1924532
auaacugguggcaucugau

SEQ ID NO: 1924534 - RNA, 19 nt, Artificial Sequence
  Description of Artificial Sequence: Synthetic oligonucleotide
  Sense strand starting at position 2439 of SEQ ID NO: 1879679
gagagaaguuauucucuuu

SEQ ID NO: 1924535 - RNA, 19 nt, Artificial Sequence
  Description of Artificial Sequence: Synthetic oligonucleotide
  Antisense strand to SEQ ID NO: 1924534
aaagagaauaacuucucuc

SEQ ID NO: 1924536 - RNA, 19 nt, Artificial Sequence
  Description of Artificial Sequence: Synthetic oligonucleotide
  Sense strand starting at position 2509 of SEQ ID NO: 1879679
gugacucuggaaugauuau

SEQ ID NO: 1924537 - RNA, 19 nt, Artificial Sequence
  Description of Artificial Sequence: Synthetic oligonucleotide
  Antisense strand to SEQ ID NO: 1924536
auaaucauuccagagucac

SEQ ID NO: 1924538 - RNA, 19 nt, Artificial Sequence
  Description of Artificial Sequence: Synthetic oligonucleotide
  Sense strand starting at position 2520 of SEQ ID NO: 1879679
augauuauuugugagaaug

SEQ ID NO: 1924539 - RNA, 19 nt, Artificial Sequence
  Description of Artificial Sequence: Synthetic oligonucleotide
  Antisense strand to SEQ ID NO: 1924538
cauucucacaaauaaucau

SEQ ID NO: 1924540 - RNA, 19 nt, Artificial Sequence
  Description of Artificial Sequence: Synthetic oligonucleotide
  Sense strand starting at position 2522 of SEQ ID NO: 1879679
gauuauuugugagaaugac

SEQ ID NO: 1924541 - RNA, 19 nt, Artificial Sequence
  Description of Artificial Sequence: Synthetic oligonucleotide
  Antisense strand to SEQ ID NO: 1924540
gucauucucacaaauaauc

SEQ ID NO: 1924542 - RNA, 19 nt, Artificial Sequence
  Description of Artificial Sequence: Synthetic oligonucleotide
  Sense strand starting at position 2528 of SEQ ID NO: 1879679
uugugagaaugacuaagua

SEQ ID NO: 1924543 - RNA, 19 nt, Artificial Sequence
  Description of Artificial Sequence: Synthetic oligonucleotide
  Antisense strand to SEQ ID NO: 1924542
uacuuagucauucucacaa

SEQ ID NO: 1924544 - RNA, 19 nt, Artificial Sequence
  Description of Artificial Sequence: Synthetic oligonucleotide
  Sense strand starting at position 2562 of SEQ ID NO: 1879679
cccagauuaugguuaagag

SEQ ID NO: 1924545 - RNA, 19 nt, Artificial Sequence
  Description of Artificial Sequence: Synthetic oligonucleotide
  Antisense strand to SEQ ID NO: 1924544
cucuuaaccauaaucuggg

SEQ ID NO: 1924546 - RNA, 19 nt, Artificial Sequence
  Description of Artificial Sequence: Synthetic oligonucleotide
  Sense strand starting at position 2837 of SEQ ID NO: 1879679
gaagaucgucucuaacuau

SEQ ID NO: 1924547 - RNA, 19 nt, Artificial Sequence
  Description of Artificial Sequence: Synthetic oligonucleotide
  Antisense strand to SEQ ID NO: 1924546
auaguuagagacgaucuuc

SEQ ID NO: 1924548 - RNA, 19 nt, Artificial Sequence
  Description of Artificial Sequence: Synthetic oligonucleotide
  Sense strand starting at position 3001 of SEQ ID NO: 1879679
guagaaauacauuauuguc

SEQ ID NO: 1924549 - RNA, 19 nt, Artificial Sequence
  Description of Artificial Sequence: Synthetic oligonucleotide
  Antisense strand to SEQ ID NO: 1924548
gacaauaauguauuucuac

SEQ ID NO: 1924550 - RNA, 19 nt, Artificial Sequence
  Description of Artificial Sequence: Synthetic oligonucleotide
  Sense strand starting at position 3090 of SEQ ID NO: 1879679
guauuauaauaccuaggag

SEQ ID NO: 1924551 - RNA, 19 nt, Artificial Sequence
  Description of Artificial Sequence: Synthetic oligonucleotide
  Antisense strand to SEQ ID NO: 1924550
cuccuagguauuauaauac

SEQ ID NO: 1924552 - RNA, 19 nt, Artificial Sequence
  Description of Artificial Sequence: Synthetic oligonucleotide
  Sense strand starting at position 3263 of SEQ ID NO: 1879679
gguaucaaugacgacagua

SEQ ID NO: 1924553 - RNA, 19 nt, Artificial Sequence
  Description of Artificial Sequence: Synthetic oligonucleotide
  Antisense strand to SEQ ID NO: 1924552
uacugucgucauugauacc

SEQ ID NO: 1924554 - RNA, 19 nt, Artificial Sequence
  Description of Artificial Sequence: Synthetic oligonucleotide
  Sense strand starting at position 3361 of SEQ ID NO: 1879679
gcaauucuauucuuaggaa

SEQ ID NO: 1924555 - RNA, 19 nt, Artificial Sequence
  Description of Artificial Sequence: Synthetic oligonucleotide
  Antisense strand to SEQ ID NO: 1924554
uuccuaagaauagaauugc

SEQ ID NO: 1924556 - RNA, 19 nt, Artificial Sequence
  Description of Artificial Sequence: Synthetic oligonucleotide
  Sense strand starting at position 3392 of SEQ ID NO: 1879679
ccuacacucccaggagaau

SEQ ID NO: 1924557 - RNA, 19 nt, Artificial Sequence
  Description of Artificial Sequence: Synthetic oligonucleotide
  Antisense strand to SEQ ID NO: 1924556
auucuccugggaguguagg

SEQ ID NO: 1924558 - RNA, 19 nt, Artificial Sequence
  Description of Artificial Sequence: Synthetic oligonucleotide
  Sense strand starting at position 3592 of SEQ ID NO: 1879679
auggaugaaccucgauauu

SEQ ID NO: 1924559 - RNA, 19 nt, Artificial Sequence
  Description of Artificial Sequence: Synthetic oligonucleotide
  Antisense strand to SEQ ID NO: 1924558
aauaucgagguucauccau

SEQ ID NO: 1924560 - RNA, 19 nt, Artificial Sequence
  Description of Artificial Sequence: Synthetic oligonucleotide
  Sense strand starting at position 3733 of SEQ ID NO: 1879679
gggauuagagagugacugu

SEQ ID NO: 1924561 - RNA, 19 nt, Artificial Sequence
  Description of Artificial Sequence: Synthetic oligonucleotide
  Antisense strand to SEQ ID NO: 1924560
acagucacucucuaauccc

SEQ ID NO: 1924562 - RNA, 19 nt, Artificial Sequence
  Description of Artificial Sequence: Synthetic oligonucleotide
  Sense strand starting at position 3736 of SEQ ID NO: 1879679
auuagagagugacuguuaa

SEQ ID NO: 1924563 - RNA, 19 nt, Artificial Sequence
  Description of Artificial Sequence: Synthetic oligonucleotide
  Antisense strand to SEQ ID NO: 1924562
uuaacagucacucucuaau

SEQ ID NO: 1924564 - RNA, 19 nt, Artificial Sequence
  Description of Artificial Sequence: Synthetic oligonucleotide
  Sense strand starting at position 3776 of SEQ ID NO: 1879679
ugugaugauguuugggaau

SEQ ID NO: 1924565 - RNA, 19 nt, Artificial Sequence
  Description of Artificial Sequence: Synthetic oligonucleotide
  Antisense strand to SEQ ID NO: 1924564
auucccaaacaucaucaca

SEQ ID NO: 1924566 - RNA, 19 nt, Artificial Sequence
  Description of Artificial Sequence: Synthetic oligonucleotide
  Sense strand starting at position 3812 of SEQ ID NO: 1879679
gguacaacacugugauuac

SEQ ID NO: 1924567 - RNA, 19 nt, Artificial Sequence
  Description of Artificial Sequence: Synthetic oligonucleotide
  Antisense strand to SEQ ID NO: 1924566
guaaucacaguguuguacc

SEQ ID NO: 1924568 - RNA, 19 nt, Artificial Sequence
  Description of Artificial Sequence: Synthetic oligonucleotide
  Sense strand starting at position 3821 of SEQ ID NO: 1879679
cugugauuacaauaguaac

SEQ ID NO: 1924569 - RNA, 19 nt, Artificial Sequence
  Description of Artificial Sequence: Synthetic oligonucleotide
  Antisense strand to SEQ ID NO: 1924568
guuacuauuguaaucacag

SEQ ID NO: 1924570 - RNA, 19 nt, Artificial Sequence
  Description of Artificial Sequence: Synthetic oligonucleotide
  Sense strand starting at position 58 of SEQ ID NO: 1879680
ggugcuacccaauacagua

SEQ ID NO: 1924571 - RNA, 19 nt, Artificial Sequence
  Description of Artificial Sequence: Synthetic oligonucleotide
  Antisense strand to SEQ ID NO: 1924570
uacuguauuggguagcacc

SEQ ID NO: 1924572 - RNA, 19 nt, Artificial Sequence
  Description of Artificial Sequence: Synthetic oligonucleotide
  Sense strand starting at position 209 of SEQ ID NO: 1879680
ugggaugcuuuauuagauc

SEQ ID NO: 1924573 - RNA, 19 nt, Artificial Sequence
  Description of Artificial Sequence: Synthetic oligonucleotide
  Antisense strand to SEQ ID NO: 1924572
gaucuaauaaagcauccca

SEQ ID NO: 1924574 - RNA, 19 nt, Artificial Sequence
  Description of Artificial Sequence: Synthetic oligonucleotide
  Sense strand starting at position 365 of SEQ ID NO: 1879680
uugugaacucaugaaugcu

SEQ ID NO: 1924575 - RNA, 19 nt, Artificial Sequence
  Description of Artificial Sequence: Synthetic oligonucleotide
  Antisense strand to SEQ ID NO: 1924574
agcauucaugaguucacaa

SEQ ID NO: 1924576 - RNA, 19 nt, Artificial Sequence
  Description of Artificial Sequence: Synthetic oligonucleotide
  Sense strand starting at position 429 of SEQ ID NO: 1879680
uaguguuuggcacaacaaa

SEQ ID NO: 1924577 - RNA, 19 nt, Artificial Sequence
  Description of Artificial Sequence: Synthetic oligonucleotide
  Antisense strand to SEQ ID NO: 1924576
uuuguugugccaaacacua

SEQ ID NO: 1924578 - RNA, 19 nt, Artificial Sequence
  Description of Artificial Sequence: Synthetic oligonucleotide
  Sense strand starting at position 517 of SEQ ID NO: 1879680
uucuguaaggaaugguauu

SEQ ID NO: 1924579 - RNA, 19 nt, Artificial Sequence
  Description of Artificial Sequence: Synthetic oligonucleotide
  Antisense strand to SEQ ID NO: 1924578
aauaccauuccuuacagaa

SEQ ID NO: 1924580 - RNA, 19 nt, Artificial Sequence
  Description of Artificial Sequence: Synthetic oligonucleotide
  Sense strand starting at position 568 of SEQ ID NO: 1879680
guugcuacugugucaaugu

SEQ ID NO: 1924581 - RNA, 19 nt, Artificial Sequence
  Description of Artificial Sequence: Synthetic oligonucleotide
  Antisense strand to SEQ ID NO: 1924580
acauugacacaguagcaac

SEQ ID NO: 1924582 - RNA, 19 nt, Artificial Sequence
  Description of Artificial Sequence: Synthetic oligonucleotide
  Sense strand starting at position 613 of SEQ ID NO: 1879680
aagggaaauuacguuuaua

SEQ ID NO: 1924583 - RNA, 19 nt, Artificial Sequence
  Description of Artificial Sequence: Synthetic oligonucleotide
  Antisense strand to SEQ ID NO: 1924582
uauaaacguaauuucccuu

SEQ ID NO: 1924584 - RNA, 19 nt, Artificial Sequence
  Description of Artificial Sequence: Synthetic oligonucleotide
  Sense strand starting at position 768 of SEQ ID NO: 1879680
aaauuaugguggcuaauau

SEQ ID NO: 1924585 - RNA, 19 nt, Artificial Sequence
  Description of Artificial Sequence: Synthetic oligonucleotide
  Antisense strand to SEQ ID NO: 1924584
auauuagccaccauaauuu

SEQ ID NO: 1924586 - RNA, 19 nt, Artificial Sequence
  Description of Artificial Sequence: Synthetic oligonucleotide
  Sense strand starting at position 769 of SEQ ID NO: 1879680
aauuaugguggcuaauauu

SEQ ID NO: 1924587 - RNA, 19 nt, Artificial Sequence
  Description of Artificial Sequence: Synthetic oligonucleotide
  Antisense strand to SEQ ID NO: 1924586
aauauuagccaccauaauu

SEQ ID NO: 1924588 - RNA, 19 nt, Artificial Sequence
  Description of Artificial Sequence: Synthetic oligonucleotide
  Sense strand starting at position 973 of SEQ ID NO: 1879680
uucucugugguuuaucaaa

SEQ ID NO: 1924589 - RNA, 19 nt, Artificial Sequence
  Description of Artificial Sequence: Synthetic oligonucleotide
  Antisense strand to SEQ ID NO: 1924588
uuugauaaaccacagagaa

SEQ ID NO: 1924590 - RNA, 19 nt, Artificial Sequence
  Description of Artificial Sequence: Synthetic oligonucleotide
  Sense strand starting at position 1584 of SEQ ID NO: 1879680
ugagauugcauguauucug

SEQ ID NO: 1924591 - RNA, 19 nt, Artificial Sequence
  Description of Artificial Sequence: Synthetic oligonucleotide
  Antisense strand to SEQ ID NO: 1924590
cagaauacaugcaaucuca

SEQ ID NO: 1924592 - RNA, 19 nt, Artificial Sequence
  Description of Artificial Sequence: Synthetic oligonucleotide
  Sense strand starting at position 1643 of SEQ ID NO: 1879680
ggaaguaccucuucuccaa

SEQ ID NO: 1924593 - RNA, 19 nt, Artificial Sequence
  Description of Artificial Sequence: Synthetic oligonucleotide
  Antisense strand to SEQ ID NO: 1924592
uuggagaagagguacuucc

SEQ ID NO: 1924594 - RNA, 19 nt, Artificial Sequence
  Description of Artificial Sequence: Synthetic oligonucleotide
  Sense strand starting at position 1698 of SEQ ID NO: 1879680
uugugacaacuguauugau

SEQ ID NO: 1924595 - RNA, 19 nt, Artificial Sequence
  Description of Artificial Sequence: Synthetic oligonucleotide
  Antisense strand to SEQ ID NO: 1924594
aucaauacaguugucacaa

SEQ ID NO: 1924596 - RNA, 19 nt, Artificial Sequence
  Description of Artificial Sequence: Synthetic oligonucleotide
  Sense strand starting at position 1707 of SEQ ID NO: 1879680
cuguauugauuauuucguu

SEQ ID NO: 1924597 - RNA, 19 nt, Artificial Sequence
  Description of Artificial Sequence: Synthetic oligonucleotide
  Antisense strand to SEQ ID NO: 1924596
aacgaaauaaucaauacag

SEQ ID NO: 1924598 - RNA, 19 nt, Artificial Sequence
  Description of Artificial Sequence: Synthetic oligonucleotide
  Sense strand starting at position 1809 of SEQ ID NO: 1879680
acugauauagccuguaaac

SEQ ID NO: 1924599 - RNA, 19 nt, Artificial Sequence
  Description of Artificial Sequence: Synthetic oligonucleotide
  Antisense strand to SEQ ID NO: 1924598
guuuacaggcuauaucagu

SEQ ID NO: 1924600 - RNA, 19 nt, Artificial Sequence
  Description of Artificial Sequence: Synthetic oligonucleotide
  Sense strand starting at position 1811 of SEQ ID NO: 1879680
ugauauagccuguaaacug

SEQ ID NO: 1924601 - RNA, 19 nt, Artificial Sequence
  Description of Artificial Sequence: Synthetic oligonucleotide
  Antisense strand to SEQ ID NO: 1924600
caguuuacaggcuauauca

SEQ ID NO: 1924602 - RNA, 19 nt, Artificial Sequence
  Description of Artificial Sequence: Synthetic oligonucleotide
  Sense strand starting at position 1898 of SEQ ID NO: 1879680
auaggugcuccauaaauga

SEQ ID NO: 1924603 - RNA, 19 nt, Artificial Sequence
  Description of Artificial Sequence: Synthetic oligonucleotide
  Antisense strand to SEQ ID NO: 1924602
ucauuuauggagcaccuau

SEQ ID NO: 1924604 - RNA, 19 nt, Artificial Sequence
  Description of Artificial Sequence: Synthetic oligonucleotide
  Sense strand starting at position 2130 of SEQ ID NO: 1879680
agaggauuaaauuguguuu

SEQ ID NO: 1924605 - RNA, 19 nt, Artificial Sequence
  Description of Artificial Sequence: Synthetic oligonucleotide
  Antisense strand to SEQ ID NO: 1924604
aaacacaauuuaauccucu

SEQ ID NO: 1924606 - RNA, 19 nt, Artificial Sequence
  Description of Artificial Sequence: Synthetic oligonucleotide
  Sense strand starting at position 2133 of SEQ ID NO: 1879680
ggauuaaauuguguuuaug

SEQ ID NO: 1924607 - RNA, 19 nt, Artificial Sequence
  Description of Artificial Sequence: Synthetic oligonucleotide
  Antisense strand to SEQ ID NO: 1924606
cauaaacacaauuuaaucc

SEQ ID NO: 1924608 - RNA, 19 nt, Artificial Sequence
  Description of Artificial Sequence: Synthetic oligonucleotide
  Sense strand starting at position 2136 of SEQ ID NO: 1879680
uuaaauuguguuuauggga

SEQ ID NO: 1924609 - RNA, 19 nt, Artificial Sequence
  Description of Artificial Sequence: Synthetic oligonucleotide
  Antisense strand to SEQ ID NO: 1924608
ucccauaaacacaauuuaa

SEQ ID NO: 1924610 - RNA, 19 nt, Artificial Sequence
  Description of Artificial Sequence: Synthetic oligonucleotide
  Sense strand starting at position 2151 of SEQ ID NO: 1879680
gggagccucucauuaagga

SEQ ID NO: 1924611 - RNA, 19 nt, Artificial Sequence
  Description of Artificial Sequence: Synthetic oligonucleotide
  Antisense strand to SEQ ID NO: 1924610
uccuuaaugagaggcuccc

SEQ ID NO: 1924612 - RNA, 19 nt, Artificial Sequence
  Description of Artificial Sequence: Synthetic oligonucleotide
  Sense strand starting at position 2274 of SEQ ID NO: 1879680
uccaguugggauggaugau

SEQ ID NO: 1924613 - RNA, 19 nt, Artificial Sequence
  Description of Artificial Sequence: Synthetic oligonucleotide
  Antisense strand to SEQ ID NO: 1924612
aucauccaucccaacugga

SEQ ID NO: 1924614 - RNA, 19 nt, Artificial Sequence
  Description of Artificial Sequence: Synthetic oligonucleotide
  Sense strand starting at position 2367 of SEQ ID NO: 1879680
ugugaugaggcagaccauu

SEQ ID NO: 1924615 - RNA, 19 nt, Artificial Sequence
  Description of Artificial Sequence: Synthetic oligonucleotide
  Antisense strand to SEQ ID NO: 1924614
aauggucugccucaucaca

SEQ ID NO: 1924616 - RNA, 19 nt, Artificial Sequence
  Description of Artificial Sequence: Synthetic oligonucleotide
  Sense strand starting at position 2507 of SEQ ID NO: 1879680
agcuauuaugcauaaucag

SEQ ID NO: 1924617 - RNA, 19 nt, Artificial Sequence
  Description of Artificial Sequence: Synthetic oligonucleotide
  Antisense strand to SEQ ID NO: 1924616
cugauuaugcauaauagcu

SEQ ID NO: 1924618 - RNA, 19 nt, Artificial Sequence
  Description of Artificial Sequence: Synthetic oligonucleotide
  Sense strand starting at position 2531 of SEQ ID NO: 1879680
gcuuguacauuuguaaugu

SEQ ID NO: 1924619 - RNA, 19 nt, Artificial Sequence
  Description of Artificial Sequence: Synthetic oligonucleotide
  Antisense strand to SEQ ID NO: 1924618
acauuacaaauguacaagc

SEQ ID NO: 1924620 - RNA, 19 nt, Artificial Sequence
  Description of Artificial Sequence: Synthetic oligonucleotide
  Sense strand starting at position 2614 of SEQ ID NO: 1879680
ugguaaaugcaugacaguu

SEQ ID NO: 1924621 - RNA, 19 nt, Artificial Sequence
  Description of Artificial Sequence: Synthetic oligonucleotide
  Antisense strand to SEQ ID NO: 1924620
aacugucaugcauuuacca

SEQ ID NO: 1924622 - RNA, 19 nt, Artificial Sequence
  Description of Artificial Sequence: Synthetic oligonucleotide
  Sense strand starting at position 3019 of SEQ ID NO: 1879680
ucuaaauugucauuuggcu

SEQ ID NO: 1924623 - RNA, 19 nt, Artificial Sequence
  Description of Artificial Sequence: Synthetic oligonucleotide
  Antisense strand to SEQ ID NO: 1924622
agccaaaugacaauuuaga

SEQ ID NO: 1924624 - RNA, 19 nt, Artificial Sequence
  Description of Artificial Sequence: Synthetic oligonucleotide
  Sense strand starting at position 3050 of SEQ ID NO: 1879680
gugcuauggguguuuaguu

SEQ ID NO: 1924625 - RNA, 19 nt, Artificial Sequence
  Description of Artificial Sequence: Synthetic oligonucleotide
  Antisense strand to SEQ ID NO: 1924624
aacuaaacacccauagcac

SEQ ID NO: 1924626 - RNA, 19 nt, Artificial Sequence
  Description of Artificial Sequence: Synthetic oligonucleotide
  Sense strand starting at position 3185 of SEQ ID NO: 1879680
ucaugucaucggcauaaag

SEQ ID NO: 1924627 - RNA, 19 nt, Artificial Sequence
  Description of Artificial Sequence: Synthetic oligonucleotide
  Antisense strand to SEQ ID NO: 1924626
cuuuaugccgaugacauga

SEQ ID NO: 1924628 - RNA, 19 nt, Artificial Sequence
  Description of Artificial Sequence: Synthetic oligonucleotide
  Sense strand starting at position 3187 of SEQ ID NO: 1879680
augucaucggcauaaagac

SEQ ID NO: 1924629 - RNA, 19 nt, Artificial Sequence
  Description of Artificial Sequence: Synthetic oligonucleotide
  Antisense strand to SEQ ID NO: 1924628
gucuuuaugccgaugacau

SEQ ID NO: 1924630 - RNA, 19 nt, Artificial Sequence
  Description of Artificial Sequence: Synthetic oligonucleotide
  Sense strand starting at position 3214 of SEQ ID NO: 1879680
ucaaacuggcguuaaauaa

SEQ ID NO: 1924631 - RNA, 19 nt, Artificial Sequence
  Description of Artificial Sequence: Synthetic oligonucleotide
  Antisense strand to SEQ ID NO: 1924630
uuauuuaacgccaguuuga

SEQ ID NO: 1924632 - RNA, 19 nt, Artificial Sequence
  Description of Artificial Sequence: Synthetic oligonucleotide
  Sense strand starting at position 3270 of SEQ ID NO: 1879680
ugccaucaucaugauguua

SEQ ID NO: 1924633 - RNA, 19 nt, Artificial Sequence
  Description of Artificial Sequence: Synthetic oligonucleotide
  Antisense strand to SEQ ID NO: 1924632
uaacaucaugaugauggca

SEQ ID NO: 1924634 - RNA, 19 nt, Artificial Sequence
  Description of Artificial Sequence: Synthetic oligonucleotide
  Sense strand starting at position 3292 of SEQ ID NO: 1879680
ccaguucuuccagaguaga

SEQ ID NO: 1924635 - RNA, 19 nt, Artificial Sequence
  Description of Artificial Sequence: Synthetic oligonucleotide
  Antisense strand to SEQ ID NO: 1924634
ucuacucuggaagaacugg

SEQ ID NO: 1924636 - RNA, 19 nt, Artificial Sequence
  Description of Artificial Sequence: Synthetic oligonucleotide
  Sense strand starting at position 3295 of SEQ ID NO: 1879680
guucuuccagaguagaauu

SEQ ID NO: 1924637 - RNA, 19 nt, Artificial Sequence
  Description of Artificial Sequence: Synthetic oligonucleotide
  Antisense strand to SEQ ID NO: 1924636
aauucuacucuggaagaac

SEQ ID NO: 1924638 - RNA, 19 nt, Artificial Sequence
  Description of Artificial Sequence: Synthetic oligonucleotide
  Sense strand starting at position 3427 of SEQ ID NO: 1879680
agaugucaccuuuggauua

SEQ ID NO: 1924639 - RNA, 19 nt, Artificial Sequence
  Description of Artificial Sequence: Synthetic oligonucleotide
  Antisense strand to SEQ ID NO: 1924638
uaauccaaaggugacaucu

SEQ ID NO: 1924640 - RNA, 19 nt, Artificial Sequence
  Description of Artificial Sequence: Synthetic oligonucleotide
  Sense strand starting at position 3533 of SEQ ID NO: 1879680
gaaguuaaaugaccuguaa

SEQ ID NO: 1924641 - RNA, 19 nt, Artificial Sequence
  Description of Artificial Sequence: Synthetic oligonucleotide
  Antisense strand to SEQ ID NO: 1924640
uuacaggucauuuaacuuc

SEQ ID NO: 1924642 - RNA, 19 nt, Artificial Sequence
  Description of Artificial Sequence: Synthetic oligonucleotide
  Sense strand starting at position 3665 of SEQ ID NO: 1879680
uuggcaugaagucaugagu

SEQ ID NO: 1924643 - RNA, 19 nt, Artificial Sequence
  Description of Artificial Sequence: Synthetic oligonucleotide
  Antisense strand to SEQ ID NO: 1924642
acucaugacuucaugccaa

SEQ ID NO: 1924644 - RNA, 19 nt, Artificial Sequence
  Description of Artificial Sequence: Synthetic oligonucleotide
  Sense strand starting at position 3668 of SEQ ID NO: 1879680
gcaugaagucaugagugaa

SEQ ID NO: 1924645 - RNA, 19 nt, Artificial Sequence
  Description of Artificial Sequence: Synthetic oligonucleotide
  Antisense strand to SEQ ID NO: 1924644
uucacucaugacuucaugc

SEQ ID NO: 1924646 - RNA, 19 nt, Artificial Sequence
  Description of Artificial Sequence: Synthetic oligonucleotide
  Sense strand starting at position 3678 of SEQ ID NO: 1879680
augagugaauuugaccuua

SEQ ID NO: 1924647 - RNA, 19 nt, Artificial Sequence
  Description of Artificial Sequence: Synthetic oligonucleotide
  Antisense strand to SEQ ID NO: 1924646
uaaggucaaauucacucau

SEQ ID NO: 1924648 - RNA, 19 nt, Artificial Sequence
  Description of Artificial Sequence: Synthetic oligonucleotide
  Sense strand starting at position 3950 of SEQ ID NO: 1879680
auagguaauugacucucaa

SEQ ID NO: 1924649 - RNA, 19 nt, Artificial Sequence
  Description of Artificial Sequence: Synthetic oligonucleotide
  Antisense strand to SEQ ID NO: 1924648
uugagagucaauuaccuau

SEQ ID NO: 1924650 - RNA, 19 nt, Artificial Sequence
  Description of Artificial Sequence: Synthetic oligonucleotide
  Sense strand starting at position 123 of SEQ ID NO: 1879681
agcagugcugaauaagaaa

SEQ ID NO: 1924651 - RNA, 19 nt, Artificial Sequence
  Description of Artificial Sequence: Synthetic oligonucleotide
  Antisense strand to SEQ ID NO: 1924650
uuucuuauucagcacugcu

SEQ ID NO: 1924652 - RNA, 19 nt, Artificial Sequence
  Description of Artificial Sequence: Synthetic oligonucleotide
  Sense strand starting at position 189 of SEQ ID NO: 1879681
agguuauuacagugaaauu

SEQ ID NO: 1924653 - RNA, 19 nt, Artificial Sequence
  Description of Artificial Sequence: Synthetic oligonucleotide
  Antisense strand to SEQ ID NO: 1924652
aauuucacuguaauaaccu

SEQ ID NO: 1924654 - RNA, 19 nt, Artificial Sequence
  Description of Artificial Sequence: Synthetic oligonucleotide
  Sense strand starting at position 200 of SEQ ID NO: 1879681
gugaaauucuaguucuaca

SEQ ID NO: 1924655 - RNA, 19 nt, Artificial Sequence
  Description of Artificial Sequence: Synthetic oligonucleotide
  Antisense strand to SEQ ID NO: 1924654
uguagaacuagaauuucac

SEQ ID NO: 1924656 - RNA, 19 nt, Artificial Sequence
  Description of Artificial Sequence: Synthetic oligonucleotide
  Sense strand starting at position 220 of SEQ ID NO: 1879681
aaguaaagugacugguaga

SEQ ID NO: 1924657 - RNA, 19 nt, Artificial Sequence
  Description of Artificial Sequence: Synthetic oligonucleotide
  Antisense strand to SEQ ID NO: 1924656
ucuaccagucacuuuacuu

SEQ ID NO: 1924658 - RNA, 19 nt, Artificial Sequence
  Description of Artificial Sequence: Synthetic oligonucleotide
  Sense strand starting at position 361 of SEQ ID NO: 1879681
agacaauguuacucaaggu

SEQ ID NO: 1924659 - RNA, 19 nt, Artificial Sequence
  Description of Artificial Sequence: Synthetic oligonucleotide
  Antisense strand to SEQ ID NO: 1924658
accuugaguaacauugucu

SEQ ID NO: 1924660 - RNA, 19 nt, Artificial Sequence
  Description of Artificial Sequence: Synthetic oligonucleotide
  Sense strand starting at position 374 of SEQ ID NO: 1879681
caagguccugcugacuuau

SEQ ID NO: 1924661 - RNA, 19 nt, Artificial Sequence
  Description of Artificial Sequence: Synthetic oligonucleotide
  Antisense strand to SEQ ID NO: 1924660
auaagucagcaggaccuug

SEQ ID NO: 1924662 - RNA, 19 nt, Artificial Sequence
  Description of Artificial Sequence: Synthetic oligonucleotide
  Sense strand starting at position 380 of SEQ ID NO: 1879681
ccugcugacuuauugaaau

SEQ ID NO: 1924663 - RNA, 19 nt, Artificial Sequence
  Description of Artificial Sequence: Synthetic oligonucleotide
  Antisense strand to SEQ ID NO: 1924662
auuucaauaagucagcagg

SEQ ID NO: 1924664 - RNA, 19 nt, Artificial Sequence
  Description of Artificial Sequence: Synthetic oligonucleotide
  Sense strand starting at position 510 of SEQ ID NO: 1879681
aucguuauucaugggauga

SEQ ID NO: 1924665 - RNA, 19 nt, Artificial Sequence
  Description of Artificial Sequence: Synthetic oligonucleotide
  Antisense strand to SEQ ID NO: 1924664
ucaucccaugaauaacgau

SEQ ID NO: 1924666 - RNA, 19 nt, Artificial Sequence
  Description of Artificial Sequence: Synthetic oligonucleotide
  Sense strand starting at position 556 of SEQ ID NO: 1879681
guagaacucuuggcacaug

SEQ ID NO: 1924667 - RNA, 19 nt, Artificial Sequence
  Description of Artificial Sequence: Synthetic oligonucleotide
  Antisense strand to SEQ ID NO: 1924666
caugugccaagaguucuac

SEQ ID NO: 1924668 - RNA, 19 nt, Artificial Sequence
  Description of Artificial Sequence: Synthetic oligonucleotide
  Sense strand starting at position 567 of SEQ ID NO: 1879681
ggcacaugacuccauccaa

SEQ ID NO: 1924669 - RNA, 19 nt, Artificial Sequence
  Description of Artificial Sequence: Synthetic oligonucleotide
  Antisense strand to SEQ ID NO: 1924668
uuggauggagucaugugcc

SEQ ID NO: 1924670 - RNA, 19 nt, Artificial Sequence
  Description of Artificial Sequence: Synthetic oligonucleotide
  Sense strand starting at position 771 of SEQ ID NO: 1879681
uuauuaagggcuuaccauu

SEQ ID NO: 1924671 - RNA, 19 nt, Artificial Sequence
  Description of Artificial Sequence: Synthetic oligonucleotide
  Antisense strand to SEQ ID NO: 1924670
aaugguaagcccuuaauaa

SEQ ID NO: 1924672 - RNA, 19 nt, Artificial Sequence
  Description of Artificial Sequence: Synthetic oligonucleotide
  Sense strand starting at position 815 of SEQ ID NO: 1879681
gguguuuaugcgucugcua

SEQ ID NO: 1924673 - RNA, 19 nt, Artificial Sequence
  Description of Artificial Sequence: Synthetic oligonucleotide
  Antisense strand to SEQ ID NO: 1924672
uagcagacgcauaaacacc

SEQ ID NO: 1924674 - RNA, 19 nt, Artificial Sequence
  Description of Artificial Sequence: Synthetic oligonucleotide
  Sense strand starting at position 816 of SEQ ID NO: 1879681
guguuuaugcgucugcuac

SEQ ID NO: 1924675 - RNA, 19 nt, Artificial Sequence
  Description of Artificial Sequence: Synthetic oligonucleotide
  Antisense strand to SEQ ID NO: 1924674
guagcagacgcauaaacac

SEQ ID NO: 1924676 - RNA, 19 nt, Artificial Sequence
  Description of Artificial Sequence: Synthetic oligonucleotide
  Sense strand starting at position 873 of SEQ ID NO: 1879681
cuuugaaauugaucgucaa

SEQ ID NO: 1924677 - RNA, 19 nt, Artificial Sequence
  Description of Artificial Sequence: Synthetic oligonucleotide
  Antisense strand to SEQ ID NO: 1924676
uugacgaucaauuucaaag

SEQ ID NO: 1924678 - RNA, 19 nt, Artificial Sequence
  Description of Artificial Sequence: Synthetic oligonucleotide
  Sense strand starting at position 874 of SEQ ID NO: 1879681
uuugaaauugaucgucaag

SEQ ID NO: 1924679 - RNA, 19 nt, Artificial Sequence
  Description of Artificial Sequence: Synthetic oligonucleotide
  Antisense strand to SEQ ID NO: 1924678
cuugacgaucaauuucaaa

SEQ ID NO: 1924680 - RNA, 19 nt, Artificial Sequence
  Description of Artificial Sequence: Synthetic oligonucleotide
  Sense strand starting at position 876 of SEQ ID NO: 1879681
ugaaauugaucgucaagaa

SEQ ID NO: 1924681 - RNA, 19 nt, Artificial Sequence
  Description of Artificial Sequence: Synthetic oligonucleotide
  Antisense strand to SEQ ID NO: 1924680
uucuugacgaucaauuuca

SEQ ID NO: 1924682 - RNA, 19 nt, Artificial Sequence
  Description of Artificial Sequence: Synthetic oligonucleotide
  Sense strand starting at position 913 of SEQ ID NO: 1879681
ccaaucucagugcaagaau

SEQ ID NO: 1924683 - RNA, 19 nt, Artificial Sequence
  Description of Artificial Sequence: Synthetic oligonucleotide
  Antisense strand to SEQ ID NO: 1924682
auucuugcacugagauugg

SEQ ID NO: 1924684 - RNA, 19 nt, Artificial Sequence
  Description of Artificial Sequence: Synthetic oligonucleotide
  Sense strand starting at position 1348 of SEQ ID NO: 1879681
acuauugagcccugaucac

SEQ ID NO: 1924685 - RNA, 19 nt, Artificial Sequence
  Description of Artificial Sequence: Synthetic oligonucleotide
  Antisense strand to SEQ ID NO: 1924684
gugaucagggcucaauagu

SEQ ID NO: 1924686 - RNA, 19 nt, Artificial Sequence
  Description of Artificial Sequence: Synthetic oligonucleotide
  Sense strand starting at position 1567 of SEQ ID NO: 1879681
uugaguugacucugaggaa

SEQ ID NO: 1924687 - RNA, 19 nt, Artificial Sequence
  Description of Artificial Sequence: Synthetic oligonucleotide
  Antisense strand to SEQ ID NO: 1924686
uuccucagagucaacucaa

SEQ ID NO: 1924688 - RNA, 19 nt, Artificial Sequence
  Description of Artificial Sequence: Synthetic oligonucleotide
  Sense strand starting at position 1571 of SEQ ID NO: 1879681
guugacucugaggaaguua

SEQ ID NO: 1924689 - RNA, 19 nt, Artificial Sequence
  Description of Artificial Sequence: Synthetic oligonucleotide
  Antisense strand to SEQ ID NO: 1924688
uaacuuccucagagucaac

SEQ ID NO: 1924690 - RNA, 19 nt, Artificial Sequence
  Description of Artificial Sequence: Synthetic oligonucleotide
  Sense strand starting at position 1764 of SEQ ID NO: 1879681
gggugcacgagugaauuaa

SEQ ID NO: 1924691 - RNA, 19 nt, Artificial Sequence
  Description of Artificial Sequence: Synthetic oligonucleotide
  Antisense strand to SEQ ID NO: 1924690
uuaauucacucgugcaccc

SEQ ID NO: 1924692 - RNA, 19 nt, Artificial Sequence
  Description of Artificial Sequence: Synthetic oligonucleotide
  Sense strand starting at position 1768 of SEQ ID NO: 1879681
gcacgagugaauuaacuga

SEQ ID NO: 1924693 - RNA, 19 nt, Artificial Sequence
  Description of Artificial Sequence: Synthetic oligonucleotide
  Antisense strand to SEQ ID NO: 1924692
ucaguuaauucacucgugc

SEQ ID NO: 1924694 - RNA, 19 nt, Artificial Sequence
  Description of Artificial Sequence: Synthetic oligonucleotide
  Sense strand starting at position 1775 of SEQ ID NO: 1879681
ugaauuaacugaguuaaug

SEQ ID NO: 1924695 - RNA, 19 nt, Artificial Sequence
  Description of Artificial Sequence: Synthetic oligonucleotide
  Antisense strand to SEQ ID NO: 1924694
cauuaacucaguuaauuca

SEQ ID NO: 1924696 - RNA, 19 nt, Artificial Sequence
  Description of Artificial Sequence: Synthetic oligonucleotide
  Sense strand starting at position 1787 of SEQ ID NO: 1879681
guuaauguugacuaaguuc

SEQ ID NO: 1924697 - RNA, 19 nt, Artificial Sequence
  Description of Artificial Sequence: Synthetic oligonucleotide
  Antisense strand to SEQ ID NO: 1924696
gaacuuagucaacauuaac

SEQ ID NO: 1924698 - RNA, 19 nt, Artificial Sequence
  Description of Artificial Sequence: Synthetic oligonucleotide
  Sense strand starting at position 1799 of SEQ ID NO: 1879681
uaaguuccugguuaguauu

SEQ ID NO: 1924699 - RNA, 19 nt, Artificial Sequence
  Description of Artificial Sequence: Synthetic oligonucleotide
  Antisense strand to SEQ ID NO: 1924698
aauacuaaccaggaacuua

SEQ ID NO: 1924700 - RNA, 19 nt, Artificial Sequence
  Description of Artificial Sequence: Synthetic oligonucleotide
  Sense strand starting at position 2277 of SEQ ID NO: 1879681
gaguauggucuggaggcaa

SEQ ID NO: 1924701 - RNA, 19 nt, Artificial Sequence
  Description of Artificial Sequence: Synthetic oligonucleotide
  Antisense strand to SEQ ID NO: 1924700
uugccuccagaccauacuc

SEQ ID NO: 1924702 - RNA, 19 nt, Artificial Sequence
  Description of Artificial Sequence: Synthetic oligonucleotide
  Sense strand starting at position 2498 of SEQ ID NO: 1879681
gauuguuugcagcauagaa

SEQ ID NO: 1924703 - RNA, 19 nt, Artificial Sequence
  Description of Artificial Sequence: Synthetic oligonucleotide
  Antisense strand to SEQ ID NO: 1924702
uucuaugcugcaaacaauc

SEQ ID NO: 1924704 - RNA, 19 nt, Artificial Sequence
  Description of Artificial Sequence: Synthetic oligonucleotide
  Sense strand starting at position 2591 of SEQ ID NO: 1879681
ggaguaggguccuugggau

SEQ ID NO: 1924705 - RNA, 19 nt, Artificial Sequence
  Description of Artificial Sequence: Synthetic oligonucleotide
  Antisense strand to SEQ ID NO: 1924704
aucccaaggacccuacucc

SEQ ID NO: 1924706 - RNA, 19 nt, Artificial Sequence
  Description of Artificial Sequence: Synthetic oligonucleotide
  Sense strand starting at position 2613 of SEQ ID NO: 1879681
ggaagaguguggaauugga

SEQ ID NO: 1924707 - RNA, 19 nt, Artificial Sequence
  Description of Artificial Sequence: Synthetic oligonucleotide
  Antisense strand to SEQ ID NO: 1924706
uccaauuccacacucuucc

SEQ ID NO: 1924708 - RNA, 19 nt, Artificial Sequence
  Description of Artificial Sequence: Synthetic oligonucleotide
  Sense strand starting at position 2876 of SEQ ID NO: 1879681
gguagggacuggucggaau

SEQ ID NO: 1924709 - RNA, 19 nt, Artificial Sequence
  Description of Artificial Sequence: Synthetic oligonucleotide
  Antisense strand to SEQ ID NO: 1924708
auuccgaccagucccuacc

SEQ ID NO: 1924710 - RNA, 19 nt, Artificial Sequence
  Description of Artificial Sequence: Synthetic oligonucleotide
  Sense strand starting at position 2877 of SEQ ID NO: 1879681
guagggacuggucggaaua

SEQ ID NO: 1924711 - RNA, 19 nt, Artificial Sequence
  Description of Artificial Sequence: Synthetic oligonucleotide
  Antisense strand to SEQ ID NO: 1924710
uauuccgaccagucccuac

SEQ ID NO: 1924712 - RNA, 19 nt, Artificial Sequence
  Description of Artificial Sequence: Synthetic oligonucleotide
  Sense strand starting at position 3679 of SEQ ID NO: 1879681
aagaguguuggaugaauga

SEQ ID NO: 1924713 - RNA, 19 nt, Artificial Sequence
  Description of Artificial Sequence: Synthetic oligonucleotide
  Antisense strand to SEQ ID NO: 1924712
ucauucauccaacacucuu

SEQ ID NO: 1924714 - RNA, 19 nt, Artificial Sequence
  Description of Artificial Sequence: Synthetic oligonucleotide
  Sense strand starting at position 3740 of SEQ ID NO: 1879681
ggagaacaaguuugucaac

SEQ ID NO: 1924715 - RNA, 19 nt, Artificial Sequence
  Description of Artificial Sequence: Synthetic oligonucleotide
  Antisense strand to SEQ ID NO: 1924714
guugacaaacuuguucucc

SEQ ID NO: 1924716 - RNA, 19 nt, Artificial Sequence
  Description of Artificial Sequence: Synthetic oligonucleotide
  Sense strand starting at position 3741 of SEQ ID NO: 1879681
gagaacaaguuugucaaca

SEQ ID NO: 1924717 - RNA, 19 nt, Artificial Sequence
  Description of Artificial Sequence: Synthetic oligonucleotide
  Antisense strand to SEQ ID NO: 1924716
uguugacaaacuuguucuc

SEQ ID NO: 1924718 - RNA, 19 nt, Artificial Sequence
  Description of Artificial Sequence: Synthetic oligonucleotide
  Sense strand starting at position 3742 of SEQ ID NO: 1879681
agaacaaguuugucaacaa

SEQ ID NO: 1924719 - RNA, 19 nt, Artificial Sequence
  Description of Artificial Sequence: Synthetic oligonucleotide
  Antisense strand to SEQ ID NO: 1924718
uuguugacaaacuuguucu

SEQ ID NO: 1924720 - RNA, 19 nt, Artificial Sequence
  Description of Artificial Sequence: Synthetic oligonucleotide
  Sense strand starting at position 3758 of SEQ ID NO: 1879681
caaaucauugcaggguaau

SEQ ID NO: 1924721 - RNA, 19 nt, Artificial Sequence
  Description of Artificial Sequence: Synthetic oligonucleotide
  Antisense strand to SEQ ID NO: 1924720
auuacccugcaaugauuug

SEQ ID NO: 1924722 - RNA, 19 nt, Artificial Sequence
  Description of Artificial Sequence: Synthetic oligonucleotide
  Sense strand starting at position 3759 of SEQ ID NO: 1879681
aaaucauugcaggguaaug

SEQ ID NO: 1924723 - RNA, 19 nt, Artificial Sequence
  Description of Artificial Sequence: Synthetic oligonucleotide
  Antisense strand to SEQ ID NO: 1924722
cauuacccugcaaugauuu

SEQ ID NO: 1924724 - RNA, 19 nt, Artificial Sequence
  Description of Artificial Sequence: Synthetic oligonucleotide
  Sense strand starting at position 3761 of SEQ ID NO: 1879681
aucauugcaggguaaugua

SEQ ID NO: 1924725 - RNA, 19 nt, Artificial Sequence
  Description of Artificial Sequence: Synthetic oligonucleotide
  Antisense strand to SEQ ID NO: 1924724
uacauuacccugcaaugau

SEQ ID NO: 1924726 - RNA, 19 nt, Artificial Sequence
  Description of Artificial Sequence: Synthetic oligonucleotide
  Sense strand starting at position 3850 of SEQ ID NO: 1879681
ggaggcauugcugaaagcu

SEQ ID NO: 1924727 - RNA, 19 nt, Artificial Sequence
  Description of Artificial Sequence: Synthetic oligonucleotide
  Antisense strand to SEQ ID NO: 1924726
agcuuucagcaaugccucc

SEQ ID NO: 1924728 - RNA, 19 nt, Artificial Sequence
  Description of Artificial Sequence: Synthetic oligonucleotide
  Sense strand starting at position 3942 of SEQ ID NO: 1879681
uuguacuucuuuccagaua

SEQ ID NO: 1924729 - RNA, 19 nt, Artificial Sequence
  Description of Artificial Sequence: Synthetic oligonucleotide
  Antisense strand to SEQ ID NO: 1924728
uaucuggaaagaaguacaa

SEQ ID NO: 1924730 - RNA, 19 nt, Artificial Sequence
  Description of Artificial Sequence: Synthetic oligonucleotide
  Sense strand starting at position 50 of SEQ ID NO: 1879682
uucuuagacuagucucaga

SEQ ID NO: 1924731 - RNA, 19 nt, Artificial Sequence
  Description of Artificial Sequence: Synthetic oligonucleotide
  Antisense strand to SEQ ID NO: 1924730
ucugagacuagucuaagaa

SEQ ID NO: 1924732 - RNA, 19 nt, Artificial Sequence
  Description of Artificial Sequence: Synthetic oligonucleotide
  Sense strand starting at position 122 of SEQ ID NO: 1879682
augcuuugugaguaacuca

SEQ ID NO: 1924733 - RNA, 19 nt, Artificial Sequence
  Description of Artificial Sequence: Synthetic oligonucleotide
  Antisense strand to SEQ ID NO: 1924732
ugaguuacucacaaagcau

SEQ ID NO: 1924734 - RNA, 19 nt, Artificial Sequence
  Description of Artificial Sequence: Synthetic oligonucleotide
  Sense strand starting at position 155 of SEQ ID NO: 1879682
gggacuuucucacuagucu

SEQ ID NO: 1924735 - RNA, 19 nt, Artificial Sequence
  Description of Artificial Sequence: Synthetic oligonucleotide
  Antisense strand to SEQ ID NO: 1924734
agacuagugagaaaguccc

SEQ ID NO: 1924736 - RNA, 19 nt, Artificial Sequence
  Description of Artificial Sequence: Synthetic oligonucleotide
  Sense strand starting at position 156 of SEQ ID NO: 1879682
ggacuuucucacuagucua

SEQ ID NO: 1924737 - RNA, 19 nt, Artificial Sequence
  Description of Artificial Sequence: Synthetic oligonucleotide
  Antisense strand to SEQ ID NO: 1924736
uagacuagugagaaagucc

SEQ ID NO: 1924738 - RNA, 19 nt, Artificial Sequence
  Description of Artificial Sequence: Synthetic oligonucleotide
  Sense strand starting at position 573 of SEQ ID NO: 1879682
cugguuuccucuccuuaga

SEQ ID NO: 1924739 - RNA, 19 nt, Artificial Sequence
  Description of Artificial Sequence: Synthetic oligonucleotide
  Antisense strand to SEQ ID NO: 1924738
ucuaaggagaggaaaccag

SEQ ID NO: 1924740 - RNA, 19 nt, Artificial Sequence
  Description of Artificial Sequence: Synthetic oligonucleotide
  Sense strand starting at position 576 of SEQ ID NO: 1879682
guuuccucuccuuagacca

SEQ ID NO: 1924741 - RNA, 19 nt, Artificial Sequence
  Description of Artificial Sequence: Synthetic oligonucleotide
  Antisense strand to SEQ ID NO: 1924740
uggucuaaggagaggaaac

SEQ ID NO: 1924742 - RNA, 19 nt, Artificial Sequence
  Description of Artificial Sequence: Synthetic oligonucleotide
  Sense strand starting at position 583 of SEQ ID NO: 1879682
cuccuuagaccauguaaag

SEQ ID NO: 1924743 - RNA, 19 nt, Artificial Sequence
  Description of Artificial Sequence: Synthetic oligonucleotide
  Antisense strand to SEQ ID NO: 1924742
cuuuacauggucuaaggag

SEQ ID NO: 1924744 - RNA, 19 nt, Artificial Sequence
  Description of Artificial Sequence: Synthetic oligonucleotide
  Sense strand starting at position 592 of SEQ ID NO: 1879682
ccauguaaaguacaugauu

SEQ ID NO: 1924745 - RNA, 19 nt, Artificial Sequence
  Description of Artificial Sequence: Synthetic oligonucleotide
  Antisense strand to SEQ ID NO: 1924744
aaucauguacuuuacaugg

SEQ ID NO: 1924746 - RNA, 19 nt, Artificial Sequence
  Description of Artificial Sequence: Synthetic oligonucleotide
  Sense strand starting at position 595 of SEQ ID NO: 1879682
uguaaaguacaugauuagu

SEQ ID NO: 1924747 - RNA, 19 nt, Artificial Sequence
  Description of Artificial Sequence: Synthetic oligonucleotide
  Antisense strand to SEQ ID NO: 1924746
acuaaucauguacuuuaca

SEQ ID NO: 1924748 - RNA, 19 nt, Artificial Sequence
  Description of Artificial Sequence: Synthetic oligonucleotide
  Sense strand starting at position 597 of SEQ ID NO: 1879682
uaaaguacaugauuaguga

SEQ ID NO: 1924749 - RNA, 19 nt, Artificial Sequence
  Description of Artificial Sequence: Synthetic oligonucleotide
  Antisense strand to SEQ ID NO: 1924748
ucacuaaucauguacuuua

SEQ ID NO: 1924750 - RNA, 19 nt, Artificial Sequence
  Description of Artificial Sequence: Synthetic oligonucleotide
  Sense strand starting at position 600 of SEQ ID NO: 1879682
aguacaugauuagugaaga

SEQ ID NO: 1924751 - RNA, 19 nt, Artificial Sequence
  Description of Artificial Sequence: Synthetic oligonucleotide
  Antisense strand to SEQ ID NO: 1924750
ucuucacuaaucauguacu

SEQ ID NO: 1924752 - RNA, 19 nt, Artificial Sequence
  Description of Artificial Sequence: Synthetic oligonucleotide
  Sense strand starting at position 624 of SEQ ID NO: 1879682
gcuaaugaacacugagaac

SEQ ID NO: 1924753 - RNA, 19 nt, Artificial Sequence
  Description of Artificial Sequence: Synthetic oligonucleotide
  Antisense strand to SEQ ID NO: 1924752
guucucaguguucauuagc

SEQ ID NO: 1924754 - RNA, 19 nt, Artificial Sequence
  Description of Artificial Sequence: Synthetic oligonucleotide
  Sense strand starting at position 714 of SEQ ID NO: 1879682
gcaggugguauuuguuauc

SEQ ID NO: 1924755 - RNA, 19 nt, Artificial Sequence
  Description of Artificial Sequence: Synthetic oligonucleotide
  Antisense strand to SEQ ID NO: 1924754
gauaacaaauaccaccugc

SEQ ID NO: 1924756 - RNA, 19 nt, Artificial Sequence
  Description of Artificial Sequence: Synthetic oligonucleotide
  Sense strand starting at position 792 of SEQ ID NO: 1879682
ggugucaauaagugcagau

SEQ ID NO: 1924757 - RNA, 19 nt, Artificial Sequence
  Description of Artificial Sequence: Synthetic oligonucleotide
  Antisense strand to SEQ ID NO: 1924756
aucugcacuuauugacacc

SEQ ID NO: 1924758 - RNA, 19 nt, Artificial Sequence
  Description of Artificial Sequence: Synthetic oligonucleotide
  Sense strand starting at position 850 of SEQ ID NO: 1879682
uucgccgucauccaagaaa

SEQ ID NO: 1924759 - RNA, 19 nt, Artificial Sequence
  Description of Artificial Sequence: Synthetic oligonucleotide
  Antisense strand to SEQ ID NO: 1924758
uuucuuggaugacggcgaa

SEQ ID NO: 1924760 - RNA, 19 nt, Artificial Sequence
  Description of Artificial Sequence: Synthetic oligonucleotide
  Sense strand starting at position 903 of SEQ ID NO: 1879682
agaagaacguuagcugaau

SEQ ID NO: 1924761 - RNA, 19 nt, Artificial Sequence
  Description of Artificial Sequence: Synthetic oligonucleotide
  Antisense strand to SEQ ID NO: 1924760
auucagcuaacguucuucu

SEQ ID NO: 1924762 - RNA, 19 nt, Artificial Sequence
  Description of Artificial Sequence: Synthetic oligonucleotide
  Sense strand starting at position 904 of SEQ ID NO: 1879682
gaagaacguuagcugaaua

SEQ ID NO: 1924763 - RNA, 19 nt, Artificial Sequence
  Description of Artificial Sequence: Synthetic oligonucleotide
  Antisense strand to SEQ ID NO: 1924762
uauucagcuaacguucuuc

SEQ ID NO: 1924764 - RNA, 19 nt, Artificial Sequence
  Description of Artificial Sequence: Synthetic oligonucleotide
  Sense strand starting at position 940 of SEQ ID NO: 1879682
gugggauaaagucaucuuc

SEQ ID NO: 1924765 - RNA, 19 nt, Artificial Sequence
  Description of Artificial Sequence: Synthetic oligonucleotide
  Antisense strand to SEQ ID NO: 1924764
gaagaugacuuuaucccac

SEQ ID NO: 1924766 - RNA, 19 nt, Artificial Sequence
  Description of Artificial Sequence: Synthetic oligonucleotide
  Sense strand starting at position 942 of SEQ ID NO: 1879682
gggauaaagucaucuucga

SEQ ID NO: 1924767 - RNA, 19 nt, Artificial Sequence
  Description of Artificial Sequence: Synthetic oligonucleotide
  Antisense strand to SEQ ID NO: 1924766
ucgaagaugacuuuauccc

SEQ ID NO: 1924768 - RNA, 19 nt, Artificial Sequence
  Description of Artificial Sequence: Synthetic oligonucleotide
  Sense strand starting at position 1457 of SEQ ID NO: 1879682
ugguguccuguguaaauua

SEQ ID NO: 1924769 - RNA, 19 nt, Artificial Sequence
  Description of Artificial Sequence: Synthetic oligonucleotide
  Antisense strand to SEQ ID NO: 1924768
uaauuuacacaggacacca

SEQ ID NO: 1924770 - RNA, 19 nt, Artificial Sequence
  Description of Artificial Sequence: Synthetic oligonucleotide
  Sense strand starting at position 1465 of SEQ ID NO: 1879682
uguguaaauuauuccuagu

SEQ ID NO: 1924771 - RNA, 19 nt, Artificial Sequence
  Description of Artificial Sequence: Synthetic oligonucleotide
  Antisense strand to SEQ ID NO: 1924770
acuaggaauaauuuacaca

SEQ ID NO: 1924772 - RNA, 19 nt, Artificial Sequence
  Description of Artificial Sequence: Synthetic oligonucleotide
  Sense strand starting at position 1467 of SEQ ID NO: 1879682
uguaaauuauuccuagucu

SEQ ID NO: 1924773 - RNA, 19 nt, Artificial Sequence
  Description of Artificial Sequence: Synthetic oligonucleotide
  Antisense strand to SEQ ID NO: 1924772
agacuaggaauaauuuaca

SEQ ID NO: 1924774 - RNA, 19 nt, Artificial Sequence
  Description of Artificial Sequence: Synthetic oligonucleotide
  Sense strand starting at position 1536 of SEQ ID NO: 1879682
gcuggcucucgggagaauu

SEQ ID NO: 1924775 - RNA, 19 nt, Artificial Sequence
  Description of Artificial Sequence: Synthetic oligonucleotide
  Antisense strand to SEQ ID NO: 1924774
aauucucccgagagccagc

SEQ ID NO: 1924776 - RNA, 19 nt, Artificial Sequence
  Description of Artificial Sequence: Synthetic oligonucleotide
  Sense strand starting at position 1547 of SEQ ID NO: 1879682
ggagaauuguugaguggga

SEQ ID NO: 1924777 - RNA, 19 nt, Artificial Sequence
  Description of Artificial Sequence: Synthetic oligonucleotide
  Antisense strand to SEQ ID NO: 1924776
ucccacucaacaauucucc

SEQ ID NO: 1924778 - RNA, 19 nt, Artificial Sequence
  Description of Artificial Sequence: Synthetic oligonucleotide
  Sense strand starting at position 1549 of SEQ ID NO: 1879682
agaauuguugagugggaca

SEQ ID NO: 1924779 - RNA, 19 nt, Artificial Sequence
  Description of Artificial Sequence: Synthetic oligonucleotide
  Antisense strand to SEQ ID NO: 1924778
ugucccacucaacaauucu

SEQ ID NO: 1924780 - RNA, 19 nt, Artificial Sequence
  Description of Artificial Sequence: Synthetic oligonucleotide
  Sense strand starting at position 1676 of SEQ ID NO: 1879682
guaucagccuauccuuaga

SEQ ID NO: 1924781 - RNA, 19 nt, Artificial Sequence
  Description of Artificial Sequence: Synthetic oligonucleotide
  Antisense strand to SEQ ID NO: 1924780
ucuaaggauaggcugauac

SEQ ID NO: 1924782 - RNA, 19 nt, Artificial Sequence
  Description of Artificial Sequence: Synthetic oligonucleotide
  Sense strand starting at position 1730 of SEQ ID NO: 1879682
gaaggauaacuuggcuaac

SEQ ID NO: 1924783 - RNA, 19 nt, Artificial Sequence
  Description of Artificial Sequence: Synthetic oligonucleotide
  Antisense strand to SEQ ID NO: 1924782
guuagccaaguuauccuuc

SEQ ID NO: 1924784 - RNA, 19 nt, Artificial Sequence
  Description of Artificial Sequence: Synthetic oligonucleotide
  Sense strand starting at position 1821 of SEQ ID NO: 1879682
agcuauugguaggucuaga

SEQ ID NO: 1924785 - RNA, 19 nt, Artificial Sequence
  Description of Artificial Sequence: Synthetic oligonucleotide
  Antisense strand to SEQ ID NO: 1924784
ucuagaccuaccaauagcu

SEQ ID NO: 1924786 - RNA, 19 nt, Artificial Sequence
  Description of Artificial Sequence: Synthetic oligonucleotide
  Sense strand starting at position 1864 of SEQ ID NO: 1879682
ggccauaucuuauccacga

SEQ ID NO: 1924787 - RNA, 19 nt, Artificial Sequence
  Description of Artificial Sequence: Synthetic oligonucleotide
  Antisense strand to SEQ ID NO: 1924786
ucguggauaagauauggcc

SEQ ID NO: 1924788 - RNA, 19 nt, Artificial Sequence
  Description of Artificial Sequence: Synthetic oligonucleotide
  Sense strand starting at position 1865 of SEQ ID NO: 1879682
gccauaucuuauccacgaa

SEQ ID NO: 1924789 - RNA, 19 nt, Artificial Sequence
  Description of Artificial Sequence: Synthetic oligonucleotide
  Antisense strand to SEQ ID NO: 1924788
uucguggauaagauauggc

SEQ ID NO: 1924790 - RNA, 19 nt, Artificial Sequence
  Description of Artificial Sequence: Synthetic oligonucleotide
  Sense strand starting at position 2014 of SEQ ID NO: 1879682
acuaguuuccaaugagcaa

SEQ ID NO: 1924791 - RNA, 19 nt, Artificial Sequence
  Description of Artificial Sequence: Synthetic oligonucleotide
  Antisense strand to SEQ ID NO: 1924790
uugcucauuggaaacuagu

SEQ ID NO: 1924792 - RNA, 19 nt, Artificial Sequence
  Description of Artificial Sequence: Synthetic oligonucleotide
  Sense strand starting at position 3068 of SEQ ID NO: 1879682
gcauaucguagauguggaa

SEQ ID NO: 1924793 - RNA, 19 nt, Artificial Sequence
  Description of Artificial Sequence: Synthetic oligonucleotide
  Antisense strand to SEQ ID NO: 1924792
uuccacaucuacgauaugc

SEQ ID NO: 1924794 - RNA, 19 nt, Artificial Sequence
  Description of Artificial Sequence: Synthetic oligonucleotide
  Sense strand starting at position 3072 of SEQ ID NO: 1879682
aucguagauguggaaauua

SEQ ID NO: 1924795 - RNA, 19 nt, Artificial Sequence
  Description of Artificial Sequence: Synthetic oligonucleotide
  Antisense strand to SEQ ID NO: 1924794
uaauuuccacaucuacgau

SEQ ID NO: 1924796 - RNA, 19 nt, Artificial Sequence
  Description of Artificial Sequence: Synthetic oligonucleotide
  Sense strand starting at position 3120 of SEQ ID NO: 1879682
aacacaucuggguggugau

SEQ ID NO: 1924797 - RNA, 19 nt, Artificial Sequence
  Description of Artificial Sequence: Synthetic oligonucleotide
  Antisense strand to SEQ ID NO: 1924796
aucaccacccagauguguu

SEQ ID NO: 1924798 - RNA, 19 nt, Artificial Sequence
  Description of Artificial Sequence: Synthetic oligonucleotide
  Sense strand starting at position 3137 of SEQ ID NO: 1879682
auggaagucaaggguugaa

SEQ ID NO: 1924799 - RNA, 19 nt, Artificial Sequence
  Description of Artificial Sequence: Synthetic oligonucleotide
  Antisense strand to SEQ ID NO: 1924798
uucaacccuugacuuccau

SEQ ID NO: 1924800 - RNA, 19 nt, Artificial Sequence
  Description of Artificial Sequence: Synthetic oligonucleotide
  Sense strand starting at position 3200 of SEQ ID NO: 1879682
gcagguugagauugaaaga

SEQ ID NO: 1924801 - RNA, 19 nt, Artificial Sequence
  Description of Artificial Sequence: Synthetic oligonucleotide
  Antisense strand to SEQ ID NO: 1924800
ucuuucaaucucaaccugc

SEQ ID NO: 1924802 - RNA, 19 nt, Artificial Sequence
  Description of Artificial Sequence: Synthetic oligonucleotide
  Sense strand starting at position 3363 of SEQ ID NO: 1879682
ucuggaagauuccuugacu

SEQ ID NO: 1924803 - RNA, 19 nt, Artificial Sequence
  Description of Artificial Sequence: Synthetic oligonucleotide
  Antisense strand to SEQ ID NO: 1924802
agucaaggaaucuuccaga

SEQ ID NO: 1924804 - RNA, 19 nt, Artificial Sequence
  Description of Artificial Sequence: Synthetic oligonucleotide
  Sense strand starting at position 3364 of SEQ ID NO: 1879682
cuggaagauuccuugacuc

SEQ ID NO: 1924805 - RNA, 19 nt, Artificial Sequence
  Description of Artificial Sequence: Synthetic oligonucleotide
  Antisense strand to SEQ ID NO: 1924804
gagucaaggaaucuuccag

SEQ ID NO: 1924806 - RNA, 19 nt, Artificial Sequence
  Description of Artificial Sequence: Synthetic oligonucleotide
  Sense strand starting at position 3429 of SEQ ID NO: 1879682
ugacucugcuuucuaaaug

SEQ ID NO: 1924807 - RNA, 19 nt, Artificial Sequence
  Description of Artificial Sequence: Synthetic oligonucleotide
  Antisense strand to SEQ ID NO: 1924806
cauuuagaaagcagaguca

SEQ ID NO: 1924808 - RNA, 19 nt, Artificial Sequence
  Description of Artificial Sequence: Synthetic oligonucleotide
  Sense strand starting at position 3766 of SEQ ID NO: 1879682
ggaaucuucuuacuccaga

SEQ ID NO: 1924809 - RNA, 19 nt, Artificial Sequence
  Description of Artificial Sequence: Synthetic oligonucleotide
  Antisense strand to SEQ ID NO: 1924808
ucuggaguaagaagauucc

SEQ ID NO: 1924810 - RNA, 19 nt, Artificial Sequence
  Description of Artificial Sequence: Synthetic oligonucleotide
  Sense strand starting at position 638 of SEQ ID NO: 1879683
auaggaaaucuuugcuuaa

SEQ ID NO: 1924811 - RNA, 19 nt, Artificial Sequence
  Description of Artificial Sequence: Synthetic oligonucleotide
  Antisense strand to SEQ ID NO: 1924810
uuaagcaaagauuuccuau

SEQ ID NO: 1924812 - RNA, 19 nt, Artificial Sequence
  Description of Artificial Sequence: Synthetic oligonucleotide
  Sense strand starting at position 640 of SEQ ID NO: 1879683
aggaaaucuuugcuuaauu

SEQ ID NO: 1924813 - RNA, 19 nt, Artificial Sequence
  Description of Artificial Sequence: Synthetic oligonucleotide
  Antisense strand to SEQ ID NO: 1924812
aauuaagcaaagauuuccu

SEQ ID NO: 1924814 - RNA, 19 nt, Artificial Sequence
  Description of Artificial Sequence: Synthetic oligonucleotide
  Sense strand starting at position 641 of SEQ ID NO: 1879683
ggaaaucuuugcuuaauuc

SEQ ID NO: 1924815 - RNA, 19 nt, Artificial Sequence
  Description of Artificial Sequence: Synthetic oligonucleotide
  Antisense strand to SEQ ID NO: 1924814
gaauuaagcaaagauuucc

SEQ ID NO: 1924816 - RNA, 19 nt, Artificial Sequence
  Description of Artificial Sequence: Synthetic oligonucleotide
  Sense strand starting at position 887 of SEQ ID NO: 1879683
agauaugcauaggaauauu

SEQ ID NO: 1924817 - RNA, 19 nt, Artificial Sequence
  Description of Artificial Sequence: Synthetic oligonucleotide
  Antisense strand to SEQ ID NO: 1924816
aauauuccuaugcauaucu

SEQ ID NO: 1924818 - RNA, 19 nt, Artificial Sequence
  Description of Artificial Sequence: Synthetic oligonucleotide
  Sense strand starting at position 929 of SEQ ID NO: 1879683
uuauuuaucugucucagcu

SEQ ID NO: 1924819 - RNA, 19 nt, Artificial Sequence
  Description of Artificial Sequence: Synthetic oligonucleotide
  Antisense strand to SEQ ID NO: 1924818
agcugagacagauaaauaa

SEQ ID NO: 1924820 - RNA, 19 nt, Artificial Sequence
  Description of Artificial Sequence: Synthetic oligonucleotide
  Sense strand starting at position 933 of SEQ ID NO: 1879683
uuaucugucucagcucuau

SEQ ID NO: 1924821 - RNA, 19 nt, Artificial Sequence
  Description of Artificial Sequence: Synthetic oligonucleotide
  Antisense strand to SEQ ID NO: 1924820
auagagcugagacagauaa

SEQ ID NO: 1924822 - RNA, 19 nt, Artificial Sequence
  Description of Artificial Sequence: Synthetic oligonucleotide
  Sense strand starting at position 939 of SEQ ID NO: 1879683
gucucagcucuaugccaau

SEQ ID NO: 1924823 - RNA, 19 nt, Artificial Sequence
  Description of Artificial Sequence: Synthetic oligonucleotide
  Antisense strand to SEQ ID NO: 1924822
auuggcauagagcugagac

SEQ ID NO: 1924824 - RNA, 19 nt, Artificial Sequence
  Description of Artificial Sequence: Synthetic oligonucleotide
  Sense strand starting at position 957 of SEQ ID NO: 1879683
uuaccaugccguugaaaca

SEQ ID NO: 1924825 - RNA, 19 nt, Artificial Sequence
  Description of Artificial Sequence: Synthetic oligonucleotide
  Antisense strand to SEQ ID NO: 1924824
uguuucaacggcaugguaa

SEQ ID NO: 1924826 - RNA, 19 nt, Artificial Sequence
  Description of Artificial Sequence: Synthetic oligonucleotide
  Sense strand starting at position 958 of SEQ ID NO: 1879683
uaccaugccguugaaacau

SEQ ID NO: 1924827 - RNA, 19 nt, Artificial Sequence
  Description of Artificial Sequence: Synthetic oligonucleotide
  Antisense strand to SEQ ID NO: 1924826
auguuucaacggcauggua

SEQ ID NO: 1924828 - RNA, 19 nt, Artificial Sequence
  Description of Artificial Sequence: Synthetic oligonucleotide
  Sense strand starting at position 1390 of SEQ ID NO: 1879683
aagcauucuuaguuuggga

SEQ ID NO: 1924829 - RNA, 19 nt, Artificial Sequence
  Description of Artificial Sequence: Synthetic oligonucleotide
  Antisense strand to SEQ ID NO: 1924828
ucccaaacuaagaaugcuu

SEQ ID NO: 1924830 - RNA, 19 nt, Artificial Sequence
  Description of Artificial Sequence: Synthetic oligonucleotide
  Sense strand starting at position 1406 of SEQ ID NO: 1879683
ggaguccuauaaucacuua

SEQ ID NO: 1924831 - RNA, 19 nt, Artificial Sequence
  Description of Artificial Sequence: Synthetic oligonucleotide
  Antisense strand to SEQ ID NO: 1924830
uaagugauuauaggacucc

SEQ ID NO: 1924832 - RNA, 19 nt, Artificial Sequence
  Description of Artificial Sequence: Synthetic oligonucleotide
  Sense strand starting at position 1492 of SEQ ID NO: 1879683
aggcauucuggacacuuua

SEQ ID NO: 1924833 - RNA, 19 nt, Artificial Sequence
  Description of Artificial Sequence: Synthetic oligonucleotide
  Antisense strand to SEQ ID NO: 1924832
uaaaguguccagaaugccu

SEQ ID NO: 1924834 - RNA, 19 nt, Artificial Sequence
  Description of Artificial Sequence: Synthetic oligonucleotide
  Sense strand starting at position 1561 of SEQ ID NO: 1879683
gcaagauucuauguauuac

SEQ ID NO: 1924835 - RNA, 19 nt, Artificial Sequence
  Description of Artificial Sequence: Synthetic oligonucleotide
  Antisense strand to SEQ ID NO: 1924834
guaauacauagaaucuugc

SEQ ID NO: 1924836 - RNA, 19 nt, Artificial Sequence
  Description of Artificial Sequence: Synthetic oligonucleotide
  Sense strand starting at position 1638 of SEQ ID NO: 1879683
uugucuuucccgucuuagu

SEQ ID NO: 1924837 - RNA, 19 nt, Artificial Sequence
  Description of Artificial Sequence: Synthetic oligonucleotide
  Antisense strand to SEQ ID NO: 1924836
acuaagacgggaaagacaa

SEQ ID NO: 1924838 - RNA, 19 nt, Artificial Sequence
  Description of Artificial Sequence: Synthetic oligonucleotide
  Sense strand starting at position 1639 of SEQ ID NO: 1879683
ugucuuucccgucuuaguu

SEQ ID NO: 1924839 - RNA, 19 nt, Artificial Sequence
  Description of Artificial Sequence: Synthetic oligonucleotide
  Antisense strand to SEQ ID NO: 1924838
aacuaagacgggaaagaca

SEQ ID NO: 1924840 - RNA, 19 nt, Artificial Sequence
  Description of Artificial Sequence: Synthetic oligonucleotide
  Sense strand starting at position 1640 of SEQ ID NO: 1879683
gucuuucccgucuuaguua

SEQ ID NO: 1924841 - RNA, 19 nt, Artificial Sequence
  Description of Artificial Sequence: Synthetic oligonucleotide
  Antisense strand to SEQ ID NO: 1924840
uaacuaagacgggaaagac

SEQ ID NO: 1924842 - RNA, 19 nt, Artificial Sequence
  Description of Artificial Sequence: Synthetic oligonucleotide
  Sense strand starting at position 1752 of SEQ ID NO: 1879683
aggucaacccuaugacaca

SEQ ID NO: 1924843 - RNA, 19 nt, Artificial Sequence
  Description of Artificial Sequence: Synthetic oligonucleotide
  Antisense strand to SEQ ID NO: 1924842
ugugucauaggguugaccu

SEQ ID NO: 1924844 - RNA, 19 nt, Artificial Sequence
  Description of Artificial Sequence: Synthetic oligonucleotide
  Sense strand starting at position 1869 of SEQ ID NO: 1879683
aucuaauuaugucagagac

SEQ ID NO: 1924845 - RNA, 19 nt, Artificial Sequence
  Description of Artificial Sequence: Synthetic oligonucleotide
  Antisense strand to SEQ ID NO: 1924844
gucucugacauaauuagau

SEQ ID NO: 1924846 - RNA, 19 nt, Artificial Sequence
  Description of Artificial Sequence: Synthetic oligonucleotide
  Sense strand starting at position 1871 of SEQ ID NO: 1879683
cuaauuaugucagagacag

SEQ ID NO: 1924847 - RNA, 19 nt, Artificial Sequence
  Description of Artificial Sequence: Synthetic oligonucleotide
  Antisense strand to SEQ ID NO: 1924846
cugucucugacauaauuag

SEQ ID NO: 1924848 - RNA, 19 nt, Artificial Sequence
  Description of Artificial Sequence: Synthetic oligonucleotide
  Sense strand starting at position 1927 of SEQ ID NO: 1879683
uuucccaacuuugggaaau

SEQ ID NO: 1924849 - RNA, 19 nt, Artificial Sequence
  Description of Artificial Sequence: Synthetic oligonucleotide
  Antisense strand to SEQ ID NO: 1924848
auuucccaaaguugggaaa

SEQ ID NO: 1924850 - RNA, 19 nt, Artificial Sequence
  Description of Artificial Sequence: Synthetic oligonucleotide
  Sense strand starting at position 1938 of SEQ ID NO: 1879683
ugggaaaucugggaagaga

SEQ ID NO: 1924851 - RNA, 19 nt, Artificial Sequence
  Description of Artificial Sequence: Synthetic oligonucleotide
  Antisense strand to SEQ ID NO: 1924850
ucucuucccagauuuccca

SEQ ID NO: 1924852 - RNA, 19 nt, Artificial Sequence
  Description of Artificial Sequence: Synthetic oligonucleotide
  Sense strand starting at position 1968 of SEQ ID NO: 1879683
acagaauucuuagguagaa

SEQ ID NO: 1924853 - RNA, 19 nt, Artificial Sequence
  Description of Artificial Sequence: Synthetic oligonucleotide
  Antisense strand to SEQ ID NO: 1924852
uucuaccuaagaauucugu

SEQ ID NO: 1924854 - RNA, 19 nt, Artificial Sequence
  Description of Artificial Sequence: Synthetic oligonucleotide
  Sense strand starting at position 2070 of SEQ ID NO: 1879683
aaaugagaugguugccuga

SEQ ID NO: 1924855 - RNA, 19 nt, Artificial Sequence
  Description of Artificial Sequence: Synthetic oligonucleotide
  Antisense strand to SEQ ID NO: 1924854
ucaggcaaccaucucauuu

SEQ ID NO: 1924856 - RNA, 19 nt, Artificial Sequence
  Description of Artificial Sequence: Synthetic oligonucleotide
  Sense strand starting at position 2072 of SEQ ID NO: 1879683
augagaugguugccugaaa

SEQ ID NO: 1924857 - RNA, 19 nt, Artificial Sequence
  Description of Artificial Sequence: Synthetic oligonucleotide
  Antisense strand to SEQ ID NO: 1924856
uuucaggcaaccaucucau

SEQ ID NO: 1924858 - RNA, 19 nt, Artificial Sequence
  Description of Artificial Sequence: Synthetic oligonucleotide
  Sense strand starting at position 2169 of SEQ ID NO: 1879683
uacagcuugccauggguaa

SEQ ID NO: 1924859 - RNA, 19 nt, Artificial Sequence
  Description of Artificial Sequence: Synthetic oligonucleotide
  Antisense strand to SEQ ID NO: 1924858
uuacccauggcaagcugua

SEQ ID NO: 1924860 - RNA, 19 nt, Artificial Sequence
  Description of Artificial Sequence: Synthetic oligonucleotide
  Sense strand starting at position 2170 of SEQ ID NO: 1879683
acagcuugccauggguaaa

SEQ ID NO: 1924861 - RNA, 19 nt, Artificial Sequence
  Description of Artificial Sequence: Synthetic oligonucleotide
  Antisense strand to SEQ ID NO: 1924860
uuuacccauggcaagcugu

SEQ ID NO: 1924862 - RNA, 19 nt, Artificial Sequence
  Description of Artificial Sequence: Synthetic oligonucleotide
  Sense strand starting at position 2438 of SEQ ID NO: 1879683
agugcagugguguaucaua

SEQ ID NO: 1924863 - RNA, 19 nt, Artificial Sequence
  Description of Artificial Sequence: Synthetic oligonucleotide
  Antisense strand to SEQ ID NO: 1924862
uaugauacaccacugcacu

SEQ ID NO: 1924864 - RNA, 19 nt, Artificial Sequence
  Description of Artificial Sequence: Synthetic oligonucleotide
  Sense strand starting at position 2468 of SEQ ID NO: 1879683
ccuugaucuccgggacuca

SEQ ID NO: 1924865 - RNA, 19 nt, Artificial Sequence
  Description of Artificial Sequence: Synthetic oligonucleotide
  Antisense strand to SEQ ID NO: 1924864
ugagucccggagaucaagg

SEQ ID NO: 1924866 - RNA, 19 nt, Artificial Sequence
  Description of Artificial Sequence: Synthetic oligonucleotide
  Sense strand starting at position 2469 of SEQ ID NO: 1879683
cuugaucuccgggacucaa

SEQ ID NO: 1924867 - RNA, 19 nt, Artificial Sequence
  Description of Artificial Sequence: Synthetic oligonucleotide
  Antisense strand to SEQ ID NO: 1924866
uugagucccggagaucaag

SEQ ID NO: 1924868 - RNA, 19 nt, Artificial Sequence
  Description of Artificial Sequence: Synthetic oligonucleotide
  Sense strand starting at position 2997 of SEQ ID NO: 1879683
auauguagaucacauaucu

SEQ ID NO: 1924869 - RNA, 19 nt, Artificial Sequence
  Description of Artificial Sequence: Synthetic oligonucleotide
  Antisense strand to SEQ ID NO: 1924868
agauaugugaucuacauau

SEQ ID NO: 1924870 - RNA, 19 nt, Artificial Sequence
  Description of Artificial Sequence: Synthetic oligonucleotide
  Sense strand starting at position 3150 of SEQ ID NO: 1879683
cacuaucaguuaucaggga

SEQ ID NO: 1924871 - RNA, 19 nt, Artificial Sequence
  Description of Artificial Sequence: Synthetic oligonucleotide
  Antisense strand to SEQ ID NO: 1924870
ucccugauaacugauagug

SEQ ID NO: 1924872 - RNA, 19 nt, Artificial Sequence
  Description of Artificial Sequence: Synthetic oligonucleotide
  Sense strand starting at position 3151 of SEQ ID NO: 1879683
acuaucaguuaucagggaa

SEQ ID NO: 1924873 - RNA, 19 nt, Artificial Sequence
  Description of Artificial Sequence: Synthetic oligonucleotide
  Antisense strand to SEQ ID NO: 1924872
uucccugauaacugauagu

SEQ ID NO: 1924874 - RNA, 19 nt, Artificial Sequence
  Description of Artificial Sequence: Synthetic oligonucleotide
  Sense strand starting at position 3155 of SEQ ID NO: 1879683
ucaguuaucagggaaaugc

SEQ ID NO: 1924875 - RNA, 19 nt, Artificial Sequence
  Description of Artificial Sequence: Synthetic oligonucleotide
  Antisense strand to SEQ ID NO: 1924874
gcauuucccugauaacuga

SEQ ID NO: 1924876 - RNA, 19 nt, Artificial Sequence
  Description of Artificial Sequence: Synthetic oligonucleotide
  Sense strand starting at position 3257 of SEQ ID NO: 1879683
gugaauaaaucagaacugu

SEQ ID NO: 1924877 - RNA, 19 nt, Artificial Sequence
  Description of Artificial Sequence: Synthetic oligonucleotide
  Antisense strand to SEQ ID NO: 1924876
acaguucugauuuauucac

SEQ ID NO: 1924878 - RNA, 19 nt, Artificial Sequence
  Description of Artificial Sequence: Synthetic oligonucleotide
  Sense strand starting at position 3294 of SEQ ID NO: 1879683
aauuacuagugggaauaua

SEQ ID NO: 1924879 - RNA, 19 nt, Artificial Sequence
  Description of Artificial Sequence: Synthetic oligonucleotide
  Antisense strand to SEQ ID NO: 1924878
uauauucccacuaguaauu

SEQ ID NO: 1924880 - RNA, 19 nt, Artificial Sequence
  Description of Artificial Sequence: Synthetic oligonucleotide
  Sense strand starting at position 3505 of SEQ ID NO: 1879683
agauguccaacuggugaau

SEQ ID NO: 1924881 - RNA, 19 nt, Artificial Sequence
  Description of Artificial Sequence: Synthetic oligonucleotide
  Antisense strand to SEQ ID NO: 1924880
auucaccaguuggacaucu

SEQ ID NO: 1924882 - RNA, 19 nt, Artificial Sequence
  Description of Artificial Sequence: Synthetic oligonucleotide
  Sense strand starting at position 3508 of SEQ ID NO: 1879683
uguccaacuggugaauaca

SEQ ID NO: 1924883 - RNA, 19 nt, Artificial Sequence
  Description of Artificial Sequence: Synthetic oligonucleotide
  Antisense strand to SEQ ID NO: 1924882
uguauucaccaguuggaca

SEQ ID NO: 1924884 - RNA, 19 nt, Artificial Sequence
  Description of Artificial Sequence: Synthetic oligonucleotide
  Sense strand starting at position 3798 of SEQ ID NO: 1879683
gcgagaccaaccugguuaa

SEQ ID NO: 1924885 - RNA, 19 nt, Artificial Sequence
  Description of Artificial Sequence: Synthetic oligonucleotide
  Antisense strand to SEQ ID NO: 1924884
uuaaccagguuggucucgc

SEQ ID NO: 1924886 - RNA, 19 nt, Artificial Sequence
  Description of Artificial Sequence: Synthetic oligonucleotide
  Sense strand starting at position 3805 of SEQ ID NO: 1879683
caaccugguuaacaugaga

SEQ ID NO: 1924887 - RNA, 19 nt, Artificial Sequence
  Description of Artificial Sequence: Synthetic oligonucleotide
  Antisense strand to SEQ ID NO: 1924886
ucucauguuaaccagguug

SEQ ID NO: 1924888 - RNA, 19 nt, Artificial Sequence
  Description of Artificial Sequence: Synthetic oligonucleotide
  Sense strand starting at position 3916 of SEQ ID NO: 1879683
ugcuaacaggcaugagauu

SEQ ID NO: 1924889 - RNA, 19 nt, Artificial Sequence
  Description of Artificial Sequence: Synthetic oligonucleotide
  Antisense strand to SEQ ID NO: 1924888
aaucucaugccuguuagca

SEQ ID NO: 1924890 - RNA, 19 nt, Artificial Sequence
  Description of Artificial Sequence: Synthetic oligonucleotide
  Sense strand starting at position 7 of SEQ ID NO: 1879684
ucaauugcugguugggaga

SEQ ID NO: 1924891 - RNA, 19 nt, Artificial Sequence
  Description of Artificial Sequence: Synthetic oligonucleotide
  Antisense strand to SEQ ID NO: 1924890
ucucccaaccagcaauuga

SEQ ID NO: 1924892 - RNA, 19 nt, Artificial Sequence
  Description of Artificial Sequence: Synthetic oligonucleotide
  Sense strand starting at position 20 of SEQ ID NO: 1879684
gggagaagguagagacauu

SEQ ID NO: 1924893 - RNA, 19 nt, Artificial Sequence
  Description of Artificial Sequence: Synthetic oligonucleotide
  Antisense strand to SEQ ID NO: 1924892
aaugucucuaccuucuccc

SEQ ID NO: 1924894 - RNA, 19 nt, Artificial Sequence
  Description of Artificial Sequence: Synthetic oligonucleotide
  Sense strand starting at position 71 of SEQ ID NO: 1879684
guagacuucugcucugaag

SEQ ID NO: 1924895 - RNA, 19 nt, Artificial Sequence
  Description of Artificial Sequence: Synthetic oligonucleotide
  Antisense strand to SEQ ID NO: 1924894
cuucagagcagaagucuac

SEQ ID NO: 1924896 - RNA, 19 nt, Artificial Sequence
  Description of Artificial Sequence: Synthetic oligonucleotide
  Sense strand starting at position 73 of SEQ ID NO: 1879684
agacuucugcucugaagca

SEQ ID NO: 1924897 - RNA, 19 nt, Artificial Sequence
  Description of Artificial Sequence: Synthetic oligonucleotide
  Antisense strand to SEQ ID NO: 1924896
ugcuucagagcagaagucu

SEQ ID NO: 1924898 - RNA, 19 nt, Artificial Sequence
  Description of Artificial Sequence: Synthetic oligonucleotide
  Sense strand starting at position 260 of SEQ ID NO: 1879684
gugcaaugugcguuacaaa

SEQ ID NO: 1924899 - RNA, 19 nt, Artificial Sequence
  Description of Artificial Sequence: Synthetic oligonucleotide
  Antisense strand to SEQ ID NO: 1924898
uuuguaacgcacauugcac

SEQ ID NO: 1924900 - RNA, 19 nt, Artificial Sequence
  Description of Artificial Sequence: Synthetic oligonucleotide
  Sense strand starting at position 261 of SEQ ID NO: 1879684
ugcaaugugcguuacaaag

SEQ ID NO: 1924901 - RNA, 19 nt, Artificial Sequence
  Description of Artificial Sequence: Synthetic oligonucleotide
  Antisense strand to SEQ ID NO: 1924900
cuuuguaacgcacauugca

SEQ ID NO: 1924902 - RNA, 19 nt, Artificial Sequence
  Description of Artificial Sequence: Synthetic oligonucleotide
  Sense strand starting at position 311 of SEQ ID NO: 1879684
cagucuauuugaggaagaa

SEQ ID NO: 1924903 - RNA, 19 nt, Artificial Sequence
  Description of Artificial Sequence: Synthetic oligonucleotide
  Antisense strand to SEQ ID NO: 1924902
uucuuccucaaauagacug

SEQ ID NO: 1924904 - RNA, 19 nt, Artificial Sequence
  Description of Artificial Sequence: Synthetic oligonucleotide
  Sense strand starting at position 377 of SEQ ID NO: 1879684
ugguuuccucuccagcauu

SEQ ID NO: 1924905 - RNA, 19 nt, Artificial Sequence
  Description of Artificial Sequence: Synthetic oligonucleotide
  Antisense strand to SEQ ID NO: 1924904
aaugcuggagaggaaacca

SEQ ID NO: 1924906 - RNA, 19 nt, Artificial Sequence
  Description of Artificial Sequence: Synthetic oligonucleotide
  Sense strand starting at position 696 of SEQ ID NO: 1879684
gccugugugaaagguacua

SEQ ID NO: 1924907 - RNA, 19 nt, Artificial Sequence
  Description of Artificial Sequence: Synthetic oligonucleotide
  Antisense strand to SEQ ID NO: 1924906
uaguaccuuucacacaggc

SEQ ID NO: 1924908 - RNA, 19 nt, Artificial Sequence
  Description of Artificial Sequence: Synthetic oligonucleotide
  Sense strand starting at position 698 of SEQ ID NO: 1879684
cugugugaaagguacuaga

SEQ ID NO: 1924909 - RNA, 19 nt, Artificial Sequence
  Description of Artificial Sequence: Synthetic oligonucleotide
  Antisense strand to SEQ ID NO: 1924908
ucuaguaccuuucacacag

SEQ ID NO: 1924910 - RNA, 19 nt, Artificial Sequence
  Description of Artificial Sequence: Synthetic oligonucleotide
  Sense strand starting at position 777 of SEQ ID NO: 1879684
guguaagacacuuacguuu

SEQ ID NO: 1924911 - RNA, 19 nt, Artificial Sequence
  Description of Artificial Sequence: Synthetic oligonucleotide
  Antisense strand to SEQ ID NO: 1924910
aaacguaagugucuuacac

SEQ ID NO: 1924912 - RNA, 19 nt, Artificial Sequence
  Description of Artificial Sequence: Synthetic oligonucleotide
  Sense strand starting at position 802 of SEQ ID NO: 1879684
accucuuaggcuuggauga

SEQ ID NO: 1924913 - RNA, 19 nt, Artificial Sequence
  Description of Artificial Sequence: Synthetic oligonucleotide
  Antisense strand to SEQ ID NO: 1924912
ucauccaagccuaagaggu

SEQ ID NO: 1924914 - RNA, 19 nt, Artificial Sequence
  Description of Artificial Sequence: Synthetic oligonucleotide
  Sense strand starting at position 803 of SEQ ID NO: 1879684
ccucuuaggcuuggaugaa

SEQ ID NO: 1924915 - RNA, 19 nt, Artificial Sequence
  Description of Artificial Sequence: Synthetic oligonucleotide
  Antisense strand to SEQ ID NO: 1924914
uucauccaagccuaagagg

SEQ ID NO: 1924916 - RNA, 19 nt, Artificial Sequence
  Description of Artificial Sequence: Synthetic oligonucleotide
  Sense strand starting at position 888 of SEQ ID NO: 1879684
gcucaaugucaauguuaga

SEQ ID NO: 1924917 - RNA, 19 nt, Artificial Sequence
  Description of Artificial Sequence: Synthetic oligonucleotide
  Antisense strand to SEQ ID NO: 1924916
ucuaacauugacauugagc

SEQ ID NO: 1924918 - RNA, 19 nt, Artificial Sequence
  Description of Artificial Sequence: Synthetic oligonucleotide
  Sense strand starting at position 895 of SEQ ID NO: 1879684
gucaauguuagagagcaca

SEQ ID NO: 1924919 - RNA, 19 nt, Artificial Sequence
  Description of Artificial Sequence: Synthetic oligonucleotide
  Antisense strand to SEQ ID NO: 1924918
ugugcucucuaacauugac

SEQ ID NO: 1924920 - RNA, 19 nt, Artificial Sequence
  Description of Artificial Sequence: Synthetic oligonucleotide
  Sense strand starting at position 946 of SEQ ID NO: 1879684
ggcugauugcaugagcucu

SEQ ID NO: 1924921 - RNA, 19 nt, Artificial Sequence
  Description of Artificial Sequence: Synthetic oligonucleotide
  Antisense strand to SEQ ID NO: 1924920
agagcucaugcaaucagcc

SEQ ID NO: 1924922 - RNA, 19 nt, Artificial Sequence
  Description of Artificial Sequence: Synthetic oligonucleotide
  Sense strand starting at position 980 of SEQ ID NO: 1879684
ccacuaacggguuaucuca

SEQ ID NO: 1924923 - RNA, 19 nt, Artificial Sequence
  Description of Artificial Sequence: Synthetic oligonucleotide
  Antisense strand to SEQ ID NO: 1924922
ugagauaacccguuagugg

SEQ ID NO: 1924924 - RNA, 19 nt, Artificial Sequence
  Description of Artificial Sequence: Synthetic oligonucleotide
  Sense strand starting at position 988 of SEQ ID NO: 1879684
ggguuaucucaggguuccu

SEQ ID NO: 1924925 - RNA, 19 nt, Artificial Sequence
  Description of Artificial Sequence: Synthetic oligonucleotide
  Antisense strand to SEQ ID NO: 1924924
aggaacccugagauaaccc

SEQ ID NO: 1924926 - RNA, 19 nt, Artificial Sequence
  Description of Artificial Sequence: Synthetic oligonucleotide
  Sense strand starting at position 1077 of SEQ ID NO: 1879684
cggugacuuugguccaauu

SEQ ID NO: 1924927 - RNA, 19 nt, Artificial Sequence
  Description of Artificial Sequence: Synthetic oligonucleotide
  Antisense strand to SEQ ID NO: 1924926
aauuggaccaaagucaccg

SEQ ID NO: 1924928 - RNA, 19 nt, Artificial Sequence
  Description of Artificial Sequence: Synthetic oligonucleotide
  Sense strand starting at position 1354 of SEQ ID NO: 1879684
cuaugauugcacuggaaau

SEQ ID NO: 1924929 - RNA, 19 nt, Artificial Sequence
  Description of Artificial Sequence: Synthetic oligonucleotide
  Antisense strand to SEQ ID NO: 1924928
auuuccagugcaaucauag

SEQ ID NO: 1924930 - RNA, 19 nt, Artificial Sequence
  Description of Artificial Sequence: Synthetic oligonucleotide
  Sense strand starting at position 1479 of SEQ ID NO: 1879684
gcagauucuugagccagau

SEQ ID NO: 1924931 - RNA, 19 nt, Artificial Sequence
  Description of Artificial Sequence: Synthetic oligonucleotide
  Antisense strand to SEQ ID NO: 1924930
aucuggcucaagaaucugc

SEQ ID NO: 1924932 - RNA, 19 nt, Artificial Sequence
  Description of Artificial Sequence: Synthetic oligonucleotide
  Sense strand starting at position 1491 of SEQ ID NO: 1879684
gccagauugcucgcguuca

SEQ ID NO: 1924933 - RNA, 19 nt, Artificial Sequence
  Description of Artificial Sequence: Synthetic oligonucleotide
  Antisense strand to SEQ ID NO: 1924932
ugaacgcgagcaaucuggc

SEQ ID NO: 1924934 - RNA, 19 nt, Artificial Sequence
  Description of Artificial Sequence: Synthetic oligonucleotide
  Sense strand starting at position 1525 of SEQ ID NO: 1879684
uuauuaauugcaugcuuag

SEQ ID NO: 1924935 - RNA, 19 nt, Artificial Sequence
  Description of Artificial Sequence: Synthetic oligonucleotide
  Antisense strand to SEQ ID NO: 1924934
cuaagcaugcaauuaauaa

SEQ ID NO: 1924936 - RNA, 19 nt, Artificial Sequence
  Description of Artificial Sequence: Synthetic oligonucleotide
  Sense strand starting at position 1566 of SEQ ID NO: 1879684
uguuuccuucucugcaaga

SEQ ID NO: 1924937 - RNA, 19 nt, Artificial Sequence
  Description of Artificial Sequence: Synthetic oligonucleotide
  Antisense strand to SEQ ID NO: 1924936
ucuugcagagaaggaaaca

SEQ ID NO: 1924938 - RNA, 19 nt, Artificial Sequence
  Description of Artificial Sequence: Synthetic oligonucleotide
  Sense strand starting at position 1600 of SEQ ID NO: 1879684
acacuuguacaugauguaa

SEQ ID NO: 1924939 - RNA, 19 nt, Artificial Sequence
  Description of Artificial Sequence: Synthetic oligonucleotide
  Antisense strand to SEQ ID NO: 1924938
uuacaucauguacaagugu

SEQ ID NO: 1924940 - RNA, 19 nt, Artificial Sequence
  Description of Artificial Sequence: Synthetic oligonucleotide
  Sense strand starting at position 1639 of SEQ ID NO: 1879684
caggccuuccugcauagua

SEQ ID NO: 1924941 - RNA, 19 nt, Artificial Sequence
  Description of Artificial Sequence: Synthetic oligonucleotide
  Antisense strand to SEQ ID NO: 1924940
uacuaugcaggaaggccug

SEQ ID NO: 1924942 - RNA, 19 nt, Artificial Sequence
  Description of Artificial Sequence: Synthetic oligonucleotide
  Sense strand starting at position 1655 of SEQ ID NO: 1879684
guaagugcucugcaaacac

SEQ ID NO: 1924943 - RNA, 19 nt, Artificial Sequence
  Description of Artificial Sequence: Synthetic oligonucleotide
  Antisense strand to SEQ ID NO: 1924942
guguuugcagagcacuuac

SEQ ID NO: 1924944 - RNA, 19 nt, Artificial Sequence
  Description of Artificial Sequence: Synthetic oligonucleotide
  Sense strand starting at position 1908 of SEQ ID NO: 1879684
gcacuucuagggcaguaua

SEQ ID NO: 1924945 - RNA, 19 nt, Artificial Sequence
  Description of Artificial Sequence: Synthetic oligonucleotide
  Antisense strand to SEQ ID NO: 1924944
uauacugcccuagaagugc

SEQ ID NO: 1924946 - RNA, 19 nt, Artificial Sequence
  Description of Artificial Sequence: Synthetic oligonucleotide
  Sense strand starting at position 2057 of SEQ ID NO: 1879684
accuguugauaagaaggaa

SEQ ID NO: 1924947 - RNA, 19 nt, Artificial Sequence
  Description of Artificial Sequence: Synthetic oligonucleotide
  Antisense strand to SEQ ID NO: 1924946
uuccuucuuaucaacaggu

SEQ ID NO: 1924948 - RNA, 19 nt, Artificial Sequence
  Description of Artificial Sequence: Synthetic oligonucleotide
  Sense strand starting at position 2755 of SEQ ID NO: 1879684
aaggaaucggcuuacguga

SEQ ID NO: 1924949 - RNA, 19 nt, Artificial Sequence
  Description of Artificial Sequence: Synthetic oligonucleotide
  Antisense strand to SEQ ID NO: 1924948
ucacguaagccgauuccuu

SEQ ID NO: 1924950 - RNA, 19 nt, Artificial Sequence
  Description of Artificial Sequence: Synthetic oligonucleotide
  Sense strand starting at position 2960 of SEQ ID NO: 1879684
acuuacagccagugaucau

SEQ ID NO: 1924951 - RNA, 19 nt, Artificial Sequence
  Description of Artificial Sequence: Synthetic oligonucleotide
  Antisense strand to SEQ ID NO: 1924950
augaucacuggcuguaagu

SEQ ID NO: 1924952 - RNA, 19 nt, Artificial Sequence
  Description of Artificial Sequence: Synthetic oligonucleotide
  Sense strand starting at position 2969 of SEQ ID NO: 1879684
cagugaucaucagugcuga

SEQ ID NO: 1924953 - RNA, 19 nt, Artificial Sequence
  Description of Artificial Sequence: Synthetic oligonucleotide
  Antisense strand to SEQ ID NO: 1924952
ucagcacugaugaucacug

SEQ ID NO: 1924954 - RNA, 19 nt, Artificial Sequence
  Description of Artificial Sequence: Synthetic oligonucleotide
  Sense strand starting at position 3024 of SEQ ID NO: 1879684
aagcguuugguugaaucau

SEQ ID NO: 1924955 - RNA, 19 nt, Artificial Sequence
  Description of Artificial Sequence: Synthetic oligonucleotide
  Antisense strand to SEQ ID NO: 1924954
augauucaaccaaacgcuu

SEQ ID NO: 1924956 - RNA, 19 nt, Artificial Sequence
  Description of Artificial Sequence: Synthetic oligonucleotide
  Sense strand starting at position 3032 of SEQ ID NO: 1879684
gguugaaucauggguauca

SEQ ID NO: 1924957 - RNA, 19 nt, Artificial Sequence
  Description of Artificial Sequence: Synthetic oligonucleotide
  Antisense strand to SEQ ID NO: 1924956
ugauacccaugauucaacc

SEQ ID NO: 1924958 - RNA, 19 nt, Artificial Sequence
  Description of Artificial Sequence: Synthetic oligonucleotide
  Sense strand starting at position 3033 of SEQ ID NO: 1879684
guugaaucauggguaucac

SEQ ID NO: 1924959 - RNA, 19 nt, Artificial Sequence
  Description of Artificial Sequence: Synthetic oligonucleotide
  Antisense strand to SEQ ID NO: 1924958
gugauacccaugauucaac

SEQ ID NO: 1924960 - RNA, 19 nt, Artificial Sequence
  Description of Artificial Sequence: Synthetic oligonucleotide
  Sense strand starting at position 3077 of SEQ ID NO: 1879684
ugcccaucacaggguuuaa

SEQ ID NO: 1924961 - RNA, 19 nt, Artificial Sequence
  Description of Artificial Sequence: Synthetic oligonucleotide
  Antisense strand to SEQ ID NO: 1924960
uuaaacccugugaugggca

SEQ ID NO: 1924962 - RNA, 19 nt, Artificial Sequence
  Description of Artificial Sequence: Synthetic oligonucleotide
  Sense strand starting at position 3088 of SEQ ID NO: 1879684
ggguuuaagaucuagugcu

SEQ ID NO: 1924963 - RNA, 19 nt, Artificial Sequence
  Description of Artificial Sequence: Synthetic oligonucleotide
  Antisense strand to SEQ ID NO: 1924962
agcacuagaucuuaaaccc

SEQ ID NO: 1924964 - RNA, 19 nt, Artificial Sequence
  Description of Artificial Sequence: Synthetic oligonucleotide
  Sense strand starting at position 3094 of SEQ ID NO: 1879684
aagaucuagugcuuuaaga

SEQ ID NO: 1924965 - RNA, 19 nt, Artificial Sequence
  Description of Artificial Sequence: Synthetic oligonucleotide
  Antisense strand to SEQ ID NO: 1924964
ucuuaaagcacuagaucuu

SEQ ID NO: 1924966 - RNA, 19 nt, Artificial Sequence
  Description of Artificial Sequence: Synthetic oligonucleotide
  Sense strand starting at position 3096 of SEQ ID NO: 1879684
gaucuagugcuuuaagauc

SEQ ID NO: 1924967 - RNA, 19 nt, Artificial Sequence
  Description of Artificial Sequence: Synthetic oligonucleotide
  Antisense strand to SEQ ID NO: 1924966
gaucuuaaagcacuagauc

SEQ ID NO: 1924968 - RNA, 19 nt, Artificial Sequence
  Description of Artificial Sequence: Synthetic oligonucleotide
  Sense strand starting at position 3397 of SEQ ID NO: 1879684
uugaguuccagguaaggua

SEQ ID NO: 1924969 - RNA, 19 nt, Artificial Sequence
  Description of Artificial Sequence: Synthetic oligonucleotide
  Antisense strand to SEQ ID NO: 1924968
uaccuuaccuggaacucaa

SEQ ID NO: 1924970 - RNA, 19 nt, Artificial Sequence
  Description of Artificial Sequence: Synthetic oligonucleotide
  Sense strand starting at position 254 of SEQ ID NO: 1879685
ggcuuuagaauuggacaag

SEQ ID NO: 1924971 - RNA, 19 nt, Artificial Sequence
  Description of Artificial Sequence: Synthetic oligonucleotide
  Antisense strand to SEQ ID NO: 1924970
cuuguccaauucuaaagcc

SEQ ID NO: 1924972 - RNA, 19 nt, Artificial Sequence
  Description of Artificial Sequence: Synthetic oligonucleotide
  Sense strand starting at position 368 of SEQ ID NO: 1879685
aguaauaccugucuuggga

SEQ ID NO: 1924973 - RNA, 19 nt, Artificial Sequence
  Description of Artificial Sequence: Synthetic oligonucleotide
  Antisense strand to SEQ ID NO: 1924972
ucccaagacagguauuacu

SEQ ID NO: 1924974 - RNA, 19 nt, Artificial Sequence
  Description of Artificial Sequence: Synthetic oligonucleotide
  Sense strand starting at position 397 of SEQ ID NO: 1879685
agaugagauaaucguauca

SEQ ID NO: 1924975 - RNA, 19 nt, Artificial Sequence
  Description of Artificial Sequence: Synthetic oligonucleotide
  Antisense strand to SEQ ID NO: 1924974
ugauacgauuaucucaucu

SEQ ID NO: 1924976 - RNA, 19 nt, Artificial Sequence
  Description of Artificial Sequence: Synthetic oligonucleotide
  Sense strand starting at position 410 of SEQ ID NO: 1879685
guaucaauugacuggcaca

SEQ ID NO: 1924977 - RNA, 19 nt, Artificial Sequence
  Description of Artificial Sequence: Synthetic oligonucleotide
  Antisense strand to SEQ ID NO: 1924976
ugugccagucaauugauac

SEQ ID NO: 1924978 - RNA, 19 nt, Artificial Sequence
  Description of Artificial Sequence: Synthetic oligonucleotide
  Sense strand starting at position 478 of SEQ ID NO: 1879685
gaccauuagugaucuaugc

SEQ ID NO: 1924979 - RNA, 19 nt, Artificial Sequence
  Description of Artificial Sequence: Synthetic oligonucleotide
  Antisense strand to SEQ ID NO: 1924978
gcauagaucacuaaugguc

SEQ ID NO: 1924980 - RNA, 19 nt, Artificial Sequence
  Description of Artificial Sequence: Synthetic oligonucleotide
  Sense strand starting at position 487 of SEQ ID NO: 1879685
ugaucuaugcugggcgaga

SEQ ID NO: 1924981 - RNA, 19 nt, Artificial Sequence
  Description of Artificial Sequence: Synthetic oligonucleotide
  Antisense strand to SEQ ID NO: 1924980
ucucgcccagcauagauca

SEQ ID NO: 1924982 - RNA, 19 nt, Artificial Sequence
  Description of Artificial Sequence: Synthetic oligonucleotide
  Sense strand starting at position 689 of SEQ ID NO: 1879685
cuucucgugcuuguugaau

SEQ ID NO: 1924983 - RNA, 19 nt, Artificial Sequence
  Description of Artificial Sequence: Synthetic oligonucleotide
  Antisense strand to SEQ ID NO: 1924982
auucaacaagcacgagaag

SEQ ID NO: 1924984 - RNA, 19 nt, Artificial Sequence
  Description of Artificial Sequence: Synthetic oligonucleotide
  Sense strand starting at position 700 of SEQ ID NO: 1879685
uguugaauuagggaugcca

SEQ ID NO: 1924985 - RNA, 19 nt, Artificial Sequence
  Description of Artificial Sequence: Synthetic oligonucleotide
  Antisense strand to SEQ ID NO: 1924984
uggcaucccuaauucaaca

SEQ ID NO: 1924986 - RNA, 19 nt, Artificial Sequence
  Description of Artificial Sequence: Synthetic oligonucleotide
  Sense strand starting at position 885 of SEQ ID NO: 1879685
cuuggaacgcuugaacuua

SEQ ID NO: 1924987 - RNA, 19 nt, Artificial Sequence
  Description of Artificial Sequence: Synthetic oligonucleotide
  Antisense strand to SEQ ID NO: 1924986
uaaguucaagcguuccaag

SEQ ID NO: 1924988 - RNA, 19 nt, Artificial Sequence
  Description of Artificial Sequence: Synthetic oligonucleotide
  Sense strand starting at position 952 of SEQ ID NO: 1879685
gcacccuccucuuuggauu

SEQ ID NO: 1924989 - RNA, 19 nt, Artificial Sequence
  Description of Artificial Sequence: Synthetic oligonucleotide
  Antisense strand to SEQ ID NO: 1924988
aauccaaagaggagggugc

SEQ ID NO: 1924990 - RNA, 19 nt, Artificial Sequence
  Description of Artificial Sequence: Synthetic oligonucleotide
  Sense strand starting at position 1075 of SEQ ID NO: 1879685
cucccacagcugugacaua

SEQ ID NO: 1924991 - RNA, 19 nt, Artificial Sequence
  Description of Artificial Sequence: Synthetic oligonucleotide
  Antisense strand to SEQ ID NO: 1924990
uaugucacagcugugggag

SEQ ID NO: 1924992 - RNA, 19 nt, Artificial Sequence
  Description of Artificial Sequence: Synthetic oligonucleotide
  Sense strand starting at position 1238 of SEQ ID NO: 1879685
gcaucaaaugacuguggaa

SEQ ID NO: 1924993 - RNA, 19 nt, Artificial Sequence
  Description of Artificial Sequence: Synthetic oligonucleotide
  Antisense strand to SEQ ID NO: 1924992
uuccacagucauuugaugc

SEQ ID NO: 1924994 - RNA, 19 nt, Artificial Sequence
  Description of Artificial Sequence: Synthetic oligonucleotide
  Sense strand starting at position 1494 of SEQ ID NO: 1879685
gggccacuccuacagucau

SEQ ID NO: 1924995 - RNA, 19 nt, Artificial Sequence
  Description of Artificial Sequence: Synthetic oligonucleotide
  Antisense strand to SEQ ID NO: 1924994
augacuguaggaguggccc

SEQ ID NO: 1924996 - RNA, 19 nt, Artificial Sequence
  Description of Artificial Sequence: Synthetic oligonucleotide
  Sense strand starting at position 1596 of SEQ ID NO: 1879685
gacacaugguucccgugau

SEQ ID NO: 1924997 - RNA, 19 nt, Artificial Sequence
  Description of Artificial Sequence: Synthetic oligonucleotide
  Antisense strand to SEQ ID NO: 1924996
aucacgggaaccauguguc

SEQ ID NO: 1924998 - RNA, 19 nt, Artificial Sequence
  Description of Artificial Sequence: Synthetic oligonucleotide
  Sense strand starting at position 1836 of SEQ ID NO: 1879685
uguggaaguuucucaggca

SEQ ID NO: 1924999 - RNA, 19 nt, Artificial Sequence
  Description of Artificial Sequence: Synthetic oligonucleotide
  Antisense strand to SEQ ID NO: 1924998
ugccugagaaacuuccaca

SEQ ID NO: 1925000 - RNA, 19 nt, Artificial Sequence
  Description of Artificial Sequence: Synthetic oligonucleotide
  Sense strand starting at position 1866 of SEQ ID NO: 1879685
gcauacuucuucuugagau

SEQ ID NO: 1925001 - RNA, 19 nt, Artificial Sequence
  Description of Artificial Sequence: Synthetic oligonucleotide
  Antisense strand to SEQ ID NO: 1925000
aucucaagaagaaguaugc

SEQ ID NO: 1925002 - RNA, 19 nt, Artificial Sequence
  Description of Artificial Sequence: Synthetic oligonucleotide
  Sense strand starting at position 2084 of SEQ ID NO: 1879685
guuggcucacgagguaaga

SEQ ID NO: 1925003 - RNA, 19 nt, Artificial Sequence
  Description of Artificial Sequence: Synthetic oligonucleotide
  Antisense strand to SEQ ID NO: 1925002
ucuuaccucgugagccaac

SEQ ID NO: 1925004 - RNA, 19 nt, Artificial Sequence
  Description of Artificial Sequence: Synthetic oligonucleotide
  Sense strand starting at position 2101 of SEQ ID NO: 1879685
gaugcuaaugggcaaagua

SEQ ID NO: 1925005 - RNA, 19 nt, Artificial Sequence
  Description of Artificial Sequence: Synthetic oligonucleotide
  Antisense strand to SEQ ID NO: 1925004
uacuuugcccauuagcauc

SEQ ID NO: 1925006 - RNA, 19 nt, Artificial Sequence
  Description of Artificial Sequence: Synthetic oligonucleotide
  Sense strand starting at position 2127 of SEQ ID NO: 1879685
ggcuucuguccaggaccaa

SEQ ID NO: 1925007 - RNA, 19 nt, Artificial Sequence
  Description of Artificial Sequence: Synthetic oligonucleotide
  Antisense strand to SEQ ID NO: 1925006
uugguccuggacagaagcc

SEQ ID NO: 1925008 - RNA, 19 nt, Artificial Sequence
  Description of Artificial Sequence: Synthetic oligonucleotide
  Sense strand starting at position 2171 of SEQ ID NO: 1879685
ugucuauuccaguaagagu

SEQ ID NO: 1925009 - RNA, 19 nt, Artificial Sequence
  Description of Artificial Sequence: Synthetic oligonucleotide
  Antisense strand to SEQ ID NO: 1925008
acucuuacuggaauagaca

SEQ ID NO: 1925010 - RNA, 19 nt, Artificial Sequence
  Description of Artificial Sequence: Synthetic oligonucleotide
  Sense strand starting at position 2186 of SEQ ID NO: 1879685
gagucuaagggcugagauc

SEQ ID NO: 1925011 - RNA, 19 nt, Artificial Sequence
  Description of Artificial Sequence: Synthetic oligonucleotide
  Antisense strand to SEQ ID NO: 1925010
gaucucagcccuuagacuc

SEQ ID NO: 1925012 - RNA, 19 nt, Artificial Sequence
  Description of Artificial Sequence: Synthetic oligonucleotide
  Sense strand starting at position 2200 of SEQ ID NO: 1879685
agaucagguuucccacagu

SEQ ID NO: 1925013 - RNA, 19 nt, Artificial Sequence
  Description of Artificial Sequence: Synthetic oligonucleotide
  Antisense strand to SEQ ID NO: 1925012
acugugggaaaccugaucu

SEQ ID NO: 1925014 - RNA, 19 nt, Artificial Sequence
  Description of Artificial Sequence: Synthetic oligonucleotide
  Sense strand starting at position 2459 of SEQ ID NO: 1879685
cagcuuauuuacgcguuua

SEQ ID NO: 1925015 - RNA, 19 nt, Artificial Sequence
  Description of Artificial Sequence: Synthetic oligonucleotide
  Antisense strand to SEQ ID NO: 1925014
uaaacgcguaaauaagcug

SEQ ID NO: 1925016 - RNA, 19 nt, Artificial Sequence
  Description of Artificial Sequence: Synthetic oligonucleotide
  Sense strand starting at position 2460 of SEQ ID NO: 1879685
agcuuauuuacgcguuuag

SEQ ID NO: 1925017 - RNA, 19 nt, Artificial Sequence
  Description of Artificial Sequence: Synthetic oligonucleotide
  Antisense strand to SEQ ID NO: 1925016
cuaaacgcguaaauaagcu

SEQ ID NO: 1925018 - RNA, 19 nt, Artificial Sequence
  Description of Artificial Sequence: Synthetic oligonucleotide
  Sense strand starting at position 2464 of SEQ ID NO: 1879685
uauuuacgcguuuagaucu

SEQ ID NO: 1925019 - RNA, 19 nt, Artificial Sequence
  Description of Artificial Sequence: Synthetic oligonucleotide
  Antisense strand to SEQ ID NO: 1925018
agaucuaaacgcguaaaua

SEQ ID NO: 1925020 - RNA, 19 nt, Artificial Sequence
  Description of Artificial Sequence: Synthetic oligonucleotide
  Sense strand starting at position 2662 of SEQ ID NO: 1879685
uaagguguuccaggcagau

SEQ ID NO: 1925021 - RNA, 19 nt, Artificial Sequence
  Description of Artificial Sequence: Synthetic oligonucleotide
  Antisense strand to SEQ ID NO: 1925020
aucugccuggaacaccuua

SEQ ID NO: 1925022 - RNA, 19 nt, Artificial Sequence
  Description of Artificial Sequence: Synthetic oligonucleotide
  Sense strand starting at position 2672 of SEQ ID NO: 1879685
caggcagauuucuuugcca

SEQ ID NO: 1925023 - RNA, 19 nt, Artificial Sequence
  Description of Artificial Sequence: Synthetic oligonucleotide
  Antisense strand to SEQ ID NO: 1925022
uggcaaagaaaucugccug

SEQ ID NO: 1925024 - RNA, 19 nt, Artificial Sequence
  Description of Artificial Sequence: Synthetic oligonucleotide
  Sense strand starting at position 2674 of SEQ ID NO: 1879685
ggcagauuucuuugccacu

SEQ ID NO: 1925025 - RNA, 19 nt, Artificial Sequence
  Description of Artificial Sequence: Synthetic oligonucleotide
  Antisense strand to SEQ ID NO: 1925024
aguggcaaagaaaucugcc

SEQ ID NO: 1925026 - RNA, 19 nt, Artificial Sequence
  Description of Artificial Sequence: Synthetic oligonucleotide
  Sense strand starting at position 2723 of SEQ ID NO: 1879685
acaagaagcuaugugucuu

SEQ ID NO: 1925027 - RNA, 19 nt, Artificial Sequence
  Description of Artificial Sequence: Synthetic oligonucleotide
  Antisense strand to SEQ ID NO: 1925026
aagacacauagcuucuugu

SEQ ID NO: 1925028 - RNA, 19 nt, Artificial Sequence
  Description of Artificial Sequence: Synthetic oligonucleotide
  Sense strand starting at position 2841 of SEQ ID NO: 1879685
ggcagaugguaucccagaa

SEQ ID NO: 1925029 - RNA, 19 nt, Artificial Sequence
  Description of Artificial Sequence: Synthetic oligonucleotide
  Antisense strand to SEQ ID NO: 1925028
uucugggauaccaucugcc

SEQ ID NO: 1925030 - RNA, 19 nt, Artificial Sequence
  Description of Artificial Sequence: Synthetic oligonucleotide
  Sense strand starting at position 2987 of SEQ ID NO: 1879685
gggugcuuuggucaauaac

SEQ ID NO: 1925031 - RNA, 19 nt, Artificial Sequence
  Description of Artificial Sequence: Synthetic oligonucleotide
  Antisense strand to SEQ ID NO: 1925030
guuauugaccaaagcaccc

SEQ ID NO: 1925032 - RNA, 19 nt, Artificial Sequence
  Description of Artificial Sequence: Synthetic oligonucleotide
  Sense strand starting at position 2990 of SEQ ID NO: 1879685
ugcuuuggucaauaaccca

SEQ ID NO: 1925033 - RNA, 19 nt, Artificial Sequence
  Description of Artificial Sequence: Synthetic oligonucleotide
  Antisense strand to SEQ ID NO: 1925032
uggguuauugaccaaagca

SEQ ID NO: 1925034 - RNA, 19 nt, Artificial Sequence
  Description of Artificial Sequence: Synthetic oligonucleotide
  Sense strand starting at position 3020 of SEQ ID NO: 1879685
cguggauauuucuuguuag

SEQ ID NO: 1925035 - RNA, 19 nt, Artificial Sequence
  Description of Artificial Sequence: Synthetic oligonucleotide
  Antisense strand to SEQ ID NO: 1925034
cuaacaagaaauauccacg

SEQ ID NO: 1925036 - RNA, 19 nt, Artificial Sequence
  Description of Artificial Sequence: Synthetic oligonucleotide
  Sense strand starting at position 3162 of SEQ ID NO: 1879685
cacguaucuggagaauucu

SEQ ID NO: 1925037 - RNA, 19 nt, Artificial Sequence
  Description of Artificial Sequence: Synthetic oligonucleotide
  Antisense strand to SEQ ID NO: 1925036
agaauucuccagauacgug

SEQ ID NO: 1925038 - RNA, 19 nt, Artificial Sequence
  Description of Artificial Sequence: Synthetic oligonucleotide
  Sense strand starting at position 3350 of SEQ ID NO: 1879685
accugaguuugugugggaa

SEQ ID NO: 1925039 - RNA, 19 nt, Artificial Sequence
  Description of Artificial Sequence: Synthetic oligonucleotide
  Antisense strand to SEQ ID NO: 1925038
uucccacacaaacucaggu

SEQ ID NO: 1925040 - RNA, 19 nt, Artificial Sequence
  Description of Artificial Sequence: Synthetic oligonucleotide
  Sense strand starting at position 3353 of SEQ ID NO: 1879685
ugaguuugugugggaaacu

SEQ ID NO: 1925041 - RNA, 19 nt, Artificial Sequence
  Description of Artificial Sequence: Synthetic oligonucleotide
  Antisense strand to SEQ ID NO: 1925040
aguuucccacacaaacuca

SEQ ID NO: 1925042 - RNA, 19 nt, Artificial Sequence
  Description of Artificial Sequence: Synthetic oligonucleotide
  Sense strand starting at position 3637 of SEQ ID NO: 1879685
gauaacaugcgucaggauu

SEQ ID NO: 1925043 - RNA, 19 nt, Artificial Sequence
  Description of Artificial Sequence: Synthetic oligonucleotide
  Antisense strand to SEQ ID NO: 1925042
aauccugacgcauguuauc

SEQ ID NO: 1925044 - RNA, 19 nt, Artificial Sequence
  Description of Artificial Sequence: Synthetic oligonucleotide
  Sense strand starting at position 3677 of SEQ ID NO: 1879685
ggugguuuauucucaccau

SEQ ID NO: 1925045 - RNA, 19 nt, Artificial Sequence
  Description of Artificial Sequence: Synthetic oligonucleotide
  Antisense strand to SEQ ID NO: 1925044
auggugagaauaaaccacc

SEQ ID NO: 1925046 - RNA, 19 nt, Artificial Sequence
  Description of Artificial Sequence: Synthetic oligonucleotide
  Sense strand starting at position 3680 of SEQ ID NO: 1879685
gguuuauucucaccauucu

SEQ ID NO: 1925047 - RNA, 19 nt, Artificial Sequence
  Description of Artificial Sequence: Synthetic oligonucleotide
  Antisense strand to SEQ ID NO: 1925046
agaauggugagaauaaacc

SEQ ID NO: 1925048 - RNA, 19 nt, Artificial Sequence
  Description of Artificial Sequence: Synthetic oligonucleotide
  Sense strand starting at position 3768 of SEQ ID NO: 1879685
cggucagugcaugaacaau

SEQ ID NO: 1925049 - RNA, 19 nt, Artificial Sequence
  Description of Artificial Sequence: Synthetic oligonucleotide
  Antisense strand to SEQ ID NO: 1925048
auuguucaugcacugaccg

SEQ ID NO: 1925050 - RNA, 19 nt, Artificial Sequence
  Description of Artificial Sequence: Synthetic oligonucleotide
  Sense strand starting at position 18 of SEQ ID NO: 1879686
gcagcaugccuguguggaa

SEQ ID NO: 1925051 - RNA, 19 nt, Artificial Sequence
  Description of Artificial Sequence: Synthetic oligonucleotide
  Antisense strand to SEQ ID NO: 1925050
uuccacacaggcaugcugc

SEQ ID NO: 1925052 - RNA, 19 nt, Artificial Sequence
  Description of Artificial Sequence: Synthetic oligonucleotide
  Sense strand starting at position 1684 of SEQ ID NO: 1879686
gccagugucaaauggucau

SEQ ID NO: 1925053 - RNA, 19 nt, Artificial Sequence
  Description of Artificial Sequence: Synthetic oligonucleotide
  Antisense strand to SEQ ID NO: 1925052
augaccauuugacacuggc

SEQ ID NO: 1925054 - RNA, 19 nt, Artificial Sequence
  Description of Artificial Sequence: Synthetic oligonucleotide
  Sense strand starting at position 1688 of SEQ ID NO: 1879686
gugucaaauggucauggga

SEQ ID NO: 1925055 - RNA, 19 nt, Artificial Sequence
  Description of Artificial Sequence: Synthetic oligonucleotide
  Antisense strand to SEQ ID NO: 1925054
ucccaugaccauuugacac

SEQ ID NO: 1925056 - RNA, 19 nt, Artificial Sequence
  Description of Artificial Sequence: Synthetic oligonucleotide
  Sense strand starting at position 1690 of SEQ ID NO: 1879686
gucaaauggucaugggaac

SEQ ID NO: 1925057 - RNA, 19 nt, Artificial Sequence
  Description of Artificial Sequence: Synthetic oligonucleotide
  Antisense strand to SEQ ID NO: 1925056
guucccaugaccauuugac

SEQ ID NO: 1925058 - RNA, 19 nt, Artificial Sequence
  Description of Artificial Sequence: Synthetic oligonucleotide
  Sense strand starting at position 1809 of SEQ ID NO: 1879686
uaccuuguguguucuggaa

SEQ ID NO: 1925059 - RNA, 19 nt, Artificial Sequence
  Description of Artificial Sequence: Synthetic oligonucleotide
  Antisense strand to SEQ ID NO: 1925058
uuccagaacacacaaggua

SEQ ID NO: 1925060 - RNA, 19 nt, Artificial Sequence
  Description of Artificial Sequence: Synthetic oligonucleotide
  Sense strand starting at position 2231 of SEQ ID NO: 1879686
agugguugcucagaaccca

SEQ ID NO: 1925061 - RNA, 19 nt, Artificial Sequence
  Description of Artificial Sequence: Synthetic oligonucleotide
  Antisense strand to SEQ ID NO: 1925060
uggguucugagcaaccacu

SEQ ID NO: 1925062 - RNA, 19 nt, Artificial Sequence
  Description of Artificial Sequence: Synthetic oligonucleotide
  Sense strand starting at position 2385 of SEQ ID NO: 1879686
gagaaacuguugcccucau

SEQ ID NO: 1925063 - RNA, 19 nt, Artificial Sequence
  Description of Artificial Sequence: Synthetic oligonucleotide
  Antisense strand to SEQ ID NO: 1925062
augagggcaacaguuucuc

SEQ ID NO: 1925064 - RNA, 19 nt, Artificial Sequence
  Description of Artificial Sequence: Synthetic oligonucleotide
  Sense strand starting at position 2736 of SEQ ID NO: 1879686
gcaauuaagucagcuggca

SEQ ID NO: 1925065 - RNA, 19 nt, Artificial Sequence
  Description of Artificial Sequence: Synthetic oligonucleotide
  Antisense strand to SEQ ID NO: 1925064
ugccagcugacuuaauugc

SEQ ID NO: 1925066 - RNA, 19 nt, Artificial Sequence
  Description of Artificial Sequence: Synthetic oligonucleotide
  Sense strand starting at position 2814 of SEQ ID NO: 1879686
cugugaggacacugaaguu

SEQ ID NO: 1925067 - RNA, 19 nt, Artificial Sequence
  Description of Artificial Sequence: Synthetic oligonucleotide
  Antisense strand to SEQ ID NO: 1925066
aacuucaguguccucacag

SEQ ID NO: 1925068 - RNA, 19 nt, Artificial Sequence
  Description of Artificial Sequence: Synthetic oligonucleotide
  Sense strand starting at position 2913 of SEQ ID NO: 1879686
uggucacuuucugaaacaa

SEQ ID NO: 1925069 - RNA, 19 nt, Artificial Sequence
  Description of Artificial Sequence: Synthetic oligonucleotide
  Antisense strand to SEQ ID NO: 1925068
uuguuucagaaagugacca

SEQ ID NO: 1925070 - RNA, 19 nt, Artificial Sequence
  Description of Artificial Sequence: Synthetic oligonucleotide
  Sense strand starting at position 3082 of SEQ ID NO: 1879686
gaaucacagccaugacugu

SEQ ID NO: 1925071 - RNA, 19 nt, Artificial Sequence
  Description of Artificial Sequence: Synthetic oligonucleotide
  Antisense strand to SEQ ID NO: 1925070
acagucauggcugugauuc

SEQ ID NO: 1925072 - RNA, 19 nt, Artificial Sequence
  Description of Artificial Sequence: Synthetic oligonucleotide
  Sense strand starting at position 3146 of SEQ ID NO: 1879686
ggaaaugccucuucuccau

SEQ ID NO: 1925073 - RNA, 19 nt, Artificial Sequence
  Description of Artificial Sequence: Synthetic oligonucleotide
  Antisense strand to SEQ ID NO: 1925072
auggagaagaggcauuucc

SEQ ID NO: 1925074 - RNA, 19 nt, Artificial Sequence
  Description of Artificial Sequence: Synthetic oligonucleotide
  Sense strand starting at position 3186 of SEQ ID NO: 1879686
cacacaugccuguguguuu

SEQ ID NO: 1925075 - RNA, 19 nt, Artificial Sequence
  Description of Artificial Sequence: Synthetic oligonucleotide
  Antisense strand to SEQ ID NO: 1925074
aaacacacaggcaugugug

SEQ ID NO: 1925076 - RNA, 19 nt, Artificial Sequence
  Description of Artificial Sequence: Synthetic oligonucleotide
  Sense strand starting at position 3199 of SEQ ID NO: 1879686
guguuucagugggugugaa

SEQ ID NO: 1925077 - RNA, 19 nt, Artificial Sequence
  Description of Artificial Sequence: Synthetic oligonucleotide
  Antisense strand to SEQ ID NO: 1925076
uucacacccacugaaacac

SEQ ID NO: 1925078 - RNA, 19 nt, Artificial Sequence
  Description of Artificial Sequence: Synthetic oligonucleotide
  Sense strand starting at position 3221 of SEQ ID NO: 1879686
gccgcccgugucugauuua

SEQ ID NO: 1925079 - RNA, 19 nt, Artificial Sequence
  Description of Artificial Sequence: Synthetic oligonucleotide
  Antisense strand to SEQ ID NO: 1925078
uaaaucagacacgggcggc

SEQ ID NO: 1925080 - RNA, 19 nt, Artificial Sequence
  Description of Artificial Sequence: Synthetic oligonucleotide
  Sense strand starting at position 3222 of SEQ ID NO: 1879686
ccgcccgugucugauuuaa

SEQ ID NO: 1925081 - RNA, 19 nt, Artificial Sequence
  Description of Artificial Sequence: Synthetic oligonucleotide
  Antisense strand to SEQ ID NO: 1925080
uuaaaucagacacgggcgg

SEQ ID NO: 1925082 - RNA, 19 nt, Artificial Sequence
  Description of Artificial Sequence: Synthetic oligonucleotide
  Sense strand starting at position 3224 of SEQ ID NO: 1879686
gcccgugucugauuuaaca

SEQ ID NO: 1925083 - RNA, 19 nt, Artificial Sequence
  Description of Artificial Sequence: Synthetic oligonucleotide
  Antisense strand to SEQ ID NO: 1925082
uguuaaaucagacacgggc

SEQ ID NO: 1925084 - RNA, 19 nt, Artificial Sequence
  Description of Artificial Sequence: Synthetic oligonucleotide
  Sense strand starting at position 3243 of SEQ ID NO: 1879686
cugccaucaucccagauga

SEQ ID NO: 1925085 - RNA, 19 nt, Artificial Sequence
  Description of Artificial Sequence: Synthetic oligonucleotide
  Antisense strand to SEQ ID NO: 1925084
ucaucugggaugauggcag

SEQ ID NO: 1925086 - RNA, 19 nt, Artificial Sequence
  Description of Artificial Sequence: Synthetic oligonucleotide
  Sense strand starting at position 3283 of SEQ ID NO: 1879686
ggaucaguguccuuuggac

SEQ ID NO: 1925087 - RNA, 19 nt, Artificial Sequence
  Description of Artificial Sequence: Synthetic oligonucleotide
  Antisense strand to SEQ ID NO: 1925086
guccaaaggacacugaucc

SEQ ID NO: 1925088 - RNA, 19 nt, Artificial Sequence
  Description of Artificial Sequence: Synthetic oligonucleotide
  Sense strand starting at position 3351 of SEQ ID NO: 1879686
uucugaaauuuauaaggac

SEQ ID NO: 1925089 - RNA, 19 nt, Artificial Sequence
  Description of Artificial Sequence: Synthetic oligonucleotide
  Antisense strand to SEQ ID NO: 1925088
guccuuauaaauuucagaa

SEQ ID NO: 1925090 - RNA, 19 nt, Artificial Sequence
  Description of Artificial Sequence: Synthetic oligonucleotide
  Sense strand starting at position 3354 of SEQ ID NO: 1879686
ugaaauuuauaaggaccuu

SEQ ID NO: 1925091 - RNA, 19 nt, Artificial Sequence
  Description of Artificial Sequence: Synthetic oligonucleotide
  Antisense strand to SEQ ID NO: 1925090
aagguccuuauaaauuuca

SEQ ID NO: 1925092 - RNA, 19 nt, Artificial Sequence
  Description of Artificial Sequence: Synthetic oligonucleotide
  Sense strand starting at position 3549 of SEQ ID NO: 1879686
agaccuuggaugugaugau

SEQ ID NO: 1925093 - RNA, 19 nt, Artificial Sequence
  Description of Artificial Sequence: Synthetic oligonucleotide
  Antisense strand to SEQ ID NO: 1925092
aucaucacauccaaggucu

SEQ ID NO: 1925094 - RNA, 19 nt, Artificial Sequence
  Description of Artificial Sequence: Synthetic oligonucleotide
  Sense strand starting at position 3550 of SEQ ID NO: 1879686
gaccuuggaugugaugauu

SEQ ID NO: 1925095 - RNA, 19 nt, Artificial Sequence
  Description of Artificial Sequence: Synthetic oligonucleotide
  Antisense strand to SEQ ID NO: 1925094
aaucaucacauccaagguc

SEQ ID NO: 1925096 - RNA, 19 nt, Artificial Sequence
  Description of Artificial Sequence: Synthetic oligonucleotide
  Sense strand starting at position 3628 of SEQ ID NO: 1879686
ggcagcaauguccaaucuu

SEQ ID NO: 1925097 - RNA, 19 nt, Artificial Sequence
  Description of Artificial Sequence: Synthetic oligonucleotide
  Antisense strand to SEQ ID NO: 1925096
aagauuggacauugcugcc

SEQ ID NO: 1925098 - RNA, 19 nt, Artificial Sequence
  Description of Artificial Sequence: Synthetic oligonucleotide
  Sense strand starting at position 3770 of SEQ ID NO: 1879686
uguguugggucggguucaa

SEQ ID NO: 1925099 - RNA, 19 nt, Artificial Sequence
  Description of Artificial Sequence: Synthetic oligonucleotide
  Antisense strand to SEQ ID NO: 1925098
uugaacccgacccaacaca

SEQ ID NO: 1925100 - RNA, 19 nt, Artificial Sequence
  Description of Artificial Sequence: Synthetic oligonucleotide
  Sense strand starting at position 3884 of SEQ ID NO: 1879686
acacuugagccaugaaauu

SEQ ID NO: 1925101 - RNA, 19 nt, Artificial Sequence
  Description of Artificial Sequence: Synthetic oligonucleotide
  Antisense strand to SEQ ID NO: 1925100
aauuucauggcucaagugu

SEQ ID NO: 1925102 - RNA, 19 nt, Artificial Sequence
  Description of Artificial Sequence: Synthetic oligonucleotide
  Sense strand starting at position 3904 of SEQ ID NO: 1879686
cagaauaauuccugagagu

SEQ ID NO: 1925103 - RNA, 19 nt, Artificial Sequence
  Description of Artificial Sequence: Synthetic oligonucleotide
  Antisense strand to SEQ ID NO: 1925102
acucucaggaauuauucug

SEQ ID NO: 1925104 - RNA, 19 nt, Artificial Sequence
  Description of Artificial Sequence: Synthetic oligonucleotide
  Sense strand starting at position 3913 of SEQ ID NO: 1879686
uccugagaguucuauaugc

SEQ ID NO: 1925105 - RNA, 19 nt, Artificial Sequence
  Description of Artificial Sequence: Synthetic oligonucleotide
  Antisense strand to SEQ ID NO: 1925104
gcauauagaacucucagga

SEQ ID NO: 1925106 - RNA, 19 nt, Artificial Sequence
  Description of Artificial Sequence: Synthetic oligonucleotide
  Sense strand starting at position 2336 of SEQ ID NO: 1879687
uagaaagacuuccagggaa

SEQ ID NO: 1925107 - RNA, 19 nt, Artificial Sequence
  Description of Artificial Sequence: Synthetic oligonucleotide
  Antisense strand to SEQ ID NO: 1925106
uucccuggaagucuuucua

SEQ ID NO: 1925108 - RNA, 19 nt, Artificial Sequence
  Description of Artificial Sequence: Synthetic oligonucleotide
  Sense strand starting at position 2394 of SEQ ID NO: 1879687
guggcucugccugagcuaa

SEQ ID NO: 1925109 - RNA, 19 nt, Artificial Sequence
  Description of Artificial Sequence: Synthetic oligonucleotide
  Antisense strand to SEQ ID NO: 1925108
uuagcucaggcagagccac

SEQ ID NO: 1925110 - RNA, 19 nt, Artificial Sequence
  Description of Artificial Sequence: Synthetic oligonucleotide
  Sense strand starting at position 2396 of SEQ ID NO: 1879687
ggcucugccugagcuaaua

SEQ ID NO: 1925111 - RNA, 19 nt, Artificial Sequence
  Description of Artificial Sequence: Synthetic oligonucleotide
  Antisense strand to SEQ ID NO: 1925110
uauuagcucaggcagagcc

SEQ ID NO: 1925112 - RNA, 19 nt, Artificial Sequence
  Description of Artificial Sequence: Synthetic oligonucleotide
  Sense strand starting at position 2492 of SEQ ID NO: 1879687
ggcuucuuaucaggagaug

SEQ ID NO: 1925113 - RNA, 19 nt, Artificial Sequence
  Description of Artificial Sequence: Synthetic oligonucleotide
  Antisense strand to SEQ ID NO: 1925112
caucuccugauaagaagcc

SEQ ID NO: 1925114 - RNA, 19 nt, Artificial Sequence
  Description of Artificial Sequence: Synthetic oligonucleotide
  Sense strand starting at position 2511 of SEQ ID NO: 1879687
aucagucaccacuggauga

SEQ ID NO: 1925115 - RNA, 19 nt, Artificial Sequence
  Description of Artificial Sequence: Synthetic oligonucleotide
  Antisense strand to SEQ ID NO: 1925114
ucauccaguggugacugau

SEQ ID NO: 1925116 - RNA, 19 nt, Artificial Sequence
  Description of Artificial Sequence: Synthetic oligonucleotide
  Sense strand starting at position 2555 of SEQ ID NO: 1879687
gugguaaccagccaugguu

SEQ ID NO: 1925117 - RNA, 19 nt, Artificial Sequence
  Description of Artificial Sequence: Synthetic oligonucleotide
  Antisense strand to SEQ ID NO: 1925116
aaccauggcugguuaccac

SEQ ID NO: 1925118 - RNA, 19 nt, Artificial Sequence
  Description of Artificial Sequence: Synthetic oligonucleotide
  Sense strand starting at position 2568 of SEQ ID NO: 1879687
augguucugacacgucaau

SEQ ID NO: 1925119 - RNA, 19 nt, Artificial Sequence
  Description of Artificial Sequence: Synthetic oligonucleotide
  Antisense strand to SEQ ID NO: 1925118
auugacgugucagaaccau

SEQ ID NO: 1925120 - RNA, 19 nt, Artificial Sequence
  Description of Artificial Sequence: Synthetic oligonucleotide
  Sense strand starting at position 2579 of SEQ ID NO: 1879687
acgucaauuagcuaugaga

SEQ ID NO: 1925121 - RNA, 19 nt, Artificial Sequence
  Description of Artificial Sequence: Synthetic oligonucleotide
  Antisense strand to SEQ ID NO: 1925120
ucucauagcuaauugacgu

SEQ ID NO: 1925122 - RNA, 19 nt, Artificial Sequence
  Description of Artificial Sequence: Synthetic oligonucleotide
  Sense strand starting at position 2581 of SEQ ID NO: 1879687
gucaauuagcuaugagacc

SEQ ID NO: 1925123 - RNA, 19 nt, Artificial Sequence
  Description of Artificial Sequence: Synthetic oligonucleotide
  Antisense strand to SEQ ID NO: 1925122
ggucucauagcuaauugac

SEQ ID NO: 1925124 - RNA, 19 nt, Artificial Sequence
  Description of Artificial Sequence: Synthetic oligonucleotide
  Sense strand starting at position 2582 of SEQ ID NO: 1879687
ucaauuagcuaugagaccu

SEQ ID NO: 1925125 - RNA, 19 nt, Artificial Sequence
  Description of Artificial Sequence: Synthetic oligonucleotide
  Antisense strand to SEQ ID NO: 1925124
aggucucauagcuaauuga

SEQ ID NO: 1925126 - RNA, 19 nt, Artificial Sequence
  Description of Artificial Sequence: Synthetic oligonucleotide
  Sense strand starting at position 2770 of SEQ ID NO: 1879687
aucaaaugcuuucugaugu

SEQ ID NO: 1925127 - RNA, 19 nt, Artificial Sequence
  Description of Artificial Sequence: Synthetic oligonucleotide
  Antisense strand to SEQ ID NO: 1925126
acaucagaaagcauuugau

SEQ ID NO: 1925128 - RNA, 19 nt, Artificial Sequence
  Description of Artificial Sequence: Synthetic oligonucleotide
  Sense strand starting at position 2774 of SEQ ID NO: 1879687
aaugcuuucugaugugaua

SEQ ID NO: 1925129 - RNA, 19 nt, Artificial Sequence
  Description of Artificial Sequence: Synthetic oligonucleotide
  Antisense strand to SEQ ID NO: 1925128
uaucacaucagaaagcauu

SEQ ID NO: 1925130 - RNA, 19 nt, Artificial Sequence
  Description of Artificial Sequence: Synthetic oligonucleotide
  Sense strand starting at position 2811 of SEQ ID NO: 1879687
acaucucuccugggauaau

SEQ ID NO: 1925131 - RNA, 19 nt, Artificial Sequence
  Description of Artificial Sequence: Synthetic oligonucleotide
  Antisense strand to SEQ ID NO: 1925130
auuaucccaggagagaugu

SEQ ID NO: 1925132 - RNA, 19 nt, Artificial Sequence
  Description of Artificial Sequence: Synthetic oligonucleotide
  Sense strand starting at position 2838 of SEQ ID NO: 1879687
acuguauaagcucaugaaa

SEQ ID NO: 1925133 - RNA, 19 nt, Artificial Sequence
  Description of Artificial Sequence: Synthetic oligonucleotide
  Antisense strand to SEQ ID NO: 1925132
uuucaugagcuuauacagu

SEQ ID NO: 1925134 - RNA, 19 nt, Artificial Sequence
  Description of Artificial Sequence: Synthetic oligonucleotide
  Sense strand starting at position 2840 of SEQ ID NO: 1879687
uguauaagcucaugaaacc

SEQ ID NO: 1925135 - RNA, 19 nt, Artificial Sequence
  Description of Artificial Sequence: Synthetic oligonucleotide
  Antisense strand to SEQ ID NO: 1925134
gguuucaugagcuuauaca

SEQ ID NO: 1925136 - RNA, 19 nt, Artificial Sequence
  Description of Artificial Sequence: Synthetic oligonucleotide
  Sense strand starting at position 2841 of SEQ ID NO: 1879687
guauaagcucaugaaacca

SEQ ID NO: 1925137 - RNA, 19 nt, Artificial Sequence
  Description of Artificial Sequence: Synthetic oligonucleotide
  Antisense strand to SEQ ID NO: 1925136
ugguuucaugagcuuauac

SEQ ID NO: 1925138 - RNA, 19 nt, Artificial Sequence
  Description of Artificial Sequence: Synthetic oligonucleotide
  Sense strand starting at position 2890 of SEQ ID NO: 1879687
ugaggaccauucuaccaaa

SEQ ID NO: 1925139 - RNA, 19 nt, Artificial Sequence
  Description of Artificial Sequence: Synthetic oligonucleotide
  Antisense strand to SEQ ID NO: 1925138
uuugguagaaugguccuca

SEQ ID NO: 1925140 - RNA, 19 nt, Artificial Sequence
  Description of Artificial Sequence: Synthetic oligonucleotide
  Sense strand starting at position 2952 of SEQ ID NO: 1879687
uagggaacaucuccagguu

SEQ ID NO: 1925141 - RNA, 19 nt, Artificial Sequence
  Description of Artificial Sequence: Synthetic oligonucleotide
  Antisense strand to SEQ ID NO: 1925140
aaccuggagauguucccua

SEQ ID NO: 1925142 - RNA, 19 nt, Artificial Sequence
  Description of Artificial Sequence: Synthetic oligonucleotide
  Sense strand starting at position 2955 of SEQ ID NO: 1879687
ggaacaucuccagguuaaa

SEQ ID NO: 1925143 - RNA, 19 nt, Artificial Sequence
  Description of Artificial Sequence: Synthetic oligonucleotide
  Antisense strand to SEQ ID NO: 1925142
uuuaaccuggagauguucc

SEQ ID NO: 1925144 - RNA, 19 nt, Artificial Sequence
  Description of Artificial Sequence: Synthetic oligonucleotide
  Sense strand starting at position 2979 of SEQ ID NO: 1879687
ucauaucaaugguaaaugu

SEQ ID NO: 1925145 - RNA, 19 nt, Artificial Sequence
  Description of Artificial Sequence: Synthetic oligonucleotide
  Antisense strand to SEQ ID NO: 1925144
acauuuaccauugauauga

SEQ ID NO: 1925146 - RNA, 19 nt, Artificial Sequence
  Description of Artificial Sequence: Synthetic oligonucleotide
  Sense strand starting at position 2986 of SEQ ID NO: 1879687
aaugguaaaugucuugaau

SEQ ID NO: 1925147 - RNA, 19 nt, Artificial Sequence
  Description of Artificial Sequence: Synthetic oligonucleotide
  Antisense strand to SEQ ID NO: 1925146
auucaagacauuuaccauu

SEQ ID NO: 1925148 - RNA, 19 nt, Artificial Sequence
  Description of Artificial Sequence: Synthetic oligonucleotide
  Sense strand starting at position 2988 of SEQ ID NO: 1879687
ugguaaaugucuugaauuu

SEQ ID NO: 1925149 - RNA, 19 nt, Artificial Sequence
  Description of Artificial Sequence: Synthetic oligonucleotide
  Antisense strand to SEQ ID NO: 1925148
aaauucaagacauuuacca

SEQ ID NO: 1925150 - RNA, 19 nt, Artificial Sequence
  Description of Artificial Sequence: Synthetic oligonucleotide
  Sense strand starting at position 3012 of SEQ ID NO: 1879687
cugcauucugcugaugaau

SEQ ID NO: 1925151 - RNA, 19 nt, Artificial Sequence
  Description of Artificial Sequence: Synthetic oligonucleotide
  Antisense strand to SEQ ID NO: 1925150
auucaucagcagaaugcag

SEQ ID NO: 1925152 - RNA, 19 nt, Artificial Sequence
  Description of Artificial Sequence: Synthetic oligonucleotide
  Sense strand starting at position 3014 of SEQ ID NO: 1879687
gcauucugcugaugaauaa

SEQ ID NO: 1925153 - RNA, 19 nt, Artificial Sequence
  Description of Artificial Sequence: Synthetic oligonucleotide
  Antisense strand to SEQ ID NO: 1925152
uuauucaucagcagaaugc

SEQ ID NO: 1925154 - RNA, 19 nt, Artificial Sequence
  Description of Artificial Sequence: Synthetic oligonucleotide
  Sense strand starting at position 3194 of SEQ ID NO: 1879687
acgccuaguccagagacau

SEQ ID NO: 1925155 - RNA, 19 nt, Artificial Sequence
  Description of Artificial Sequence: Synthetic oligonucleotide
  Antisense strand to SEQ ID NO: 1925154
augucucuggacuaggcgu

SEQ ID NO: 1925156 - RNA, 19 nt, Artificial Sequence
  Description of Artificial Sequence: Synthetic oligonucleotide
  Sense strand starting at position 3308 of SEQ ID NO: 1879687
ggaagggucgcuugaggua

SEQ ID NO: 1925157 - RNA, 19 nt, Artificial Sequence
  Description of Artificial Sequence: Synthetic oligonucleotide
  Antisense strand to SEQ ID NO: 1925156
uaccucaagcgacccuucc

SEQ ID NO: 1925158 - RNA, 19 nt, Artificial Sequence
  Description of Artificial Sequence: Synthetic oligonucleotide
  Sense strand starting at position 3445 of SEQ ID NO: 1879687
ggaauuggaggcugcaaau

SEQ ID NO: 1925159 - RNA, 19 nt, Artificial Sequence
  Description of Artificial Sequence: Synthetic oligonucleotide
  Antisense strand to SEQ ID NO: 1925158
auuugcagccuccaauucc

SEQ ID NO: 1925160 - RNA, 19 nt, Artificial Sequence
  Description of Artificial Sequence: Synthetic oligonucleotide
  Sense strand starting at position 3456 of SEQ ID NO: 1879687
cugcaaaugagcugugacu

SEQ ID NO: 1925161 - RNA, 19 nt, Artificial Sequence
  Description of Artificial Sequence: Synthetic oligonucleotide
  Antisense strand to SEQ ID NO: 1925160
agucacagcucauuugcag

SEQ ID NO: 1925162 - RNA, 19 nt, Artificial Sequence
  Description of Artificial Sequence: Synthetic oligonucleotide
  Sense strand starting at position 3458 of SEQ ID NO: 1879687
gcaaaugagcugugacugu

SEQ ID NO: 1925163 - RNA, 19 nt, Artificial Sequence
  Description of Artificial Sequence: Synthetic oligonucleotide
  Antisense strand to SEQ ID NO: 1925162
acagucacagcucauuugc

SEQ ID NO: 1925164 - RNA, 19 nt, Artificial Sequence
  Description of Artificial Sequence: Synthetic oligonucleotide
  Sense strand starting at position 3486 of SEQ ID NO: 1879687
cuuccaucuuggugacaga

SEQ ID NO: 1925165 - RNA, 19 nt, Artificial Sequence
  Description of Artificial Sequence: Synthetic oligonucleotide
  Antisense strand to SEQ ID NO: 1925164
ucugucaccaagauggaag

SEQ ID NO: 1925166 - RNA, 19 nt, Artificial Sequence
  Description of Artificial Sequence: Synthetic oligonucleotide
  Sense strand starting at position 3507 of SEQ ID NO: 1879687
aagaccucgucucuaaagu

SEQ ID NO: 1925167 - RNA, 19 nt, Artificial Sequence
  Description of Artificial Sequence: Synthetic oligonucleotide
  Antisense strand to SEQ ID NO: 1925166
acuuuagagacgaggucuu

SEQ ID NO: 1925168 - RNA, 19 nt, Artificial Sequence
  Description of Artificial Sequence: Synthetic oligonucleotide
  Sense strand starting at position 3508 of SEQ ID NO: 1879687
agaccucgucucuaaagua

SEQ ID NO: 1925169 - RNA, 19 nt, Artificial Sequence
  Description of Artificial Sequence: Synthetic oligonucleotide
  Antisense strand to SEQ ID NO: 1925168
uacuuuagagacgaggucu

SEQ ID NO: 1925170 - RNA, 19 nt, Artificial Sequence
  Description of Artificial Sequence: Synthetic oligonucleotide
  Sense strand starting at position 3595 of SEQ ID NO: 1879687
gauggcaggucauucuaaa

SEQ ID NO: 1925171 - RNA, 19 nt, Artificial Sequence
  Description of Artificial Sequence: Synthetic oligonucleotide
  Antisense strand to SEQ ID NO: 1925170
uuuagaaugaccugccauc

SEQ ID NO: 1925172 - RNA, 19 nt, Artificial Sequence
  Description of Artificial Sequence: Synthetic oligonucleotide
  Sense strand starting at position 3665 of SEQ ID NO: 1879687
guacccaagugucaucauu

SEQ ID NO: 1925173 - RNA, 19 nt, Artificial Sequence
  Description of Artificial Sequence: Synthetic oligonucleotide
  Antisense strand to SEQ ID NO: 1925172
aaugaugacacuuggguac

SEQ ID NO: 1925174 - RNA, 19 nt, Artificial Sequence
  Description of Artificial Sequence: Synthetic oligonucleotide
  Sense strand starting at position 3671 of SEQ ID NO: 1879687
aagugucaucauugggaag

SEQ ID NO: 1925175 - RNA, 19 nt, Artificial Sequence
  Description of Artificial Sequence: Synthetic oligonucleotide
  Antisense strand to SEQ ID NO: 1925174
cuucccaaugaugacacuu

SEQ ID NO: 1925176 - RNA, 19 nt, Artificial Sequence
  Description of Artificial Sequence: Synthetic oligonucleotide
  Sense strand starting at position 3672 of SEQ ID NO: 1879687
agugucaucauugggaagu

SEQ ID NO: 1925177 - RNA, 19 nt, Artificial Sequence
  Description of Artificial Sequence: Synthetic oligonucleotide
  Antisense strand to SEQ ID NO: 1925176
acuucccaaugaugacacu

SEQ ID NO: 1925178 - RNA, 19 nt, Artificial Sequence
  Description of Artificial Sequence: Synthetic oligonucleotide
  Sense strand starting at position 3673 of SEQ ID NO: 1879687
gugucaucauugggaagug

SEQ ID NO: 1925179 - RNA, 19 nt, Artificial Sequence
  Description of Artificial Sequence: Synthetic oligonucleotide
  Antisense strand to SEQ ID NO: 1925178
cacuucccaaugaugacac

SEQ ID NO: 1925180 - RNA, 19 nt, Artificial Sequence
  Description of Artificial Sequence: Synthetic oligonucleotide
  Sense strand starting at position 3674 of SEQ ID NO: 1879687
ugucaucauugggaaguga

SEQ ID NO: 1925181 - RNA, 19 nt, Artificial Sequence
  Description of Artificial Sequence: Synthetic oligonucleotide
  Antisense strand to SEQ ID NO: 1925180
ucacuucccaaugaugaca

SEQ ID NO: 1925182 - RNA, 19 nt, Artificial Sequence
  Description of Artificial Sequence: Synthetic oligonucleotide
  Sense strand starting at position 3678 of SEQ ID NO: 1879687
aucauugggaagugauagu

SEQ ID NO: 1925183 - RNA, 19 nt, Artificial Sequence
  Description of Artificial Sequence: Synthetic oligonucleotide
  Antisense strand to SEQ ID NO: 1925182
acuaucacuucccaaugau

SEQ ID NO: 1925184 - RNA, 19 nt, Artificial Sequence
  Description of Artificial Sequence: Synthetic oligonucleotide
  Sense strand starting at position 3800 of SEQ ID NO: 1879687
acguguagguggaaagguu

SEQ ID NO: 1925185 - RNA, 19 nt, Artificial Sequence
  Description of Artificial Sequence: Synthetic oligonucleotide
  Antisense strand to SEQ ID NO: 1925184
aaccuuuccaccuacacgu

SEQ ID NO: 1925186 - RNA, 19 nt, Artificial Sequence
  Description of Artificial Sequence: Synthetic oligonucleotide
  Sense strand starting at position 129 of SEQ ID NO: 1879688
ugacaauggacaugugcaa

SEQ ID NO: 1925187 - RNA, 19 nt, Artificial Sequence
  Description of Artificial Sequence: Synthetic oligonucleotide
  Antisense strand to SEQ ID NO: 1925186
uugcacauguccauuguca

SEQ ID NO: 1925188 - RNA, 19 nt, Artificial Sequence
  Description of Artificial Sequence: Synthetic oligonucleotide
  Sense strand starting at position 387 of SEQ ID NO: 1879688
ccugauacaugguauaugu

SEQ ID NO: 1925189 - RNA, 19 nt, Artificial Sequence
  Description of Artificial Sequence: Synthetic oligonucleotide
  Antisense strand to SEQ ID NO: 1925188
acauauaccauguaucagg

SEQ ID NO: 1925190 - RNA, 19 nt, Artificial Sequence
  Description of Artificial Sequence: Synthetic oligonucleotide
  Sense strand starting at position 389 of SEQ ID NO: 1879688
ugauacaugguauauguau

SEQ ID NO: 1925191 - RNA, 19 nt, Artificial Sequence
  Description of Artificial Sequence: Synthetic oligonucleotide
  Antisense strand to SEQ ID NO: 1925190
auacauauaccauguauca

SEQ ID NO: 1925192 - RNA, 19 nt, Artificial Sequence
  Description of Artificial Sequence: Synthetic oligonucleotide
  Sense strand starting at position 395 of SEQ ID NO: 1879688
augguauauguaugaguga

SEQ ID NO: 1925193 - RNA, 19 nt, Artificial Sequence
  Description of Artificial Sequence: Synthetic oligonucleotide
  Antisense strand to SEQ ID NO: 1925192
ucacucauacauauaccau

SEQ ID NO: 1925194 - RNA, 19 nt, Artificial Sequence
  Description of Artificial Sequence: Synthetic oligonucleotide
  Sense strand starting at position 396 of SEQ ID NO: 1879688
ugguauauguaugagugaa

SEQ ID NO: 1925195 - RNA, 19 nt, Artificial Sequence
  Description of Artificial Sequence: Synthetic oligonucleotide
  Antisense strand to SEQ ID NO: 1925194
uucacucauacauauacca

SEQ ID NO: 1925196 - RNA, 19 nt, Artificial Sequence
  Description of Artificial Sequence: Synthetic oligonucleotide
  Sense strand starting at position 398 of SEQ ID NO: 1879688
guauauguaugagugaaug

SEQ ID NO: 1925197 - RNA, 19 nt, Artificial Sequence
  Description of Artificial Sequence: Synthetic oligonucleotide
  Antisense strand to SEQ ID NO: 1925196
cauucacucauacauauac

SEQ ID NO: 1925198 - RNA, 19 nt, Artificial Sequence
  Description of Artificial Sequence: Synthetic oligonucleotide
  Sense strand starting at position 522 of SEQ ID NO: 1879688
cacugucuccgugaacauc

SEQ ID NO: 1925199 - RNA, 19 nt, Artificial Sequence
  Description of Artificial Sequence: Synthetic oligonucleotide
  Antisense strand to SEQ ID NO: 1925198
gauguucacggagacagug

SEQ ID NO: 1925200 - RNA, 19 nt, Artificial Sequence
  Description of Artificial Sequence: Synthetic oligonucleotide
  Sense strand starting at position 530 of SEQ ID NO: 1879688
ccgugaacauccucaucaa

SEQ ID NO: 1925201 - RNA, 19 nt, Artificial Sequence
  Description of Artificial Sequence: Synthetic oligonucleotide
  Antisense strand to SEQ ID NO: 1925200
uugaugaggauguucacgg

SEQ ID NO: 1925202 - RNA, 19 nt, Artificial Sequence
  Description of Artificial Sequence: Synthetic oligonucleotide
  Sense strand starting at position 612 of SEQ ID NO: 1879688
cucacuuuguugucuaauc

SEQ ID NO: 1925203 - RNA, 19 nt, Artificial Sequence
  Description of Artificial Sequence: Synthetic oligonucleotide
  Antisense strand to SEQ ID NO: 1925202
gauuagacaacaaagugag

SEQ ID NO: 1925204 - RNA, 19 nt, Artificial Sequence
  Description of Artificial Sequence: Synthetic oligonucleotide
  Sense strand starting at position 613 of SEQ ID NO: 1879688
ucacuuuguugucuaauca

SEQ ID NO: 1925205 - RNA, 19 nt, Artificial Sequence
  Description of Artificial Sequence: Synthetic oligonucleotide
  Antisense strand to SEQ ID NO: 1925204
ugauuagacaacaaaguga

SEQ ID NO: 1925206 - RNA, 19 nt, Artificial Sequence
  Description of Artificial Sequence: Synthetic oligonucleotide
  Sense strand starting at position 617 of SEQ ID NO: 1879688
uuuguugucuaaucaaucu

SEQ ID NO: 1925207 - RNA, 19 nt, Artificial Sequence
  Description of Artificial Sequence: Synthetic oligonucleotide
  Antisense strand to SEQ ID NO: 1925206
agauugauuagacaacaaa

SEQ ID NO: 1925208 - RNA, 19 nt, Artificial Sequence
  Description of Artificial Sequence: Synthetic oligonucleotide
  Sense strand starting at position 660 of SEQ ID NO: 1879688
ggaauacccucugauucca

SEQ ID NO: 1925209 - RNA, 19 nt, Artificial Sequence
  Description of Artificial Sequence: Synthetic oligonucleotide
  Antisense strand to SEQ ID NO: 1925208
uggaaucagaggguauucc

SEQ ID NO: 1925210 - RNA, 19 nt, Artificial Sequence
  Description of Artificial Sequence: Synthetic oligonucleotide
  Sense strand starting at position 740 of SEQ ID NO: 1879688
aguccuuccucacugugaa

SEQ ID NO: 1925211 - RNA, 19 nt, Artificial Sequence
  Description of Artificial Sequence: Synthetic oligonucleotide
  Antisense strand to SEQ ID NO: 1925210
uucacagugaggaaggacu

SEQ ID NO: 1925212 - RNA, 19 nt, Artificial Sequence
  Description of Artificial Sequence: Synthetic oligonucleotide
  Sense strand starting at position 741 of SEQ ID NO: 1879688
guccuuccucacugugaaa

SEQ ID NO: 1925213 - RNA, 19 nt, Artificial Sequence
  Description of Artificial Sequence: Synthetic oligonucleotide
  Antisense strand to SEQ ID NO: 1925212
uuucacagugaggaaggac

SEQ ID NO: 1925214 - RNA, 19 nt, Artificial Sequence
  Description of Artificial Sequence: Synthetic oligonucleotide
  Sense strand starting at position 754 of SEQ ID NO: 1879688
gugaaagcagagugauauu

SEQ ID NO: 1925215 - RNA, 19 nt, Artificial Sequence
  Description of Artificial Sequence: Synthetic oligonucleotide
  Antisense strand to SEQ ID NO: 1925214
aauaucacucugcuuucac

SEQ ID NO: 1925216 - RNA, 19 nt, Artificial Sequence
  Description of Artificial Sequence: Synthetic oligonucleotide
  Sense strand starting at position 757 of SEQ ID NO: 1879688
aaagcagagugauauuucu

SEQ ID NO: 1925217 - RNA, 19 nt, Artificial Sequence
  Description of Artificial Sequence: Synthetic oligonucleotide
  Antisense strand to SEQ ID NO: 1925216
agaaauaucacucugcuuu

SEQ ID NO: 1925218 - RNA, 19 nt, Artificial Sequence
  Description of Artificial Sequence: Synthetic oligonucleotide
  Sense strand starting at position 763 of SEQ ID NO: 1879688
gagugauauuucuacccug

SEQ ID NO: 1925219 - RNA, 19 nt, Artificial Sequence
  Description of Artificial Sequence: Synthetic oligonucleotide
  Antisense strand to SEQ ID NO: 1925218
caggguagaaauaucacuc

SEQ ID NO: 1925220 - RNA, 19 nt, Artificial Sequence
  Description of Artificial Sequence: Synthetic oligonucleotide
  Sense strand starting at position 818 of SEQ ID NO: 1879688
ucccgcuucccucaggaua

SEQ ID NO: 1925221 - RNA, 19 nt, Artificial Sequence
  Description of Artificial Sequence: Synthetic oligonucleotide
  Antisense strand to SEQ ID NO: 1925220
uauccugagggaagcggga

SEQ ID NO: 1925222 - RNA, 19 nt, Artificial Sequence
  Description of Artificial Sequence: Synthetic oligonucleotide
  Sense strand starting at position 1195 of SEQ ID NO: 1879688
agagaauacgcaugucacu

SEQ ID NO: 1925223 - RNA, 19 nt, Artificial Sequence
  Description of Artificial Sequence: Synthetic oligonucleotide
  Antisense strand to SEQ ID NO: 1925222
agugacaugcguauucucu

SEQ ID NO: 1925224 - RNA, 19 nt, Artificial Sequence
  Description of Artificial Sequence: Synthetic oligonucleotide
  Sense strand starting at position 1215 of SEQ ID NO: 1879688
ucuccagugaguuguucuu

SEQ ID NO: 1925225 - RNA, 19 nt, Artificial Sequence
  Description of Artificial Sequence: Synthetic oligonucleotide
  Antisense strand to SEQ ID NO: 1925224
aagaacaacucacuggaga

SEQ ID NO: 1925226 - RNA, 19 nt, Artificial Sequence
  Description of Artificial Sequence: Synthetic oligonucleotide
  Sense strand starting at position 1221 of SEQ ID NO: 1879688
gugaguuguucuuuccacu

SEQ ID NO: 1925227 - RNA, 19 nt, Artificial Sequence
  Description of Artificial Sequence: Synthetic oligonucleotide
  Antisense strand to SEQ ID NO: 1925226
aguggaaagaacaacucac

SEQ ID NO: 1925228 - RNA, 19 nt, Artificial Sequence
  Description of Artificial Sequence: Synthetic oligonucleotide
  Sense strand starting at position 1433 of SEQ ID NO: 1879688
gugggcagccacugauaua

SEQ ID NO: 1925229 - RNA, 19 nt, Artificial Sequence
  Description of Artificial Sequence: Synthetic oligonucleotide
  Antisense strand to SEQ ID NO: 1925228
uauaucaguggcugcccac

SEQ ID NO: 1925230 - RNA, 19 nt, Artificial Sequence
  Description of Artificial Sequence: Synthetic oligonucleotide
  Sense strand starting at position 1984 of SEQ ID NO: 1879688
cuuguaucugcuuguagag

SEQ ID NO: 1925231 - RNA, 19 nt, Artificial Sequence
  Description of Artificial Sequence: Synthetic oligonucleotide
  Antisense strand to SEQ ID NO: 1925230
cucuacaagcagauacaag

SEQ ID NO: 1925232 - RNA, 19 nt, Artificial Sequence
  Description of Artificial Sequence: Synthetic oligonucleotide
  Sense strand starting at position 2122 of SEQ ID NO: 1879688
gagacagguuagugaauga

SEQ ID NO: 1925233 - RNA, 19 nt, Artificial Sequence
  Description of Artificial Sequence: Synthetic oligonucleotide
  Antisense strand to SEQ ID NO: 1925232
ucauucacuaaccugucuc

SEQ ID NO: 1925234 - RNA, 19 nt, Artificial Sequence
  Description of Artificial Sequence: Synthetic oligonucleotide
  Sense strand starting at position 2126 of SEQ ID NO: 1879688
cagguuagugaaugaugca

SEQ ID NO: 1925235 - RNA, 19 nt, Artificial Sequence
  Description of Artificial Sequence: Synthetic oligonucleotide
  Antisense strand to SEQ ID NO: 1925234
ugcaucauucacuaaccug

SEQ ID NO: 1925236 - RNA, 19 nt, Artificial Sequence
  Description of Artificial Sequence: Synthetic oligonucleotide
  Sense strand starting at position 2133 of SEQ ID NO: 1879688
gugaaugaugcaggucaaa

SEQ ID NO: 1925237 - RNA, 19 nt, Artificial Sequence
  Description of Artificial Sequence: Synthetic oligonucleotide
  Antisense strand to SEQ ID NO: 1925236
uuugaccugcaucauucac

SEQ ID NO: 1925238 - RNA, 19 nt, Artificial Sequence
  Description of Artificial Sequence: Synthetic oligonucleotide
  Sense strand starting at position 2473 of SEQ ID NO: 1879688
aguccucugccucaagauu

SEQ ID NO: 1925239 - RNA, 19 nt, Artificial Sequence
  Description of Artificial Sequence: Synthetic oligonucleotide
  Antisense strand to SEQ ID NO: 1925238
aaucuugaggcagaggacu

SEQ ID NO: 1925240 - RNA, 19 nt, Artificial Sequence
  Description of Artificial Sequence: Synthetic oligonucleotide
  Sense strand starting at position 2484 of SEQ ID NO: 1879688
ucaagauucuuggugcuuu

SEQ ID NO: 1925241 - RNA, 19 nt, Artificial Sequence
  Description of Artificial Sequence: Synthetic oligonucleotide
  Antisense strand to SEQ ID NO: 1925240
aaagcaccaagaaucuuga

SEQ ID NO: 1925242 - RNA, 19 nt, Artificial Sequence
  Description of Artificial Sequence: Synthetic oligonucleotide
  Sense strand starting at position 2628 of SEQ ID NO: 1879688
gccagaggucgcuaagcau

SEQ ID NO: 1925243 - RNA, 19 nt, Artificial Sequence
  Description of Artificial Sequence: Synthetic oligonucleotide
  Antisense strand to SEQ ID NO: 1925242
augcuuagcgaccucuggc

SEQ ID NO: 1925244 - RNA, 19 nt, Artificial Sequence
  Description of Artificial Sequence: Synthetic oligonucleotide
  Sense strand starting at position 2687 of SEQ ID NO: 1879688
gcuggagucauccagacag

SEQ ID NO: 1925245 - RNA, 19 nt, Artificial Sequence
  Description of Artificial Sequence: Synthetic oligonucleotide
  Antisense strand to SEQ ID NO: 1925244
cugucuggaugacuccagc

SEQ ID NO: 1925246 - RNA, 19 nt, Artificial Sequence
  Description of Artificial Sequence: Synthetic oligonucleotide
  Sense strand starting at position 2689 of SEQ ID NO: 1879688
uggagucauccagacagug

SEQ ID NO: 1925247 - RNA, 19 nt, Artificial Sequence
  Description of Artificial Sequence: Synthetic oligonucleotide
  Antisense strand to SEQ ID NO: 1925246
cacugucuggaugacucca

SEQ ID NO: 1925248 - RNA, 19 nt, Artificial Sequence
  Description of Artificial Sequence: Synthetic oligonucleotide
  Sense strand starting at position 2747 of SEQ ID NO: 1879688
gcuuccuauugcucucaga

SEQ ID NO: 1925249 - RNA, 19 nt, Artificial Sequence
  Description of Artificial Sequence: Synthetic oligonucleotide
  Antisense strand to SEQ ID NO: 1925248
ucugagagcaauaggaagc

SEQ ID NO: 1925250 - RNA, 19 nt, Artificial Sequence
  Description of Artificial Sequence: Synthetic oligonucleotide
  Sense strand starting at position 3223 of SEQ ID NO: 1879688
aguggcaugucuguuaaag

SEQ ID NO: 1925251 - RNA, 19 nt, Artificial Sequence
  Description of Artificial Sequence: Synthetic oligonucleotide
  Antisense strand to SEQ ID NO: 1925250
cuuuaacagacaugccacu

SEQ ID NO: 1925252 - RNA, 19 nt, Artificial Sequence
  Description of Artificial Sequence: Synthetic oligonucleotide
  Sense strand starting at position 3229 of SEQ ID NO: 1879688
augucuguuaaaggaguga

SEQ ID NO: 1925253 - RNA, 19 nt, Artificial Sequence
  Description of Artificial Sequence: Synthetic oligonucleotide
  Antisense strand to SEQ ID NO: 1925252
ucacuccuuuaacagacau

SEQ ID NO: 1925254 - RNA, 19 nt, Artificial Sequence
  Description of Artificial Sequence: Synthetic oligonucleotide
  Sense strand starting at position 3233 of SEQ ID NO: 1879688
cuguuaaaggagugaauga

SEQ ID NO: 1925255 - RNA, 19 nt, Artificial Sequence
  Description of Artificial Sequence: Synthetic oligonucleotide
  Antisense strand to SEQ ID NO: 1925254
ucauucacuccuuuaacag

SEQ ID NO: 1925256 - RNA, 19 nt, Artificial Sequence
  Description of Artificial Sequence: Synthetic oligonucleotide
  Sense strand starting at position 3406 of SEQ ID NO: 1879688
augggaucauguccaccau

SEQ ID NO: 1925257 - RNA, 19 nt, Artificial Sequence
  Description of Artificial Sequence: Synthetic oligonucleotide
  Antisense strand to SEQ ID NO: 1925256
augguggacaugaucccau

SEQ ID NO: 1925258 - RNA, 19 nt, Artificial Sequence
  Description of Artificial Sequence: Synthetic oligonucleotide
  Sense strand starting at position 3570 of SEQ ID NO: 1879688
ccauauuaauugucguaug

SEQ ID NO: 1925259 - RNA, 19 nt, Artificial Sequence
  Description of Artificial Sequence: Synthetic oligonucleotide
  Antisense strand to SEQ ID NO: 1925258
cauacgacaauuaauaugg

SEQ ID NO: 1925260 - RNA, 19 nt, Artificial Sequence
  Description of Artificial Sequence: Synthetic oligonucleotide
  Sense strand starting at position 3614 of SEQ ID NO: 1879688
ucccaaauuucguaagaaa

SEQ ID NO: 1925261 - RNA, 19 nt, Artificial Sequence
  Description of Artificial Sequence: Synthetic oligonucleotide
  Antisense strand to SEQ ID NO: 1925260
uuucuuacgaaauuuggga

SEQ ID NO: 1925262 - RNA, 19 nt, Artificial Sequence
  Description of Artificial Sequence: Synthetic oligonucleotide
  Sense strand starting at position 3730 of SEQ ID NO: 1879688
uccacuuaccagugaccua

SEQ ID NO: 1925263 - RNA, 19 nt, Artificial Sequence
  Description of Artificial Sequence: Synthetic oligonucleotide
  Antisense strand to SEQ ID NO: 1925262
uaggucacugguaagugga

SEQ ID NO: 1925264 - RNA, 19 nt, Artificial Sequence
  Description of Artificial Sequence: Synthetic oligonucleotide
  Sense strand starting at position 3785 of SEQ ID NO: 1879688
gggcucagcagucauggaa

SEQ ID NO: 1925265 - RNA, 19 nt, Artificial Sequence
  Description of Artificial Sequence: Synthetic oligonucleotide
  Antisense strand to SEQ ID NO: 1925264
uuccaugacugcugagccc

SEQ ID NO: 1925266 - RNA, 19 nt, Artificial Sequence
  Description of Artificial Sequence: Synthetic oligonucleotide
  Sense strand starting at position 67 of SEQ ID NO: 1879689
aagguuggguaaguauaaa

SEQ ID NO: 1925267 - RNA, 19 nt, Artificial Sequence
  Description of Artificial Sequence: Synthetic oligonucleotide
  Antisense strand to SEQ ID NO: 1925266
uuuauacuuacccaaccuu

SEQ ID NO: 1925268 - RNA, 19 nt, Artificial Sequence
  Description of Artificial Sequence: Synthetic oligonucleotide
  Sense strand starting at position 287 of SEQ ID NO: 1879689
uccagaguuucugucagaa

SEQ ID NO: 1925269 - RNA, 19 nt, Artificial Sequence
  Description of Artificial Sequence: Synthetic oligonucleotide
  Antisense strand to SEQ ID NO: 1925268
uucugacagaaacucugga

SEQ ID NO: 1925270 - RNA, 19 nt, Artificial Sequence
  Description of Artificial Sequence: Synthetic oligonucleotide
  Sense strand starting at position 397 of SEQ ID NO: 1879689
gcuuauauagcuuagagaa

SEQ ID NO: 1925271 - RNA, 19 nt, Artificial Sequence
  Description of Artificial Sequence: Synthetic oligonucleotide
  Antisense strand to SEQ ID NO: 1925270
uucucuaagcuauauaagc

SEQ ID NO: 1925272 - RNA, 19 nt, Artificial Sequence
  Description of Artificial Sequence: Synthetic oligonucleotide
  Sense strand starting at position 451 of SEQ ID NO: 1879689
cuauaauguggucaaugug

SEQ ID NO: 1925273 - RNA, 19 nt, Artificial Sequence
  Description of Artificial Sequence: Synthetic oligonucleotide
  Antisense strand to SEQ ID NO: 1925272
cacauugaccacauuauag

SEQ ID NO: 1925274 - RNA, 19 nt, Artificial Sequence
  Description of Artificial Sequence: Synthetic oligonucleotide
  Sense strand starting at position 755 of SEQ ID NO: 1879689
gcugauaguagguaagguu

SEQ ID NO: 1925275 - RNA, 19 nt, Artificial Sequence
  Description of Artificial Sequence: Synthetic oligonucleotide
  Antisense strand to SEQ ID NO: 1925274
aaccuuaccuacuaucagc

SEQ ID NO: 1925276 - RNA, 19 nt, Artificial Sequence
  Description of Artificial Sequence: Synthetic oligonucleotide
  Sense strand starting at position 762 of SEQ ID NO: 1879689
guagguaagguucacagua

SEQ ID NO: 1925277 - RNA, 19 nt, Artificial Sequence
  Description of Artificial Sequence: Synthetic oligonucleotide
  Antisense strand to SEQ ID NO: 1925276
uacugugaaccuuaccuac

SEQ ID NO: 1925278 - RNA, 19 nt, Artificial Sequence
  Description of Artificial Sequence: Synthetic oligonucleotide
  Sense strand starting at position 1279 of SEQ ID NO: 1879689
gagguaauauacccgauua

SEQ ID NO: 1925279 - RNA, 19 nt, Artificial Sequence
  Description of Artificial Sequence: Synthetic oligonucleotide
  Antisense strand to SEQ ID NO: 1925278
uaaucggguauauuaccuc

SEQ ID NO: 1925280 - RNA, 19 nt, Artificial Sequence
  Description of Artificial Sequence: Synthetic oligonucleotide
  Sense strand starting at position 1280 of SEQ ID NO: 1879689
agguaauauacccgauuag

SEQ ID NO: 1925281 - RNA, 19 nt, Artificial Sequence
  Description of Artificial Sequence: Synthetic oligonucleotide
  Antisense strand to SEQ ID NO: 1925280
cuaaucggguauauuaccu

SEQ ID NO: 1925282 - RNA, 19 nt, Artificial Sequence
  Description of Artificial Sequence: Synthetic oligonucleotide
  Sense strand starting at position 1322 of SEQ ID NO: 1879689
augaaauuaccugagccuu

SEQ ID NO: 1925283 - RNA, 19 nt, Artificial Sequence
  Description of Artificial Sequence: Synthetic oligonucleotide
  Antisense strand to SEQ ID NO: 1925282
aaggcucagguaauuucau

SEQ ID NO: 1925284 - RNA, 19 nt, Artificial Sequence
  Description of Artificial Sequence: Synthetic oligonucleotide
  Sense strand starting at position 1347 of SEQ ID NO: 1879689
acaguacugugaucuaaga

SEQ ID NO: 1925285 - RNA, 19 nt, Artificial Sequence
  Description of Artificial Sequence: Synthetic oligonucleotide
  Antisense strand to SEQ ID NO: 1925284
ucuuagaucacaguacugu

SEQ ID NO: 1925286 - RNA, 19 nt, Artificial Sequence
  Description of Artificial Sequence: Synthetic oligonucleotide
  Sense strand starting at position 1386 of SEQ ID NO: 1879689
ugcacuuuguuucuuauuu

SEQ ID NO: 1925287 - RNA, 19 nt, Artificial Sequence
  Description of Artificial Sequence: Synthetic oligonucleotide
  Antisense strand to SEQ ID NO: 1925286
aaauaagaaacaaagugca

SEQ ID NO: 1925288 - RNA, 19 nt, Artificial Sequence
  Description of Artificial Sequence: Synthetic oligonucleotide
  Sense strand starting at position 1390 of SEQ ID NO: 1879689
cuuuguuucuuauuugcua

SEQ ID NO: 1925289 - RNA, 19 nt, Artificial Sequence
  Description of Artificial Sequence: Synthetic oligonucleotide
  Antisense strand to SEQ ID NO: 1925288
uagcaaauaagaaacaaag

SEQ ID NO: 1925290 - RNA, 19 nt, Artificial Sequence
  Description of Artificial Sequence: Synthetic oligonucleotide
  Sense strand starting at position 1463 of SEQ ID NO: 1879689
agagauuggcauuggcaga

SEQ ID NO: 1925291 - RNA, 19 nt, Artificial Sequence
  Description of Artificial Sequence: Synthetic oligonucleotide
  Antisense strand to SEQ ID NO: 1925290
ucugccaaugccaaucucu

SEQ ID NO: 1925292 - RNA, 19 nt, Artificial Sequence
  Description of Artificial Sequence: Synthetic oligonucleotide
  Sense strand starting at position 1464 of SEQ ID NO: 1879689
gagauuggcauuggcagaa

SEQ ID NO: 1925293 - RNA, 19 nt, Artificial Sequence
  Description of Artificial Sequence: Synthetic oligonucleotide
  Antisense strand to SEQ ID NO: 1925292
uucugccaaugccaaucuc

SEQ ID NO: 1925294 - RNA, 19 nt, Artificial Sequence
  Description of Artificial Sequence: Synthetic oligonucleotide
  Sense strand starting at position 1516 of SEQ ID NO: 1879689
agcaguacucucuagagua

SEQ ID NO: 1925295 - RNA, 19 nt, Artificial Sequence
  Description of Artificial Sequence: Synthetic oligonucleotide
  Antisense strand to SEQ ID NO: 1925294
uacucuagagaguacugcu

SEQ ID NO: 1925296 - RNA, 19 nt, Artificial Sequence
  Description of Artificial Sequence: Synthetic oligonucleotide
  Sense strand starting at position 1518 of SEQ ID NO: 1879689
caguacucucuagaguaag

SEQ ID NO: 1925297 - RNA, 19 nt, Artificial Sequence
  Description of Artificial Sequence: Synthetic oligonucleotide
  Antisense strand to SEQ ID NO: 1925296
cuuacucuagagaguacug

SEQ ID NO: 1925298 - RNA, 19 nt, Artificial Sequence
  Description of Artificial Sequence: Synthetic oligonucleotide
  Sense strand starting at position 1773 of SEQ ID NO: 1879689
ggagaucaagguugaagua

SEQ ID NO: 1925299 - RNA, 19 nt, Artificial Sequence
  Description of Artificial Sequence: Synthetic oligonucleotide
  Antisense strand to SEQ ID NO: 1925298
uacuucaaccuugaucucc

SEQ ID NO: 1925300 - RNA, 19 nt, Artificial Sequence
  Description of Artificial Sequence: Synthetic oligonucleotide
  Sense strand starting at position 1783 of SEQ ID NO: 1879689
guugaaguaagcuaugauc

SEQ ID NO: 1925301 - RNA, 19 nt, Artificial Sequence
  Description of Artificial Sequence: Synthetic oligonucleotide
  Antisense strand to SEQ ID NO: 1925300
gaucauagcuuacuucaac

SEQ ID NO: 1925302 - RNA, 19 nt, Artificial Sequence
  Description of Artificial Sequence: Synthetic oligonucleotide
  Sense strand starting at position 1871 of SEQ ID NO: 1879689
ugguguuuacagcuucgua

SEQ ID NO: 1925303 - RNA, 19 nt, Artificial Sequence
  Description of Artificial Sequence: Synthetic oligonucleotide
  Antisense strand to SEQ ID NO: 1925302
uacgaagcuguaaacacca

SEQ ID NO: 1925304 - RNA, 19 nt, Artificial Sequence
  Description of Artificial Sequence: Synthetic oligonucleotide
  Sense strand starting at position 1872 of SEQ ID NO: 1879689
gguguuuacagcuucguau

SEQ ID NO: 1925305 - RNA, 19 nt, Artificial Sequence
  Description of Artificial Sequence: Synthetic oligonucleotide
  Antisense strand to SEQ ID NO: 1925304
auacgaagcuguaaacacc

SEQ ID NO: 1925306 - RNA, 19 nt, Artificial Sequence
  Description of Artificial Sequence: Synthetic oligonucleotide
  Sense strand starting at position 1873 of SEQ ID NO: 1879689
guguuuacagcuucguauu

SEQ ID NO: 1925307 - RNA, 19 nt, Artificial Sequence
  Description of Artificial Sequence: Synthetic oligonucleotide
  Antisense strand to SEQ ID NO: 1925306
aauacgaagcuguaaacac

SEQ ID NO: 1925308 - RNA, 19 nt, Artificial Sequence
  Description of Artificial Sequence: Synthetic oligonucleotide
  Sense strand starting at position 1900 of SEQ ID NO: 1879689
cgauaugugccagauauca

SEQ ID NO: 1925309 - RNA, 19 nt, Artificial Sequence
  Description of Artificial Sequence: Synthetic oligonucleotide
  Antisense strand to SEQ ID NO: 1925308
ugauaucuggcacauaucg

SEQ ID NO: 1925310 - RNA, 19 nt, Artificial Sequence
  Description of Artificial Sequence: Synthetic oligonucleotide
  Sense strand starting at position 1908 of SEQ ID NO: 1879689
gccagauaucacugcagac

SEQ ID NO: 1925311 - RNA, 19 nt, Artificial Sequence
  Description of Artificial Sequence: Synthetic oligonucleotide
  Antisense strand to SEQ ID NO: 1925310
gucugcagugauaucuggc

SEQ ID NO: 1925312 - RNA, 19 nt, Artificial Sequence
  Description of Artificial Sequence: Synthetic oligonucleotide
  Sense strand starting at position 1929 of SEQ ID NO: 1879689
guccuuauuugauagaaau

SEQ ID NO: 1925313 - RNA, 19 nt, Artificial Sequence
  Description of Artificial Sequence: Synthetic oligonucleotide
  Antisense strand to SEQ ID NO: 1925312
auuucuaucaaauaaggac

SEQ ID NO: 1925314 - RNA, 19 nt, Artificial Sequence
  Description of Artificial Sequence: Synthetic oligonucleotide
  Sense strand starting at position 2121 of SEQ ID NO: 1879689
uaagcuggucuacaaugau

SEQ ID NO: 1925315 - RNA, 19 nt, Artificial Sequence
  Description of Artificial Sequence: Synthetic oligonucleotide
  Antisense strand to SEQ ID NO: 1925314
aucauuguagaccagcuua

SEQ ID NO: 1925316 - RNA, 19 nt, Artificial Sequence
  Description of Artificial Sequence: Synthetic oligonucleotide
  Sense strand starting at position 2124 of SEQ ID NO: 1879689
gcuggucuacaaugaugga

SEQ ID NO: 1925317 - RNA, 19 nt, Artificial Sequence
  Description of Artificial Sequence: Synthetic oligonucleotide
  Antisense strand to SEQ ID NO: 1925316
uccaucauuguagaccagc

SEQ ID NO: 1925318 - RNA, 19 nt, Artificial Sequence
  Description of Artificial Sequence: Synthetic oligonucleotide
  Sense strand starting at position 2291 of SEQ ID NO: 1879689
uacgaaguucucugaauac

SEQ ID NO: 1925319 - RNA, 19 nt, Artificial Sequence
  Description of Artificial Sequence: Synthetic oligonucleotide
  Antisense strand to SEQ ID NO: 1925318
guauucagagaacuucgua

SEQ ID NO: 1925320 - RNA, 19 nt, Artificial Sequence
  Description of Artificial Sequence: Synthetic oligonucleotide
  Sense strand starting at position 2465 of SEQ ID NO: 1879689
ccgggagaaguaugacaga

SEQ ID NO: 1925321 - RNA, 19 nt, Artificial Sequence
  Description of Artificial Sequence: Synthetic oligonucleotide
  Antisense strand to SEQ ID NO: 1925320
ucugucauacuucucccgg

SEQ ID NO: 1925322 - RNA, 19 nt, Artificial Sequence
  Description of Artificial Sequence: Synthetic oligonucleotide
  Sense strand starting at position 2566 of SEQ ID NO: 1879689
gcuccucugauggaaggua

SEQ ID NO: 1925323 - RNA, 19 nt, Artificial Sequence
  Description of Artificial Sequence: Synthetic oligonucleotide
  Antisense strand to SEQ ID NO: 1925322
uaccuuccaucagaggagc

SEQ ID NO: 1925324 - RNA, 19 nt, Artificial Sequence
  Description of Artificial Sequence: Synthetic oligonucleotide
  Sense strand starting at position 2602 of SEQ ID NO: 1879689
caguuaucacaguacugua

SEQ ID NO: 1925325 - RNA, 19 nt, Artificial Sequence
  Description of Artificial Sequence: Synthetic oligonucleotide
  Antisense strand to SEQ ID NO: 1925324
uacaguacugugauaacug

SEQ ID NO: 1925326 - RNA, 19 nt, Artificial Sequence
  Description of Artificial Sequence: Synthetic oligonucleotide
  Sense strand starting at position 2610 of SEQ ID NO: 1879689
acaguacuguaccuuuaga

SEQ ID NO: 1925327 - RNA, 19 nt, Artificial Sequence
  Description of Artificial Sequence: Synthetic oligonucleotide
  Antisense strand to SEQ ID NO: 1925326
ucuaaagguacaguacugu

SEQ ID NO: 1925328 - RNA, 19 nt, Artificial Sequence
  Description of Artificial Sequence: Synthetic oligonucleotide
  Sense strand starting at position 2816 of SEQ ID NO: 1879689
aguggugaggcugaaauau

SEQ ID NO: 1925329 - RNA, 19 nt, Artificial Sequence
  Description of Artificial Sequence: Synthetic oligonucleotide
  Antisense strand to SEQ ID NO: 1925328
auauuucagccucaccacu

SEQ ID NO: 1925330 - RNA, 19 nt, Artificial Sequence
  Description of Artificial Sequence: Synthetic oligonucleotide
  Sense strand starting at position 2937 of SEQ ID NO: 1879689
ucaaauaugcaguaagcuu

SEQ ID NO: 1925331 - RNA, 19 nt, Artificial Sequence
  Description of Artificial Sequence: Synthetic oligonucleotide
  Antisense strand to SEQ ID NO: 1925330
aagcuuacugcauauuuga

SEQ ID NO: 1925332 - RNA, 19 nt, Artificial Sequence
  Description of Artificial Sequence: Synthetic oligonucleotide
  Sense strand starting at position 3045 of SEQ ID NO: 1879689
gaggaacuacuacguucua

SEQ ID NO: 1925333 - RNA, 19 nt, Artificial Sequence
  Description of Artificial Sequence: Synthetic oligonucleotide
  Antisense strand to SEQ ID NO: 1925332
uagaacguaguaguuccuc

SEQ ID NO: 1925334 - RNA, 19 nt, Artificial Sequence
  Description of Artificial Sequence: Synthetic oligonucleotide
  Sense strand starting at position 3046 of SEQ ID NO: 1879689
aggaacuacuacguucuaa

SEQ ID NO: 1925335 - RNA, 19 nt, Artificial Sequence
  Description of Artificial Sequence: Synthetic oligonucleotide
  Antisense strand to SEQ ID NO: 1925334
uuagaacguaguaguuccu

SEQ ID NO: 1925336 - RNA, 19 nt, Artificial Sequence
  Description of Artificial Sequence: Synthetic oligonucleotide
  Sense strand starting at position 3328 of SEQ ID NO: 1879689
uuugccagagaucauauau

SEQ ID NO: 1925337 - RNA, 19 nt, Artificial Sequence
  Description of Artificial Sequence: Synthetic oligonucleotide
  Antisense strand to SEQ ID NO: 1925336
auauaugaucucuggcaaa

SEQ ID NO: 1925338 - RNA, 19 nt, Artificial Sequence
  Description of Artificial Sequence: Synthetic oligonucleotide
  Sense strand starting at position 3349 of SEQ ID NO: 1879689
cuaaguuauggcgaaccca

SEQ ID NO: 1925339 - RNA, 19 nt, Artificial Sequence
  Description of Artificial Sequence: Synthetic oligonucleotide
  Antisense strand to SEQ ID NO: 1925338
uggguucgccauaacuuag

SEQ ID NO: 1925340 - RNA, 19 nt, Artificial Sequence
  Description of Artificial Sequence: Synthetic oligonucleotide
  Sense strand starting at position 3368 of SEQ ID NO: 1879689
uguccagaaccaugucaaa

SEQ ID NO: 1925341 - RNA, 19 nt, Artificial Sequence
  Description of Artificial Sequence: Synthetic oligonucleotide
  Antisense strand to SEQ ID NO: 1925340
uuugacaugguucuggaca

SEQ ID NO: 1925342 - RNA, 19 nt, Artificial Sequence
  Description of Artificial Sequence: Synthetic oligonucleotide
  Sense strand starting at position 3616 of SEQ ID NO: 1879689
guacucaaauuaguaacau

SEQ ID NO: 1925343 - RNA, 19 nt, Artificial Sequence
  Description of Artificial Sequence: Synthetic oligonucleotide
  Antisense strand to SEQ ID NO: 1925342
auguuacuaauuugaguac

SEQ ID NO: 1925344 - RNA, 19 nt, Artificial Sequence
  Description of Artificial Sequence: Synthetic oligonucleotide
  Sense strand starting at position 3662 of SEQ ID NO: 1879689
auucuauaccuauggugau

SEQ ID NO: 1925345 - RNA, 19 nt, Artificial Sequence
  Description of Artificial Sequence: Synthetic oligonucleotide
  Antisense strand to SEQ ID NO: 1925344
aucaccauagguauagaau

SEQ ID NO: 1925346 - RNA, 19 nt, Artificial Sequence
  Description of Artificial Sequence: Synthetic oligonucleotide
  Sense strand starting at position 112 of SEQ ID NO: 1879690
ugaagagucucauccagag

SEQ ID NO: 1925347 - RNA, 19 nt, Artificial Sequence
  Description of Artificial Sequence: Synthetic oligonucleotide
  Antisense strand to SEQ ID NO: 1925346
cucuggaugagacucuuca

SEQ ID NO: 1925348 - RNA, 19 nt, Artificial Sequence
  Description of Artificial Sequence: Synthetic oligonucleotide
  Sense strand starting at position 233 of SEQ ID NO: 1879690
gggcacuuucuggauugaa

SEQ ID NO: 1925349 - RNA, 19 nt, Artificial Sequence
  Description of Artificial Sequence: Synthetic oligonucleotide
  Antisense strand to SEQ ID NO: 1925348
uucaauccagaaagugccc

SEQ ID NO: 1925350 - RNA, 19 nt, Artificial Sequence
  Description of Artificial Sequence: Synthetic oligonucleotide
  Sense strand starting at position 298 of SEQ ID NO: 1879690
gaaacaacaugucugggua

SEQ ID NO: 1925351 - RNA, 19 nt, Artificial Sequence
  Description of Artificial Sequence: Synthetic oligonucleotide
  Antisense strand to SEQ ID NO: 1925350
uacccagacauguuguuuc

SEQ ID NO: 1925352 - RNA, 19 nt, Artificial Sequence
  Description of Artificial Sequence: Synthetic oligonucleotide
  Sense strand starting at position 299 of SEQ ID NO: 1879690
aaacaacaugucuggguau

SEQ ID NO: 1925353 - RNA, 19 nt, Artificial Sequence
  Description of Artificial Sequence: Synthetic oligonucleotide
  Antisense strand to SEQ ID NO: 1925352
auacccagacauguuguuu

SEQ ID NO: 1925354 - RNA, 19 nt, Artificial Sequence
  Description of Artificial Sequence: Synthetic oligonucleotide
  Sense strand starting at position 386 of SEQ ID NO: 1879690
auaggaugaugucccagua

SEQ ID NO: 1925355 - RNA, 19 nt, Artificial Sequence
  Description of Artificial Sequence: Synthetic oligonucleotide
  Antisense strand to SEQ ID NO: 1925354
uacugggacaucauccuau

SEQ ID NO: 1925356 - RNA, 19 nt, Artificial Sequence
  Description of Artificial Sequence: Synthetic oligonucleotide
  Sense strand starting at position 439 of SEQ ID NO: 1879690
agggauauaucaguaaagu

SEQ ID NO: 1925357 - RNA, 19 nt, Artificial Sequence
  Description of Artificial Sequence: Synthetic oligonucleotide
  Antisense strand to SEQ ID NO: 1925356
acuuuacugauauaucccu

SEQ ID NO: 1925358 - RNA, 19 nt, Artificial Sequence
  Description of Artificial Sequence: Synthetic oligonucleotide
  Sense strand starting at position 455 of SEQ ID NO: 1879690
aguaauaguacauauggua

SEQ ID NO: 1925359 - RNA, 19 nt, Artificial Sequence
  Description of Artificial Sequence: Synthetic oligonucleotide
  Antisense strand to SEQ ID NO: 1925358
uaccauauguacuauuacu

SEQ ID NO: 1925360 - RNA, 19 nt, Artificial Sequence
  Description of Artificial Sequence: Synthetic oligonucleotide
  Sense strand starting at position 462 of SEQ ID NO: 1879690
guacauaugguaugguaua

SEQ ID NO: 1925361 - RNA, 19 nt, Artificial Sequence
  Description of Artificial Sequence: Synthetic oligonucleotide
  Antisense strand to SEQ ID NO: 1925360
uauaccauaccauauguac

SEQ ID NO: 1925362 - RNA, 19 nt, Artificial Sequence
  Description of Artificial Sequence: Synthetic oligonucleotide
  Sense strand starting at position 525 of SEQ ID NO: 1879690
agugguaauacuggaauca

SEQ ID NO: 1925363 - RNA, 19 nt, Artificial Sequence
  Description of Artificial Sequence: Synthetic oligonucleotide
  Antisense strand to SEQ ID NO: 1925362
ugauuccaguauuaccacu

SEQ ID NO: 1925364 - RNA, 19 nt, Artificial Sequence
  Description of Artificial Sequence: Synthetic oligonucleotide
  Sense strand starting at position 590 of SEQ ID NO: 1879690
uucugagccuuugucauua

SEQ ID NO: 1925365 - RNA, 19 nt, Artificial Sequence
  Description of Artificial Sequence: Synthetic oligonucleotide
  Antisense strand to SEQ ID NO: 1925364
uaaugacaaaggcucagaa

SEQ ID NO: 1925366 - RNA, 19 nt, Artificial Sequence
  Description of Artificial Sequence: Synthetic oligonucleotide
  Sense strand starting at position 595 of SEQ ID NO: 1879690
agccuuugucauuaccuau

SEQ ID NO: 1925367 - RNA, 19 nt, Artificial Sequence
  Description of Artificial Sequence: Synthetic oligonucleotide
  Antisense strand to SEQ ID NO: 1925366
auagguaaugacaaaggcu

SEQ ID NO: 1925368 - RNA, 19 nt, Artificial Sequence
  Description of Artificial Sequence: Synthetic oligonucleotide
  Sense strand starting at position 647 of SEQ ID NO: 1879690
gguggauauuagguuuaca

SEQ ID NO: 1925369 - RNA, 19 nt, Artificial Sequence
  Description of Artificial Sequence: Synthetic oligonucleotide
  Antisense strand to SEQ ID NO: 1925368
uguaaaccuaauauccacc

SEQ ID NO: 1925370 - RNA, 19 nt, Artificial Sequence
  Description of Artificial Sequence: Synthetic oligonucleotide
  Sense strand starting at position 988 of SEQ ID NO: 1879690
aguacaagugcuuagaaug

SEQ ID NO: 1925371 - RNA, 19 nt, Artificial Sequence
  Description of Artificial Sequence: Synthetic oligonucleotide
  Antisense strand to SEQ ID NO: 1925370
cauucuaagcacuuguacu

SEQ ID NO: 1925372 - RNA, 19 nt, Artificial Sequence
  Description of Artificial Sequence: Synthetic oligonucleotide
  Sense strand starting at position 1043 of SEQ ID NO: 1879690
cauaguuaucaguguuauu

SEQ ID NO: 1925373 - RNA, 19 nt, Artificial Sequence
  Description of Artificial Sequence: Synthetic oligonucleotide
  Antisense strand to SEQ ID NO: 1925372
aauaacacugauaacuaug

SEQ ID NO: 1925374 - RNA, 19 nt, Artificial Sequence
  Description of Artificial Sequence: Synthetic oligonucleotide
  Sense strand starting at position 1048 of SEQ ID NO: 1879690
uuaucaguguuauugacac

SEQ ID NO: 1925375 - RNA, 19 nt, Artificial Sequence
  Description of Artificial Sequence: Synthetic oligonucleotide
  Antisense strand to SEQ ID NO: 1925374
gugucaauaacacugauaa

SEQ ID NO: 1925376 - RNA, 19 nt, Artificial Sequence
  Description of Artificial Sequence: Synthetic oligonucleotide
  Sense strand starting at position 1058 of SEQ ID NO: 1879690
uauugacacuuuguguuga

SEQ ID NO: 1925377 - RNA, 19 nt, Artificial Sequence
  Description of Artificial Sequence: Synthetic oligonucleotide
  Antisense strand to SEQ ID NO: 1925376
ucaacacaaagugucaaua

SEQ ID NO: 1925378 - RNA, 19 nt, Artificial Sequence
  Description of Artificial Sequence: Synthetic oligonucleotide
  Sense strand starting at position 1112 of SEQ ID NO: 1879690
aucuacugcuaaguaagaa

SEQ ID NO: 1925379 - RNA, 19 nt, Artificial Sequence
  Description of Artificial Sequence: Synthetic oligonucleotide
  Antisense strand to SEQ ID NO: 1925378
uucuuacuuagcaguagau

SEQ ID NO: 1925380 - RNA, 19 nt, Artificial Sequence
  Description of Artificial Sequence: Synthetic oligonucleotide
  Sense strand starting at position 1245 of SEQ ID NO: 1879690
aguugauggcaugagaguu

SEQ ID NO: 1925381 - RNA, 19 nt, Artificial Sequence
  Description of Artificial Sequence: Synthetic oligonucleotide
  Antisense strand to SEQ ID NO: 1925380
aacucucaugccaucaacu

SEQ ID NO: 1925382 - RNA, 19 nt, Artificial Sequence
  Description of Artificial Sequence: Synthetic oligonucleotide
  Sense strand starting at position 1263 of SEQ ID NO: 1879690
uuaugugauggccaugauu

SEQ ID NO: 1925383 - RNA, 19 nt, Artificial Sequence
  Description of Artificial Sequence: Synthetic oligonucleotide
  Antisense strand to SEQ ID NO: 1925382
aaucauggccaucacauaa

SEQ ID NO: 1925384 - RNA, 19 nt, Artificial Sequence
  Description of Artificial Sequence: Synthetic oligonucleotide
  Sense strand starting at position 1372 of SEQ ID NO: 1879690
gacuuaggaugagaugagu

SEQ ID NO: 1925385 - RNA, 19 nt, Artificial Sequence
  Description of Artificial Sequence: Synthetic oligonucleotide
  Antisense strand to SEQ ID NO: 1925384
acucaucucauccuaaguc

SEQ ID NO: 1925386 - RNA, 19 nt, Artificial Sequence
  Description of Artificial Sequence: Synthetic oligonucleotide
  Sense strand starting at position 1400 of SEQ ID NO: 1879690
cauugaguaucugcuguga

SEQ ID NO: 1925387 - RNA, 19 nt, Artificial Sequence
  Description of Artificial Sequence: Synthetic oligonucleotide
  Antisense strand to SEQ ID NO: 1925386
ucacagcagauacucaaug

SEQ ID NO: 1925388 - RNA, 19 nt, Artificial Sequence
  Description of Artificial Sequence: Synthetic oligonucleotide
  Sense strand starting at position 1404 of SEQ ID NO: 1879690
gaguaucugcugugaaucu

SEQ ID NO: 1925389 - RNA, 19 nt, Artificial Sequence
  Description of Artificial Sequence: Synthetic oligonucleotide
  Antisense strand to SEQ ID NO: 1925388
agauucacagcagauacuc

SEQ ID NO: 1925390 - RNA, 19 nt, Artificial Sequence
  Description of Artificial Sequence: Synthetic oligonucleotide
  Sense strand starting at position 1411 of SEQ ID NO: 1879690
ugcugugaaucucugugau

SEQ ID NO: 1925391 - RNA, 19 nt, Artificial Sequence
  Description of Artificial Sequence: Synthetic oligonucleotide
  Antisense strand to SEQ ID NO: 1925390
aucacagagauucacagca

SEQ ID NO: 1925392 - RNA, 19 nt, Artificial Sequence
  Description of Artificial Sequence: Synthetic oligonucleotide
  Sense strand starting at position 1435 of SEQ ID NO: 1879690
ugcuguaagggaugugaaa

SEQ ID NO: 1925393 - RNA, 19 nt, Artificial Sequence
  Description of Artificial Sequence: Synthetic oligonucleotide
  Antisense strand to SEQ ID NO: 1925392
uuucacaucccuuacagca

SEQ ID NO: 1925394 - RNA, 19 nt, Artificial Sequence
  Description of Artificial Sequence: Synthetic oligonucleotide
  Sense strand starting at position 1444 of SEQ ID NO: 1879690
ggaugugaaacgcagaacu

SEQ ID NO: 1925395 - RNA, 19 nt, Artificial Sequence
  Description of Artificial Sequence: Synthetic oligonucleotide
  Antisense strand to SEQ ID NO: 1925394
aguucugcguuucacaucc

SEQ ID NO: 1925396 - RNA, 19 nt, Artificial Sequence
  Description of Artificial Sequence: Synthetic oligonucleotide
  Sense strand starting at position 1446 of SEQ ID NO: 1879690
augugaaacgcagaacuau

SEQ ID NO: 1925397 - RNA, 19 nt, Artificial Sequence
  Description of Artificial Sequence: Synthetic oligonucleotide
  Antisense strand to SEQ ID NO: 1925396
auaguucugcguuucacau

SEQ ID NO: 1925398 - RNA, 19 nt, Artificial Sequence
  Description of Artificial Sequence: Synthetic oligonucleotide
  Sense strand starting at position 1471 of SEQ ID NO: 1879690
ucucacagaccuuacgauu

SEQ ID NO: 1925399 - RNA, 19 nt, Artificial Sequence
  Description of Artificial Sequence: Synthetic oligonucleotide
  Antisense strand to SEQ ID NO: 1925398
aaucguaaggucugugaga

SEQ ID NO: 1925400 - RNA, 19 nt, Artificial Sequence
  Description of Artificial Sequence: Synthetic oligonucleotide
  Sense strand starting at position 1485 of SEQ ID NO: 1879690
cgauuuaucuagggacaua

SEQ ID NO: 1925401 - RNA, 19 nt, Artificial Sequence
  Description of Artificial Sequence: Synthetic oligonucleotide
  Antisense strand to SEQ ID NO: 1925400
uaugucccuagauaaaucg

SEQ ID NO: 1925402 - RNA, 19 nt, Artificial Sequence
  Description of Artificial Sequence: Synthetic oligonucleotide
  Sense strand starting at position 3185 of SEQ ID NO: 1879690
ugguguagugguuauuaug

SEQ ID NO: 1925403 - RNA, 19 nt, Artificial Sequence
  Description of Artificial Sequence: Synthetic oligonucleotide
  Antisense strand to SEQ ID NO: 1925402
cauaauaaccacuacacca

SEQ ID NO: 1925404 - RNA, 19 nt, Artificial Sequence
  Description of Artificial Sequence: Synthetic oligonucleotide
  Sense strand starting at position 3192 of SEQ ID NO: 1879690
gugguuauuauguucgcuu

SEQ ID NO: 1925405 - RNA, 19 nt, Artificial Sequence
  Description of Artificial Sequence: Synthetic oligonucleotide
  Antisense strand to SEQ ID NO: 1925404
aagcgaacauaauaaccac

SEQ ID NO: 1925406 - RNA, 19 nt, Artificial Sequence
  Description of Artificial Sequence: Synthetic oligonucleotide
  Sense strand starting at position 3219 of SEQ ID NO: 1879690
aaaggucucugguucgaga

SEQ ID NO: 1925407 - RNA, 19 nt, Artificial Sequence
  Description of Artificial Sequence: Synthetic oligonucleotide
  Antisense strand to SEQ ID NO: 1925406
ucucgaaccagagaccuuu

SEQ ID NO: 1925408 - RNA, 19 nt, Artificial Sequence
  Description of Artificial Sequence: Synthetic oligonucleotide
  Sense strand starting at position 3289 of SEQ ID NO: 1879690
uagugaguuuaaucgaggu

SEQ ID NO: 1925409 - RNA, 19 nt, Artificial Sequence
  Description of Artificial Sequence: Synthetic oligonucleotide
  Antisense strand to SEQ ID NO: 1925408
accucgauuaaacucacua

SEQ ID NO: 1925410 - RNA, 19 nt, Artificial Sequence
  Description of Artificial Sequence: Synthetic oligonucleotide
  Sense strand starting at position 3359 of SEQ ID NO: 1879690
ucaaucuagagagaucguu

SEQ ID NO: 1925411 - RNA, 19 nt, Artificial Sequence
  Description of Artificial Sequence: Synthetic oligonucleotide
  Antisense strand to SEQ ID NO: 1925410
aacgaucucucuagauuga

SEQ ID NO: 1925412 - RNA, 19 nt, Artificial Sequence
  Description of Artificial Sequence: Synthetic oligonucleotide
  Sense strand starting at position 3365 of SEQ ID NO: 1879690
uagagagaucguugaccag

SEQ ID NO: 1925413 - RNA, 19 nt, Artificial Sequence
  Description of Artificial Sequence: Synthetic oligonucleotide
  Antisense strand to SEQ ID NO: 1925412
cuggucaacgaucucucua

SEQ ID NO: 1925414 - RNA, 19 nt, Artificial Sequence
  Description of Artificial Sequence: Synthetic oligonucleotide
  Sense strand starting at position 3371 of SEQ ID NO: 1879690
gaucguugaccaggcuaca

SEQ ID NO: 1925415 - RNA, 19 nt, Artificial Sequence
  Description of Artificial Sequence: Synthetic oligonucleotide
  Antisense strand to SEQ ID NO: 1925414
uguagccuggucaacgauc

SEQ ID NO: 1925416 - RNA, 19 nt, Artificial Sequence
  Description of Artificial Sequence: Synthetic oligonucleotide
  Sense strand starting at position 3468 of SEQ ID NO: 1879690
ucuucuaucgccuguauuu

SEQ ID NO: 1925417 - RNA, 19 nt, Artificial Sequence
  Description of Artificial Sequence: Synthetic oligonucleotide
  Antisense strand to SEQ ID NO: 1925416
aaauacaggcgauagaaga

SEQ ID NO: 1925418 - RNA, 19 nt, Artificial Sequence
  Description of Artificial Sequence: Synthetic oligonucleotide
  Sense strand starting at position 3509 of SEQ ID NO: 1879690
gaugacaucuuagugcauu

SEQ ID NO: 1925419 - RNA, 19 nt, Artificial Sequence
  Description of Artificial Sequence: Synthetic oligonucleotide
  Antisense strand to SEQ ID NO: 1925418
aaugcacuaagaugucauc

SEQ ID NO: 1925420 - RNA, 19 nt, Artificial Sequence
  Description of Artificial Sequence: Synthetic oligonucleotide
  Sense strand starting at position 3833 of SEQ ID NO: 1879690
uaaauauagcucuggugga

SEQ ID NO: 1925421 - RNA, 19 nt, Artificial Sequence
  Description of Artificial Sequence: Synthetic oligonucleotide
  Antisense strand to SEQ ID NO: 1925420
uccaccagagcuauauuua

SEQ ID NO: 1925422 - RNA, 19 nt, Artificial Sequence
  Description of Artificial Sequence: Synthetic oligonucleotide
  Sense strand starting at position 3837 of SEQ ID NO: 1879690
uauagcucugguggauaua

SEQ ID NO: 1925423 - RNA, 19 nt, Artificial Sequence
  Description of Artificial Sequence: Synthetic oligonucleotide
  Antisense strand to SEQ ID NO: 1925422
uauauccaccagagcuaua

SEQ ID NO: 1925424 - RNA, 19 nt, Artificial Sequence
  Description of Artificial Sequence: Synthetic oligonucleotide
  Sense strand starting at position 3840 of SEQ ID NO: 1879690
agcucugguggauauagau

SEQ ID NO: 1925425 - RNA, 19 nt, Artificial Sequence
  Description of Artificial Sequence: Synthetic oligonucleotide
  Antisense strand to SEQ ID NO: 1925424
aucuauauccaccagagcu

SEQ ID NO: 1925426 - RNA, 19 nt, Artificial Sequence
  Description of Artificial Sequence: Synthetic oligonucleotide
  Sense strand starting at position 40 of SEQ ID NO: 1879691
agagacugcuucuuaccaa

SEQ ID NO: 1925427 - RNA, 19 nt, Artificial Sequence
  Description of Artificial Sequence: Synthetic oligonucleotide
  Antisense strand to SEQ ID NO: 1925426
uugguaagaagcagucucu

SEQ ID NO: 1925428 - RNA, 19 nt, Artificial Sequence
  Description of Artificial Sequence: Synthetic oligonucleotide
  Sense strand starting at position 119 of SEQ ID NO: 1879691
cuuaccacaucuguggaau

SEQ ID NO: 1925429 - RNA, 19 nt, Artificial Sequence
  Description of Artificial Sequence: Synthetic oligonucleotide
  Antisense strand to SEQ ID NO: 1925428
auuccacagaugugguaag

SEQ ID NO: 1925430 - RNA, 19 nt, Artificial Sequence
  Description of Artificial Sequence: Synthetic oligonucleotide
  Sense strand starting at position 120 of SEQ ID NO: 1879691
uuaccacaucuguggaauc

SEQ ID NO: 1925431 - RNA, 19 nt, Artificial Sequence
  Description of Artificial Sequence: Synthetic oligonucleotide
  Antisense strand to SEQ ID NO: 1925430
gauuccacagaugugguaa

SEQ ID NO: 1925432 - RNA, 19 nt, Artificial Sequence
  Description of Artificial Sequence: Synthetic oligonucleotide
  Sense strand starting at position 355 of SEQ ID NO: 1879691
aucagauacuaaugugaau

SEQ ID NO: 1925433 - RNA, 19 nt, Artificial Sequence
  Description of Artificial Sequence: Synthetic oligonucleotide
  Antisense strand to SEQ ID NO: 1925432
auucacauuaguaucugau

SEQ ID NO: 1925434 - RNA, 19 nt, Artificial Sequence
  Description of Artificial Sequence: Synthetic oligonucleotide
  Sense strand starting at position 536 of SEQ ID NO: 1879691
gugguaacccaauaaacuu

SEQ ID NO: 1925435 - RNA, 19 nt, Artificial Sequence
  Description of Artificial Sequence: Synthetic oligonucleotide
  Antisense strand to SEQ ID NO: 1925434
aaguuuauuggguuaccac

SEQ ID NO: 1925436 - RNA, 19 nt, Artificial Sequence
  Description of Artificial Sequence: Synthetic oligonucleotide
  Sense strand starting at position 1372 of SEQ ID NO: 1879691
augaguuguggcugucuga

SEQ ID NO: 1925437 - RNA, 19 nt, Artificial Sequence
  Description of Artificial Sequence: Synthetic oligonucleotide
  Antisense strand to SEQ ID NO: 1925436
ucagacagccacaacucau

SEQ ID NO: 1925438 - RNA, 19 nt, Artificial Sequence
  Description of Artificial Sequence: Synthetic oligonucleotide
  Sense strand starting at position 1438 of SEQ ID NO: 1879691
ugaagagucuccuccagag

SEQ ID NO: 1925439 - RNA, 19 nt, Artificial Sequence
  Description of Artificial Sequence: Synthetic oligonucleotide
  Antisense strand to SEQ ID NO: 1925438
cucuggaggagacucuuca

SEQ ID NO: 1925440 - RNA, 19 nt, Artificial Sequence
  Description of Artificial Sequence: Synthetic oligonucleotide
  Sense strand starting at position 1442 of SEQ ID NO: 1879691
gagucuccuccagagagua

SEQ ID NO: 1925441 - RNA, 19 nt, Artificial Sequence
  Description of Artificial Sequence: Synthetic oligonucleotide
  Antisense strand to SEQ ID NO: 1925440
uacucucuggaggagacuc

SEQ ID NO: 1925442 - RNA, 19 nt, Artificial Sequence
  Description of Artificial Sequence: Synthetic oligonucleotide
  Sense strand starting at position 1772 of SEQ ID NO: 1879691
ucacgaacucuugaccuau

SEQ ID NO: 1925443 - RNA, 19 nt, Artificial Sequence
  Description of Artificial Sequence: Synthetic oligonucleotide
  Antisense strand to SEQ ID NO: 1925442
auaggucaagaguucguga

SEQ ID NO: 1925444 - RNA, 19 nt, Artificial Sequence
  Description of Artificial Sequence: Synthetic oligonucleotide
  Sense strand starting at position 1774 of SEQ ID NO: 1879691
acgaacucuugaccuauga

SEQ ID NO: 1925445 - RNA, 19 nt, Artificial Sequence
  Description of Artificial Sequence: Synthetic oligonucleotide
  Antisense strand to SEQ ID NO: 1925444
ucauaggucaagaguucgu

SEQ ID NO: 1925446 - RNA, 19 nt, Artificial Sequence
  Description of Artificial Sequence: Synthetic oligonucleotide
  Sense strand starting at position 1787 of SEQ ID NO: 1879691
cuaugaucugccugccuca

SEQ ID NO: 1925447 - RNA, 19 nt, Artificial Sequence
  Description of Artificial Sequence: Synthetic oligonucleotide
  Antisense strand to SEQ ID NO: 1925446
ugaggcaggcagaucauag

SEQ ID NO: 1925448 - RNA, 19 nt, Artificial Sequence
  Description of Artificial Sequence: Synthetic oligonucleotide
  Sense strand starting at position 1873 of SEQ ID NO: 1879691
gauacuuuaucaggguaga

SEQ ID NO: 1925449 - RNA, 19 nt, Artificial Sequence
  Description of Artificial Sequence: Synthetic oligonucleotide
  Antisense strand to SEQ ID NO: 1925448
ucuacccugauaaaguauc

SEQ ID NO: 1925450 - RNA, 19 nt, Artificial Sequence
  Description of Artificial Sequence: Synthetic oligonucleotide
  Sense strand starting at position 1896 of SEQ ID NO: 1879691
gcuguuaaaugccuccuau

SEQ ID NO: 1925451 - RNA, 19 nt, Artificial Sequence
  Description of Artificial Sequence: Synthetic oligonucleotide
  Antisense strand to SEQ ID NO: 1925450
auaggaggcauuuaacagc

SEQ ID NO: 1925452 - RNA, 19 nt, Artificial Sequence
  Description of Artificial Sequence: Synthetic oligonucleotide
  Sense strand starting at position 2580 of SEQ ID NO: 1879691
agcuaagaauugcaagaca

SEQ ID NO: 1925453 - RNA, 19 nt, Artificial Sequence
  Description of Artificial Sequence: Synthetic oligonucleotide
  Antisense strand to SEQ ID NO: 1925452
ugucuugcaauucuuagcu

SEQ ID NO: 1925454 - RNA, 19 nt, Artificial Sequence
  Description of Artificial Sequence: Synthetic oligonucleotide
  Sense strand starting at position 3185 of SEQ ID NO: 1879691
ugguguagugguuaucaug

SEQ ID NO: 1925455 - RNA, 19 nt, Artificial Sequence
  Description of Artificial Sequence: Synthetic oligonucleotide
  Antisense strand to SEQ ID NO: 1925454
caugauaaccacuacacca

SEQ ID NO: 1925456 - RNA, 19 nt, Artificial Sequence
  Description of Artificial Sequence: Synthetic oligonucleotide
  Sense strand starting at position 3196 of SEQ ID NO: 1879691
uuaucauguucgccucaca

SEQ ID NO: 1925457 - RNA, 19 nt, Artificial Sequence
  Description of Artificial Sequence: Synthetic oligonucleotide
  Antisense strand to SEQ ID NO: 1925456
ugugaggcgaacaugauaa

SEQ ID NO: 1925458 - RNA, 19 nt, Artificial Sequence
  Description of Artificial Sequence: Synthetic oligonucleotide
  Sense strand starting at position 3203 of SEQ ID NO: 1879691
guucgccucacacgagaaa

SEQ ID NO: 1925459 - RNA, 19 nt, Artificial Sequence
  Description of Artificial Sequence: Synthetic oligonucleotide
  Antisense strand to SEQ ID NO: 1925458
uuucucgugugaggcgaac

SEQ ID NO: 1925460 - RNA, 19 nt, Artificial Sequence
  Description of Artificial Sequence: Synthetic oligonucleotide
  Sense strand starting at position 3304 of SEQ ID NO: 1879691
uugugaguuuaaucgaggu

SEQ ID NO: 1925461 - RNA, 19 nt, Artificial Sequence
  Description of Artificial Sequence: Synthetic oligonucleotide
  Antisense strand to SEQ ID NO: 1925460
accucgauuaaacucacaa

SEQ ID NO: 1925462 - RNA, 19 nt, Artificial Sequence
  Description of Artificial Sequence: Synthetic oligonucleotide
  Sense strand starting at position 3383 of SEQ ID NO: 1879691
acagauuguugaccaggua

SEQ ID NO: 1925463 - RNA, 19 nt, Artificial Sequence
  Description of Artificial Sequence: Synthetic oligonucleotide
  Antisense strand to SEQ ID NO: 1925462
uaccuggucaacaaucugu

SEQ ID NO: 1925464 - RNA, 19 nt, Artificial Sequence
  Description of Artificial Sequence: Synthetic oligonucleotide
  Sense strand starting at position 3386 of SEQ ID NO: 1879691
gauuguugaccagguacaa

SEQ ID NO: 1925465 - RNA, 19 nt, Artificial Sequence
  Description of Artificial Sequence: Synthetic oligonucleotide
  Antisense strand to SEQ ID NO: 1925464
uuguaccuggucaacaauc

SEQ ID NO: 1925466 - RNA, 19 nt, Artificial Sequence
  Description of Artificial Sequence: Synthetic oligonucleotide
  Sense strand starting at position 3480 of SEQ ID NO: 1879691
ucucuucugucgccugaau

SEQ ID NO: 1925467 - RNA, 19 nt, Artificial Sequence
  Description of Artificial Sequence: Synthetic oligonucleotide
  Antisense strand to SEQ ID NO: 1925466
auucaggcgacagaagaga

SEQ ID NO: 1925468 - RNA, 19 nt, Artificial Sequence
  Description of Artificial Sequence: Synthetic oligonucleotide
  Sense strand starting at position 3482 of SEQ ID NO: 1879691
ucuucugucgccugaauuu

SEQ ID NO: 1925469 - RNA, 19 nt, Artificial Sequence
  Description of Artificial Sequence: Synthetic oligonucleotide
  Antisense strand to SEQ ID NO: 1925468
aaauucaggcgacagaaga

SEQ ID NO: 1925470 - RNA, 19 nt, Artificial Sequence
  Description of Artificial Sequence: Synthetic oligonucleotide
  Sense strand starting at position 3523 of SEQ ID NO: 1879691
gaugacaucuuagcgcauu

SEQ ID NO: 1925471 - RNA, 19 nt, Artificial Sequence
  Description of Artificial Sequence: Synthetic oligonucleotide
  Antisense strand to SEQ ID NO: 1925470
aaugcgcuaagaugucauc

SEQ ID NO: 1925472 - RNA, 19 nt, Artificial Sequence
  Description of Artificial Sequence: Synthetic oligonucleotide
  Sense strand starting at position 3524 of SEQ ID NO: 1879691
augacaucuuagcgcauuu

SEQ ID NO: 1925473 - RNA, 19 nt, Artificial Sequence
  Description of Artificial Sequence: Synthetic oligonucleotide
  Antisense strand to SEQ ID NO: 1925472
aaaugcgcuaagaugucau

SEQ ID NO: 1925474 - RNA, 19 nt, Artificial Sequence
  Description of Artificial Sequence: Synthetic oligonucleotide
  Sense strand starting at position 3562 of SEQ ID NO: 1879691
uuggcuuuacucugguaag

SEQ ID NO: 1925475 - RNA, 19 nt, Artificial Sequence
  Description of Artificial Sequence: Synthetic oligonucleotide
  Antisense strand to SEQ ID NO: 1925474
cuuaccagaguaaagccaa

SEQ ID NO: 1925476 - RNA, 19 nt, Artificial Sequence
  Description of Artificial Sequence: Synthetic oligonucleotide
  Sense strand starting at position 3654 of SEQ ID NO: 1879691
agucauagaguccauauuc

SEQ ID NO: 1925477 - RNA, 19 nt, Artificial Sequence
  Description of Artificial Sequence: Synthetic oligonucleotide
  Antisense strand to SEQ ID NO: 1925476
gaauauggacucuaugacu

SEQ ID NO: 1925478 - RNA, 19 nt, Artificial Sequence
  Description of Artificial Sequence: Synthetic oligonucleotide
  Sense strand starting at position 3751 of SEQ ID NO: 1879691
uagcaucugugacucagau

SEQ ID NO: 1925479 - RNA, 19 nt, Artificial Sequence
  Description of Artificial Sequence: Synthetic oligonucleotide
  Antisense strand to SEQ ID NO: 1925478
aucugagucacagaugcua

SEQ ID NO: 1925480 - RNA, 19 nt, Artificial Sequence
  Description of Artificial Sequence: Synthetic oligonucleotide
  Sense strand starting at position 3755 of SEQ ID NO: 1879691
aucugugacucagaugcau

SEQ ID NO: 1925481 - RNA, 19 nt, Artificial Sequence
  Description of Artificial Sequence: Synthetic oligonucleotide
  Antisense strand to SEQ ID NO: 1925480
augcaucugagucacagau

SEQ ID NO: 1925482 - RNA, 19 nt, Artificial Sequence
  Description of Artificial Sequence: Synthetic oligonucleotide
  Sense strand starting at position 3759 of SEQ ID NO: 1879691
gugacucagaugcauauga

SEQ ID NO: 1925483 - RNA, 19 nt, Artificial Sequence
  Description of Artificial Sequence: Synthetic oligonucleotide
  Antisense strand to SEQ ID NO: 1925482
ucauaugcaucugagucac

SEQ ID NO: 1925484 - RNA, 19 nt, Artificial Sequence
  Description of Artificial Sequence: Synthetic oligonucleotide
  Sense strand starting at position 3772 of SEQ ID NO: 1879691
auaugaggccuugguagau

SEQ ID NO: 1925485 - RNA, 19 nt, Artificial Sequence
  Description of Artificial Sequence: Synthetic oligonucleotide
  Antisense strand to SEQ ID NO: 1925484
aucuaccaaggccucauau

SEQ ID NO: 1925486 - RNA, 19 nt, Artificial Sequence
  Description of Artificial Sequence: Synthetic oligonucleotide
  Sense strand starting at position 3839 of SEQ ID NO: 1879691
ugggaauaaauguagcuuu

SEQ ID NO: 1925487 - RNA, 19 nt, Artificial Sequence
  Description of Artificial Sequence: Synthetic oligonucleotide
  Antisense strand to SEQ ID NO: 1925486
aaagcuacauuuauuccca

SEQ ID NO: 1925488 - RNA, 19 nt, Artificial Sequence
  Description of Artificial Sequence: Synthetic oligonucleotide
  Sense strand starting at position 3842 of SEQ ID NO: 1879691
gaauaaauguagcuuuggu

SEQ ID NO: 1925489 - RNA, 19 nt, Artificial Sequence
  Description of Artificial Sequence: Synthetic oligonucleotide
  Antisense strand to SEQ ID NO: 1925488
accaaagcuacauuuauuc

SEQ ID NO: 1925490 - RNA, 19 nt, Artificial Sequence
  Description of Artificial Sequence: Synthetic oligonucleotide
  Sense strand starting at position 3847 of SEQ ID NO: 1879691
aauguagcuuugguugaua

SEQ ID NO: 1925491 - RNA, 19 nt, Artificial Sequence
  Description of Artificial Sequence: Synthetic oligonucleotide
  Antisense strand to SEQ ID NO: 1925490
uaucaaccaaagcuacauu

SEQ ID NO: 1925492 - RNA, 19 nt, Artificial Sequence
  Description of Artificial Sequence: Synthetic oligonucleotide
  Sense strand starting at position 3849 of SEQ ID NO: 1879691
uguagcuuugguugauaua

SEQ ID NO: 1925493 - RNA, 19 nt, Artificial Sequence
  Description of Artificial Sequence: Synthetic oligonucleotide
  Antisense strand to SEQ ID NO: 1925492
uauaucaaccaaagcuaca

SEQ ID NO: 1925494 - RNA, 19 nt, Artificial Sequence
  Description of Artificial Sequence: Synthetic oligonucleotide
  Sense strand starting at position 3850 of SEQ ID NO: 1879691
guagcuuugguugauauag

SEQ ID NO: 1925495 - RNA, 19 nt, Artificial Sequence
  Description of Artificial Sequence: Synthetic oligonucleotide
  Antisense strand to SEQ ID NO: 1925494
cuauaucaaccaaagcuac

SEQ ID NO: 1925496 - RNA, 19 nt, Artificial Sequence
  Description of Artificial Sequence: Synthetic oligonucleotide
  Sense strand starting at position 3852 of SEQ ID NO: 1879691
agcuuugguugauauagau

SEQ ID NO: 1925497 - RNA, 19 nt, Artificial Sequence
  Description of Artificial Sequence: Synthetic oligonucleotide
  Antisense strand to SEQ ID NO: 1925496
aucuauaucaaccaaagcu

SEQ ID NO: 1925498 - RNA, 19 nt, Artificial Sequence
  Description of Artificial Sequence: Synthetic oligonucleotide
  Sense strand starting at position 3859 of SEQ ID NO: 1879691
guugauauagaucauaugu

SEQ ID NO: 1925499 - RNA, 19 nt, Artificial Sequence
  Description of Artificial Sequence: Synthetic oligonucleotide
  Antisense strand to SEQ ID NO: 1925498
acauaugaucuauaucaac

SEQ ID NO: 1925500 - RNA, 19 nt, Artificial Sequence
  Description of Artificial Sequence: Synthetic oligonucleotide
  Sense strand starting at position 3940 of SEQ ID NO: 1879691
aaagcucugcgaggucaau

SEQ ID NO: 1925501 - RNA, 19 nt, Artificial Sequence
  Description of Artificial Sequence: Synthetic oligonucleotide
  Antisense strand to SEQ ID NO: 1925500
auugaccucgcagagcuuu

SEQ ID NO: 1925502 - RNA, 19 nt, Artificial Sequence
  Description of Artificial Sequence: Synthetic oligonucleotide
  Sense strand starting at position 3949 of SEQ ID NO: 1879691
cgaggucaaugugaaggau

SEQ ID NO: 1925503 - RNA, 19 nt, Artificial Sequence
  Description of Artificial Sequence: Synthetic oligonucleotide
  Antisense strand to SEQ ID NO: 1925502
auccuucacauugaccucg

SEQ ID NO: 1925504 - RNA, 19 nt, Artificial Sequence
  Description of Artificial Sequence: Synthetic oligonucleotide
  Sense strand starting at position 3952 of SEQ ID NO: 1879691
ggucaaugugaaggaugau

SEQ ID NO: 1925505 - RNA, 19 nt, Artificial Sequence
  Description of Artificial Sequence: Synthetic oligonucleotide
  Antisense strand to SEQ ID NO: 1925504
aucauccuucacauugacc

SEQ ID NO: 1925506 - RNA, 19 nt, Artificial Sequence
  Description of Artificial Sequence: Synthetic oligonucleotide
  Sense strand starting at position 238 of SEQ ID NO: 1879692
gggcacuuucuggauugaa

SEQ ID NO: 1925507 - RNA, 19 nt, Artificial Sequence
  Description of Artificial Sequence: Synthetic oligonucleotide
  Antisense strand to SEQ ID NO: 1925506
uucaauccagaaagugccc

SEQ ID NO: 1925508 - RNA, 19 nt, Artificial Sequence
  Description of Artificial Sequence: Synthetic oligonucleotide
  Sense strand starting at position 303 of SEQ ID NO: 1879692
gaaacaacaugucugggua

SEQ ID NO: 1925509 - RNA, 19 nt, Artificial Sequence
  Description of Artificial Sequence: Synthetic oligonucleotide
  Antisense strand to SEQ ID NO: 1925508
uacccagacauguuguuuc

SEQ ID NO: 1925510 - RNA, 19 nt, Artificial Sequence
  Description of Artificial Sequence: Synthetic oligonucleotide
  Sense strand starting at position 304 of SEQ ID NO: 1879692
aaacaacaugucuggguau

SEQ ID NO: 1925511 - RNA, 19 nt, Artificial Sequence
  Description of Artificial Sequence: Synthetic oligonucleotide
  Antisense strand to SEQ ID NO: 1925510
auacccagacauguuguuu

SEQ ID NO: 1925512 - RNA, 19 nt, Artificial Sequence
  Description of Artificial Sequence: Synthetic oligonucleotide
  Sense strand starting at position 347 of SEQ ID NO: 1879692
uagauauaggucuguggaa

SEQ ID NO: 1925513 - RNA, 19 nt, Artificial Sequence
  Description of Artificial Sequence: Synthetic oligonucleotide
  Antisense strand to SEQ ID NO: 1925512
uuccacagaccuauaucua

SEQ ID NO: 1925514 - RNA, 19 nt, Artificial Sequence
  Description of Artificial Sequence: Synthetic oligonucleotide
  Sense strand starting at position 348 of SEQ ID NO: 1879692
agauauaggucuguggaaa

SEQ ID NO: 1925515 - RNA, 19 nt, Artificial Sequence
  Description of Artificial Sequence: Synthetic oligonucleotide
  Antisense strand to SEQ ID NO: 1925514
uuuccacagaccuauaucu

SEQ ID NO: 1925516 - RNA, 19 nt, Artificial Sequence
  Description of Artificial Sequence: Synthetic oligonucleotide
  Sense strand starting at position 391 of SEQ ID NO: 1879692
auaggaugaugucccagua

SEQ ID NO: 1925517 - RNA, 19 nt, Artificial Sequence
  Description of Artificial Sequence: Synthetic oligonucleotide
  Antisense strand to SEQ ID NO: 1925516
uacugggacaucauccuau

SEQ ID NO: 1925518 - RNA, 19 nt, Artificial Sequence
  Description of Artificial Sequence: Synthetic oligonucleotide
  Sense strand starting at position 444 of SEQ ID NO: 1879692
agggauauaucaguaaagu

SEQ ID NO: 1925519 - RNA, 19 nt, Artificial Sequence
  Description of Artificial Sequence: Synthetic oligonucleotide
  Antisense strand to SEQ ID NO: 1925518
acuuuacugauauaucccu

SEQ ID NO: 1925520 - RNA, 19 nt, Artificial Sequence
  Description of Artificial Sequence: Synthetic oligonucleotide
  Sense strand starting at position 460 of SEQ ID NO: 1879692
aguaauaguacauauggua

SEQ ID NO: 1925521 - RNA, 19 nt, Artificial Sequence
  Description of Artificial Sequence: Synthetic oligonucleotide
  Antisense strand to SEQ ID NO: 1925520
uaccauauguacuauuacu

SEQ ID NO: 1925522 - RNA, 19 nt, Artificial Sequence
  Description of Artificial Sequence: Synthetic oligonucleotide
  Sense strand starting at position 467 of SEQ ID NO: 1879692
guacauaugguauaguaua

SEQ ID NO: 1925523 - RNA, 19 nt, Artificial Sequence
  Description of Artificial Sequence: Synthetic oligonucleotide
  Antisense strand to SEQ ID NO: 1925522
uauacuauaccauauguac

SEQ ID NO: 1925524 - RNA, 19 nt, Artificial Sequence
  Description of Artificial Sequence: Synthetic oligonucleotide
  Sense strand starting at position 530 of SEQ ID NO: 1879692
agugguaauacuggaauca

SEQ ID NO: 1925525 - RNA, 19 nt, Artificial Sequence
  Description of Artificial Sequence: Synthetic oligonucleotide
  Antisense strand to SEQ ID NO: 1925524
ugauuccaguauuaccacu

SEQ ID NO: 1925526 - RNA, 19 nt, Artificial Sequence
  Description of Artificial Sequence: Synthetic oligonucleotide
  Sense strand starting at position 600 of SEQ ID NO: 1879692
agccuuugucauuaccuau

SEQ ID NO: 1925527 - RNA, 19 nt, Artificial Sequence
  Description of Artificial Sequence: Synthetic oligonucleotide
  Antisense strand to SEQ ID NO: 1925526
auagguaaugacaaaggcu

SEQ ID NO: 1925528 - RNA, 19 nt, Artificial Sequence
  Description of Artificial Sequence: Synthetic oligonucleotide
  Sense strand starting at position 620 of SEQ ID NO: 1879692
aaaugaggaugauaacaga

SEQ ID NO: 1925529 - RNA, 19 nt, Artificial Sequence
  Description of Artificial Sequence: Synthetic oligonucleotide
  Antisense strand to SEQ ID NO: 1925528
ucuguuaucauccucauuu

SEQ ID NO: 1925530 - RNA, 19 nt, Artificial Sequence
  Description of Artificial Sequence: Synthetic oligonucleotide
  Sense strand starting at position 987 of SEQ ID NO: 1879692
uaguacaagugcuuagaau

SEQ ID NO: 1925531 - RNA, 19 nt, Artificial Sequence
  Description of Artificial Sequence: Synthetic oligonucleotide
  Antisense strand to SEQ ID NO: 1925530
auucuaagcacuuguacua

SEQ ID NO: 1925532 - RNA, 19 nt, Artificial Sequence
  Description of Artificial Sequence: Synthetic oligonucleotide
  Sense strand starting at position 988 of SEQ ID NO: 1879692
aguacaagugcuuagaaug

SEQ ID NO: 1925533 - RNA, 19 nt, Artificial Sequence
  Description of Artificial Sequence: Synthetic oligonucleotide
  Antisense strand to SEQ ID NO: 1925532
cauucuaagcacuuguacu

SEQ ID NO: 1925534 - RNA, 19 nt, Artificial Sequence
  Description of Artificial Sequence: Synthetic oligonucleotide
  Sense strand starting at position 1000 of SEQ ID NO: 1879692
uagaauggugcccagcaua

SEQ ID NO: 1925535 - RNA, 19 nt, Artificial Sequence
  Description of Artificial Sequence: Synthetic oligonucleotide
  Antisense strand to SEQ ID NO: 1925534
uaugcugggcaccauucua

SEQ ID NO: 1925536 - RNA, 19 nt, Artificial Sequence
  Description of Artificial Sequence: Synthetic oligonucleotide
  Sense strand starting at position 1048 of SEQ ID NO: 1879692
uuaucaguguuauugacac

SEQ ID NO: 1925537 - RNA, 19 nt, Artificial Sequence
  Description of Artificial Sequence: Synthetic oligonucleotide
  Antisense strand to SEQ ID NO: 1925536
gugucaauaacacugauaa

SEQ ID NO: 1925538 - RNA, 19 nt, Artificial Sequence
  Description of Artificial Sequence: Synthetic oligonucleotide
  Sense strand starting at position 1058 of SEQ ID NO: 1879692
uauugacacuuuguguuga

SEQ ID NO: 1925539 - RNA, 19 nt, Artificial Sequence
  Description of Artificial Sequence: Synthetic oligonucleotide
  Antisense strand to SEQ ID NO: 1925538
ucaacacaaagugucaaua

SEQ ID NO: 1925540 - RNA, 19 nt, Artificial Sequence
  Description of Artificial Sequence: Synthetic oligonucleotide
  Sense strand starting at position 1060 of SEQ ID NO: 1879692
uugacacuuuguguugaaa

SEQ ID NO: 1925541 - RNA, 19 nt, Artificial Sequence
  Description of Artificial Sequence: Synthetic oligonucleotide
  Antisense strand to SEQ ID NO: 1925540
uuucaacacaaagugucaa

SEQ ID NO: 1925542 - RNA, 19 nt, Artificial Sequence
  Description of Artificial Sequence: Synthetic oligonucleotide
  Sense strand starting at position 1094 of SEQ ID NO: 1879692
uugguaugcguccugguua

SEQ ID NO: 1925543 - RNA, 19 nt, Artificial Sequence
  Description of Artificial Sequence: Synthetic oligonucleotide
  Antisense strand to SEQ ID NO: 1925542
uaaccaggacgcauaccaa

SEQ ID NO: 1925544 - RNA, 19 nt, Artificial Sequence
  Description of Artificial Sequence: Synthetic oligonucleotide
  Sense strand starting at position 1097 of SEQ ID NO: 1879692
guaugcguccugguuaucu

SEQ ID NO: 1925545 - RNA, 19 nt, Artificial Sequence
  Description of Artificial Sequence: Synthetic oligonucleotide
  Antisense strand to SEQ ID NO: 1925544
agauaaccaggacgcauac

SEQ ID NO: 1925546 - RNA, 19 nt, Artificial Sequence
  Description of Artificial Sequence: Synthetic oligonucleotide
  Sense strand starting at position 1112 of SEQ ID NO: 1879692
aucuacugcuaaguaagaa

SEQ ID NO: 1925547 - RNA, 19 nt, Artificial Sequence
  Description of Artificial Sequence: Synthetic oligonucleotide
  Antisense strand to SEQ ID NO: 1925546
uucuuacuuagcaguagau

SEQ ID NO: 1925548 - RNA, 19 nt, Artificial Sequence
  Description of Artificial Sequence: Synthetic oligonucleotide
  Sense strand starting at position 1245 of SEQ ID NO: 1879692
aguugauggcaugagaguu

SEQ ID NO: 1925549 - RNA, 19 nt, Artificial Sequence
  Description of Artificial Sequence: Synthetic oligonucleotide
  Antisense strand to SEQ ID NO: 1925548
aacucucaugccaucaacu

SEQ ID NO: 1925550 - RNA, 19 nt, Artificial Sequence
  Description of Artificial Sequence: Synthetic oligonucleotide
  Sense strand starting at position 1263 of SEQ ID NO: 1879692
uuaugugauggccaugauu

SEQ ID NO: 1925551 - RNA, 19 nt, Artificial Sequence
  Description of Artificial Sequence: Synthetic oligonucleotide
  Antisense strand to SEQ ID NO: 1925550
aaucauggccaucacauaa

SEQ ID NO: 1925552 - RNA, 19 nt, Artificial Sequence
  Description of Artificial Sequence: Synthetic oligonucleotide
  Sense strand starting at position 1435 of SEQ ID NO: 1879692
ugcuguaagggaugugaaa

SEQ ID NO: 1925553 - RNA, 19 nt, Artificial Sequence
  Description of Artificial Sequence: Synthetic oligonucleotide
  Antisense strand to SEQ ID NO: 1925552
uuucacaucccuuacagca

SEQ ID NO: 1925554 - RNA, 19 nt, Artificial Sequence
  Description of Artificial Sequence: Synthetic oligonucleotide
  Sense strand starting at position 1444 of SEQ ID NO: 1879692
ggaugugaaacgcagaacu

SEQ ID NO: 1925555 - RNA, 19 nt, Artificial Sequence
  Description of Artificial Sequence: Synthetic oligonucleotide
  Antisense strand to SEQ ID NO: 1925554
aguucugcguuucacaucc

SEQ ID NO: 1925556 - RNA, 19 nt, Artificial Sequence
  Description of Artificial Sequence: Synthetic oligonucleotide
  Sense strand starting at position 1446 of SEQ ID NO: 1879692
augugaaacgcagaacuau

SEQ ID NO: 1925557 - RNA, 19 nt, Artificial Sequence
  Description of Artificial Sequence: Synthetic oligonucleotide
  Antisense strand to SEQ ID NO: 1925556
auaguucugcguuucacau

SEQ ID NO: 1925558 - RNA, 19 nt, Artificial Sequence
  Description of Artificial Sequence: Synthetic oligonucleotide
  Sense strand starting at position 1471 of SEQ ID NO: 1879692
ucucacagaccuuacgauu

SEQ ID NO: 1925559 - RNA, 19 nt, Artificial Sequence
  Description of Artificial Sequence: Synthetic oligonucleotide
  Antisense strand to SEQ ID NO: 1925558
aaucguaaggucugugaga

SEQ ID NO: 1925560 - RNA, 19 nt, Artificial Sequence
  Description of Artificial Sequence: Synthetic oligonucleotide
  Sense strand starting at position 1485 of SEQ ID NO: 1879692
cgauuuaucuagggacaua

SEQ ID NO: 1925561 - RNA, 19 nt, Artificial Sequence
  Description of Artificial Sequence: Synthetic oligonucleotide
  Antisense strand to SEQ ID NO: 1925560
uaugucccuagauaaaucg

SEQ ID NO: 1925562 - RNA, 19 nt, Artificial Sequence
  Description of Artificial Sequence: Synthetic oligonucleotide
  Sense strand starting at position 1529 of SEQ ID NO: 1879692
agaacaguggcaugguaaa

SEQ ID NO: 1925563 - RNA, 19 nt, Artificial Sequence
  Description of Artificial Sequence: Synthetic oligonucleotide
  Antisense strand to SEQ ID NO: 1925562
uuuaccaugccacuguucu

SEQ ID NO: 1925564 - RNA, 19 nt, Artificial Sequence
  Description of Artificial Sequence: Synthetic oligonucleotide
  Sense strand starting at position 1871 of SEQ ID NO: 1879692
gcaauaauuuaucagggua

SEQ ID NO: 1925565 - RNA, 19 nt, Artificial Sequence
  Description of Artificial Sequence: Synthetic oligonucleotide
  Antisense strand to SEQ ID NO: 1925564
uacccugauaaauuauugc

SEQ ID NO: 1925566 - RNA, 19 nt, Artificial Sequence
  Description of Artificial Sequence: Synthetic oligonucleotide
  Sense strand starting at position 1873 of SEQ ID NO: 1879692
aauaauuuaucaggguaga

SEQ ID NO: 1925567 - RNA, 19 nt, Artificial Sequence
  Description of Artificial Sequence: Synthetic oligonucleotide
  Antisense strand to SEQ ID NO: 1925566
ucuacccugauaaauuauu

SEQ ID NO: 1925568 - RNA, 19 nt, Artificial Sequence
  Description of Artificial Sequence: Synthetic oligonucleotide
  Sense strand starting at position 2565 of SEQ ID NO: 1879692
gaggaagagccgugagcua

SEQ ID NO: 1925569 - RNA, 19 nt, Artificial Sequence
  Description of Artificial Sequence: Synthetic oligonucleotide
  Antisense strand to SEQ ID NO: 1925568
uagcucacggcucuuccuc

SEQ ID NO: 1925570 - RNA, 19 nt, Artificial Sequence
  Description of Artificial Sequence: Synthetic oligonucleotide
  Sense strand starting at position 2570 of SEQ ID NO: 1879692
agagccgugagcuaacaau

SEQ ID NO: 1925571 - RNA, 19 nt, Artificial Sequence
  Description of Artificial Sequence: Synthetic oligonucleotide
  Antisense strand to SEQ ID NO: 1925570
auuguuagcucacggcucu

SEQ ID NO: 1925572 - RNA, 19 nt, Artificial Sequence
  Description of Artificial Sequence: Synthetic oligonucleotide
  Sense strand starting at position 3074 of SEQ ID NO: 1879692
cgaauuucgaaaugcaguu

SEQ ID NO: 1925573 - RNA, 19 nt, Artificial Sequence
  Description of Artificial Sequence: Synthetic oligonucleotide
  Antisense strand to SEQ ID NO: 1925572
aacugcauuucgaaauucg

SEQ ID NO: 1925574 - RNA, 19 nt, Artificial Sequence
  Description of Artificial Sequence: Synthetic oligonucleotide
  Sense strand starting at position 3174 of SEQ ID NO: 1879692
gcaguuucugugguguagu

SEQ ID NO: 1925575 - RNA, 19 nt, Artificial Sequence
  Description of Artificial Sequence: Synthetic oligonucleotide
  Antisense strand to SEQ ID NO: 1925574
acuacaccacagaaacugc

SEQ ID NO: 1925576 - RNA, 19 nt, Artificial Sequence
  Description of Artificial Sequence: Synthetic oligonucleotide
  Sense strand starting at position 3184 of SEQ ID NO: 1879692
ugguguagugguuauuaug

SEQ ID NO: 1925577 - RNA, 19 nt, Artificial Sequence
  Description of Artificial Sequence: Synthetic oligonucleotide
  Antisense strand to SEQ ID NO: 1925576
cauaauaaccacuacacca

SEQ ID NO: 1925578 - RNA, 19 nt, Artificial Sequence
  Description of Artificial Sequence: Synthetic oligonucleotide
  Sense strand starting at position 3191 of SEQ ID NO: 1879692
gugguuauuauguucgcuu

SEQ ID NO: 1925579 - RNA, 19 nt, Artificial Sequence
  Description of Artificial Sequence: Synthetic oligonucleotide
  Antisense strand to SEQ ID NO: 1925578
aagcgaacauaauaaccac

SEQ ID NO: 1925580 - RNA, 19 nt, Artificial Sequence
  Description of Artificial Sequence: Synthetic oligonucleotide
  Sense strand starting at position 3218 of SEQ ID NO: 1879692
aaaggucucugguucgaga

SEQ ID NO: 1925581 - RNA, 19 nt, Artificial Sequence
  Description of Artificial Sequence: Synthetic oligonucleotide
  Antisense strand to SEQ ID NO: 1925580
ucucgaaccagagaccuuu

SEQ ID NO: 1925582 - RNA, 19 nt, Artificial Sequence
  Description of Artificial Sequence: Synthetic oligonucleotide
  Sense strand starting at position 3365 of SEQ ID NO: 1879692
gaucguugaccaggcuaca

SEQ ID NO: 1925583 - RNA, 19 nt, Artificial Sequence
  Description of Artificial Sequence: Synthetic oligonucleotide
  Antisense strand to SEQ ID NO: 1925582
uguagccuggucaacgauc

SEQ ID NO: 1925584 - RNA, 19 nt, Artificial Sequence
  Description of Artificial Sequence: Synthetic oligonucleotide
  Sense strand starting at position 3503 of SEQ ID NO: 1879692
gaugacaucuuagugcauu

SEQ ID NO: 1925585 - RNA, 19 nt, Artificial Sequence
  Description of Artificial Sequence: Synthetic oligonucleotide
  Antisense strand to SEQ ID NO: 1925584
aaugcacuaagaugucauc

SEQ ID NO: 1925586 - RNA, 19 nt, Artificial Sequence
  Description of Artificial Sequence: Synthetic oligonucleotide
  Sense strand starting at position 343 of SEQ ID NO: 1879693
ccuagaauguguucuuaaa

SEQ ID NO: 1925587 - RNA, 19 nt, Artificial Sequence
  Description of Artificial Sequence: Synthetic oligonucleotide
  Antisense strand to SEQ ID NO: 1925586
uuuaagaacacauucuagg

SEQ ID NO: 1925588 - RNA, 19 nt, Artificial Sequence
  Description of Artificial Sequence: Synthetic oligonucleotide
  Sense strand starting at position 345 of SEQ ID NO: 1879693
uagaauguguucuuaaagg

SEQ ID NO: 1925589 - RNA, 19 nt, Artificial Sequence
  Description of Artificial Sequence: Synthetic oligonucleotide
  Antisense strand to SEQ ID NO: 1925588
ccuuuaagaacacauucua

SEQ ID NO: 1925590 - RNA, 19 nt, Artificial Sequence
  Description of Artificial Sequence: Synthetic oligonucleotide
  Sense strand starting at position 361 of SEQ ID NO: 1879693
agguucuuguucucauuau

SEQ ID NO: 1925591 - RNA, 19 nt, Artificial Sequence
  Description of Artificial Sequence: Synthetic oligonucleotide
  Antisense strand to SEQ ID NO: 1925590
auaaugagaacaagaaccu

SEQ ID NO: 1925592 - RNA, 19 nt, Artificial Sequence
  Description of Artificial Sequence: Synthetic oligonucleotide
  Sense strand starting at position 365 of SEQ ID NO: 1879693
ucuuguucucauuauguuu

SEQ ID NO: 1925593 - RNA, 19 nt, Artificial Sequence
  Description of Artificial Sequence: Synthetic oligonucleotide
  Antisense strand to SEQ ID NO: 1925592
aaacauaaugagaacaaga

SEQ ID NO: 1925594 - RNA, 19 nt, Artificial Sequence
  Description of Artificial Sequence: Synthetic oligonucleotide
  Sense strand starting at position 391 of SEQ ID NO: 1879693
cagguauaauugucuuagu

SEQ ID NO: 1925595 - RNA, 19 nt, Artificial Sequence
  Description of Artificial Sequence: Synthetic oligonucleotide
  Antisense strand to SEQ ID NO: 1925594
acuaagacaauuauaccug

SEQ ID NO: 1925596 - RNA, 19 nt, Artificial Sequence
  Description of Artificial Sequence: Synthetic oligonucleotide
  Sense strand starting at position 392 of SEQ ID NO: 1879693
agguauaauugucuuagug

SEQ ID NO: 1925597 - RNA, 19 nt, Artificial Sequence
  Description of Artificial Sequence: Synthetic oligonucleotide
  Antisense strand to SEQ ID NO: 1925596
cacuaagacaauuauaccu

SEQ ID NO: 1925598 - RNA, 19 nt, Artificial Sequence
  Description of Artificial Sequence: Synthetic oligonucleotide
  Sense strand starting at position 407 of SEQ ID NO: 1879693
aguguuucggcuuaauaga

SEQ ID NO: 1925599 - RNA, 19 nt, Artificial Sequence
  Description of Artificial Sequence: Synthetic oligonucleotide
  Antisense strand to SEQ ID NO: 1925598
ucuauuaagccgaaacacu

SEQ ID NO: 1925600 - RNA, 19 nt, Artificial Sequence
  Description of Artificial Sequence: Synthetic oligonucleotide
  Sense strand starting at position 412 of SEQ ID NO: 1879693
uucggcuuaauagaggaau

SEQ ID NO: 1925601 - RNA, 19 nt, Artificial Sequence
  Description of Artificial Sequence: Synthetic oligonucleotide
  Antisense strand to SEQ ID NO: 1925600
auuccucuauuaagccgaa

SEQ ID NO: 1925602 - RNA, 19 nt, Artificial Sequence
  Description of Artificial Sequence: Synthetic oligonucleotide
  Sense strand starting at position 573 of SEQ ID NO: 1879693
cuaugucugcuauaaggca

SEQ ID NO: 1925603 - RNA, 19 nt, Artificial Sequence
  Description of Artificial Sequence: Synthetic oligonucleotide
  Antisense strand to SEQ ID NO: 1925602
ugccuuauagcagacauag

SEQ ID NO: 1925604 - RNA, 19 nt, Artificial Sequence
  Description of Artificial Sequence: Synthetic oligonucleotide
  Sense strand starting at position 612 of SEQ ID NO: 1879693
gggaguugcaaguaaccau

SEQ ID NO: 1925605 - RNA, 19 nt, Artificial Sequence
  Description of Artificial Sequence: Synthetic oligonucleotide
  Antisense strand to SEQ ID NO: 1925604
augguuacuugcaacuccc

SEQ ID NO: 1925606 - RNA, 19 nt, Artificial Sequence
  Description of Artificial Sequence: Synthetic oligonucleotide
  Sense strand starting at position 1214 of SEQ ID NO: 1879693
cucacaagcuguccugaga

SEQ ID NO: 1925607 - RNA, 19 nt, Artificial Sequence
  Description of Artificial Sequence: Synthetic oligonucleotide
  Antisense strand to SEQ ID NO: 1925606
ucucaggacagcuugugag

SEQ ID NO: 1925608 - RNA, 19 nt, Artificial Sequence
  Description of Artificial Sequence: Synthetic oligonucleotide
  Sense strand starting at position 1327 of SEQ ID NO: 1879693
gaugcauaacucugggcaa

SEQ ID NO: 1925609 - RNA, 19 nt, Artificial Sequence
  Description of Artificial Sequence: Synthetic oligonucleotide
  Antisense strand to SEQ ID NO: 1925608
uugcccagaguuaugcauc

SEQ ID NO: 1925610 - RNA, 19 nt, Artificial Sequence
  Description of Artificial Sequence: Synthetic oligonucleotide
  Sense strand starting at position 1331 of SEQ ID NO: 1879693
cauaacucugggcaaguua

SEQ ID NO: 1925611 - RNA, 19 nt, Artificial Sequence
  Description of Artificial Sequence: Synthetic oligonucleotide
  Antisense strand to SEQ ID NO: 1925610
uaacuugcccagaguuaug

SEQ ID NO: 1925612 - RNA, 19 nt, Artificial Sequence
  Description of Artificial Sequence: Synthetic oligonucleotide
  Sense strand starting at position 1349 of SEQ ID NO: 1879693
acuuaacaucucugggaca

SEQ ID NO: 1925613 - RNA, 19 nt, Artificial Sequence
  Description of Artificial Sequence: Synthetic oligonucleotide
  Antisense strand to SEQ ID NO: 1925612
ugucccagagauguuaagu

SEQ ID NO: 1925614 - RNA, 19 nt, Artificial Sequence
  Description of Artificial Sequence: Synthetic oligonucleotide
  Sense strand starting at position 1351 of SEQ ID NO: 1879693
uuaacaucucugggacagu

SEQ ID NO: 1925615 - RNA, 19 nt, Artificial Sequence
  Description of Artificial Sequence: Synthetic oligonucleotide
  Antisense strand to SEQ ID NO: 1925614
acugucccagagauguuaa

SEQ ID NO: 1925616 - RNA, 19 nt, Artificial Sequence
  Description of Artificial Sequence: Synthetic oligonucleotide
  Sense strand starting at position 1741 of SEQ ID NO: 1879693
ggugguuaugcagauuaag

SEQ ID NO: 1925617 - RNA, 19 nt, Artificial Sequence
  Description of Artificial Sequence: Synthetic oligonucleotide
  Antisense strand to SEQ ID NO: 1925616
cuuaaucugcauaaccacc

SEQ ID NO: 1925618 - RNA, 19 nt, Artificial Sequence
  Description of Artificial Sequence: Synthetic oligonucleotide
  Sense strand starting at position 1744 of SEQ ID NO: 1879693
gguuaugcagauuaaguga

SEQ ID NO: 1925619 - RNA, 19 nt, Artificial Sequence
  Description of Artificial Sequence: Synthetic oligonucleotide
  Antisense strand to SEQ ID NO: 1925618
ucacuuaaucugcauaacc

SEQ ID NO: 1925620 - RNA, 19 nt, Artificial Sequence
  Description of Artificial Sequence: Synthetic oligonucleotide
  Sense strand starting at position 1753 of SEQ ID NO: 1879693
gauuaagugaaguggucaa

SEQ ID NO: 1925621 - RNA, 19 nt, Artificial Sequence
  Description of Artificial Sequence: Synthetic oligonucleotide
  Antisense strand to SEQ ID NO: 1925620
uugaccacuucacuuaauc

SEQ ID NO: 1925622 - RNA, 19 nt, Artificial Sequence
  Description of Artificial Sequence: Synthetic oligonucleotide
  Sense strand starting at position 1778 of SEQ ID NO: 1879693
ggguuuaguggucaguuca

SEQ ID NO: 1925623 - RNA, 19 nt, Artificial Sequence
  Description of Artificial Sequence: Synthetic oligonucleotide
  Antisense strand to SEQ ID NO: 1925622
ugaacugaccacuaaaccc

SEQ ID NO: 1925624 - RNA, 19 nt, Artificial Sequence
  Description of Artificial Sequence: Synthetic oligonucleotide
  Sense strand starting at position 1811 of SEQ ID NO: 1879693
ugaauuagcaguugugaca

SEQ ID NO: 1925625 - RNA, 19 nt, Artificial Sequence
  Description of Artificial Sequence: Synthetic oligonucleotide
  Antisense strand to SEQ ID NO: 1925624
ugucacaacugcuaauuca

SEQ ID NO: 1925626 - RNA, 19 nt, Artificial Sequence
  Description of Artificial Sequence: Synthetic oligonucleotide
  Sense strand starting at position 1854 of SEQ ID NO: 1879693
ugagguguaacugguccaa

SEQ ID NO: 1925627 - RNA, 19 nt, Artificial Sequence
  Description of Artificial Sequence: Synthetic oligonucleotide
  Antisense strand to SEQ ID NO: 1925626
uuggaccaguuacaccuca

SEQ ID NO: 1925628 - RNA, 19 nt, Artificial Sequence
  Description of Artificial Sequence: Synthetic oligonucleotide
  Sense strand starting at position 1856 of SEQ ID NO: 1879693
agguguaacugguccaacu

SEQ ID NO: 1925629 - RNA, 19 nt, Artificial Sequence
  Description of Artificial Sequence: Synthetic oligonucleotide
  Antisense strand to SEQ ID NO: 1925628
aguuggaccaguuacaccu

SEQ ID NO: 1925630 - RNA, 19 nt, Artificial Sequence
  Description of Artificial Sequence: Synthetic oligonucleotide
  Sense strand starting at position 1858 of SEQ ID NO: 1879693
guguaacugguccaacuga

SEQ ID NO: 1925631 - RNA, 19 nt, Artificial Sequence
  Description of Artificial Sequence: Synthetic oligonucleotide
  Antisense strand to SEQ ID NO: 1925630
ucaguuggaccaguuacac

SEQ ID NO: 1925632 - RNA, 19 nt, Artificial Sequence
  Description of Artificial Sequence: Synthetic oligonucleotide
  Sense strand starting at position 2047 of SEQ ID NO: 1879693
cagagagguuuccuaagau

SEQ ID NO: 1925633 - RNA, 19 nt, Artificial Sequence
  Description of Artificial Sequence: Synthetic oligonucleotide
  Antisense strand to SEQ ID NO: 1925632
aucuuaggaaaccucucug

SEQ ID NO: 1925634 - RNA, 19 nt, Artificial Sequence
  Description of Artificial Sequence: Synthetic oligonucleotide
  Sense strand starting at position 2075 of SEQ ID NO: 1879693
uggagacuuucuuugagcu

SEQ ID NO: 1925635 - RNA, 19 nt, Artificial Sequence
  Description of Artificial Sequence: Synthetic oligonucleotide
  Antisense strand to SEQ ID NO: 1925634
agcucaaagaaagucucca

SEQ ID NO: 1925636 - RNA, 19 nt, Artificial Sequence
  Description of Artificial Sequence: Synthetic oligonucleotide
  Sense strand starting at position 2076 of SEQ ID NO: 1879693
ggagacuuucuuugagcug

SEQ ID NO: 1925637 - RNA, 19 nt, Artificial Sequence
  Description of Artificial Sequence: Synthetic oligonucleotide
  Antisense strand to SEQ ID NO: 1925636
cagcucaaagaaagucucc

SEQ ID NO: 1925638 - RNA, 19 nt, Artificial Sequence
  Description of Artificial Sequence: Synthetic oligonucleotide
  Sense strand starting at position 2104 of SEQ ID NO: 1879693
aaagccuucgucuaaggau

SEQ ID NO: 1925639 - RNA, 19 nt, Artificial Sequence
  Description of Artificial Sequence: Synthetic oligonucleotide
  Antisense strand to SEQ ID NO: 1925638
auccuuagacgaaggcuuu

SEQ ID NO: 1925640 - RNA, 19 nt, Artificial Sequence
  Description of Artificial Sequence: Synthetic oligonucleotide
  Sense strand starting at position 2148 of SEQ ID NO: 1879693
uggguauccuacucaaugu

SEQ ID NO: 1925641 - RNA, 19 nt, Artificial Sequence
  Description of Artificial Sequence: Synthetic oligonucleotide
  Antisense strand to SEQ ID NO: 1925640
acauugaguaggauaccca

SEQ ID NO: 1925642 - RNA, 19 nt, Artificial Sequence
  Description of Artificial Sequence: Synthetic oligonucleotide
  Sense strand starting at position 2159 of SEQ ID NO: 1879693
cucaauguauuaguguaau

SEQ ID NO: 1925643 - RNA, 19 nt, Artificial Sequence
  Description of Artificial Sequence: Synthetic oligonucleotide
  Antisense strand to SEQ ID NO: 1925642
auuacacuaauacauugag

SEQ ID NO: 1925644 - RNA, 19 nt, Artificial Sequence
  Description of Artificial Sequence: Synthetic oligonucleotide
  Sense strand starting at position 2531 of SEQ ID NO: 1879693
ucuucuguguucccaaaca

SEQ ID NO: 1925645 - RNA, 19 nt, Artificial Sequence
  Description of Artificial Sequence: Synthetic oligonucleotide
  Antisense strand to SEQ ID NO: 1925644
uguuugggaacacagaaga

SEQ ID NO: 1925646 - RNA, 19 nt, Artificial Sequence
  Description of Artificial Sequence: Synthetic oligonucleotide
  Sense strand starting at position 2562 of SEQ ID NO: 1879693
ucugcuauugaagaguaau

SEQ ID NO: 1925647 - RNA, 19 nt, Artificial Sequence
  Description of Artificial Sequence: Synthetic oligonucleotide
  Antisense strand to SEQ ID NO: 1925646
auuacucuucaauagcaga

SEQ ID NO: 1925648 - RNA, 19 nt, Artificial Sequence
  Description of Artificial Sequence: Synthetic oligonucleotide
  Sense strand starting at position 3081 of SEQ ID NO: 1879693
auacucuacugguugaaau

SEQ ID NO: 1925649 - RNA, 19 nt, Artificial Sequence
  Description of Artificial Sequence: Synthetic oligonucleotide
  Antisense strand to SEQ ID NO: 1925648
auuucaaccaguagaguau

SEQ ID NO: 1925650 - RNA, 19 nt, Artificial Sequence
  Description of Artificial Sequence: Synthetic oligonucleotide
  Sense strand starting at position 3082 of SEQ ID NO: 1879693
uacucuacugguugaaaug

SEQ ID NO: 1925651 - RNA, 19 nt, Artificial Sequence
  Description of Artificial Sequence: Synthetic oligonucleotide
  Antisense strand to SEQ ID NO: 1925650
cauuucaaccaguagagua

SEQ ID NO: 1925652 - RNA, 19 nt, Artificial Sequence
  Description of Artificial Sequence: Synthetic oligonucleotide
  Sense strand starting at position 3110 of SEQ ID NO: 1879693
gucuucucagguuaucuuu

SEQ ID NO: 1925653 - RNA, 19 nt, Artificial Sequence
  Description of Artificial Sequence: Synthetic oligonucleotide
  Antisense strand to SEQ ID NO: 1925652
aaagauaaccugagaagac

SEQ ID NO: 1925654 - RNA, 19 nt, Artificial Sequence
  Description of Artificial Sequence: Synthetic oligonucleotide
  Sense strand starting at position 3203 of SEQ ID NO: 1879693
guacucauuuguucccuca

SEQ ID NO: 1925655 - RNA, 19 nt, Artificial Sequence
  Description of Artificial Sequence: Synthetic oligonucleotide
  Antisense strand to SEQ ID NO: 1925654
ugagggaacaaaugaguac

SEQ ID NO: 1925656 - RNA, 19 nt, Artificial Sequence
  Description of Artificial Sequence: Synthetic oligonucleotide
  Sense strand starting at position 3299 of SEQ ID NO: 1879693
aggucaacccuuugaagua

SEQ ID NO: 1925657 - RNA, 19 nt, Artificial Sequence
  Description of Artificial Sequence: Synthetic oligonucleotide
  Antisense strand to SEQ ID NO: 1925656
uacuucaaaggguugaccu

SEQ ID NO: 1925658 - RNA, 19 nt, Artificial Sequence
  Description of Artificial Sequence: Synthetic oligonucleotide
  Sense strand starting at position 3387 of SEQ ID NO: 1879693
ucaugugaaugagucgaga

SEQ ID NO: 1925659 - RNA, 19 nt, Artificial Sequence
  Description of Artificial Sequence: Synthetic oligonucleotide
  Antisense strand to SEQ ID NO: 1925658
ucucgacucauucacauga

SEQ ID NO: 1925660 - RNA, 19 nt, Artificial Sequence
  Description of Artificial Sequence: Synthetic oligonucleotide
  Sense strand starting at position 3389 of SEQ ID NO: 1879693
augugaaugagucgagaac

SEQ ID NO: 1925661 - RNA, 19 nt, Artificial Sequence
  Description of Artificial Sequence: Synthetic oligonucleotide
  Antisense strand to SEQ ID NO: 1925660
guucucgacucauucacau

SEQ ID NO: 1925662 - RNA, 19 nt, Artificial Sequence
  Description of Artificial Sequence: Synthetic oligonucleotide
  Sense strand starting at position 3441 of SEQ ID NO: 1879693
gccuaugcccguuccuuaa

SEQ ID NO: 1925663 - RNA, 19 nt, Artificial Sequence
  Description of Artificial Sequence: Synthetic oligonucleotide
  Antisense strand to SEQ ID NO: 1925662
uuaaggaacgggcauaggc

SEQ ID NO: 1925664 - RNA, 19 nt, Artificial Sequence
  Description of Artificial Sequence: Synthetic oligonucleotide
  Sense strand starting at position 3623 of SEQ ID NO: 1879693
uccugugccagcuauggaa

SEQ ID NO: 1925665 - RNA, 19 nt, Artificial Sequence
  Description of Artificial Sequence: Synthetic oligonucleotide
  Antisense strand to SEQ ID NO: 1925664
uuccauagcuggcacagga

SEQ ID NO: 1925666 - RNA, 19 nt, Artificial Sequence
  Description of Artificial Sequence: Synthetic oligonucleotide
  Sense strand starting at position 85 of SEQ ID NO: 1879694
aguguacaucuguaacaaa

SEQ ID NO: 1925667 - RNA, 19 nt, Artificial Sequence
  Description of Artificial Sequence: Synthetic oligonucleotide
  Antisense strand to SEQ ID NO: 1925666
uuuguuacagauguacacu

SEQ ID NO: 1925668 - RNA, 19 nt, Artificial Sequence
  Description of Artificial Sequence: Synthetic oligonucleotide
  Sense strand starting at position 105 of SEQ ID NO: 1879694
acaguuuauuguuccaaga

SEQ ID NO: 1925669 - RNA, 19 nt, Artificial Sequence
  Description of Artificial Sequence: Synthetic oligonucleotide
  Antisense strand to SEQ ID NO: 1925668
ucuuggaacaauaaacugu

SEQ ID NO: 1925670 - RNA, 19 nt, Artificial Sequence
  Description of Artificial Sequence: Synthetic oligonucleotide
  Sense strand starting at position 727 of SEQ ID NO: 1879694
uccauucuggcucaggaga

SEQ ID NO: 1925671 - RNA, 19 nt, Artificial Sequence
  Description of Artificial Sequence: Synthetic oligonucleotide
  Antisense strand to SEQ ID NO: 1925670
ucuccugagccagaaugga

SEQ ID NO: 1925672 - RNA, 19 nt, Artificial Sequence
  Description of Artificial Sequence: Synthetic oligonucleotide
  Sense strand starting at position 748 of SEQ ID NO: 1879694
cagggagguuuccugagga

SEQ ID NO: 1925673 - RNA, 19 nt, Artificial Sequence
  Description of Artificial Sequence: Synthetic oligonucleotide
  Antisense strand to SEQ ID NO: 1925672
uccucaggaaaccucccug

SEQ ID NO: 1925674 - RNA, 19 nt, Artificial Sequence
  Description of Artificial Sequence: Synthetic oligonucleotide
  Sense strand starting at position 761 of SEQ ID NO: 1879694
ugaggaauauggucucauu

SEQ ID NO: 1925675 - RNA, 19 nt, Artificial Sequence
  Description of Artificial Sequence: Synthetic oligonucleotide
  Antisense strand to SEQ ID NO: 1925674
aaugagaccauauuccuca

SEQ ID NO: 1925676 - RNA, 19 nt, Artificial Sequence
  Description of Artificial Sequence: Synthetic oligonucleotide
  Sense strand starting at position 771 of SEQ ID NO: 1879694
ggucucauuccugauggga

SEQ ID NO: 1925677 - RNA, 19 nt, Artificial Sequence
  Description of Artificial Sequence: Synthetic oligonucleotide
  Antisense strand to SEQ ID NO: 1925676
ucccaucaggaaugagacc

SEQ ID NO: 1925678 - RNA, 19 nt, Artificial Sequence
  Description of Artificial Sequence: Synthetic oligonucleotide
  Sense strand starting at position 898 of SEQ ID NO: 1879694
ugaguauggcuugaaguag

SEQ ID NO: 1925679 - RNA, 19 nt, Artificial Sequence
  Description of Artificial Sequence: Synthetic oligonucleotide
  Antisense strand to SEQ ID NO: 1925678
cuacuucaagccauacuca

SEQ ID NO: 1925680 - RNA, 19 nt, Artificial Sequence
  Description of Artificial Sequence: Synthetic oligonucleotide
  Sense strand starting at position 974 of SEQ ID NO: 1879694
ccagaucacaggugaguau

SEQ ID NO: 1925681 - RNA, 19 nt, Artificial Sequence
  Description of Artificial Sequence: Synthetic oligonucleotide
  Antisense strand to SEQ ID NO: 1925680
auacucaccugugaucugg

SEQ ID NO: 1925682 - RNA, 19 nt, Artificial Sequence
  Description of Artificial Sequence: Synthetic oligonucleotide
  Sense strand starting at position 977 of SEQ ID NO: 1879694
gaucacaggugaguauauu

SEQ ID NO: 1925683 - RNA, 19 nt, Artificial Sequence
  Description of Artificial Sequence: Synthetic oligonucleotide
  Antisense strand to SEQ ID NO: 1925682
aauauacucaccugugauc

SEQ ID NO: 1925684 - RNA, 19 nt, Artificial Sequence
  Description of Artificial Sequence: Synthetic oligonucleotide
  Sense strand starting at position 1091 of SEQ ID NO: 1879694
gcaguuuagaaagaguaau

SEQ ID NO: 1925685 - RNA, 19 nt, Artificial Sequence
  Description of Artificial Sequence: Synthetic oligonucleotide
  Antisense strand to SEQ ID NO: 1925684
auuacucuuucuaaacugc

SEQ ID NO: 1925686 - RNA, 19 nt, Artificial Sequence
  Description of Artificial Sequence: Synthetic oligonucleotide
  Sense strand starting at position 1103 of SEQ ID NO: 1879694
gaguaaucagaauggguag

SEQ ID NO: 1925687 - RNA, 19 nt, Artificial Sequence
  Description of Artificial Sequence: Synthetic oligonucleotide
  Antisense strand to SEQ ID NO: 1925686
cuacccauucugauuacuc

SEQ ID NO: 1925688 - RNA, 19 nt, Artificial Sequence
  Description of Artificial Sequence: Synthetic oligonucleotide
  Sense strand starting at position 1457 of SEQ ID NO: 1879694
gaagauccugaguggucca

SEQ ID NO: 1925689 - RNA, 19 nt, Artificial Sequence
  Description of Artificial Sequence: Synthetic oligonucleotide
  Antisense strand to SEQ ID NO: 1925688
uggaccacucaggaucuuc

SEQ ID NO: 1925690 - RNA, 19 nt, Artificial Sequence
  Description of Artificial Sequence: Synthetic oligonucleotide
  Sense strand starting at position 1460 of SEQ ID NO: 1879694
gauccugagugguccagga

SEQ ID NO: 1925691 - RNA, 19 nt, Artificial Sequence
  Description of Artificial Sequence: Synthetic oligonucleotide
  Antisense strand to SEQ ID NO: 1925690
uccuggaccacucaggauc

SEQ ID NO: 1925692 - RNA, 19 nt, Artificial Sequence
  Description of Artificial Sequence: Synthetic oligonucleotide
  Sense strand starting at position 1462 of SEQ ID NO: 1879694
uccugagugguccaggaga

SEQ ID NO: 1925693 - RNA, 19 nt, Artificial Sequence
  Description of Artificial Sequence: Synthetic oligonucleotide
  Antisense strand to SEQ ID NO: 1925692
ucuccuggaccacucagga

SEQ ID NO: 1925694 - RNA, 19 nt, Artificial Sequence
  Description of Artificial Sequence: Synthetic oligonucleotide
  Sense strand starting at position 1464 of SEQ ID NO: 1879694
cugagugguccaggagaga

SEQ ID NO: 1925695 - RNA, 19 nt, Artificial Sequence
  Description of Artificial Sequence: Synthetic oligonucleotide
  Antisense strand to SEQ ID NO: 1925694
ucucuccuggaccacucag

SEQ ID NO: 1925696 - RNA, 19 nt, Artificial Sequence
  Description of Artificial Sequence: Synthetic oligonucleotide
  Sense strand starting at position 1560 of SEQ ID NO: 1879694
aggacuugugacuggauga

SEQ ID NO: 1925697 - RNA, 19 nt, Artificial Sequence
  Description of Artificial Sequence: Synthetic oligonucleotide
  Antisense strand to SEQ ID NO: 1925696
ucauccagucacaaguccu

SEQ ID NO: 1925698 - RNA, 19 nt, Artificial Sequence
  Description of Artificial Sequence: Synthetic oligonucleotide
  Sense strand starting at position 1561 of SEQ ID NO: 1879694
ggacuugugacuggaugac

SEQ ID NO: 1925699 - RNA, 19 nt, Artificial Sequence
  Description of Artificial Sequence: Synthetic oligonucleotide
  Antisense strand to SEQ ID NO: 1925698
gucauccagucacaagucc

SEQ ID NO: 1925700 - RNA, 19 nt, Artificial Sequence
  Description of Artificial Sequence: Synthetic oligonucleotide
  Sense strand starting at position 1699 of SEQ ID NO: 1879694
gaacgauugauugggcaug

SEQ ID NO: 1925701 - RNA, 19 nt, Artificial Sequence
  Description of Artificial Sequence: Synthetic oligonucleotide
  Antisense strand to SEQ ID NO: 1925700
caugcccaaucaaucguuc

SEQ ID NO: 1925702 - RNA, 19 nt, Artificial Sequence
  Description of Artificial Sequence: Synthetic oligonucleotide
  Sense strand starting at position 1850 of SEQ ID NO: 1879694
gugucacagaaguauguga

SEQ ID NO: 1925703 - RNA, 19 nt, Artificial Sequence
  Description of Artificial Sequence: Synthetic oligonucleotide
  Antisense strand to SEQ ID NO: 1925702
ucacauacuucugugacac

SEQ ID NO: 1925704 - RNA, 19 nt, Artificial Sequence
  Description of Artificial Sequence: Synthetic oligonucleotide
  Sense strand starting at position 1894 of SEQ ID NO: 1879694
gccugaugucauuagacag

SEQ ID NO: 1925705 - RNA, 19 nt, Artificial Sequence
  Description of Artificial Sequence: Synthetic oligonucleotide
  Antisense strand to SEQ ID NO: 1925704
cugucuaaugacaucaggc

SEQ ID NO: 1925706 - RNA, 19 nt, Artificial Sequence
  Description of Artificial Sequence: Synthetic oligonucleotide
  Sense strand starting at position 2203 of SEQ ID NO: 1879694
gggagauacccuuggguga

SEQ ID NO: 1925707 - RNA, 19 nt, Artificial Sequence
  Description of Artificial Sequence: Synthetic oligonucleotide
  Antisense strand to SEQ ID NO: 1925706
ucacccaaggguaucuccc

SEQ ID NO: 1925708 - RNA, 19 nt, Artificial Sequence
  Description of Artificial Sequence: Synthetic oligonucleotide
  Sense strand starting at position 2413 of SEQ ID NO: 1879694
ucugcuagacuaugagaua

SEQ ID NO: 1925709 - RNA, 19 nt, Artificial Sequence
  Description of Artificial Sequence: Synthetic oligonucleotide
  Antisense strand to SEQ ID NO: 1925708
uaucucauagucuagcaga

SEQ ID NO: 1925710 - RNA, 19 nt, Artificial Sequence
  Description of Artificial Sequence: Synthetic oligonucleotide
  Sense strand starting at position 2441 of SEQ ID NO: 1879694
cugcuaagauggguacuaa

SEQ ID NO: 1925711 - RNA, 19 nt, Artificial Sequence
  Description of Artificial Sequence: Synthetic oligonucleotide
  Antisense strand to SEQ ID NO: 1925710
uuaguacccaucuuagcag

SEQ ID NO: 1925712 - RNA, 19 nt, Artificial Sequence
  Description of Artificial Sequence: Synthetic oligonucleotide
  Sense strand starting at position 2442 of SEQ ID NO: 1879694
ugcuaagauggguacuaau

SEQ ID NO: 1925713 - RNA, 19 nt, Artificial Sequence
  Description of Artificial Sequence: Synthetic oligonucleotide
  Antisense strand to SEQ ID NO: 1925712
auuaguacccaucuuagca

SEQ ID NO: 1925714 - RNA, 19 nt, Artificial Sequence
  Description of Artificial Sequence: Synthetic oligonucleotide
  Sense strand starting at position 2451 of SEQ ID NO: 1879694
ggguacuaaucaguuaaug

SEQ ID NO: 1925715 - RNA, 19 nt, Artificial Sequence
  Description of Artificial Sequence: Synthetic oligonucleotide
  Antisense strand to SEQ ID NO: 1925714
cauuaacugauuaguaccc

SEQ ID NO: 1925716 - RNA, 19 nt, Artificial Sequence
  Description of Artificial Sequence: Synthetic oligonucleotide
  Sense strand starting at position 2514 of SEQ ID NO: 1879694
ggagacauguaaguagcau

SEQ ID NO: 1925717 - RNA, 19 nt, Artificial Sequence
  Description of Artificial Sequence: Synthetic oligonucleotide
  Antisense strand to SEQ ID NO: 1925716
augcuacuuacaugucucc

SEQ ID NO: 1925718 - RNA, 19 nt, Artificial Sequence
  Description of Artificial Sequence: Synthetic oligonucleotide
  Sense strand starting at position 2652 of SEQ ID NO: 1879694
acauuaacauguuuggagu

SEQ ID NO: 1925719 - RNA, 19 nt, Artificial Sequence
  Description of Artificial Sequence: Synthetic oligonucleotide
  Antisense strand to SEQ ID NO: 1925718
acuccaaacauguuaaugu

SEQ ID NO: 1925720 - RNA, 19 nt, Artificial Sequence
  Description of Artificial Sequence: Synthetic oligonucleotide
  Sense strand starting at position 2891 of SEQ ID NO: 1879694
uagugaucucauugguaga

SEQ ID NO: 1925721 - RNA, 19 nt, Artificial Sequence
  Description of Artificial Sequence: Synthetic oligonucleotide
  Antisense strand to SEQ ID NO: 1925720
ucuaccaaugagaucacua

SEQ ID NO: 1925722 - RNA, 19 nt, Artificial Sequence
  Description of Artificial Sequence: Synthetic oligonucleotide
  Sense strand starting at position 2892 of SEQ ID NO: 1879694
agugaucucauugguagaa

SEQ ID NO: 1925723 - RNA, 19 nt, Artificial Sequence
  Description of Artificial Sequence: Synthetic oligonucleotide
  Antisense strand to SEQ ID NO: 1925722
uucuaccaaugagaucacu

SEQ ID NO: 1925724 - RNA, 19 nt, Artificial Sequence
  Description of Artificial Sequence: Synthetic oligonucleotide
  Sense strand starting at position 2893 of SEQ ID NO: 1879694
gugaucucauugguagaac

SEQ ID NO: 1925725 - RNA, 19 nt, Artificial Sequence
  Description of Artificial Sequence: Synthetic oligonucleotide
  Antisense strand to SEQ ID NO: 1925724
guucuaccaaugagaucac

SEQ ID NO: 1925726 - RNA, 19 nt, Artificial Sequence
  Description of Artificial Sequence: Synthetic oligonucleotide
  Sense strand starting at position 2948 of SEQ ID NO: 1879694
auguuuacuaagggcugaa

SEQ ID NO: 1925727 - RNA, 19 nt, Artificial Sequence
  Description of Artificial Sequence: Synthetic oligonucleotide
  Antisense strand to SEQ ID NO: 1925726
uucagcccuuaguaaacau

SEQ ID NO: 1925728 - RNA, 19 nt, Artificial Sequence
  Description of Artificial Sequence: Synthetic oligonucleotide
  Sense strand starting at position 2951 of SEQ ID NO: 1879694
uuuacuaagggcugaauua

SEQ ID NO: 1925729 - RNA, 19 nt, Artificial Sequence
  Description of Artificial Sequence: Synthetic oligonucleotide
  Antisense strand to SEQ ID NO: 1925728
uaauucagcccuuaguaaa

SEQ ID NO: 1925730 - RNA, 19 nt, Artificial Sequence
  Description of Artificial Sequence: Synthetic oligonucleotide
  Sense strand starting at position 2975 of SEQ ID NO: 1879694
gaaucucuugggugaggga

SEQ ID NO: 1925731 - RNA, 19 nt, Artificial Sequence
  Description of Artificial Sequence: Synthetic oligonucleotide
  Antisense strand to SEQ ID NO: 1925730
ucccucacccaagagauuc

SEQ ID NO: 1925732 - RNA, 19 nt, Artificial Sequence
  Description of Artificial Sequence: Synthetic oligonucleotide
  Sense strand starting at position 3150 of SEQ ID NO: 1879694
ccagccuugcaagacuuaa

SEQ ID NO: 1925733 - RNA, 19 nt, Artificial Sequence
  Description of Artificial Sequence: Synthetic oligonucleotide
  Antisense strand to SEQ ID NO: 1925732
uuaagucuugcaaggcugg

SEQ ID NO: 1925734 - RNA, 19 nt, Artificial Sequence
  Description of Artificial Sequence: Synthetic oligonucleotide
  Sense strand starting at position 3348 of SEQ ID NO: 1879694
ccucuaaugugacucugga

SEQ ID NO: 1925735 - RNA, 19 nt, Artificial Sequence
  Description of Artificial Sequence: Synthetic oligonucleotide
  Antisense strand to SEQ ID NO: 1925734
uccagagucacauuagagg

SEQ ID NO: 1925736 - RNA, 19 nt, Artificial Sequence
  Description of Artificial Sequence: Synthetic oligonucleotide
  Sense strand starting at position 3510 of SEQ ID NO: 1879694
aucaguugaugucugaauu

SEQ ID NO: 1925737 - RNA, 19 nt, Artificial Sequence
  Description of Artificial Sequence: Synthetic oligonucleotide
  Antisense strand to SEQ ID NO: 1925736
aauucagacaucaacugau

SEQ ID NO: 1925738 - RNA, 19 nt, Artificial Sequence
  Description of Artificial Sequence: Synthetic oligonucleotide
  Sense strand starting at position 3543 of SEQ ID NO: 1879694
cuuaccaaguggucauuaa

SEQ ID NO: 1925739 - RNA, 19 nt, Artificial Sequence
  Description of Artificial Sequence: Synthetic oligonucleotide
  Antisense strand to SEQ ID NO: 1925738
uuaaugaccacuugguaag

SEQ ID NO: 1925740 - RNA, 19 nt, Artificial Sequence
  Description of Artificial Sequence: Synthetic oligonucleotide
  Sense strand starting at position 3547 of SEQ ID NO: 1879694
ccaaguggucauuaagcca

SEQ ID NO: 1925741 - RNA, 19 nt, Artificial Sequence
  Description of Artificial Sequence: Synthetic oligonucleotide
  Antisense strand to SEQ ID NO: 1925740
uggcuuaaugaccacuugg

SEQ ID NO: 1925742 - RNA, 19 nt, Artificial Sequence
  Description of Artificial Sequence: Synthetic oligonucleotide
  Sense strand starting at position 3555 of SEQ ID NO: 1879694
ucauuaagccaguacuuga

SEQ ID NO: 1925743 - RNA, 19 nt, Artificial Sequence
  Description of Artificial Sequence: Synthetic oligonucleotide
  Antisense strand to SEQ ID NO: 1925742
ucaaguacuggcuuaauga

SEQ ID NO: 1925744 - RNA, 19 nt, Artificial Sequence
  Description of Artificial Sequence: Synthetic oligonucleotide
  Sense strand starting at position 3558 of SEQ ID NO: 1879694
uuaagccaguacuugaaua

SEQ ID NO: 1925745 - RNA, 19 nt, Artificial Sequence
  Description of Artificial Sequence: Synthetic oligonucleotide
  Antisense strand to SEQ ID NO: 1925744
uauucaaguacuggcuuaa

SEQ ID NO: 1925746 - RNA, 19 nt, Artificial Sequence
  Description of Artificial Sequence: Synthetic oligonucleotide
  Sense strand starting at position 105 of SEQ ID NO: 1879695
auggccacaucccugaaua

SEQ ID NO: 1925747 - RNA, 19 nt, Artificial Sequence
  Description of Artificial Sequence: Synthetic oligonucleotide
  Antisense strand to SEQ ID NO: 1925746
uauucagggauguggccau

SEQ ID NO: 1925748 - RNA, 19 nt, Artificial Sequence
  Description of Artificial Sequence: Synthetic oligonucleotide
  Sense strand starting at position 106 of SEQ ID NO: 1879695
uggccacaucccugaauau

SEQ ID NO: 1925749 - RNA, 19 nt, Artificial Sequence
  Description of Artificial Sequence: Synthetic oligonucleotide
  Antisense strand to SEQ ID NO: 1925748
auauucagggauguggcca

SEQ ID NO: 1925750 - RNA, 19 nt, Artificial Sequence
  Description of Artificial Sequence: Synthetic oligonucleotide
  Sense strand starting at position 107 of SEQ ID NO: 1879695
ggccacaucccugaauauc

SEQ ID NO: 1925751 - RNA, 19 nt, Artificial Sequence
  Description of Artificial Sequence: Synthetic oligonucleotide
  Antisense strand to SEQ ID NO: 1925750
gauauucagggauguggcc

SEQ ID NO: 1925752 - RNA, 19 nt, Artificial Sequence
  Description of Artificial Sequence: Synthetic oligonucleotide
  Sense strand starting at position 218 of SEQ ID NO: 1879695
acugguucuuacuuauaga

SEQ ID NO: 1925753 - RNA, 19 nt, Artificial Sequence
  Description of Artificial Sequence: Synthetic oligonucleotide
  Antisense strand to SEQ ID NO: 1925752
ucuauaaguaagaaccagu

SEQ ID NO: 1925754 - RNA, 19 nt, Artificial Sequence
  Description of Artificial Sequence: Synthetic oligonucleotide
  Sense strand starting at position 312 of SEQ ID NO: 1879695
uggcauaagcuccacauaa

SEQ ID NO: 1925755 - RNA, 19 nt, Artificial Sequence
  Description of Artificial Sequence: Synthetic oligonucleotide
  Antisense strand to SEQ ID NO: 1925754
uuauguggagcuuaugcca

SEQ ID NO: 1925756 - RNA, 19 nt, Artificial Sequence
  Description of Artificial Sequence: Synthetic oligonucleotide
  Sense strand starting at position 323 of SEQ ID NO: 1879695
ccacauaaccaguguacau

SEQ ID NO: 1925757 - RNA, 19 nt, Artificial Sequence
  Description of Artificial Sequence: Synthetic oligonucleotide
  Antisense strand to SEQ ID NO: 1925756
auguacacugguuaugugg

SEQ ID NO: 1925758 - RNA, 19 nt, Artificial Sequence
  Description of Artificial Sequence: Synthetic oligonucleotide
  Sense strand starting at position 447 of SEQ ID NO: 1879695
cucauauguagaggucaug

SEQ ID NO: 1925759 - RNA, 19 nt, Artificial Sequence
  Description of Artificial Sequence: Synthetic oligonucleotide
  Antisense strand to SEQ ID NO: 1925758
caugaccucuacauaugag

SEQ ID NO: 1925760 - RNA, 19 nt, Artificial Sequence
  Description of Artificial Sequence: Synthetic oligonucleotide
  Sense strand starting at position 495 of SEQ ID NO: 1879695
augcguacacaauaaacua

SEQ ID NO: 1925761 - RNA, 19 nt, Artificial Sequence
  Description of Artificial Sequence: Synthetic oligonucleotide
  Antisense strand to SEQ ID NO: 1925760
uaguuuauuguguacgcau

SEQ ID NO: 1925762 - RNA, 19 nt, Artificial Sequence
  Description of Artificial Sequence: Synthetic oligonucleotide
  Sense strand starting at position 719 of SEQ ID NO: 1879695
agcuauaagcgaggagaau

SEQ ID NO: 1925763 - RNA, 19 nt, Artificial Sequence
  Description of Artificial Sequence: Synthetic oligonucleotide
  Antisense strand to SEQ ID NO: 1925762
auucuccucgcuuauagcu

SEQ ID NO: 1925764 - RNA, 19 nt, Artificial Sequence
  Description of Artificial Sequence: Synthetic oligonucleotide
  Sense strand starting at position 720 of SEQ ID NO: 1879695
gcuauaagcgaggagaauc

SEQ ID NO: 1925765 - RNA, 19 nt, Artificial Sequence
  Description of Artificial Sequence: Synthetic oligonucleotide
  Antisense strand to SEQ ID NO: 1925764
gauucuccucgcuuauagc

SEQ ID NO: 1925766 - RNA, 19 nt, Artificial Sequence
  Description of Artificial Sequence: Synthetic oligonucleotide
  Sense strand starting at position 751 of SEQ ID NO: 1879695
agagcuuccuaauuaaaug

SEQ ID NO: 1925767 - RNA, 19 nt, Artificial Sequence
  Description of Artificial Sequence: Synthetic oligonucleotide
  Antisense strand to SEQ ID NO: 1925766
cauuuaauuaggaagcucu

SEQ ID NO: 1925768 - RNA, 19 nt, Artificial Sequence
  Description of Artificial Sequence: Synthetic oligonucleotide
  Sense strand starting at position 782 of SEQ ID NO: 1879695
uguaucagucaguaaaucu

SEQ ID NO: 1925769 - RNA, 19 nt, Artificial Sequence
  Description of Artificial Sequence: Synthetic oligonucleotide
  Antisense strand to SEQ ID NO: 1925768
agauuuacugacugauaca

SEQ ID NO: 1925770 - RNA, 19 nt, Artificial Sequence
  Description of Artificial Sequence: Synthetic oligonucleotide
  Sense strand starting at position 1331 of SEQ ID NO: 1879695
agugccuggccagaaacau

SEQ ID NO: 1925771 - RNA, 19 nt, Artificial Sequence
  Description of Artificial Sequence: Synthetic oligonucleotide
  Antisense strand to SEQ ID NO: 1925770
auguuucuggccaggcacu

SEQ ID NO: 1925772 - RNA, 19 nt, Artificial Sequence
  Description of Artificial Sequence: Synthetic oligonucleotide
  Sense strand starting at position 1392 of SEQ ID NO: 1879695
uuuaaucugcaauagggua

SEQ ID NO: 1925773 - RNA, 19 nt, Artificial Sequence
  Description of Artificial Sequence: Synthetic oligonucleotide
  Antisense strand to SEQ ID NO: 1925772
uacccuauugcagauuaaa

SEQ ID NO: 1925774 - RNA, 19 nt, Artificial Sequence
  Description of Artificial Sequence: Synthetic oligonucleotide
  Sense strand starting at position 1529 of SEQ ID NO: 1879695
uucuguucugcauagagau

SEQ ID NO: 1925775 - RNA, 19 nt, Artificial Sequence
  Description of Artificial Sequence: Synthetic oligonucleotide
  Antisense strand to SEQ ID NO: 1925774
aucucuaugcagaacagaa

SEQ ID NO: 1925776 - RNA, 19 nt, Artificial Sequence
  Description of Artificial Sequence: Synthetic oligonucleotide
  Sense strand starting at position 1531 of SEQ ID NO: 1879695
cuguucugcauagagauga

SEQ ID NO: 1925777 - RNA, 19 nt, Artificial Sequence
  Description of Artificial Sequence: Synthetic oligonucleotide
  Antisense strand to SEQ ID NO: 1925776
ucaucucuaugcagaacag

SEQ ID NO: 1925778 - RNA, 19 nt, Artificial Sequence
  Description of Artificial Sequence: Synthetic oligonucleotide
  Sense strand starting at position 1551 of SEQ ID NO: 1879695
ggagcauguggaugaaauc

SEQ ID NO: 1925779 - RNA, 19 nt, Artificial Sequence
  Description of Artificial Sequence: Synthetic oligonucleotide
  Antisense strand to SEQ ID NO: 1925778
gauuucauccacaugcucc

SEQ ID NO: 1925780 - RNA, 19 nt, Artificial Sequence
  Description of Artificial Sequence: Synthetic oligonucleotide
  Sense strand starting at position 1781 of SEQ ID NO: 1879695
uuuacagaguuccuuauca

SEQ ID NO: 1925781 - RNA, 19 nt, Artificial Sequence
  Description of Artificial Sequence: Synthetic oligonucleotide
  Antisense strand to SEQ ID NO: 1925780
ugauaaggaacucuguaaa

SEQ ID NO: 1925782 - RNA, 19 nt, Artificial Sequence
  Description of Artificial Sequence: Synthetic oligonucleotide
  Sense strand starting at position 1874 of SEQ ID NO: 1879695
gaaauaaagguuugcaagu

SEQ ID NO: 1925783 - RNA, 19 nt, Artificial Sequence
  Description of Artificial Sequence: Synthetic oligonucleotide
  Antisense strand to SEQ ID NO: 1925782
acuugcaaaccuuuauuuc

SEQ ID NO: 1925784 - RNA, 19 nt, Artificial Sequence
  Description of Artificial Sequence: Synthetic oligonucleotide
  Sense strand starting at position 1875 of SEQ ID NO: 1879695
aaauaaagguuugcaaguu

SEQ ID NO: 1925785 - RNA, 19 nt, Artificial Sequence
  Description of Artificial Sequence: Synthetic oligonucleotide
  Antisense strand to SEQ ID NO: 1925784
aacuugcaaaccuuuauuu

SEQ ID NO: 1925786 - RNA, 19 nt, Artificial Sequence
  Description of Artificial Sequence: Synthetic oligonucleotide
  Sense strand starting at position 2001 of SEQ ID NO: 1879695
uccuucucaggugagauua

SEQ ID NO: 1925787 - RNA, 19 nt, Artificial Sequence
  Description of Artificial Sequence: Synthetic oligonucleotide
  Antisense strand to SEQ ID NO: 1925786
uaaucucaccugagaagga

SEQ ID NO: 1925788 - RNA, 19 nt, Artificial Sequence
  Description of Artificial Sequence: Synthetic oligonucleotide
  Sense strand starting at position 2218 of SEQ ID NO: 1879695
ugccaugaacuccagcaau

SEQ ID NO: 1925789 - RNA, 19 nt, Artificial Sequence
  Description of Artificial Sequence: Synthetic oligonucleotide
  Antisense strand to SEQ ID NO: 1925788
auugcuggaguucauggca

SEQ ID NO: 1925790 - RNA, 19 nt, Artificial Sequence
  Description of Artificial Sequence: Synthetic oligonucleotide
  Sense strand starting at position 2459 of SEQ ID NO: 1879695
augguaguucuccaaacug

SEQ ID NO: 1925791 - RNA, 19 nt, Artificial Sequence
  Description of Artificial Sequence: Synthetic oligonucleotide
  Antisense strand to SEQ ID NO: 1925790
caguuuggagaacuaccau

SEQ ID NO: 1925792 - RNA, 19 nt, Artificial Sequence
  Description of Artificial Sequence: Synthetic oligonucleotide
  Sense strand starting at position 2474 of SEQ ID NO: 1879695
acuggcuauuuguuucuaa

SEQ ID NO: 1925793 - RNA, 19 nt, Artificial Sequence
  Description of Artificial Sequence: Synthetic oligonucleotide
  Antisense strand to SEQ ID NO: 1925792
uuagaaacaaauagccagu

SEQ ID NO: 1925794 - RNA, 19 nt, Artificial Sequence
  Description of Artificial Sequence: Synthetic oligonucleotide
  Sense strand starting at position 2475 of SEQ ID NO: 1879695
cuggcuauuuguuucuaau

SEQ ID NO: 1925795 - RNA, 19 nt, Artificial Sequence
  Description of Artificial Sequence: Synthetic oligonucleotide
  Antisense strand to SEQ ID NO: 1925794
auuagaaacaaauagccag

SEQ ID NO: 1925796 - RNA, 19 nt, Artificial Sequence
  Description of Artificial Sequence: Synthetic oligonucleotide
  Sense strand starting at position 2477 of SEQ ID NO: 1879695
ggcuauuuguuucuaauug

SEQ ID NO: 1925797 - RNA, 19 nt, Artificial Sequence
  Description of Artificial Sequence: Synthetic oligonucleotide
  Antisense strand to SEQ ID NO: 1925796
caauuagaaacaaauagcc

SEQ ID NO: 1925798 - RNA, 19 nt, Artificial Sequence
  Description of Artificial Sequence: Synthetic oligonucleotide
  Sense strand starting at position 2604 of SEQ ID NO: 1879695
guguuuccgcaggugugaa

SEQ ID NO: 1925799 - RNA, 19 nt, Artificial Sequence
  Description of Artificial Sequence: Synthetic oligonucleotide
  Antisense strand to SEQ ID NO: 1925798
uucacaccugcggaaacac

SEQ ID NO: 1925800 - RNA, 19 nt, Artificial Sequence
  Description of Artificial Sequence: Synthetic oligonucleotide
  Sense strand starting at position 2686 of SEQ ID NO: 1879695
gcagcacucagcuagagaa

SEQ ID NO: 1925801 - RNA, 19 nt, Artificial Sequence
  Description of Artificial Sequence: Synthetic oligonucleotide
  Antisense strand to SEQ ID NO: 1925800
uucucuagcugagugcugc

SEQ ID NO: 1925802 - RNA, 19 nt, Artificial Sequence
  Description of Artificial Sequence: Synthetic oligonucleotide
  Sense strand starting at position 3080 of SEQ ID NO: 1879695
ucugauugcaagugaagac

SEQ ID NO: 1925803 - RNA, 19 nt, Artificial Sequence
  Description of Artificial Sequence: Synthetic oligonucleotide
  Antisense strand to SEQ ID NO: 1925802
gucuucacuugcaaucaga

SEQ ID NO: 1925804 - RNA, 19 nt, Artificial Sequence
  Description of Artificial Sequence: Synthetic oligonucleotide
  Sense strand starting at position 3129 of SEQ ID NO: 1879695
ucugcugagcguuuaaagu

SEQ ID NO: 1925805 - RNA, 19 nt, Artificial Sequence
  Description of Artificial Sequence: Synthetic oligonucleotide
  Antisense strand to SEQ ID NO: 1925804
acuuuaaacgcucagcaga

SEQ ID NO: 1925806 - RNA, 19 nt, Artificial Sequence
  Description of Artificial Sequence: Synthetic oligonucleotide
  Sense strand starting at position 3252 of SEQ ID NO: 1879695
aaguguguuacagaggaca

SEQ ID NO: 1925807 - RNA, 19 nt, Artificial Sequence
  Description of Artificial Sequence: Synthetic oligonucleotide
  Antisense strand to SEQ ID NO: 1925806
uguccucuguaacacacuu

SEQ ID NO: 1925808 - RNA, 19 nt, Artificial Sequence
  Description of Artificial Sequence: Synthetic oligonucleotide
  Sense strand starting at position 3281 of SEQ ID NO: 1879695
ccuaguaauaggugaggua

SEQ ID NO: 1925809 - RNA, 19 nt, Artificial Sequence
  Description of Artificial Sequence: Synthetic oligonucleotide
  Antisense strand to SEQ ID NO: 1925808
uaccucaccuauuacuagg

SEQ ID NO: 1925810 - RNA, 19 nt, Artificial Sequence
  Description of Artificial Sequence: Synthetic oligonucleotide
  Sense strand starting at position 3282 of SEQ ID NO: 1879695
cuaguaauaggugagguaa

SEQ ID NO: 1925811 - RNA, 19 nt, Artificial Sequence
  Description of Artificial Sequence: Synthetic oligonucleotide
  Antisense strand to SEQ ID NO: 1925810
uuaccucaccuauuacuag

SEQ ID NO: 1925812 - RNA, 19 nt, Artificial Sequence
  Description of Artificial Sequence: Synthetic oligonucleotide
  Sense strand starting at position 3463 of SEQ ID NO: 1879695
gguuaaauguaguugagag

SEQ ID NO: 1925813 - RNA, 19 nt, Artificial Sequence
  Description of Artificial Sequence: Synthetic oligonucleotide
  Antisense strand to SEQ ID NO: 1925812
cucucaacuacauuuaacc

SEQ ID NO: 1925814 - RNA, 19 nt, Artificial Sequence
  Description of Artificial Sequence: Synthetic oligonucleotide
  Sense strand starting at position 3464 of SEQ ID NO: 1879695
guuaaauguaguugagagg

SEQ ID NO: 1925815 - RNA, 19 nt, Artificial Sequence
  Description of Artificial Sequence: Synthetic oligonucleotide
  Antisense strand to SEQ ID NO: 1925814
ccucucaacuacauuuaac

SEQ ID NO: 1925816 - RNA, 19 nt, Artificial Sequence
  Description of Artificial Sequence: Synthetic oligonucleotide
  Sense strand starting at position 3652 of SEQ ID NO: 1879695
agugcuuuguucucauuua

SEQ ID NO: 1925817 - RNA, 19 nt, Artificial Sequence
  Description of Artificial Sequence: Synthetic oligonucleotide
  Antisense strand to SEQ ID NO: 1925816
uaaaugagaacaaagcacu

SEQ ID NO: 1925818 - RNA, 19 nt, Artificial Sequence
  Description of Artificial Sequence: Synthetic oligonucleotide
  Sense strand starting at position 3699 of SEQ ID NO: 1879695
gcaccugcucuggagagau

SEQ ID NO: 1925819 - RNA, 19 nt, Artificial Sequence
  Description of Artificial Sequence: Synthetic oligonucleotide
  Antisense strand to SEQ ID NO: 1925818
aucucuccagagcaggugc

SEQ ID NO: 1925820 - RNA, 19 nt, Artificial Sequence
  Description of Artificial Sequence: Synthetic oligonucleotide
  Sense strand starting at position 3741 of SEQ ID NO: 1879695
ucugauguccucuaaugaa

SEQ ID NO: 1925821 - RNA, 19 nt, Artificial Sequence
  Description of Artificial Sequence: Synthetic oligonucleotide
  Antisense strand to SEQ ID NO: 1925820
uucauuagaggacaucaga

SEQ ID NO: 1925822 - RNA, 19 nt, Artificial Sequence
  Description of Artificial Sequence: Synthetic oligonucleotide
  Sense strand starting at position 3905 of SEQ ID NO: 1879695
gcuugacucccagaguuug

SEQ ID NO: 1925823 - RNA, 19 nt, Artificial Sequence
  Description of Artificial Sequence: Synthetic oligonucleotide
  Antisense strand to SEQ ID NO: 1925822
caaacucugggagucaagc

SEQ ID NO: 1925824 - RNA, 19 nt, Artificial Sequence
  Description of Artificial Sequence: Synthetic oligonucleotide
  Sense strand starting at position 3913 of SEQ ID NO: 1879695
cccagaguuuguguaauuu

SEQ ID NO: 1925825 - RNA, 19 nt, Artificial Sequence
  Description of Artificial Sequence: Synthetic oligonucleotide
  Antisense strand to SEQ ID NO: 1925824
aaauuacacaaacucuggg

SEQ ID NO: 1925826 - RNA, 19 nt, Artificial Sequence
  Description of Artificial Sequence: Synthetic oligonucleotide
  Sense strand starting at position 211 of SEQ ID NO: 1879696
agaagaagccauggugaau

SEQ ID NO: 1925827 - RNA, 19 nt, Artificial Sequence
  Description of Artificial Sequence: Synthetic oligonucleotide
  Antisense strand to SEQ ID NO: 1925826
auucaccauggcuucuucu

SEQ ID NO: 1925828 - RNA, 19 nt, Artificial Sequence
  Description of Artificial Sequence: Synthetic oligonucleotide
  Sense strand starting at position 249 of SEQ ID NO: 1879696
guguauucugcacaaucaa

SEQ ID NO: 1925829 - RNA, 19 nt, Artificial Sequence
  Description of Artificial Sequence: Synthetic oligonucleotide
  Antisense strand to SEQ ID NO: 1925828
uugauugugcagaauacac

SEQ ID NO: 1925830 - RNA, 19 nt, Artificial Sequence
  Description of Artificial Sequence: Synthetic oligonucleotide
  Sense strand starting at position 320 of SEQ ID NO: 1879696
uuugccuuucuauauguca

SEQ ID NO: 1925831 - RNA, 19 nt, Artificial Sequence
  Description of Artificial Sequence: Synthetic oligonucleotide
  Antisense strand to SEQ ID NO: 1925830
ugacauauagaaaggcaaa

SEQ ID NO: 1925832 - RNA, 19 nt, Artificial Sequence
  Description of Artificial Sequence: Synthetic oligonucleotide
  Sense strand starting at position 323 of SEQ ID NO: 1879696
gccuuucuauaugucauca

SEQ ID NO: 1925833 - RNA, 19 nt, Artificial Sequence
  Description of Artificial Sequence: Synthetic oligonucleotide
  Antisense strand to SEQ ID NO: 1925832
ugaugacauauagaaaggc

SEQ ID NO: 1925834 - RNA, 19 nt, Artificial Sequence
  Description of Artificial Sequence: Synthetic oligonucleotide
  Sense strand starting at position 366 of SEQ ID NO: 1879696
cuacauacaucgucagaaa

SEQ ID NO: 1925835 - RNA, 19 nt, Artificial Sequence
  Description of Artificial Sequence: Synthetic oligonucleotide
  Antisense strand to SEQ ID NO: 1925834
uuucugacgauguauguag

SEQ ID NO: 1925836 - RNA, 19 nt, Artificial Sequence
  Description of Artificial Sequence: Synthetic oligonucleotide
  Sense strand starting at position 390 of SEQ ID NO: 1879696
guggaauaaagacgucuaa

SEQ ID NO: 1925837 - RNA, 19 nt, Artificial Sequence
  Description of Artificial Sequence: Synthetic oligonucleotide
  Antisense strand to SEQ ID NO: 1925836
uuagacgucuuuauuccac

SEQ ID NO: 1925838 - RNA, 19 nt, Artificial Sequence
  Description of Artificial Sequence: Synthetic oligonucleotide
  Sense strand starting at position 402 of SEQ ID NO: 1879696
cgucuaaauuaaccacgaa

SEQ ID NO: 1925839 - RNA, 19 nt, Artificial Sequence
  Description of Artificial Sequence: Synthetic oligonucleotide
  Antisense strand to SEQ ID NO: 1925838
uucgugguuaauuuagacg

SEQ ID NO: 1925840 - RNA, 19 nt, Artificial Sequence
  Description of Artificial Sequence: Synthetic oligonucleotide
  Sense strand starting at position 468 of SEQ ID NO: 1879696
auaugauauugguuccaga

SEQ ID NO: 1925841 - RNA, 19 nt, Artificial Sequence
  Description of Artificial Sequence: Synthetic oligonucleotide
  Antisense strand to SEQ ID NO: 1925840
ucuggaaccaauaucauau

SEQ ID NO: 1925842 - RNA, 19 nt, Artificial Sequence
  Description of Artificial Sequence: Synthetic oligonucleotide
  Sense strand starting at position 497 of SEQ ID NO: 1879696
aacugagcuuucucgguca

SEQ ID NO: 1925843 - RNA, 19 nt, Artificial Sequence
  Description of Artificial Sequence: Synthetic oligonucleotide
  Antisense strand to SEQ ID NO: 1925842
ugaccgagaaagcucaguu

SEQ ID NO: 1925844 - RNA, 19 nt, Artificial Sequence
  Description of Artificial Sequence: Synthetic oligonucleotide
  Sense strand starting at position 499 of SEQ ID NO: 1879696
cugagcuuucucggucaua

SEQ ID NO: 1925845 - RNA, 19 nt, Artificial Sequence
  Description of Artificial Sequence: Synthetic oligonucleotide
  Antisense strand to SEQ ID NO: 1925844
uaugaccgagaaagcucag

SEQ ID NO: 1925846 - RNA, 19 nt, Artificial Sequence
  Description of Artificial Sequence: Synthetic oligonucleotide
  Sense strand starting at position 500 of SEQ ID NO: 1879696
ugagcuuucucggucauaa

SEQ ID NO: 1925847 - RNA, 19 nt, Artificial Sequence
  Description of Artificial Sequence: Synthetic oligonucleotide
  Antisense strand to SEQ ID NO: 1925846
uuaugaccgagaaagcuca

SEQ ID NO: 1925848 - RNA, 19 nt, Artificial Sequence
  Description of Artificial Sequence: Synthetic oligonucleotide
  Sense strand starting at position 594 of SEQ ID NO: 1879696
ccgaaacuguaagaagaua

SEQ ID NO: 1925849 - RNA, 19 nt, Artificial Sequence
  Description of Artificial Sequence: Synthetic oligonucleotide
  Antisense strand to SEQ ID NO: 1925848
uaucuucuuacaguuucgg

SEQ ID NO: 1925850 - RNA, 19 nt, Artificial Sequence
  Description of Artificial Sequence: Synthetic oligonucleotide
  Sense strand starting at position 762 of SEQ ID NO: 1879696
ccuauugucccucagguuu

SEQ ID NO: 1925851 - RNA, 19 nt, Artificial Sequence
  Description of Artificial Sequence: Synthetic oligonucleotide
  Antisense strand to SEQ ID NO: 1925850
aaaccugagggacaauagg

SEQ ID NO: 1925852 - RNA, 19 nt, Artificial Sequence
  Description of Artificial Sequence: Synthetic oligonucleotide
  Sense strand starting at position 838 of SEQ ID NO: 1879696
auuugcugccguuauguca

SEQ ID NO: 1925853 - RNA, 19 nt, Artificial Sequence
  Description of Artificial Sequence: Synthetic oligonucleotide
  Antisense strand to SEQ ID NO: 1925852
ugacauaacggcagcaaau

SEQ ID NO: 1925854 - RNA, 19 nt, Artificial Sequence
  Description of Artificial Sequence: Synthetic oligonucleotide
  Sense strand starting at position 842 of SEQ ID NO: 1879696
gcugccguuaugucaugaa

SEQ ID NO: 1925855 - RNA, 19 nt, Artificial Sequence
  Description of Artificial Sequence: Synthetic oligonucleotide
  Antisense strand to SEQ ID NO: 1925854
uucaugacauaacggcagc

SEQ ID NO: 1925856 - RNA, 19 nt, Artificial Sequence
  Description of Artificial Sequence: Synthetic oligonucleotide
  Sense strand starting at position 2549 of SEQ ID NO: 1879696
uugugacaucaucguaauu

SEQ ID NO: 1925857 - RNA, 19 nt, Artificial Sequence
  Description of Artificial Sequence: Synthetic oligonucleotide
  Antisense strand to SEQ ID NO: 1925856
aauuacgaugaugucacaa

SEQ ID NO: 1925858 - RNA, 19 nt, Artificial Sequence
  Description of Artificial Sequence: Synthetic oligonucleotide
  Sense strand starting at position 2551 of SEQ ID NO: 1879696
gugacaucaucguaauuuc

SEQ ID NO: 1925859 - RNA, 19 nt, Artificial Sequence
  Description of Artificial Sequence: Synthetic oligonucleotide
  Antisense strand to SEQ ID NO: 1925858
gaaauuacgaugaugucac

SEQ ID NO: 1925860 - RNA, 19 nt, Artificial Sequence
  Description of Artificial Sequence: Synthetic oligonucleotide
  Sense strand starting at position 2686 of SEQ ID NO: 1879696
ucuggaauuugaucgccuu

SEQ ID NO: 1925861 - RNA, 19 nt, Artificial Sequence
  Description of Artificial Sequence: Synthetic oligonucleotide
  Antisense strand to SEQ ID NO: 1925860
aaggcgaucaaauuccaga

SEQ ID NO: 1925862 - RNA, 19 nt, Artificial Sequence
  Description of Artificial Sequence: Synthetic oligonucleotide
  Sense strand starting at position 2687 of SEQ ID NO: 1879696
cuggaauuugaucgccuuu

SEQ ID NO: 1925863 - RNA, 19 nt, Artificial Sequence
  Description of Artificial Sequence: Synthetic oligonucleotide
  Antisense strand to SEQ ID NO: 1925862
aaaggcgaucaaauuccag

SEQ ID NO: 1925864 - RNA, 19 nt, Artificial Sequence
  Description of Artificial Sequence: Synthetic oligonucleotide
  Sense strand starting at position 2696 of SEQ ID NO: 1879696
gaucgccuuuggucuaaca

SEQ ID NO: 1925865 - RNA, 19 nt, Artificial Sequence
  Description of Artificial Sequence: Synthetic oligonucleotide
  Antisense strand to SEQ ID NO: 1925864
uguuagaccaaaggcgauc

SEQ ID NO: 1925866 - RNA, 19 nt, Artificial Sequence
  Description of Artificial Sequence: Synthetic oligonucleotide
  Sense strand starting at position 2698 of SEQ ID NO: 1879696
ucgccuuuggucuaacaaa

SEQ ID NO: 1925867 - RNA, 19 nt, Artificial Sequence
  Description of Artificial Sequence: Synthetic oligonucleotide
  Antisense strand to SEQ ID NO: 1925866
uuuguuagaccaaaggcga

SEQ ID NO: 1925868 - RNA, 19 nt, Artificial Sequence
  Description of Artificial Sequence: Synthetic oligonucleotide
  Sense strand starting at position 2754 of SEQ ID NO: 1879696
aagccuucugcggaugaua

SEQ ID NO: 1925869 - RNA, 19 nt, Artificial Sequence
  Description of Artificial Sequence: Synthetic oligonucleotide
  Antisense strand to SEQ ID NO: 1925868
uaucauccgcagaaggcuu

SEQ ID NO: 1925870 - RNA, 19 nt, Artificial Sequence
  Description of Artificial Sequence: Synthetic oligonucleotide
  Sense strand starting at position 2792 of SEQ ID NO: 1879696
cguucuagacuacacagau

SEQ ID NO: 1925871 - RNA, 19 nt, Artificial Sequence
  Description of Artificial Sequence: Synthetic oligonucleotide
  Antisense strand to SEQ ID NO: 1925870
aucuguguagucuagaacg

SEQ ID NO: 1925872 - RNA, 19 nt, Artificial Sequence
  Description of Artificial Sequence: Synthetic oligonucleotide
  Sense strand starting at position 2805 of SEQ ID NO: 1879696
acagauugcaguuaagugu

SEQ ID NO: 1925873 - RNA, 19 nt, Artificial Sequence
  Description of Artificial Sequence: Synthetic oligonucleotide
  Antisense strand to SEQ ID NO: 1925872
acacuuaacugcaaucugu

SEQ ID NO: 1925874 - RNA, 19 nt, Artificial Sequence
  Description of Artificial Sequence: Synthetic oligonucleotide
  Sense strand starting at position 2949 of SEQ ID NO: 1879696
aggaaauuggucugaccgu

SEQ ID NO: 1925875 - RNA, 19 nt, Artificial Sequence
  Description of Artificial Sequence: Synthetic oligonucleotide
  Antisense strand to SEQ ID NO: 1925874
acggucagaccaauuuccu

SEQ ID NO: 1925876 - RNA, 19 nt, Artificial Sequence
  Description of Artificial Sequence: Synthetic oligonucleotide
  Sense strand starting at position 2958 of SEQ ID NO: 1879696
gucugaccgugccuuagaa

SEQ ID NO: 1925877 - RNA, 19 nt, Artificial Sequence
  Description of Artificial Sequence: Synthetic oligonucleotide
  Antisense strand to SEQ ID NO: 1925876
uucuaaggcacggucagac

SEQ ID NO: 1925878 - RNA, 19 nt, Artificial Sequence
  Description of Artificial Sequence: Synthetic oligonucleotide
  Sense strand starting at position 2960 of SEQ ID NO: 1879696
cugaccgugccuuagaaua

SEQ ID NO: 1925879 - RNA, 19 nt, Artificial Sequence
  Description of Artificial Sequence: Synthetic oligonucleotide
  Antisense strand to SEQ ID NO: 1925878
uauucuaaggcacggucag

SEQ ID NO: 1925880 - RNA, 19 nt, Artificial Sequence
  Description of Artificial Sequence: Synthetic oligonucleotide
  Sense strand starting at position 3069 of SEQ ID NO: 1879696
ucgguugguggucaauaca

SEQ ID NO: 1925881 - RNA, 19 nt, Artificial Sequence
  Description of Artificial Sequence: Synthetic oligonucleotide
  Antisense strand to SEQ ID NO: 1925880
uguauugaccaccaaccga

SEQ ID NO: 1925882 - RNA, 19 nt, Artificial Sequence
  Description of Artificial Sequence: Synthetic oligonucleotide
  Sense strand starting at position 3102 of SEQ ID NO: 1879696
uugagaucuugacuaagca

SEQ ID NO: 1925883 - RNA, 19 nt, Artificial Sequence
  Description of Artificial Sequence: Synthetic oligonucleotide
  Antisense strand to SEQ ID NO: 1925882
ugcuuagucaagaucucaa

SEQ ID NO: 1925884 - RNA, 19 nt, Artificial Sequence
  Description of Artificial Sequence: Synthetic oligonucleotide
  Sense strand starting at position 3215 of SEQ ID NO: 1879696
agacucucaugccuaguua

SEQ ID NO: 1925885 - RNA, 19 nt, Artificial Sequence
  Description of Artificial Sequence: Synthetic oligonucleotide
  Antisense strand to SEQ ID NO: 1925884
uaacuaggcaugagagucu

SEQ ID NO: 1925886 - RNA, 19 nt, Artificial Sequence
  Description of Artificial Sequence: Synthetic oligonucleotide
  Sense strand starting at position 3226 of SEQ ID NO: 1879696
ccuaguuagucaccaggga

SEQ ID NO: 1925887 - RNA, 19 nt, Artificial Sequence
  Description of Artificial Sequence: Synthetic oligonucleotide
  Antisense strand to SEQ ID NO: 1925886
ucccuggugacuaacuagg

SEQ ID NO: 1925888 - RNA, 19 nt, Artificial Sequence
  Description of Artificial Sequence: Synthetic oligonucleotide
  Sense strand starting at position 3227 of SEQ ID NO: 1879696
cuaguuagucaccagggau

SEQ ID NO: 1925889 - RNA, 19 nt, Artificial Sequence
  Description of Artificial Sequence: Synthetic oligonucleotide
  Antisense strand to SEQ ID NO: 1925888
aucccuggugacuaacuag

SEQ ID NO: 1925890 - RNA, 19 nt, Artificial Sequence
  Description of Artificial Sequence: Synthetic oligonucleotide
  Sense strand starting at position 3524 of SEQ ID NO: 1879696
aggugcuuccgucugucau

SEQ ID NO: 1925891 - RNA, 19 nt, Artificial Sequence
  Description of Artificial Sequence: Synthetic oligonucleotide
  Antisense strand to SEQ ID NO: 1925890
augacagacggaagcaccu

SEQ ID NO: 1925892 - RNA, 19 nt, Artificial Sequence
  Description of Artificial Sequence: Synthetic oligonucleotide
  Sense strand starting at position 3526 of SEQ ID NO: 1879696
gugcuuccgucugucauuu

SEQ ID NO: 1925893 - RNA, 19 nt, Artificial Sequence
  Description of Artificial Sequence: Synthetic oligonucleotide
  Antisense strand to SEQ ID NO: 1925892
aaaugacagacggaagcac

SEQ ID NO: 1925894 - RNA, 19 nt, Artificial Sequence
  Description of Artificial Sequence: Synthetic oligonucleotide
  Sense strand starting at position 3548 of SEQ ID NO: 1879696
ugaacagaaucucagacau

SEQ ID NO: 1925895 - RNA, 19 nt, Artificial Sequence
  Description of Artificial Sequence: Synthetic oligonucleotide
  Antisense strand to SEQ ID NO: 1925894
augucugagauucuguuca

SEQ ID NO: 1925896 - RNA, 19 nt, Artificial Sequence
  Description of Artificial Sequence: Synthetic oligonucleotide
  Sense strand starting at position 3689 of SEQ ID NO: 1879696
ucuugaagucuuuguauuu

SEQ ID NO: 1925897 - RNA, 19 nt, Artificial Sequence
  Description of Artificial Sequence: Synthetic oligonucleotide
  Antisense strand to SEQ ID NO: 1925896
aaauacaaagacuucaaga

SEQ ID NO: 1925898 - RNA, 19 nt, Artificial Sequence
  Description of Artificial Sequence: Synthetic oligonucleotide
  Sense strand starting at position 3723 of SEQ ID NO: 1879696
agaggaaggucccacucau

SEQ ID NO: 1925899 - RNA, 19 nt, Artificial Sequence
  Description of Artificial Sequence: Synthetic oligonucleotide
  Antisense strand to SEQ ID NO: 1925898
augagugggaccuuccucu

SEQ ID NO: 1925900 - RNA, 19 nt, Artificial Sequence
  Description of Artificial Sequence: Synthetic oligonucleotide
  Sense strand starting at position 3781 of SEQ ID NO: 1879696
agucucacauuccugacua

SEQ ID NO: 1925901 - RNA, 19 nt, Artificial Sequence
  Description of Artificial Sequence: Synthetic oligonucleotide
  Antisense strand to SEQ ID NO: 1925900
uagucaggaaugugagacu

SEQ ID NO: 1925902 - RNA, 19 nt, Artificial Sequence
  Description of Artificial Sequence: Synthetic oligonucleotide
  Sense strand starting at position 3899 of SEQ ID NO: 1879696
gaugucuauuuccauggaa

SEQ ID NO: 1925903 - RNA, 19 nt, Artificial Sequence
  Description of Artificial Sequence: Synthetic oligonucleotide
  Antisense strand to SEQ ID NO: 1925902
uuccauggaaauagacauc

SEQ ID NO: 1925904 - RNA, 19 nt, Artificial Sequence
  Description of Artificial Sequence: Synthetic oligonucleotide
  Sense strand starting at position 3926 of SEQ ID NO: 1879696
aaggaacguagauguuaga

SEQ ID NO: 1925905 - RNA, 19 nt, Artificial Sequence
  Description of Artificial Sequence: Synthetic oligonucleotide
  Antisense strand to SEQ ID NO: 1925904
ucuaacaucuacguuccuu

SEQ ID NO: 1925906 - RNA, 19 nt, Artificial Sequence
  Description of Artificial Sequence: Synthetic oligonucleotide
  Sense strand starting at position 128 of SEQ ID NO: 1879697
uuaguaagcgcuuaccaug

SEQ ID NO: 1925907 - RNA, 19 nt, Artificial Sequence
  Description of Artificial Sequence: Synthetic oligonucleotide
  Antisense strand to SEQ ID NO: 1925906
caugguaagcgcuuacuaa

SEQ ID NO: 1925908 - RNA, 19 nt, Artificial Sequence
  Description of Artificial Sequence: Synthetic oligonucleotide
  Sense strand starting at position 208 of SEQ ID NO: 1879697
caagguaugcauuaugauc

SEQ ID NO: 1925909 - RNA, 19 nt, Artificial Sequence
  Description of Artificial Sequence: Synthetic oligonucleotide
  Antisense strand to SEQ ID NO: 1925908
gaucauaaugcauaccuug

SEQ ID NO: 1925910 - RNA, 19 nt, Artificial Sequence
  Description of Artificial Sequence: Synthetic oligonucleotide
  Sense strand starting at position 342 of SEQ ID NO: 1879697
ggccucaagccuugaccaa

SEQ ID NO: 1925911 - RNA, 19 nt, Artificial Sequence
  Description of Artificial Sequence: Synthetic oligonucleotide
  Antisense strand to SEQ ID NO: 1925910
uuggucaaggcuugaggcc

SEQ ID NO: 1925912 - RNA, 19 nt, Artificial Sequence
  Description of Artificial Sequence: Synthetic oligonucleotide
  Sense strand starting at position 382 of SEQ ID NO: 1879697
gacccaucugcaggucuaa

SEQ ID NO: 1925913 - RNA, 19 nt, Artificial Sequence
  Description of Artificial Sequence: Synthetic oligonucleotide
  Antisense strand to SEQ ID NO: 1925912
uuagaccugcagauggguc

SEQ ID NO: 1925914 - RNA, 19 nt, Artificial Sequence
  Description of Artificial Sequence: Synthetic oligonucleotide
  Sense strand starting at position 501 of SEQ ID NO: 1879697
ccucacauucuugggaaua

SEQ ID NO: 1925915 - RNA, 19 nt, Artificial Sequence
  Description of Artificial Sequence: Synthetic oligonucleotide
  Antisense strand to SEQ ID NO: 1925914
uauucccaagaaugugagg

SEQ ID NO: 1925916 - RNA, 19 nt, Artificial Sequence
  Description of Artificial Sequence: Synthetic oligonucleotide
  Sense strand starting at position 525 of SEQ ID NO: 1879697
gggugagagucaucccauu

SEQ ID NO: 1925917 - RNA, 19 nt, Artificial Sequence
  Description of Artificial Sequence: Synthetic oligonucleotide
  Antisense strand to SEQ ID NO: 1925916
aaugggaugacucucaccc

SEQ ID NO: 1925918 - RNA, 19 nt, Artificial Sequence
  Description of Artificial Sequence: Synthetic oligonucleotide
  Sense strand starting at position 538 of SEQ ID NO: 1879697
cccauuugaucucucguga

SEQ ID NO: 1925919 - RNA, 19 nt, Artificial Sequence
  Description of Artificial Sequence: Synthetic oligonucleotide
  Antisense strand to SEQ ID NO: 1925918
ucacgagagaucaaauggg

SEQ ID NO: 1925920 - RNA, 19 nt, Artificial Sequence
  Description of Artificial Sequence: Synthetic oligonucleotide
  Sense strand starting at position 543 of SEQ ID NO: 1879697
uugaucucucgugagauca

SEQ ID NO: 1925921 - RNA, 19 nt, Artificial Sequence
  Description of Artificial Sequence: Synthetic oligonucleotide
  Antisense strand to SEQ ID NO: 1925920
ugaucucacgagagaucaa

SEQ ID NO: 1925922 - RNA, 19 nt, Artificial Sequence
  Description of Artificial Sequence: Synthetic oligonucleotide
  Sense strand starting at position 564 of SEQ ID NO: 1879697
ugagauaacacgugugaug

SEQ ID NO: 1925923 - RNA, 19 nt, Artificial Sequence
  Description of Artificial Sequence: Synthetic oligonucleotide
  Antisense strand to SEQ ID NO: 1925922
caucacacguguuaucuca

SEQ ID NO: 1925924 - RNA, 19 nt, Artificial Sequence
  Description of Artificial Sequence: Synthetic oligonucleotide
  Sense strand starting at position 566 of SEQ ID NO: 1879697
agauaacacgugugaugca

SEQ ID NO: 1925925 - RNA, 19 nt, Artificial Sequence
  Description of Artificial Sequence: Synthetic oligonucleotide
  Antisense strand to SEQ ID NO: 1925924
ugcaucacacguguuaucu

SEQ ID NO: 1925926 - RNA, 19 nt, Artificial Sequence
  Description of Artificial Sequence: Synthetic oligonucleotide
  Sense strand starting at position 604 of SEQ ID NO: 1879697
cacugaggugucuaaucag

SEQ ID NO: 1925927 - RNA, 19 nt, Artificial Sequence
  Description of Artificial Sequence: Synthetic oligonucleotide
  Antisense strand to SEQ ID NO: 1925926
cugauuagacaccucagug

SEQ ID NO: 1925928 - RNA, 19 nt, Artificial Sequence
  Description of Artificial Sequence: Synthetic oligonucleotide
  Sense strand starting at position 657 of SEQ ID NO: 1879697
guaauuaaucgccacaguc

SEQ ID NO: 1925929 - RNA, 19 nt, Artificial Sequence
  Description of Artificial Sequence: Synthetic oligonucleotide
  Antisense strand to SEQ ID NO: 1925928
gacuguggcgauuaauuac

SEQ ID NO: 1925930 - RNA, 19 nt, Artificial Sequence
  Description of Artificial Sequence: Synthetic oligonucleotide
  Sense strand starting at position 765 of SEQ ID NO: 1879697
uuggaauaacucugcucaa

SEQ ID NO: 1925931 - RNA, 19 nt, Artificial Sequence
  Description of Artificial Sequence: Synthetic oligonucleotide
  Antisense strand to SEQ ID NO: 1925930
uugagcagaguuauuccaa

SEQ ID NO: 1925932 - RNA, 19 nt, Artificial Sequence
  Description of Artificial Sequence: Synthetic oligonucleotide
  Sense strand starting at position 766 of SEQ ID NO: 1879697
uggaauaacucugcucaac

SEQ ID NO: 1925933 - RNA, 19 nt, Artificial Sequence
  Description of Artificial Sequence: Synthetic oligonucleotide
  Antisense strand to SEQ ID NO: 1925932
guugagcagaguuauucca

SEQ ID NO: 1925934 - RNA, 19 nt, Artificial Sequence
  Description of Artificial Sequence: Synthetic oligonucleotide
  Sense strand starting at position 791 of SEQ ID NO: 1879697
cugggucuugcucaccaua

SEQ ID NO: 1925935 - RNA, 19 nt, Artificial Sequence
  Description of Artificial Sequence: Synthetic oligonucleotide
  Antisense strand to SEQ ID NO: 1925934
uauggugagcaagacccag

SEQ ID NO: 1925936 - RNA, 19 nt, Artificial Sequence
  Description of Artificial Sequence: Synthetic oligonucleotide
  Sense strand starting at position 793 of SEQ ID NO: 1879697
gggucuugcucaccauaag

SEQ ID NO: 1925937 - RNA, 19 nt, Artificial Sequence
  Description of Artificial Sequence: Synthetic oligonucleotide
  Antisense strand to SEQ ID NO: 1925936
cuuauggugagcaagaccc

SEQ ID NO: 1925938 - RNA, 19 nt, Artificial Sequence
  Description of Artificial Sequence: Synthetic oligonucleotide
  Sense strand starting at position 794 of SEQ ID NO: 1879697
ggucuugcucaccauaagu

SEQ ID NO: 1925939 - RNA, 19 nt, Artificial Sequence
  Description of Artificial Sequence: Synthetic oligonucleotide
  Antisense strand to SEQ ID NO: 1925938
acuuauggugagcaagacc

SEQ ID NO: 1925940 - RNA, 19 nt, Artificial Sequence
  Description of Artificial Sequence: Synthetic oligonucleotide
  Sense strand starting at position 804 of SEQ ID NO: 1879697
accauaaguucucccagga

SEQ ID NO: 1925941 - RNA, 19 nt, Artificial Sequence
  Description of Artificial Sequence: Synthetic oligonucleotide
  Antisense strand to SEQ ID NO: 1925940
uccugggagaacuuauggu

SEQ ID NO: 1925942 - RNA, 19 nt, Artificial Sequence
  Description of Artificial Sequence: Synthetic oligonucleotide
  Sense strand starting at position 808 of SEQ ID NO: 1879697
uaaguucucccaggaaaga

SEQ ID NO: 1925943 - RNA, 19 nt, Artificial Sequence
  Description of Artificial Sequence: Synthetic oligonucleotide
  Antisense strand to SEQ ID NO: 1925942
ucuuuccugggagaacuua

SEQ ID NO: 1925944 - RNA, 19 nt, Artificial Sequence
  Description of Artificial Sequence: Synthetic oligonucleotide
  Sense strand starting at position 821 of SEQ ID NO: 1879697
gaaagaugaagguggcauu

SEQ ID NO: 1925945 - RNA, 19 nt, Artificial Sequence
  Description of Artificial Sequence: Synthetic oligonucleotide
  Antisense strand to SEQ ID NO: 1925944
aaugccaccuucaucuuuc

SEQ ID NO: 1925946 - RNA, 19 nt, Artificial Sequence
  Description of Artificial Sequence: Synthetic oligonucleotide
  Sense strand starting at position 889 of SEQ ID NO: 1879697
cuagguucaccggagucua

SEQ ID NO: 1925947 - RNA, 19 nt, Artificial Sequence
  Description of Artificial Sequence: Synthetic oligonucleotide
  Antisense strand to SEQ ID NO: 1925946
uagacuccggugaaccuag

SEQ ID NO: 1925948 - RNA, 19 nt, Artificial Sequence
  Description of Artificial Sequence: Synthetic oligonucleotide
  Sense strand starting at position 976 of SEQ ID NO: 1879697
caggguuguguuggaagaa

SEQ ID NO: 1925949 - RNA, 19 nt, Artificial Sequence
  Description of Artificial Sequence: Synthetic oligonucleotide
  Antisense strand to SEQ ID NO: 1925948
uucuuccaacacaacccug

SEQ ID NO: 1925950 - RNA, 19 nt, Artificial Sequence
  Description of Artificial Sequence: Synthetic oligonucleotide
  Sense strand starting at position 991 of SEQ ID NO: 1879697
agaaguuaacgcuagcaaa

SEQ ID NO: 1925951 - RNA, 19 nt, Artificial Sequence
  Description of Artificial Sequence: Synthetic oligonucleotide
  Antisense strand to SEQ ID NO: 1925950
uuugcuagcguuaacuucu

SEQ ID NO: 1925952 - RNA, 19 nt, Artificial Sequence
  Description of Artificial Sequence: Synthetic oligonucleotide
  Sense strand starting at position 1086 of SEQ ID NO: 1879697
cuguguuuggucuaggaug

SEQ ID NO: 1925953 - RNA, 19 nt, Artificial Sequence
  Description of Artificial Sequence: Synthetic oligonucleotide
  Antisense strand to SEQ ID NO: 1925952
cauccuagaccaaacacag

SEQ ID NO: 1925954 - RNA, 19 nt, Artificial Sequence
  Description of Artificial Sequence: Synthetic oligonucleotide
  Sense strand starting at position 1245 of SEQ ID NO: 1879697
gagugaauuugagaacgcu

SEQ ID NO: 1925955 - RNA, 19 nt, Artificial Sequence
  Description of Artificial Sequence: Synthetic oligonucleotide
  Antisense strand to SEQ ID NO: 1925954
agcguucucaaauucacuc

SEQ ID NO: 1925956 - RNA, 19 nt, Artificial Sequence
  Description of Artificial Sequence: Synthetic oligonucleotide
  Sense strand starting at position 1268 of SEQ ID NO: 1879697
gcaagcuugccagaugacu

SEQ ID NO: 1925957 - RNA, 19 nt, Artificial Sequence
  Description of Artificial Sequence: Synthetic oligonucleotide
  Antisense strand to SEQ ID NO: 1925956
agucaucuggcaagcuugc

SEQ ID NO: 1925958 - RNA, 19 nt, Artificial Sequence
  Description of Artificial Sequence: Synthetic oligonucleotide
  Sense strand starting at position 1551 of SEQ ID NO: 1879697
gggagacucgcuuaagucu

SEQ ID NO: 1925959 - RNA, 19 nt, Artificial Sequence
  Description of Artificial Sequence: Synthetic oligonucleotide
  Antisense strand to SEQ ID NO: 1925958
agacuuaagcgagucuccc

SEQ ID NO: 1925960 - RNA, 19 nt, Artificial Sequence
  Description of Artificial Sequence: Synthetic oligonucleotide
  Sense strand starting at position 1621 of SEQ ID NO: 1879697
gcugauagacccugucuca

SEQ ID NO: 1925961 - RNA, 19 nt, Artificial Sequence
  Description of Artificial Sequence: Synthetic oligonucleotide
  Antisense strand to SEQ ID NO: 1925960
ugagacagggucuaucagc

SEQ ID NO: 1925962 - RNA, 19 nt, Artificial Sequence
  Description of Artificial Sequence: Synthetic oligonucleotide
  Sense strand starting at position 1660 of SEQ ID NO: 1879697
ccagcuccuuguuuaaaga

SEQ ID NO: 1925963 - RNA, 19 nt, Artificial Sequence
  Description of Artificial Sequence: Synthetic oligonucleotide
  Antisense strand to SEQ ID NO: 1925962
ucuuuaaacaaggagcugg

SEQ ID NO: 1925964 - RNA, 19 nt, Artificial Sequence
  Description of Artificial Sequence: Synthetic oligonucleotide
  Sense strand starting at position 1746 of SEQ ID NO: 1879697
cugacuugucagggugguu

SEQ ID NO: 1925965 - RNA, 19 nt, Artificial Sequence
  Description of Artificial Sequence: Synthetic oligonucleotide
  Antisense strand to SEQ ID NO: 1925964
aaccacccugacaagucag

SEQ ID NO: 1925966 - RNA, 19 nt, Artificial Sequence
  Description of Artificial Sequence: Synthetic oligonucleotide
  Sense strand starting at position 1998 of SEQ ID NO: 1879697
gggcgaccuccagaguauu

SEQ ID NO: 1925967 - RNA, 19 nt, Artificial Sequence
  Description of Artificial Sequence: Synthetic oligonucleotide
  Antisense strand to SEQ ID NO: 1925966
aauacucuggaggucgccc

SEQ ID NO: 1925968 - RNA, 19 nt, Artificial Sequence
  Description of Artificial Sequence: Synthetic oligonucleotide
  Sense strand starting at position 2309 of SEQ ID NO: 1879697
aggacugugccugagcaga

SEQ ID NO: 1925969 - RNA, 19 nt, Artificial Sequence
  Description of Artificial Sequence: Synthetic oligonucleotide
  Antisense strand to SEQ ID NO: 1925968
ucugcucaggcacaguccu

SEQ ID NO: 1925970 - RNA, 19 nt, Artificial Sequence
  Description of Artificial Sequence: Synthetic oligonucleotide
  Sense strand starting at position 2707 of SEQ ID NO: 1879697
caggauagugacugcagaa

SEQ ID NO: 1925971 - RNA, 19 nt, Artificial Sequence
  Description of Artificial Sequence: Synthetic oligonucleotide
  Antisense strand to SEQ ID NO: 1925970
uucugcagucacuauccug

SEQ ID NO: 1925972 - RNA, 19 nt, Artificial Sequence
  Description of Artificial Sequence: Synthetic oligonucleotide
  Sense strand starting at position 2943 of SEQ ID NO: 1879697
aagccaugaugugucuuaa

SEQ ID NO: 1925973 - RNA, 19 nt, Artificial Sequence
  Description of Artificial Sequence: Synthetic oligonucleotide
  Antisense strand to SEQ ID NO: 1925972
uuaagacacaucauggcuu

SEQ ID NO: 1925974 - RNA, 19 nt, Artificial Sequence
  Description of Artificial Sequence: Synthetic oligonucleotide
  Sense strand starting at position 2952 of SEQ ID NO: 1879697
ugugucuuaauuuggguaa

SEQ ID NO: 1925975 - RNA, 19 nt, Artificial Sequence
  Description of Artificial Sequence: Synthetic oligonucleotide
  Antisense strand to SEQ ID NO: 1925974
uuacccaaauuaagacaca

SEQ ID NO: 1925976 - RNA, 19 nt, Artificial Sequence
  Description of Artificial Sequence: Synthetic oligonucleotide
  Sense strand starting at position 3433 of SEQ ID NO: 1879697
augacaagaguuuagcauu

SEQ ID NO: 1925977 - RNA, 19 nt, Artificial Sequence
  Description of Artificial Sequence: Synthetic oligonucleotide
  Antisense strand to SEQ ID NO: 1925976
aaugcuaaacucuugucau

SEQ ID NO: 1925978 - RNA, 19 nt, Artificial Sequence
  Description of Artificial Sequence: Synthetic oligonucleotide
  Sense strand starting at position 3447 of SEQ ID NO: 1879697
gcauuccugcaauaucuga

SEQ ID NO: 1925979 - RNA, 19 nt, Artificial Sequence
  Description of Artificial Sequence: Synthetic oligonucleotide
  Antisense strand to SEQ ID NO: 1925978
ucagauauugcaggaaugc

SEQ ID NO: 1925980 - RNA, 19 nt, Artificial Sequence
  Description of Artificial Sequence: Synthetic oligonucleotide
  Sense strand starting at position 3832 of SEQ ID NO: 1879697
ccagccagauacguauauu

SEQ ID NO: 1925981 - RNA, 19 nt, Artificial Sequence
  Description of Artificial Sequence: Synthetic oligonucleotide
  Antisense strand to SEQ ID NO: 1925980
aauauacguaucuggcugg

SEQ ID NO: 1925982 - RNA, 19 nt, Artificial Sequence
  Description of Artificial Sequence: Synthetic oligonucleotide
  Sense strand starting at position 3866 of SEQ ID NO: 1879697
gggugaguucugcaugagg

SEQ ID NO: 1925983 - RNA, 19 nt, Artificial Sequence
  Description of Artificial Sequence: Synthetic oligonucleotide
  Antisense strand to SEQ ID NO: 1925982
ccucaugcagaacucaccc

SEQ ID NO: 1925984 - RNA, 19 nt, Artificial Sequence
  Description of Artificial Sequence: Synthetic oligonucleotide
  Sense strand starting at position 3970 of SEQ ID NO: 1879697
agguucuuauucuccaaga

SEQ ID NO: 1925985 - RNA, 19 nt, Artificial Sequence
  Description of Artificial Sequence: Synthetic oligonucleotide
  Antisense strand to SEQ ID NO: 1925984
ucuuggagaauaagaaccu

SEQ ID NO: 1925986 - RNA, 19 nt, Artificial Sequence
  Description of Artificial Sequence: Synthetic oligonucleotide
  Sense strand starting at position 17 of SEQ ID NO: 1879698
gcccucaguggauacaaau

SEQ ID NO: 1925987 - RNA, 19 nt, Artificial Sequence
  Description of Artificial Sequence: Synthetic oligonucleotide
  Antisense strand to SEQ ID NO: 1925986
auuuguauccacugagggc

SEQ ID NO: 1925988 - RNA, 19 nt, Artificial Sequence
  Description of Artificial Sequence: Synthetic oligonucleotide
  Sense strand starting at position 234 of SEQ ID NO: 1879698
agggauuucugcuccguac

SEQ ID NO: 1925989 - RNA, 19 nt, Artificial Sequence
  Description of Artificial Sequence: Synthetic oligonucleotide
  Antisense strand to SEQ ID NO: 1925988
guacggagcagaaaucccu

SEQ ID NO: 1925990 - RNA, 19 nt, Artificial Sequence
  Description of Artificial Sequence: Synthetic oligonucleotide
  Sense strand starting at position 236 of SEQ ID NO: 1879698
ggauuucugcuccguacag

SEQ ID NO: 1925991 - RNA, 19 nt, Artificial Sequence
  Description of Artificial Sequence: Synthetic oligonucleotide
  Antisense strand to SEQ ID NO: 1925990
cuguacggagcagaaaucc

SEQ ID NO: 1925992 - RNA, 19 nt, Artificial Sequence
  Description of Artificial Sequence: Synthetic oligonucleotide
  Sense strand starting at position 1279 of SEQ ID NO: 1879698
gugggauggucuccaguag

SEQ ID NO: 1925993 - RNA, 19 nt, Artificial Sequence
  Description of Artificial Sequence: Synthetic oligonucleotide
  Antisense strand to SEQ ID NO: 1925992
cuacuggagaccaucccac

SEQ ID NO: 1925994 - RNA, 19 nt, Artificial Sequence
  Description of Artificial Sequence: Synthetic oligonucleotide
  Sense strand starting at position 1384 of SEQ ID NO: 1879698
uggguucccgagugagagu

SEQ ID NO: 1925995 - RNA, 19 nt, Artificial Sequence
  Description of Artificial Sequence: Synthetic oligonucleotide
  Antisense strand to SEQ ID NO: 1925994
acucucacucgggaaccca

SEQ ID NO: 1925996 - RNA, 19 nt, Artificial Sequence
  Description of Artificial Sequence: Synthetic oligonucleotide
  Sense strand starting at position 1431 of SEQ ID NO: 1879698
gucaccauugugggagaaa

SEQ ID NO: 1925997 - RNA, 19 nt, Artificial Sequence
  Description of Artificial Sequence: Synthetic oligonucleotide
  Antisense strand to SEQ ID NO: 1925996
uuucucccacaauggugac

SEQ ID NO: 1925998 - RNA, 19 nt, Artificial Sequence
  Description of Artificial Sequence: Synthetic oligonucleotide
  Sense strand starting at position 1553 of SEQ ID NO: 1879698
augggaugucgugaucaga

SEQ ID NO: 1925999 - RNA, 19 nt, Artificial Sequence
  Description of Artificial Sequence: Synthetic oligonucleotide
  Antisense strand to SEQ ID NO: 1925998
ucugaucacgacaucccau

SEQ ID NO: 1926000 - RNA, 19 nt, Artificial Sequence
  Description of Artificial Sequence: Synthetic oligonucleotide
  Sense strand starting at position 1728 of SEQ ID NO: 1879698
cgucaaacgugaggucuuu

SEQ ID NO: 1926001 - RNA, 19 nt, Artificial Sequence
  Description of Artificial Sequence: Synthetic oligonucleotide
  Antisense strand to SEQ ID NO: 1926000
aaagaccucacguuugacg

SEQ ID NO: 1926002 - RNA, 19 nt, Artificial Sequence
  Description of Artificial Sequence: Synthetic oligonucleotide
  Sense strand starting at position 1745 of SEQ ID NO: 1879698
uuguuucccucucagaaga

SEQ ID NO: 1926003 - RNA, 19 nt, Artificial Sequence
  Description of Artificial Sequence: Synthetic oligonucleotide
  Antisense strand to SEQ ID NO: 1926002
ucuucugagagggaaacaa

SEQ ID NO: 1926004 - RNA, 19 nt, Artificial Sequence
  Description of Artificial Sequence: Synthetic oligonucleotide
  Sense strand starting at position 1867 of SEQ ID NO: 1879698
cggaguugaucccuccaca

SEQ ID NO: 1926005 - RNA, 19 nt, Artificial Sequence
  Description of Artificial Sequence: Synthetic oligonucleotide
  Antisense strand to SEQ ID NO: 1926004
uguggagggaucaacuccg

SEQ ID NO: 1926006 - RNA, 19 nt, Artificial Sequence
  Description of Artificial Sequence: Synthetic oligonucleotide
  Sense strand starting at position 2229 of SEQ ID NO: 1879698
cggccucucgcucagagau

SEQ ID NO: 1926007 - RNA, 19 nt, Artificial Sequence
  Description of Artificial Sequence: Synthetic oligonucleotide
  Antisense strand to SEQ ID NO: 1926006
aucucugagcgagaggccg

SEQ ID NO: 1926008 - RNA, 19 nt, Artificial Sequence
  Description of Artificial Sequence: Synthetic oligonucleotide
  Sense strand starting at position 2346 of SEQ ID NO: 1879698
gagcaucuguaucaguuua

SEQ ID NO: 1926009 - RNA, 19 nt, Artificial Sequence
  Description of Artificial Sequence: Synthetic oligonucleotide
  Antisense strand to SEQ ID NO: 1926008
uaaacugauacagaugcuc

SEQ ID NO: 1926010 - RNA, 19 nt, Artificial Sequence
  Description of Artificial Sequence: Synthetic oligonucleotide
  Sense strand starting at position 2348 of SEQ ID NO: 1879698
gcaucuguaucaguuuaca

SEQ ID NO: 1926011 - RNA, 19 nt, Artificial Sequence
  Description of Artificial Sequence: Synthetic oligonucleotide
  Antisense strand to SEQ ID NO: 1926010
uguaaacugauacagaugc

SEQ ID NO: 1926012 - RNA, 19 nt, Artificial Sequence
  Description of Artificial Sequence: Synthetic oligonucleotide
  Sense strand starting at position 2368 of SEQ ID NO: 1879698
gcagaauggaucugcuuag

SEQ ID NO: 1926013 - RNA, 19 nt, Artificial Sequence
  Description of Artificial Sequence: Synthetic oligonucleotide
  Antisense strand to SEQ ID NO: 1926012
cuaagcagauccauucugc

SEQ ID NO: 1926014 - RNA, 19 nt, Artificial Sequence
  Description of Artificial Sequence: Synthetic oligonucleotide
  Sense strand starting at position 2575 of SEQ ID NO: 1879698
gaucuaucucacgagggca

SEQ ID NO: 1926015 - RNA, 19 nt, Artificial Sequence
  Description of Artificial Sequence: Synthetic oligonucleotide
  Antisense strand to SEQ ID NO: 1926014
ugcccucgugagauagauc

SEQ ID NO: 1926016 - RNA, 19 nt, Artificial Sequence
  Description of Artificial Sequence: Synthetic oligonucleotide
  Sense strand starting at position 2587 of SEQ ID NO: 1879698
gagggcaucgucuggguaa

SEQ ID NO: 1926017 - RNA, 19 nt, Artificial Sequence
  Description of Artificial Sequence: Synthetic oligonucleotide
  Antisense strand to SEQ ID NO: 1926016
uuacccagacgaugcccuc

SEQ ID NO: 1926018 - RNA, 19 nt, Artificial Sequence
  Description of Artificial Sequence: Synthetic oligonucleotide
  Sense strand starting at position 2589 of SEQ ID NO: 1879698
gggcaucgucuggguaaga

SEQ ID NO: 1926019 - RNA, 19 nt, Artificial Sequence
  Description of Artificial Sequence: Synthetic oligonucleotide
  Antisense strand to SEQ ID NO: 1926018
ucuuacccagacgaugccc

SEQ ID NO: 1926020 - RNA, 19 nt, Artificial Sequence
  Description of Artificial Sequence: Synthetic oligonucleotide
  Sense strand starting at position 2590 of SEQ ID NO: 1879698
ggcaucgucuggguaagau

SEQ ID NO: 1926021 - RNA, 19 nt, Artificial Sequence
  Description of Artificial Sequence: Synthetic oligonucleotide
  Antisense strand to SEQ ID NO: 1926020
aucuuacccagacgaugcc

SEQ ID NO: 1926022 - RNA, 19 nt, Artificial Sequence
  Description of Artificial Sequence: Synthetic oligonucleotide
  Sense strand starting at position 2594 of SEQ ID NO: 1879698
ucgucuggguaagaugaua

SEQ ID NO: 1926023 - RNA, 19 nt, Artificial Sequence
  Description of Artificial Sequence: Synthetic oligonucleotide
  Antisense strand to SEQ ID NO: 1926022
uaucaucuuacccagacga

SEQ ID NO: 1926024 - RNA, 19 nt, Artificial Sequence
  Description of Artificial Sequence: Synthetic oligonucleotide
  Sense strand starting at position 2602 of SEQ ID NO: 1879698
guaagaugauaucagaugu

SEQ ID NO: 1926025 - RNA, 19 nt, Artificial Sequence
  Description of Artificial Sequence: Synthetic oligonucleotide
  Antisense strand to SEQ ID NO: 1926024
acaucugauaucaucuuac

SEQ ID NO: 1926026 - RNA, 19 nt, Artificial Sequence
  Description of Artificial Sequence: Synthetic oligonucleotide
  Sense strand starting at position 2727 of SEQ ID NO: 1879698
ggcuguccuugccagaaac

SEQ ID NO: 1926027 - RNA, 19 nt, Artificial Sequence
  Description of Artificial Sequence: Synthetic oligonucleotide
  Antisense strand to SEQ ID NO: 1926026
guuucuggcaaggacagcc

SEQ ID NO: 1926028 - RNA, 19 nt, Artificial Sequence
  Description of Artificial Sequence: Synthetic oligonucleotide
  Sense strand starting at position 2759 of SEQ ID NO: 1879698
gcgaggaucgcagaagagu

SEQ ID NO: 1926029 - RNA, 19 nt, Artificial Sequence
  Description of Artificial Sequence: Synthetic oligonucleotide
  Antisense strand to SEQ ID NO: 1926028
acucuucugcgauccucgc

SEQ ID NO: 1926030 - RNA, 19 nt, Artificial Sequence
  Description of Artificial Sequence: Synthetic oligonucleotide
  Sense strand starting at position 2767 of SEQ ID NO: 1879698
cgcagaagagugcaaagau

SEQ ID NO: 1926031 - RNA, 19 nt, Artificial Sequence
  Description of Artificial Sequence: Synthetic oligonucleotide
  Antisense strand to SEQ ID NO: 1926030
aucuuugcacucuucugcg

SEQ ID NO: 1926032 - RNA, 19 nt, Artificial Sequence
  Description of Artificial Sequence: Synthetic oligonucleotide
  Sense strand starting at position 2776 of SEQ ID NO: 1879698
gugcaaagauuugucuuua

SEQ ID NO: 1926033 - RNA, 19 nt, Artificial Sequence
  Description of Artificial Sequence: Synthetic oligonucleotide
  Antisense strand to SEQ ID NO: 1926032
uaaagacaaaucuuugcac

SEQ ID NO: 1926034 - RNA, 19 nt, Artificial Sequence
  Description of Artificial Sequence: Synthetic oligonucleotide
  Sense strand starting at position 3063 of SEQ ID NO: 1879698
ccuaaaguuugccggaaca

SEQ ID NO: 1926035 - RNA, 19 nt, Artificial Sequence
  Description of Artificial Sequence: Synthetic oligonucleotide
  Antisense strand to SEQ ID NO: 1926034
uguuccggcaaacuuuagg

SEQ ID NO: 1926036 - RNA, 19 nt, Artificial Sequence
  Description of Artificial Sequence: Synthetic oligonucleotide
  Sense strand starting at position 3065 of SEQ ID NO: 1879698
uaaaguuugccggaacaga

SEQ ID NO: 1926037 - RNA, 19 nt, Artificial Sequence
  Description of Artificial Sequence: Synthetic oligonucleotide
  Antisense strand to SEQ ID NO: 1926036
ucuguuccggcaaacuuua

SEQ ID NO: 1926038 - RNA, 19 nt, Artificial Sequence
  Description of Artificial Sequence: Synthetic oligonucleotide
  Sense strand starting at position 3836 of SEQ ID NO: 1879698
cgcguuuauugagacaguu

SEQ ID NO: 1926039 - RNA, 19 nt, Artificial Sequence
  Description of Artificial Sequence: Synthetic oligonucleotide
  Antisense strand to SEQ ID NO: 1926038
aacugucucaauaaacgcg

SEQ ID NO: 1926040 - RNA, 19 nt, Artificial Sequence
  Description of Artificial Sequence: Synthetic oligonucleotide
  Sense strand starting at position 3845 of SEQ ID NO: 1879698
ugagacaguucgguuugga

SEQ ID NO: 1926041 - RNA, 19 nt, Artificial Sequence
  Description of Artificial Sequence: Synthetic oligonucleotide
  Antisense strand to SEQ ID NO: 1926040
uccaaaccgaacugucuca

SEQ ID NO: 1926042 - RNA, 19 nt, Artificial Sequence
  Description of Artificial Sequence: Synthetic oligonucleotide
  Sense strand starting at position 3848 of SEQ ID NO: 1879698
gacaguucgguuuggaaua

SEQ ID NO: 1926043 - RNA, 19 nt, Artificial Sequence
  Description of Artificial Sequence: Synthetic oligonucleotide
  Antisense strand to SEQ ID NO: 1926042
uauuccaaaccgaacuguc

SEQ ID NO: 1926044 - RNA, 19 nt, Artificial Sequence
  Description of Artificial Sequence: Synthetic oligonucleotide
  Sense strand starting at position 3849 of SEQ ID NO: 1879698
acaguucgguuuggaauau

SEQ ID NO: 1926045 - RNA, 19 nt, Artificial Sequence
  Description of Artificial Sequence: Synthetic oligonucleotide
  Antisense strand to SEQ ID NO: 1926044
auauuccaaaccgaacugu

SEQ ID NO: 1926046 - RNA, 19 nt, Artificial Sequence
  Description of Artificial Sequence: Synthetic oligonucleotide
  Sense strand starting at position 3850 of SEQ ID NO: 1879698
caguucgguuuggaauauu

SEQ ID NO: 1926047 - RNA, 19 nt, Artificial Sequence
  Description of Artificial Sequence: Synthetic oligonucleotide
  Antisense strand to SEQ ID NO: 1926046
aauauuccaaaccgaacug

SEQ ID NO: 1926048 - RNA, 19 nt, Artificial Sequence
  Description of Artificial Sequence: Synthetic oligonucleotide
  Sense strand starting at position 121 of SEQ ID NO: 1879699
ccaguuaguugcccaagga

SEQ ID NO: 1926049 - RNA, 19 nt, Artificial Sequence
  Description of Artificial Sequence: Synthetic oligonucleotide
  Antisense strand to SEQ ID NO: 1926048
uccuugggcaacuaacugg

SEQ ID NO: 1926050 - RNA, 19 nt, Artificial Sequence
  Description of Artificial Sequence: Synthetic oligonucleotide
  Sense strand starting at position 296 of SEQ ID NO: 1879699
ggcuuuaggacuugaacca

SEQ ID NO: 1926051 - RNA, 19 nt, Artificial Sequence
  Description of Artificial Sequence: Synthetic oligonucleotide
  Antisense strand to SEQ ID NO: 1926050
ugguucaaguccuaaagcc

SEQ ID NO: 1926052 - RNA, 19 nt, Artificial Sequence
  Description of Artificial Sequence: Synthetic oligonucleotide
  Sense strand starting at position 509 of SEQ ID NO: 1879699
cgagcacuacccugaguaa

SEQ ID NO: 1926053 - RNA, 19 nt, Artificial Sequence
  Description of Artificial Sequence: Synthetic oligonucleotide
  Antisense strand to SEQ ID NO: 1926052
uuacucaggguagugcucg

SEQ ID NO: 1926054 - RNA, 19 nt, Artificial Sequence
  Description of Artificial Sequence: Synthetic oligonucleotide
  Sense strand starting at position 512 of SEQ ID NO: 1879699
gcacuacccugaguaagau

SEQ ID NO: 1926055 - RNA, 19 nt, Artificial Sequence
  Description of Artificial Sequence: Synthetic oligonucleotide
  Antisense strand to SEQ ID NO: 1926054
aucuuacucaggguagugc

SEQ ID NO: 1926056 - RNA, 19 nt, Artificial Sequence
  Description of Artificial Sequence: Synthetic oligonucleotide
  Sense strand starting at position 615 of SEQ ID NO: 1879699
gggcaaugaucccuccagu

SEQ ID NO: 1926057 - RNA, 19 nt, Artificial Sequence
  Description of Artificial Sequence: Synthetic oligonucleotide
  Antisense strand to SEQ ID NO: 1926056
acuggagggaucauugccc

SEQ ID NO: 1926058 - RNA, 19 nt, Artificial Sequence
  Description of Artificial Sequence: Synthetic oligonucleotide
  Sense strand starting at position 664 of SEQ ID NO: 1879699
agaaauggcucccacucaa

SEQ ID NO: 1926059 - RNA, 19 nt, Artificial Sequence
  Description of Artificial Sequence: Synthetic oligonucleotide
  Antisense strand to SEQ ID NO: 1926058
uugagugggagccauuucu

SEQ ID NO: 1926060 - RNA, 19 nt, Artificial Sequence
  Description of Artificial Sequence: Synthetic oligonucleotide
  Sense strand starting at position 1051 of SEQ ID NO: 1879699
gagagcaucuuguuaucuc

SEQ ID NO: 1926061 - RNA, 19 nt, Artificial Sequence
  Description of Artificial Sequence: Synthetic oligonucleotide
  Antisense strand to SEQ ID NO: 1926060
gagauaacaagaugcucuc

SEQ ID NO: 1926062 - RNA, 19 nt, Artificial Sequence
  Description of Artificial Sequence: Synthetic oligonucleotide
  Sense strand starting at position 1340 of SEQ ID NO: 1879699
augggugacccucauuagu

SEQ ID NO: 1926063 - RNA, 19 nt, Artificial Sequence
  Description of Artificial Sequence: Synthetic oligonucleotide
  Antisense strand to SEQ ID NO: 1926062
acuaaugagggucacccau

SEQ ID NO: 1926064 - RNA, 19 nt, Artificial Sequence
  Description of Artificial Sequence: Synthetic oligonucleotide
  Sense strand starting at position 1342 of SEQ ID NO: 1879699
gggugacccucauuagucu

SEQ ID NO: 1926065 - RNA, 19 nt, Artificial Sequence
  Description of Artificial Sequence: Synthetic oligonucleotide
  Antisense strand to SEQ ID NO: 1926064
agacuaaugagggucaccc

SEQ ID NO: 1926066 - RNA, 19 nt, Artificial Sequence
  Description of Artificial Sequence: Synthetic oligonucleotide
  Sense strand starting at position 1365 of SEQ ID NO: 1879699
gggagccugagauguaaau

SEQ ID NO: 1926067 - RNA, 19 nt, Artificial Sequence
  Description of Artificial Sequence: Synthetic oligonucleotide
  Antisense strand to SEQ ID NO: 1926066
auuuacaucucaggcuccc

SEQ ID NO: 1926068 - RNA, 19 nt, Artificial Sequence
  Description of Artificial Sequence: Synthetic oligonucleotide
  Sense strand starting at position 1367 of SEQ ID NO: 1879699
gagccugagauguaaaugu

SEQ ID NO: 1926069 - RNA, 19 nt, Artificial Sequence
  Description of Artificial Sequence: Synthetic oligonucleotide
  Antisense strand to SEQ ID NO: 1926068
acauuuacaucucaggcuc

SEQ ID NO: 1926070 - RNA, 19 nt, Artificial Sequence
  Description of Artificial Sequence: Synthetic oligonucleotide
  Sense strand starting at position 1371 of SEQ ID NO: 1879699
cugagauguaaaugugaau

SEQ ID NO: 1926071 - RNA, 19 nt, Artificial Sequence
  Description of Artificial Sequence: Synthetic oligonucleotide
  Antisense strand to SEQ ID NO: 1926070
auucacauuuacaucucag

SEQ ID NO: 1926072 - RNA, 19 nt, Artificial Sequence
  Description of Artificial Sequence: Synthetic oligonucleotide
  Sense strand starting at position 1410 of SEQ ID NO: 1879699
agagcagcuuugguaugaa

SEQ ID NO: 1926073 - RNA, 19 nt, Artificial Sequence
  Description of Artificial Sequence: Synthetic oligonucleotide
  Antisense strand to SEQ ID NO: 1926072
uucauaccaaagcugcucu

SEQ ID NO: 1926074 - RNA, 19 nt, Artificial Sequence
  Description of Artificial Sequence: Synthetic oligonucleotide
  Sense strand starting at position 1413 of SEQ ID NO: 1879699
gcagcuuugguaugaauuc

SEQ ID NO: 1926075 - RNA, 19 nt, Artificial Sequence
  Description of Artificial Sequence: Synthetic oligonucleotide
  Antisense strand to SEQ ID NO: 1926074
gaauucauaccaaagcugc

SEQ ID NO: 1926076 - RNA, 19 nt, Artificial Sequence
  Description of Artificial Sequence: Synthetic oligonucleotide
  Sense strand starting at position 1451 of SEQ ID NO: 1879699
ggauuuggaucaugucaaa

SEQ ID NO: 1926077 - RNA, 19 nt, Artificial Sequence
  Description of Artificial Sequence: Synthetic oligonucleotide
  Antisense strand to SEQ ID NO: 1926076
uuugacaugauccaaaucc

SEQ ID NO: 1926078 - RNA, 19 nt, Artificial Sequence
  Description of Artificial Sequence: Synthetic oligonucleotide
  Sense strand starting at position 1462 of SEQ ID NO: 1879699
augucaaagucagugggau

SEQ ID NO: 1926079 - RNA, 19 nt, Artificial Sequence
  Description of Artificial Sequence: Synthetic oligonucleotide
  Antisense strand to SEQ ID NO: 1926078
aucccacugacuuugacau

SEQ ID NO: 1926080 - RNA, 19 nt, Artificial Sequence
  Description of Artificial Sequence: Synthetic oligonucleotide
  Sense strand starting at position 1463 of SEQ ID NO: 1879699
ugucaaagucagugggauu

SEQ ID NO: 1926081 - RNA, 19 nt, Artificial Sequence
  Description of Artificial Sequence: Synthetic oligonucleotide
  Antisense strand to SEQ ID NO: 1926080
aaucccacugacuuugaca

SEQ ID NO: 1926082 - RNA, 19 nt, Artificial Sequence
  Description of Artificial Sequence: Synthetic oligonucleotide
  Sense strand starting at position 1557 of SEQ ID NO: 1879699
ccagauuccugaguuagac

SEQ ID NO: 1926083 - RNA, 19 nt, Artificial Sequence
  Description of Artificial Sequence: Synthetic oligonucleotide
  Antisense strand to SEQ ID NO: 1926082
gucuaacucaggaaucugg

SEQ ID NO: 1926084 - RNA, 19 nt, Artificial Sequence
  Description of Artificial Sequence: Synthetic oligonucleotide
  Sense strand starting at position 1567 of SEQ ID NO: 1879699
gaguuagacucuccagguu

SEQ ID NO: 1926085 - RNA, 19 nt, Artificial Sequence
  Description of Artificial Sequence: Synthetic oligonucleotide
  Antisense strand to SEQ ID NO: 1926084
aaccuggagagucuaacuc

SEQ ID NO: 1926086 - RNA, 19 nt, Artificial Sequence
  Description of Artificial Sequence: Synthetic oligonucleotide
  Sense strand starting at position 1705 of SEQ ID NO: 1879699
cccugauggcgggaccaau

SEQ ID NO: 1926087 - RNA, 19 nt, Artificial Sequence
  Description of Artificial Sequence: Synthetic oligonucleotide
  Antisense strand to SEQ ID NO: 1926086
auuggucccgccaucaggg

SEQ ID NO: 1926088 - RNA, 19 nt, Artificial Sequence
  Description of Artificial Sequence: Synthetic oligonucleotide
  Sense strand starting at position 1795 of SEQ ID NO: 1879699
agccuuccucacugagaag

SEQ ID NO: 1926089 - RNA, 19 nt, Artificial Sequence
  Description of Artificial Sequence: Synthetic oligonucleotide
  Antisense strand to SEQ ID NO: 1926088
cuucucagugaggaaggcu

SEQ ID NO: 1926090 - RNA, 19 nt, Artificial Sequence
  Description of Artificial Sequence: Synthetic oligonucleotide
  Sense strand starting at position 2062 of SEQ ID NO: 1879699
augugacucgacugauaag

SEQ ID NO: 1926091 - RNA, 19 nt, Artificial Sequence
  Description of Artificial Sequence: Synthetic oligonucleotide
  Antisense strand to SEQ ID NO: 1926090
cuuaucagucgagucacau

SEQ ID NO: 1926092 - RNA, 19 nt, Artificial Sequence
  Description of Artificial Sequence: Synthetic oligonucleotide
  Sense strand starting at position 2065 of SEQ ID NO: 1879699
ugacucgacugauaagaag

SEQ ID NO: 1926093 - RNA, 19 nt, Artificial Sequence
  Description of Artificial Sequence: Synthetic oligonucleotide
  Antisense strand to SEQ ID NO: 1926092
cuucuuaucagucgaguca

SEQ ID NO: 1926094 - RNA, 19 nt, Artificial Sequence
  Description of Artificial Sequence: Synthetic oligonucleotide
  Sense strand starting at position 2071 of SEQ ID NO: 1879699
gacugauaagaaggugucu

SEQ ID NO: 1926095 - RNA, 19 nt, Artificial Sequence
  Description of Artificial Sequence: Synthetic oligonucleotide
  Antisense strand to SEQ ID NO: 1926094
agacaccuucuuaucaguc

SEQ ID NO: 1926096 - RNA, 19 nt, Artificial Sequence
  Description of Artificial Sequence: Synthetic oligonucleotide
  Sense strand starting at position 2073 of SEQ ID NO: 1879699
cugauaagaaggugucuuu

SEQ ID NO: 1926097 - RNA, 19 nt, Artificial Sequence
  Description of Artificial Sequence: Synthetic oligonucleotide
  Antisense strand to SEQ ID NO: 1926096
aaagacaccuucuuaucag

SEQ ID NO: 1926098 - RNA, 19 nt, Artificial Sequence
  Description of Artificial Sequence: Synthetic oligonucleotide
  Sense strand starting at position 2183 of SEQ ID NO: 1879699
agggauuccugcucaucaa

SEQ ID NO: 1926099 - RNA, 19 nt, Artificial Sequence
  Description of Artificial Sequence: Synthetic oligonucleotide
  Antisense strand to SEQ ID NO: 1926098
uugaugagcaggaaucccu

SEQ ID NO: 1926100 - RNA, 19 nt, Artificial Sequence
  Description of Artificial Sequence: Synthetic oligonucleotide
  Sense strand starting at position 2184 of SEQ ID NO: 1879699
gggauuccugcucaucaag

SEQ ID NO: 1926101 - RNA, 19 nt, Artificial Sequence
  Description of Artificial Sequence: Synthetic oligonucleotide
  Antisense strand to SEQ ID NO: 1926100
cuugaugagcaggaauccc

SEQ ID NO: 1926102 - RNA, 19 nt, Artificial Sequence
  Description of Artificial Sequence: Synthetic oligonucleotide
  Sense strand starting at position 2195 of SEQ ID NO: 1879699
ucaucaaggcuguggauau

SEQ ID NO: 1926103 - RNA, 19 nt, Artificial Sequence
  Description of Artificial Sequence: Synthetic oligonucleotide
  Antisense strand to SEQ ID NO: 1926102
auauccacagccuugauga

SEQ ID NO: 1926104 - RNA, 19 nt, Artificial Sequence
  Description of Artificial Sequence: Synthetic oligonucleotide
  Sense strand starting at position 2316 of SEQ ID NO: 1879699
gggccugcugugaaucguu

SEQ ID NO: 1926105 - RNA, 19 nt, Artificial Sequence
  Description of Artificial Sequence: Synthetic oligonucleotide
  Antisense strand to SEQ ID NO: 1926104
aacgauucacagcaggccc

SEQ ID NO: 1926106 - RNA, 19 nt, Artificial Sequence
  Description of Artificial Sequence: Synthetic oligonucleotide
  Sense strand starting at position 2321 of SEQ ID NO: 1879699
ugcugugaaucguugugaa

SEQ ID NO: 1926107 - RNA, 19 nt, Artificial Sequence
  Description of Artificial Sequence: Synthetic oligonucleotide
  Antisense strand to SEQ ID NO: 1926106
uucacaacgauucacagca

SEQ ID NO: 1926108 - RNA, 19 nt, Artificial Sequence
  Description of Artificial Sequence: Synthetic oligonucleotide
  Sense strand starting at position 2548 of SEQ ID NO: 1879699
acagaaagcgcuugagauu

SEQ ID NO: 1926109 - RNA, 19 nt, Artificial Sequence
  Description of Artificial Sequence: Synthetic oligonucleotide
  Antisense strand to SEQ ID NO: 1926108
aaucucaagcgcuuucugu

SEQ ID NO: 1926110 - RNA, 19 nt, Artificial Sequence
  Description of Artificial Sequence: Synthetic oligonucleotide
  Sense strand starting at position 2559 of SEQ ID NO: 1879699
uugagauugcaggaauguc

SEQ ID NO: 1926111 - RNA, 19 nt, Artificial Sequence
  Description of Artificial Sequence: Synthetic oligonucleotide
  Antisense strand to SEQ ID NO: 1926110
gacauuccugcaaucucaa

SEQ ID NO: 1926112 - RNA, 19 nt, Artificial Sequence
  Description of Artificial Sequence: Synthetic oligonucleotide
  Sense strand starting at position 2618 of SEQ ID NO: 1879699
ggccaagucuucccagaag

SEQ ID NO: 1926113 - RNA, 19 nt, Artificial Sequence
  Description of Artificial Sequence: Synthetic oligonucleotide
  Antisense strand to SEQ ID NO: 1926112
cuucugggaagacuuggcc

SEQ ID NO: 1926114 - RNA, 19 nt, Artificial Sequence
  Description of Artificial Sequence: Synthetic oligonucleotide
  Sense strand starting at position 3039 of SEQ ID NO: 1879699
ggguccagaucccuaauca

SEQ ID NO: 1926115 - RNA, 19 nt, Artificial Sequence
  Description of Artificial Sequence: Synthetic oligonucleotide
  Antisense strand to SEQ ID NO: 1926114
ugauuagggaucuggaccc

SEQ ID NO: 1926116 - RNA, 19 nt, Artificial Sequence
  Description of Artificial Sequence: Synthetic oligonucleotide
  Sense strand starting at position 3582 of SEQ ID NO: 1879699
gggcuaugccuguacaggu

SEQ ID NO: 1926117 - RNA, 19 nt, Artificial Sequence
  Description of Artificial Sequence: Synthetic oligonucleotide
  Antisense strand to SEQ ID NO: 1926116
accuguacaggcauagccc

SEQ ID NO: 1926118 - RNA, 19 nt, Artificial Sequence
  Description of Artificial Sequence: Synthetic oligonucleotide
  Sense strand starting at position 3879 of SEQ ID NO: 1879699
ccgagcaguagcuauguaa

SEQ ID NO: 1926119 - RNA, 19 nt, Artificial Sequence
  Description of Artificial Sequence: Synthetic oligonucleotide
  Antisense strand to SEQ ID NO: 1926118
uuacauagcuacugcucgg

SEQ ID NO: 1926120 - RNA, 19 nt, Artificial Sequence
  Description of Artificial Sequence: Synthetic oligonucleotide
  Sense strand starting at position 3882 of SEQ ID NO: 1879699
agcaguagcuauguaauca

SEQ ID NO: 1926121 - RNA, 19 nt, Artificial Sequence
  Description of Artificial Sequence: Synthetic oligonucleotide
  Antisense strand to SEQ ID NO: 1926120
ugauuacauagcuacugcu

SEQ ID NO: 1926122 - RNA, 19 nt, Artificial Sequence
  Description of Artificial Sequence: Synthetic oligonucleotide
  Sense strand starting at position 3883 of SEQ ID NO: 1879699
gcaguagcuauguaaucag

SEQ ID NO: 1926123 - RNA, 19 nt, Artificial Sequence
  Description of Artificial Sequence: Synthetic oligonucleotide
  Antisense strand to SEQ ID NO: 1926122
cugauuacauagcuacugc

SEQ ID NO: 1926124 - RNA, 19 nt, Artificial Sequence
  Description of Artificial Sequence: Synthetic oligonucleotide
  Sense strand starting at position 3967 of SEQ ID NO: 1879699
ucuaaaugccagugauaug

SEQ ID NO: 1926125 - RNA, 19 nt, Artificial Sequence
  Description of Artificial Sequence: Synthetic oligonucleotide
  Antisense strand to SEQ ID NO: 1926124
cauaucacuggcauuuaga

SEQ ID NO: 1926126 - RNA, 19 nt, Artificial Sequence
  Description of Artificial Sequence: Synthetic oligonucleotide
  Sense strand starting at position 3976 of SEQ ID NO: 1879699
cagugauaugcuggugaac

SEQ ID NO: 1926127 - RNA, 19 nt, Artificial Sequence
  Description of Artificial Sequence: Synthetic oligonucleotide
  Antisense strand to SEQ ID NO: 1926126
guucaccagcauaucacug

SEQ ID NO: 1926128 - RNA, 19 nt, Artificial Sequence
  Description of Artificial Sequence: Synthetic oligonucleotide
  Sense strand starting at position 506 of SEQ ID NO: 1879700
ggagggugguuugcuaaga

SEQ ID NO: 1926129 - RNA, 19 nt, Artificial Sequence
  Description of Artificial Sequence: Synthetic oligonucleotide
  Antisense strand to SEQ ID NO: 1926128
ucuuagcaaaccacccucc

SEQ ID NO: 1926130 - RNA, 19 nt, Artificial Sequence
  Description of Artificial Sequence: Synthetic oligonucleotide
  Sense strand starting at position 625 of SEQ ID NO: 1879700
agcugagucacuugcugaa

SEQ ID NO: 1926131 - RNA, 19 nt, Artificial Sequence
  Description of Artificial Sequence: Synthetic oligonucleotide
  Antisense strand to SEQ ID NO: 1926130
uucagcaagugacucagcu

SEQ ID NO: 1926132 - RNA, 19 nt, Artificial Sequence
  Description of Artificial Sequence: Synthetic oligonucleotide
  Sense strand starting at position 627 of SEQ ID NO: 1879700
cugagucacuugcugaaga

SEQ ID NO: 1926133 - RNA, 19 nt, Artificial Sequence
  Description of Artificial Sequence: Synthetic oligonucleotide
  Antisense strand to SEQ ID NO: 1926132
ucuucagcaagugacucag

SEQ ID NO: 1926134 - RNA, 19 nt, Artificial Sequence
  Description of Artificial Sequence: Synthetic oligonucleotide
  Sense strand starting at position 629 of SEQ ID NO: 1879700
gagucacuugcugaagaac

SEQ ID NO: 1926135 - RNA, 19 nt, Artificial Sequence
  Description of Artificial Sequence: Synthetic oligonucleotide
  Antisense strand to SEQ ID NO: 1926134
guucuucagcaagugacuc

SEQ ID NO: 1926136 - RNA, 19 nt, Artificial Sequence
  Description of Artificial Sequence: Synthetic oligonucleotide
  Sense strand starting at position 729 of SEQ ID NO: 1879700
gaugaaauguuuguugcaa

SEQ ID NO: 1926137 - RNA, 19 nt, Artificial Sequence
  Description of Artificial Sequence: Synthetic oligonucleotide
  Antisense strand to SEQ ID NO: 1926136
uugcaacaaacauuucauc

SEQ ID NO: 1926138 - RNA, 19 nt, Artificial Sequence
  Description of Artificial Sequence: Synthetic oligonucleotide
  Sense strand starting at position 730 of SEQ ID NO: 1879700
augaaauguuuguugcaaa

SEQ ID NO: 1926139 - RNA, 19 nt, Artificial Sequence
  Description of Artificial Sequence: Synthetic oligonucleotide
  Antisense strand to SEQ ID NO: 1926138
uuugcaacaaacauuucau

SEQ ID NO: 1926140 - RNA, 19 nt, Artificial Sequence
  Description of Artificial Sequence: Synthetic oligonucleotide
  Sense strand starting at position 911 of SEQ ID NO: 1879700
uugaauaugugugcacaca

SEQ ID NO: 1926141 - RNA, 19 nt, Artificial Sequence
  Description of Artificial Sequence: Synthetic oligonucleotide
  Antisense strand to SEQ ID NO: 1926140
ugugugcacacauauucaa

SEQ ID NO: 1926142 - RNA, 19 nt, Artificial Sequence
  Description of Artificial Sequence: Synthetic oligonucleotide
  Sense strand starting at position 912 of SEQ ID NO: 1879700
ugaauaugugugcacacaa

SEQ ID NO: 1926143 - RNA, 19 nt, Artificial Sequence
  Description of Artificial Sequence: Synthetic oligonucleotide
  Antisense strand to SEQ ID NO: 1926142
uugugugcacacauauuca

SEQ ID NO: 1926144 - RNA, 19 nt, Artificial Sequence
  Description of Artificial Sequence: Synthetic oligonucleotide
  Sense strand starting at position 984 of SEQ ID NO: 1879700
gacuccauaucagggauga

SEQ ID NO: 1926145 - RNA, 19 nt, Artificial Sequence
  Description of Artificial Sequence: Synthetic oligonucleotide
  Antisense strand to SEQ ID NO: 1926144
ucaucccugauauggaguc

SEQ ID NO: 1926146 - RNA, 19 nt, Artificial Sequence
  Description of Artificial Sequence: Synthetic oligonucleotide
  Sense strand starting at position 1173 of SEQ ID NO: 1879700
gcagaauacucacaaugac

SEQ ID NO: 1926147 - RNA, 19 nt, Artificial Sequence
  Description of Artificial Sequence: Synthetic oligonucleotide
  Antisense strand to SEQ ID NO: 1926146
gucauugugaguauucugc

SEQ ID NO: 1926148 - RNA, 19 nt, Artificial Sequence
  Description of Artificial Sequence: Synthetic oligonucleotide
  Sense strand starting at position 1235 of SEQ ID NO: 1879700
aacugagucugaguaguua

SEQ ID NO: 1926149 - RNA, 19 nt, Artificial Sequence
  Description of Artificial Sequence: Synthetic oligonucleotide
  Antisense strand to SEQ ID NO: 1926148
uaacuacucagacucaguu

SEQ ID NO: 1926150 - RNA, 19 nt, Artificial Sequence
  Description of Artificial Sequence: Synthetic oligonucleotide
  Sense strand starting at position 1239 of SEQ ID NO: 1879700
gagucugaguaguuaagca

SEQ ID NO: 1926151 - RNA, 19 nt, Artificial Sequence
  Description of Artificial Sequence: Synthetic oligonucleotide
  Antisense strand to SEQ ID NO: 1926150
ugcuuaacuacucagacuc

SEQ ID NO: 1926152 - RNA, 19 nt, Artificial Sequence
  Description of Artificial Sequence: Synthetic oligonucleotide
  Sense strand starting at position 1331 of SEQ ID NO: 1879700
aguguccuccucuauucua

SEQ ID NO: 1926153 - RNA, 19 nt, Artificial Sequence
  Description of Artificial Sequence: Synthetic oligonucleotide
  Antisense strand to SEQ ID NO: 1926152
uagaauagaggaggacacu

SEQ ID NO: 1926154 - RNA, 19 nt, Artificial Sequence
  Description of Artificial Sequence: Synthetic oligonucleotide
  Sense strand starting at position 1381 of SEQ ID NO: 1879700
uuucuucugccguauaauc

SEQ ID NO: 1926155 - RNA, 19 nt, Artificial Sequence
  Description of Artificial Sequence: Synthetic oligonucleotide
  Antisense strand to SEQ ID NO: 1926154
gauuauacggcagaagaaa

SEQ ID NO: 1926156 - RNA, 19 nt, Artificial Sequence
  Description of Artificial Sequence: Synthetic oligonucleotide
  Sense strand starting at position 1383 of SEQ ID NO: 1879700
ucuucugccguauaaucau

SEQ ID NO: 1926157 - RNA, 19 nt, Artificial Sequence
  Description of Artificial Sequence: Synthetic oligonucleotide
  Antisense strand to SEQ ID NO: 1926156
augauuauacggcagaaga

SEQ ID NO: 1926158 - RNA, 19 nt, Artificial Sequence
  Description of Artificial Sequence: Synthetic oligonucleotide
  Sense strand starting at position 1389 of SEQ ID NO: 1879700
gccguauaaucaucuuaau

SEQ ID NO: 1926159 - RNA, 19 nt, Artificial Sequence
  Description of Artificial Sequence: Synthetic oligonucleotide
  Antisense strand to SEQ ID NO: 1926158
auuaagaugauuauacggc

SEQ ID NO: 1926160 - RNA, 19 nt, Artificial Sequence
  Description of Artificial Sequence: Synthetic oligonucleotide
  Sense strand starting at position 1398 of SEQ ID NO: 1879700
ucaucuuaauugucuguaa

SEQ ID NO: 1926161 - RNA, 19 nt, Artificial Sequence
  Description of Artificial Sequence: Synthetic oligonucleotide
  Antisense strand to SEQ ID NO: 1926160
uuacagacaauuaagauga

SEQ ID NO: 1926162 - RNA, 19 nt, Artificial Sequence
  Description of Artificial Sequence: Synthetic oligonucleotide
  Sense strand starting at position 1402 of SEQ ID NO: 1879700
cuuaauugucuguaaccca

SEQ ID NO: 1926163 - RNA, 19 nt, Artificial Sequence
  Description of Artificial Sequence: Synthetic oligonucleotide
  Antisense strand to SEQ ID NO: 1926162
uggguuacagacaauuaag

SEQ ID NO: 1926164 - RNA, 19 nt, Artificial Sequence
  Description of Artificial Sequence: Synthetic oligonucleotide
  Sense strand starting at position 1410 of SEQ ID NO: 1879700
ucuguaacccaaggaucua

SEQ ID NO: 1926165 - RNA, 19 nt, Artificial Sequence
  Description of Artificial Sequence: Synthetic oligonucleotide
  Antisense strand to SEQ ID NO: 1926164
uagauccuuggguuacaga

SEQ ID NO: 1926166 - RNA, 19 nt, Artificial Sequence
  Description of Artificial Sequence: Synthetic oligonucleotide
  Sense strand starting at position 1421 of SEQ ID NO: 1879700
aggaucuaguucuaagaau

SEQ ID NO: 1926167 - RNA, 19 nt, Artificial Sequence
  Description of Artificial Sequence: Synthetic oligonucleotide
  Antisense strand to SEQ ID NO: 1926166
auucuuagaacuagauccu

SEQ ID NO: 1926168 - RNA, 19 nt, Artificial Sequence
  Description of Artificial Sequence: Synthetic oligonucleotide
  Sense strand starting at position 1449 of SEQ ID NO: 1879700
gccagacauuauuaagcaa

SEQ ID NO: 1926169 - RNA, 19 nt, Artificial Sequence
  Description of Artificial Sequence: Synthetic oligonucleotide
  Antisense strand to SEQ ID NO: 1926168
uugcuuaauaaugucuggc

SEQ ID NO: 1926170 - RNA, 19 nt, Artificial Sequence
  Description of Artificial Sequence: Synthetic oligonucleotide
  Sense strand starting at position 1514 of SEQ ID NO: 1879700
cuaacuaggucaggauuga

SEQ ID NO: 1926171 - RNA, 19 nt, Artificial Sequence
  Description of Artificial Sequence: Synthetic oligonucleotide
  Antisense strand to SEQ ID NO: 1926170
ucaauccugaccuaguuag

SEQ ID NO: 1926172 - RNA, 19 nt, Artificial Sequence
  Description of Artificial Sequence: Synthetic oligonucleotide
  Sense strand starting at position 1524 of SEQ ID NO: 1879700
caggauugauucuagagac

SEQ ID NO: 1926173 - RNA, 19 nt, Artificial Sequence
  Description of Artificial Sequence: Synthetic oligonucleotide
  Antisense strand to SEQ ID NO: 1926172
gucucuagaaucaauccug

SEQ ID NO: 1926174 - RNA, 19 nt, Artificial Sequence
  Description of Artificial Sequence: Synthetic oligonucleotide
  Sense strand starting at position 1751 of SEQ ID NO: 1879700
ucgugaccucucugagucu

SEQ ID NO: 1926175 - RNA, 19 nt, Artificial Sequence
  Description of Artificial Sequence: Synthetic oligonucleotide
  Antisense strand to SEQ ID NO: 1926174
agacucagagaggucacga

SEQ ID NO: 1926176 - RNA, 19 nt, Artificial Sequence
  Description of Artificial Sequence: Synthetic oligonucleotide
  Sense strand starting at position 1783 of SEQ ID NO: 1879700
uggugacucuccuugucuu

SEQ ID NO: 1926177 - RNA, 19 nt, Artificial Sequence
  Description of Artificial Sequence: Synthetic oligonucleotide
  Antisense strand to SEQ ID NO: 1926176
aagacaaggagagucacca

SEQ ID NO: 1926178 - RNA, 19 nt, Artificial Sequence
  Description of Artificial Sequence: Synthetic oligonucleotide
  Sense strand starting at position 2064 of SEQ ID NO: 1879700
cagucuuucccugguggga

SEQ ID NO: 1926179 - RNA, 19 nt, Artificial Sequence
  Description of Artificial Sequence: Synthetic oligonucleotide
  Antisense strand to SEQ ID NO: 1926178
ucccaccagggaaagacug

SEQ ID NO: 1926180 - RNA, 19 nt, Artificial Sequence
  Description of Artificial Sequence: Synthetic oligonucleotide
  Sense strand starting at position 2182 of SEQ ID NO: 1879700
ugcugagucacauggaaga

SEQ ID NO: 1926181 - RNA, 19 nt, Artificial Sequence
  Description of Artificial Sequence: Synthetic oligonucleotide
  Antisense strand to SEQ ID NO: 1926180
ucuuccaugugacucagca

SEQ ID NO: 1926182 - RNA, 19 nt, Artificial Sequence
  Description of Artificial Sequence: Synthetic oligonucleotide
  Sense strand starting at position 2386 of SEQ ID NO: 1879700
aucugucagggauggcauu

SEQ ID NO: 1926183 - RNA, 19 nt, Artificial Sequence
  Description of Artificial Sequence: Synthetic oligonucleotide
  Antisense strand to SEQ ID NO: 1926182
aaugccaucccugacagau

SEQ ID NO: 1926184 - RNA, 19 nt, Artificial Sequence
  Description of Artificial Sequence: Synthetic oligonucleotide
  Sense strand starting at position 2425 of SEQ ID NO: 1879700
gagcccuauggcugaaacu

SEQ ID NO: 1926185 - RNA, 19 nt, Artificial Sequence
  Description of Artificial Sequence: Synthetic oligonucleotide
  Antisense strand to SEQ ID NO: 1926184
aguuucagccauagggcuc

SEQ ID NO: 1926186 - RNA, 19 nt, Artificial Sequence
  Description of Artificial Sequence: Synthetic oligonucleotide
  Sense strand starting at position 2436 of SEQ ID NO: 1879700
cugaaacuguacggauuua

SEQ ID NO: 1926187 - RNA, 19 nt, Artificial Sequence
  Description of Artificial Sequence: Synthetic oligonucleotide
  Antisense strand to SEQ ID NO: 1926186
uaaauccguacaguuucag

SEQ ID NO: 1926188 - RNA, 19 nt, Artificial Sequence
  Description of Artificial Sequence: Synthetic oligonucleotide
  Sense strand starting at position 2481 of SEQ ID NO: 1879700
uagacaguccugggacagu

SEQ ID NO: 1926189 - RNA, 19 nt, Artificial Sequence
  Description of Artificial Sequence: Synthetic oligonucleotide
  Antisense strand to SEQ ID NO: 1926188
acugucccaggacugucua

SEQ ID NO: 1926190 - RNA, 19 nt, Artificial Sequence
  Description of Artificial Sequence: Synthetic oligonucleotide
  Sense strand starting at position 3097 of SEQ ID NO: 1879700
gguguuagccacuguuguu

SEQ ID NO: 1926191 - RNA, 19 nt, Artificial Sequence
  Description of Artificial Sequence: Synthetic oligonucleotide
  Antisense strand to SEQ ID NO: 1926190
aacaacaguggcuaacacc

SEQ ID NO: 1926192 - RNA, 19 nt, Artificial Sequence
  Description of Artificial Sequence: Synthetic oligonucleotide
  Sense strand starting at position 3098 of SEQ ID NO: 1879700
guguuagccacuguuguuu

SEQ ID NO: 1926193 - RNA, 19 nt, Artificial Sequence
  Description of Artificial Sequence: Synthetic oligonucleotide
  Antisense strand to SEQ ID NO: 1926192
aaacaacaguggcuaacac

SEQ ID NO: 1926194 - RNA, 19 nt, Artificial Sequence
  Description of Artificial Sequence: Synthetic oligonucleotide
  Sense strand starting at position 3107 of SEQ ID NO: 1879700
acuguuguuucuguucuua

SEQ ID NO: 1926195 - RNA, 19 nt, Artificial Sequence
  Description of Artificial Sequence: Synthetic oligonucleotide
  Antisense strand to SEQ ID NO: 1926194
uaagaacagaaacaacagu

SEQ ID NO: 1926196 - RNA, 19 nt, Artificial Sequence
  Description of Artificial Sequence: Synthetic oligonucleotide
  Sense strand starting at position 3109 of SEQ ID NO: 1879700
uguuguuucuguucuuaac

SEQ ID NO: 1926197 - RNA, 19 nt, Artificial Sequence
  Description of Artificial Sequence: Synthetic oligonucleotide
  Antisense strand to SEQ ID NO: 1926196
guuaagaacagaaacaaca

SEQ ID NO: 1926198 - RNA, 19 nt, Artificial Sequence
  Description of Artificial Sequence: Synthetic oligonucleotide
  Sense strand starting at position 3260 of SEQ ID NO: 1879700
acuucugcucuauaucagu

SEQ ID NO: 1926199 - RNA, 19 nt, Artificial Sequence
  Description of Artificial Sequence: Synthetic oligonucleotide
  Antisense strand to SEQ ID NO: 1926198
acugauauagagcagaagu

SEQ ID NO: 1926200 - RNA, 19 nt, Artificial Sequence
  Description of Artificial Sequence: Synthetic oligonucleotide
  Sense strand starting at position 3265 of SEQ ID NO: 1879700
ugcucuauaucaguggcaa

SEQ ID NO: 1926201 - RNA, 19 nt, Artificial Sequence
  Description of Artificial Sequence: Synthetic oligonucleotide
  Antisense strand to SEQ ID NO: 1926200
uugccacugauauagagca

SEQ ID NO: 1926202 - RNA, 19 nt, Artificial Sequence
  Description of Artificial Sequence: Synthetic oligonucleotide
  Sense strand starting at position 3266 of SEQ ID NO: 1879700
gcucuauaucaguggcaag

SEQ ID NO: 1926203 - RNA, 19 nt, Artificial Sequence
  Description of Artificial Sequence: Synthetic oligonucleotide
  Antisense strand to SEQ ID NO: 1926202
cuugccacugauauagagc

SEQ ID NO: 1926204 - RNA, 19 nt, Artificial Sequence
  Description of Artificial Sequence: Synthetic oligonucleotide
  Sense strand starting at position 3380 of SEQ ID NO: 1879700
agauacugggcagguauaa

SEQ ID NO: 1926205 - RNA, 19 nt, Artificial Sequence
  Description of Artificial Sequence: Synthetic oligonucleotide
  Antisense strand to SEQ ID NO: 1926204
uuauaccugcccaguaucu

SEQ ID NO: 1926206 - RNA, 19 nt, Artificial Sequence
  Description of Artificial Sequence: Synthetic oligonucleotide
  Sense strand starting at position 3488 of SEQ ID NO: 1879700
gcuaacuuguauucuagaa

SEQ ID NO: 1926207 - RNA, 19 nt, Artificial Sequence
  Description of Artificial Sequence: Synthetic oligonucleotide
  Antisense strand to SEQ ID NO: 1926206
uucuagaauacaaguuagc

SEQ ID NO: 1926208 - RNA, 19 nt, Artificial Sequence
  Description of Artificial Sequence: Synthetic oligonucleotide
  Sense strand starting at position 155 of SEQ ID NO: 1879701
gggagugggccucauaagu

SEQ ID NO: 1926209 - RNA, 19 nt, Artificial Sequence
  Description of Artificial Sequence: Synthetic oligonucleotide
  Antisense strand to SEQ ID NO: 1926208
acuuaugaggcccacuccc

SEQ ID NO: 1926210 - RNA, 19 nt, Artificial Sequence
  Description of Artificial Sequence: Synthetic oligonucleotide
  Sense strand starting at position 170 of SEQ ID NO: 1879701
aaguuaagacccuggucuu

SEQ ID NO: 1926211 - RNA, 19 nt, Artificial Sequence
  Description of Artificial Sequence: Synthetic oligonucleotide
  Antisense strand to SEQ ID NO: 1926210
aagaccagggucuuaacuu

SEQ ID NO: 1926212 - RNA, 19 nt, Artificial Sequence
  Description of Artificial Sequence: Synthetic oligonucleotide
  Sense strand starting at position 171 of SEQ ID NO: 1879701
aguuaagacccuggucuuu

SEQ ID NO: 1926213 - RNA, 19 nt, Artificial Sequence
  Description of Artificial Sequence: Synthetic oligonucleotide
  Antisense strand to SEQ ID NO: 1926212
aaagaccagggucuuaacu

SEQ ID NO: 1926214 - RNA, 19 nt, Artificial Sequence
  Description of Artificial Sequence: Synthetic oligonucleotide
  Sense strand starting at position 173 of SEQ ID NO: 1879701
uuaagacccuggucuuuga

SEQ ID NO: 1926215 - RNA, 19 nt, Artificial Sequence
  Description of Artificial Sequence: Synthetic oligonucleotide
  Antisense strand to SEQ ID NO: 1926214
ucaaagaccagggucuuaa

SEQ ID NO: 1926216 - RNA, 19 nt, Artificial Sequence
  Description of Artificial Sequence: Synthetic oligonucleotide
  Sense strand starting at position 283 of SEQ ID NO: 1879701
ggaccuaucgcacaaguuu

SEQ ID NO: 1926217 - RNA, 19 nt, Artificial Sequence
  Description of Artificial Sequence: Synthetic oligonucleotide
  Antisense strand to SEQ ID NO: 1926216
aaacuugugcgauaggucc

SEQ ID NO: 1926218 - RNA, 19 nt, Artificial Sequence
  Description of Artificial Sequence: Synthetic oligonucleotide
  Sense strand starting at position 294 of SEQ ID NO: 1879701
acaaguuuccuacaagggu

SEQ ID NO: 1926219 - RNA, 19 nt, Artificial Sequence
  Description of Artificial Sequence: Synthetic oligonucleotide
  Antisense strand to SEQ ID NO: 1926218
acccuuguaggaaacuugu

SEQ ID NO: 1926220 - RNA, 19 nt, Artificial Sequence
  Description of Artificial Sequence: Synthetic oligonucleotide
  Sense strand starting at position 298 of SEQ ID NO: 1879701
guuuccuacaagggugaaa

SEQ ID NO: 1926221 - RNA, 19 nt, Artificial Sequence
  Description of Artificial Sequence: Synthetic oligonucleotide
  Antisense strand to SEQ ID NO: 1926220
uuucacccuuguaggaaac

SEQ ID NO: 1926222 - RNA, 19 nt, Artificial Sequence
  Description of Artificial Sequence: Synthetic oligonucleotide
  Sense strand starting at position 300 of SEQ ID NO: 1879701
uuccuacaagggugaaaua

SEQ ID NO: 1926223 - RNA, 19 nt, Artificial Sequence
  Description of Artificial Sequence: Synthetic oligonucleotide
  Antisense strand to SEQ ID NO: 1926222
uauuucacccuuguaggaa

SEQ ID NO: 1926224 - RNA, 19 nt, Artificial Sequence
  Description of Artificial Sequence: Synthetic oligonucleotide
  Sense strand starting at position 348 of SEQ ID NO: 1879701
ggaaucuugugagcccuga

SEQ ID NO: 1926225 - RNA, 19 nt, Artificial Sequence
  Description of Artificial Sequence: Synthetic oligonucleotide
  Antisense strand to SEQ ID NO: 1926224
ucagggcucacaagauucc

SEQ ID NO: 1926226 - RNA, 19 nt, Artificial Sequence
  Description of Artificial Sequence: Synthetic oligonucleotide
  Sense strand starting at position 352 of SEQ ID NO: 1879701
ucuugugagcccugaagaa

SEQ ID NO: 1926227 - RNA, 19 nt, Artificial Sequence
  Description of Artificial Sequence: Synthetic oligonucleotide
  Antisense strand to SEQ ID NO: 1926226
uucuucagggcucacaaga

SEQ ID NO: 1926228 - RNA, 19 nt, Artificial Sequence
  Description of Artificial Sequence: Synthetic oligonucleotide
  Sense strand starting at position 426 of SEQ ID NO: 1879701
agcauauucgccuugcauu

SEQ ID NO: 1926229 - RNA, 19 nt, Artificial Sequence
  Description of Artificial Sequence: Synthetic oligonucleotide
  Antisense strand to SEQ ID NO: 1926228
aaugcaaggcgaauaugcu

SEQ ID NO: 1926230 - RNA, 19 nt, Artificial Sequence
  Description of Artificial Sequence: Synthetic oligonucleotide
  Sense strand starting at position 527 of SEQ ID NO: 1879701
aggcaugucaccgcguaau

SEQ ID NO: 1926231 - RNA, 19 nt, Artificial Sequence
  Description of Artificial Sequence: Synthetic oligonucleotide
  Antisense strand to SEQ ID NO: 1926230
auuacgcggugacaugccu

SEQ ID NO: 1926232 - RNA, 19 nt, Artificial Sequence
  Description of Artificial Sequence: Synthetic oligonucleotide
  Sense strand starting at position 537 of SEQ ID NO: 1879701
ccgcguaauccugugguaa

SEQ ID NO: 1926233 - RNA, 19 nt, Artificial Sequence
  Description of Artificial Sequence: Synthetic oligonucleotide
  Antisense strand to SEQ ID NO: 1926232
uuaccacaggauuacgcgg

SEQ ID NO: 1926234 - RNA, 19 nt, Artificial Sequence
  Description of Artificial Sequence: Synthetic oligonucleotide
  Sense strand starting at position 557 of SEQ ID NO: 1879701
ugucaaaguggugauguuu

SEQ ID NO: 1926235 - RNA, 19 nt, Artificial Sequence
  Description of Artificial Sequence: Synthetic oligonucleotide
  Antisense strand to SEQ ID NO: 1926234
aaacaucaccacuuugaca

SEQ ID NO: 1926236 - RNA, 19 nt, Artificial Sequence
  Description of Artificial Sequence: Synthetic oligonucleotide
  Sense strand starting at position 566 of SEQ ID NO: 1879701
ggugauguuugacuaugau

SEQ ID NO: 1926237 - RNA, 19 nt, Artificial Sequence
  Description of Artificial Sequence: Synthetic oligonucleotide
  Antisense strand to SEQ ID NO: 1926236
aucauagucaaacaucacc

SEQ ID NO: 1926238 - RNA, 19 nt, Artificial Sequence
  Description of Artificial Sequence: Synthetic oligonucleotide
  Sense strand starting at position 572 of SEQ ID NO: 1879701
guuugacuaugauuugcuu

SEQ ID NO: 1926239 - RNA, 19 nt, Artificial Sequence
  Description of Artificial Sequence: Synthetic oligonucleotide
  Antisense strand to SEQ ID NO: 1926238
aagcaaaucauagucaaac

SEQ ID NO: 1926240 - RNA, 19 nt, Artificial Sequence
  Description of Artificial Sequence: Synthetic oligonucleotide
  Sense strand starting at position 612 of SEQ ID NO: 1879701
gagguuauuccuggaacaa

SEQ ID NO: 1926241 - RNA, 19 nt, Artificial Sequence
  Description of Artificial Sequence: Synthetic oligonucleotide
  Antisense strand to SEQ ID NO: 1926240
uuguuccaggaauaaccuc

SEQ ID NO: 1926242 - RNA, 19 nt, Artificial Sequence
  Description of Artificial Sequence: Synthetic oligonucleotide
  Sense strand starting at position 624 of SEQ ID NO: 1879701
ggaacaaugucauucucac

SEQ ID NO: 1926243 - RNA, 19 nt, Artificial Sequence
  Description of Artificial Sequence: Synthetic oligonucleotide
  Antisense strand to SEQ ID NO: 1926242
gugagaaugacauuguucc

SEQ ID NO: 1926244 - RNA, 19 nt, Artificial Sequence
  Description of Artificial Sequence: Synthetic oligonucleotide
  Sense strand starting at position 746 of SEQ ID NO: 1879701
ggacgucacauguaucacu

SEQ ID NO: 1926245 - RNA, 19 nt, Artificial Sequence
  Description of Artificial Sequence: Synthetic oligonucleotide
  Antisense strand to SEQ ID NO: 1926244
agugauacaugugacgucc

SEQ ID NO: 1926246 - RNA, 19 nt, Artificial Sequence
  Description of Artificial Sequence: Synthetic oligonucleotide
  Sense strand starting at position 757 of SEQ ID NO: 1879701
guaucacugcuguggauuu

SEQ ID NO: 1926247 - RNA, 19 nt, Artificial Sequence
  Description of Artificial Sequence: Synthetic oligonucleotide
  Antisense strand to SEQ ID NO: 1926246
aaauccacagcagugauac

SEQ ID NO: 1926248 - RNA, 19 nt, Artificial Sequence
  Description of Artificial Sequence: Synthetic oligonucleotide
  Sense strand starting at position 853 of SEQ ID NO: 1879701
gugggugacccucaugagu

SEQ ID NO: 1926249 - RNA, 19 nt, Artificial Sequence
  Description of Artificial Sequence: Synthetic oligonucleotide
  Antisense strand to SEQ ID NO: 1926248
acucaugagggucacccac

SEQ ID NO: 1926250 - RNA, 19 nt, Artificial Sequence
  Description of Artificial Sequence: Synthetic oligonucleotide
  Sense strand starting at position 930 of SEQ ID NO: 1879701
ccuccagcuccaugggauu

SEQ ID NO: 1926251 - RNA, 19 nt, Artificial Sequence
  Description of Artificial Sequence: Synthetic oligonucleotide
  Antisense strand to SEQ ID NO: 1926250
aaucccauggagcuggagg

SEQ ID NO: 1926252 - RNA, 19 nt, Artificial Sequence
  Description of Artificial Sequence: Synthetic oligonucleotide
  Sense strand starting at position 1465 of SEQ ID NO: 1879701
ccagcugguccucaucaga

SEQ ID NO: 1926253 - RNA, 19 nt, Artificial Sequence
  Description of Artificial Sequence: Synthetic oligonucleotide
  Antisense strand to SEQ ID NO: 1926252
ucugaugaggaccagcugg

SEQ ID NO: 1926254 - RNA, 19 nt, Artificial Sequence
  Description of Artificial Sequence: Synthetic oligonucleotide
  Sense strand starting at position 1753 of SEQ ID NO: 1879701
uugggucuucaggagucua

SEQ ID NO: 1926255 - RNA, 19 nt, Artificial Sequence
  Description of Artificial Sequence: Synthetic oligonucleotide
  Antisense strand to SEQ ID NO: 1926254
uagacuccugaagacccaa

SEQ ID NO: 1926256 - RNA, 19 nt, Artificial Sequence
  Description of Artificial Sequence: Synthetic oligonucleotide
  Sense strand starting at position 2175 of SEQ ID NO: 1879701
ggcugaugaugagugacau

SEQ ID NO: 1926257 - RNA, 19 nt, Artificial Sequence
  Description of Artificial Sequence: Synthetic oligonucleotide
  Antisense strand to SEQ ID NO: 1926256
augucacucaucaucagcc

SEQ ID NO: 1926258 - RNA, 19 nt, Artificial Sequence
  Description of Artificial Sequence: Synthetic oligonucleotide
  Sense strand starting at position 2176 of SEQ ID NO: 1879701
gcugaugaugagugacauc

SEQ ID NO: 1926259 - RNA, 19 nt, Artificial Sequence
  Description of Artificial Sequence: Synthetic oligonucleotide
  Antisense strand to SEQ ID NO: 1926258
gaugucacucaucaucagc

SEQ ID NO: 1926260 - RNA, 19 nt, Artificial Sequence
  Description of Artificial Sequence: Synthetic oligonucleotide
  Sense strand starting at position 2412 of SEQ ID NO: 1879701
acaggaguucugcauauga

SEQ ID NO: 1926261 - RNA, 19 nt, Artificial Sequence
  Description of Artificial Sequence: Synthetic oligonucleotide
  Antisense strand to SEQ ID NO: 1926260
ucauaugcagaacuccugu

SEQ ID NO: 1926262 - RNA, 19 nt, Artificial Sequence
  Description of Artificial Sequence: Synthetic oligonucleotide
  Sense strand starting at position 2521 of SEQ ID NO: 1879701
gguguagaggcuuacacuu

SEQ ID NO: 1926263 - RNA, 19 nt, Artificial Sequence
  Description of Artificial Sequence: Synthetic oligonucleotide
  Antisense strand to SEQ ID NO: 1926262
aaguguaagccucuacacc

SEQ ID NO: 1926264 - RNA, 19 nt, Artificial Sequence
  Description of Artificial Sequence: Synthetic oligonucleotide
  Sense strand starting at position 2564 of SEQ ID NO: 1879701
gcauucucgacugagaaca

SEQ ID NO: 1926265 - RNA, 19 nt, Artificial Sequence
  Description of Artificial Sequence: Synthetic oligonucleotide
  Antisense strand to SEQ ID NO: 1926264
uguucucagucgagaaugc

SEQ ID NO: 1926266 - RNA, 19 nt, Artificial Sequence
  Description of Artificial Sequence: Synthetic oligonucleotide
  Sense strand starting at position 2612 of SEQ ID NO: 1879701
gcauaugacagcuaagugu

SEQ ID NO: 1926267 - RNA, 19 nt, Artificial Sequence
  Description of Artificial Sequence: Synthetic oligonucleotide
  Antisense strand to SEQ ID NO: 1926266
acacuuagcugucauaugc

SEQ ID NO: 1926268 - RNA, 19 nt, Artificial Sequence
  Description of Artificial Sequence: Synthetic oligonucleotide
  Sense strand starting at position 2773 of SEQ ID NO: 1879701
cuggcuucuccagaaugga

SEQ ID NO: 1926269 - RNA, 19 nt, Artificial Sequence
  Description of Artificial Sequence: Synthetic oligonucleotide
  Antisense strand to SEQ ID NO: 1926268
uccauucuggagaagccag

SEQ ID NO: 1926270 - RNA, 19 nt, Artificial Sequence
  Description of Artificial Sequence: Synthetic oligonucleotide
  Sense strand starting at position 3103 of SEQ ID NO: 1879701
ggaugauccuugccucaca

SEQ ID NO: 1926271 - RNA, 19 nt, Artificial Sequence
  Description of Artificial Sequence: Synthetic oligonucleotide
  Antisense strand to SEQ ID NO: 1926270
ugugaggcaaggaucaucc

SEQ ID NO: 1926272 - RNA, 19 nt, Artificial Sequence
  Description of Artificial Sequence: Synthetic oligonucleotide
  Sense strand starting at position 3132 of SEQ ID NO: 1879701
guggcucuuagucaugauu

SEQ ID NO: 1926273 - RNA, 19 nt, Artificial Sequence
  Description of Artificial Sequence: Synthetic oligonucleotide
  Antisense strand to SEQ ID NO: 1926272
aaucaugacuaagagccac

SEQ ID NO: 1926274 - RNA, 19 nt, Artificial Sequence
  Description of Artificial Sequence: Synthetic oligonucleotide
  Sense strand starting at position 3135 of SEQ ID NO: 1879701
gcucuuagucaugauuaac

SEQ ID NO: 1926275 - RNA, 19 nt, Artificial Sequence
  Description of Artificial Sequence: Synthetic oligonucleotide
  Antisense strand to SEQ ID NO: 1926274
guuaaucaugacuaagagc

SEQ ID NO: 1926276 - RNA, 19 nt, Artificial Sequence
  Description of Artificial Sequence: Synthetic oligonucleotide
  Sense strand starting at position 3342 of SEQ ID NO: 1879701
ugggaaggcucuuuggguu

SEQ ID NO: 1926277 - RNA, 19 nt, Artificial Sequence
  Description of Artificial Sequence: Synthetic oligonucleotide
  Antisense strand to SEQ ID NO: 1926276
aacccaaagagccuuccca

SEQ ID NO: 1926278 - RNA, 19 nt, Artificial Sequence
  Description of Artificial Sequence: Synthetic oligonucleotide
  Sense strand starting at position 3348 of SEQ ID NO: 1879701
ggcucuuuggguugaacca

SEQ ID NO: 1926279 - RNA, 19 nt, Artificial Sequence
  Description of Artificial Sequence: Synthetic oligonucleotide
  Antisense strand to SEQ ID NO: 1926278
ugguucaacccaaagagcc

SEQ ID NO: 1926280 - RNA, 19 nt, Artificial Sequence
  Description of Artificial Sequence: Synthetic oligonucleotide
  Sense strand starting at position 3349 of SEQ ID NO: 1879701
gcucuuuggguugaaccau

SEQ ID NO: 1926281 - RNA, 19 nt, Artificial Sequence
  Description of Artificial Sequence: Synthetic oligonucleotide
  Antisense strand to SEQ ID NO: 1926280
augguucaacccaaagagc

SEQ ID NO: 1926282 - RNA, 19 nt, Artificial Sequence
  Description of Artificial Sequence: Synthetic oligonucleotide
  Sense strand starting at position 3471 of SEQ ID NO: 1879701
gccagagguggcugauaga

SEQ ID NO: 1926283 - RNA, 19 nt, Artificial Sequence
  Description of Artificial Sequence: Synthetic oligonucleotide
  Antisense strand to SEQ ID NO: 1926282
ucuaucagccaccucuggc

SEQ ID NO: 1926284 - RNA, 19 nt, Artificial Sequence
  Description of Artificial Sequence: Synthetic oligonucleotide
  Sense strand starting at position 3504 of SEQ ID NO: 1879701
ggccuccugccucagagau

SEQ ID NO: 1926285 - RNA, 19 nt, Artificial Sequence
  Description of Artificial Sequence: Synthetic oligonucleotide
  Antisense strand to SEQ ID NO: 1926284
aucucugaggcaggaggcc

SEQ ID NO: 1926286 - RNA, 19 nt, Artificial Sequence
  Description of Artificial Sequence: Synthetic oligonucleotide
  Sense strand starting at position 3815 of SEQ ID NO: 1879701
ccgggauucccaggaugac

SEQ ID NO: 1926287 - RNA, 19 nt, Artificial Sequence
  Description of Artificial Sequence: Synthetic oligonucleotide
  Antisense strand to SEQ ID NO: 1926286
gucauccugggaaucccgg

SEQ ID NO: 1926288 - RNA, 19 nt, Artificial Sequence
  Description of Artificial Sequence: Synthetic oligonucleotide
  Sense strand starting at position 22 of SEQ ID NO: 1879702
ucagaagcuuuguuaagcu

SEQ ID NO: 1926289 - RNA, 19 nt, Artificial Sequence
  Description of Artificial Sequence: Synthetic oligonucleotide
  Antisense strand to SEQ ID NO: 1926288
agcuuaacaaagcuucuga

SEQ ID NO: 1926290 - RNA, 19 nt, Artificial Sequence
  Description of Artificial Sequence: Synthetic oligonucleotide
  Sense strand starting at position 26 of SEQ ID NO: 1879702
aagcuuuguuaagcuggaa

SEQ ID NO: 1926291 - RNA, 19 nt, Artificial Sequence
  Description of Artificial Sequence: Synthetic oligonucleotide
  Antisense strand to SEQ ID NO: 1926290
uuccagcuuaacaaagcuu

SEQ ID NO: 1926292 - RNA, 19 nt, Artificial Sequence
  Description of Artificial Sequence: Synthetic oligonucleotide
  Sense strand starting at position 29 of SEQ ID NO: 1879702
cuuuguuaagcuggaaaua

SEQ ID NO: 1926293 - RNA, 19 nt, Artificial Sequence
  Description of Artificial Sequence: Synthetic oligonucleotide
  Antisense strand to SEQ ID NO: 1926292
uauuuccagcuuaacaaag

SEQ ID NO: 1926294 - RNA, 19 nt, Artificial Sequence
  Description of Artificial Sequence: Synthetic oligonucleotide
  Sense strand starting at position 30 of SEQ ID NO: 1879702
uuuguuaagcuggaaauac

SEQ ID NO: 1926295 - RNA, 19 nt, Artificial Sequence
  Description of Artificial Sequence: Synthetic oligonucleotide
  Antisense strand to SEQ ID NO: 1926294
guauuuccagcuuaacaaa

SEQ ID NO: 1926296 - RNA, 19 nt, Artificial Sequence
  Description of Artificial Sequence: Synthetic oligonucleotide
  Sense strand starting at position 251 of SEQ ID NO: 1879702
cccgguaaucaagacagua

SEQ ID NO: 1926297 - RNA, 19 nt, Artificial Sequence
  Description of Artificial Sequence: Synthetic oligonucleotide
  Antisense strand to SEQ ID NO: 1926296
uacugucuugauuaccggg

SEQ ID NO: 1926298 - RNA, 19 nt, Artificial Sequence
  Description of Artificial Sequence: Synthetic oligonucleotide
  Sense strand starting at position 253 of SEQ ID NO: 1879702
cgguaaucaagacaguaca

SEQ ID NO: 1926299 - RNA, 19 nt, Artificial Sequence
  Description of Artificial Sequence: Synthetic oligonucleotide
  Antisense strand to SEQ ID NO: 1926298
uguacugucuugauuaccg

SEQ ID NO: 1926300 - RNA, 19 nt, Artificial Sequence
  Description of Artificial Sequence: Synthetic oligonucleotide
  Sense strand starting at position 342 of SEQ ID NO: 1879702
auggccaacugauuauuaa

SEQ ID NO: 1926301 - RNA, 19 nt, Artificial Sequence
  Description of Artificial Sequence: Synthetic oligonucleotide
  Antisense strand to SEQ ID NO: 1926300
uuaauaaucaguuggccau

SEQ ID NO: 1926302 - RNA, 19 nt, Artificial Sequence
  Description of Artificial Sequence: Synthetic oligonucleotide
  Sense strand starting at position 557 of SEQ ID NO: 1879702
ucuuuauaaccuuggauug

SEQ ID NO: 1926303 - RNA, 19 nt, Artificial Sequence
  Description of Artificial Sequence: Synthetic oligonucleotide
  Antisense strand to SEQ ID NO: 1926302
caauccaagguuauaaaga

SEQ ID NO: 1926304 - RNA, 19 nt, Artificial Sequence
  Description of Artificial Sequence: Synthetic oligonucleotide
  Sense strand starting at position 585 of SEQ ID NO: 1879702
uucuuagauuuggcgcuaa

SEQ ID NO: 1926305 - RNA, 19 nt, Artificial Sequence
  Description of Artificial Sequence: Synthetic oligonucleotide
  Antisense strand to SEQ ID NO: 1926304
uuagcgccaaaucuaagaa

SEQ ID NO: 1926306 - RNA, 19 nt, Artificial Sequence
  Description of Artificial Sequence: Synthetic oligonucleotide
  Sense strand starting at position 740 of SEQ ID NO: 1879702
aucugauaaggguauuguu

SEQ ID NO: 1926307 - RNA, 19 nt, Artificial Sequence
  Description of Artificial Sequence: Synthetic oligonucleotide
  Antisense strand to SEQ ID NO: 1926306
aacaauacccuuaucagau

SEQ ID NO: 1926308 - RNA, 19 nt, Artificial Sequence
  Description of Artificial Sequence: Synthetic oligonucleotide
  Sense strand starting at position 948 of SEQ ID NO: 1879702
cuuuacaugcauuggaaua

SEQ ID NO: 1926309 - RNA, 19 nt, Artificial Sequence
  Description of Artificial Sequence: Synthetic oligonucleotide
  Antisense strand to SEQ ID NO: 1926308
uauuccaaugcauguaaag

SEQ ID NO: 1926310 - RNA, 19 nt, Artificial Sequence
  Description of Artificial Sequence: Synthetic oligonucleotide
  Sense strand starting at position 1404 of SEQ ID NO: 1879702
auuguaugacugcauguau

SEQ ID NO: 1926311 - RNA, 19 nt, Artificial Sequence
  Description of Artificial Sequence: Synthetic oligonucleotide
  Antisense strand to SEQ ID NO: 1926310
auacaugcagucauacaau

SEQ ID NO: 1926312 - RNA, 19 nt, Artificial Sequence
  Description of Artificial Sequence: Synthetic oligonucleotide
  Sense strand starting at position 1426 of SEQ ID NO: 1879702
aaaugucaugcauaggcaa

SEQ ID NO: 1926313 - RNA, 19 nt, Artificial Sequence
  Description of Artificial Sequence: Synthetic oligonucleotide
  Antisense strand to SEQ ID NO: 1926312
uugccuaugcaugacauuu

SEQ ID NO: 1926314 - RNA, 19 nt, Artificial Sequence
  Description of Artificial Sequence: Synthetic oligonucleotide
  Sense strand starting at position 1513 of SEQ ID NO: 1879702
ugcuaauuaguaugggauu

SEQ ID NO: 1926315 - RNA, 19 nt, Artificial Sequence
  Description of Artificial Sequence: Synthetic oligonucleotide
  Antisense strand to SEQ ID NO: 1926314
aaucccauacuaauuagca

SEQ ID NO: 1926316 - RNA, 19 nt, Artificial Sequence
  Description of Artificial Sequence: Synthetic oligonucleotide
  Sense strand starting at position 1516 of SEQ ID NO: 1879702
uaauuaguaugggauuucu

SEQ ID NO: 1926317 - RNA, 19 nt, Artificial Sequence
  Description of Artificial Sequence: Synthetic oligonucleotide
  Antisense strand to SEQ ID NO: 1926316
agaaaucccauacuaauua

SEQ ID NO: 1926318 - RNA, 19 nt, Artificial Sequence
  Description of Artificial Sequence: Synthetic oligonucleotide
  Sense strand starting at position 1846 of SEQ ID NO: 1879702
ugaagcuugcuguauauac

SEQ ID NO: 1926319 - RNA, 19 nt, Artificial Sequence
  Description of Artificial Sequence: Synthetic oligonucleotide
  Antisense strand to SEQ ID NO: 1926318
guauauacagcaagcuuca

SEQ ID NO: 1926320 - RNA, 19 nt, Artificial Sequence
  Description of Artificial Sequence: Synthetic oligonucleotide
  Sense strand starting at position 1992 of SEQ ID NO: 1879702
aaggaugcucuauaaaguu

SEQ ID NO: 1926321 - RNA, 19 nt, Artificial Sequence
  Description of Artificial Sequence: Synthetic oligonucleotide
  Antisense strand to SEQ ID NO: 1926320
aacuuuauagagcauccuu

SEQ ID NO: 1926322 - RNA, 19 nt, Artificial Sequence
  Description of Artificial Sequence: Synthetic oligonucleotide
  Sense strand starting at position 2054 of SEQ ID NO: 1879702
acaggcuuuccuggagauu

SEQ ID NO: 1926323 - RNA, 19 nt, Artificial Sequence
  Description of Artificial Sequence: Synthetic oligonucleotide
  Antisense strand to SEQ ID NO: 1926322
aaucuccaggaaagccugu

SEQ ID NO: 1926324 - RNA, 19 nt, Artificial Sequence
  Description of Artificial Sequence: Synthetic oligonucleotide
  Sense strand starting at position 2055 of SEQ ID NO: 1879702
caggcuuuccuggagauuc

SEQ ID NO: 1926325 - RNA, 19 nt, Artificial Sequence
  Description of Artificial Sequence: Synthetic oligonucleotide
  Antisense strand to SEQ ID NO: 1926324
gaaucuccaggaaagccug

SEQ ID NO: 1926326 - RNA, 19 nt, Artificial Sequence
  Description of Artificial Sequence: Synthetic oligonucleotide
  Sense strand starting at position 2057 of SEQ ID NO: 1879702
ggcuuuccuggagauucca

SEQ ID NO: 1926327 - RNA, 19 nt, Artificial Sequence
  Description of Artificial Sequence: Synthetic oligonucleotide
  Antisense strand to SEQ ID NO: 1926326
uggaaucuccaggaaagcc

SEQ ID NO: 1926328 - RNA, 19 nt, Artificial Sequence
  Description of Artificial Sequence: Synthetic oligonucleotide
  Sense strand starting at position 2089 of SEQ ID NO: 1879702
cugggaacuuaaucuagua

SEQ ID NO: 1926329 - RNA, 19 nt, Artificial Sequence
  Description of Artificial Sequence: Synthetic oligonucleotide
  Antisense strand to SEQ ID NO: 1926328
uacuagauuaaguucccag

SEQ ID NO: 1926330 - RNA, 19 nt, Artificial Sequence
  Description of Artificial Sequence: Synthetic oligonucleotide
  Sense strand starting at position 2113 of SEQ ID NO: 1879702
agaaacugcucuccuaguu

SEQ ID NO: 1926331 - RNA, 19 nt, Artificial Sequence
  Description of Artificial Sequence: Synthetic oligonucleotide
  Antisense strand to SEQ ID NO: 1926330
aacuaggagagcaguuucu

SEQ ID NO: 1926332 - RNA, 19 nt, Artificial Sequence
  Description of Artificial Sequence: Synthetic oligonucleotide
  Sense strand starting at position 2193 of SEQ ID NO: 1879702
cagauauugggugagcgua

SEQ ID NO: 1926333 - RNA, 19 nt, Artificial Sequence
  Description of Artificial Sequence: Synthetic oligonucleotide
  Antisense strand to SEQ ID NO: 1926332
uacgcucacccaauaucug

SEQ ID NO: 1926334 - RNA, 19 nt, Artificial Sequence
  Description of Artificial Sequence: Synthetic oligonucleotide
  Sense strand starting at position 2245 of SEQ ID NO: 1879702
gcaagaaugucagugagag

SEQ ID NO: 1926335 - RNA, 19 nt, Artificial Sequence
  Description of Artificial Sequence: Synthetic oligonucleotide
  Antisense strand to SEQ ID NO: 1926334
cucucacugacauucuugc

SEQ ID NO: 1926336 - RNA, 19 nt, Artificial Sequence
  Description of Artificial Sequence: Synthetic oligonucleotide
  Sense strand starting at position 2367 of SEQ ID NO: 1879702
cucuuuaugugagcuaacu

SEQ ID NO: 1926337 - RNA, 19 nt, Artificial Sequence
  Description of Artificial Sequence: Synthetic oligonucleotide
  Antisense strand to SEQ ID NO: 1926336
aguuagcucacauaaagag

SEQ ID NO: 1926338 - RNA, 19 nt, Artificial Sequence
  Description of Artificial Sequence: Synthetic oligonucleotide
  Sense strand starting at position 2377 of SEQ ID NO: 1879702
gagcuaacuugauugguuu

SEQ ID NO: 1926339 - RNA, 19 nt, Artificial Sequence
  Description of Artificial Sequence: Synthetic oligonucleotide
  Antisense strand to SEQ ID NO: 1926338
aaaccaaucaaguuagcuc

SEQ ID NO: 1926340 - RNA, 19 nt, Artificial Sequence
  Description of Artificial Sequence: Synthetic oligonucleotide
  Sense strand starting at position 2481 of SEQ ID NO: 1879702
ccauccagguguguauuua

SEQ ID NO: 1926341 - RNA, 19 nt, Artificial Sequence
  Description of Artificial Sequence: Synthetic oligonucleotide
  Antisense strand to SEQ ID NO: 1926340
uaaauacacaccuggaugg

SEQ ID NO: 1926342 - RNA, 19 nt, Artificial Sequence
  Description of Artificial Sequence: Synthetic oligonucleotide
  Sense strand starting at position 2676 of SEQ ID NO: 1879702
cuuuaaauccuguaugucu

SEQ ID NO: 1926343 - RNA, 19 nt, Artificial Sequence
  Description of Artificial Sequence: Synthetic oligonucleotide
  Antisense strand to SEQ ID NO: 1926342
agacauacaggauuuaaag

SEQ ID NO: 1926344 - RNA, 19 nt, Artificial Sequence
  Description of Artificial Sequence: Synthetic oligonucleotide
  Sense strand starting at position 2688 of SEQ ID NO: 1879702
uaugucuugcaaugaaugu

SEQ ID NO: 1926345 - RNA, 19 nt, Artificial Sequence
  Description of Artificial Sequence: Synthetic oligonucleotide
  Antisense strand to SEQ ID NO: 1926344
acauucauugcaagacaua

SEQ ID NO: 1926346 - RNA, 19 nt, Artificial Sequence
  Description of Artificial Sequence: Synthetic oligonucleotide
  Sense strand starting at position 2771 of SEQ ID NO: 1879702
ucaccacuggccugacaau

SEQ ID NO: 1926347 - RNA, 19 nt, Artificial Sequence
  Description of Artificial Sequence: Synthetic oligonucleotide
  Antisense strand to SEQ ID NO: 1926346
auugucaggccagugguga

SEQ ID NO: 1926348 - RNA, 19 nt, Artificial Sequence
  Description of Artificial Sequence: Synthetic oligonucleotide
  Sense strand starting at position 2783 of SEQ ID NO: 1879702
ugacaauacccaggcaaga

SEQ ID NO: 1926349 - RNA, 19 nt, Artificial Sequence
  Description of Artificial Sequence: Synthetic oligonucleotide
  Antisense strand to SEQ ID NO: 1926348
ucuugccuggguauuguca

SEQ ID NO: 1926350 - RNA, 19 nt, Artificial Sequence
  Description of Artificial Sequence: Synthetic oligonucleotide
  Sense strand starting at position 2925 of SEQ ID NO: 1879702
auacauucgcucuaugaug

SEQ ID NO: 1926351 - RNA, 19 nt, Artificial Sequence
  Description of Artificial Sequence: Synthetic oligonucleotide
  Antisense strand to SEQ ID NO: 1926350
caucauagagcgaauguau

SEQ ID NO: 1926352 - RNA, 19 nt, Artificial Sequence
  Description of Artificial Sequence: Synthetic oligonucleotide
  Sense strand starting at position 3008 of SEQ ID NO: 1879702
uuuguauacugugccaaga

SEQ ID NO: 1926353 - RNA, 19 nt, Artificial Sequence
  Description of Artificial Sequence: Synthetic oligonucleotide
  Antisense strand to SEQ ID NO: 1926352
ucuuggcacaguauacaaa

SEQ ID NO: 1926354 - RNA, 19 nt, Artificial Sequence
  Description of Artificial Sequence: Synthetic oligonucleotide
  Sense strand starting at position 3248 of SEQ ID NO: 1879702
augacuauuucccagagac

SEQ ID NO: 1926355 - RNA, 19 nt, Artificial Sequence
  Description of Artificial Sequence: Synthetic oligonucleotide
  Antisense strand to SEQ ID NO: 1926354
gucucugggaaauagucau

SEQ ID NO: 1926356 - RNA, 19 nt, Artificial Sequence
  Description of Artificial Sequence: Synthetic oligonucleotide
  Sense strand starting at position 3377 of SEQ ID NO: 1879702
uacacaagaccggguaauu

SEQ ID NO: 1926357 - RNA, 19 nt, Artificial Sequence
  Description of Artificial Sequence: Synthetic oligonucleotide
  Antisense strand to SEQ ID NO: 1926356
aauuacccggucuugugua

SEQ ID NO: 1926358 - RNA, 19 nt, Artificial Sequence
  Description of Artificial Sequence: Synthetic oligonucleotide
  Sense strand starting at position 3736 of SEQ ID NO: 1879702
aacugaagguucuuauagu

SEQ ID NO: 1926359 - RNA, 19 nt, Artificial Sequence
  Description of Artificial Sequence: Synthetic oligonucleotide
  Antisense strand to SEQ ID NO: 1926358
acuauaagaaccuucaguu

SEQ ID NO: 1926360 - RNA, 19 nt, Artificial Sequence
  Description of Artificial Sequence: Synthetic oligonucleotide
  Sense strand starting at position 3742 of SEQ ID NO: 1879702
agguucuuauagucaucuu

SEQ ID NO: 1926361 - RNA, 19 nt, Artificial Sequence
  Description of Artificial Sequence: Synthetic oligonucleotide
  Antisense strand to SEQ ID NO: 1926360
aagaugacuauaagaaccu

SEQ ID NO: 1926362 - RNA, 19 nt, Artificial Sequence
  Description of Artificial Sequence: Synthetic oligonucleotide
  Sense strand starting at position 3810 of SEQ ID NO: 1879702
aguccuucuucuucuagga

SEQ ID NO: 1926363 - RNA, 19 nt, Artificial Sequence
  Description of Artificial Sequence: Synthetic oligonucleotide
  Antisense strand to SEQ ID NO: 1926362
uccuagaagaagaaggacu

SEQ ID NO: 1926364 - RNA, 19 nt, Artificial Sequence
  Description of Artificial Sequence: Synthetic oligonucleotide
  Sense strand starting at position 3814 of SEQ ID NO: 1879702
cuucuucuucuaggaggaa

SEQ ID NO: 1926365 - RNA, 19 nt, Artificial Sequence
  Description of Artificial Sequence: Synthetic oligonucleotide
  Antisense strand to SEQ ID NO: 1926364
uuccuccuagaagaagaag

SEQ ID NO: 1926366 - RNA, 19 nt, Artificial Sequence
  Description of Artificial Sequence: Synthetic oligonucleotide
  Sense strand starting at position 3817 of SEQ ID NO: 1879702
cuucuucuaggaggaacau

SEQ ID NO: 1926367 - RNA, 19 nt, Artificial Sequence
  Description of Artificial Sequence: Synthetic oligonucleotide
  Antisense strand to SEQ ID NO: 1926366
auguuccuccuagaagaag

SEQ ID NO: 1926368 - RNA, 19 nt, Artificial Sequence
  Description of Artificial Sequence: Synthetic oligonucleotide
  Sense strand starting at position 1363 of SEQ ID NO: 1879703
guaaguauaaccugggaag

SEQ ID NO: 1926369 - RNA, 19 nt, Artificial Sequence
  Description of Artificial Sequence: Synthetic oligonucleotide
  Antisense strand to SEQ ID NO: 1926368
cuucccagguuauacuuac

SEQ ID NO: 1926370 - RNA, 19 nt, Artificial Sequence
  Description of Artificial Sequence: Synthetic oligonucleotide
  Sense strand starting at position 1492 of SEQ ID NO: 1879703
gcuauuugccucugaccua

SEQ ID NO: 1926371 - RNA, 19 nt, Artificial Sequence
  Description of Artificial Sequence: Synthetic oligonucleotide
  Antisense strand to SEQ ID NO: 1926370
uaggucagaggcaaauagc

SEQ ID NO: 1926372 - RNA, 19 nt, Artificial Sequence
  Description of Artificial Sequence: Synthetic oligonucleotide
  Sense strand starting at position 1527 of SEQ ID NO: 1879703
uccugaaacugguuuggca

SEQ ID NO: 1926373 - RNA, 19 nt, Artificial Sequence
  Description of Artificial Sequence: Synthetic oligonucleotide
  Antisense strand to SEQ ID NO: 1926372
ugccaaaccaguuucagga

SEQ ID NO: 1926374 - RNA, 19 nt, Artificial Sequence
  Description of Artificial Sequence: Synthetic oligonucleotide
  Sense strand starting at position 1531 of SEQ ID NO: 1879703
gaaacugguuuggcagaau

SEQ ID NO: 1926375 - RNA, 19 nt, Artificial Sequence
  Description of Artificial Sequence: Synthetic oligonucleotide
  Antisense strand to SEQ ID NO: 1926374
auucugccaaaccaguuuc

SEQ ID NO: 1926376 - RNA, 19 nt, Artificial Sequence
  Description of Artificial Sequence: Synthetic oligonucleotide
  Sense strand starting at position 1542 of SEQ ID NO: 1879703
ggcagaaugucagugauau

SEQ ID NO: 1926377 - RNA, 19 nt, Artificial Sequence
  Description of Artificial Sequence: Synthetic oligonucleotide
  Antisense strand to SEQ ID NO: 1926376
auaucacugacauucugcc

SEQ ID NO: 1926378 - RNA, 19 nt, Artificial Sequence
  Description of Artificial Sequence: Synthetic oligonucleotide
  Sense strand starting at position 1543 of SEQ ID NO: 1879703
gcagaaugucagugauauu

SEQ ID NO: 1926379 - RNA, 19 nt, Artificial Sequence
  Description of Artificial Sequence: Synthetic oligonucleotide
  Antisense strand to SEQ ID NO: 1926378
aauaucacugacauucugc

SEQ ID NO: 1926380 - RNA, 19 nt, Artificial Sequence
  Description of Artificial Sequence: Synthetic oligonucleotide
  Sense strand starting at position 1569 of SEQ ID NO: 1879703
aagagugccuacuugagua

SEQ ID NO: 1926381 - RNA, 19 nt, Artificial Sequence
  Description of Artificial Sequence: Synthetic oligonucleotide
  Antisense strand to SEQ ID NO: 1926380
uacucaaguaggcacucuu

SEQ ID NO: 1926382 - RNA, 19 nt, Artificial Sequence
  Description of Artificial Sequence: Synthetic oligonucleotide
  Sense strand starting at position 1573 of SEQ ID NO: 1879703
gugccuacuugaguaccaa

SEQ ID NO: 1926383 - RNA, 19 nt, Artificial Sequence
  Description of Artificial Sequence: Synthetic oligonucleotide
  Antisense strand to SEQ ID NO: 1926382
uugguacucaaguaggcac

SEQ ID NO: 1926384 - RNA, 19 nt, Artificial Sequence
  Description of Artificial Sequence: Synthetic oligonucleotide
  Sense strand starting at position 1639 of SEQ ID NO: 1879703
acgggugcugugagguauu

SEQ ID NO: 1926385 - RNA, 19 nt, Artificial Sequence
  Description of Artificial Sequence: Synthetic oligonucleotide
  Antisense strand to SEQ ID NO: 1926384
aauaccucacagcacccgu

SEQ ID NO: 1926386 - RNA, 19 nt, Artificial Sequence
  Description of Artificial Sequence: Synthetic oligonucleotide
  Sense strand starting at position 1642 of SEQ ID NO: 1879703
ggugcugugagguauuauu

SEQ ID NO: 1926387 - RNA, 19 nt, Artificial Sequence
  Description of Artificial Sequence: Synthetic oligonucleotide
  Antisense strand to SEQ ID NO: 1926386
aauaauaccucacagcacc

SEQ ID NO: 1926388 - RNA, 19 nt, Artificial Sequence
  Description of Artificial Sequence: Synthetic oligonucleotide
  Sense strand starting at position 1681 of SEQ ID NO: 1879703
guaguugagggccagagau

SEQ ID NO: 1926389 - RNA, 19 nt, Artificial Sequence
  Description of Artificial Sequence: Synthetic oligonucleotide
  Antisense strand to SEQ ID NO: 1926388
aucucuggcccucaacuac

SEQ ID NO: 1926390 - RNA, 19 nt, Artificial Sequence
  Description of Artificial Sequence: Synthetic oligonucleotide
  Sense strand starting at position 1689 of SEQ ID NO: 1879703
gggccagagaucugugcaa

SEQ ID NO: 1926391 - RNA, 19 nt, Artificial Sequence
  Description of Artificial Sequence: Synthetic oligonucleotide
  Antisense strand to SEQ ID NO: 1926390
uugcacagaucucuggccc

SEQ ID NO: 1926392 - RNA, 19 nt, Artificial Sequence
  Description of Artificial Sequence: Synthetic oligonucleotide
  Sense strand starting at position 1708 of SEQ ID NO: 1879703
gggcccuuagcauaugaca

SEQ ID NO: 1926393 - RNA, 19 nt, Artificial Sequence
  Description of Artificial Sequence: Synthetic oligonucleotide
  Antisense strand to SEQ ID NO: 1926392
ugucauaugcuaagggccc

SEQ ID NO: 1926394 - RNA, 19 nt, Artificial Sequence
  Description of Artificial Sequence: Synthetic oligonucleotide
  Sense strand starting at position 1717 of SEQ ID NO: 1879703
gcauaugacagccaggauu

SEQ ID NO: 1926395 - RNA, 19 nt, Artificial Sequence
  Description of Artificial Sequence: Synthetic oligonucleotide
  Antisense strand to SEQ ID NO: 1926394
aauccuggcugucauaugc

SEQ ID NO: 1926396 - RNA, 19 nt, Artificial Sequence
  Description of Artificial Sequence: Synthetic oligonucleotide
  Sense strand starting at position 1820 of SEQ ID NO: 1879703
uggcgauucugauuucagu

SEQ ID NO: 1926397 - RNA, 19 nt, Artificial Sequence
  Description of Artificial Sequence: Synthetic oligonucleotide
  Antisense strand to SEQ ID NO: 1926396
acugaaaucagaaucgcca

SEQ ID NO: 1926398 - RNA, 19 nt, Artificial Sequence
  Description of Artificial Sequence: Synthetic oligonucleotide
  Sense strand starting at position 1857 of SEQ ID NO: 1879703
agauaaaugccuuggugau

SEQ ID NO: 1926399 - RNA, 19 nt, Artificial Sequence
  Description of Artificial Sequence: Synthetic oligonucleotide
  Antisense strand to SEQ ID NO: 1926398
aucaccaaggcauuuaucu

SEQ ID NO: 1926400 - RNA, 19 nt, Artificial Sequence
  Description of Artificial Sequence: Synthetic oligonucleotide
  Sense strand starting at position 1858 of SEQ ID NO: 1879703
gauaaaugccuuggugauu

SEQ ID NO: 1926401 - RNA, 19 nt, Artificial Sequence
  Description of Artificial Sequence: Synthetic oligonucleotide
  Antisense strand to SEQ ID NO: 1926400
aaucaccaaggcauuuauc

SEQ ID NO: 1926402 - RNA, 19 nt, Artificial Sequence
  Description of Artificial Sequence: Synthetic oligonucleotide
  Sense strand starting at position 2087 of SEQ ID NO: 1879703
acacaaguuuaauccuguu

SEQ ID NO: 1926403 - RNA, 19 nt, Artificial Sequence
  Description of Artificial Sequence: Synthetic oligonucleotide
  Antisense strand to SEQ ID NO: 1926402
aacaggauuaaacuugugu

SEQ ID NO: 1926404 - RNA, 19 nt, Artificial Sequence
  Description of Artificial Sequence: Synthetic oligonucleotide
  Sense strand starting at position 2111 of SEQ ID NO: 1879703
cccuuaggguacucacaau

SEQ ID NO: 1926405 - RNA, 19 nt, Artificial Sequence
  Description of Artificial Sequence: Synthetic oligonucleotide
  Antisense strand to SEQ ID NO: 1926404
auugugaguacccuaaggg

SEQ ID NO: 1926406 - RNA, 19 nt, Artificial Sequence
  Description of Artificial Sequence: Synthetic oligonucleotide
  Sense strand starting at position 2160 of SEQ ID NO: 1879703
gauacauagugaguccaga

SEQ ID NO: 1926407 - RNA, 19 nt, Artificial Sequence
  Description of Artificial Sequence: Synthetic oligonucleotide
  Antisense strand to SEQ ID NO: 1926406
ucuggacucacuauguauc

SEQ ID NO: 1926408 - RNA, 19 nt, Artificial Sequence
  Description of Artificial Sequence: Synthetic oligonucleotide
  Sense strand starting at position 2177 of SEQ ID NO: 1879703
gaggcaacaguuugauaga

SEQ ID NO: 1926409 - RNA, 19 nt, Artificial Sequence
  Description of Artificial Sequence: Synthetic oligonucleotide
  Antisense strand to SEQ ID NO: 1926408
ucuaucaaacuguugccuc

SEQ ID NO: 1926410 - RNA, 19 nt, Artificial Sequence
  Description of Artificial Sequence: Synthetic oligonucleotide
  Sense strand starting at position 2495 of SEQ ID NO: 1879703
gagcaaggcucugucuaag

SEQ ID NO: 1926411 - RNA, 19 nt, Artificial Sequence
  Description of Artificial Sequence: Synthetic oligonucleotide
  Antisense strand to SEQ ID NO: 1926410
cuuagacagagccuugcuc

SEQ ID NO: 1926412 - RNA, 19 nt, Artificial Sequence
  Description of Artificial Sequence: Synthetic oligonucleotide
  Sense strand starting at position 2565 of SEQ ID NO: 1879703
guagcucagagguaacaga

SEQ ID NO: 1926413 - RNA, 19 nt, Artificial Sequence
  Description of Artificial Sequence: Synthetic oligonucleotide
  Antisense strand to SEQ ID NO: 1926412
ucuguuaccucugagcuac

SEQ ID NO: 1926414 - RNA, 19 nt, Artificial Sequence
  Description of Artificial Sequence: Synthetic oligonucleotide
  Sense strand starting at position 2584 of SEQ ID NO: 1879703
gcucuuugugggcaggaaa

SEQ ID NO: 1926415 - RNA, 19 nt, Artificial Sequence
  Description of Artificial Sequence: Synthetic oligonucleotide
  Antisense strand to SEQ ID NO: 1926414
uuuccugcccacaaagagc

SEQ ID NO: 1926416 - RNA, 19 nt, Artificial Sequence
  Description of Artificial Sequence: Synthetic oligonucleotide
  Sense strand starting at position 2658 of SEQ ID NO: 1879703
cuuggaguucuguaacaug

SEQ ID NO: 1926417 - RNA, 19 nt, Artificial Sequence
  Description of Artificial Sequence: Synthetic oligonucleotide
  Antisense strand to SEQ ID NO: 1926416
cauguuacagaacuccaag

SEQ ID NO: 1926418 - RNA, 19 nt, Artificial Sequence
  Description of Artificial Sequence: Synthetic oligonucleotide
  Sense strand starting at position 2698 of SEQ ID NO: 1879703
uuaauuggcuugucuugau

SEQ ID NO: 1926419 - RNA, 19 nt, Artificial Sequence
  Description of Artificial Sequence: Synthetic oligonucleotide
  Antisense strand to SEQ ID NO: 1926418
aucaagacaagccaauuaa

SEQ ID NO: 1926420 - RNA, 19 nt, Artificial Sequence
  Description of Artificial Sequence: Synthetic oligonucleotide
  Sense strand starting at position 2702 of SEQ ID NO: 1879703
uuggcuugucuugauucua

SEQ ID NO: 1926421 - RNA, 19 nt, Artificial Sequence
  Description of Artificial Sequence: Synthetic oligonucleotide
  Antisense strand to SEQ ID NO: 1926420
uagaaucaagacaagccaa

SEQ ID NO: 1926422 - RNA, 19 nt, Artificial Sequence
  Description of Artificial Sequence: Synthetic oligonucleotide
  Sense strand starting at position 2797 of SEQ ID NO: 1879703
gggugcuuucuucaagggu

SEQ ID NO: 1926423 - RNA, 19 nt, Artificial Sequence
  Description of Artificial Sequence: Synthetic oligonucleotide
  Antisense strand to SEQ ID NO: 1926422
acccuugaagaaagcaccc

SEQ ID NO: 1926424 - RNA, 19 nt, Artificial Sequence
  Description of Artificial Sequence: Synthetic oligonucleotide
  Sense strand starting at position 2868 of SEQ ID NO: 1879703
uccaauaauuuguagggaa

SEQ ID NO: 1926425 - RNA, 19 nt, Artificial Sequence
  Description of Artificial Sequence: Synthetic oligonucleotide
  Antisense strand to SEQ ID NO: 1926424
uucccuacaaauuauugga

SEQ ID NO: 1926426 - RNA, 19 nt, Artificial Sequence
  Description of Artificial Sequence: Synthetic oligonucleotide
  Sense strand starting at position 2871 of SEQ ID NO: 1879703
aauaauuuguagggaagau

SEQ ID NO: 1926427 - RNA, 19 nt, Artificial Sequence
  Description of Artificial Sequence: Synthetic oligonucleotide
  Antisense strand to SEQ ID NO: 1926426
aucuucccuacaaauuauu

SEQ ID NO: 1926428 - RNA, 19 nt, Artificial Sequence
  Description of Artificial Sequence: Synthetic oligonucleotide
  Sense strand starting at position 3074 of SEQ ID NO: 1879703
cuuauuucuuccgaaggau

SEQ ID NO: 1926429 - RNA, 19 nt, Artificial Sequence
  Description of Artificial Sequence: Synthetic oligonucleotide
  Antisense strand to SEQ ID NO: 1926428
auccuucggaagaaauaag

SEQ ID NO: 1926430 - RNA, 19 nt, Artificial Sequence
  Description of Artificial Sequence: Synthetic oligonucleotide
  Sense strand starting at position 3254 of SEQ ID NO: 1879703
ggagucaccuguuuaaccu

SEQ ID NO: 1926431 - RNA, 19 nt, Artificial Sequence
  Description of Artificial Sequence: Synthetic oligonucleotide
  Antisense strand to SEQ ID NO: 1926430
agguuaaacaggugacucc

SEQ ID NO: 1926432 - RNA, 19 nt, Artificial Sequence
  Description of Artificial Sequence: Synthetic oligonucleotide
  Sense strand starting at position 3287 of SEQ ID NO: 1879703
ucauuaacucaauguguua

SEQ ID NO: 1926433 - RNA, 19 nt, Artificial Sequence
  Description of Artificial Sequence: Synthetic oligonucleotide
  Antisense strand to SEQ ID NO: 1926432
uaacacauugaguuaauga

SEQ ID NO: 1926434 - RNA, 19 nt, Artificial Sequence
  Description of Artificial Sequence: Synthetic oligonucleotide
  Sense strand starting at position 3379 of SEQ ID NO: 1879703
guaaguggcccucaagaua

SEQ ID NO: 1926435 - RNA, 19 nt, Artificial Sequence
  Description of Artificial Sequence: Synthetic oligonucleotide
  Antisense strand to SEQ ID NO: 1926434
uaucuugagggccacuuac

SEQ ID NO: 1926436 - RNA, 19 nt, Artificial Sequence
  Description of Artificial Sequence: Synthetic oligonucleotide
  Sense strand starting at position 3785 of SEQ ID NO: 1879703
uacaaagacugauugaugu

SEQ ID NO: 1926437 - RNA, 19 nt, Artificial Sequence
  Description of Artificial Sequence: Synthetic oligonucleotide
  Antisense strand to SEQ ID NO: 1926436
acaucaaucagucuuugua

SEQ ID NO: 1926438 - RNA, 19 nt, Artificial Sequence
  Description of Artificial Sequence: Synthetic oligonucleotide
  Sense strand starting at position 3791 of SEQ ID NO: 1879703
gacugauugauguagaguu

SEQ ID NO: 1926439 - RNA, 19 nt, Artificial Sequence
  Description of Artificial Sequence: Synthetic oligonucleotide
  Antisense strand to SEQ ID NO: 1926438
aacucuacaucaaucaguc

SEQ ID NO: 1926440 - RNA, 19 nt, Artificial Sequence
  Description of Artificial Sequence: Synthetic oligonucleotide
  Sense strand starting at position 3793 of SEQ ID NO: 1879703
cugauugauguagaguuua

SEQ ID NO: 1926441 - RNA, 19 nt, Artificial Sequence
  Description of Artificial Sequence: Synthetic oligonucleotide
  Antisense strand to SEQ ID NO: 1926440
uaaacucuacaucaaucag

SEQ ID NO: 1926442 - RNA, 19 nt, Artificial Sequence
  Description of Artificial Sequence: Synthetic oligonucleotide
  Sense strand starting at position 3798 of SEQ ID NO: 1879703
ugauguagaguuuauacua

SEQ ID NO: 1926443 - RNA, 19 nt, Artificial Sequence
  Description of Artificial Sequence: Synthetic oligonucleotide
  Antisense strand to SEQ ID NO: 1926442
uaguauaaacucuacauca

SEQ ID NO: 1926444 - RNA, 19 nt, Artificial Sequence
  Description of Artificial Sequence: Synthetic oligonucleotide
  Sense strand starting at position 3872 of SEQ ID NO: 1879703
ccuuuagaguugccugaga

SEQ ID NO: 1926445 - RNA, 19 nt, Artificial Sequence
  Description of Artificial Sequence: Synthetic oligonucleotide
  Antisense strand to SEQ ID NO: 1926444
ucucaggcaacucuaaagg

SEQ ID NO: 1926446 - RNA, 19 nt, Artificial Sequence
  Description of Artificial Sequence: Synthetic oligonucleotide
  Sense strand starting at position 3883 of SEQ ID NO: 1879703
gccugagaccuuuauugag

SEQ ID NO: 1926447 - RNA, 19 nt, Artificial Sequence
  Description of Artificial Sequence: Synthetic oligonucleotide
  Antisense strand to SEQ ID NO: 1926446
cucaauaaaggucucaggc

SEQ ID NO: 1926448 - RNA, 19 nt, Artificial Sequence
  Description of Artificial Sequence: Synthetic oligonucleotide
  Sense strand starting at position 505 of SEQ ID NO: 1879704
cugagaagguguuucagau

SEQ ID NO: 1926449 - RNA, 19 nt, Artificial Sequence
  Description of Artificial Sequence: Synthetic oligonucleotide
  Antisense strand to SEQ ID NO: 1926448
aucugaaacaccuucucag

SEQ ID NO: 1926450 - RNA, 19 nt, Artificial Sequence
  Description of Artificial Sequence: Synthetic oligonucleotide
  Sense strand starting at position 1180 of SEQ ID NO: 1879704
gguguuaugaggcaaggaa

SEQ ID NO: 1926451 - RNA, 19 nt, Artificial Sequence
  Description of Artificial Sequence: Synthetic oligonucleotide
  Antisense strand to SEQ ID NO: 1926450
uuccuugccucauaacacc

SEQ ID NO: 1926452 - RNA, 19 nt, Artificial Sequence
  Description of Artificial Sequence: Synthetic oligonucleotide
  Sense strand starting at position 1241 of SEQ ID NO: 1879704
aggcguggccuggagagau

SEQ ID NO: 1926453 - RNA, 19 nt, Artificial Sequence
  Description of Artificial Sequence: Synthetic oligonucleotide
  Antisense strand to SEQ ID NO: 1926452
aucucuccaggccacgccu

SEQ ID NO: 1926454 - RNA, 19 nt, Artificial Sequence
  Description of Artificial Sequence: Synthetic oligonucleotide
  Sense strand starting at position 1306 of SEQ ID NO: 1879704
gcugcucacuuguccagaa

SEQ ID NO: 1926455 - RNA, 19 nt, Artificial Sequence
  Description of Artificial Sequence: Synthetic oligonucleotide
  Antisense strand to SEQ ID NO: 1926454
uucuggacaagugagcagc

SEQ ID NO: 1926456 - RNA, 19 nt, Artificial Sequence
  Description of Artificial Sequence: Synthetic oligonucleotide
  Sense strand starting at position 1308 of SEQ ID NO: 1879704
ugcucacuuguccagaacu

SEQ ID NO: 1926457 - RNA, 19 nt, Artificial Sequence
  Description of Artificial Sequence: Synthetic oligonucleotide
  Antisense strand to SEQ ID NO: 1926456
aguucuggacaagugagca

SEQ ID NO: 1926458 - RNA, 19 nt, Artificial Sequence
  Description of Artificial Sequence: Synthetic oligonucleotide
  Sense strand starting at position 1745 of SEQ ID NO: 1879704
gugguuaccucuccagugu

SEQ ID NO: 1926459 - RNA, 19 nt, Artificial Sequence
  Description of Artificial Sequence: Synthetic oligonucleotide
  Antisense strand to SEQ ID NO: 1926458
acacuggagagguaaccac

SEQ ID NO: 1926460 - RNA, 19 nt, Artificial Sequence
  Description of Artificial Sequence: Synthetic oligonucleotide
  Sense strand starting at position 1783 of SEQ ID NO: 1879704
gaggacagcucagagaaua

SEQ ID NO: 1926461 - RNA, 19 nt, Artificial Sequence
  Description of Artificial Sequence: Synthetic oligonucleotide
  Antisense strand to SEQ ID NO: 1926460
uauucucugagcuguccuc

SEQ ID NO: 1926462 - RNA, 19 nt, Artificial Sequence
  Description of Artificial Sequence: Synthetic oligonucleotide
  Sense strand starting at position 1821 of SEQ ID NO: 1879704
gguccaucccuuuaggauc

SEQ ID NO: 1926463 - RNA, 19 nt, Artificial Sequence
  Description of Artificial Sequence: Synthetic oligonucleotide
  Antisense strand to SEQ ID NO: 1926462
gauccuaaagggauggacc

SEQ ID NO: 1926464 - RNA, 19 nt, Artificial Sequence
  Description of Artificial Sequence: Synthetic oligonucleotide
  Sense strand starting at position 1859 of SEQ ID NO: 1879704
ggaucacugccuuguccau

SEQ ID NO: 1926465 - RNA, 19 nt, Artificial Sequence
  Description of Artificial Sequence: Synthetic oligonucleotide
  Antisense strand to SEQ ID NO: 1926464
auggacaaggcagugaucc

SEQ ID NO: 1926466 - RNA, 19 nt, Artificial Sequence
  Description of Artificial Sequence: Synthetic oligonucleotide
  Sense strand starting at position 2523 of SEQ ID NO: 1879704
uagauaagcucuuuaggga

SEQ ID NO: 1926467 - RNA, 19 nt, Artificial Sequence
  Description of Artificial Sequence: Synthetic oligonucleotide
  Antisense strand to SEQ ID NO: 1926466
ucccuaaagagcuuaucua

SEQ ID NO: 1926468 - RNA, 19 nt, Artificial Sequence
  Description of Artificial Sequence: Synthetic oligonucleotide
  Sense strand starting at position 2526 of SEQ ID NO: 1879704
auaagcucuuuagggaaca

SEQ ID NO: 1926469 - RNA, 19 nt, Artificial Sequence
  Description of Artificial Sequence: Synthetic oligonucleotide
  Antisense strand to SEQ ID NO: 1926468
uguucccuaaagagcuuau

SEQ ID NO: 1926470 - RNA, 19 nt, Artificial Sequence
  Description of Artificial Sequence: Synthetic oligonucleotide
  Sense strand starting at position 2596 of SEQ ID NO: 1879704
acgguuuaaucucuagaga

SEQ ID NO: 1926471 - RNA, 19 nt, Artificial Sequence
  Description of Artificial Sequence: Synthetic oligonucleotide
  Antisense strand to SEQ ID NO: 1926470
ucucuagagauuaaaccgu

SEQ ID NO: 1926472 - RNA, 19 nt, Artificial Sequence
  Description of Artificial Sequence: Synthetic oligonucleotide
  Sense strand starting at position 2597 of SEQ ID NO: 1879704
cgguuuaaucucuagagaa

SEQ ID NO: 1926473 - RNA, 19 nt, Artificial Sequence
  Description of Artificial Sequence: Synthetic oligonucleotide
  Antisense strand to SEQ ID NO: 1926472
uucucuagagauuaaaccg

SEQ ID NO: 1926474 - RNA, 19 nt, Artificial Sequence
  Description of Artificial Sequence: Synthetic oligonucleotide
  Sense strand starting at position 2612 of SEQ ID NO: 1879704
agaagaagccggcaaugua

SEQ ID NO: 1926475 - RNA, 19 nt, Artificial Sequence
  Description of Artificial Sequence: Synthetic oligonucleotide
  Antisense strand to SEQ ID NO: 1926474
uacauugccggcuucuucu

SEQ ID NO: 1926476 - RNA, 19 nt, Artificial Sequence
  Description of Artificial Sequence: Synthetic oligonucleotide
  Sense strand starting at position 2674 of SEQ ID NO: 1879704
gcuuguuuccugugcgucu

SEQ ID NO: 1926477 - RNA, 19 nt, Artificial Sequence
  Description of Artificial Sequence: Synthetic oligonucleotide
  Antisense strand to SEQ ID NO: 1926476
agacgcacaggaaacaagc

SEQ ID NO: 1926478 - RNA, 19 nt, Artificial Sequence
  Description of Artificial Sequence: Synthetic oligonucleotide
  Sense strand starting at position 2751 of SEQ ID NO: 1879704
acaggccucucauucugaa

SEQ ID NO: 1926479 - RNA, 19 nt, Artificial Sequence
  Description of Artificial Sequence: Synthetic oligonucleotide
  Antisense strand to SEQ ID NO: 1926478
uucagaaugagaggccugu

SEQ ID NO: 1926480 - RNA, 19 nt, Artificial Sequence
  Description of Artificial Sequence: Synthetic oligonucleotide
  Sense strand starting at position 2795 of SEQ ID NO: 1879704
agcuuugaacacuggagaa

SEQ ID NO: 1926481 - RNA, 19 nt, Artificial Sequence
  Description of Artificial Sequence: Synthetic oligonucleotide
  Antisense strand to SEQ ID NO: 1926480
uucuccaguguucaaagcu

SEQ ID NO: 1926482 - RNA, 19 nt, Artificial Sequence
  Description of Artificial Sequence: Synthetic oligonucleotide
  Sense strand starting at position 2911 of SEQ ID NO: 1879704
uaguucugcuuuccaggaa

SEQ ID NO: 1926483 - RNA, 19 nt, Artificial Sequence
  Description of Artificial Sequence: Synthetic oligonucleotide
  Antisense strand to SEQ ID NO: 1926482
uuccuggaaagcagaacua

SEQ ID NO: 1926484 - RNA, 19 nt, Artificial Sequence
  Description of Artificial Sequence: Synthetic oligonucleotide
  Sense strand starting at position 2935 of SEQ ID NO: 1879704
aaaucuguuucuguuggau

SEQ ID NO: 1926485 - RNA, 19 nt, Artificial Sequence
  Description of Artificial Sequence: Synthetic oligonucleotide
  Antisense strand to SEQ ID NO: 1926484
auccaacagaaacagauuu

SEQ ID NO: 1926486 - RNA, 19 nt, Artificial Sequence
  Description of Artificial Sequence: Synthetic oligonucleotide
  Sense strand starting at position 2937 of SEQ ID NO: 1879704
aucuguuucuguuggaucu

SEQ ID NO: 1926487 - RNA, 19 nt, Artificial Sequence
  Description of Artificial Sequence: Synthetic oligonucleotide
  Antisense strand to SEQ ID NO: 1926486
agauccaacagaaacagau

SEQ ID NO: 1926488 - RNA, 19 nt, Artificial Sequence
  Description of Artificial Sequence: Synthetic oligonucleotide
  Sense strand starting at position 3087 of SEQ ID NO: 1879704
agaccuaggguucggaauu

SEQ ID NO: 1926489 - RNA, 19 nt, Artificial Sequence
  Description of Artificial Sequence: Synthetic oligonucleotide
  Antisense strand to SEQ ID NO: 1926488
aauuccgaacccuaggucu

SEQ ID NO: 1926490 - RNA, 19 nt, Artificial Sequence
  Description of Artificial Sequence: Synthetic oligonucleotide
  Sense strand starting at position 3088 of SEQ ID NO: 1879704
gaccuaggguucggaauuu

SEQ ID NO: 1926491 - RNA, 19 nt, Artificial Sequence
  Description of Artificial Sequence: Synthetic oligonucleotide
  Antisense strand to SEQ ID NO: 1926490
aaauuccgaacccuagguc

SEQ ID NO: 1926492 - RNA, 19 nt, Artificial Sequence
  Description of Artificial Sequence: Synthetic oligonucleotide
  Sense strand starting at position 3293 of SEQ ID NO: 1879704
cugccugacucuuguuacu

SEQ ID NO: 1926493 - RNA, 19 nt, Artificial Sequence
  Description of Artificial Sequence: Synthetic oligonucleotide
  Antisense strand to SEQ ID NO: 1926492
aguaacaagagucaggcag

SEQ ID NO: 1926494 - RNA, 19 nt, Artificial Sequence
  Description of Artificial Sequence: Synthetic oligonucleotide
  Sense strand starting at position 3441 of SEQ ID NO: 1879704
gggucuacccaguacacau

SEQ ID NO: 1926495 - RNA, 19 nt, Artificial Sequence
  Description of Artificial Sequence: Synthetic oligonucleotide
  Antisense strand to SEQ ID NO: 1926494
auguguacuggguagaccc

SEQ ID NO: 1926496 - RNA, 19 nt, Artificial Sequence
  Description of Artificial Sequence: Synthetic oligonucleotide
  Sense strand starting at position 3486 of SEQ ID NO: 1879704
uuggcaguucccuggagaa

SEQ ID NO: 1926497 - RNA, 19 nt, Artificial Sequence
  Description of Artificial Sequence: Synthetic oligonucleotide
  Antisense strand to SEQ ID NO: 1926496
uucuccagggaacugccaa

SEQ ID NO: 1926498 - RNA, 19 nt, Artificial Sequence
  Description of Artificial Sequence: Synthetic oligonucleotide
  Sense strand starting at position 3488 of SEQ ID NO: 1879704
ggcaguucccuggagaagu

SEQ ID NO: 1926499 - RNA, 19 nt, Artificial Sequence
  Description of Artificial Sequence: Synthetic oligonucleotide
  Antisense strand to SEQ ID NO: 1926498
acuucuccagggaacugcc

SEQ ID NO: 1926500 - RNA, 19 nt, Artificial Sequence
  Description of Artificial Sequence: Synthetic oligonucleotide
  Sense strand starting at position 3872 of SEQ ID NO: 1879704
cccuguguuucugggccua

SEQ ID NO: 1926501 - RNA, 19 nt, Artificial Sequence
  Description of Artificial Sequence: Synthetic oligonucleotide
  Antisense strand to SEQ ID NO: 1926500
uaggcccagaaacacaggg

SEQ ID NO: 1926502 - RNA, 19 nt, Artificial Sequence
  Description of Artificial Sequence: Synthetic oligonucleotide
  Sense strand starting at position 3884 of SEQ ID NO: 1879704
gggccuagccauggagaau

SEQ ID NO: 1926503 - RNA, 19 nt, Artificial Sequence
  Description of Artificial Sequence: Synthetic oligonucleotide
  Antisense strand to SEQ ID NO: 1926502
auucuccauggcuaggccc

SEQ ID NO: 1926504 - RNA, 19 nt, Artificial Sequence
  Description of Artificial Sequence: Synthetic oligonucleotide
  Sense strand starting at position 3897 of SEQ ID NO: 1879704
gagaaucccuguccugagu

SEQ ID NO: 1926505 - RNA, 19 nt, Artificial Sequence
  Description of Artificial Sequence: Synthetic oligonucleotide
  Antisense strand to SEQ ID NO: 1926504
acucaggacagggauucuc

SEQ ID NO: 1926506 - RNA, 19 nt, Artificial Sequence
  Description of Artificial Sequence: Synthetic oligonucleotide
  Sense strand starting at position 16 of SEQ ID NO: 1879705
cggagcacacaguguuaau

SEQ ID NO: 1926507 - RNA, 19 nt, Artificial Sequence
  Description of Artificial Sequence: Synthetic oligonucleotide
  Antisense strand to SEQ ID NO: 1926506
auuaacacugugugcuccg

SEQ ID NO: 1926508 - RNA, 19 nt, Artificial Sequence
  Description of Artificial Sequence: Synthetic oligonucleotide
  Sense strand starting at position 25 of SEQ ID NO: 1879705
caguguuaauaauuagaag

SEQ ID NO: 1926509 - RNA, 19 nt, Artificial Sequence
  Description of Artificial Sequence: Synthetic oligonucleotide
  Antisense strand to SEQ ID NO: 1926508
cuucuaauuauuaacacug

SEQ ID NO: 1926510 - RNA, 19 nt, Artificial Sequence
  Description of Artificial Sequence: Synthetic oligonucleotide
  Sense strand starting at position 85 of SEQ ID NO: 1879705
ugaaguacuguguggacaa

SEQ ID NO: 1926511 - RNA, 19 nt, Artificial Sequence
  Description of Artificial Sequence: Synthetic oligonucleotide
  Antisense strand to SEQ ID NO: 1926510
uuguccacacaguacuuca

SEQ ID NO: 1926512 - RNA, 19 nt, Artificial Sequence
  Description of Artificial Sequence: Synthetic oligonucleotide
  Sense strand starting at position 96 of SEQ ID NO: 1879705
guggacaaguuauuacaaa

SEQ ID NO: 1926513 - RNA, 19 nt, Artificial Sequence
  Description of Artificial Sequence: Synthetic oligonucleotide
  Antisense strand to SEQ ID NO: 1926512
uuuguaauaacuuguccac

SEQ ID NO: 1926514 - RNA, 19 nt, Artificial Sequence
  Description of Artificial Sequence: Synthetic oligonucleotide
  Sense strand starting at position 232 of SEQ ID NO: 1879705
aaagauacaguaugaaguu

SEQ ID NO: 1926515 - RNA, 19 nt, Artificial Sequence
  Description of Artificial Sequence: Synthetic oligonucleotide
  Antisense strand to SEQ ID NO: 1926514
aacuucauacuguaucuuu

SEQ ID NO: 1926516 - RNA, 19 nt, Artificial Sequence
  Description of Artificial Sequence: Synthetic oligonucleotide
  Sense strand starting at position 239 of SEQ ID NO: 1879705
caguaugaaguuugaaauc

SEQ ID NO: 1926517 - RNA, 19 nt, Artificial Sequence
  Description of Artificial Sequence: Synthetic oligonucleotide
  Antisense strand to SEQ ID NO: 1926516
gauuucaaacuucauacug

SEQ ID NO: 1926518 - RNA, 19 nt, Artificial Sequence
  Description of Artificial Sequence: Synthetic oligonucleotide
  Sense strand starting at position 509 of SEQ ID NO: 1879705
agcugagaucugggcgaua

SEQ ID NO: 1926519 - RNA, 19 nt, Artificial Sequence
  Description of Artificial Sequence: Synthetic oligonucleotide
  Antisense strand to SEQ ID NO: 1926518
uaucgcccagaucucagcu

SEQ ID NO: 1926520 - RNA, 19 nt, Artificial Sequence
  Description of Artificial Sequence: Synthetic oligonucleotide
  Sense strand starting at position 511 of SEQ ID NO: 1879705
cugagaucugggcgauaga

SEQ ID NO: 1926521 - RNA, 19 nt, Artificial Sequence
  Description of Artificial Sequence: Synthetic oligonucleotide
  Antisense strand to SEQ ID NO: 1926520
ucuaucgcccagaucucag

SEQ ID NO: 1926522 - RNA, 19 nt, Artificial Sequence
  Description of Artificial Sequence: Synthetic oligonucleotide
  Sense strand starting at position 692 of SEQ ID NO: 1879705
cuaacucuggagggaugua

SEQ ID NO: 1926523 - RNA, 19 nt, Artificial Sequence
  Description of Artificial Sequence: Synthetic oligonucleotide
  Antisense strand to SEQ ID NO: 1926522
uacaucccuccagaguuag

SEQ ID NO: 1926524 - RNA, 19 nt, Artificial Sequence
  Description of Artificial Sequence: Synthetic oligonucleotide
  Sense strand starting at position 702 of SEQ ID NO: 1879705
agggauguaccuugagacu

SEQ ID NO: 1926525 - RNA, 19 nt, Artificial Sequence
  Description of Artificial Sequence: Synthetic oligonucleotide
  Antisense strand to SEQ ID NO: 1926524
agucucaagguacaucccu

SEQ ID NO: 1926526 - RNA, 19 nt, Artificial Sequence
  Description of Artificial Sequence: Synthetic oligonucleotide
  Sense strand starting at position 711 of SEQ ID NO: 1879705
ccuugagacuuucugggua

SEQ ID NO: 1926527 - RNA, 19 nt, Artificial Sequence
  Description of Artificial Sequence: Synthetic oligonucleotide
  Antisense strand to SEQ ID NO: 1926526
uacccagaaagucucaagg

SEQ ID NO: 1926528 - RNA, 19 nt, Artificial Sequence
  Description of Artificial Sequence: Synthetic oligonucleotide
  Sense strand starting at position 714 of SEQ ID NO: 1879705
ugagacuuucuggguaaau

SEQ ID NO: 1926529 - RNA, 19 nt, Artificial Sequence
  Description of Artificial Sequence: Synthetic oligonucleotide
  Antisense strand to SEQ ID NO: 1926528
auuuacccagaaagucuca

SEQ ID NO: 1926530 - RNA, 19 nt, Artificial Sequence
  Description of Artificial Sequence: Synthetic oligonucleotide
  Sense strand starting at position 715 of SEQ ID NO: 1879705
gagacuuucuggguaaauu

SEQ ID NO: 1926531 - RNA, 19 nt, Artificial Sequence
  Description of Artificial Sequence: Synthetic oligonucleotide
  Antisense strand to SEQ ID NO: 1926530
aauuuacccagaaagucuc

SEQ ID NO: 1926532 - RNA, 19 nt, Artificial Sequence
  Description of Artificial Sequence: Synthetic oligonucleotide
  Sense strand starting at position 817 of SEQ ID NO: 1879705
cuucgucaugcucaaugaa

SEQ ID NO: 1926533 - RNA, 19 nt, Artificial Sequence
  Description of Artificial Sequence: Synthetic oligonucleotide
  Antisense strand to SEQ ID NO: 1926532
uucauugagcaugacgaag

SEQ ID NO: 1926534 - RNA, 19 nt, Artificial Sequence
  Description of Artificial Sequence: Synthetic oligonucleotide
  Sense strand starting at position 1090 of SEQ ID NO: 1879705
guuaguuuaguucagaugu

SEQ ID NO: 1926535 - RNA, 19 nt, Artificial Sequence
  Description of Artificial Sequence: Synthetic oligonucleotide
  Antisense strand to SEQ ID NO: 1926534
acaucugaacuaaacuaac

SEQ ID NO: 1926536 - RNA, 19 nt, Artificial Sequence
  Description of Artificial Sequence: Synthetic oligonucleotide
  Sense strand starting at position 1157 of SEQ ID NO: 1879705
gccgucuuggcauaaagau

SEQ ID NO: 1926537 - RNA, 19 nt, Artificial Sequence
  Description of Artificial Sequence: Synthetic oligonucleotide
  Antisense strand to SEQ ID NO: 1926536
aucuuuaugccaagacggc

SEQ ID NO: 1926538 - RNA, 19 nt, Artificial Sequence
  Description of Artificial Sequence: Synthetic oligonucleotide
  Sense strand starting at position 1166 of SEQ ID NO: 1879705
gcauaaagaugauuaugua

SEQ ID NO: 1926539 - RNA, 19 nt, Artificial Sequence
  Description of Artificial Sequence: Synthetic oligonucleotide
  Antisense strand to SEQ ID NO: 1926538
uacauaaucaucuuuaugc

SEQ ID NO: 1926540 - RNA, 19 nt, Artificial Sequence
  Description of Artificial Sequence: Synthetic oligonucleotide
  Sense strand starting at position 1181 of SEQ ID NO: 1879705
uguauuugucaaugcacau

SEQ ID NO: 1926541 - RNA, 19 nt, Artificial Sequence
  Description of Artificial Sequence: Synthetic oligonucleotide
  Antisense strand to SEQ ID NO: 1926540
augugcauugacaaauaca

SEQ ID NO: 1926542 - RNA, 19 nt, Artificial Sequence
  Description of Artificial Sequence: Synthetic oligonucleotide
  Sense strand starting at position 1195 of SEQ ID NO: 1879705
cacaucgaguucucuggaa

SEQ ID NO: 1926543 - RNA, 19 nt, Artificial Sequence
  Description of Artificial Sequence: Synthetic oligonucleotide
  Antisense strand to SEQ ID NO: 1926542
uuccagagaacucgaugug

SEQ ID NO: 1926544 - RNA, 19 nt, Artificial Sequence
  Description of Artificial Sequence: Synthetic oligonucleotide
  Sense strand starting at position 1197 of SEQ ID NO: 1879705
caucgaguucucuggaaga

SEQ ID NO: 1926545 - RNA, 19 nt, Artificial Sequence
  Description of Artificial Sequence: Synthetic oligonucleotide
  Antisense strand to SEQ ID NO: 1926544
ucuuccagagaacucgaug

SEQ ID NO: 1926546 - RNA, 19 nt, Artificial Sequence
  Description of Artificial Sequence: Synthetic oligonucleotide
  Sense strand starting at position 1199 of SEQ ID NO: 1879705
ucgaguucucuggaagacc

SEQ ID NO: 1926547 - RNA, 19 nt, Artificial Sequence
  Description of Artificial Sequence: Synthetic oligonucleotide
  Antisense strand to SEQ ID NO: 1926546
ggucuuccagagaacucga

SEQ ID NO: 1926548 - RNA, 19 nt, Artificial Sequence
  Description of Artificial Sequence: Synthetic oligonucleotide
  Sense strand starting at position 1884 of SEQ ID NO: 1879705
gagacaucacgcugaauug

SEQ ID NO: 1926549 - RNA, 19 nt, Artificial Sequence
  Description of Artificial Sequence: Synthetic oligonucleotide
  Antisense strand to SEQ ID NO: 1926548
caauucagcgugaugucuc

SEQ ID NO: 1926550 - RNA, 19 nt, Artificial Sequence
  Description of Artificial Sequence: Synthetic oligonucleotide
  Sense strand starting at position 2024 of SEQ ID NO: 1879705
gcguccuggaguuagcaaa

SEQ ID NO: 1926551 - RNA, 19 nt, Artificial Sequence
  Description of Artificial Sequence: Synthetic oligonucleotide
  Antisense strand to SEQ ID NO: 1926550
uuugcuaacuccaggacgc

SEQ ID NO: 1926552 - RNA, 19 nt, Artificial Sequence
  Description of Artificial Sequence: Synthetic oligonucleotide
  Sense strand starting at position 2286 of SEQ ID NO: 1879705
uuaaguauuccguaacugu

SEQ ID NO: 1926553 - RNA, 19 nt, Artificial Sequence
  Description of Artificial Sequence: Synthetic oligonucleotide
  Antisense strand to SEQ ID NO: 1926552
acaguuacggaauacuuaa

SEQ ID NO: 1926554 - RNA, 19 nt, Artificial Sequence
  Description of Artificial Sequence: Synthetic oligonucleotide
  Sense strand starting at position 2443 of SEQ ID NO: 1879705
acgaguuaauaagcaauau

SEQ ID NO: 1926555 - RNA, 19 nt, Artificial Sequence
  Description of Artificial Sequence: Synthetic oligonucleotide
  Antisense strand to SEQ ID NO: 1926554
auauugcuuauuaacucgu

SEQ ID NO: 1926556 - RNA, 19 nt, Artificial Sequence
  Description of Artificial Sequence: Synthetic oligonucleotide
  Sense strand starting at position 2542 of SEQ ID NO: 1879705
ucgacaagauuacugugaa

SEQ ID NO: 1926557 - RNA, 19 nt, Artificial Sequence
  Description of Artificial Sequence: Synthetic oligonucleotide
  Antisense strand to SEQ ID NO: 1926556
uucacaguaaucuugucga

SEQ ID NO: 1926558 - RNA, 19 nt, Artificial Sequence
  Description of Artificial Sequence: Synthetic oligonucleotide
  Sense strand starting at position 2556 of SEQ ID NO: 1879705
gugaaacagucucuacaag

SEQ ID NO: 1926559 - RNA, 19 nt, Artificial Sequence
  Description of Artificial Sequence: Synthetic oligonucleotide
  Antisense strand to SEQ ID NO: 1926558
cuuguagagacuguuucac

SEQ ID NO: 1926560 - RNA, 19 nt, Artificial Sequence
  Description of Artificial Sequence: Synthetic oligonucleotide
  Sense strand starting at position 2578 of SEQ ID NO: 1879705
aguuaaguuugcccgauaa

SEQ ID NO: 1926561 - RNA, 19 nt, Artificial Sequence
  Description of Artificial Sequence: Synthetic oligonucleotide
  Antisense strand to SEQ ID NO: 1926560
uuaucgggcaaacuuaacu

SEQ ID NO: 1926562 - RNA, 19 nt, Artificial Sequence
  Description of Artificial Sequence: Synthetic oligonucleotide
  Sense strand starting at position 2580 of SEQ ID NO: 1879705
uuaaguuugcccgauaaag

SEQ ID NO: 1926563 - RNA, 19 nt, Artificial Sequence
  Description of Artificial Sequence: Synthetic oligonucleotide
  Antisense strand to SEQ ID NO: 1926562
cuuuaucgggcaaacuuaa

SEQ ID NO: 1926564 - RNA, 19 nt, Artificial Sequence
  Description of Artificial Sequence: Synthetic oligonucleotide
  Sense strand starting at position 2582 of SEQ ID NO: 1879705
aaguuugcccgauaaaguu

SEQ ID NO: 1926565 - RNA, 19 nt, Artificial Sequence
  Description of Artificial Sequence: Synthetic oligonucleotide
  Antisense strand to SEQ ID NO: 1926564
aacuuuaucgggcaaacuu

SEQ ID NO: 1926566 - RNA, 19 nt, Artificial Sequence
  Description of Artificial Sequence: Synthetic oligonucleotide
  Sense strand starting at position 2611 of SEQ ID NO: 1879705
uccagaaagccucaugggu

SEQ ID NO: 1926567 - RNA, 19 nt, Artificial Sequence
  Description of Artificial Sequence: Synthetic oligonucleotide
  Antisense strand to SEQ ID NO: 1926566
acccaugaggcuuucugga

SEQ ID NO: 1926568 - RNA, 19 nt, Artificial Sequence
  Description of Artificial Sequence: Synthetic oligonucleotide
  Sense strand starting at position 2739 of SEQ ID NO: 1879705
cgccuuacgccuuccacaa

SEQ ID NO: 1926569 - RNA, 19 nt, Artificial Sequence
  Description of Artificial Sequence: Synthetic oligonucleotide
  Antisense strand to SEQ ID NO: 1926568
uuguggaaggcguaaggcg

SEQ ID NO: 1926570 - RNA, 19 nt, Artificial Sequence
  Description of Artificial Sequence: Synthetic oligonucleotide
  Sense strand starting at position 3155 of SEQ ID NO: 1879705
uucucacgcuucucaagaa

SEQ ID NO: 1926571 - RNA, 19 nt, Artificial Sequence
  Description of Artificial Sequence: Synthetic oligonucleotide
  Antisense strand to SEQ ID NO: 1926570
uucuugagaagcgugagaa

SEQ ID NO: 1926572 - RNA, 19 nt, Artificial Sequence
  Description of Artificial Sequence: Synthetic oligonucleotide
  Sense strand starting at position 3324 of SEQ ID NO: 1879705
aauaaaguuucuccaggga

SEQ ID NO: 1926573 - RNA, 19 nt, Artificial Sequence
  Description of Artificial Sequence: Synthetic oligonucleotide
  Antisense strand to SEQ ID NO: 1926572
ucccuggagaaacuuuauu

SEQ ID NO: 1926574 - RNA, 19 nt, Artificial Sequence
  Description of Artificial Sequence: Synthetic oligonucleotide
  Sense strand starting at position 3694 of SEQ ID NO: 1879705
cgagaaacccuucguuacu

SEQ ID NO: 1926575 - RNA, 19 nt, Artificial Sequence
  Description of Artificial Sequence: Synthetic oligonucleotide
  Antisense strand to SEQ ID NO: 1926574
aguaacgaaggguuucucg

SEQ ID NO: 1926576 - RNA, 19 nt, Artificial Sequence
  Description of Artificial Sequence: Synthetic oligonucleotide
  Sense strand starting at position 3695 of SEQ ID NO: 1879705
gagaaacccuucguuacuc

SEQ ID NO: 1926577 - RNA, 19 nt, Artificial Sequence
  Description of Artificial Sequence: Synthetic oligonucleotide
  Antisense strand to SEQ ID NO: 1926576
gaguaacgaaggguuucuc

SEQ ID NO: 1926578 - RNA, 19 nt, Artificial Sequence
  Description of Artificial Sequence: Synthetic oligonucleotide
  Sense strand starting at position 3743 of SEQ ID NO: 1879705
caacgauccucggcuaacu

SEQ ID NO: 1926579 - RNA, 19 nt, Artificial Sequence
  Description of Artificial Sequence: Synthetic oligonucleotide
  Antisense strand to SEQ ID NO: 1926578
aguuagccgaggaucguug

SEQ ID NO: 1926580 - RNA, 19 nt, Artificial Sequence
  Description of Artificial Sequence: Synthetic oligonucleotide
  Sense strand starting at position 3868 of SEQ ID NO: 1879705
acgucugacuguccagaaa

SEQ ID NO: 1926581 - RNA, 19 nt, Artificial Sequence
  Description of Artificial Sequence: Synthetic oligonucleotide
  Antisense strand to SEQ ID NO: 1926580
uuucuggacagucagacgu

SEQ ID NO: 1926582 - RNA, 19 nt, Artificial Sequence
  Description of Artificial Sequence: Synthetic oligonucleotide
  Sense strand starting at position 3904 of SEQ ID NO: 1879705
ucugaaguucgcguccuua

SEQ ID NO: 1926583 - RNA, 19 nt, Artificial Sequence
  Description of Artificial Sequence: Synthetic oligonucleotide
  Antisense strand to SEQ ID NO: 1926582
uaaggacgcgaacuucaga

SEQ ID NO: 1926584 - RNA, 19 nt, Artificial Sequence
  Description of Artificial Sequence: Synthetic oligonucleotide
  Sense strand starting at position 3942 of SEQ ID NO: 1879705
gagcuuuaucuuuguggga

SEQ ID NO: 1926585 - RNA, 19 nt, Artificial Sequence
  Description of Artificial Sequence: Synthetic oligonucleotide
  Antisense strand to SEQ ID NO: 1926584
ucccacaaagauaaagcuc

SEQ ID NO: 1926586 - RNA, 19 nt, Artificial Sequence
  Description of Artificial Sequence: Synthetic oligonucleotide
  Sense strand starting at position 217 of SEQ ID NO: 1879706
ccggguccuguuuagggau

SEQ ID NO: 1926587 - RNA, 19 nt, Artificial Sequence
  Description of Artificial Sequence: Synthetic oligonucleotide
  Antisense strand to SEQ ID NO: 1926586
aucccuaaacaggacccgg

SEQ ID NO: 1926588 - RNA, 19 nt, Artificial Sequence
  Description of Artificial Sequence: Synthetic oligonucleotide
  Sense strand starting at position 232 of SEQ ID NO: 1879706
ggaucuuuccauuguacag

SEQ ID NO: 1926589 - RNA, 19 nt, Artificial Sequence
  Description of Artificial Sequence: Synthetic oligonucleotide
  Antisense strand to SEQ ID NO: 1926588
cuguacaauggaaagaucc

SEQ ID NO: 1926590 - RNA, 19 nt, Artificial Sequence
  Description of Artificial Sequence: Synthetic oligonucleotide
  Sense strand starting at position 326 of SEQ ID NO: 1879706
cugugucuggccuuauguu

SEQ ID NO: 1926591 - RNA, 19 nt, Artificial Sequence
  Description of Artificial Sequence: Synthetic oligonucleotide
  Antisense strand to SEQ ID NO: 1926590
aacauaaggccagacacag

SEQ ID NO: 1926592 - RNA, 19 nt, Artificial Sequence
  Description of Artificial Sequence: Synthetic oligonucleotide
  Sense strand starting at position 327 of SEQ ID NO: 1879706
ugugucuggccuuauguua

SEQ ID NO: 1926593 - RNA, 19 nt, Artificial Sequence
  Description of Artificial Sequence: Synthetic oligonucleotide
  Antisense strand to SEQ ID NO: 1926592
uaacauaaggccagacaca

SEQ ID NO: 1926594 - RNA, 19 nt, Artificial Sequence
  Description of Artificial Sequence: Synthetic oligonucleotide
  Sense strand starting at position 353 of SEQ ID NO: 1879706
gugacacaguagucaacaa

SEQ ID NO: 1926595 - RNA, 19 nt, Artificial Sequence
  Description of Artificial Sequence: Synthetic oligonucleotide
  Antisense strand to SEQ ID NO: 1926594
uuguugacuacugugucac

SEQ ID NO: 1926596 - RNA, 19 nt, Artificial Sequence
  Description of Artificial Sequence: Synthetic oligonucleotide
  Sense strand starting at position 406 of SEQ ID NO: 1879706
auucuaguggagugacaau

SEQ ID NO: 1926597 - RNA, 19 nt, Artificial Sequence
  Description of Artificial Sequence: Synthetic oligonucleotide
  Antisense strand to SEQ ID NO: 1926596
auugucacuccacuagaau

SEQ ID NO: 1926598 - RNA, 19 nt, Artificial Sequence
  Description of Artificial Sequence: Synthetic oligonucleotide
  Sense strand starting at position 447 of SEQ ID NO: 1879706
gggugaguagugcaaggaa

SEQ ID NO: 1926599 - RNA, 19 nt, Artificial Sequence
  Description of Artificial Sequence: Synthetic oligonucleotide
  Antisense strand to SEQ ID NO: 1926598
uuccuugcacuacucaccc

SEQ ID NO: 1926600 - RNA, 19 nt, Artificial Sequence
  Description of Artificial Sequence: Synthetic oligonucleotide
  Sense strand starting at position 450 of SEQ ID NO: 1879706
ugaguagugcaaggaaagu

SEQ ID NO: 1926601 - RNA, 19 nt, Artificial Sequence
  Description of Artificial Sequence: Synthetic oligonucleotide
  Antisense strand to SEQ ID NO: 1926600
acuuuccuugcacuacuca

SEQ ID NO: 1926602 - RNA, 19 nt, Artificial Sequence
  Description of Artificial Sequence: Synthetic oligonucleotide
  Sense strand starting at position 654 of SEQ ID NO: 1879706
caaggucacucccaagaga

SEQ ID NO: 1926603 - RNA, 19 nt, Artificial Sequence
  Description of Artificial Sequence: Synthetic oligonucleotide
  Antisense strand to SEQ ID NO: 1926602
ucucuugggagugaccuug

SEQ ID NO: 1926604 - RNA, 19 nt, Artificial Sequence
  Description of Artificial Sequence: Synthetic oligonucleotide
  Sense strand starting at position 755 of SEQ ID NO: 1879706
gcaggagugagaugugauc

SEQ ID NO: 1926605 - RNA, 19 nt, Artificial Sequence
  Description of Artificial Sequence: Synthetic oligonucleotide
  Antisense strand to SEQ ID NO: 1926604
gaucacaucucacuccugc

SEQ ID NO: 1926606 - RNA, 19 nt, Artificial Sequence
  Description of Artificial Sequence: Synthetic oligonucleotide
  Sense strand starting at position 762 of SEQ ID NO: 1879706
ugagaugugaucugacuua

SEQ ID NO: 1926607 - RNA, 19 nt, Artificial Sequence
  Description of Artificial Sequence: Synthetic oligonucleotide
  Antisense strand to SEQ ID NO: 1926606
uaagucagaucacaucuca

SEQ ID NO: 1926608 - RNA, 19 nt, Artificial Sequence
  Description of Artificial Sequence: Synthetic oligonucleotide
  Sense strand starting at position 769 of SEQ ID NO: 1879706
ugaucugacuuaugcauuu

SEQ ID NO: 1926609 - RNA, 19 nt, Artificial Sequence
  Description of Artificial Sequence: Synthetic oligonucleotide
  Antisense strand to SEQ ID NO: 1926608
aaaugcauaagucagauca

SEQ ID NO: 1926610 - RNA, 19 nt, Artificial Sequence
  Description of Artificial Sequence: Synthetic oligonucleotide
  Sense strand starting at position 800 of SEQ ID NO: 1879706
uucagcuguuguguugaga

SEQ ID NO: 1926611 - RNA, 19 nt, Artificial Sequence
  Description of Artificial Sequence: Synthetic oligonucleotide
  Antisense strand to SEQ ID NO: 1926610
ucucaacacaacagcugaa

SEQ ID NO: 1926612 - RNA, 19 nt, Artificial Sequence
  Description of Artificial Sequence: Synthetic oligonucleotide
  Sense strand starting at position 803 of SEQ ID NO: 1879706
agcuguuguguugagaaug

SEQ ID NO: 1926613 - RNA, 19 nt, Artificial Sequence
  Description of Artificial Sequence: Synthetic oligonucleotide
  Antisense strand to SEQ ID NO: 1926612
cauucucaacacaacagcu

SEQ ID NO: 1926614 - RNA, 19 nt, Artificial Sequence
  Description of Artificial Sequence: Synthetic oligonucleotide
  Sense strand starting at position 808 of SEQ ID NO: 1879706
uuguguugagaaugagaau

SEQ ID NO: 1926615 - RNA, 19 nt, Artificial Sequence
  Description of Artificial Sequence: Synthetic oligonucleotide
  Antisense strand to SEQ ID NO: 1926614
auucucauucucaacacaa

SEQ ID NO: 1926616 - RNA, 19 nt, Artificial Sequence
  Description of Artificial Sequence: Synthetic oligonucleotide
  Sense strand starting at position 821 of SEQ ID NO: 1879706
gagaaugggucacaaggga

SEQ ID NO: 1926617 - RNA, 19 nt, Artificial Sequence
  Description of Artificial Sequence: Synthetic oligonucleotide
  Antisense strand to SEQ ID NO: 1926616
ucccuugugacccauucuc

SEQ ID NO: 1926618 - RNA, 19 nt, Artificial Sequence
  Description of Artificial Sequence: Synthetic oligonucleotide
  Sense strand starting at position 1058 of SEQ ID NO: 1879706
agccgugugcgucugacau

SEQ ID NO: 1926619 - RNA, 19 nt, Artificial Sequence
  Description of Artificial Sequence: Synthetic oligonucleotide
  Antisense strand to SEQ ID NO: 1926618
augucagacgcacacggcu

SEQ ID NO: 1926620 - RNA, 19 nt, Artificial Sequence
  Description of Artificial Sequence: Synthetic oligonucleotide
  Sense strand starting at position 1161 of SEQ ID NO: 1879706
cugcccuaaucuguugaca

SEQ ID NO: 1926621 - RNA, 19 nt, Artificial Sequence
  Description of Artificial Sequence: Synthetic oligonucleotide
  Antisense strand to SEQ ID NO: 1926620
ugucaacagauuagggcag

SEQ ID NO: 1926622 - RNA, 19 nt, Artificial Sequence
  Description of Artificial Sequence: Synthetic oligonucleotide
  Sense strand starting at position 1241 of SEQ ID NO: 1879706
cggaucauccucuaugcca

SEQ ID NO: 1926623 - RNA, 19 nt, Artificial Sequence
  Description of Artificial Sequence: Synthetic oligonucleotide
  Antisense strand to SEQ ID NO: 1926622
uggcauagaggaugauccg

SEQ ID NO: 1926624 - RNA, 19 nt, Artificial Sequence
  Description of Artificial Sequence: Synthetic oligonucleotide
  Sense strand starting at position 1642 of SEQ ID NO: 1879706
aagccaucugccuggaguu

SEQ ID NO: 1926625 - RNA, 19 nt, Artificial Sequence
  Description of Artificial Sequence: Synthetic oligonucleotide
  Antisense strand to SEQ ID NO: 1926624
aacuccaggcagauggcuu

SEQ ID NO: 1926626 - RNA, 19 nt, Artificial Sequence
  Description of Artificial Sequence: Synthetic oligonucleotide
  Sense strand starting at position 1673 of SEQ ID NO: 1879706
uggacagauggcgguguua

SEQ ID NO: 1926627 - RNA, 19 nt, Artificial Sequence
  Description of Artificial Sequence: Synthetic oligonucleotide
  Antisense strand to SEQ ID NO: 1926626
uaacaccgccaucugucca

SEQ ID NO: 1926628 - RNA, 19 nt, Artificial Sequence
  Description of Artificial Sequence: Synthetic oligonucleotide
  Sense strand starting at position 1675 of SEQ ID NO: 1879706
gacagauggcgguguuaaa

SEQ ID NO: 1926629 - RNA, 19 nt, Artificial Sequence
  Description of Artificial Sequence: Synthetic oligonucleotide
  Antisense strand to SEQ ID NO: 1926628
uuuaacaccgccaucuguc

SEQ ID NO: 1926630 - RNA, 19 nt, Artificial Sequence
  Description of Artificial Sequence: Synthetic oligonucleotide
  Sense strand starting at position 1750 of SEQ ID NO: 1879706
gccagacaucuccaugaca

SEQ ID NO: 1926631 - RNA, 19 nt, Artificial Sequence
  Description of Artificial Sequence: Synthetic oligonucleotide
  Antisense strand to SEQ ID NO: 1926630
ugucauggagaugucuggc

SEQ ID NO: 1926632 - RNA, 19 nt, Artificial Sequence
  Description of Artificial Sequence: Synthetic oligonucleotide
  Sense strand starting at position 1788 of SEQ ID NO: 1879706
cagacaucuccaugagagc

SEQ ID NO: 1926633 - RNA, 19 nt, Artificial Sequence
  Description of Artificial Sequence: Synthetic oligonucleotide
  Antisense strand to SEQ ID NO: 1926632
gcucucauggagaugucug

SEQ ID NO: 1926634 - RNA, 19 nt, Artificial Sequence
  Description of Artificial Sequence: Synthetic oligonucleotide
  Sense strand starting at position 1812 of SEQ ID NO: 1879706
accagaaacugguuuccuu

SEQ ID NO: 1926635 - RNA, 19 nt, Artificial Sequence
  Description of Artificial Sequence: Synthetic oligonucleotide
  Antisense strand to SEQ ID NO: 1926634
aaggaaaccaguuucuggu

SEQ ID NO: 1926636 - RNA, 19 nt, Artificial Sequence
  Description of Artificial Sequence: Synthetic oligonucleotide
  Sense strand starting at position 1900 of SEQ ID NO: 1879706
gcagaucugcccuaauagg

SEQ ID NO: 1926637 - RNA, 19 nt, Artificial Sequence
  Description of Artificial Sequence: Synthetic oligonucleotide
  Antisense strand to SEQ ID NO: 1926636
ccuauuagggcagaucugc

SEQ ID NO: 1926638 - RNA, 19 nt, Artificial Sequence
  Description of Artificial Sequence: Synthetic oligonucleotide
  Sense strand starting at position 1930 of SEQ ID NO: 1879706
agcaguuggugugugacaa

SEQ ID NO: 1926639 - RNA, 19 nt, Artificial Sequence
  Description of Artificial Sequence: Synthetic oligonucleotide
  Antisense strand to SEQ ID NO: 1926638
uugucacacaccaacugcu

SEQ ID NO: 1926640 - RNA, 19 nt, Artificial Sequence
  Description of Artificial Sequence: Synthetic oligonucleotide
  Sense strand starting at position 1931 of SEQ ID NO: 1879706
gcaguuggugugugacaag

SEQ ID NO: 1926641 - RNA, 19 nt, Artificial Sequence
  Description of Artificial Sequence: Synthetic oligonucleotide
  Antisense strand to SEQ ID NO: 1926640
cuugucacacaccaacugc

SEQ ID NO: 1926642 - RNA, 19 nt, Artificial Sequence
  Description of Artificial Sequence: Synthetic oligonucleotide
  Sense strand starting at position 2397 of SEQ ID NO: 1879706
auugaagcuucugucaaga

SEQ ID NO: 1926643 - RNA, 19 nt, Artificial Sequence
  Description of Artificial Sequence: Synthetic oligonucleotide
  Antisense strand to SEQ ID NO: 1926642
ucuugacagaagcuucaau

SEQ ID NO: 1926644 - RNA, 19 nt, Artificial Sequence
  Description of Artificial Sequence: Synthetic oligonucleotide
  Sense strand starting at position 2481 of SEQ ID NO: 1879706
gagaguucgccugagaagg

SEQ ID NO: 1926645 - RNA, 19 nt, Artificial Sequence
  Description of Artificial Sequence: Synthetic oligonucleotide
  Antisense strand to SEQ ID NO: 1926644
ccuucucaggcgaacucuc

SEQ ID NO: 1926646 - RNA, 19 nt, Artificial Sequence
  Description of Artificial Sequence: Synthetic oligonucleotide
  Sense strand starting at position 2760 of SEQ ID NO: 1879706
uccagauccuggcuuccau

SEQ ID NO: 1926647 - RNA, 19 nt, Artificial Sequence
  Description of Artificial Sequence: Synthetic oligonucleotide
  Antisense strand to SEQ ID NO: 1926646
auggaagccaggaucugga

SEQ ID NO: 1926648 - RNA, 19 nt, Artificial Sequence
  Description of Artificial Sequence: Synthetic oligonucleotide
  Sense strand starting at position 2966 of SEQ ID NO: 1879706
cacugagcucuuggagagu

SEQ ID NO: 1926649 - RNA, 19 nt, Artificial Sequence
  Description of Artificial Sequence: Synthetic oligonucleotide
  Antisense strand to SEQ ID NO: 1926648
acucuccaagagcucagug

SEQ ID NO: 1926650 - RNA, 19 nt, Artificial Sequence
  Description of Artificial Sequence: Synthetic oligonucleotide
  Sense strand starting at position 3159 of SEQ ID NO: 1879706
agacuuaggucagaaggca

SEQ ID NO: 1926651 - RNA, 19 nt, Artificial Sequence
  Description of Artificial Sequence: Synthetic oligonucleotide
  Antisense strand to SEQ ID NO: 1926650
ugccuucugaccuaagucu

SEQ ID NO: 1926652 - RNA, 19 nt, Artificial Sequence
  Description of Artificial Sequence: Synthetic oligonucleotide
  Sense strand starting at position 3202 of SEQ ID NO: 1879706
auuauaacaugcgucacau

SEQ ID NO: 1926653 - RNA, 19 nt, Artificial Sequence
  Description of Artificial Sequence: Synthetic oligonucleotide
  Antisense strand to SEQ ID NO: 1926652
augugacgcauguuauaau

SEQ ID NO: 1926654 - RNA, 19 nt, Artificial Sequence
  Description of Artificial Sequence: Synthetic oligonucleotide
  Sense strand starting at position 3214 of SEQ ID NO: 1879706
gucacauuauaguuuacca

SEQ ID NO: 1926655 - RNA, 19 nt, Artificial Sequence
  Description of Artificial Sequence: Synthetic oligonucleotide
  Antisense strand to SEQ ID NO: 1926654
ugguaaacuauaaugugac

SEQ ID NO: 1926656 - RNA, 19 nt, Artificial Sequence
  Description of Artificial Sequence: Synthetic oligonucleotide
  Sense strand starting at position 3259 of SEQ ID NO: 1879706
gcuucuugagcgcaaagau

SEQ ID NO: 1926657 - RNA, 19 nt, Artificial Sequence
  Description of Artificial Sequence: Synthetic oligonucleotide
  Antisense strand to SEQ ID NO: 1926656
aucuuugcgcucaagaagc

SEQ ID NO: 1926658 - RNA, 19 nt, Artificial Sequence
  Description of Artificial Sequence: Synthetic oligonucleotide
  Sense strand starting at position 3495 of SEQ ID NO: 1879706
ucaauauucgcuugaguuc

SEQ ID NO: 1926659 - RNA, 19 nt, Artificial Sequence
  Description of Artificial Sequence: Synthetic oligonucleotide
  Antisense strand to SEQ ID NO: 1926658
gaacucaagcgaauauuga

SEQ ID NO: 1926660 - RNA, 19 nt, Artificial Sequence
  Description of Artificial Sequence: Synthetic oligonucleotide
  Sense strand starting at position 3809 of SEQ ID NO: 1879706
gggugacuaauccagagcu

SEQ ID NO: 1926661 - RNA, 19 nt, Artificial Sequence
  Description of Artificial Sequence: Synthetic oligonucleotide
  Antisense strand to SEQ ID NO: 1926660
agcucuggauuagucaccc

SEQ ID NO: 1926662 - RNA, 19 nt, Artificial Sequence
  Description of Artificial Sequence: Synthetic oligonucleotide
  Sense strand starting at position 3811 of SEQ ID NO: 1879706
gugacuaauccagagcuga

SEQ ID NO: 1926663 - RNA, 19 nt, Artificial Sequence
  Description of Artificial Sequence: Synthetic oligonucleotide
  Antisense strand to SEQ ID NO: 1926662
ucagcucuggauuagucac

SEQ ID NO: 1926664 - RNA, 19 nt, Artificial Sequence
  Description of Artificial Sequence: Synthetic oligonucleotide
  Sense strand starting at position 3921 of SEQ ID NO: 1879706
ucauguggcucugucacau

SEQ ID NO: 1926665 - RNA, 19 nt, Artificial Sequence
  Description of Artificial Sequence: Synthetic oligonucleotide
  Antisense strand to SEQ ID NO: 1926664
augugacagagccacauga

SEQ ID NO: 1926666 - RNA, 19 nt, Artificial Sequence
  Description of Artificial Sequence: Synthetic oligonucleotide
  Sense strand starting at position 407 of SEQ ID NO: 1879707
cagggaagauuccugagca

SEQ ID NO: 1926667 - RNA, 19 nt, Artificial Sequence
  Description of Artificial Sequence: Synthetic oligonucleotide
  Antisense strand to SEQ ID NO: 1926666
ugcucaggaaucuucccug

SEQ ID NO: 1926668 - RNA, 19 nt, Artificial Sequence
  Description of Artificial Sequence: Synthetic oligonucleotide
  Sense strand starting at position 408 of SEQ ID NO: 1879707
agggaagauuccugagcaa

SEQ ID NO: 1926669 - RNA, 19 nt, Artificial Sequence
  Description of Artificial Sequence: Synthetic oligonucleotide
  Antisense strand to SEQ ID NO: 1926668
uugcucaggaaucuucccu

SEQ ID NO: 1926670 - RNA, 19 nt, Artificial Sequence
  Description of Artificial Sequence: Synthetic oligonucleotide
  Sense strand starting at position 625 of SEQ ID NO: 1879707
cugugcacgugugguuaaa

SEQ ID NO: 1926671 - RNA, 19 nt, Artificial Sequence
  Description of Artificial Sequence: Synthetic oligonucleotide
  Antisense strand to SEQ ID NO: 1926670
uuuaaccacacgugcacag

SEQ ID NO: 1926672 - RNA, 19 nt, Artificial Sequence
  Description of Artificial Sequence: Synthetic oligonucleotide
  Sense strand starting at position 669 of SEQ ID NO: 1879707
gcgugaacugcagacuuua

SEQ ID NO: 1926673 - RNA, 19 nt, Artificial Sequence
  Description of Artificial Sequence: Synthetic oligonucleotide
  Antisense strand to SEQ ID NO: 1926672
uaaagucugcaguucacgc

SEQ ID NO: 1926674 - RNA, 19 nt, Artificial Sequence
  Description of Artificial Sequence: Synthetic oligonucleotide
  Sense strand starting at position 795 of SEQ ID NO: 1879707
caggguccuuccugucaca

SEQ ID NO: 1926675 - RNA, 19 nt, Artificial Sequence
  Description of Artificial Sequence: Synthetic oligonucleotide
  Antisense strand to SEQ ID NO: 1926674
ugugacaggaaggacccug

SEQ ID NO: 1926676 - RNA, 19 nt, Artificial Sequence
  Description of Artificial Sequence: Synthetic oligonucleotide
  Sense strand starting at position 1018 of SEQ ID NO: 1879707
guguccaaaccuuguguua

SEQ ID NO: 1926677 - RNA, 19 nt, Artificial Sequence
  Description of Artificial Sequence: Synthetic oligonucleotide
  Antisense strand to SEQ ID NO: 1926676
uaacacaagguuuggacac

SEQ ID NO: 1926678 - RNA, 19 nt, Artificial Sequence
  Description of Artificial Sequence: Synthetic oligonucleotide
  Sense strand starting at position 1020 of SEQ ID NO: 1879707
guccaaaccuuguguuaua

SEQ ID NO: 1926679 - RNA, 19 nt, Artificial Sequence
  Description of Artificial Sequence: Synthetic oligonucleotide
  Antisense strand to SEQ ID NO: 1926678
uauaacacaagguuuggac

SEQ ID NO: 1926680 - RNA, 19 nt, Artificial Sequence
  Description of Artificial Sequence: Synthetic oligonucleotide
  Sense strand starting at position 1021 of SEQ ID NO: 1879707
uccaaaccuuguguuauau

SEQ ID NO: 1926681 - RNA, 19 nt, Artificial Sequence
  Description of Artificial Sequence: Synthetic oligonucleotide
  Antisense strand to SEQ ID NO: 1926680
auauaacacaagguuugga

SEQ ID NO: 1926682 - RNA, 19 nt, Artificial Sequence
  Description of Artificial Sequence: Synthetic oligonucleotide
  Sense strand starting at position 1201 of SEQ ID NO: 1879707
gaaagagggucuggagaua

SEQ ID NO: 1926683 - RNA, 19 nt, Artificial Sequence
  Description of Artificial Sequence: Synthetic oligonucleotide
  Antisense strand to SEQ ID NO: 1926682
uaucuccagacccucuuuc

SEQ ID NO: 1926684 - RNA, 19 nt, Artificial Sequence
  Description of Artificial Sequence: Synthetic oligonucleotide
  Sense strand starting at position 1411 of SEQ ID NO: 1879707
gggagaguguggucugcau

SEQ ID NO: 1926685 - RNA, 19 nt, Artificial Sequence
  Description of Artificial Sequence: Synthetic oligonucleotide
  Antisense strand to SEQ ID NO: 1926684
augcagaccacacucuccc

SEQ ID NO: 1926686 - RNA, 19 nt, Artificial Sequence
  Description of Artificial Sequence: Synthetic oligonucleotide
  Sense strand starting at position 1415 of SEQ ID NO: 1879707
gaguguggucugcauccca

SEQ ID NO: 1926687 - RNA, 19 nt, Artificial Sequence
  Description of Artificial Sequence: Synthetic oligonucleotide
  Antisense strand to SEQ ID NO: 1926686
ugggaugcagaccacacuc

SEQ ID NO: 1926688 - RNA, 19 nt, Artificial Sequence
  Description of Artificial Sequence: Synthetic oligonucleotide
  Sense strand starting at position 2265 of SEQ ID NO: 1879707
gaagcucggucggguuaau

SEQ ID NO: 1926689 - RNA, 19 nt, Artificial Sequence
  Description of Artificial Sequence: Synthetic oligonucleotide
  Antisense strand to SEQ ID NO: 1926688
auuaacccgaccgagcuuc

SEQ ID NO: 1926690 - RNA, 19 nt, Artificial Sequence
  Description of Artificial Sequence: Synthetic oligonucleotide
  Sense strand starting at position 2271 of SEQ ID NO: 1879707
cggucggguuaaugaguaa

SEQ ID NO: 1926691 - RNA, 19 nt, Artificial Sequence
  Description of Artificial Sequence: Synthetic oligonucleotide
  Antisense strand to SEQ ID NO: 1926690
uuacucauuaacccgaccg

SEQ ID NO: 1926692 - RNA, 19 nt, Artificial Sequence
  Description of Artificial Sequence: Synthetic oligonucleotide
  Sense strand starting at position 2275 of SEQ ID NO: 1879707
cggguuaaugaguaacagu

SEQ ID NO: 1926693 - RNA, 19 nt, Artificial Sequence
  Description of Artificial Sequence: Synthetic oligonucleotide
  Antisense strand to SEQ ID NO: 1926692
acuguuacucauuaacccg

SEQ ID NO: 1926694 - RNA, 19 nt, Artificial Sequence
  Description of Artificial Sequence: Synthetic oligonucleotide
  Sense strand starting at position 2278 of SEQ ID NO: 1879707
guuaaugaguaacagugaa

SEQ ID NO: 1926695 - RNA, 19 nt, Artificial Sequence
  Description of Artificial Sequence: Synthetic oligonucleotide
  Antisense strand to SEQ ID NO: 1926694
uucacuguuacucauuaac

SEQ ID NO: 1926696 - RNA, 19 nt, Artificial Sequence
  Description of Artificial Sequence: Synthetic oligonucleotide
  Sense strand starting at position 2422 of SEQ ID NO: 1879707
ggacaaaguuccuguucuu

SEQ ID NO: 1926697 - RNA, 19 nt, Artificial Sequence
  Description of Artificial Sequence: Synthetic oligonucleotide
  Antisense strand to SEQ ID NO: 1926696
aagaacaggaacuuugucc

SEQ ID NO: 1926698 - RNA, 19 nt, Artificial Sequence
  Description of Artificial Sequence: Synthetic oligonucleotide
  Sense strand starting at position 2758 of SEQ ID NO: 1879707
ggguccucaaggugucaga

SEQ ID NO: 1926699 - RNA, 19 nt, Artificial Sequence
  Description of Artificial Sequence: Synthetic oligonucleotide
  Antisense strand to SEQ ID NO: 1926698
ucugacaccuugaggaccc

SEQ ID NO: 1926700 - RNA, 19 nt, Artificial Sequence
  Description of Artificial Sequence: Synthetic oligonucleotide
  Sense strand starting at position 3395 of SEQ ID NO: 1879707
ggaagauggcuguggccaa

SEQ ID NO: 1926701 - RNA, 19 nt, Artificial Sequence
  Description of Artificial Sequence: Synthetic oligonucleotide
  Antisense strand to SEQ ID NO: 1926700
uuggccacagccaucuucc

SEQ ID NO: 1926702 - RNA, 19 nt, Artificial Sequence
  Description of Artificial Sequence: Synthetic oligonucleotide
  Sense strand starting at position 19 of SEQ ID NO: 1879708
aguuuacccagguguaaac

SEQ ID NO: 1926703 - RNA, 19 nt, Artificial Sequence
  Description of Artificial Sequence: Synthetic oligonucleotide
  Antisense strand to SEQ ID NO: 1926702
guuuacaccuggguaaacu

SEQ ID NO: 1926704 - RNA, 19 nt, Artificial Sequence
  Description of Artificial Sequence: Synthetic oligonucleotide
  Sense strand starting at position 104 of SEQ ID NO: 1879708
gcuugaacucagcaucugu

SEQ ID NO: 1926705 - RNA, 19 nt, Artificial Sequence
  Description of Artificial Sequence: Synthetic oligonucleotide
  Antisense strand to SEQ ID NO: 1926704
acagaugcugaguucaagc

SEQ ID NO: 1926706 - RNA, 19 nt, Artificial Sequence
  Description of Artificial Sequence: Synthetic oligonucleotide
  Sense strand starting at position 112 of SEQ ID NO: 1879708
ucagcaucuguguggauuu

SEQ ID NO: 1926707 - RNA, 19 nt, Artificial Sequence
  Description of Artificial Sequence: Synthetic oligonucleotide
  Antisense strand to SEQ ID NO: 1926706
aaauccacacagaugcuga

SEQ ID NO: 1926708 - RNA, 19 nt, Artificial Sequence
  Description of Artificial Sequence: Synthetic oligonucleotide
  Sense strand starting at position 181 of SEQ ID NO: 1879708
gcaugcgugguuaggagau

SEQ ID NO: 1926709 - RNA, 19 nt, Artificial Sequence
  Description of Artificial Sequence: Synthetic oligonucleotide
  Antisense strand to SEQ ID NO: 1926708
aucuccuaaccacgcaugc

SEQ ID NO: 1926710 - RNA, 19 nt, Artificial Sequence
  Description of Artificial Sequence: Synthetic oligonucleotide
  Sense strand starting at position 375 of SEQ ID NO: 1879708
guuacaucuugcucacaga

SEQ ID NO: 1926711 - RNA, 19 nt, Artificial Sequence
  Description of Artificial Sequence: Synthetic oligonucleotide
  Antisense strand to SEQ ID NO: 1926710
ucugugagcaagauguaac

SEQ ID NO: 1926712 - RNA, 19 nt, Artificial Sequence
  Description of Artificial Sequence: Synthetic oligonucleotide
  Sense strand starting at position 430 of SEQ ID NO: 1879708
gacgcaucugggcaauuaa

SEQ ID NO: 1926713 - RNA, 19 nt, Artificial Sequence
  Description of Artificial Sequence: Synthetic oligonucleotide
  Antisense strand to SEQ ID NO: 1926712
uuaauugcccagaugcguc

SEQ ID NO: 1926714 - RNA, 19 nt, Artificial Sequence
  Description of Artificial Sequence: Synthetic oligonucleotide
  Sense strand starting at position 501 of SEQ ID NO: 1879708
gaguguguccgugcaucau

SEQ ID NO: 1926715 - RNA, 19 nt, Artificial Sequence
  Description of Artificial Sequence: Synthetic oligonucleotide
  Antisense strand to SEQ ID NO: 1926714
augaugcacggacacacuc

SEQ ID NO: 1926716 - RNA, 19 nt, Artificial Sequence
  Description of Artificial Sequence: Synthetic oligonucleotide
  Sense strand starting at position 592 of SEQ ID NO: 1879708
gcuggauggugaccugaga

SEQ ID NO: 1926717 - RNA, 19 nt, Artificial Sequence
  Description of Artificial Sequence: Synthetic oligonucleotide
  Antisense strand to SEQ ID NO: 1926716
ucucaggucaccauccagc

SEQ ID NO: 1926718 - RNA, 19 nt, Artificial Sequence
  Description of Artificial Sequence: Synthetic oligonucleotide
  Sense strand starting at position 677 of SEQ ID NO: 1879708
gggugagugucaccaguaa

SEQ ID NO: 1926719 - RNA, 19 nt, Artificial Sequence
  Description of Artificial Sequence: Synthetic oligonucleotide
  Antisense strand to SEQ ID NO: 1926718
uuacuggugacacucaccc

SEQ ID NO: 1926720 - RNA, 19 nt, Artificial Sequence
  Description of Artificial Sequence: Synthetic oligonucleotide
  Sense strand starting at position 681 of SEQ ID NO: 1879708
gagugucaccaguaaagag

SEQ ID NO: 1926721 - RNA, 19 nt, Artificial Sequence
  Description of Artificial Sequence: Synthetic oligonucleotide
  Antisense strand to SEQ ID NO: 1926720
cucuuuacuggugacacuc

SEQ ID NO: 1926722 - RNA, 19 nt, Artificial Sequence
  Description of Artificial Sequence: Synthetic oligonucleotide
  Sense strand starting at position 753 of SEQ ID NO: 1879708
ugcugucuccucuuguuau

SEQ ID NO: 1926723 - RNA, 19 nt, Artificial Sequence
  Description of Artificial Sequence: Synthetic oligonucleotide
  Antisense strand to SEQ ID NO: 1926722
auaacaagaggagacagca

SEQ ID NO: 1926724 - RNA, 19 nt, Artificial Sequence
  Description of Artificial Sequence: Synthetic oligonucleotide
  Sense strand starting at position 765 of SEQ ID NO: 1879708
uuguuauggagucauggaa

SEQ ID NO: 1926725 - RNA, 19 nt, Artificial Sequence
  Description of Artificial Sequence: Synthetic oligonucleotide
  Antisense strand to SEQ ID NO: 1926724
uuccaugacuccauaacaa

SEQ ID NO: 1926726 - RNA, 19 nt, Artificial Sequence
  Description of Artificial Sequence: Synthetic oligonucleotide
  Sense strand starting at position 838 of SEQ ID NO: 1879708
gguuguugccaguaauuuc

SEQ ID NO: 1926727 - RNA, 19 nt, Artificial Sequence
  Description of Artificial Sequence: Synthetic oligonucleotide
  Antisense strand to SEQ ID NO: 1926726
gaaauuacuggcaacaacc

SEQ ID NO: 1926728 - RNA, 19 nt, Artificial Sequence
  Description of Artificial Sequence: Synthetic oligonucleotide
  Sense strand starting at position 1041 of SEQ ID NO: 1879708
cucagucucaccgggagaa

SEQ ID NO: 1926729 - RNA, 19 nt, Artificial Sequence
  Description of Artificial Sequence: Synthetic oligonucleotide
  Antisense strand to SEQ ID NO: 1926728
uucucccggugagacugag

SEQ ID NO: 1926730 - RNA, 19 nt, Artificial Sequence
  Description of Artificial Sequence: Synthetic oligonucleotide
  Sense strand starting at position 1043 of SEQ ID NO: 1879708
cagucucaccgggagaacu

SEQ ID NO: 1926731 - RNA, 19 nt, Artificial Sequence
  Description of Artificial Sequence: Synthetic oligonucleotide
  Antisense strand to SEQ ID NO: 1926730
aguucucccggugagacug

SEQ ID NO: 1926732 - RNA, 19 nt, Artificial Sequence
  Description of Artificial Sequence: Synthetic oligonucleotide
  Sense strand starting at position 1073 of SEQ ID NO: 1879708
ugguuauugcaauaucauc

SEQ ID NO: 1926733 - RNA, 19 nt, Artificial Sequence
  Description of Artificial Sequence: Synthetic oligonucleotide
  Antisense strand to SEQ ID NO: 1926732
gaugauauugcaauaacca

SEQ ID NO: 1926734 - RNA, 19 nt, Artificial Sequence
  Description of Artificial Sequence: Synthetic oligonucleotide
  Sense strand starting at position 1176 of SEQ ID NO: 1879708
cccaguguucucugaauag

SEQ ID NO: 1926735 - RNA, 19 nt, Artificial Sequence
  Description of Artificial Sequence: Synthetic oligonucleotide
  Antisense strand to SEQ ID NO: 1926734
cuauucagagaacacuggg

SEQ ID NO: 1926736 - RNA, 19 nt, Artificial Sequence
  Description of Artificial Sequence: Synthetic oligonucleotide
  Sense strand starting at position 1180 of SEQ ID NO: 1879708
guguucucugaauagugau

SEQ ID NO: 1926737 - RNA, 19 nt, Artificial Sequence
  Description of Artificial Sequence: Synthetic oligonucleotide
  Antisense strand to SEQ ID NO: 1926736
aucacuauucagagaacac

SEQ ID NO: 1926738 - RNA, 19 nt, Artificial Sequence
  Description of Artificial Sequence: Synthetic oligonucleotide
  Sense strand starting at position 1186 of SEQ ID NO: 1879708
ucugaauagugauugcaau

SEQ ID NO: 1926739 - RNA, 19 nt, Artificial Sequence
  Description of Artificial Sequence: Synthetic oligonucleotide
  Antisense strand to SEQ ID NO: 1926738
auugcaaucacuauucaga

SEQ ID NO: 1926740 - RNA, 19 nt, Artificial Sequence
  Description of Artificial Sequence: Synthetic oligonucleotide
  Sense strand starting at position 1187 of SEQ ID NO: 1879708
cugaauagugauugcaaug

SEQ ID NO: 1926741 - RNA, 19 nt, Artificial Sequence
  Description of Artificial Sequence: Synthetic oligonucleotide
  Antisense strand to SEQ ID NO: 1926740
cauugcaaucacuauucag

SEQ ID NO: 1926742 - RNA, 19 nt, Artificial Sequence
  Description of Artificial Sequence: Synthetic oligonucleotide
  Sense strand starting at position 1197 of SEQ ID NO: 1879708
auugcaaugcuguaggaaa

SEQ ID NO: 1926743 - RNA, 19 nt, Artificial Sequence
  Description of Artificial Sequence: Synthetic oligonucleotide
  Antisense strand to SEQ ID NO: 1926742
uuuccuacagcauugcaau

SEQ ID NO: 1926744 - RNA, 19 nt, Artificial Sequence
  Description of Artificial Sequence: Synthetic oligonucleotide
  Sense strand starting at position 1580 of SEQ ID NO: 1879708
gugucugaugggcacaaga

SEQ ID NO: 1926745 - RNA, 19 nt, Artificial Sequence
  Description of Artificial Sequence: Synthetic oligonucleotide
  Antisense strand to SEQ ID NO: 1926744
ucuugugcccaucagacac

SEQ ID NO: 1926746 - RNA, 19 nt, Artificial Sequence
  Description of Artificial Sequence: Synthetic oligonucleotide
  Sense strand starting at position 1726 of SEQ ID NO: 1879708
ggaucuuaaagccaugugu

SEQ ID NO: 1926747 - RNA, 19 nt, Artificial Sequence
  Description of Artificial Sequence: Synthetic oligonucleotide
  Antisense strand to SEQ ID NO: 1926746
acacauggcuuuaagaucc

SEQ ID NO: 1926748 - RNA, 19 nt, Artificial Sequence
  Description of Artificial Sequence: Synthetic oligonucleotide
  Sense strand starting at position 1728 of SEQ ID NO: 1879708
aucuuaaagccauguguaa

SEQ ID NO: 1926749 - RNA, 19 nt, Artificial Sequence
  Description of Artificial Sequence: Synthetic oligonucleotide
  Antisense strand to SEQ ID NO: 1926748
uuacacauggcuuuaagau

SEQ ID NO: 1926750 - RNA, 19 nt, Artificial Sequence
  Description of Artificial Sequence: Synthetic oligonucleotide
  Sense strand starting at position 1743 of SEQ ID NO: 1879708
guaaccaucugggucugau

SEQ ID NO: 1926751 - RNA, 19 nt, Artificial Sequence
  Description of Artificial Sequence: Synthetic oligonucleotide
  Antisense strand to SEQ ID NO: 1926750
aucagacccagaugguuac

SEQ ID NO: 1926752 - RNA, 19 nt, Artificial Sequence
  Description of Artificial Sequence: Synthetic oligonucleotide
  Sense strand starting at position 2037 of SEQ ID NO: 1879708
guguuuguggaugauccua

SEQ ID NO: 1926753 - RNA, 19 nt, Artificial Sequence
  Description of Artificial Sequence: Synthetic oligonucleotide
  Antisense strand to SEQ ID NO: 1926752
uaggaucauccacaaacac

SEQ ID NO: 1926754 - RNA, 19 nt, Artificial Sequence
  Description of Artificial Sequence: Synthetic oligonucleotide
  Sense strand starting at position 2081 of SEQ ID NO: 1879708
cugagagggucuccagcau

SEQ ID NO: 1926755 - RNA, 19 nt, Artificial Sequence
  Description of Artificial Sequence: Synthetic oligonucleotide
  Antisense strand to SEQ ID NO: 1926754
augcuggagacccucucag

SEQ ID NO: 1926756 - RNA, 19 nt, Artificial Sequence
  Description of Artificial Sequence: Synthetic oligonucleotide
  Sense strand starting at position 2246 of SEQ ID NO: 1879708
aggagagacugagaugaau

SEQ ID NO: 1926757 - RNA, 19 nt, Artificial Sequence
  Description of Artificial Sequence: Synthetic oligonucleotide
  Antisense strand to SEQ ID NO: 1926756
auucaucucagucucuccu

SEQ ID NO: 1926758 - RNA, 19 nt, Artificial Sequence
  Description of Artificial Sequence: Synthetic oligonucleotide
  Sense strand starting at position 2404 of SEQ ID NO: 1879708
agagcaguggcucaaacua

SEQ ID NO: 1926759 - RNA, 19 nt, Artificial Sequence
  Description of Artificial Sequence: Synthetic oligonucleotide
  Antisense strand to SEQ ID NO: 1926758
uaguuugagccacugcucu

SEQ ID NO: 1926760 - RNA, 19 nt, Artificial Sequence
  Description of Artificial Sequence: Synthetic oligonucleotide
  Sense strand starting at position 2575 of SEQ ID NO: 1879708
aaguguauaguuugacgaa

SEQ ID NO: 1926761 - RNA, 19 nt, Artificial Sequence
  Description of Artificial Sequence: Synthetic oligonucleotide
  Antisense strand to SEQ ID NO: 1926760
uucgucaaacuauacacuu

SEQ ID NO: 1926762 - RNA, 19 nt, Artificial Sequence
  Description of Artificial Sequence: Synthetic oligonucleotide
  Sense strand starting at position 2577 of SEQ ID NO: 1879708
guguauaguuugacgaagu

SEQ ID NO: 1926763 - RNA, 19 nt, Artificial Sequence
  Description of Artificial Sequence: Synthetic oligonucleotide
  Antisense strand to SEQ ID NO: 1926762
acuucgucaaacuauacac

SEQ ID NO: 1926764 - RNA, 19 nt, Artificial Sequence
  Description of Artificial Sequence: Synthetic oligonucleotide
  Sense strand starting at position 3350 of SEQ ID NO: 1879708
gagaauuucuacuagggca

SEQ ID NO: 1926765 - RNA, 19 nt, Artificial Sequence
  Description of Artificial Sequence: Synthetic oligonucleotide
  Antisense strand to SEQ ID NO: 1926764
ugcccuaguagaaauucuc

SEQ ID NO: 1926766 - RNA, 19 nt, Artificial Sequence
  Description of Artificial Sequence: Synthetic oligonucleotide
  Sense strand starting at position 3616 of SEQ ID NO: 1879708
aucaauguggccuggauau

SEQ ID NO: 1926767 - RNA, 19 nt, Artificial Sequence
  Description of Artificial Sequence: Synthetic oligonucleotide
  Antisense strand to SEQ ID NO: 1926766
auauccaggccacauugau

SEQ ID NO: 1926768 - RNA, 19 nt, Artificial Sequence
  Description of Artificial Sequence: Synthetic oligonucleotide
  Sense strand starting at position 3618 of SEQ ID NO: 1879708
caauguggccuggauauga

SEQ ID NO: 1926769 - RNA, 19 nt, Artificial Sequence
  Description of Artificial Sequence: Synthetic oligonucleotide
  Antisense strand to SEQ ID NO: 1926768
ucauauccaggccacauug

SEQ ID NO: 1926770 - RNA, 19 nt, Artificial Sequence
  Description of Artificial Sequence: Synthetic oligonucleotide
  Sense strand starting at position 3653 of SEQ ID NO: 1879708
agauuagagcuuuaagguu

SEQ ID NO: 1926771 - RNA, 19 nt, Artificial Sequence
  Description of Artificial Sequence: Synthetic oligonucleotide
  Antisense strand to SEQ ID NO: 1926770
aaccuuaaagcucuaaucu

SEQ ID NO: 1926772 - RNA, 19 nt, Artificial Sequence
  Description of Artificial Sequence: Synthetic oligonucleotide
  Sense strand starting at position 3891 of SEQ ID NO: 1879708
augaguuaagacugugaau

SEQ ID NO: 1926773 - RNA, 19 nt, Artificial Sequence
  Description of Artificial Sequence: Synthetic oligonucleotide
  Antisense strand to SEQ ID NO: 1926772
auucacagucuuaacucau

SEQ ID NO: 1926774 - RNA, 19 nt, Artificial Sequence
  Description of Artificial Sequence: Synthetic oligonucleotide
  Sense strand starting at position 3893 of SEQ ID NO: 1879708
gaguuaagacugugaauua

SEQ ID NO: 1926775 - RNA, 19 nt, Artificial Sequence
  Description of Artificial Sequence: Synthetic oligonucleotide
  Antisense strand to SEQ ID NO: 1926774
uaauucacagucuuaacuc

SEQ ID NO: 1926776 - RNA, 19 nt, Artificial Sequence
  Description of Artificial Sequence: Synthetic oligonucleotide
  Sense strand starting at position 3902 of SEQ ID NO: 1879708
cugugaauuauugggaagu

SEQ ID NO: 1926777 - RNA, 19 nt, Artificial Sequence
  Description of Artificial Sequence: Synthetic oligonucleotide
  Antisense strand to SEQ ID NO: 1926776
acuucccaauaauucacag

SEQ ID NO: 1926778 - RNA, 19 nt, Artificial Sequence
  Description of Artificial Sequence: Synthetic oligonucleotide
  Sense strand starting at position 3915 of SEQ ID NO: 1879708
ggaagucaugauuguacuu

SEQ ID NO: 1926779 - RNA, 19 nt, Artificial Sequence
  Description of Artificial Sequence: Synthetic oligonucleotide
  Antisense strand to SEQ ID NO: 1926778
aaguacaaucaugacuucc

SEQ ID NO: 1926780 - RNA, 19 nt, Artificial Sequence
  Description of Artificial Sequence: Synthetic oligonucleotide
  Sense strand starting at position 3950 of SEQ ID NO: 1879708
acacgagauuuggagggau

SEQ ID NO: 1926781 - RNA, 19 nt, Artificial Sequence
  Description of Artificial Sequence: Synthetic oligonucleotide
  Antisense strand to SEQ ID NO: 1926780
aucccuccaaaucucgugu

SEQ ID NO: 1926782 - RNA, 19 nt, Artificial Sequence
  Description of Artificial Sequence: Synthetic oligonucleotide
  Sense strand starting at position 73 of SEQ ID NO: 1879709
gucgcauugucccuggaag

SEQ ID NO: 1926783 - RNA, 19 nt, Artificial Sequence
  Description of Artificial Sequence: Synthetic oligonucleotide
  Antisense strand to SEQ ID NO: 1926782
cuuccagggacaaugcgac

SEQ ID NO: 1926784 - RNA, 19 nt, Artificial Sequence
  Description of Artificial Sequence: Synthetic oligonucleotide
  Sense strand starting at position 74 of SEQ ID NO: 1879709
ucgcauugucccuggaaga

SEQ ID NO: 1926785 - RNA, 19 nt, Artificial Sequence
  Description of Artificial Sequence: Synthetic oligonucleotide
  Antisense strand to SEQ ID NO: 1926784
ucuuccagggacaaugcga

SEQ ID NO: 1926786 - RNA, 19 nt, Artificial Sequence
  Description of Artificial Sequence: Synthetic oligonucleotide
  Sense strand starting at position 75 of SEQ ID NO: 1879709
cgcauugucccuggaagaa

SEQ ID NO: 1926787 - RNA, 19 nt, Artificial Sequence
  Description of Artificial Sequence: Synthetic oligonucleotide
  Antisense strand to SEQ ID NO: 1926786
uucuuccagggacaaugcg

SEQ ID NO: 1926788 - RNA, 19 nt, Artificial Sequence
  Description of Artificial Sequence: Synthetic oligonucleotide
  Sense strand starting at position 177 of SEQ ID NO: 1879709
cuggguugcucagugauau

SEQ ID NO: 1926789 - RNA, 19 nt, Artificial Sequence
  Description of Artificial Sequence: Synthetic oligonucleotide
  Antisense strand to SEQ ID NO: 1926788
auaucacugagcaacccag

SEQ ID NO: 1926790 - RNA, 19 nt, Artificial Sequence
  Description of Artificial Sequence: Synthetic oligonucleotide
  Sense strand starting at position 178 of SEQ ID NO: 1879709
uggguugcucagugauaug

SEQ ID NO: 1926791 - RNA, 19 nt, Artificial Sequence
  Description of Artificial Sequence: Synthetic oligonucleotide
  Antisense strand to SEQ ID NO: 1926790
cauaucacugagcaaccca

SEQ ID NO: 1926792 - RNA, 19 nt, Artificial Sequence
  Description of Artificial Sequence: Synthetic oligonucleotide
  Sense strand starting at position 234 of SEQ ID NO: 1879709
gaaggaagcuuccuguauc

SEQ ID NO: 1926793 - RNA, 19 nt, Artificial Sequence
  Description of Artificial Sequence: Synthetic oligonucleotide
  Antisense strand to SEQ ID NO: 1926792
gauacaggaagcuuccuuc

SEQ ID NO: 1926794 - RNA, 19 nt, Artificial Sequence
  Description of Artificial Sequence: Synthetic oligonucleotide
  Sense strand starting at position 237 of SEQ ID NO: 1879709
ggaagcuuccuguauccca

SEQ ID NO: 1926795 - RNA, 19 nt, Artificial Sequence
  Description of Artificial Sequence: Synthetic oligonucleotide
  Antisense strand to SEQ ID NO: 1926794
ugggauacaggaagcuucc

SEQ ID NO: 1926796 - RNA, 19 nt, Artificial Sequence
  Description of Artificial Sequence: Synthetic oligonucleotide
  Sense strand starting at position 365 of SEQ ID NO: 1879709
aaaggaggugccuguaaau

SEQ ID NO: 1926797 - RNA, 19 nt, Artificial Sequence
  Description of Artificial Sequence: Synthetic oligonucleotide
  Antisense strand to SEQ ID NO: 1926796
auuuacaggcaccuccuuu

SEQ ID NO: 1926798 - RNA, 19 nt, Artificial Sequence
  Description of Artificial Sequence: Synthetic oligonucleotide
  Sense strand starting at position 1348 of SEQ ID NO: 1879709
accauagcucauggucaau

SEQ ID NO: 1926799 - RNA, 19 nt, Artificial Sequence
  Description of Artificial Sequence: Synthetic oligonucleotide
  Antisense strand to SEQ ID NO: 1926798
auugaccaugagcuauggu

SEQ ID NO: 1926800 - RNA, 19 nt, Artificial Sequence
  Description of Artificial Sequence: Synthetic oligonucleotide
  Sense strand starting at position 1354 of SEQ ID NO: 1879709
gcucauggucaauaugaau

SEQ ID NO: 1926801 - RNA, 19 nt, Artificial Sequence
  Description of Artificial Sequence: Synthetic oligonucleotide
  Antisense strand to SEQ ID NO: 1926800
auucauauugaccaugagc

SEQ ID NO: 1926802 - RNA, 19 nt, Artificial Sequence
  Description of Artificial Sequence: Synthetic oligonucleotide
  Sense strand starting at position 1445 of SEQ ID NO: 1879709
gggagauacuccuauuauc

SEQ ID NO: 1926803 - RNA, 19 nt, Artificial Sequence
  Description of Artificial Sequence: Synthetic oligonucleotide
  Antisense strand to SEQ ID NO: 1926802
gauaauaggaguaucuccc

SEQ ID NO: 1926804 - RNA, 19 nt, Artificial Sequence
  Description of Artificial Sequence: Synthetic oligonucleotide
  Sense strand starting at position 1488 of SEQ ID NO: 1879709
ggcucagggugguuaagaa

SEQ ID NO: 1926805 - RNA, 19 nt, Artificial Sequence
  Description of Artificial Sequence: Synthetic oligonucleotide
  Antisense strand to SEQ ID NO: 1926804
uucuuaaccacccugagcc

SEQ ID NO: 1926806 - RNA, 19 nt, Artificial Sequence
  Description of Artificial Sequence: Synthetic oligonucleotide
  Sense strand starting at position 1532 of SEQ ID NO: 1879709
aagccaaggucugucugau

SEQ ID NO: 1926807 - RNA, 19 nt, Artificial Sequence
  Description of Artificial Sequence: Synthetic oligonucleotide
  Antisense strand to SEQ ID NO: 1926806
aucagacagaccuuggcuu

SEQ ID NO: 1926808 - RNA, 19 nt, Artificial Sequence
  Description of Artificial Sequence: Synthetic oligonucleotide
  Sense strand starting at position 1657 of SEQ ID NO: 1879709
ggcguugaagcuuugcaca

SEQ ID NO: 1926809 - RNA, 19 nt, Artificial Sequence
  Description of Artificial Sequence: Synthetic oligonucleotide
  Antisense strand to SEQ ID NO: 1926808
ugugcaaagcuucaacgcc

SEQ ID NO: 1926810 - RNA, 19 nt, Artificial Sequence
  Description of Artificial Sequence: Synthetic oligonucleotide
  Sense strand starting at position 1780 of SEQ ID NO: 1879709
aggcuugggucaucaaauc

SEQ ID NO: 1926811 - RNA, 19 nt, Artificial Sequence
  Description of Artificial Sequence: Synthetic oligonucleotide
  Antisense strand to SEQ ID NO: 1926810
gauuugaugacccaagccu

SEQ ID NO: 1926812 - RNA, 19 nt, Artificial Sequence
  Description of Artificial Sequence: Synthetic oligonucleotide
  Sense strand starting at position 2219 of SEQ ID NO: 1879709
ucaggucucugcucaggua

SEQ ID NO: 1926813 - RNA, 19 nt, Artificial Sequence
  Description of Artificial Sequence: Synthetic oligonucleotide
  Antisense strand to SEQ ID NO: 1926812
uaccugagcagagaccuga

SEQ ID NO: 1926814 - RNA, 19 nt, Artificial Sequence
  Description of Artificial Sequence: Synthetic oligonucleotide
  Sense strand starting at position 2220 of SEQ ID NO: 1879709
caggucucugcucagguau

SEQ ID NO: 1926815 - RNA, 19 nt, Artificial Sequence
  Description of Artificial Sequence: Synthetic oligonucleotide
  Antisense strand to SEQ ID NO: 1926814
auaccugagcagagaccug

SEQ ID NO: 1926816 - RNA, 19 nt, Artificial Sequence
  Description of Artificial Sequence: Synthetic oligonucleotide
  Sense strand starting at position 2297 of SEQ ID NO: 1879709
ugcugaauuucguucccua

SEQ ID NO: 1926817 - RNA, 19 nt, Artificial Sequence
  Description of Artificial Sequence: Synthetic oligonucleotide
  Antisense strand to SEQ ID NO: 1926816
uagggaacgaaauucagca

SEQ ID NO: 1926818 - RNA, 19 nt, Artificial Sequence
  Description of Artificial Sequence: Synthetic oligonucleotide
  Sense strand starting at position 2300 of SEQ ID NO: 1879709
ugaauuucguucccuagca

SEQ ID NO: 1926819 - RNA, 19 nt, Artificial Sequence
  Description of Artificial Sequence: Synthetic oligonucleotide
  Antisense strand to SEQ ID NO: 1926818
ugcuagggaacgaaauuca

SEQ ID NO: 1926820 - RNA, 19 nt, Artificial Sequence
  Description of Artificial Sequence: Synthetic oligonucleotide
  Sense strand starting at position 2301 of SEQ ID NO: 1879709
gaauuucguucccuagcau

SEQ ID NO: 1926821 - RNA, 19 nt, Artificial Sequence
  Description of Artificial Sequence: Synthetic oligonucleotide
  Antisense strand to SEQ ID NO: 1926820
augcuagggaacgaaauuc

SEQ ID NO: 1926822 - RNA, 19 nt, Artificial Sequence
  Description of Artificial Sequence: Synthetic oligonucleotide
  Sense strand starting at position 2338 of SEQ ID NO: 1879709
uuacuaauggcuugucugu

SEQ ID NO: 1926823 - RNA, 19 nt, Artificial Sequence
  Description of Artificial Sequence: Synthetic oligonucleotide
  Antisense strand to SEQ ID NO: 1926822
acagacaagccauuaguaa

SEQ ID NO: 1926824 - RNA, 19 nt, Artificial Sequence
  Description of Artificial Sequence: Synthetic oligonucleotide
  Sense strand starting at position 2343 of SEQ ID NO: 1879709
aauggcuugucuguuuaau

SEQ ID NO: 1926825 - RNA, 19 nt, Artificial Sequence
  Description of Artificial Sequence: Synthetic oligonucleotide
  Antisense strand to SEQ ID NO: 1926824
auuaaacagacaagccauu

SEQ ID NO: 1926826 - RNA, 19 nt, Artificial Sequence
  Description of Artificial Sequence: Synthetic oligonucleotide
  Sense strand starting at position 2353 of SEQ ID NO: 1879709
cuguuuaaugucuaccuca

SEQ ID NO: 1926827 - RNA, 19 nt, Artificial Sequence
  Description of Artificial Sequence: Synthetic oligonucleotide
  Antisense strand to SEQ ID NO: 1926826
ugagguagacauuaaacag

SEQ ID NO: 1926828 - RNA, 19 nt, Artificial Sequence
  Description of Artificial Sequence: Synthetic oligonucleotide
  Sense strand starting at position 2360 of SEQ ID NO: 1879709
augucuaccucaucacaga

SEQ ID NO: 1926829 - RNA, 19 nt, Artificial Sequence
  Description of Artificial Sequence: Synthetic oligonucleotide
  Antisense strand to SEQ ID NO: 1926828
ucugugaugagguagacau

SEQ ID NO: 1926830 - RNA, 19 nt, Artificial Sequence
  Description of Artificial Sequence: Synthetic oligonucleotide
  Sense strand starting at position 2463 of SEQ ID NO: 1879709
aaagcagacccucgagaaa

SEQ ID NO: 1926831 - RNA, 19 nt, Artificial Sequence
  Description of Artificial Sequence: Synthetic oligonucleotide
  Antisense strand to SEQ ID NO: 1926830
uuucucgagggucugcuuu

SEQ ID NO: 1926832 - RNA, 19 nt, Artificial Sequence
  Description of Artificial Sequence: Synthetic oligonucleotide
  Sense strand starting at position 2466 of SEQ ID NO: 1879709
gcagacccucgagaaacau

SEQ ID NO: 1926833 - RNA, 19 nt, Artificial Sequence
  Description of Artificial Sequence: Synthetic oligonucleotide
  Antisense strand to SEQ ID NO: 1926832
auguuucucgagggucugc

SEQ ID NO: 1926834 - RNA, 19 nt, Artificial Sequence
  Description of Artificial Sequence: Synthetic oligonucleotide
  Sense strand starting at position 2502 of SEQ ID NO: 1879709
gaaggaauguuggcauagu

SEQ ID NO: 1926835 - RNA, 19 nt, Artificial Sequence
  Description of Artificial Sequence: Synthetic oligonucleotide
  Antisense strand to SEQ ID NO: 1926834
acuaugccaacauuccuuc

SEQ ID NO: 1926836 - RNA, 19 nt, Artificial Sequence
  Description of Artificial Sequence: Synthetic oligonucleotide
  Sense strand starting at position 2659 of SEQ ID NO: 1879709
gugucaguacgguaaccau

SEQ ID NO: 1926837 - RNA, 19 nt, Artificial Sequence
  Description of Artificial Sequence: Synthetic oligonucleotide
  Antisense strand to SEQ ID NO: 1926836
augguuaccguacugacac

SEQ ID NO: 1926838 - RNA, 19 nt, Artificial Sequence
  Description of Artificial Sequence: Synthetic oligonucleotide
  Sense strand starting at position 2666 of SEQ ID NO: 1879709
uacgguaaccauggaugaa

SEQ ID NO: 1926839 - RNA, 19 nt, Artificial Sequence
  Description of Artificial Sequence: Synthetic oligonucleotide
  Antisense strand to SEQ ID NO: 1926838
uucauccaugguuaccgua

SEQ ID NO: 1926840 - RNA, 19 nt, Artificial Sequence
  Description of Artificial Sequence: Synthetic oligonucleotide
  Sense strand starting at position 2798 of SEQ ID NO: 1879709
acacauacguccucauaca

SEQ ID NO: 1926841 - RNA, 19 nt, Artificial Sequence
  Description of Artificial Sequence: Synthetic oligonucleotide
  Antisense strand to SEQ ID NO: 1926840
uguaugaggacguaugugu

SEQ ID NO: 1926842 - RNA, 19 nt, Artificial Sequence
  Description of Artificial Sequence: Synthetic oligonucleotide
  Sense strand starting at position 2999 of SEQ ID NO: 1879709
cucacugagcgggaguuaa

SEQ ID NO: 1926843 - RNA, 19 nt, Artificial Sequence
  Description of Artificial Sequence: Synthetic oligonucleotide
  Antisense strand to SEQ ID NO: 1926842
uuaacucccgcucagugag

SEQ ID NO: 1926844 - RNA, 19 nt, Artificial Sequence
  Description of Artificial Sequence: Synthetic oligonucleotide
  Sense strand starting at position 3049 of SEQ ID NO: 1879709
gcuccagucucccuuguaa

SEQ ID NO: 1926845 - RNA, 19 nt, Artificial Sequence
  Description of Artificial Sequence: Synthetic oligonucleotide
  Antisense strand to SEQ ID NO: 1926844
uuacaagggagacuggagc

SEQ ID NO: 1926846 - RNA, 19 nt, Artificial Sequence
  Description of Artificial Sequence: Synthetic oligonucleotide
  Sense strand starting at position 3051 of SEQ ID NO: 1879709
uccagucucccuuguaauc

SEQ ID NO: 1926847 - RNA, 19 nt, Artificial Sequence
  Description of Artificial Sequence: Synthetic oligonucleotide
  Antisense strand to SEQ ID NO: 1926846
gauuacaagggagacugga

SEQ ID NO: 1926848 - RNA, 19 nt, Artificial Sequence
  Description of Artificial Sequence: Synthetic oligonucleotide
  Sense strand starting at position 3061 of SEQ ID NO: 1879709
cuuguaaucugcuccugga

SEQ ID NO: 1926849 - RNA, 19 nt, Artificial Sequence
  Description of Artificial Sequence: Synthetic oligonucleotide
  Antisense strand to SEQ ID NO: 1926848
uccaggagcagauuacaag

SEQ ID NO: 1926850 - RNA, 19 nt, Artificial Sequence
  Description of Artificial Sequence: Synthetic oligonucleotide
  Sense strand starting at position 3212 of SEQ ID NO: 1879709
gcugaauucuugcugggua

SEQ ID NO: 1926851 - RNA, 19 nt, Artificial Sequence
  Description of Artificial Sequence: Synthetic oligonucleotide
  Antisense strand to SEQ ID NO: 1926850
uacccagcaagaauucagc

SEQ ID NO: 1926852 - RNA, 19 nt, Artificial Sequence
  Description of Artificial Sequence: Synthetic oligonucleotide
  Sense strand starting at position 3214 of SEQ ID NO: 1879709
ugaauucuugcuggguauu

SEQ ID NO: 1926853 - RNA, 19 nt, Artificial Sequence
  Description of Artificial Sequence: Synthetic oligonucleotide
  Antisense strand to SEQ ID NO: 1926852
aauacccagcaagaauuca

SEQ ID NO: 1926854 - RNA, 19 nt, Artificial Sequence
  Description of Artificial Sequence: Synthetic oligonucleotide
  Sense strand starting at position 3420 of SEQ ID NO: 1879709
cagccucuguuucccgaaa

SEQ ID NO: 1926855 - RNA, 19 nt, Artificial Sequence
  Description of Artificial Sequence: Synthetic oligonucleotide
  Antisense strand to SEQ ID NO: 1926854
uuucgggaaacagaggcug

SEQ ID NO: 1926856 - RNA, 19 nt, Artificial Sequence
  Description of Artificial Sequence: Synthetic oligonucleotide
  Sense strand starting at position 3726 of SEQ ID NO: 1879709
aggaaaugcuuauagaaug

SEQ ID NO: 1926857 - RNA, 19 nt, Artificial Sequence
  Description of Artificial Sequence: Synthetic oligonucleotide
  Antisense strand to SEQ ID NO: 1926856
cauucuauaagcauuuccu

SEQ ID NO: 1926858 - RNA, 19 nt, Artificial Sequence
  Description of Artificial Sequence: Synthetic oligonucleotide
  Sense strand starting at position 3731 of SEQ ID NO: 1879709
augcuuauagaaugugaaa

SEQ ID NO: 1926859 - RNA, 19 nt, Artificial Sequence
  Description of Artificial Sequence: Synthetic oligonucleotide
  Antisense strand to SEQ ID NO: 1926858
uuucacauucuauaagcau

SEQ ID NO: 1926860 - RNA, 19 nt, Artificial Sequence
  Description of Artificial Sequence: Synthetic oligonucleotide
  Sense strand starting at position 3816 of SEQ ID NO: 1879709
ugccuugagccagacaugu

SEQ ID NO: 1926861 - RNA, 19 nt, Artificial Sequence
  Description of Artificial Sequence: Synthetic oligonucleotide
  Antisense strand to SEQ ID NO: 1926860
acaugucuggcucaaggca

SEQ ID NO: 1926862 - RNA, 19 nt, Artificial Sequence
  Description of Artificial Sequence: Synthetic oligonucleotide
  Sense strand starting at position 211 of SEQ ID NO: 1879710
uuuguauaauacucagagu

SEQ ID NO: 1926863 - RNA, 19 nt, Artificial Sequence
  Description of Artificial Sequence: Synthetic oligonucleotide
  Antisense strand to SEQ ID NO: 1926862
acucugaguauuauacaaa

SEQ ID NO: 1926864 - RNA, 19 nt, Artificial Sequence
  Description of Artificial Sequence: Synthetic oligonucleotide
  Sense strand starting at position 385 of SEQ ID NO: 1879710
auggacauauccuuuguua

SEQ ID NO: 1926865 - RNA, 19 nt, Artificial Sequence
  Description of Artificial Sequence: Synthetic oligonucleotide
  Antisense strand to SEQ ID NO: 1926864
uaacaaaggauauguccau

SEQ ID NO: 1926866 - RNA, 19 nt, Artificial Sequence
  Description of Artificial Sequence: Synthetic oligonucleotide
  Sense strand starting at position 387 of SEQ ID NO: 1879710
ggacauauccuuuguuagg

SEQ ID NO: 1926867 - RNA, 19 nt, Artificial Sequence
  Description of Artificial Sequence: Synthetic oligonucleotide
  Antisense strand to SEQ ID NO: 1926866
ccuaacaaaggauaugucc

SEQ ID NO: 1926868 - RNA, 19 nt, Artificial Sequence
  Description of Artificial Sequence: Synthetic oligonucleotide
  Sense strand starting at position 388 of SEQ ID NO: 1879710
gacauauccuuuguuagga

SEQ ID NO: 1926869 - RNA, 19 nt, Artificial Sequence
  Description of Artificial Sequence: Synthetic oligonucleotide
  Antisense strand to SEQ ID NO: 1926868
uccuaacaaaggauauguc

SEQ ID NO: 1926870 - RNA, 19 nt, Artificial Sequence
  Description of Artificial Sequence: Synthetic oligonucleotide
  Sense strand starting at position 397 of SEQ ID NO: 1879710
uuuguuaggaggcaguuau

SEQ ID NO: 1926871 - RNA, 19 nt, Artificial Sequence
  Description of Artificial Sequence: Synthetic oligonucleotide
  Antisense strand to SEQ ID NO: 1926870
auaacugccuccuaacaaa

SEQ ID NO: 1926872 - RNA, 19 nt, Artificial Sequence
  Description of Artificial Sequence: Synthetic oligonucleotide
  Sense strand starting at position 827 of SEQ ID NO: 1879710
ccaugaggaguuuguaauc

SEQ ID NO: 1926873 - RNA, 19 nt, Artificial Sequence
  Description of Artificial Sequence: Synthetic oligonucleotide
  Antisense strand to SEQ ID NO: 1926872
gauuacaaacuccucaugg

SEQ ID NO: 1926874 - RNA, 19 nt, Artificial Sequence
  Description of Artificial Sequence: Synthetic oligonucleotide
  Sense strand starting at position 888 of SEQ ID NO: 1879710
uuuggaguuccagaguacu

SEQ ID NO: 1926875 - RNA, 19 nt, Artificial Sequence
  Description of Artificial Sequence: Synthetic oligonucleotide
  Antisense strand to SEQ ID NO: 1926874
aguacucuggaacuccaaa

SEQ ID NO: 1926876 - RNA, 19 nt, Artificial Sequence
  Description of Artificial Sequence: Synthetic oligonucleotide
  Sense strand starting at position 891 of SEQ ID NO: 1879710
ggaguuccagaguacucuu

SEQ ID NO: 1926877 - RNA, 19 nt, Artificial Sequence
  Description of Artificial Sequence: Synthetic oligonucleotide
  Antisense strand to SEQ ID NO: 1926876
aagaguacucuggaacucc

SEQ ID NO: 1926878 - RNA, 19 nt, Artificial Sequence
  Description of Artificial Sequence: Synthetic oligonucleotide
  Sense strand starting at position 973 of SEQ ID NO: 1879710
agugauaaaccugggccua

SEQ ID NO: 1926879 - RNA, 19 nt, Artificial Sequence
  Description of Artificial Sequence: Synthetic oligonucleotide
  Antisense strand to SEQ ID NO: 1926878
uaggcccagguuuaucacu

SEQ ID NO: 1926880 - RNA, 19 nt, Artificial Sequence
  Description of Artificial Sequence: Synthetic oligonucleotide
  Sense strand starting at position 975 of SEQ ID NO: 1879710
ugauaaaccugggccuauu

SEQ ID NO: 1926881 - RNA, 19 nt, Artificial Sequence
  Description of Artificial Sequence: Synthetic oligonucleotide
  Antisense strand to SEQ ID NO: 1926880
aauaggcccagguuuauca

SEQ ID NO: 1926882 - RNA, 19 nt, Artificial Sequence
  Description of Artificial Sequence: Synthetic oligonucleotide
  Sense strand starting at position 1004 of SEQ ID NO: 1879710
agguauugugaacaggcua

SEQ ID NO: 1926883 - RNA, 19 nt, Artificial Sequence
  Description of Artificial Sequence: Synthetic oligonucleotide
  Antisense strand to SEQ ID NO: 1926882
uagccuguucacaauaccu

SEQ ID NO: 1926884 - RNA, 19 nt, Artificial Sequence
  Description of Artificial Sequence: Synthetic oligonucleotide
  Sense strand starting at position 1018 of SEQ ID NO: 1879710
ggcuauguucaguauggac

SEQ ID NO: 1926885 - RNA, 19 nt, Artificial Sequence
  Description of Artificial Sequence: Synthetic oligonucleotide
  Antisense strand to SEQ ID NO: 1926884
guccauacugaacauagcc

SEQ ID NO: 1926886 - RNA, 19 nt, Artificial Sequence
  Description of Artificial Sequence: Synthetic oligonucleotide
  Sense strand starting at position 1118 of SEQ ID NO: 1879710
gggaucaggguguaagagu

SEQ ID NO: 1926887 - RNA, 19 nt, Artificial Sequence
  Description of Artificial Sequence: Synthetic oligonucleotide
  Antisense strand to SEQ ID NO: 1926886
acucuuacacccugauccc

SEQ ID NO: 1926888 - RNA, 19 nt, Artificial Sequence
  Description of Artificial Sequence: Synthetic oligonucleotide
  Sense strand starting at position 1125 of SEQ ID NO: 1879710
ggguguaagagucagauua

SEQ ID NO: 1926889 - RNA, 19 nt, Artificial Sequence
  Description of Artificial Sequence: Synthetic oligonucleotide
  Antisense strand to SEQ ID NO: 1926888
uaaucugacucuuacaccc

SEQ ID NO: 1926890 - RNA, 19 nt, Artificial Sequence
  Description of Artificial Sequence: Synthetic oligonucleotide
  Sense strand starting at position 1135 of SEQ ID NO: 1879710
gucagauuacagugguaga

SEQ ID NO: 1926891 - RNA, 19 nt, Artificial Sequence
  Description of Artificial Sequence: Synthetic oligonucleotide
  Antisense strand to SEQ ID NO: 1926890
ucuaccacuguaaucugac

SEQ ID NO: 1926892 - RNA, 19 nt, Artificial Sequence
  Description of Artificial Sequence: Synthetic oligonucleotide
  Sense strand starting at position 1136 of SEQ ID NO: 1879710
ucagauuacagugguagaa

SEQ ID NO: 1926893 - RNA, 19 nt, Artificial Sequence
  Description of Artificial Sequence: Synthetic oligonucleotide
  Antisense strand to SEQ ID NO: 1926892
uucuaccacuguaaucuga

SEQ ID NO: 1926894 - RNA, 19 nt, Artificial Sequence
  Description of Artificial Sequence: Synthetic oligonucleotide
  Sense strand starting at position 1140 of SEQ ID NO: 1879710
auuacagugguagaaaguu

SEQ ID NO: 1926895 - RNA, 19 nt, Artificial Sequence
  Description of Artificial Sequence: Synthetic oligonucleotide
  Antisense strand to SEQ ID NO: 1926894
aacuuucuaccacuguaau

SEQ ID NO: 1926896 - RNA, 19 nt, Artificial Sequence
  Description of Artificial Sequence: Synthetic oligonucleotide
  Sense strand starting at position 1307 of SEQ ID NO: 1879710
uaauucugugucguuuagu

SEQ ID NO: 1926897 - RNA, 19 nt, Artificial Sequence
  Description of Artificial Sequence: Synthetic oligonucleotide
  Antisense strand to SEQ ID NO: 1926896
acuaaacgacacagaauua

SEQ ID NO: 1926898 - RNA, 19 nt, Artificial Sequence
  Description of Artificial Sequence: Synthetic oligonucleotide
  Sense strand starting at position 1656 of SEQ ID NO: 1879710
uauaguacauggucuaaga

SEQ ID NO: 1926899 - RNA, 19 nt, Artificial Sequence
  Description of Artificial Sequence: Synthetic oligonucleotide
  Antisense strand to SEQ ID NO: 1926898
ucuuagaccauguacuaua

SEQ ID NO: 1926900 - RNA, 19 nt, Artificial Sequence
  Description of Artificial Sequence: Synthetic oligonucleotide
  Sense strand starting at position 1658 of SEQ ID NO: 1879710
uaguacauggucuaagacu

SEQ ID NO: 1926901 - RNA, 19 nt, Artificial Sequence
  Description of Artificial Sequence: Synthetic oligonucleotide
  Antisense strand to SEQ ID NO: 1926900
agucuuagaccauguacua

SEQ ID NO: 1926902 - RNA, 19 nt, Artificial Sequence
  Description of Artificial Sequence: Synthetic oligonucleotide
  Sense strand starting at position 1718 of SEQ ID NO: 1879710
auugguuuagaauagucau

SEQ ID NO: 1926903 - RNA, 19 nt, Artificial Sequence
  Description of Artificial Sequence: Synthetic oligonucleotide
  Antisense strand to SEQ ID NO: 1926902
augacuauucuaaaccaau

SEQ ID NO: 1926904 - RNA, 19 nt, Artificial Sequence
  Description of Artificial Sequence: Synthetic oligonucleotide
  Sense strand starting at position 1743 of SEQ ID NO: 1879710
uuuagugagagguauagca

SEQ ID NO: 1926905 - RNA, 19 nt, Artificial Sequence
  Description of Artificial Sequence: Synthetic oligonucleotide
  Antisense strand to SEQ ID NO: 1926904
ugcuauaccucucacuaaa

SEQ ID NO: 1926906 - RNA, 19 nt, Artificial Sequence
  Description of Artificial Sequence: Synthetic oligonucleotide
  Sense strand starting at position 1745 of SEQ ID NO: 1879710
uagugagagguauagcagu

SEQ ID NO: 1926907 - RNA, 19 nt, Artificial Sequence
  Description of Artificial Sequence: Synthetic oligonucleotide
  Antisense strand to SEQ ID NO: 1926906
acugcuauaccucucacua

SEQ ID NO: 1926908 - RNA, 19 nt, Artificial Sequence
  Description of Artificial Sequence: Synthetic oligonucleotide
  Sense strand starting at position 1810 of SEQ ID NO: 1879710
uuucuaguucuaggaaauu

SEQ ID NO: 1926909 - RNA, 19 nt, Artificial Sequence
  Description of Artificial Sequence: Synthetic oligonucleotide
  Antisense strand to SEQ ID NO: 1926908
aauuuccuagaacuagaaa

SEQ ID NO: 1926910 - RNA, 19 nt, Artificial Sequence
  Description of Artificial Sequence: Synthetic oligonucleotide
  Sense strand starting at position 2433 of SEQ ID NO: 1879710
ccauguauggcuuaaacua

SEQ ID NO: 1926911 - RNA, 19 nt, Artificial Sequence
  Description of Artificial Sequence: Synthetic oligonucleotide
  Antisense strand to SEQ ID NO: 1926910
uaguuuaagccauacaugg

SEQ ID NO: 1926912 - RNA, 19 nt, Artificial Sequence
  Description of Artificial Sequence: Synthetic oligonucleotide
  Sense strand starting at position 2537 of SEQ ID NO: 1879710
ucuaaagagauagguuagu

SEQ ID NO: 1926913 - RNA, 19 nt, Artificial Sequence
  Description of Artificial Sequence: Synthetic oligonucleotide
  Antisense strand to SEQ ID NO: 1926912
acuaaccuaucucuuuaga

SEQ ID NO: 1926914 - RNA, 19 nt, Artificial Sequence
  Description of Artificial Sequence: Synthetic oligonucleotide
  Sense strand starting at position 2918 of SEQ ID NO: 1879710
cuagaagaaucuguaaugu

SEQ ID NO: 1926915 - RNA, 19 nt, Artificial Sequence
  Description of Artificial Sequence: Synthetic oligonucleotide
  Antisense strand to SEQ ID NO: 1926914
acauuacagauucuucuag

SEQ ID NO: 1926916 - RNA, 19 nt, Artificial Sequence
  Description of Artificial Sequence: Synthetic oligonucleotide
  Sense strand starting at position 2931 of SEQ ID NO: 1879710
uaauguuaauuagugggau

SEQ ID NO: 1926917 - RNA, 19 nt, Artificial Sequence
  Description of Artificial Sequence: Synthetic oligonucleotide
  Antisense strand to SEQ ID NO: 1926916
aucccacuaauuaacauua

SEQ ID NO: 1926918 - RNA, 19 nt, Artificial Sequence
  Description of Artificial Sequence: Synthetic oligonucleotide
  Sense strand starting at position 2933 of SEQ ID NO: 1879710
auguuaauuagugggauua

SEQ ID NO: 1926919 - RNA, 19 nt, Artificial Sequence
  Description of Artificial Sequence: Synthetic oligonucleotide
  Antisense strand to SEQ ID NO: 1926918
uaaucccacuaauuaacau

SEQ ID NO: 1926920 - RNA, 19 nt, Artificial Sequence
  Description of Artificial Sequence: Synthetic oligonucleotide
  Sense strand starting at position 2934 of SEQ ID NO: 1879710
uguuaauuagugggauuau

SEQ ID NO: 1926921 - RNA, 19 nt, Artificial Sequence
  Description of Artificial Sequence: Synthetic oligonucleotide
  Antisense strand to SEQ ID NO: 1926920
auaaucccacuaauuaaca

SEQ ID NO: 1926922 - RNA, 19 nt, Artificial Sequence
  Description of Artificial Sequence: Synthetic oligonucleotide
  Sense strand starting at position 3299 of SEQ ID NO: 1879710
ugguauggaugagcauaua

SEQ ID NO: 1926923 - RNA, 19 nt, Artificial Sequence
  Description of Artificial Sequence: Synthetic oligonucleotide
  Antisense strand to SEQ ID NO: 1926922
uauaugcucauccauacca

SEQ ID NO: 1926924 - RNA, 19 nt, Artificial Sequence
  Description of Artificial Sequence: Synthetic oligonucleotide
  Sense strand starting at position 3398 of SEQ ID NO: 1879710
ucuugagcuauguaggaaa

SEQ ID NO: 1926925 - RNA, 19 nt, Artificial Sequence
  Description of Artificial Sequence: Synthetic oligonucleotide
  Antisense strand to SEQ ID NO: 1926924
uuuccuacauagcucaaga

SEQ ID NO: 1926926 - RNA, 19 nt, Artificial Sequence
  Description of Artificial Sequence: Synthetic oligonucleotide
  Sense strand starting at position 3479 of SEQ ID NO: 1879710
aggcuagcuagacaguuaa

SEQ ID NO: 1926927 - RNA, 19 nt, Artificial Sequence
  Description of Artificial Sequence: Synthetic oligonucleotide
  Antisense strand to SEQ ID NO: 1926926
uuaacugucuagcuagccu

SEQ ID NO: 1926928 - RNA, 19 nt, Artificial Sequence
  Description of Artificial Sequence: Synthetic oligonucleotide
  Sense strand starting at position 3743 of SEQ ID NO: 1879710
augacaauagcaugaaagu

SEQ ID NO: 1926929 - RNA, 19 nt, Artificial Sequence
  Description of Artificial Sequence: Synthetic oligonucleotide
  Antisense strand to SEQ ID NO: 1926928
acuuucaugcuauugucau

SEQ ID NO: 1926930 - RNA, 19 nt, Artificial Sequence
  Description of Artificial Sequence: Synthetic oligonucleotide
  Sense strand starting at position 3749 of SEQ ID NO: 1879710
auagcaugaaagugaugaa

SEQ ID NO: 1926931 - RNA, 19 nt, Artificial Sequence
  Description of Artificial Sequence: Synthetic oligonucleotide
  Antisense strand to SEQ ID NO: 1926930
uucaucacuuucaugcuau

SEQ ID NO: 1926932 - RNA, 19 nt, Artificial Sequence
  Description of Artificial Sequence: Synthetic oligonucleotide
  Sense strand starting at position 3756 of SEQ ID NO: 1879710
gaaagugaugaaugguaug

SEQ ID NO: 1926933 - RNA, 19 nt, Artificial Sequence
  Description of Artificial Sequence: Synthetic oligonucleotide
  Antisense strand to SEQ ID NO: 1926932
cauaccauucaucacuuuc

SEQ ID NO: 1926934 - RNA, 19 nt, Artificial Sequence
  Description of Artificial Sequence: Synthetic oligonucleotide
  Sense strand starting at position 3785 of SEQ ID NO: 1879710
caguuuaaugacuguaaga

SEQ ID NO: 1926935 - RNA, 19 nt, Artificial Sequence
  Description of Artificial Sequence: Synthetic oligonucleotide
  Antisense strand to SEQ ID NO: 1926934
ucuuacagucauuaaacug

SEQ ID NO: 1926936 - RNA, 19 nt, Artificial Sequence
  Description of Artificial Sequence: Synthetic oligonucleotide
  Sense strand starting at position 3795 of SEQ ID NO: 1879710
acuguaagauaagcuuaga

SEQ ID NO: 1926937 - RNA, 19 nt, Artificial Sequence
  Description of Artificial Sequence: Synthetic oligonucleotide
  Antisense strand to SEQ ID NO: 1926936
ucuaagcuuaucuuacagu

SEQ ID NO: 1926938 - RNA, 19 nt, Artificial Sequence
  Description of Artificial Sequence: Synthetic oligonucleotide
  Sense strand starting at position 3814 of SEQ ID NO: 1879710
uuacauaagucaguccuaa

SEQ ID NO: 1926939 - RNA, 19 nt, Artificial Sequence
  Description of Artificial Sequence: Synthetic oligonucleotide
  Antisense strand to SEQ ID NO: 1926938
uuaggacugacuuauguaa

SEQ ID NO: 1926940 - RNA, 19 nt, Artificial Sequence
  Description of Artificial Sequence: Synthetic oligonucleotide
  Sense strand starting at position 3959 of SEQ ID NO: 1879710
gugauuuccuauguauacg

SEQ ID NO: 1926941 - RNA, 19 nt, Artificial Sequence
  Description of Artificial Sequence: Synthetic oligonucleotide
  Antisense strand to SEQ ID NO: 1926940
cguauacauaggaaaucac

SEQ ID NO: 1926942 - RNA, 19 nt, Artificial Sequence
  Description of Artificial Sequence: Synthetic oligonucleotide
  Sense strand starting at position 40 of SEQ ID NO: 1879711
agaagugacuugcugaaga

SEQ ID NO: 1926943 - RNA, 19 nt, Artificial Sequence
  Description of Artificial Sequence: Synthetic oligonucleotide
  Antisense strand to SEQ ID NO: 1926942
ucuucagcaagucacuucu

SEQ ID NO: 1926944 - RNA, 19 nt, Artificial Sequence
  Description of Artificial Sequence: Synthetic oligonucleotide
  Sense strand starting at position 190 of SEQ ID NO: 1879711
cucggaggaucccaaguaa

SEQ ID NO: 1926945 - RNA, 19 nt, Artificial Sequence
  Description of Artificial Sequence: Synthetic oligonucleotide
  Antisense strand to SEQ ID NO: 1926944
uuacuugggauccuccgag

SEQ ID NO: 1926946 - RNA, 19 nt, Artificial Sequence
  Description of Artificial Sequence: Synthetic oligonucleotide
  Sense strand starting at position 419 of SEQ ID NO: 1879711
ucuugaugaacugguuaug

SEQ ID NO: 1926947 - RNA, 19 nt, Artificial Sequence
  Description of Artificial Sequence: Synthetic oligonucleotide
  Antisense strand to SEQ ID NO: 1926946
cauaaccaguucaucaaga

SEQ ID NO: 1926948 - RNA, 19 nt, Artificial Sequence
  Description of Artificial Sequence: Synthetic oligonucleotide
  Sense strand starting at position 458 of SEQ ID NO: 1879711
ggagguaauucugcaacag

SEQ ID NO: 1926949 - RNA, 19 nt, Artificial Sequence
  Description of Artificial Sequence: Synthetic oligonucleotide
  Antisense strand to SEQ ID NO: 1926948
cuguugcagaauuaccucc

SEQ ID NO: 1926950 - RNA, 19 nt, Artificial Sequence
  Description of Artificial Sequence: Synthetic oligonucleotide
  Sense strand starting at position 488 of SEQ ID NO: 1879711
acaucaaugucucuggaca

SEQ ID NO: 1926951 - RNA, 19 nt, Artificial Sequence
  Description of Artificial Sequence: Synthetic oligonucleotide
  Antisense strand to SEQ ID NO: 1926950
uguccagagacauugaugu

SEQ ID NO: 1926952 - RNA, 19 nt, Artificial Sequence
  Description of Artificial Sequence: Synthetic oligonucleotide
  Sense strand starting at position 525 of SEQ ID NO: 1879711
cccacacauccgggaauaa

SEQ ID NO: 1926953 - RNA, 19 nt, Artificial Sequence
  Description of Artificial Sequence: Synthetic oligonucleotide
  Antisense strand to SEQ ID NO: 1926952
uuauucccggauguguggg

SEQ ID NO: 1926954 - RNA, 19 nt, Artificial Sequence
  Description of Artificial Sequence: Synthetic oligonucleotide
  Sense strand starting at position 678 of SEQ ID NO: 1879711
ggcuacuaucuccagaucu

SEQ ID NO: 1926955 - RNA, 19 nt, Artificial Sequence
  Description of Artificial Sequence: Synthetic oligonucleotide
  Antisense strand to SEQ ID NO: 1926954
agaucuggagauaguagcc

SEQ ID NO: 1926956 - RNA, 19 nt, Artificial Sequence
  Description of Artificial Sequence: Synthetic oligonucleotide
  Sense strand starting at position 809 of SEQ ID NO: 1879711
ccacuaauaccugggaggu

SEQ ID NO: 1926957 - RNA, 19 nt, Artificial Sequence
  Description of Artificial Sequence: Synthetic oligonucleotide
  Antisense strand to SEQ ID NO: 1926956
accucccagguauuagugg

SEQ ID NO: 1926958 - RNA, 19 nt, Artificial Sequence
  Description of Artificial Sequence: Synthetic oligonucleotide
  Sense strand starting at position 810 of SEQ ID NO: 1879711
cacuaauaccugggagguu

SEQ ID NO: 1926959 - RNA, 19 nt, Artificial Sequence
  Description of Artificial Sequence: Synthetic oligonucleotide
  Antisense strand to SEQ ID NO: 1926958
aaccucccagguauuagug

SEQ ID NO: 1926960 - RNA, 19 nt, Artificial Sequence
  Description of Artificial Sequence: Synthetic oligonucleotide
  Sense strand starting at position 811 of SEQ ID NO: 1879711
acuaauaccugggagguua

SEQ ID NO: 1926961 - RNA, 19 nt, Artificial Sequence
  Description of Artificial Sequence: Synthetic oligonucleotide
  Antisense strand to SEQ ID NO: 1926960
uaaccucccagguauuagu

SEQ ID NO: 1926962 - RNA, 19 nt, Artificial Sequence
  Description of Artificial Sequence: Synthetic oligonucleotide
  Sense strand starting at position 902 of SEQ ID NO: 1879711
uguggucauuugcaaauau

SEQ ID NO: 1926963 - RNA, 19 nt, Artificial Sequence
  Description of Artificial Sequence: Synthetic oligonucleotide
  Antisense strand to SEQ ID NO: 1926962
auauuugcaaaugaccaca

SEQ ID NO: 1926964 - RNA, 19 nt, Artificial Sequence
  Description of Artificial Sequence: Synthetic oligonucleotide
  Sense strand starting at position 1026 of SEQ ID NO: 1879711
gcagaagugauagaagucu

SEQ ID NO: 1926965 - RNA, 19 nt, Artificial Sequence
  Description of Artificial Sequence: Synthetic oligonucleotide
  Antisense strand to SEQ ID NO: 1926964
agacuucuaucacuucugc

SEQ ID NO: 1926966 - RNA, 19 nt, Artificial Sequence
  Description of Artificial Sequence: Synthetic oligonucleotide
  Sense strand starting at position 1272 of SEQ ID NO: 1879711
cagagucccugagucagaa

SEQ ID NO: 1926967 - RNA, 19 nt, Artificial Sequence
  Description of Artificial Sequence: Synthetic oligonucleotide
  Antisense strand to SEQ ID NO: 1926966
uucugacucagggacucug

SEQ ID NO: 1926968 - RNA, 19 nt, Artificial Sequence
  Description of Artificial Sequence: Synthetic oligonucleotide
  Sense strand starting at position 1356 of SEQ ID NO: 1879711
ugcuuuaagccaugaugcu

SEQ ID NO: 1926969 - RNA, 19 nt, Artificial Sequence
  Description of Artificial Sequence: Synthetic oligonucleotide
  Antisense strand to SEQ ID NO: 1926968
agcaucauggcuuaaagca

SEQ ID NO: 1926970 - RNA, 19 nt, Artificial Sequence
  Description of Artificial Sequence: Synthetic oligonucleotide
  Sense strand starting at position 1357 of SEQ ID NO: 1879711
gcuuuaagccaugaugcuu

SEQ ID NO: 1926971 - RNA, 19 nt, Artificial Sequence
  Description of Artificial Sequence: Synthetic oligonucleotide
  Antisense strand to SEQ ID NO: 1926970
aagcaucauggcuuaaagc

SEQ ID NO: 1926972 - RNA, 19 nt, Artificial Sequence
  Description of Artificial Sequence: Synthetic oligonucleotide
  Sense strand starting at position 1363 of SEQ ID NO: 1879711
agccaugaugcuuagagau

SEQ ID NO: 1926973 - RNA, 19 nt, Artificial Sequence
  Description of Artificial Sequence: Synthetic oligonucleotide
  Antisense strand to SEQ ID NO: 1926972
aucucuaagcaucauggcu

SEQ ID NO: 1926974 - RNA, 19 nt, Artificial Sequence
  Description of Artificial Sequence: Synthetic oligonucleotide
  Sense strand starting at position 1365 of SEQ ID NO: 1879711
ccaugaugcuuagagauaa

SEQ ID NO: 1926975 - RNA, 19 nt, Artificial Sequence
  Description of Artificial Sequence: Synthetic oligonucleotide
  Antisense strand to SEQ ID NO: 1926974
uuaucucuaagcaucaugg

SEQ ID NO: 1926976 - RNA, 19 nt, Artificial Sequence
  Description of Artificial Sequence: Synthetic oligonucleotide
  Sense strand starting at position 1405 of SEQ ID NO: 1879711
cugauauuaugucuguguu

SEQ ID NO: 1926977 - RNA, 19 nt, Artificial Sequence
  Description of Artificial Sequence: Synthetic oligonucleotide
  Antisense strand to SEQ ID NO: 1926976
aacacagacauaauaucag

SEQ ID NO: 1926978 - RNA, 19 nt, Artificial Sequence
  Description of Artificial Sequence: Synthetic oligonucleotide
  Sense strand starting at position 1406 of SEQ ID NO: 1879711
ugauauuaugucuguguug

SEQ ID NO: 1926979 - RNA, 19 nt, Artificial Sequence
  Description of Artificial Sequence: Synthetic oligonucleotide
  Antisense strand to SEQ ID NO: 1926978
caacacagacauaauauca

SEQ ID NO: 1926980 - RNA, 19 nt, Artificial Sequence
  Description of Artificial Sequence: Synthetic oligonucleotide
  Sense strand starting at position 1408 of SEQ ID NO: 1879711
auauuaugucuguguugca

SEQ ID NO: 1926981 - RNA, 19 nt, Artificial Sequence
  Description of Artificial Sequence: Synthetic oligonucleotide
  Antisense strand to SEQ ID NO: 1926980
ugcaacacagacauaauau

SEQ ID NO: 1926982 - RNA, 19 nt, Artificial Sequence
  Description of Artificial Sequence: Synthetic oligonucleotide
  Sense strand starting at position 1409 of SEQ ID NO: 1879711
uauuaugucuguguugcaa

SEQ ID NO: 1926983 - RNA, 19 nt, Artificial Sequence
  Description of Artificial Sequence: Synthetic oligonucleotide
  Antisense strand to SEQ ID NO: 1926982
uugcaacacagacauaaua

SEQ ID NO: 1926984 - RNA, 19 nt, Artificial Sequence
  Description of Artificial Sequence: Synthetic oligonucleotide
  Sense strand starting at position 1534 of SEQ ID NO: 1879711
cugacaaguuucuuccuga

SEQ ID NO: 1926985 - RNA, 19 nt, Artificial Sequence
  Description of Artificial Sequence: Synthetic oligonucleotide
  Antisense strand to SEQ ID NO: 1926984
ucaggaagaaacuugucag

SEQ ID NO: 1926986 - RNA, 19 nt, Artificial Sequence
  Description of Artificial Sequence: Synthetic oligonucleotide
  Sense strand starting at position 1535 of SEQ ID NO: 1879711
ugacaaguuucuuccugag

SEQ ID NO: 1926987 - RNA, 19 nt, Artificial Sequence
  Description of Artificial Sequence: Synthetic oligonucleotide
  Antisense strand to SEQ ID NO: 1926986
cucaggaagaaacuuguca

SEQ ID NO: 1926988 - RNA, 19 nt, Artificial Sequence
  Description of Artificial Sequence: Synthetic oligonucleotide
  Sense strand starting at position 1537 of SEQ ID NO: 1879711
acaaguuucuuccugagag

SEQ ID NO: 1926989 - RNA, 19 nt, Artificial Sequence
  Description of Artificial Sequence: Synthetic oligonucleotide
  Antisense strand to SEQ ID NO: 1926988
cucucaggaagaaacuugu

SEQ ID NO: 1926990 - RNA, 19 nt, Artificial Sequence
  Description of Artificial Sequence: Synthetic oligonucleotide
  Sense strand starting at position 1555 of SEQ ID NO: 1879711
gggcucccucaauaaauca

SEQ ID NO: 1926991 - RNA, 19 nt, Artificial Sequence
  Description of Artificial Sequence: Synthetic oligonucleotide
  Antisense strand to SEQ ID NO: 1926990
ugauuuauugagggagccc

SEQ ID NO: 1926992 - RNA, 19 nt, Artificial Sequence
  Description of Artificial Sequence: Synthetic oligonucleotide
  Sense strand starting at position 1633 of SEQ ID NO: 1879711
cacacagagacgugaagua

SEQ ID NO: 1926993 - RNA, 19 nt, Artificial Sequence
  Description of Artificial Sequence: Synthetic oligonucleotide
  Antisense strand to SEQ ID NO: 1926992
uacuucacgucucugugug

SEQ ID NO: 1926994 - RNA, 19 nt, Artificial Sequence
  Description of Artificial Sequence: Synthetic oligonucleotide
  Sense strand starting at position 1722 of SEQ ID NO: 1879711
acuugaaguugagauaggu

SEQ ID NO: 1926995 - RNA, 19 nt, Artificial Sequence
  Description of Artificial Sequence: Synthetic oligonucleotide
  Antisense strand to SEQ ID NO: 1926994
accuaucucaacuucaagu

SEQ ID NO: 1926996 - RNA, 19 nt, Artificial Sequence
  Description of Artificial Sequence: Synthetic oligonucleotide
  Sense strand starting at position 1740 of SEQ ID NO: 1879711
ugggcacuuccauguagga

SEQ ID NO: 1926997 - RNA, 19 nt, Artificial Sequence
  Description of Artificial Sequence: Synthetic oligonucleotide
  Antisense strand to SEQ ID NO: 1926996
uccuacauggaagugccca

SEQ ID NO: 1926998 - RNA, 19 nt, Artificial Sequence
  Description of Artificial Sequence: Synthetic oligonucleotide
  Sense strand starting at position 2049 of SEQ ID NO: 1879711
agggcccuuccaugaugua

SEQ ID NO: 1926999 - RNA, 19 nt, Artificial Sequence
  Description of Artificial Sequence: Synthetic oligonucleotide
  Antisense strand to SEQ ID NO: 1926998
uacaucauggaagggcccu

SEQ ID NO: 1927000 - RNA, 19 nt, Artificial Sequence
  Description of Artificial Sequence: Synthetic oligonucleotide
  Sense strand starting at position 2173 of SEQ ID NO: 1879711
gcucacuggcaugaaucau

SEQ ID NO: 1927001 - RNA, 19 nt, Artificial Sequence
  Description of Artificial Sequence: Synthetic oligonucleotide
  Antisense strand to SEQ ID NO: 1927000
augauucaugccagugagc

SEQ ID NO: 1927002 - RNA, 19 nt, Artificial Sequence
  Description of Artificial Sequence: Synthetic oligonucleotide
  Sense strand starting at position 2208 of SEQ ID NO: 1879711
ucaacuugguuccaaagaa

SEQ ID NO: 1927003 - RNA, 19 nt, Artificial Sequence
  Description of Artificial Sequence: Synthetic oligonucleotide
  Antisense strand to SEQ ID NO: 1927002
uucuuuggaaccaaguuga

SEQ ID NO: 1927004 - RNA, 19 nt, Artificial Sequence
  Description of Artificial Sequence: Synthetic oligonucleotide
  Sense strand starting at position 2373 of SEQ ID NO: 1879711
augagaugugauugcaggu

SEQ ID NO: 1927005 - RNA, 19 nt, Artificial Sequence
  Description of Artificial Sequence: Synthetic oligonucleotide
  Antisense strand to SEQ ID NO: 1927004
accugcaaucacaucucau

SEQ ID NO: 1927006 - RNA, 19 nt, Artificial Sequence
  Description of Artificial Sequence: Synthetic oligonucleotide
  Sense strand starting at position 2767 of SEQ ID NO: 1879711
gccugauauccucaugcau

SEQ ID NO: 1927007 - RNA, 19 nt, Artificial Sequence
  Description of Artificial Sequence: Synthetic oligonucleotide
  Antisense strand to SEQ ID NO: 1927006
augcaugaggauaucaggc

SEQ ID NO: 1927008 - RNA, 19 nt, Artificial Sequence
  Description of Artificial Sequence: Synthetic oligonucleotide
  Sense strand starting at position 2897 of SEQ ID NO: 1879711
gagucuuggugucccagga

SEQ ID NO: 1927009 - RNA, 19 nt, Artificial Sequence
  Description of Artificial Sequence: Synthetic oligonucleotide
  Antisense strand to SEQ ID NO: 1927008
uccugggacaccaagacuc

SEQ ID NO: 1927010 - RNA, 19 nt, Artificial Sequence
  Description of Artificial Sequence: Synthetic oligonucleotide
  Sense strand starting at position 3381 of SEQ ID NO: 1879711
gucucauguggucgucuaa

SEQ ID NO: 1927011 - RNA, 19 nt, Artificial Sequence
  Description of Artificial Sequence: Synthetic oligonucleotide
  Antisense strand to SEQ ID NO: 1927010
uuagacgaccacaugagac

SEQ ID NO: 1927012 - RNA, 19 nt, Artificial Sequence
  Description of Artificial Sequence: Synthetic oligonucleotide
  Sense strand starting at position 3417 of SEQ ID NO: 1879711
ccagaacaaucuugacuga

SEQ ID NO: 1927013 - RNA, 19 nt, Artificial Sequence
  Description of Artificial Sequence: Synthetic oligonucleotide
  Antisense strand to SEQ ID NO: 1927012
ucagucaagauuguucugg

SEQ ID NO: 1927014 - RNA, 19 nt, Artificial Sequence
  Description of Artificial Sequence: Synthetic oligonucleotide
  Sense strand starting at position 3481 of SEQ ID NO: 1879711
agcugaacccuuugaguuu

SEQ ID NO: 1927015 - RNA, 19 nt, Artificial Sequence
  Description of Artificial Sequence: Synthetic oligonucleotide
  Antisense strand to SEQ ID NO: 1927014
aaacucaaaggguucagcu

SEQ ID NO: 1927016 - RNA, 19 nt, Artificial Sequence
  Description of Artificial Sequence: Synthetic oligonucleotide
  Sense strand starting at position 3488 of SEQ ID NO: 1879711
cccuuugaguuucugcaca

SEQ ID NO: 1927017 - RNA, 19 nt, Artificial Sequence
  Description of Artificial Sequence: Synthetic oligonucleotide
  Antisense strand to SEQ ID NO: 1927016
ugugcagaaacucaaaggg

SEQ ID NO: 1927018 - RNA, 19 nt, Artificial Sequence
  Description of Artificial Sequence: Synthetic oligonucleotide
  Sense strand starting at position 3964 of SEQ ID NO: 1879711
cugucacugcauggauaga

SEQ ID NO: 1927019 - RNA, 19 nt, Artificial Sequence
  Description of Artificial Sequence: Synthetic oligonucleotide
  Antisense strand to SEQ ID NO: 1927018
ucuauccaugcagugacag

SEQ ID NO: 1927020 - RNA, 19 nt, Artificial Sequence
  Description of Artificial Sequence: Synthetic oligonucleotide
  Sense strand starting at position 3975 of SEQ ID NO: 1879711
uggauagagcugcaugcau

SEQ ID NO: 1927021 - RNA, 19 nt, Artificial Sequence
  Description of Artificial Sequence: Synthetic oligonucleotide
  Antisense strand to SEQ ID NO: 1927020
augcaugcagcucuaucca

SEQ ID NO: 1927022 - RNA, 19 nt, Artificial Sequence
  Description of Artificial Sequence: Synthetic oligonucleotide
  Sense strand starting at position 126 of SEQ ID NO: 1879712
acagucaugucauagauau

SEQ ID NO: 1927023 - RNA, 19 nt, Artificial Sequence
  Description of Artificial Sequence: Synthetic oligonucleotide
  Antisense strand to SEQ ID NO: 1927022
auaucuaugacaugacugu

SEQ ID NO: 1927024 - RNA, 19 nt, Artificial Sequence
  Description of Artificial Sequence: Synthetic oligonucleotide
  Sense strand starting at position 297 of SEQ ID NO: 1879712
cccaucuuagucuguguua

SEQ ID NO: 1927025 - RNA, 19 nt, Artificial Sequence
  Description of Artificial Sequence: Synthetic oligonucleotide
  Antisense strand to SEQ ID NO: 1927024
uaacacagacuaagauggg

SEQ ID NO: 1927026 - RNA, 19 nt, Artificial Sequence
  Description of Artificial Sequence: Synthetic oligonucleotide
  Sense strand starting at position 299 of SEQ ID NO: 1879712
caucuuagucuguguuacu

SEQ ID NO: 1927027 - RNA, 19 nt, Artificial Sequence
  Description of Artificial Sequence: Synthetic oligonucleotide
  Antisense strand to SEQ ID NO: 1927026
aguaacacagacuaagaug

SEQ ID NO: 1927028 - RNA, 19 nt, Artificial Sequence
  Description of Artificial Sequence: Synthetic oligonucleotide
  Sense strand starting at position 300 of SEQ ID NO: 1879712
aucuuagucuguguuacua

SEQ ID NO: 1927029 - RNA, 19 nt, Artificial Sequence
  Description of Artificial Sequence: Synthetic oligonucleotide
  Antisense strand to SEQ ID NO: 1927028
uaguaacacagacuaagau

SEQ ID NO: 1927030 - RNA, 19 nt, Artificial Sequence
  Description of Artificial Sequence: Synthetic oligonucleotide
  Sense strand starting at position 366 of SEQ ID NO: 1879712
guucauuugucucacgguu

SEQ ID NO: 1927031 - RNA, 19 nt, Artificial Sequence
  Description of Artificial Sequence: Synthetic oligonucleotide
  Antisense strand to SEQ ID NO: 1927030
aaccgugagacaaaugaac

SEQ ID NO: 1927032 - RNA, 19 nt, Artificial Sequence
  Description of Artificial Sequence: Synthetic oligonucleotide
  Sense strand starting at position 394 of SEQ ID NO: 1879712
gcacaagaaucauggcauu

SEQ ID NO: 1927033 - RNA, 19 nt, Artificial Sequence
  Description of Artificial Sequence: Synthetic oligonucleotide
  Antisense strand to SEQ ID NO: 1927032
aaugccaugauucuugugc

SEQ ID NO: 1927034 - RNA, 19 nt, Artificial Sequence
  Description of Artificial Sequence: Synthetic oligonucleotide
  Sense strand starting at position 413 of SEQ ID NO: 1879712
ggcaucugcuucuagugaa

SEQ ID NO: 1927035 - RNA, 19 nt, Artificial Sequence
  Description of Artificial Sequence: Synthetic oligonucleotide
  Antisense strand to SEQ ID NO: 1927034
uucacuagaagcagaugcc

SEQ ID NO: 1927036 - RNA, 19 nt, Artificial Sequence
  Description of Artificial Sequence: Synthetic oligonucleotide
  Sense strand starting at position 442 of SEQ ID NO: 1879712
ugauuccacuuauggcaga

SEQ ID NO: 1927037 - RNA, 19 nt, Artificial Sequence
  Description of Artificial Sequence: Synthetic oligonucleotide
  Antisense strand to SEQ ID NO: 1927036
ucugccauaaguggaauca

SEQ ID NO: 1927038 - RNA, 19 nt, Artificial Sequence
  Description of Artificial Sequence: Synthetic oligonucleotide
  Sense strand starting at position 464 of SEQ ID NO: 1879712
ugaagaggagcugguauau

SEQ ID NO: 1927039 - RNA, 19 nt, Artificial Sequence
  Description of Artificial Sequence: Synthetic oligonucleotide
  Antisense strand to SEQ ID NO: 1927038
auauaccagcuccucuuca

SEQ ID NO: 1927040 - RNA, 19 nt, Artificial Sequence
  Description of Artificial Sequence: Synthetic oligonucleotide
  Sense strand starting at position 470 of SEQ ID NO: 1879712
ggagcugguauaugcauau

SEQ ID NO: 1927041 - RNA, 19 nt, Artificial Sequence
  Description of Artificial Sequence: Synthetic oligonucleotide
  Antisense strand to SEQ ID NO: 1927040
auaugcauauaccagcucc

SEQ ID NO: 1927042 - RNA, 19 nt, Artificial Sequence
  Description of Artificial Sequence: Synthetic oligonucleotide
  Sense strand starting at position 474 of SEQ ID NO: 1879712
cugguauaugcauaucaua

SEQ ID NO: 1927043 - RNA, 19 nt, Artificial Sequence
  Description of Artificial Sequence: Synthetic oligonucleotide
  Antisense strand to SEQ ID NO: 1927042
uaugauaugcauauaccag

SEQ ID NO: 1927044 - RNA, 19 nt, Artificial Sequence
  Description of Artificial Sequence: Synthetic oligonucleotide
  Sense strand starting at position 484 of SEQ ID NO: 1879712
cauaucauauggugagaga

SEQ ID NO: 1927045 - RNA, 19 nt, Artificial Sequence
  Description of Artificial Sequence: Synthetic oligonucleotide
  Antisense strand to SEQ ID NO: 1927044
ucucucaccauaugauaug

SEQ ID NO: 1927046 - RNA, 19 nt, Artificial Sequence
  Description of Artificial Sequence: Synthetic oligonucleotide
  Sense strand starting at position 576 of SEQ ID NO: 1879712
aacucacucucgugagaau

SEQ ID NO: 1927047 - RNA, 19 nt, Artificial Sequence
  Description of Artificial Sequence: Synthetic oligonucleotide
  Antisense strand to SEQ ID NO: 1927046
auucucacgagagugaguu

SEQ ID NO: 1927048 - RNA, 19 nt, Artificial Sequence
  Description of Artificial Sequence: Synthetic oligonucleotide
  Sense strand starting at position 810 of SEQ ID NO: 1879712
ucagaauccuugugucaug

SEQ ID NO: 1927049 - RNA, 19 nt, Artificial Sequence
  Description of Artificial Sequence: Synthetic oligonucleotide
  Antisense strand to SEQ ID NO: 1927048
caugacacaaggauucuga

SEQ ID NO: 1927050 - RNA, 19 nt, Artificial Sequence
  Description of Artificial Sequence: Synthetic oligonucleotide
  Sense strand starting at position 813 of SEQ ID NO: 1879712
gaauccuugugucauggca

SEQ ID NO: 1927051 - RNA, 19 nt, Artificial Sequence
  Description of Artificial Sequence: Synthetic oligonucleotide
  Antisense strand to SEQ ID NO: 1927050
ugccaugacacaaggauuc

SEQ ID NO: 1927052 - RNA, 19 nt, Artificial Sequence
  Description of Artificial Sequence: Synthetic oligonucleotide
  Sense strand starting at position 1101 of SEQ ID NO: 1879712
aggugcuggcucuguucaa

SEQ ID NO: 1927053 - RNA, 19 nt, Artificial Sequence
  Description of Artificial Sequence: Synthetic oligonucleotide
  Antisense strand to SEQ ID NO: 1927052
uugaacagagccagcaccu

SEQ ID NO: 1927054 - RNA, 19 nt, Artificial Sequence
  Description of Artificial Sequence: Synthetic oligonucleotide
  Sense strand starting at position 1353 of SEQ ID NO: 1879712
uuagcucuguuuguguuau

SEQ ID NO: 1927055 - RNA, 19 nt, Artificial Sequence
  Description of Artificial Sequence: Synthetic oligonucleotide
  Antisense strand to SEQ ID NO: 1927054
auaacacaaacagagcuaa

SEQ ID NO: 1927056 - RNA, 19 nt, Artificial Sequence
  Description of Artificial Sequence: Synthetic oligonucleotide
  Sense strand starting at position 1694 of SEQ ID NO: 1879712
gagugcaucccucagcaga

SEQ ID NO: 1927057 - RNA, 19 nt, Artificial Sequence
  Description of Artificial Sequence: Synthetic oligonucleotide
  Antisense strand to SEQ ID NO: 1927056
ucugcugagggaugcacuc

SEQ ID NO: 1927058 - RNA, 19 nt, Artificial Sequence
  Description of Artificial Sequence: Synthetic oligonucleotide
  Sense strand starting at position 1696 of SEQ ID NO: 1879712
gugcaucccucagcagaga

SEQ ID NO: 1927059 - RNA, 19 nt, Artificial Sequence
  Description of Artificial Sequence: Synthetic oligonucleotide
  Antisense strand to SEQ ID NO: 1927058
ucucugcugagggaugcac

SEQ ID NO: 1927060 - RNA, 19 nt, Artificial Sequence
  Description of Artificial Sequence: Synthetic oligonucleotide
  Sense strand starting at position 1816 of SEQ ID NO: 1879712
gcagguaguccugacgagu

SEQ ID NO: 1927061 - RNA, 19 nt, Artificial Sequence
  Description of Artificial Sequence: Synthetic oligonucleotide
  Antisense strand to SEQ ID NO: 1927060
acucgucaggacuaccugc

SEQ ID NO: 1927062 - RNA, 19 nt, Artificial Sequence
  Description of Artificial Sequence: Synthetic oligonucleotide
  Sense strand starting at position 1884 of SEQ ID NO: 1879712
gcagguuguccagaugagu

SEQ ID NO: 1927063 - RNA, 19 nt, Artificial Sequence
  Description of Artificial Sequence: Synthetic oligonucleotide
  Antisense strand to SEQ ID NO: 1927062
acucaucuggacaaccugc

SEQ ID NO: 1927064 - RNA, 19 nt, Artificial Sequence
  Description of Artificial Sequence: Synthetic oligonucleotide
  Sense strand starting at position 2024 of SEQ ID NO: 1879712
gcaggucauacugacaagu

SEQ ID NO: 1927065 - RNA, 19 nt, Artificial Sequence
  Description of Artificial Sequence: Synthetic oligonucleotide
  Antisense strand to SEQ ID NO: 1927064
acuugucaguaugaccugc

SEQ ID NO: 1927066 - RNA, 19 nt, Artificial Sequence
  Description of Artificial Sequence: Synthetic oligonucleotide
  Sense strand starting at position 2026 of SEQ ID NO: 1879712
aggucauacugacaaguag

SEQ ID NO: 1927067 - RNA, 19 nt, Artificial Sequence
  Description of Artificial Sequence: Synthetic oligonucleotide
  Antisense strand to SEQ ID NO: 1927066
cuacuugucaguaugaccu

SEQ ID NO: 1927068 - RNA, 19 nt, Artificial Sequence
  Description of Artificial Sequence: Synthetic oligonucleotide
  Sense strand starting at position 2085 of SEQ ID NO: 1879712
uccugacaucuguaugagu

SEQ ID NO: 1927069 - RNA, 19 nt, Artificial Sequence
  Description of Artificial Sequence: Synthetic oligonucleotide
  Antisense strand to SEQ ID NO: 1927068
acucauacagaugucagga

SEQ ID NO: 1927070 - RNA, 19 nt, Artificial Sequence
  Description of Artificial Sequence: Synthetic oligonucleotide
  Sense strand starting at position 2096 of SEQ ID NO: 1879712
guaugagucuagcuaggua

SEQ ID NO: 1927071 - RNA, 19 nt, Artificial Sequence
  Description of Artificial Sequence: Synthetic oligonucleotide
  Antisense strand to SEQ ID NO: 1927070
uaccuagcuagacucauac

SEQ ID NO: 1927072 - RNA, 19 nt, Artificial Sequence
  Description of Artificial Sequence: Synthetic oligonucleotide
  Sense strand starting at position 2099 of SEQ ID NO: 1879712
ugagucuagcuagguaaca

SEQ ID NO: 1927073 - RNA, 19 nt, Artificial Sequence
  Description of Artificial Sequence: Synthetic oligonucleotide
  Antisense strand to SEQ ID NO: 1927072
uguuaccuagcuagacuca

SEQ ID NO: 1927074 - RNA, 19 nt, Artificial Sequence
  Description of Artificial Sequence: Synthetic oligonucleotide
  Sense strand starting at position 2100 of SEQ ID NO: 1879712
gagucuagcuagguaacau

SEQ ID NO: 1927075 - RNA, 19 nt, Artificial Sequence
  Description of Artificial Sequence: Synthetic oligonucleotide
  Antisense strand to SEQ ID NO: 1927074
auguuaccuagcuagacuc

SEQ ID NO: 1927076 - RNA, 19 nt, Artificial Sequence
  Description of Artificial Sequence: Synthetic oligonucleotide
  Sense strand starting at position 2140 of SEQ ID NO: 1879712
gaagaaguguguucugauu

SEQ ID NO: 1927077 - RNA, 19 nt, Artificial Sequence
  Description of Artificial Sequence: Synthetic oligonucleotide
  Antisense strand to SEQ ID NO: 1927076
aaucagaacacacuucuuc

SEQ ID NO: 1927078 - RNA, 19 nt, Artificial Sequence
  Description of Artificial Sequence: Synthetic oligonucleotide
  Sense strand starting at position 2146 of SEQ ID NO: 1879712
guguguucugauuggccca

SEQ ID NO: 1927079 - RNA, 19 nt, Artificial Sequence
  Description of Artificial Sequence: Synthetic oligonucleotide
  Antisense strand to SEQ ID NO: 1927078
ugggccaaucagaacacac

SEQ ID NO: 1927080 - RNA, 19 nt, Artificial Sequence
  Description of Artificial Sequence: Synthetic oligonucleotide
  Sense strand starting at position 2278 of SEQ ID NO: 1879712
gguugcguuucacugggaa

SEQ ID NO: 1927081 - RNA, 19 nt, Artificial Sequence
  Description of Artificial Sequence: Synthetic oligonucleotide
  Antisense strand to SEQ ID NO: 1927080
uucccagugaaacgcaacc

SEQ ID NO: 1927082 - RNA, 19 nt, Artificial Sequence
  Description of Artificial Sequence: Synthetic oligonucleotide
  Sense strand starting at position 2496 of SEQ ID NO: 1879712
ugcccugagugcuugggua

SEQ ID NO: 1927083 - RNA, 19 nt, Artificial Sequence
  Description of Artificial Sequence: Synthetic oligonucleotide
  Antisense strand to SEQ ID NO: 1927082
uacccaagcacucagggca

SEQ ID NO: 1927084 - RNA, 19 nt, Artificial Sequence
  Description of Artificial Sequence: Synthetic oligonucleotide
  Sense strand starting at position 2890 of SEQ ID NO: 1879712
acagucuuccuccaugaag

SEQ ID NO: 1927085 - RNA, 19 nt, Artificial Sequence
  Description of Artificial Sequence: Synthetic oligonucleotide
  Antisense strand to SEQ ID NO: 1927084
cuucauggaggaagacugu

SEQ ID NO: 1927086 - RNA, 19 nt, Artificial Sequence
  Description of Artificial Sequence: Synthetic oligonucleotide
  Sense strand starting at position 2914 of SEQ ID NO: 1879712
ucauaugcucuagaaguua

SEQ ID NO: 1927087 - RNA, 19 nt, Artificial Sequence
  Description of Artificial Sequence: Synthetic oligonucleotide
  Antisense strand to SEQ ID NO: 1927086
uaacuucuagagcauauga

SEQ ID NO: 1927088 - RNA, 19 nt, Artificial Sequence
  Description of Artificial Sequence: Synthetic oligonucleotide
  Sense strand starting at position 2925 of SEQ ID NO: 1879712
agaaguuacuccuccauga

SEQ ID NO: 1927089 - RNA, 19 nt, Artificial Sequence
  Description of Artificial Sequence: Synthetic oligonucleotide
  Antisense strand to SEQ ID NO: 1927088
ucauggaggaguaacuucu

SEQ ID NO: 1927090 - RNA, 19 nt, Artificial Sequence
  Description of Artificial Sequence: Synthetic oligonucleotide
  Sense strand starting at position 3170 of SEQ ID NO: 1879712
gccauaccaccucgaacau

SEQ ID NO: 1927091 - RNA, 19 nt, Artificial Sequence
  Description of Artificial Sequence: Synthetic oligonucleotide
  Antisense strand to SEQ ID NO: 1927090
auguucgaggugguauggc

SEQ ID NO: 1927092 - RNA, 19 nt, Artificial Sequence
  Description of Artificial Sequence: Synthetic oligonucleotide
  Sense strand starting at position 3653 of SEQ ID NO: 1879712
agacuuuauugagcagaag

SEQ ID NO: 1927093 - RNA, 19 nt, Artificial Sequence
  Description of Artificial Sequence: Synthetic oligonucleotide
  Antisense strand to SEQ ID NO: 1927092
cuucugcucaauaaagucu

SEQ ID NO: 1927094 - RNA, 19 nt, Artificial Sequence
  Description of Artificial Sequence: Synthetic oligonucleotide
  Sense strand starting at position 3785 of SEQ ID NO: 1879712
ccaauaugugcauaaugag

SEQ ID NO: 1927095 - RNA, 19 nt, Artificial Sequence
  Description of Artificial Sequence: Synthetic oligonucleotide
  Antisense strand to SEQ ID NO: 1927094
cucauuaugcacauauugg

SEQ ID NO: 1927096 - RNA, 19 nt, Artificial Sequence
  Description of Artificial Sequence: Synthetic oligonucleotide
  Sense strand starting at position 3788 of SEQ ID NO: 1879712
auaugugcauaaugagagu

SEQ ID NO: 1927097 - RNA, 19 nt, Artificial Sequence
  Description of Artificial Sequence: Synthetic oligonucleotide
  Antisense strand to SEQ ID NO: 1927096
acucucauuaugcacauau

SEQ ID NO: 1927098 - RNA, 19 nt, Artificial Sequence
  Description of Artificial Sequence: Synthetic oligonucleotide
  Sense strand starting at position 3791 of SEQ ID NO: 1879712
ugugcauaaugagaguacu

SEQ ID NO: 1927099 - RNA, 19 nt, Artificial Sequence
  Description of Artificial Sequence: Synthetic oligonucleotide
  Antisense strand to SEQ ID NO: 1927098
aguacucucauuaugcaca

SEQ ID NO: 1927100 - RNA, 19 nt, Artificial Sequence
  Description of Artificial Sequence: Synthetic oligonucleotide
  Sense strand starting at position 3797 of SEQ ID NO: 1879712
uaaugagaguacuagaaga

SEQ ID NO: 1927101 - RNA, 19 nt, Artificial Sequence
  Description of Artificial Sequence: Synthetic oligonucleotide
  Antisense strand to SEQ ID NO: 1927100
ucuucuaguacucucauua

SEQ ID NO: 1927102 - RNA, 19 nt, Artificial Sequence
  Description of Artificial Sequence: Synthetic oligonucleotide
  Sense strand starting at position 97 of SEQ ID NO: 1879713
uggugaaagaccggguauu

SEQ ID NO: 1927103 - RNA, 19 nt, Artificial Sequence
  Description of Artificial Sequence: Synthetic oligonucleotide
  Antisense strand to SEQ ID NO: 1927102
aauacccggucuuucacca

SEQ ID NO: 1927104 - RNA, 19 nt, Artificial Sequence
  Description of Artificial Sequence: Synthetic oligonucleotide
  Sense strand starting at position 119 of SEQ ID NO: 1879713
cccauaagaucaguagcaa

SEQ ID NO: 1927105 - RNA, 19 nt, Artificial Sequence
  Description of Artificial Sequence: Synthetic oligonucleotide
  Antisense strand to SEQ ID NO: 1927104
uugcuacugaucuuauggg

SEQ ID NO: 1927106 - RNA, 19 nt, Artificial Sequence
  Description of Artificial Sequence: Synthetic oligonucleotide
  Sense strand starting at position 280 of SEQ ID NO: 1879713
acaugaucuugcguauuaa

SEQ ID NO: 1927107 - RNA, 19 nt, Artificial Sequence
  Description of Artificial Sequence: Synthetic oligonucleotide
  Antisense strand to SEQ ID NO: 1927106
uuaauacgcaagaucaugu

SEQ ID NO: 1927108 - RNA, 19 nt, Artificial Sequence
  Description of Artificial Sequence: Synthetic oligonucleotide
  Sense strand starting at position 281 of SEQ ID NO: 1879713
caugaucuugcguauuaaa

SEQ ID NO: 1927109 - RNA, 19 nt, Artificial Sequence
  Description of Artificial Sequence: Synthetic oligonucleotide
  Antisense strand to SEQ ID NO: 1927108
uuuaauacgcaagaucaug

SEQ ID NO: 1927110 - RNA, 19 nt, Artificial Sequence
  Description of Artificial Sequence: Synthetic oligonucleotide
  Sense strand starting at position 971 of SEQ ID NO: 1879713
aguauuagagaagaugugu

SEQ ID NO: 1927111 - RNA, 19 nt, Artificial Sequence
  Description of Artificial Sequence: Synthetic oligonucleotide
  Antisense strand to SEQ ID NO: 1927110
acacaucuucucuaauacu

SEQ ID NO: 1927112 - RNA, 19 nt, Artificial Sequence
  Description of Artificial Sequence: Synthetic oligonucleotide
  Sense strand starting at position 1091 of SEQ ID NO: 1879713
auccaaguccuagguuuau

SEQ ID NO: 1927113 - RNA, 19 nt, Artificial Sequence
  Description of Artificial Sequence: Synthetic oligonucleotide
  Antisense strand to SEQ ID NO: 1927112
auaaaccuaggacuuggau

SEQ ID NO: 1927114 - RNA, 19 nt, Artificial Sequence
  Description of Artificial Sequence: Synthetic oligonucleotide
  Sense strand starting at position 1100 of SEQ ID NO: 1879713
cuagguuuauguccaagag

SEQ ID NO: 1927115 - RNA, 19 nt, Artificial Sequence
  Description of Artificial Sequence: Synthetic oligonucleotide
  Antisense strand to SEQ ID NO: 1927114
cucuuggacauaaaccuag

SEQ ID NO: 1927116 - RNA, 19 nt, Artificial Sequence
  Description of Artificial Sequence: Synthetic oligonucleotide
  Sense strand starting at position 1304 of SEQ ID NO: 1879713
cuuguaaagguaugcuaag

SEQ ID NO: 1927117 - RNA, 19 nt, Artificial Sequence
  Description of Artificial Sequence: Synthetic oligonucleotide
  Antisense strand to SEQ ID NO: 1927116
cuuagcauaccuuuacaag

SEQ ID NO: 1927118 - RNA, 19 nt, Artificial Sequence
  Description of Artificial Sequence: Synthetic oligonucleotide
  Sense strand starting at position 1305 of SEQ ID NO: 1879713
uuguaaagguaugcuaagu

SEQ ID NO: 1927119 - RNA, 19 nt, Artificial Sequence
  Description of Artificial Sequence: Synthetic oligonucleotide
  Antisense strand to SEQ ID NO: 1927118
acuuagcauaccuuuacaa

SEQ ID NO: 1927120 - RNA, 19 nt, Artificial Sequence
  Description of Artificial Sequence: Synthetic oligonucleotide
  Sense strand starting at position 1310 of SEQ ID NO: 1879713
aagguaugcuaagugaaag

SEQ ID NO: 1927121 - RNA, 19 nt, Artificial Sequence
  Description of Artificial Sequence: Synthetic oligonucleotide
  Antisense strand to SEQ ID NO: 1927120
cuuucacuuagcauaccuu

SEQ ID NO: 1927122 - RNA, 19 nt, Artificial Sequence
  Description of Artificial Sequence: Synthetic oligonucleotide
  Sense strand starting at position 1311 of SEQ ID NO: 1879713
agguaugcuaagugaaaga

SEQ ID NO: 1927123 - RNA, 19 nt, Artificial Sequence
  Description of Artificial Sequence: Synthetic oligonucleotide
  Antisense strand to SEQ ID NO: 1927122
ucuuucacuuagcauaccu

SEQ ID NO: 1927124 - RNA, 19 nt, Artificial Sequence
  Description of Artificial Sequence: Synthetic oligonucleotide
  Sense strand starting at position 1508 of SEQ ID NO: 1879713
ugaaauugccaacagugau

SEQ ID NO: 1927125 - RNA, 19 nt, Artificial Sequence
  Description of Artificial Sequence: Synthetic oligonucleotide
  Antisense strand to SEQ ID NO: 1927124
aucacuguuggcaauuuca

SEQ ID NO: 1927126 - RNA, 19 nt, Artificial Sequence
  Description of Artificial Sequence: Synthetic oligonucleotide
  Sense strand starting at position 2000 of SEQ ID NO: 1879713
cugguuaacugguuaauac

SEQ ID NO: 1927127 - RNA, 19 nt, Artificial Sequence
  Description of Artificial Sequence: Synthetic oligonucleotide
  Antisense strand to SEQ ID NO: 1927126
guauuaaccaguuaaccag

SEQ ID NO: 1927128 - RNA, 19 nt, Artificial Sequence
  Description of Artificial Sequence: Synthetic oligonucleotide
  Sense strand starting at position 2001 of SEQ ID NO: 1879713
ugguuaacugguuaauacu

SEQ ID NO: 1927129 - RNA, 19 nt, Artificial Sequence
  Description of Artificial Sequence: Synthetic oligonucleotide
  Antisense strand to SEQ ID NO: 1927128
aguauuaaccaguuaacca

SEQ ID NO: 1927130 - RNA, 19 nt, Artificial Sequence
  Description of Artificial Sequence: Synthetic oligonucleotide
  Sense strand starting at position 2010 of SEQ ID NO: 1879713
gguuaauacugguuaacag

SEQ ID NO: 1927131 - RNA, 19 nt, Artificial Sequence
  Description of Artificial Sequence: Synthetic oligonucleotide
  Antisense strand to SEQ ID NO: 1927130
cuguuaaccaguauuaacc

SEQ ID NO: 1927132 - RNA, 19 nt, Artificial Sequence
  Description of Artificial Sequence: Synthetic oligonucleotide
  Sense strand starting at position 2011 of SEQ ID NO: 1879713
guuaauacugguuaacagu

SEQ ID NO: 1927133 - RNA, 19 nt, Artificial Sequence
  Description of Artificial Sequence: Synthetic oligonucleotide
  Antisense strand to SEQ ID NO: 1927132
acuguuaaccaguauuaac

SEQ ID NO: 1927134 - RNA, 19 nt, Artificial Sequence
  Description of Artificial Sequence: Synthetic oligonucleotide
  Sense strand starting at position 2048 of SEQ ID NO: 1879713
gcuugcauaggcuaaagua

SEQ ID NO: 1927135 - RNA, 19 nt, Artificial Sequence
  Description of Artificial Sequence: Synthetic oligonucleotide
  Antisense strand to SEQ ID NO: 1927134
uacuuuagccuaugcaagc

SEQ ID NO: 1927136 - RNA, 19 nt, Artificial Sequence
  Description of Artificial Sequence: Synthetic oligonucleotide
  Sense strand starting at position 2058 of SEQ ID NO: 1879713
gcuaaaguacuuugaggaa

SEQ ID NO: 1927137 - RNA, 19 nt, Artificial Sequence
  Description of Artificial Sequence: Synthetic oligonucleotide
  Antisense strand to SEQ ID NO: 1927136
uuccucaaaguacuuuagc

SEQ ID NO: 1927138 - RNA, 19 nt, Artificial Sequence
  Description of Artificial Sequence: Synthetic oligonucleotide
  Sense strand starting at position 2108 of SEQ ID NO: 1879713
gcuagagacugagggauuu

SEQ ID NO: 1927139 - RNA, 19 nt, Artificial Sequence
  Description of Artificial Sequence: Synthetic oligonucleotide
  Antisense strand to SEQ ID NO: 1927138
aaaucccucagucucuagc

SEQ ID NO: 1927140 - RNA, 19 nt, Artificial Sequence
  Description of Artificial Sequence: Synthetic oligonucleotide
  Sense strand starting at position 2153 of SEQ ID NO: 1879713
accagucacuucucuuuga

SEQ ID NO: 1927141 - RNA, 19 nt, Artificial Sequence
  Description of Artificial Sequence: Synthetic oligonucleotide
  Antisense strand to SEQ ID NO: 1927140
ucaaagagaagugacuggu

SEQ ID NO: 1927142 - RNA, 19 nt, Artificial Sequence
  Description of Artificial Sequence: Synthetic oligonucleotide
  Sense strand starting at position 2402 of SEQ ID NO: 1879713
gcugauuccuaaucagcaa

SEQ ID NO: 1927143 - RNA, 19 nt, Artificial Sequence
  Description of Artificial Sequence: Synthetic oligonucleotide
  Antisense strand to SEQ ID NO: 1927142
uugcugauuaggaaucagc

SEQ ID NO: 1927144 - RNA, 19 nt, Artificial Sequence
  Description of Artificial Sequence: Synthetic oligonucleotide
  Sense strand starting at position 2505 of SEQ ID NO: 1879713
ugguaagcaccauaggauu

SEQ ID NO: 1927145 - RNA, 19 nt, Artificial Sequence
  Description of Artificial Sequence: Synthetic oligonucleotide
  Antisense strand to SEQ ID NO: 1927144
aauccuauggugcuuacca

SEQ ID NO: 1927146 - RNA, 19 nt, Artificial Sequence
  Description of Artificial Sequence: Synthetic oligonucleotide
  Sense strand starting at position 2617 of SEQ ID NO: 1879713
cgggcuuagccauauaauu

SEQ ID NO: 1927147 - RNA, 19 nt, Artificial Sequence
  Description of Artificial Sequence: Synthetic oligonucleotide
  Antisense strand to SEQ ID NO: 1927146
aauuauauggcuaagcccg

SEQ ID NO: 1927148 - RNA, 19 nt, Artificial Sequence
  Description of Artificial Sequence: Synthetic oligonucleotide
  Sense strand starting at position 2803 of SEQ ID NO: 1879713
cugcaucuggcuuauguga

SEQ ID NO: 1927149 - RNA, 19 nt, Artificial Sequence
  Description of Artificial Sequence: Synthetic oligonucleotide
  Antisense strand to SEQ ID NO: 1927148
ucacauaagccagaugcag

SEQ ID NO: 1927150 - RNA, 19 nt, Artificial Sequence
  Description of Artificial Sequence: Synthetic oligonucleotide
  Sense strand starting at position 2810 of SEQ ID NO: 1879713
uggcuuaugugauuuguuu

SEQ ID NO: 1927151 - RNA, 19 nt, Artificial Sequence
  Description of Artificial Sequence: Synthetic oligonucleotide
  Antisense strand to SEQ ID NO: 1927150
aaacaaaucacauaagcca

SEQ ID NO: 1927152 - RNA, 19 nt, Artificial Sequence
  Description of Artificial Sequence: Synthetic oligonucleotide
  Sense strand starting at position 2916 of SEQ ID NO: 1879713
guuagaaucuagccuccau

SEQ ID NO: 1927153 - RNA, 19 nt, Artificial Sequence
  Description of Artificial Sequence: Synthetic oligonucleotide
  Antisense strand to SEQ ID NO: 1927152
auggaggcuagauucuaac

SEQ ID NO: 1927154 - RNA, 19 nt, Artificial Sequence
  Description of Artificial Sequence: Synthetic oligonucleotide
  Sense strand starting at position 2945 of SEQ ID NO: 1879713
agguuaucccaguggagaa

SEQ ID NO: 1927155 - RNA, 19 nt, Artificial Sequence
  Description of Artificial Sequence: Synthetic oligonucleotide
  Antisense strand to SEQ ID NO: 1927154
uucuccacugggauaaccu

SEQ ID NO: 1927156 - RNA, 19 nt, Artificial Sequence
  Description of Artificial Sequence: Synthetic oligonucleotide
  Sense strand starting at position 2946 of SEQ ID NO: 1879713
gguuaucccaguggagaaa

SEQ ID NO: 1927157 - RNA, 19 nt, Artificial Sequence
  Description of Artificial Sequence: Synthetic oligonucleotide
  Antisense strand to SEQ ID NO: 1927156
uuucuccacugggauaacc

SEQ ID NO: 1927158 - RNA, 19 nt, Artificial Sequence
  Description of Artificial Sequence: Synthetic oligonucleotide
  Sense strand starting at position 3092 of SEQ ID NO: 1879713
ugaagaacuguucagucga

SEQ ID NO: 1927159 - RNA, 19 nt, Artificial Sequence
  Description of Artificial Sequence: Synthetic oligonucleotide
  Antisense strand to SEQ ID NO: 1927158
ucgacugaacaguucuuca

SEQ ID NO: 1927160 - RNA, 19 nt, Artificial Sequence
  Description of Artificial Sequence: Synthetic oligonucleotide
  Sense strand starting at position 3103 of SEQ ID NO: 1879713
ucagucgacccagauaauu

SEQ ID NO: 1927161 - RNA, 19 nt, Artificial Sequence
  Description of Artificial Sequence: Synthetic oligonucleotide
  Antisense strand to SEQ ID NO: 1927160
aauuaucugggucgacuga

SEQ ID NO: 1927162 - RNA, 19 nt, Artificial Sequence
  Description of Artificial Sequence: Synthetic oligonucleotide
  Sense strand starting at position 3122 of SEQ ID NO: 1879713
gccagaaaucacuauuguu

SEQ ID NO: 1927163 - RNA, 19 nt, Artificial Sequence
  Description of Artificial Sequence: Synthetic oligonucleotide
  Antisense strand to SEQ ID NO: 1927162
aacaauagugauuucuggc

SEQ ID NO: 1927164 - RNA, 19 nt, Artificial Sequence
  Description of Artificial Sequence: Synthetic oligonucleotide
  Sense strand starting at position 3154 of SEQ ID NO: 1879713
auugaagugguuugagaua

SEQ ID NO: 1927165 - RNA, 19 nt, Artificial Sequence
  Description of Artificial Sequence: Synthetic oligonucleotide
  Antisense strand to SEQ ID NO: 1927164
uaucucaaaccacuucaau

SEQ ID NO: 1927166 - RNA, 19 nt, Artificial Sequence
  Description of Artificial Sequence: Synthetic oligonucleotide
  Sense strand starting at position 3159 of SEQ ID NO: 1879713
agugguuugagauacagca

SEQ ID NO: 1927167 - RNA, 19 nt, Artificial Sequence
  Description of Artificial Sequence: Synthetic oligonucleotide
  Antisense strand to SEQ ID NO: 1927166
ugcuguaucucaaaccacu

SEQ ID NO: 1927168 - RNA, 19 nt, Artificial Sequence
  Description of Artificial Sequence: Synthetic oligonucleotide
  Sense strand starting at position 3161 of SEQ ID NO: 1879713
ugguuugagauacagcaau

SEQ ID NO: 1927169 - RNA, 19 nt, Artificial Sequence
  Description of Artificial Sequence: Synthetic oligonucleotide
  Antisense strand to SEQ ID NO: 1927168
auugcuguaucucaaacca

SEQ ID NO: 1927170 - RNA, 19 nt, Artificial Sequence
  Description of Artificial Sequence: Synthetic oligonucleotide
  Sense strand starting at position 3216 of SEQ ID NO: 1879713
acaaguaagaugggccaaa

SEQ ID NO: 1927171 - RNA, 19 nt, Artificial Sequence
  Description of Artificial Sequence: Synthetic oligonucleotide
  Antisense strand to SEQ ID NO: 1927170
uuuggcccaucuuacuugu

SEQ ID NO: 1927172 - RNA, 19 nt, Artificial Sequence
  Description of Artificial Sequence: Synthetic oligonucleotide
  Sense strand starting at position 3458 of SEQ ID NO: 1879713
guauuagagacaggguguu

SEQ ID NO: 1927173 - RNA, 19 nt, Artificial Sequence
  Description of Artificial Sequence: Synthetic oligonucleotide
  Antisense strand to SEQ ID NO: 1927172
aacacccugucucuaauac

SEQ ID NO: 1927174 - RNA, 19 nt, Artificial Sequence
  Description of Artificial Sequence: Synthetic oligonucleotide
  Sense strand starting at position 3737 of SEQ ID NO: 1879713
augcuauuuguugauacgu

SEQ ID NO: 1927175 - RNA, 19 nt, Artificial Sequence
  Description of Artificial Sequence: Synthetic oligonucleotide
  Antisense strand to SEQ ID NO: 1927174
acguaucaacaaauagcau

SEQ ID NO: 1927176 - RNA, 19 nt, Artificial Sequence
  Description of Artificial Sequence: Synthetic oligonucleotide
  Sense strand starting at position 3745 of SEQ ID NO: 1879713
uguugauacguuuaugaau

SEQ ID NO: 1927177 - RNA, 19 nt, Artificial Sequence
  Description of Artificial Sequence: Synthetic oligonucleotide
  Antisense strand to SEQ ID NO: 1927176
auucauaaacguaucaaca

SEQ ID NO: 1927178 - RNA, 19 nt, Artificial Sequence
  Description of Artificial Sequence: Synthetic oligonucleotide
  Sense strand starting at position 3773 of SEQ ID NO: 1879713
guguuaauauaagcuaucu

SEQ ID NO: 1927179 - RNA, 19 nt, Artificial Sequence
  Description of Artificial Sequence: Synthetic oligonucleotide
  Antisense strand to SEQ ID NO: 1927178
agauagcuuauauuaacac

SEQ ID NO: 1927180 - RNA, 19 nt, Artificial Sequence
  Description of Artificial Sequence: Synthetic oligonucleotide
  Sense strand starting at position 3856 of SEQ ID NO: 1879713
uagugaaagguagguacaa

SEQ ID NO: 1927181 - RNA, 19 nt, Artificial Sequence
  Description of Artificial Sequence: Synthetic oligonucleotide
  Antisense strand to SEQ ID NO: 1927180
uuguaccuaccuuucacua

SEQ ID NO: 1927182 - RNA, 19 nt, Artificial Sequence
  Description of Artificial Sequence: Synthetic oligonucleotide
  Sense strand starting at position 29 of SEQ ID NO: 1879714
auauuuacugcuugccgua

SEQ ID NO: 1927183 - RNA, 19 nt, Artificial Sequence
  Description of Artificial Sequence: Synthetic oligonucleotide
  Antisense strand to SEQ ID NO: 1927182
uacggcaagcaguaaauau

SEQ ID NO: 1927184 - RNA, 19 nt, Artificial Sequence
  Description of Artificial Sequence: Synthetic oligonucleotide
  Sense strand starting at position 113 of SEQ ID NO: 1879714
acuccaguccuuuaugcua

SEQ ID NO: 1927185 - RNA, 19 nt, Artificial Sequence
  Description of Artificial Sequence: Synthetic oligonucleotide
  Antisense strand to SEQ ID NO: 1927184
uagcauaaaggacuggagu

SEQ ID NO: 1927186 - RNA, 19 nt, Artificial Sequence
  Description of Artificial Sequence: Synthetic oligonucleotide
  Sense strand starting at position 174 of SEQ ID NO: 1879714
ccagucaugguuuaugaca

SEQ ID NO: 1927187 - RNA, 19 nt, Artificial Sequence
  Description of Artificial Sequence: Synthetic oligonucleotide
  Antisense strand to SEQ ID NO: 1927186
ugucauaaaccaugacugg

SEQ ID NO: 1927188 - RNA, 19 nt, Artificial Sequence
  Description of Artificial Sequence: Synthetic oligonucleotide
  Sense strand starting at position 185 of SEQ ID NO: 1879714
uuaugacacucaguuauga

SEQ ID NO: 1927189 - RNA, 19 nt, Artificial Sequence
  Description of Artificial Sequence: Synthetic oligonucleotide
  Antisense strand to SEQ ID NO: 1927188
ucauaacugagugucauaa

SEQ ID NO: 1927190 - RNA, 19 nt, Artificial Sequence
  Description of Artificial Sequence: Synthetic oligonucleotide
  Sense strand starting at position 782 of SEQ ID NO: 1879714
uugggaacauacucugagu

SEQ ID NO: 1927191 - RNA, 19 nt, Artificial Sequence
  Description of Artificial Sequence: Synthetic oligonucleotide
  Antisense strand to SEQ ID NO: 1927190
acucagaguauguucccaa

SEQ ID NO: 1927192 - RNA, 19 nt, Artificial Sequence
  Description of Artificial Sequence: Synthetic oligonucleotide
  Sense strand starting at position 788 of SEQ ID NO: 1879714
acauacucugagugaucau

SEQ ID NO: 1927193 - RNA, 19 nt, Artificial Sequence
  Description of Artificial Sequence: Synthetic oligonucleotide
  Antisense strand to SEQ ID NO: 1927192
augaucacucagaguaugu

SEQ ID NO: 1927194 - RNA, 19 nt, Artificial Sequence
  Description of Artificial Sequence: Synthetic oligonucleotide
  Sense strand starting at position 799 of SEQ ID NO: 1879714
gugaucauacuaugagguu

SEQ ID NO: 1927195 - RNA, 19 nt, Artificial Sequence
  Description of Artificial Sequence: Synthetic oligonucleotide
  Antisense strand to SEQ ID NO: 1927194
aaccucauaguaugaucac

SEQ ID NO: 1927196 - RNA, 19 nt, Artificial Sequence
  Description of Artificial Sequence: Synthetic oligonucleotide
  Sense strand starting at position 996 of SEQ ID NO: 1879714
aagagaagcgaucagguuu

SEQ ID NO: 1927197 - RNA, 19 nt, Artificial Sequence
  Description of Artificial Sequence: Synthetic oligonucleotide
  Antisense strand to SEQ ID NO: 1927196
aaaccugaucgcuucucuu

SEQ ID NO: 1927198 - RNA, 19 nt, Artificial Sequence
  Description of Artificial Sequence: Synthetic oligonucleotide
  Sense strand starting at position 1029 of SEQ ID NO: 1879714
acguguagucaacaggacu

SEQ ID NO: 1927199 - RNA, 19 nt, Artificial Sequence
  Description of Artificial Sequence: Synthetic oligonucleotide
  Antisense strand to SEQ ID NO: 1927198
aguccuguugacuacacgu

SEQ ID NO: 1927200 - RNA, 19 nt, Artificial Sequence
  Description of Artificial Sequence: Synthetic oligonucleotide
  Sense strand starting at position 1187 of SEQ ID NO: 1879714
cauguuuaaguuugagaug

SEQ ID NO: 1927201 - RNA, 19 nt, Artificial Sequence
  Description of Artificial Sequence: Synthetic oligonucleotide
  Antisense strand to SEQ ID NO: 1927200
caucucaaacuuaaacaug

SEQ ID NO: 1927202 - RNA, 19 nt, Artificial Sequence
  Description of Artificial Sequence: Synthetic oligonucleotide
  Sense strand starting at position 1296 of SEQ ID NO: 1879714
uaucuaaagccuugagagu

SEQ ID NO: 1927203 - RNA, 19 nt, Artificial Sequence
  Description of Artificial Sequence: Synthetic oligonucleotide
  Antisense strand to SEQ ID NO: 1927202
acucucaaggcuuuagaua

SEQ ID NO: 1927204 - RNA, 19 nt, Artificial Sequence
  Description of Artificial Sequence: Synthetic oligonucleotide
  Sense strand starting at position 1375 of SEQ ID NO: 1879714
aaggaugagcccugggaua

SEQ ID NO: 1927205 - RNA, 19 nt, Artificial Sequence
  Description of Artificial Sequence: Synthetic oligonucleotide
  Antisense strand to SEQ ID NO: 1927204
uaucccagggcucauccuu

SEQ ID NO: 1927206 - RNA, 19 nt, Artificial Sequence
  Description of Artificial Sequence: Synthetic oligonucleotide
  Sense strand starting at position 1377 of SEQ ID NO: 1879714
ggaugagcccugggauauu

SEQ ID NO: 1927207 - RNA, 19 nt, Artificial Sequence
  Description of Artificial Sequence: Synthetic oligonucleotide
  Antisense strand to SEQ ID NO: 1927206
aauaucccagggcucaucc

SEQ ID NO: 1927208 - RNA, 19 nt, Artificial Sequence
  Description of Artificial Sequence: Synthetic oligonucleotide
  Sense strand starting at position 1463 of SEQ ID NO: 1879714
acauaaaugcugcaaguua

SEQ ID NO: 1927209 - RNA, 19 nt, Artificial Sequence
  Description of Artificial Sequence: Synthetic oligonucleotide
  Antisense strand to SEQ ID NO: 1927208
uaacuugcagcauuuaugu

SEQ ID NO: 1927210 - RNA, 19 nt, Artificial Sequence
  Description of Artificial Sequence: Synthetic oligonucleotide
  Sense strand starting at position 1740 of SEQ ID NO: 1879714
aggauuucuugccaugaga

SEQ ID NO: 1927211 - RNA, 19 nt, Artificial Sequence
  Description of Artificial Sequence: Synthetic oligonucleotide
  Antisense strand to SEQ ID NO: 1927210
ucucauggcaagaaauccu

SEQ ID NO: 1927212 - RNA, 19 nt, Artificial Sequence
  Description of Artificial Sequence: Synthetic oligonucleotide
  Sense strand starting at position 1807 of SEQ ID NO: 1879714
ugggucaacuuccuguuua

SEQ ID NO: 1927213 - RNA, 19 nt, Artificial Sequence
  Description of Artificial Sequence: Synthetic oligonucleotide
  Antisense strand to SEQ ID NO: 1927212
uaaacaggaaguugaccca

SEQ ID NO: 1927214 - RNA, 19 nt, Artificial Sequence
  Description of Artificial Sequence: Synthetic oligonucleotide
  Sense strand starting at position 2017 of SEQ ID NO: 1879714
gugugagcugugucuuguu

SEQ ID NO: 1927215 - RNA, 19 nt, Artificial Sequence
  Description of Artificial Sequence: Synthetic oligonucleotide
  Antisense strand to SEQ ID NO: 1927214
aacaagacacagcucacac

SEQ ID NO: 1927216 - RNA, 19 nt, Artificial Sequence
  Description of Artificial Sequence: Synthetic oligonucleotide
  Sense strand starting at position 2122 of SEQ ID NO: 1879714
caggaauucuuucuguaga

SEQ ID NO: 1927217 - RNA, 19 nt, Artificial Sequence
  Description of Artificial Sequence: Synthetic oligonucleotide
  Antisense strand to SEQ ID NO: 1927216
ucuacagaaagaauuccug

SEQ ID NO: 1927218 - RNA, 19 nt, Artificial Sequence
  Description of Artificial Sequence: Synthetic oligonucleotide
  Sense strand starting at position 2124 of SEQ ID NO: 1879714
ggaauucuuucuguagaug

SEQ ID NO: 1927219 - RNA, 19 nt, Artificial Sequence
  Description of Artificial Sequence: Synthetic oligonucleotide
  Antisense strand to SEQ ID NO: 1927218
caucuacagaaagaauucc

SEQ ID NO: 1927220 - RNA, 19 nt, Artificial Sequence
  Description of Artificial Sequence: Synthetic oligonucleotide
  Sense strand starting at position 2135 of SEQ ID NO: 1879714
uguagaugccaagaaugua

SEQ ID NO: 1927221 - RNA, 19 nt, Artificial Sequence
  Description of Artificial Sequence: Synthetic oligonucleotide
  Antisense strand to SEQ ID NO: 1927220
uacauucuuggcaucuaca

SEQ ID NO: 1927222 - RNA, 19 nt, Artificial Sequence
  Description of Artificial Sequence: Synthetic oligonucleotide
  Sense strand starting at position 2203 of SEQ ID NO: 1879714
ucgacuuggcaucauaauu

SEQ ID NO: 1927223 - RNA, 19 nt, Artificial Sequence
  Description of Artificial Sequence: Synthetic oligonucleotide
  Antisense strand to SEQ ID NO: 1927222
aauuaugaugccaagucga

SEQ ID NO: 1927224 - RNA, 19 nt, Artificial Sequence
  Description of Artificial Sequence: Synthetic oligonucleotide
  Sense strand starting at position 2448 of SEQ ID NO: 1879714
guaggagcaguuugauuuc

SEQ ID NO: 1927225 - RNA, 19 nt, Artificial Sequence
  Description of Artificial Sequence: Synthetic oligonucleotide
  Antisense strand to SEQ ID NO: 1927224
gaaaucaaacugcuccuac

SEQ ID NO: 1927226 - RNA, 19 nt, Artificial Sequence
  Description of Artificial Sequence: Synthetic oligonucleotide
  Sense strand starting at position 3012 of SEQ ID NO: 1879714
gcuguuugugaauaguuga

SEQ ID NO: 1927227 - RNA, 19 nt, Artificial Sequence
  Description of Artificial Sequence: Synthetic oligonucleotide
  Antisense strand to SEQ ID NO: 1927226
ucaacuauucacaaacagc

SEQ ID NO: 1927228 - RNA, 19 nt, Artificial Sequence
  Description of Artificial Sequence: Synthetic oligonucleotide
  Sense strand starting at position 3101 of SEQ ID NO: 1879714
gucagaugugcugggaaag

SEQ ID NO: 1927229 - RNA, 19 nt, Artificial Sequence
  Description of Artificial Sequence: Synthetic oligonucleotide
  Antisense strand to SEQ ID NO: 1927228
cuuucccagcacaucugac

SEQ ID NO: 1927230 - RNA, 19 nt, Artificial Sequence
  Description of Artificial Sequence: Synthetic oligonucleotide
  Sense strand starting at position 3199 of SEQ ID NO: 1879714
ucuuguuucccuuauguag

SEQ ID NO: 1927231 - RNA, 19 nt, Artificial Sequence
  Description of Artificial Sequence: Synthetic oligonucleotide
  Antisense strand to SEQ ID NO: 1927230
cuacauaagggaaacaaga

SEQ ID NO: 1927232 - RNA, 19 nt, Artificial Sequence
  Description of Artificial Sequence: Synthetic oligonucleotide
  Sense strand starting at position 3227 of SEQ ID NO: 1879714
ugacuaauagccuagaggu

SEQ ID NO: 1927233 - RNA, 19 nt, Artificial Sequence
  Description of Artificial Sequence: Synthetic oligonucleotide
  Antisense strand to SEQ ID NO: 1927232
accucuaggcuauuaguca

SEQ ID NO: 1927234 - RNA, 19 nt, Artificial Sequence
  Description of Artificial Sequence: Synthetic oligonucleotide
  Sense strand starting at position 3277 of SEQ ID NO: 1879714
aguccauauggauggcaua

SEQ ID NO: 1927235 - RNA, 19 nt, Artificial Sequence
  Description of Artificial Sequence: Synthetic oligonucleotide
  Antisense strand to SEQ ID NO: 1927234
uaugccauccauauggacu

SEQ ID NO: 1927236 - RNA, 19 nt, Artificial Sequence
  Description of Artificial Sequence: Synthetic oligonucleotide
  Sense strand starting at position 3344 of SEQ ID NO: 1879714
cugaaauucugguuaggaa

SEQ ID NO: 1927237 - RNA, 19 nt, Artificial Sequence
  Description of Artificial Sequence: Synthetic oligonucleotide
  Antisense strand to SEQ ID NO: 1927236
uuccuaaccagaauuucag

SEQ ID NO: 1927238 - RNA, 19 nt, Artificial Sequence
  Description of Artificial Sequence: Synthetic oligonucleotide
  Sense strand starting at position 3380 of SEQ ID NO: 1879714
caacuagagcagugauuau

SEQ ID NO: 1927239 - RNA, 19 nt, Artificial Sequence
  Description of Artificial Sequence: Synthetic oligonucleotide
  Antisense strand to SEQ ID NO: 1927238
auaaucacugcucuaguug

SEQ ID NO: 1927240 - RNA, 19 nt, Artificial Sequence
  Description of Artificial Sequence: Synthetic oligonucleotide
  Sense strand starting at position 3384 of SEQ ID NO: 1879714
uagagcagugauuauuauu

SEQ ID NO: 1927241 - RNA, 19 nt, Artificial Sequence
  Description of Artificial Sequence: Synthetic oligonucleotide
  Antisense strand to SEQ ID NO: 1927240
aauaauaaucacugcucua

SEQ ID NO: 1927242 - RNA, 19 nt, Artificial Sequence
  Description of Artificial Sequence: Synthetic oligonucleotide
  Sense strand starting at position 3392 of SEQ ID NO: 1879714
ugauuauuauuguccauug

SEQ ID NO: 1927243 - RNA, 19 nt, Artificial Sequence
  Description of Artificial Sequence: Synthetic oligonucleotide
  Antisense strand to SEQ ID NO: 1927242
caauggacaauaauaauca

SEQ ID NO: 1927244 - RNA, 19 nt, Artificial Sequence
  Description of Artificial Sequence: Synthetic oligonucleotide
  Sense strand starting at position 3397 of SEQ ID NO: 1879714
auuauuguccauugaggag

SEQ ID NO: 1927245 - RNA, 19 nt, Artificial Sequence
  Description of Artificial Sequence: Synthetic oligonucleotide
  Antisense strand to SEQ ID NO: 1927244
cuccucaauggacaauaau

SEQ ID NO: 1927246 - RNA, 19 nt, Artificial Sequence
  Description of Artificial Sequence: Synthetic oligonucleotide
  Sense strand starting at position 3464 of SEQ ID NO: 1879714
uccugaaaucuguguugaa

SEQ ID NO: 1927247 - RNA, 19 nt, Artificial Sequence
  Description of Artificial Sequence: Synthetic oligonucleotide
  Antisense strand to SEQ ID NO: 1927246
uucaacacagauuucagga

SEQ ID NO: 1927248 - RNA, 19 nt, Artificial Sequence
  Description of Artificial Sequence: Synthetic oligonucleotide
  Sense strand starting at position 3465 of SEQ ID NO: 1879714
ccugaaaucuguguugaac

SEQ ID NO: 1927249 - RNA, 19 nt, Artificial Sequence
  Description of Artificial Sequence: Synthetic oligonucleotide
  Antisense strand to SEQ ID NO: 1927248
guucaacacagauuucagg

SEQ ID NO: 1927250 - RNA, 19 nt, Artificial Sequence
  Description of Artificial Sequence: Synthetic oligonucleotide
  Sense strand starting at position 3468 of SEQ ID NO: 1879714
gaaaucuguguugaacugu

SEQ ID NO: 1927251 - RNA, 19 nt, Artificial Sequence
  Description of Artificial Sequence: Synthetic oligonucleotide
  Antisense strand to SEQ ID NO: 1927250
acaguucaacacagauuuc

SEQ ID NO: 1927252 - RNA, 19 nt, Artificial Sequence
  Description of Artificial Sequence: Synthetic oligonucleotide
  Sense strand starting at position 3573 of SEQ ID NO: 1879714
ggcuaagugcuguaaauau

SEQ ID NO: 1927253 - RNA, 19 nt, Artificial Sequence
  Description of Artificial Sequence: Synthetic oligonucleotide
  Antisense strand to SEQ ID NO: 1927252
auauuuacagcacuuagcc

SEQ ID NO: 1927254 - RNA, 19 nt, Artificial Sequence
  Description of Artificial Sequence: Synthetic oligonucleotide
  Sense strand starting at position 3650 of SEQ ID NO: 1879714
cuuuaucagccguugcuua

SEQ ID NO: 1927255 - RNA, 19 nt, Artificial Sequence
  Description of Artificial Sequence: Synthetic oligonucleotide
  Antisense strand to SEQ ID NO: 1927254
uaagcaacggcugauaaag

SEQ ID NO: 1927256 - RNA, 19 nt, Artificial Sequence
  Description of Artificial Sequence: Synthetic oligonucleotide
  Sense strand starting at position 3671 of SEQ ID NO: 1879714
aggagacauuucugacuaa

SEQ ID NO: 1927257 - RNA, 19 nt, Artificial Sequence
  Description of Artificial Sequence: Synthetic oligonucleotide
  Antisense strand to SEQ ID NO: 1927256
uuagucagaaaugucuccu

SEQ ID NO: 1927258 - RNA, 19 nt, Artificial Sequence
  Description of Artificial Sequence: Synthetic oligonucleotide
  Sense strand starting at position 3719 of SEQ ID NO: 1879714
uuauguucucaauguaaca

SEQ ID NO: 1927259 - RNA, 19 nt, Artificial Sequence
  Description of Artificial Sequence: Synthetic oligonucleotide
  Antisense strand to SEQ ID NO: 1927258
uguuacauugagaacauaa

SEQ ID NO: 1927260 - RNA, 19 nt, Artificial Sequence
  Description of Artificial Sequence: Synthetic oligonucleotide
  Sense strand starting at position 3797 of SEQ ID NO: 1879714
uugagaagugguggcuuua

SEQ ID NO: 1927261 - RNA, 19 nt, Artificial Sequence
  Description of Artificial Sequence: Synthetic oligonucleotide
  Antisense strand to SEQ ID NO: 1927260
uaaagccaccacuucucaa

SEQ ID NO: 1927262 - RNA, 19 nt, Artificial Sequence
  Description of Artificial Sequence: Synthetic oligonucleotide
  Sense strand starting at position 7 of SEQ ID NO: 1879715
cuggucaugugguugaaau

SEQ ID NO: 1927263 - RNA, 19 nt, Artificial Sequence
  Description of Artificial Sequence: Synthetic oligonucleotide
  Antisense strand to SEQ ID NO: 1927262
auuucaaccacaugaccag

SEQ ID NO: 1927264 - RNA, 19 nt, Artificial Sequence
  Description of Artificial Sequence: Synthetic oligonucleotide
  Sense strand starting at position 8 of SEQ ID NO: 1879715
uggucaugugguugaaaua

SEQ ID NO: 1927265 - RNA, 19 nt, Artificial Sequence
  Description of Artificial Sequence: Synthetic oligonucleotide
  Antisense strand to SEQ ID NO: 1927264
uauuucaaccacaugacca

SEQ ID NO: 1927266 - RNA, 19 nt, Artificial Sequence
  Description of Artificial Sequence: Synthetic oligonucleotide
  Sense strand starting at position 9 of SEQ ID NO: 1879715
ggucaugugguugaaauaa

SEQ ID NO: 1927267 - RNA, 19 nt, Artificial Sequence
  Description of Artificial Sequence: Synthetic oligonucleotide
  Antisense strand to SEQ ID NO: 1927266
uuauuucaaccacaugacc

SEQ ID NO: 1927268 - RNA, 19 nt, Artificial Sequence
  Description of Artificial Sequence: Synthetic oligonucleotide
  Sense strand starting at position 17 of SEQ ID NO: 1879715
gguugaaauaauggaguca

SEQ ID NO: 1927269 - RNA, 19 nt, Artificial Sequence
  Description of Artificial Sequence: Synthetic oligonucleotide
  Antisense strand to SEQ ID NO: 1927268
ugacuccauuauuucaacc

SEQ ID NO: 1927270 - RNA, 19 nt, Artificial Sequence
  Description of Artificial Sequence: Synthetic oligonucleotide
  Sense strand starting at position 43 of SEQ ID NO: 1879715
gggaaaguacguggcauaa

SEQ ID NO: 1927271 - RNA, 19 nt, Artificial Sequence
  Description of Artificial Sequence: Synthetic oligonucleotide
  Antisense strand to SEQ ID NO: 1927270
uuaugccacguacuuuccc

SEQ ID NO: 1927272 - RNA, 19 nt, Artificial Sequence
  Description of Artificial Sequence: Synthetic oligonucleotide
  Sense strand starting at position 83 of SEQ ID NO: 1879715
ucagcuggcggaugagaau

SEQ ID NO: 1927273 - RNA, 19 nt, Artificial Sequence
  Description of Artificial Sequence: Synthetic oligonucleotide
  Antisense strand to SEQ ID NO: 1927272
auucucauccgccagcuga

SEQ ID NO: 1927274 - RNA, 19 nt, Artificial Sequence
  Description of Artificial Sequence: Synthetic oligonucleotide
  Sense strand starting at position 89 of SEQ ID NO: 1879715
ggcggaugagaaugagcau

SEQ ID NO: 1927275 - RNA, 19 nt, Artificial Sequence
  Description of Artificial Sequence: Synthetic oligonucleotide
  Antisense strand to SEQ ID NO: 1927274
augcucauucucauccgcc

SEQ ID NO: 1927276 - RNA, 19 nt, Artificial Sequence
  Description of Artificial Sequence: Synthetic oligonucleotide
  Sense strand starting at position 90 of SEQ ID NO: 1879715
gcggaugagaaugagcaua

SEQ ID NO: 1927277 - RNA, 19 nt, Artificial Sequence
  Description of Artificial Sequence: Synthetic oligonucleotide
  Antisense strand to SEQ ID NO: 1927276
uaugcucauucucauccgc

SEQ ID NO: 1927278 - RNA, 19 nt, Artificial Sequence
  Description of Artificial Sequence: Synthetic oligonucleotide
  Sense strand starting at position 252 of SEQ ID NO: 1879715
cauagauugguaugaaauu

SEQ ID NO: 1927279 - RNA, 19 nt, Artificial Sequence
  Description of Artificial Sequence: Synthetic oligonucleotide
  Antisense strand to SEQ ID NO: 1927278
aauuucauaccaaucuaug

SEQ ID NO: 1927280 - RNA, 19 nt, Artificial Sequence
  Description of Artificial Sequence: Synthetic oligonucleotide
  Sense strand starting at position 355 of SEQ ID NO: 1879715
ggaacaucccagcauaguu

SEQ ID NO: 1927281 - RNA, 19 nt, Artificial Sequence
  Description of Artificial Sequence: Synthetic oligonucleotide
  Antisense strand to SEQ ID NO: 1927280
aacuaugcugggauguucc

SEQ ID NO: 1927282 - RNA, 19 nt, Artificial Sequence
  Description of Artificial Sequence: Synthetic oligonucleotide
  Sense strand starting at position 473 of SEQ ID NO: 1879715
gcauuauugcuauaguuug

SEQ ID NO: 1927283 - RNA, 19 nt, Artificial Sequence
  Description of Artificial Sequence: Synthetic oligonucleotide
  Antisense strand to SEQ ID NO: 1927282
caaacuauagcaauaaugc

SEQ ID NO: 1927284 - RNA, 19 nt, Artificial Sequence
  Description of Artificial Sequence: Synthetic oligonucleotide
  Sense strand starting at position 517 of SEQ ID NO: 1879715
guugaaguuugaucaccag

SEQ ID NO: 1927285 - RNA, 19 nt, Artificial Sequence
  Description of Artificial Sequence: Synthetic oligonucleotide
  Antisense strand to SEQ ID NO: 1927284
cuggugaucaaacuucaac

SEQ ID NO: 1927286 - RNA, 19 nt, Artificial Sequence
  Description of Artificial Sequence: Synthetic oligonucleotide
  Sense strand starting at position 520 of SEQ ID NO: 1879715
gaaguuugaucaccagugu

SEQ ID NO: 1927287 - RNA, 19 nt, Artificial Sequence
  Description of Artificial Sequence: Synthetic oligonucleotide
  Antisense strand to SEQ ID NO: 1927286
acacuggugaucaaacuuc

SEQ ID NO: 1927288 - RNA, 19 nt, Artificial Sequence
  Description of Artificial Sequence: Synthetic oligonucleotide
  Sense strand starting at position 521 of SEQ ID NO: 1879715
aaguuugaucaccaguguu

SEQ ID NO: 1927289 - RNA, 19 nt, Artificial Sequence
  Description of Artificial Sequence: Synthetic oligonucleotide
  Antisense strand to SEQ ID NO: 1927288
aacacuggugaucaaacuu

SEQ ID NO: 1927290 - RNA, 19 nt, Artificial Sequence
  Description of Artificial Sequence: Synthetic oligonucleotide
  Sense strand starting at position 550 of SEQ ID NO: 1879715
acuaaugggagguguuuga

SEQ ID NO: 1927291 - RNA, 19 nt, Artificial Sequence
  Description of Artificial Sequence: Synthetic oligonucleotide
  Antisense strand to SEQ ID NO: 1927290
ucaaacaccucccauuagu

SEQ ID NO: 1927292 - RNA, 19 nt, Artificial Sequence
  Description of Artificial Sequence: Synthetic oligonucleotide
  Sense strand starting at position 591 of SEQ ID NO: 1879715
uuugcagaucccugguaaa

SEQ ID NO: 1927293 - RNA, 19 nt, Artificial Sequence
  Description of Artificial Sequence: Synthetic oligonucleotide
  Antisense strand to SEQ ID NO: 1927292
uuuaccagggaucugcaaa

SEQ ID NO: 1927294 - RNA, 19 nt, Artificial Sequence
  Description of Artificial Sequence: Synthetic oligonucleotide
  Sense strand starting at position 647 of SEQ ID NO: 1879715
ggguucucacucuauuaga

SEQ ID NO: 1927295 - RNA, 19 nt, Artificial Sequence
  Description of Artificial Sequence: Synthetic oligonucleotide
  Antisense strand to SEQ ID NO: 1927294
ucuaauagagugagaaccc

SEQ ID NO: 1927296 - RNA, 19 nt, Artificial Sequence
  Description of Artificial Sequence: Synthetic oligonucleotide
  Sense strand starting at position 997 of SEQ ID NO: 1879715
uugugaugagcagaugcuu

SEQ ID NO: 1927297 - RNA, 19 nt, Artificial Sequence
  Description of Artificial Sequence: Synthetic oligonucleotide
  Antisense strand to SEQ ID NO: 1927296
aagcaucugcucaucacaa

SEQ ID NO: 1927298 - RNA, 19 nt, Artificial Sequence
  Description of Artificial Sequence: Synthetic oligonucleotide
  Sense strand starting at position 1006 of SEQ ID NO: 1879715
gcagaugcuuuaccacaaa

SEQ ID NO: 1927299 - RNA, 19 nt, Artificial Sequence
  Description of Artificial Sequence: Synthetic oligonucleotide
  Antisense strand to SEQ ID NO: 1927298
uuugugguaaagcaucugc

SEQ ID NO: 1927300 - RNA, 19 nt, Artificial Sequence
  Description of Artificial Sequence: Synthetic oligonucleotide
  Sense strand starting at position 1900 of SEQ ID NO: 1879715
ccuccagaguuucuagacu

SEQ ID NO: 1927301 - RNA, 19 nt, Artificial Sequence
  Description of Artificial Sequence: Synthetic oligonucleotide
  Antisense strand to SEQ ID NO: 1927300
agucuagaaacucuggagg

SEQ ID NO: 1927302 - RNA, 19 nt, Artificial Sequence
  Description of Artificial Sequence: Synthetic oligonucleotide
  Sense strand starting at position 2079 of SEQ ID NO: 1879715
ccuauuauguauucuuagu

SEQ ID NO: 1927303 - RNA, 19 nt, Artificial Sequence
  Description of Artificial Sequence: Synthetic oligonucleotide
  Antisense strand to SEQ ID NO: 1927302
acuaagaauacauaauagg

SEQ ID NO: 1927304 - RNA, 19 nt, Artificial Sequence
  Description of Artificial Sequence: Synthetic oligonucleotide
  Sense strand starting at position 2119 of SEQ ID NO: 1879715
acuauauaugcauguaguu

SEQ ID NO: 1927305 - RNA, 19 nt, Artificial Sequence
  Description of Artificial Sequence: Synthetic oligonucleotide
  Antisense strand to SEQ ID NO: 1927304
aacuacaugcauauauagu

SEQ ID NO: 1927306 - RNA, 19 nt, Artificial Sequence
  Description of Artificial Sequence: Synthetic oligonucleotide
  Sense strand starting at position 2148 of SEQ ID NO: 1879715
ucucuauuggucuaugugu

SEQ ID NO: 1927307 - RNA, 19 nt, Artificial Sequence
  Description of Artificial Sequence: Synthetic oligonucleotide
  Antisense strand to SEQ ID NO: 1927306
acacauagaccaauagaga

SEQ ID NO: 1927308 - RNA, 19 nt, Artificial Sequence
  Description of Artificial Sequence: Synthetic oligonucleotide
  Sense strand starting at position 2175 of SEQ ID NO: 1879715
augccauugccauacuguu

SEQ ID NO: 1927309 - RNA, 19 nt, Artificial Sequence
  Description of Artificial Sequence: Synthetic oligonucleotide
  Antisense strand to SEQ ID NO: 1927308
aacaguauggcaauggcau

SEQ ID NO: 1927310 - RNA, 19 nt, Artificial Sequence
  Description of Artificial Sequence: Synthetic oligonucleotide
  Sense strand starting at position 2226 of SEQ ID NO: 1879715
caagaaaugugugccucua

SEQ ID NO: 1927311 - RNA, 19 nt, Artificial Sequence
  Description of Artificial Sequence: Synthetic oligonucleotide
  Antisense strand to SEQ ID NO: 1927310
uagaggcacacauuucuug

SEQ ID NO: 1927312 - RNA, 19 nt, Artificial Sequence
  Description of Artificial Sequence: Synthetic oligonucleotide
  Sense strand starting at position 2462 of SEQ ID NO: 1879715
uucugucaucaaugucaua

SEQ ID NO: 1927313 - RNA, 19 nt, Artificial Sequence
  Description of Artificial Sequence: Synthetic oligonucleotide
  Antisense strand to SEQ ID NO: 1927312
uaugacauugaugacagaa

SEQ ID NO: 1927314 - RNA, 19 nt, Artificial Sequence
  Description of Artificial Sequence: Synthetic oligonucleotide
  Sense strand starting at position 2501 of SEQ ID NO: 1879715
ucacuuccuugguuuaagu

SEQ ID NO: 1927315 - RNA, 19 nt, Artificial Sequence
  Description of Artificial Sequence: Synthetic oligonucleotide
  Antisense strand to SEQ ID NO: 1927314
acuuaaaccaaggaaguga

SEQ ID NO: 1927316 - RNA, 19 nt, Artificial Sequence
  Description of Artificial Sequence: Synthetic oligonucleotide
  Sense strand starting at position 2503 of SEQ ID NO: 1879715
acuuccuugguuuaaguau

SEQ ID NO: 1927317 - RNA, 19 nt, Artificial Sequence
  Description of Artificial Sequence: Synthetic oligonucleotide
  Antisense strand to SEQ ID NO: 1927316
auacuuaaaccaaggaagu

SEQ ID NO: 1927318 - RNA, 19 nt, Artificial Sequence
  Description of Artificial Sequence: Synthetic oligonucleotide
  Sense strand starting at position 2684 of SEQ ID NO: 1879715
uagggucugccacauauaa

SEQ ID NO: 1927319 - RNA, 19 nt, Artificial Sequence
  Description of Artificial Sequence: Synthetic oligonucleotide
  Antisense strand to SEQ ID NO: 1927318
uuauauguggcagacccua

SEQ ID NO: 1927320 - RNA, 19 nt, Artificial Sequence
  Description of Artificial Sequence: Synthetic oligonucleotide
  Sense strand starting at position 2686 of SEQ ID NO: 1879715
gggucugccacauauaaga

SEQ ID NO: 1927321 - RNA, 19 nt, Artificial Sequence
  Description of Artificial Sequence: Synthetic oligonucleotide
  Antisense strand to SEQ ID NO: 1927320
ucuuauauguggcagaccc

SEQ ID NO: 1927322 - RNA, 19 nt, Artificial Sequence
  Description of Artificial Sequence: Synthetic oligonucleotide
  Sense strand starting at position 3046 of SEQ ID NO: 1879715
guuaaugugguuuauuaca

SEQ ID NO: 1927323 - RNA, 19 nt, Artificial Sequence
  Description of Artificial Sequence: Synthetic oligonucleotide
  Antisense strand to SEQ ID NO: 1927322
uguaauaaaccacauuaac

SEQ ID NO: 1927324 - RNA, 19 nt, Artificial Sequence
  Description of Artificial Sequence: Synthetic oligonucleotide
  Sense strand starting at position 3082 of SEQ ID NO: 1879715
guugaaccauccguacaua

SEQ ID NO: 1927325 - RNA, 19 nt, Artificial Sequence
  Description of Artificial Sequence: Synthetic oligonucleotide
  Antisense strand to SEQ ID NO: 1927324
uauguacggaugguucaac

SEQ ID NO: 1927326 - RNA, 19 nt, Artificial Sequence
  Description of Artificial Sequence: Synthetic oligonucleotide
  Sense strand starting at position 3093 of SEQ ID NO: 1879715
cguacauaccaaggauaaa

SEQ ID NO: 1927327 - RNA, 19 nt, Artificial Sequence
  Description of Artificial Sequence: Synthetic oligonucleotide
  Antisense strand to SEQ ID NO: 1927326
uuuauccuugguauguacg

SEQ ID NO: 1927328 - RNA, 19 nt, Artificial Sequence
  Description of Artificial Sequence: Synthetic oligonucleotide
  Sense strand starting at position 3814 of SEQ ID NO: 1879715
aguauaagccuguaaguuu

SEQ ID NO: 1927329 - RNA, 19 nt, Artificial Sequence
  Description of Artificial Sequence: Synthetic oligonucleotide
  Antisense strand to SEQ ID NO: 1927328
aaacuuacaggcuuauacu

SEQ ID NO: 1927330 - RNA, 19 nt, Artificial Sequence
  Description of Artificial Sequence: Synthetic oligonucleotide
  Sense strand starting at position 3858 of SEQ ID NO: 1879715
cuuugaugcaaggguaaua

SEQ ID NO: 1927331 - RNA, 19 nt, Artificial Sequence
  Description of Artificial Sequence: Synthetic oligonucleotide
  Antisense strand to SEQ ID NO: 1927330
uauuacccuugcaucaaag

SEQ ID NO: 1927332 - RNA, 19 nt, Artificial Sequence
  Description of Artificial Sequence: Synthetic oligonucleotide
  Sense strand starting at position 3897 of SEQ ID NO: 1879715
uggaaauguuccucccucu

SEQ ID NO: 1927333 - RNA, 19 nt, Artificial Sequence
  Description of Artificial Sequence: Synthetic oligonucleotide
  Antisense strand to SEQ ID NO: 1927332
agagggaggaacauuucca

SEQ ID NO: 1927334 - RNA, 19 nt, Artificial Sequence
  Description of Artificial Sequence: Synthetic oligonucleotide
  Sense strand starting at position 3938 of SEQ ID NO: 1879715
uuuagaagaauugguguuu

SEQ ID NO: 1927335 - RNA, 19 nt, Artificial Sequence
  Description of Artificial Sequence: Synthetic oligonucleotide
  Antisense strand to SEQ ID NO: 1927334
aaacaccaauucuucuaaa

SEQ ID NO: 1927336 - RNA, 19 nt, Artificial Sequence
  Description of Artificial Sequence: Synthetic oligonucleotide
  Sense strand starting at position 3939 of SEQ ID NO: 1879715
uuagaagaauugguguuua

SEQ ID NO: 1927337 - RNA, 19 nt, Artificial Sequence
  Description of Artificial Sequence: Synthetic oligonucleotide
  Antisense strand to SEQ ID NO: 1927336
uaaacaccaauucuucuaa

SEQ ID NO: 1927338 - RNA, 19 nt, Artificial Sequence
  Description of Artificial Sequence: Synthetic oligonucleotide
  Sense strand starting at position 3943 of SEQ ID NO: 1879715
aagaauugguguuuauucu

SEQ ID NO: 1927339 - RNA, 19 nt, Artificial Sequence
  Description of Artificial Sequence: Synthetic oligonucleotide
  Antisense strand to SEQ ID NO: 1927338
agaauaaacaccaauucuu

SEQ ID NO: 1927340 - RNA, 19 nt, Artificial Sequence
  Description of Artificial Sequence: Synthetic oligonucleotide
  Sense strand starting at position 3963 of SEQ ID NO: 1879715
cucuguuugguggaaucca

SEQ ID NO: 1927341 - RNA, 19 nt, Artificial Sequence
  Description of Artificial Sequence: Synthetic oligonucleotide
  Antisense strand to SEQ ID NO: 1927340
uggauuccaccaaacagag

SEQ ID NO: 1927342 - RNA, 19 nt, Artificial Sequence
  Description of Artificial Sequence: Synthetic oligonucleotide
  Sense strand starting at position 36 of SEQ ID NO: 1879716
cagcaucgcucuguaguaa

SEQ ID NO: 1927343 - RNA, 19 nt, Artificial Sequence
  Description of Artificial Sequence: Synthetic oligonucleotide
  Antisense strand to SEQ ID NO: 1927342
uuacuacagagcgaugcug

SEQ ID NO: 1927344 - RNA, 19 nt, Artificial Sequence
  Description of Artificial Sequence: Synthetic oligonucleotide
  Sense strand starting at position 37 of SEQ ID NO: 1879716
agcaucgcucuguaguaau

SEQ ID NO: 1927345 - RNA, 19 nt, Artificial Sequence
  Description of Artificial Sequence: Synthetic oligonucleotide
  Antisense strand to SEQ ID NO: 1927344
auuacuacagagcgaugcu

SEQ ID NO: 1927346 - RNA, 19 nt, Artificial Sequence
  Description of Artificial Sequence: Synthetic oligonucleotide
  Sense strand starting at position 475 of SEQ ID NO: 1879716
cagagcauuugaugucaga

SEQ ID NO: 1927347 - RNA, 19 nt, Artificial Sequence
  Description of Artificial Sequence: Synthetic oligonucleotide
  Antisense strand to SEQ ID NO: 1927346
ucugacaucaaaugcucug

SEQ ID NO: 1927348 - RNA, 19 nt, Artificial Sequence
  Description of Artificial Sequence: Synthetic oligonucleotide
  Sense strand starting at position 495 of SEQ ID NO: 1879716
ggcaguauuuguuuccaag

SEQ ID NO: 1927349 - RNA, 19 nt, Artificial Sequence
  Description of Artificial Sequence: Synthetic oligonucleotide
  Antisense strand to SEQ ID NO: 1927348
cuuggaaacaaauacugcc

SEQ ID NO: 1927350 - RNA, 19 nt, Artificial Sequence
  Description of Artificial Sequence: Synthetic oligonucleotide
  Sense strand starting at position 541 of SEQ ID NO: 1879716
ccugcuccucugcaugauu

SEQ ID NO: 1927351 - RNA, 19 nt, Artificial Sequence
  Description of Artificial Sequence: Synthetic oligonucleotide
  Antisense strand to SEQ ID NO: 1927350
aaucaugcagaggagcagg

SEQ ID NO: 1927352 - RNA, 19 nt, Artificial Sequence
  Description of Artificial Sequence: Synthetic oligonucleotide
  Sense strand starting at position 586 of SEQ ID NO: 1879716
cuucuuccguggucaucua

SEQ ID NO: 1927353 - RNA, 19 nt, Artificial Sequence
  Description of Artificial Sequence: Synthetic oligonucleotide
  Antisense strand to SEQ ID NO: 1927352
uagaugaccacggaagaag

SEQ ID NO: 1927354 - RNA, 19 nt, Artificial Sequence
  Description of Artificial Sequence: Synthetic oligonucleotide
  Sense strand starting at position 684 of SEQ ID NO: 1879716
agcccuuaugugggcagaa

SEQ ID NO: 1927355 - RNA, 19 nt, Artificial Sequence
  Description of Artificial Sequence: Synthetic oligonucleotide
  Antisense strand to SEQ ID NO: 1927354
uucugcccacauaagggcu

SEQ ID NO: 1927356 - RNA, 19 nt, Artificial Sequence
  Description of Artificial Sequence: Synthetic oligonucleotide
  Sense strand starting at position 685 of SEQ ID NO: 1879716
gcccuuaugugggcagaaa

SEQ ID NO: 1927357 - RNA, 19 nt, Artificial Sequence
  Description of Artificial Sequence: Synthetic oligonucleotide
  Antisense strand to SEQ ID NO: 1927356
uuucugcccacauaagggc

SEQ ID NO: 1927358 - RNA, 19 nt, Artificial Sequence
  Description of Artificial Sequence: Synthetic oligonucleotide
  Sense strand starting at position 726 of SEQ ID NO: 1879716
gcuggucuguggucagaua

SEQ ID NO: 1927359 - RNA, 19 nt, Artificial Sequence
  Description of Artificial Sequence: Synthetic oligonucleotide
  Antisense strand to SEQ ID NO: 1927358
uaucugaccacagaccagc

SEQ ID NO: 1927360 - RNA, 19 nt, Artificial Sequence
  Description of Artificial Sequence: Synthetic oligonucleotide
  Sense strand starting at position 727 of SEQ ID NO: 1879716
cuggucuguggucagauaa

SEQ ID NO: 1927361 - RNA, 19 nt, Artificial Sequence
  Description of Artificial Sequence: Synthetic oligonucleotide
  Antisense strand to SEQ ID NO: 1927360
uuaucugaccacagaccag

SEQ ID NO: 1927362 - RNA, 19 nt, Artificial Sequence
  Description of Artificial Sequence: Synthetic oligonucleotide
  Sense strand starting at position 1195 of SEQ ID NO: 1879716
agaguaggcuacucugaga

SEQ ID NO: 1927363 - RNA, 19 nt, Artificial Sequence
  Description of Artificial Sequence: Synthetic oligonucleotide
  Antisense strand to SEQ ID NO: 1927362
ucucagaguagccuacucu

SEQ ID NO: 1927364 - RNA, 19 nt, Artificial Sequence
  Description of Artificial Sequence: Synthetic oligonucleotide
  Sense strand starting at position 1285 of SEQ ID NO: 1879716
auuucuguauaaugacaga

SEQ ID NO: 1927365 - RNA, 19 nt, Artificial Sequence
  Description of Artificial Sequence: Synthetic oligonucleotide
  Antisense strand to SEQ ID NO: 1927364
ucugucauuauacagaaau

SEQ ID NO: 1927366 - RNA, 19 nt, Artificial Sequence
  Description of Artificial Sequence: Synthetic oligonucleotide
  Sense strand starting at position 1288 of SEQ ID NO: 1879716
ucuguauaaugacagagaa

SEQ ID NO: 1927367 - RNA, 19 nt, Artificial Sequence
  Description of Artificial Sequence: Synthetic oligonucleotide
  Antisense strand to SEQ ID NO: 1927366
uucucugucauuauacaga

SEQ ID NO: 1927368 - RNA, 19 nt, Artificial Sequence
  Description of Artificial Sequence: Synthetic oligonucleotide
  Sense strand starting at position 1573 of SEQ ID NO: 1879716
cagagacaauccuggaaag

SEQ ID NO: 1927369 - RNA, 19 nt, Artificial Sequence
  Description of Artificial Sequence: Synthetic oligonucleotide
  Antisense strand to SEQ ID NO: 1927368
cuuuccaggauugucucug

SEQ ID NO: 1927370 - RNA, 19 nt, Artificial Sequence
  Description of Artificial Sequence: Synthetic oligonucleotide
  Sense strand starting at position 1735 of SEQ ID NO: 1879716
aguccaaauccuuauuagu

SEQ ID NO: 1927371 - RNA, 19 nt, Artificial Sequence
  Description of Artificial Sequence: Synthetic oligonucleotide
  Antisense strand to SEQ ID NO: 1927370
acuaauaaggauuuggacu

SEQ ID NO: 1927372 - RNA, 19 nt, Artificial Sequence
  Description of Artificial Sequence: Synthetic oligonucleotide
  Sense strand starting at position 1819 of SEQ ID NO: 1879716
guuugaaucucacuuugcu

SEQ ID NO: 1927373 - RNA, 19 nt, Artificial Sequence
  Description of Artificial Sequence: Synthetic oligonucleotide
  Antisense strand to SEQ ID NO: 1927372
agcaaagugagauucaaac

SEQ ID NO: 1927374 - RNA, 19 nt, Artificial Sequence
  Description of Artificial Sequence: Synthetic oligonucleotide
  Sense strand starting at position 1838 of SEQ ID NO: 1879716
gcuuacuaacuaugagaca

SEQ ID NO: 1927375 - RNA, 19 nt, Artificial Sequence
  Description of Artificial Sequence: Synthetic oligonucleotide
  Antisense strand to SEQ ID NO: 1927374
ugucucauaguuaguaagc

SEQ ID NO: 1927376 - RNA, 19 nt, Artificial Sequence
  Description of Artificial Sequence: Synthetic oligonucleotide
  Sense strand starting at position 2061 of SEQ ID NO: 1879716
guguguuccgcaguuuauc

SEQ ID NO: 1927377 - RNA, 19 nt, Artificial Sequence
  Description of Artificial Sequence: Synthetic oligonucleotide
  Antisense strand to SEQ ID NO: 1927376
gauaaacugcggaacacac

SEQ ID NO: 1927378 - RNA, 19 nt, Artificial Sequence
  Description of Artificial Sequence: Synthetic oligonucleotide
  Sense strand starting at position 2158 of SEQ ID NO: 1879716
guggagaucgacugagguu

SEQ ID NO: 1927379 - RNA, 19 nt, Artificial Sequence
  Description of Artificial Sequence: Synthetic oligonucleotide
  Antisense strand to SEQ ID NO: 1927378
aaccucagucgaucuccac

SEQ ID NO: 1927380 - RNA, 19 nt, Artificial Sequence
  Description of Artificial Sequence: Synthetic oligonucleotide
  Sense strand starting at position 2159 of SEQ ID NO: 1879716
uggagaucgacugagguuu

SEQ ID NO: 1927381 - RNA, 19 nt, Artificial Sequence
  Description of Artificial Sequence: Synthetic oligonucleotide
  Antisense strand to SEQ ID NO: 1927380
aaaccucagucgaucucca

SEQ ID NO: 1927382 - RNA, 19 nt, Artificial Sequence
  Description of Artificial Sequence: Synthetic oligonucleotide
  Sense strand starting at position 2269 of SEQ ID NO: 1879716
ucacucuaagcagaguauu

SEQ ID NO: 1927383 - RNA, 19 nt, Artificial Sequence
  Description of Artificial Sequence: Synthetic oligonucleotide
  Antisense strand to SEQ ID NO: 1927382
aauacucugcuuagaguga

SEQ ID NO: 1927384 - RNA, 19 nt, Artificial Sequence
  Description of Artificial Sequence: Synthetic oligonucleotide
  Sense strand starting at position 2456 of SEQ ID NO: 1879716
uuucucacucuggaugagu

SEQ ID NO: 1927385 - RNA, 19 nt, Artificial Sequence
  Description of Artificial Sequence: Synthetic oligonucleotide
  Antisense strand to SEQ ID NO: 1927384
acucauccagagugagaaa

SEQ ID NO: 1927386 - RNA, 19 nt, Artificial Sequence
  Description of Artificial Sequence: Synthetic oligonucleotide
  Sense strand starting at position 2688 of SEQ ID NO: 1879716
cagguuguugaugagaacu

SEQ ID NO: 1927387 - RNA, 19 nt, Artificial Sequence
  Description of Artificial Sequence: Synthetic oligonucleotide
  Antisense strand to SEQ ID NO: 1927386
aguucucaucaacaaccug

SEQ ID NO: 1927388 - RNA, 19 nt, Artificial Sequence
  Description of Artificial Sequence: Synthetic oligonucleotide
  Sense strand starting at position 3120 of SEQ ID NO: 1879716
gggccucacagggauucua

SEQ ID NO: 1927389 - RNA, 19 nt, Artificial Sequence
  Description of Artificial Sequence: Synthetic oligonucleotide
  Antisense strand to SEQ ID NO: 1927388
uagaaucccugugaggccc

SEQ ID NO: 1927390 - RNA, 19 nt, Artificial Sequence
  Description of Artificial Sequence: Synthetic oligonucleotide
  Sense strand starting at position 3302 of SEQ ID NO: 1879716
uucccuuagguguggaaga

SEQ ID NO: 1927391 - RNA, 19 nt, Artificial Sequence
  Description of Artificial Sequence: Synthetic oligonucleotide
  Antisense strand to SEQ ID NO: 1927390
ucuuccacaccuaagggaa

SEQ ID NO: 1927392 - RNA, 19 nt, Artificial Sequence
  Description of Artificial Sequence: Synthetic oligonucleotide
  Sense strand starting at position 3304 of SEQ ID NO: 1879716
cccuuagguguggaagaau

SEQ ID NO: 1927393 - RNA, 19 nt, Artificial Sequence
  Description of Artificial Sequence: Synthetic oligonucleotide
  Antisense strand to SEQ ID NO: 1927392
auucuuccacaccuaaggg

SEQ ID NO: 1927394 - RNA, 19 nt, Artificial Sequence
  Description of Artificial Sequence: Synthetic oligonucleotide
  Sense strand starting at position 3328 of SEQ ID NO: 1879716
cucuguuguccaugcgaga

SEQ ID NO: 1927395 - RNA, 19 nt, Artificial Sequence
  Description of Artificial Sequence: Synthetic oligonucleotide
  Antisense strand to SEQ ID NO: 1927394
ucucgcauggacaacagag

SEQ ID NO: 1927396 - RNA, 19 nt, Artificial Sequence
  Description of Artificial Sequence: Synthetic oligonucleotide
  Sense strand starting at position 3495 of SEQ ID NO: 1879716
ccaucaguggcucacuaaa

SEQ ID NO: 1927397 - RNA, 19 nt, Artificial Sequence
  Description of Artificial Sequence: Synthetic oligonucleotide
  Antisense strand to SEQ ID NO: 1927396
uuuagugagccacugaugg

SEQ ID NO: 1927398 - RNA, 19 nt, Artificial Sequence
  Description of Artificial Sequence: Synthetic oligonucleotide
  Sense strand starting at position 3497 of SEQ ID NO: 1879716
aucaguggcucacuaaaua

SEQ ID NO: 1927399 - RNA, 19 nt, Artificial Sequence
  Description of Artificial Sequence: Synthetic oligonucleotide
  Antisense strand to SEQ ID NO: 1927398
uauuuagugagccacugau

SEQ ID NO: 1927400 - RNA, 19 nt, Artificial Sequence
  Description of Artificial Sequence: Synthetic oligonucleotide
  Sense strand starting at position 3509 of SEQ ID NO: 1879716
cuaaauaucugccuuugga

SEQ ID NO: 1927401 - RNA, 19 nt, Artificial Sequence
  Description of Artificial Sequence: Synthetic oligonucleotide
  Antisense strand to SEQ ID NO: 1927400
uccaaaggcagauauuuag

SEQ ID NO: 1927402 - RNA, 19 nt, Artificial Sequence
  Description of Artificial Sequence: Synthetic oligonucleotide
  Sense strand starting at position 3597 of SEQ ID NO: 1879716
caggcauaccucuagguga

SEQ ID NO: 1927403 - RNA, 19 nt, Artificial Sequence
  Description of Artificial Sequence: Synthetic oligonucleotide
  Antisense strand to SEQ ID NO: 1927402
ucaccuagagguaugccug

SEQ ID NO: 1927404 - RNA, 19 nt, Artificial Sequence
  Description of Artificial Sequence: Synthetic oligonucleotide
  Sense strand starting at position 3599 of SEQ ID NO: 1879716
ggcauaccucuaggugagu

SEQ ID NO: 1927405 - RNA, 19 nt, Artificial Sequence
  Description of Artificial Sequence: Synthetic oligonucleotide
  Antisense strand to SEQ ID NO: 1927404
acucaccuagagguaugcc

SEQ ID NO: 1927406 - RNA, 19 nt, Artificial Sequence
  Description of Artificial Sequence: Synthetic oligonucleotide
  Sense strand starting at position 3673 of SEQ ID NO: 1879716
ggauccuuugcagggacau

SEQ ID NO: 1927407 - RNA, 19 nt, Artificial Sequence
  Description of Artificial Sequence: Synthetic oligonucleotide
  Antisense strand to SEQ ID NO: 1927406
augucccugcaaaggaucc

SEQ ID NO: 1927408 - RNA, 19 nt, Artificial Sequence
  Description of Artificial Sequence: Synthetic oligonucleotide
  Sense strand starting at position 3825 of SEQ ID NO: 1879716
gggcuccagcccugagauu

SEQ ID NO: 1927409 - RNA, 19 nt, Artificial Sequence
  Description of Artificial Sequence: Synthetic oligonucleotide
  Antisense strand to SEQ ID NO: 1927408
aaucucagggcuggagccc

SEQ ID NO: 1927410 - RNA, 19 nt, Artificial Sequence
  Description of Artificial Sequence: Synthetic oligonucleotide
  Sense strand starting at position 3826 of SEQ ID NO: 1879716
ggcuccagcccugagauua

SEQ ID NO: 1927411 - RNA, 19 nt, Artificial Sequence
  Description of Artificial Sequence: Synthetic oligonucleotide
  Antisense strand to SEQ ID NO: 1927410
uaaucucagggcuggagcc

SEQ ID NO: 1927412 - RNA, 19 nt, Artificial Sequence
  Description of Artificial Sequence: Synthetic oligonucleotide
  Sense strand starting at position 3883 of SEQ ID NO: 1879716
uuuauaaaguuccucuagu

SEQ ID NO: 1927413 - RNA, 19 nt, Artificial Sequence
  Description of Artificial Sequence: Synthetic oligonucleotide
  Antisense strand to SEQ ID NO: 1927412
acuagaggaacuuuauaaa

SEQ ID NO: 1927414 - RNA, 19 nt, Artificial Sequence
  Description of Artificial Sequence: Synthetic oligonucleotide
  Sense strand starting at position 3884 of SEQ ID NO: 1879716
uuauaaaguuccucuaguu

SEQ ID NO: 1927415 - RNA, 19 nt, Artificial Sequence
  Description of Artificial Sequence: Synthetic oligonucleotide
  Antisense strand to SEQ ID NO: 1927414
aacuagaggaacuuuauaa

SEQ ID NO: 1927416 - RNA, 19 nt, Artificial Sequence
  Description of Artificial Sequence: Synthetic oligonucleotide
  Sense strand starting at position 3896 of SEQ ID NO: 1879716
ucuaguugaucugauggau

SEQ ID NO: 1927417 - RNA, 19 nt, Artificial Sequence
  Description of Artificial Sequence: Synthetic oligonucleotide
  Antisense strand to SEQ ID NO: 1927416
auccaucagaucaacuaga

SEQ ID NO: 1927418 - RNA, 19 nt, Artificial Sequence
  Description of Artificial Sequence: Synthetic oligonucleotide
  Sense strand starting at position 3899 of SEQ ID NO: 1879716
aguugaucugauggauuga

SEQ ID NO: 1927419 - RNA, 19 nt, Artificial Sequence
  Description of Artificial Sequence: Synthetic oligonucleotide
  Antisense strand to SEQ ID NO: 1927418
ucaauccaucagaucaacu

SEQ ID NO: 1927420 - RNA, 19 nt, Artificial Sequence
  Description of Artificial Sequence: Synthetic oligonucleotide
  Sense strand starting at position 3914 of SEQ ID NO: 1879716
uugagaagcuuggaacaga

SEQ ID NO: 1927421 - RNA, 19 nt, Artificial Sequence
  Description of Artificial Sequence: Synthetic oligonucleotide
  Antisense strand to SEQ ID NO: 1927420
ucuguuccaagcuucucaa

SEQ ID NO: 1927422 - RNA, 19 nt, Artificial Sequence
  Description of Artificial Sequence: Synthetic oligonucleotide
  Sense strand starting at position 45 of SEQ ID NO: 1879717
uggccuacucuugagaaug

SEQ ID NO: 1927423 - RNA, 19 nt, Artificial Sequence
  Description of Artificial Sequence: Synthetic oligonucleotide
  Antisense strand to SEQ ID NO: 1927422
cauucucaagaguaggcca

SEQ ID NO: 1927424 - RNA, 19 nt, Artificial Sequence
  Description of Artificial Sequence: Synthetic oligonucleotide
  Sense strand starting at position 96 of SEQ ID NO: 1879717
gcagcugauggaugaaaua

SEQ ID NO: 1927425 - RNA, 19 nt, Artificial Sequence
  Description of Artificial Sequence: Synthetic oligonucleotide
  Antisense strand to SEQ ID NO: 1927424
uauuucauccaucagcugc

SEQ ID NO: 1927426 - RNA, 19 nt, Artificial Sequence
  Description of Artificial Sequence: Synthetic oligonucleotide
  Sense strand starting at position 208 of SEQ ID NO: 1879717
cugaaagugaggugaugaa

SEQ ID NO: 1927427 - RNA, 19 nt, Artificial Sequence
  Description of Artificial Sequence: Synthetic oligonucleotide
  Antisense strand to SEQ ID NO: 1927426
uucaucaccucacuuucag

SEQ ID NO: 1927428 - RNA, 19 nt, Artificial Sequence
  Description of Artificial Sequence: Synthetic oligonucleotide
  Sense strand starting at position 419 of SEQ ID NO: 1879717
ucugauauaaaguguaguu

SEQ ID NO: 1927429 - RNA, 19 nt, Artificial Sequence
  Description of Artificial Sequence: Synthetic oligonucleotide
  Antisense strand to SEQ ID NO: 1927428
aacuacacuuuauaucaga

SEQ ID NO: 1927430 - RNA, 19 nt, Artificial Sequence
  Description of Artificial Sequence: Synthetic oligonucleotide
  Sense strand starting at position 471 of SEQ ID NO: 1879717
guuggcauggaauaucuau

SEQ ID NO: 1927431 - RNA, 19 nt, Artificial Sequence
  Description of Artificial Sequence: Synthetic oligonucleotide
  Antisense strand to SEQ ID NO: 1927430
auagauauuccaugccaac

SEQ ID NO: 1927432 - RNA, 19 nt, Artificial Sequence
  Description of Artificial Sequence: Synthetic oligonucleotide
  Sense strand starting at position 1104 of SEQ ID NO: 1879717
auaauauucuguguaccau

SEQ ID NO: 1927433 - RNA, 19 nt, Artificial Sequence
  Description of Artificial Sequence: Synthetic oligonucleotide
  Antisense strand to SEQ ID NO: 1927432
augguacacagaauauuau

SEQ ID NO: 1927434 - RNA, 19 nt, Artificial Sequence
  Description of Artificial Sequence: Synthetic oligonucleotide
  Sense strand starting at position 1145 of SEQ ID NO: 1879717
agaugauucuuauugguug

SEQ ID NO: 1927435 - RNA, 19 nt, Artificial Sequence
  Description of Artificial Sequence: Synthetic oligonucleotide
  Antisense strand to SEQ ID NO: 1927434
caaccaauaagaaucaucu

SEQ ID NO: 1927436 - RNA, 19 nt, Artificial Sequence
  Description of Artificial Sequence: Synthetic oligonucleotide
  Sense strand starting at position 1148 of SEQ ID NO: 1879717
ugauucuuauugguuguua

SEQ ID NO: 1927437 - RNA, 19 nt, Artificial Sequence
  Description of Artificial Sequence: Synthetic oligonucleotide
  Antisense strand to SEQ ID NO: 1927436
uaacaaccaauaagaauca

SEQ ID NO: 1927438 - RNA, 19 nt, Artificial Sequence
  Description of Artificial Sequence: Synthetic oligonucleotide
  Sense strand starting at position 1149 of SEQ ID NO: 1879717
gauucuuauugguuguuaa

SEQ ID NO: 1927439 - RNA, 19 nt, Artificial Sequence
  Description of Artificial Sequence: Synthetic oligonucleotide
  Antisense strand to SEQ ID NO: 1927438
uuaacaaccaauaagaauc

SEQ ID NO: 1927440 - RNA, 19 nt, Artificial Sequence
  Description of Artificial Sequence: Synthetic oligonucleotide
  Sense strand starting at position 1150 of SEQ ID NO: 1879717
auucuuauugguuguuaac

SEQ ID NO: 1927441 - RNA, 19 nt, Artificial Sequence
  Description of Artificial Sequence: Synthetic oligonucleotide
  Antisense strand to SEQ ID NO: 1927440
guuaacaaccaauaagaau

SEQ ID NO: 1927442 - RNA, 19 nt, Artificial Sequence
  Description of Artificial Sequence: Synthetic oligonucleotide
  Sense strand starting at position 1152 of SEQ ID NO: 1879717
ucuuauugguuguuaacau

SEQ ID NO: 1927443 - RNA, 19 nt, Artificial Sequence
  Description of Artificial Sequence: Synthetic oligonucleotide
  Antisense strand to SEQ ID NO: 1927442
auguuaacaaccaauaaga

SEQ ID NO: 1927444 - RNA, 19 nt, Artificial Sequence
  Description of Artificial Sequence: Synthetic oligonucleotide
  Sense strand starting at position 1220 of SEQ ID NO: 1879717
aggucuaguguugacgaaa

SEQ ID NO: 1927445 - RNA, 19 nt, Artificial Sequence
  Description of Artificial Sequence: Synthetic oligonucleotide
  Antisense strand to SEQ ID NO: 1927444
uuucgucaacacuagaccu

SEQ ID NO: 1927446 - RNA, 19 nt, Artificial Sequence
  Description of Artificial Sequence: Synthetic oligonucleotide
  Sense strand starting at position 2074 of SEQ ID NO: 1879717
uaucuauuguauccgagag

SEQ ID NO: 1927447 - RNA, 19 nt, Artificial Sequence
  Description of Artificial Sequence: Synthetic oligonucleotide
  Antisense strand to SEQ ID NO: 1927446
cucucggauacaauagaua

SEQ ID NO: 1927448 - RNA, 19 nt, Artificial Sequence
  Description of Artificial Sequence: Synthetic oligonucleotide
  Sense strand starting at position 2075 of SEQ ID NO: 1879717
aucuauuguauccgagagu

SEQ ID NO: 1927449 - RNA, 19 nt, Artificial Sequence
  Description of Artificial Sequence: Synthetic oligonucleotide
  Antisense strand to SEQ ID NO: 1927448
acucucggauacaauagau

SEQ ID NO: 1927450 - RNA, 19 nt, Artificial Sequence
  Description of Artificial Sequence: Synthetic oligonucleotide
  Sense strand starting at position 2470 of SEQ ID NO: 1879717
ccaaucccuucguuaaaug

SEQ ID NO: 1927451 - RNA, 19 nt, Artificial Sequence
  Description of Artificial Sequence: Synthetic oligonucleotide
  Antisense strand to SEQ ID NO: 1927450
cauuuaacgaagggauugg

SEQ ID NO: 1927452 - RNA, 19 nt, Artificial Sequence
  Description of Artificial Sequence: Synthetic oligonucleotide
  Sense strand starting at position 2480 of SEQ ID NO: 1879717
cguuaaauguaucugauaa

SEQ ID NO: 1927453 - RNA, 19 nt, Artificial Sequence
  Description of Artificial Sequence: Synthetic oligonucleotide
  Antisense strand to SEQ ID NO: 1927452
uuaucagauacauuuaacg

SEQ ID NO: 1927454 - RNA, 19 nt, Artificial Sequence
  Description of Artificial Sequence: Synthetic oligonucleotide
  Sense strand starting at position 2687 of SEQ ID NO: 1879717
cuggguacuacugaaaggu

SEQ ID NO: 1927455 - RNA, 19 nt, Artificial Sequence
  Description of Artificial Sequence: Synthetic oligonucleotide
  Antisense strand to SEQ ID NO: 1927454
accuuucaguaguacccag

SEQ ID NO: 1927456 - RNA, 19 nt, Artificial Sequence
  Description of Artificial Sequence: Synthetic oligonucleotide
  Sense strand starting at position 2798 of SEQ ID NO: 1879717
ugaucuaugccauaucugu

SEQ ID NO: 1927457 - RNA, 19 nt, Artificial Sequence
  Description of Artificial Sequence: Synthetic oligonucleotide
  Antisense strand to SEQ ID NO: 1927456
acagauauggcauagauca

SEQ ID NO: 1927458 - RNA, 19 nt, Artificial Sequence
  Description of Artificial Sequence: Synthetic oligonucleotide
  Sense strand starting at position 2804 of SEQ ID NO: 1879717
augccauaucuguaucagu

SEQ ID NO: 1927459 - RNA, 19 nt, Artificial Sequence
  Description of Artificial Sequence: Synthetic oligonucleotide
  Antisense strand to SEQ ID NO: 1927458
acugauacagauauggcau

SEQ ID NO: 1927460 - RNA, 19 nt, Artificial Sequence
  Description of Artificial Sequence: Synthetic oligonucleotide
  Sense strand starting at position 2809 of SEQ ID NO: 1879717
auaucuguaucagugggua

SEQ ID NO: 1927461 - RNA, 19 nt, Artificial Sequence
  Description of Artificial Sequence: Synthetic oligonucleotide
  Antisense strand to SEQ ID NO: 1927460
uacccacugauacagauau

SEQ ID NO: 1927462 - RNA, 19 nt, Artificial Sequence
  Description of Artificial Sequence: Synthetic oligonucleotide
  Sense strand starting at position 2817 of SEQ ID NO: 1879717
aucaguggguacucaaagu

SEQ ID NO: 1927463 - RNA, 19 nt, Artificial Sequence
  Description of Artificial Sequence: Synthetic oligonucleotide
  Antisense strand to SEQ ID NO: 1927462
acuuugaguacccacugau

SEQ ID NO: 1927464 - RNA, 19 nt, Artificial Sequence
  Description of Artificial Sequence: Synthetic oligonucleotide
  Sense strand starting at position 2825 of SEQ ID NO: 1879717
guacucaaaguccaguaau

SEQ ID NO: 1927465 - RNA, 19 nt, Artificial Sequence
  Description of Artificial Sequence: Synthetic oligonucleotide
  Antisense strand to SEQ ID NO: 1927464
auuacuggacuuugaguac

SEQ ID NO: 1927466 - RNA, 19 nt, Artificial Sequence
  Description of Artificial Sequence: Synthetic oligonucleotide
  Sense strand starting at position 2828 of SEQ ID NO: 1879717
cucaaaguccaguaaugcu

SEQ ID NO: 1927467 - RNA, 19 nt, Artificial Sequence
  Description of Artificial Sequence: Synthetic oligonucleotide
  Antisense strand to SEQ ID NO: 1927466
agcauuacuggacuuugag

SEQ ID NO: 1927468 - RNA, 19 nt, Artificial Sequence
  Description of Artificial Sequence: Synthetic oligonucleotide
  Sense strand starting at position 2880 of SEQ ID NO: 1879717
gucagucuuggauaggguu

SEQ ID NO: 1927469 - RNA, 19 nt, Artificial Sequence
  Description of Artificial Sequence: Synthetic oligonucleotide
  Antisense strand to SEQ ID NO: 1927468
aacccuauccaagacugac

SEQ ID NO: 1927470 - RNA, 19 nt, Artificial Sequence
  Description of Artificial Sequence: Synthetic oligonucleotide
  Sense strand starting at position 3054 of SEQ ID NO: 1879717
gggacuguacugggucaua

SEQ ID NO: 1927471 - RNA, 19 nt, Artificial Sequence
  Description of Artificial Sequence: Synthetic oligonucleotide
  Antisense strand to SEQ ID NO: 1927470
uaugacccaguacaguccc

SEQ ID NO: 1927472 - RNA, 19 nt, Artificial Sequence
  Description of Artificial Sequence: Synthetic oligonucleotide
  Sense strand starting at position 3212 of SEQ ID NO: 1879717
gguggugaguucucccaag

SEQ ID NO: 1927473 - RNA, 19 nt, Artificial Sequence
  Description of Artificial Sequence: Synthetic oligonucleotide
  Antisense strand to SEQ ID NO: 1927472
cuugggagaacucaccacc

SEQ ID NO: 1927474 - RNA, 19 nt, Artificial Sequence
  Description of Artificial Sequence: Synthetic oligonucleotide
  Sense strand starting at position 3394 of SEQ ID NO: 1879717
ggaacaaugguagguauua

SEQ ID NO: 1927475 - RNA, 19 nt, Artificial Sequence
  Description of Artificial Sequence: Synthetic oligonucleotide
  Antisense strand to SEQ ID NO: 1927474
uaauaccuaccauuguucc

SEQ ID NO: 1927476 - RNA, 19 nt, Artificial Sequence
  Description of Artificial Sequence: Synthetic oligonucleotide
  Sense strand starting at position 3404 of SEQ ID NO: 1879717
uagguauuacuaggcuauc

SEQ ID NO: 1927477 - RNA, 19 nt, Artificial Sequence
  Description of Artificial Sequence: Synthetic oligonucleotide
  Antisense strand to SEQ ID NO: 1927476
gauagccuaguaauaccua

SEQ ID NO: 1927478 - RNA, 19 nt, Artificial Sequence
  Description of Artificial Sequence: Synthetic oligonucleotide
  Sense strand starting at position 3405 of SEQ ID NO: 1879717
agguauuacuaggcuauca

SEQ ID NO: 1927479 - RNA, 19 nt, Artificial Sequence
  Description of Artificial Sequence: Synthetic oligonucleotide
  Antisense strand to SEQ ID NO: 1927478
ugauagccuaguaauaccu

SEQ ID NO: 1927480 - RNA, 19 nt, Artificial Sequence
  Description of Artificial Sequence: Synthetic oligonucleotide
  Sense strand starting at position 3453 of SEQ ID NO: 1879717
ucagucaguuugucaugaa

SEQ ID NO: 1927481 - RNA, 19 nt, Artificial Sequence
  Description of Artificial Sequence: Synthetic oligonucleotide
  Antisense strand to SEQ ID NO: 1927480
uucaugacaaacugacuga

SEQ ID NO: 1927482 - RNA, 19 nt, Artificial Sequence
  Description of Artificial Sequence: Synthetic oligonucleotide
  Sense strand starting at position 3550 of SEQ ID NO: 1879717
gggccaaguccuggaauca

SEQ ID NO: 1927483 - RNA, 19 nt, Artificial Sequence
  Description of Artificial Sequence: Synthetic oligonucleotide
  Antisense strand to SEQ ID NO: 1927482
ugauuccaggacuuggccc

SEQ ID NO: 1927484 - RNA, 19 nt, Artificial Sequence
  Description of Artificial Sequence: Synthetic oligonucleotide
  Sense strand starting at position 3551 of SEQ ID NO: 1879717
ggccaaguccuggaaucag

SEQ ID NO: 1927485 - RNA, 19 nt, Artificial Sequence
  Description of Artificial Sequence: Synthetic oligonucleotide
  Antisense strand to SEQ ID NO: 1927484
cugauuccaggacuuggcc

SEQ ID NO: 1927486 - RNA, 19 nt, Artificial Sequence
  Description of Artificial Sequence: Synthetic oligonucleotide
  Sense strand starting at position 3704 of SEQ ID NO: 1879717
cagaaugugcuaggucuca

SEQ ID NO: 1927487 - RNA, 19 nt, Artificial Sequence
  Description of Artificial Sequence: Synthetic oligonucleotide
  Antisense strand to SEQ ID NO: 1927486
ugagaccuagcacauucug

SEQ ID NO: 1927488 - RNA, 19 nt, Artificial Sequence
  Description of Artificial Sequence: Synthetic oligonucleotide
  Sense strand starting at position 3761 of SEQ ID NO: 1879717
acgacaugcuauuuauggu

SEQ ID NO: 1927489 - RNA, 19 nt, Artificial Sequence
  Description of Artificial Sequence: Synthetic oligonucleotide
  Antisense strand to SEQ ID NO: 1927488
accauaaauagcaugucgu

SEQ ID NO: 1927490 - RNA, 19 nt, Artificial Sequence
  Description of Artificial Sequence: Synthetic oligonucleotide
  Sense strand starting at position 3799 of SEQ ID NO: 1879717
ugcucaagugcuguuuagu

SEQ ID NO: 1927491 - RNA, 19 nt, Artificial Sequence
  Description of Artificial Sequence: Synthetic oligonucleotide
  Antisense strand to SEQ ID NO: 1927490
acuaaacagcacuugagca

SEQ ID NO: 1927492 - RNA, 19 nt, Artificial Sequence
  Description of Artificial Sequence: Synthetic oligonucleotide
  Sense strand starting at position 3800 of SEQ ID NO: 1879717
gcucaagugcuguuuaguc

SEQ ID NO: 1927493 - RNA, 19 nt, Artificial Sequence
  Description of Artificial Sequence: Synthetic oligonucleotide
  Antisense strand to SEQ ID NO: 1927492
gacuaaacagcacuugagc

SEQ ID NO: 1927494 - RNA, 19 nt, Artificial Sequence
  Description of Artificial Sequence: Synthetic oligonucleotide
  Sense strand starting at position 3827 of SEQ ID NO: 1879717
augaauccugccgggacua

SEQ ID NO: 1927495 - RNA, 19 nt, Artificial Sequence
  Description of Artificial Sequence: Synthetic oligonucleotide
  Antisense strand to SEQ ID NO: 1927494
uagucccggcaggauucau

SEQ ID NO: 1927496 - RNA, 19 nt, Artificial Sequence
  Description of Artificial Sequence: Synthetic oligonucleotide
  Sense strand starting at position 3839 of SEQ ID NO: 1879717
gggacuagguccuuuccuu

SEQ ID NO: 1927497 - RNA, 19 nt, Artificial Sequence
  Description of Artificial Sequence: Synthetic oligonucleotide
  Antisense strand to SEQ ID NO: 1927496
aaggaaaggaccuaguccc

SEQ ID NO: 1927498 - RNA, 19 nt, Artificial Sequence
  Description of Artificial Sequence: Synthetic oligonucleotide
  Sense strand starting at position 3894 of SEQ ID NO: 1879717
uagauauguuauccaagag

SEQ ID NO: 1927499 - RNA, 19 nt, Artificial Sequence
  Description of Artificial Sequence: Synthetic oligonucleotide
  Antisense strand to SEQ ID NO: 1927498
cucuuggauaacauaucua

SEQ ID NO: 1927500 - RNA, 19 nt, Artificial Sequence
  Description of Artificial Sequence: Synthetic oligonucleotide
  Sense strand starting at position 3955 of SEQ ID NO: 1879717
ggaagcugguauccaagau

SEQ ID NO: 1927501 - RNA, 19 nt, Artificial Sequence
  Description of Artificial Sequence: Synthetic oligonucleotide
  Antisense strand to SEQ ID NO: 1927500
aucuuggauaccagcuucc

SEQ ID NO: 1927502 - RNA, 19 nt, Artificial Sequence
  Description of Artificial Sequence: Synthetic oligonucleotide
  Sense strand starting at position 5 of SEQ ID NO: 1879718
cugagucaccgagaggcau

SEQ ID NO: 1927503 - RNA, 19 nt, Artificial Sequence
  Description of Artificial Sequence: Synthetic oligonucleotide
  Antisense strand to SEQ ID NO: 1927502
augccucucggugacucag

SEQ ID NO: 1927504 - RNA, 19 nt, Artificial Sequence
  Description of Artificial Sequence: Synthetic oligonucleotide
  Sense strand starting at position 104 of SEQ ID NO: 1879718
gagugaacgcguuggaaca

SEQ ID NO: 1927505 - RNA, 19 nt, Artificial Sequence
  Description of Artificial Sequence: Synthetic oligonucleotide
  Antisense strand to SEQ ID NO: 1927504
uguuccaacgcguucacuc

SEQ ID NO: 1927506 - RNA, 19 nt, Artificial Sequence
  Description of Artificial Sequence: Synthetic oligonucleotide
  Sense strand starting at position 115 of SEQ ID NO: 1879718
uuggaacagucagucagau

SEQ ID NO: 1927507 - RNA, 19 nt, Artificial Sequence
  Description of Artificial Sequence: Synthetic oligonucleotide
  Antisense strand to SEQ ID NO: 1927506
aucugacugacuguuccaa

SEQ ID NO: 1927508 - RNA, 19 nt, Artificial Sequence
  Description of Artificial Sequence: Synthetic oligonucleotide
  Sense strand starting at position 315 of SEQ ID NO: 1879718
gccuuuguucuggaacaca

SEQ ID NO: 1927509 - RNA, 19 nt, Artificial Sequence
  Description of Artificial Sequence: Synthetic oligonucleotide
  Antisense strand to SEQ ID NO: 1927508
uguguuccagaacaaaggc

SEQ ID NO: 1927510 - RNA, 19 nt, Artificial Sequence
  Description of Artificial Sequence: Synthetic oligonucleotide
  Sense strand starting at position 368 of SEQ ID NO: 1879718
uccucucacucuuuacgua

SEQ ID NO: 1927511 - RNA, 19 nt, Artificial Sequence
  Description of Artificial Sequence: Synthetic oligonucleotide
  Antisense strand to SEQ ID NO: 1927510
uacguaaagagugagagga

SEQ ID NO: 1927512 - RNA, 19 nt, Artificial Sequence
  Description of Artificial Sequence: Synthetic oligonucleotide
  Sense strand starting at position 391 of SEQ ID NO: 1879718
ccaucuucucaguaaggcu

SEQ ID NO: 1927513 - RNA, 19 nt, Artificial Sequence
  Description of Artificial Sequence: Synthetic oligonucleotide
  Antisense strand to SEQ ID NO: 1927512
agccuuacugagaagaugg

SEQ ID NO: 1927514 - RNA, 19 nt, Artificial Sequence
  Description of Artificial Sequence: Synthetic oligonucleotide
  Sense strand starting at position 538 of SEQ ID NO: 1879718
gugcauuucccuuaguuau

SEQ ID NO: 1927515 - RNA, 19 nt, Artificial Sequence
  Description of Artificial Sequence: Synthetic oligonucleotide
  Antisense strand to SEQ ID NO: 1927514
auaacuaagggaaaugcac

SEQ ID NO: 1927516 - RNA, 19 nt, Artificial Sequence
  Description of Artificial Sequence: Synthetic oligonucleotide
  Sense strand starting at position 540 of SEQ ID NO: 1879718
gcauuucccuuaguuaucu

SEQ ID NO: 1927517 - RNA, 19 nt, Artificial Sequence
  Description of Artificial Sequence: Synthetic oligonucleotide
  Antisense strand to SEQ ID NO: 1927516
agauaacuaagggaaaugc

SEQ ID NO: 1927518 - RNA, 19 nt, Artificial Sequence
  Description of Artificial Sequence: Synthetic oligonucleotide
  Sense strand starting at position 1193 of SEQ ID NO: 1879718
cuacaauuguaucuccgau

SEQ ID NO: 1927519 - RNA, 19 nt, Artificial Sequence
  Description of Artificial Sequence: Synthetic oligonucleotide
  Antisense strand to SEQ ID NO: 1927518
aucggagauacaauuguag

SEQ ID NO: 1927520 - RNA, 19 nt, Artificial Sequence
  Description of Artificial Sequence: Synthetic oligonucleotide
  Sense strand starting at position 1276 of SEQ ID NO: 1879718
ucccuaagugccuggagua

SEQ ID NO: 1927521 - RNA, 19 nt, Artificial Sequence
  Description of Artificial Sequence: Synthetic oligonucleotide
  Antisense strand to SEQ ID NO: 1927520
uacuccaggcacuuaggga

SEQ ID NO: 1927522 - RNA, 19 nt, Artificial Sequence
  Description of Artificial Sequence: Synthetic oligonucleotide
  Sense strand starting at position 1461 of SEQ ID NO: 1879718
ucuguuuccucaucaagag

SEQ ID NO: 1927523 - RNA, 19 nt, Artificial Sequence
  Description of Artificial Sequence: Synthetic oligonucleotide
  Antisense strand to SEQ ID NO: 1927522
cucuugaugaggaaacaga

SEQ ID NO: 1927524 - RNA, 19 nt, Artificial Sequence
  Description of Artificial Sequence: Synthetic oligonucleotide
  Sense strand starting at position 1462 of SEQ ID NO: 1879718
cuguuuccucaucaagaga

SEQ ID NO: 1927525 - RNA, 19 nt, Artificial Sequence
  Description of Artificial Sequence: Synthetic oligonucleotide
  Antisense strand to SEQ ID NO: 1927524
ucucuugaugaggaaacag

SEQ ID NO: 1927526 - RNA, 19 nt, Artificial Sequence
  Description of Artificial Sequence: Synthetic oligonucleotide
  Sense strand starting at position 1568 of SEQ ID NO: 1879718
gaagaaaugugccuuaagu

SEQ ID NO: 1927527 - RNA, 19 nt, Artificial Sequence
  Description of Artificial Sequence: Synthetic oligonucleotide
  Antisense strand to SEQ ID NO: 1927526
acuuaaggcacauuucuuc

SEQ ID NO: 1927528 - RNA, 19 nt, Artificial Sequence
  Description of Artificial Sequence: Synthetic oligonucleotide
  Sense strand starting at position 1570 of SEQ ID NO: 1879718
agaaaugugccuuaaguug

SEQ ID NO: 1927529 - RNA, 19 nt, Artificial Sequence
  Description of Artificial Sequence: Synthetic oligonucleotide
  Antisense strand to SEQ ID NO: 1927528
caacuuaaggcacauuucu

SEQ ID NO: 1927530 - RNA, 19 nt, Artificial Sequence
  Description of Artificial Sequence: Synthetic oligonucleotide
  Sense strand starting at position 1720 of SEQ ID NO: 1879718
acagauguuacgggaacca

SEQ ID NO: 1927531 - RNA, 19 nt, Artificial Sequence
  Description of Artificial Sequence: Synthetic oligonucleotide
  Antisense strand to SEQ ID NO: 1927530
ugguucccguaacaucugu

SEQ ID NO: 1927532 - RNA, 19 nt, Artificial Sequence
  Description of Artificial Sequence: Synthetic oligonucleotide
  Sense strand starting at position 1749 of SEQ ID NO: 1879718
agcuaagugcuguggagaa

SEQ ID NO: 1927533 - RNA, 19 nt, Artificial Sequence
  Description of Artificial Sequence: Synthetic oligonucleotide
  Antisense strand to SEQ ID NO: 1927532
uucuccacagcacuuagcu

SEQ ID NO: 1927534 - RNA, 19 nt, Artificial Sequence
  Description of Artificial Sequence: Synthetic oligonucleotide
  Sense strand starting at position 1783 of SEQ ID NO: 1879718
ggaggaggugucugggaca

SEQ ID NO: 1927535 - RNA, 19 nt, Artificial Sequence
  Description of Artificial Sequence: Synthetic oligonucleotide
  Antisense strand to SEQ ID NO: 1927534
ugucccagacaccuccucc

SEQ ID NO: 1927536 - RNA, 19 nt, Artificial Sequence
  Description of Artificial Sequence: Synthetic oligonucleotide
  Sense strand starting at position 2028 of SEQ ID NO: 1879718
gggcaucgacuugaguaaa

SEQ ID NO: 1927537 - RNA, 19 nt, Artificial Sequence
  Description of Artificial Sequence: Synthetic oligonucleotide
  Antisense strand to SEQ ID NO: 1927536
uuuacucaagucgaugccc

SEQ ID NO: 1927538 - RNA, 19 nt, Artificial Sequence
  Description of Artificial Sequence: Synthetic oligonucleotide
  Sense strand starting at position 2038 of SEQ ID NO: 1879718
uugaguaaauagcuuaacu

SEQ ID NO: 1927539 - RNA, 19 nt, Artificial Sequence
  Description of Artificial Sequence: Synthetic oligonucleotide
  Antisense strand to SEQ ID NO: 1927538
aguuaagcuauuuacucaa

SEQ ID NO: 1927540 - RNA, 19 nt, Artificial Sequence
  Description of Artificial Sequence: Synthetic oligonucleotide
  Sense strand starting at position 2126 of SEQ ID NO: 1879718
ugaucauacucagagaaau

SEQ ID NO: 1927541 - RNA, 19 nt, Artificial Sequence
  Description of Artificial Sequence: Synthetic oligonucleotide
  Antisense strand to SEQ ID NO: 1927540
auuucucugaguaugauca

SEQ ID NO: 1927542 - RNA, 19 nt, Artificial Sequence
  Description of Artificial Sequence: Synthetic oligonucleotide
  Sense strand starting at position 2712 of SEQ ID NO: 1879718
gggaacauuuaauaccuuu

SEQ ID NO: 1927543 - RNA, 19 nt, Artificial Sequence
  Description of Artificial Sequence: Synthetic oligonucleotide
  Antisense strand to SEQ ID NO: 1927542
aaagguauuaaauguuccc

SEQ ID NO: 1927544 - RNA, 19 nt, Artificial Sequence
  Description of Artificial Sequence: Synthetic oligonucleotide
  Sense strand starting at position 2865 of SEQ ID NO: 1879718
guacccuucccagaugcua

SEQ ID NO: 1927545 - RNA, 19 nt, Artificial Sequence
  Description of Artificial Sequence: Synthetic oligonucleotide
  Antisense strand to SEQ ID NO: 1927544
uagcaucugggaaggguac

SEQ ID NO: 1927546 - RNA, 19 nt, Artificial Sequence
  Description of Artificial Sequence: Synthetic oligonucleotide
  Sense strand starting at position 2878 of SEQ ID NO: 1879718
augcuaguaugcuccauuu

SEQ ID NO: 1927547 - RNA, 19 nt, Artificial Sequence
  Description of Artificial Sequence: Synthetic oligonucleotide
  Antisense strand to SEQ ID NO: 1927546
aaauggagcauacuagcau

SEQ ID NO: 1927548 - RNA, 19 nt, Artificial Sequence
  Description of Artificial Sequence: Synthetic oligonucleotide
  Sense strand starting at position 2880 of SEQ ID NO: 1879718
gcuaguaugcuccauuuac

SEQ ID NO: 1927549 - RNA, 19 nt, Artificial Sequence
  Description of Artificial Sequence: Synthetic oligonucleotide
  Antisense strand to SEQ ID NO: 1927548
guaaauggagcauacuagc

SEQ ID NO: 1927550 - RNA, 19 nt, Artificial Sequence
  Description of Artificial Sequence: Synthetic oligonucleotide
  Sense strand starting at position 3016 of SEQ ID NO: 1879718
acuguuugagauuaacuuu

SEQ ID NO: 1927551 - RNA, 19 nt, Artificial Sequence
  Description of Artificial Sequence: Synthetic oligonucleotide
  Antisense strand to SEQ ID NO: 1927550
aaaguuaaucucaaacagu

SEQ ID NO: 1927552 - RNA, 19 nt, Artificial Sequence
  Description of Artificial Sequence: Synthetic oligonucleotide
  Sense strand starting at position 3087 of SEQ ID NO: 1879718
ggcuuucuguccucugaau

SEQ ID NO: 1927553 - RNA, 19 nt, Artificial Sequence
  Description of Artificial Sequence: Synthetic oligonucleotide
  Antisense strand to SEQ ID NO: 1927552
auucagaggacagaaagcc

SEQ ID NO: 1927554 - RNA, 19 nt, Artificial Sequence
  Description of Artificial Sequence: Synthetic oligonucleotide
  Sense strand starting at position 3098 of SEQ ID NO: 1879718
cucugaaugcaucagccau

SEQ ID NO: 1927555 - RNA, 19 nt, Artificial Sequence
  Description of Artificial Sequence: Synthetic oligonucleotide
  Antisense strand to SEQ ID NO: 1927554
auggcugaugcauucagag

SEQ ID NO: 1927556 - RNA, 19 nt, Artificial Sequence
  Description of Artificial Sequence: Synthetic oligonucleotide
  Sense strand starting at position 3104 of SEQ ID NO: 1879718
augcaucagccaugauuuc

SEQ ID NO: 1927557 - RNA, 19 nt, Artificial Sequence
  Description of Artificial Sequence: Synthetic oligonucleotide
  Antisense strand to SEQ ID NO: 1927556
gaaaucauggcugaugcau

SEQ ID NO: 1927558 - RNA, 19 nt, Artificial Sequence
  Description of Artificial Sequence: Synthetic oligonucleotide
  Sense strand starting at position 3130 of SEQ ID NO: 1879718
cucucugaguucccugaga

SEQ ID NO: 1927559 - RNA, 19 nt, Artificial Sequence
  Description of Artificial Sequence: Synthetic oligonucleotide
  Antisense strand to SEQ ID NO: 1927558
ucucagggaacucagagag

SEQ ID NO: 1927560 - RNA, 19 nt, Artificial Sequence
  Description of Artificial Sequence: Synthetic oligonucleotide
  Sense strand starting at position 3132 of SEQ ID NO: 1879718
cucugaguucccugagagc

SEQ ID NO: 1927561 - RNA, 19 nt, Artificial Sequence
  Description of Artificial Sequence: Synthetic oligonucleotide
  Antisense strand to SEQ ID NO: 1927560
gcucucagggaacucagag

SEQ ID NO: 1927562 - RNA, 19 nt, Artificial Sequence
  Description of Artificial Sequence: Synthetic oligonucleotide
  Sense strand starting at position 3261 of SEQ ID NO: 1879718
aaaguuagacucugaucug

SEQ ID NO: 1927563 - RNA, 19 nt, Artificial Sequence
  Description of Artificial Sequence: Synthetic oligonucleotide
  Antisense strand to SEQ ID NO: 1927562
cagaucagagucuaacuuu

SEQ ID NO: 1927564 - RNA, 19 nt, Artificial Sequence
  Description of Artificial Sequence: Synthetic oligonucleotide
  Sense strand starting at position 3264 of SEQ ID NO: 1879718
guuagacucugaucuggga

SEQ ID NO: 1927565 - RNA, 19 nt, Artificial Sequence
  Description of Artificial Sequence: Synthetic oligonucleotide
  Antisense strand to SEQ ID NO: 1927564
ucccagaucagagucuaac

SEQ ID NO: 1927566 - RNA, 19 nt, Artificial Sequence
  Description of Artificial Sequence: Synthetic oligonucleotide
  Sense strand starting at position 3395 of SEQ ID NO: 1879718
aguagaaagucacagauaa

SEQ ID NO: 1927567 - RNA, 19 nt, Artificial Sequence
  Description of Artificial Sequence: Synthetic oligonucleotide
  Antisense strand to SEQ ID NO: 1927566
uuaucugugacuuucuacu

SEQ ID NO: 1927568 - RNA, 19 nt, Artificial Sequence
  Description of Artificial Sequence: Synthetic oligonucleotide
  Sense strand starting at position 3616 of SEQ ID NO: 1879718
caaagaaagucagaguaca

SEQ ID NO: 1927569 - RNA, 19 nt, Artificial Sequence
  Description of Artificial Sequence: Synthetic oligonucleotide
  Antisense strand to SEQ ID NO: 1927568
uguacucugacuuucuuug

SEQ ID NO: 1927570 - RNA, 19 nt, Artificial Sequence
  Description of Artificial Sequence: Synthetic oligonucleotide
  Sense strand starting at position 3652 of SEQ ID NO: 1879718
agaaguaucacaggaguca

SEQ ID NO: 1927571 - RNA, 19 nt, Artificial Sequence
  Description of Artificial Sequence: Synthetic oligonucleotide
  Antisense strand to SEQ ID NO: 1927570
ugacuccugugauacuucu

SEQ ID NO: 1927572 - RNA, 19 nt, Artificial Sequence
  Description of Artificial Sequence: Synthetic oligonucleotide
  Sense strand starting at position 3808 of SEQ ID NO: 1879718
auuggaagaugucuuugga

SEQ ID NO: 1927573 - RNA, 19 nt, Artificial Sequence
  Description of Artificial Sequence: Synthetic oligonucleotide
  Antisense strand to SEQ ID NO: 1927572
uccaaagacaucuuccaau

SEQ ID NO: 1927574 - RNA, 19 nt, Artificial Sequence
  Description of Artificial Sequence: Synthetic oligonucleotide
  Sense strand starting at position 3846 of SEQ ID NO: 1879718
caacucugaguaugucaga

SEQ ID NO: 1927575 - RNA, 19 nt, Artificial Sequence
  Description of Artificial Sequence: Synthetic oligonucleotide
  Antisense strand to SEQ ID NO: 1927574
ucugacauacucagaguug

SEQ ID NO: 1927576 - RNA, 19 nt, Artificial Sequence
  Description of Artificial Sequence: Synthetic oligonucleotide
  Sense strand starting at position 3876 of SEQ ID NO: 1879718
agaugagauuucugucccu

SEQ ID NO: 1927577 - RNA, 19 nt, Artificial Sequence
  Description of Artificial Sequence: Synthetic oligonucleotide
  Antisense strand to SEQ ID NO: 1927576
agggacagaaaucucaucu

SEQ ID NO: 1927578 - RNA, 19 nt, Artificial Sequence
  Description of Artificial Sequence: Synthetic oligonucleotide
  Sense strand starting at position 3894 of SEQ ID NO: 1879718
ugaaaccaaccuuguagua

SEQ ID NO: 1927579 - RNA, 19 nt, Artificial Sequence
  Description of Artificial Sequence: Synthetic oligonucleotide
  Antisense strand to SEQ ID NO: 1927578
uacuacaagguugguuuca

SEQ ID NO: 1927580 - RNA, 19 nt, Artificial Sequence
  Description of Artificial Sequence: Synthetic oligonucleotide
  Sense strand starting at position 3953 of SEQ ID NO: 1879718
aauugagugucggcaauuc

SEQ ID NO: 1927581 - RNA, 19 nt, Artificial Sequence
  Description of Artificial Sequence: Synthetic oligonucleotide
  Antisense strand to SEQ ID NO: 1927580
gaauugccgacacucaauu

SEQ ID NO: 1927582 - RNA, 19 nt, Artificial Sequence
  Description of Artificial Sequence: Synthetic oligonucleotide
  Sense strand starting at position 32 of SEQ ID NO: 1879719
agcccuaucggguagauaa

SEQ ID NO: 1927583 - RNA, 19 nt, Artificial Sequence
  Description of Artificial Sequence: Synthetic oligonucleotide
  Antisense strand to SEQ ID NO: 1927582
uuaucuacccgauagggcu

SEQ ID NO: 1927584 - RNA, 19 nt, Artificial Sequence
  Description of Artificial Sequence: Synthetic oligonucleotide
  Sense strand starting at position 42 of SEQ ID NO: 1879719
gguagauaacacuauuguc

SEQ ID NO: 1927585 - RNA, 19 nt, Artificial Sequence
  Description of Artificial Sequence: Synthetic oligonucleotide
  Antisense strand to SEQ ID NO: 1927584
gacaauaguguuaucuacc

SEQ ID NO: 1927586 - RNA, 19 nt, Artificial Sequence
  Description of Artificial Sequence: Synthetic oligonucleotide
  Sense strand starting at position 177 of SEQ ID NO: 1879719
ucuauccuuugggucuaau

SEQ ID NO: 1927587 - RNA, 19 nt, Artificial Sequence
  Description of Artificial Sequence: Synthetic oligonucleotide
  Antisense strand to SEQ ID NO: 1927586
auuagacccaaaggauaga

SEQ ID NO: 1927588 - RNA, 19 nt, Artificial Sequence
  Description of Artificial Sequence: Synthetic oligonucleotide
  Sense strand starting at position 289 of SEQ ID NO: 1879719
acuccuuggucaccaaagu

SEQ ID NO: 1927589 - RNA, 19 nt, Artificial Sequence
  Description of Artificial Sequence: Synthetic oligonucleotide
  Antisense strand to SEQ ID NO: 1927588
acuuuggugaccaaggagu

SEQ ID NO: 1927590 - RNA, 19 nt, Artificial Sequence
  Description of Artificial Sequence: Synthetic oligonucleotide
  Sense strand starting at position 290 of SEQ ID NO: 1879719
cuccuuggucaccaaagua

SEQ ID NO: 1927591 - RNA, 19 nt, Artificial Sequence
  Description of Artificial Sequence: Synthetic oligonucleotide
  Antisense strand to SEQ ID NO: 1927590
uacuuuggugaccaaggag

SEQ ID NO: 1927592 - RNA, 19 nt, Artificial Sequence
  Description of Artificial Sequence: Synthetic oligonucleotide
  Sense strand starting at position 314 of SEQ ID NO: 1879719
cgguguacauauuucuaca

SEQ ID NO: 1927593 - RNA, 19 nt, Artificial Sequence
  Description of Artificial Sequence: Synthetic oligonucleotide
  Antisense strand to SEQ ID NO: 1927592
uguagaaauauguacaccg

SEQ ID NO: 1927594 - RNA, 19 nt, Artificial Sequence
  Description of Artificial Sequence: Synthetic oligonucleotide
  Sense strand starting at position 643 of SEQ ID NO: 1879719
ugcaucuggcaaugguaaa

SEQ ID NO: 1927595 - RNA, 19 nt, Artificial Sequence
  Description of Artificial Sequence: Synthetic oligonucleotide
  Antisense strand to SEQ ID NO: 1927594
uuuaccauugccagaugca

SEQ ID NO: 1927596 - RNA, 19 nt, Artificial Sequence
  Description of Artificial Sequence: Synthetic oligonucleotide
  Sense strand starting at position 653 of SEQ ID NO: 1879719
aaugguaaacgagguguuu

SEQ ID NO: 1927597 - RNA, 19 nt, Artificial Sequence
  Description of Artificial Sequence: Synthetic oligonucleotide
  Antisense strand to SEQ ID NO: 1927596
aaacaccucguuuaccauu

SEQ ID NO: 1927598 - RNA, 19 nt, Artificial Sequence
  Description of Artificial Sequence: Synthetic oligonucleotide
  Sense strand starting at position 854 of SEQ ID NO: 1879719
acgucagacuuauuacaga

SEQ ID NO: 1927599 - RNA, 19 nt, Artificial Sequence
  Description of Artificial Sequence: Synthetic oligonucleotide
  Antisense strand to SEQ ID NO: 1927598
ucuguaauaagucugacgu

SEQ ID NO: 1927600 - RNA, 19 nt, Artificial Sequence
  Description of Artificial Sequence: Synthetic oligonucleotide
  Sense strand starting at position 892 of SEQ ID NO: 1879719
auguaugcacuuuguaaag

SEQ ID NO: 1927601 - RNA, 19 nt, Artificial Sequence
  Description of Artificial Sequence: Synthetic oligonucleotide
  Antisense strand to SEQ ID NO: 1927600
cuuuacaaagugcauacau

SEQ ID NO: 1927602 - RNA, 19 nt, Artificial Sequence
  Description of Artificial Sequence: Synthetic oligonucleotide
  Sense strand starting at position 948 of SEQ ID NO: 1879719
ugugcaucucaucauuguu

SEQ ID NO: 1927603 - RNA, 19 nt, Artificial Sequence
  Description of Artificial Sequence: Synthetic oligonucleotide
  Antisense strand to SEQ ID NO: 1927602
aacaaugaugagaugcaca

SEQ ID NO: 1927604 - RNA, 19 nt, Artificial Sequence
  Description of Artificial Sequence: Synthetic oligonucleotide
  Sense strand starting at position 1282 of SEQ ID NO: 1879719
uuauguuaucucugagcac

SEQ ID NO: 1927605 - RNA, 19 nt, Artificial Sequence
  Description of Artificial Sequence: Synthetic oligonucleotide
  Antisense strand to SEQ ID NO: 1927604
gugcucagagauaacauaa

SEQ ID NO: 1927606 - RNA, 19 nt, Artificial Sequence
  Description of Artificial Sequence: Synthetic oligonucleotide
  Sense strand starting at position 1371 of SEQ ID NO: 1879719
auuuguaucugaugaaacu

SEQ ID NO: 1927607 - RNA, 19 nt, Artificial Sequence
  Description of Artificial Sequence: Synthetic oligonucleotide
  Antisense strand to SEQ ID NO: 1927606
aguuucaucagauacaaau

SEQ ID NO: 1927608 - RNA, 19 nt, Artificial Sequence
  Description of Artificial Sequence: Synthetic oligonucleotide
  Sense strand starting at position 1380 of SEQ ID NO: 1879719
ugaugaaacugugccugua

SEQ ID NO: 1927609 - RNA, 19 nt, Artificial Sequence
  Description of Artificial Sequence: Synthetic oligonucleotide
  Antisense strand to SEQ ID NO: 1927608
uacaggcacaguuucauca

SEQ ID NO: 1927610 - RNA, 19 nt, Artificial Sequence
  Description of Artificial Sequence: Synthetic oligonucleotide
  Sense strand starting at position 1434 of SEQ ID NO: 1879719
guacuugguugaccuuaaa

SEQ ID NO: 1927611 - RNA, 19 nt, Artificial Sequence
  Description of Artificial Sequence: Synthetic oligonucleotide
  Antisense strand to SEQ ID NO: 1927610
uuuaaggucaaccaaguac

SEQ ID NO: 1927612 - RNA, 19 nt, Artificial Sequence
  Description of Artificial Sequence: Synthetic oligonucleotide
  Sense strand starting at position 1498 of SEQ ID NO: 1879719
uaagcauuucgcugugcag

SEQ ID NO: 1927613 - RNA, 19 nt, Artificial Sequence
  Description of Artificial Sequence: Synthetic oligonucleotide
  Antisense strand to SEQ ID NO: 1927612
cugcacagcgaaaugcuua

SEQ ID NO: 1927614 - RNA, 19 nt, Artificial Sequence
  Description of Artificial Sequence: Synthetic oligonucleotide
  Sense strand starting at position 1627 of SEQ ID NO: 1879719
gcuuuccagugauucugga

SEQ ID NO: 1927615 - RNA, 19 nt, Artificial Sequence
  Description of Artificial Sequence: Synthetic oligonucleotide
  Antisense strand to SEQ ID NO: 1927614
uccagaaucacuggaaagc

SEQ ID NO: 1927616 - RNA, 19 nt, Artificial Sequence
  Description of Artificial Sequence: Synthetic oligonucleotide
  Sense strand starting at position 1684 of SEQ ID NO: 1879719
gccaccaucuuguuacuga

SEQ ID NO: 1927617 - RNA, 19 nt, Artificial Sequence
  Description of Artificial Sequence: Synthetic oligonucleotide
  Antisense strand to SEQ ID NO: 1927616
ucaguaacaagaugguggc

SEQ ID NO: 1927618 - RNA, 19 nt, Artificial Sequence
  Description of Artificial Sequence: Synthetic oligonucleotide
  Sense strand starting at position 2003 of SEQ ID NO: 1879719
uggaaagccuguuugcaua

SEQ ID NO: 1927619 - RNA, 19 nt, Artificial Sequence
  Description of Artificial Sequence: Synthetic oligonucleotide
  Antisense strand to SEQ ID NO: 1927618
uaugcaaacaggcuuucca

SEQ ID NO: 1927620 - RNA, 19 nt, Artificial Sequence
  Description of Artificial Sequence: Synthetic oligonucleotide
  Sense strand starting at position 2377 of SEQ ID NO: 1879719
ggugcaagacaaugaaucu

SEQ ID NO: 1927621 - RNA, 19 nt, Artificial Sequence
  Description of Artificial Sequence: Synthetic oligonucleotide
  Antisense strand to SEQ ID NO: 1927620
agauucauugucuugcacc

SEQ ID NO: 1927622 - RNA, 19 nt, Artificial Sequence
  Description of Artificial Sequence: Synthetic oligonucleotide
  Sense strand starting at position 2441 of SEQ ID NO: 1879719
uggucacuucuuuaugcua

SEQ ID NO: 1927623 - RNA, 19 nt, Artificial Sequence
  Description of Artificial Sequence: Synthetic oligonucleotide
  Antisense strand to SEQ ID NO: 1927622
uagcauaaagaagugacca

SEQ ID NO: 1927624 - RNA, 19 nt, Artificial Sequence
  Description of Artificial Sequence: Synthetic oligonucleotide
  Sense strand starting at position 2448 of SEQ ID NO: 1879719
uucuuuaugcuagaaguua

SEQ ID NO: 1927625 - RNA, 19 nt, Artificial Sequence
  Description of Artificial Sequence: Synthetic oligonucleotide
  Antisense strand to SEQ ID NO: 1927624
uaacuucuagcauaaagaa

SEQ ID NO: 1927626 - RNA, 19 nt, Artificial Sequence
  Description of Artificial Sequence: Synthetic oligonucleotide
  Sense strand starting at position 2782 of SEQ ID NO: 1879719
cugagugggucuuuaucau

SEQ ID NO: 1927627 - RNA, 19 nt, Artificial Sequence
  Description of Artificial Sequence: Synthetic oligonucleotide
  Antisense strand to SEQ ID NO: 1927626
augauaaagacccacucag

SEQ ID NO: 1927628 - RNA, 19 nt, Artificial Sequence
  Description of Artificial Sequence: Synthetic oligonucleotide
  Sense strand starting at position 2821 of SEQ ID NO: 1879719
uuguauggacagugguauu

SEQ ID NO: 1927629 - RNA, 19 nt, Artificial Sequence
  Description of Artificial Sequence: Synthetic oligonucleotide
  Antisense strand to SEQ ID NO: 1927628
aauaccacuguccauacaa

SEQ ID NO: 1927630 - RNA, 19 nt, Artificial Sequence
  Description of Artificial Sequence: Synthetic oligonucleotide
  Sense strand starting at position 3046 of SEQ ID NO: 1879719
augaaauacugugcaaaca

SEQ ID NO: 1927631 - RNA, 19 nt, Artificial Sequence
  Description of Artificial Sequence: Synthetic oligonucleotide
  Antisense strand to SEQ ID NO: 1927630
uguuugcacaguauuucau

SEQ ID NO: 1927632 - RNA, 19 nt, Artificial Sequence
  Description of Artificial Sequence: Synthetic oligonucleotide
  Sense strand starting at position 3087 of SEQ ID NO: 1879719
uugggugucacugaggcaa

SEQ ID NO: 1927633 - RNA, 19 nt, Artificial Sequence
  Description of Artificial Sequence: Synthetic oligonucleotide
  Antisense strand to SEQ ID NO: 1927632
uugccucagugacacccaa

SEQ ID NO: 1927634 - RNA, 19 nt, Artificial Sequence
  Description of Artificial Sequence: Synthetic oligonucleotide
  Sense strand starting at position 3091 of SEQ ID NO: 1879719
gugucacugaggcaaucua

SEQ ID NO: 1927635 - RNA, 19 nt, Artificial Sequence
  Description of Artificial Sequence: Synthetic oligonucleotide
  Antisense strand to SEQ ID NO: 1927634
uagauugccucagugacac

SEQ ID NO: 1927636 - RNA, 19 nt, Artificial Sequence
  Description of Artificial Sequence: Synthetic oligonucleotide
  Sense strand starting at position 3110 of SEQ ID NO: 1879719
uggcacuagagaggucaau

SEQ ID NO: 1927637 - RNA, 19 nt, Artificial Sequence
  Description of Artificial Sequence: Synthetic oligonucleotide
  Antisense strand to SEQ ID NO: 1927636
auugaccucucuagugcca

SEQ ID NO: 1927638 - RNA, 19 nt, Artificial Sequence
  Description of Artificial Sequence: Synthetic oligonucleotide
  Sense strand starting at position 3126 of SEQ ID NO: 1879719
aauuaugugugagcuagag

SEQ ID NO: 1927639 - RNA, 19 nt, Artificial Sequence
  Description of Artificial Sequence: Synthetic oligonucleotide
  Antisense strand to SEQ ID NO: 1927638
cucuagcucacacauaauu

SEQ ID NO: 1927640 - RNA, 19 nt, Artificial Sequence
  Description of Artificial Sequence: Synthetic oligonucleotide
  Sense strand starting at position 3128 of SEQ ID NO: 1879719
uuaugugugagcuagagag

SEQ ID NO: 1927641 - RNA, 19 nt, Artificial Sequence
  Description of Artificial Sequence: Synthetic oligonucleotide
  Antisense strand to SEQ ID NO: 1927640
cucucuagcucacacauaa

SEQ ID NO: 1927642 - RNA, 19 nt, Artificial Sequence
  Description of Artificial Sequence: Synthetic oligonucleotide
  Sense strand starting at position 3138 of SEQ ID NO: 1879719
gcuagagagcucuaacaag

SEQ ID NO: 1927643 - RNA, 19 nt, Artificial Sequence
  Description of Artificial Sequence: Synthetic oligonucleotide
  Antisense strand to SEQ ID NO: 1927642
cuuguuagagcucucuagc

SEQ ID NO: 1927644 - RNA, 19 nt, Artificial Sequence
  Description of Artificial Sequence: Synthetic oligonucleotide
  Sense strand starting at position 3166 of SEQ ID NO: 1879719
cugauuuaauacugguaag

SEQ ID NO: 1927645 - RNA, 19 nt, Artificial Sequence
  Description of Artificial Sequence: Synthetic oligonucleotide
  Antisense strand to SEQ ID NO: 1927644
cuuaccaguauuaaaucag

SEQ ID NO: 1927646 - RNA, 19 nt, Artificial Sequence
  Description of Artificial Sequence: Synthetic oligonucleotide
  Sense strand starting at position 3251 of SEQ ID NO: 1879719
ucuuauuagagaugugugu

SEQ ID NO: 1927647 - RNA, 19 nt, Artificial Sequence
  Description of Artificial Sequence: Synthetic oligonucleotide
  Antisense strand to SEQ ID NO: 1927646
acacacaucucuaauaaga

SEQ ID NO: 1927648 - RNA, 19 nt, Artificial Sequence
  Description of Artificial Sequence: Synthetic oligonucleotide
  Sense strand starting at position 3253 of SEQ ID NO: 1879719
uuauuagagauguguguau

SEQ ID NO: 1927649 - RNA, 19 nt, Artificial Sequence
  Description of Artificial Sequence: Synthetic oligonucleotide
  Antisense strand to SEQ ID NO: 1927648
auacacacaucucuaauaa

SEQ ID NO: 1927650 - RNA, 19 nt, Artificial Sequence
  Description of Artificial Sequence: Synthetic oligonucleotide
  Sense strand starting at position 3272 of SEQ ID NO: 1879719
cggguugacugccuauaaa

SEQ ID NO: 1927651 - RNA, 19 nt, Artificial Sequence
  Description of Artificial Sequence: Synthetic oligonucleotide
  Antisense strand to SEQ ID NO: 1927650
uuuauaggcagucaacccg

SEQ ID NO: 1927652 - RNA, 19 nt, Artificial Sequence
  Description of Artificial Sequence: Synthetic oligonucleotide
  Sense strand starting at position 3275 of SEQ ID NO: 1879719
guugacugccuauaaauau

SEQ ID NO: 1927653 - RNA, 19 nt, Artificial Sequence
  Description of Artificial Sequence: Synthetic oligonucleotide
  Antisense strand to SEQ ID NO: 1927652
auauuuauaggcagucaac

SEQ ID NO: 1927654 - RNA, 19 nt, Artificial Sequence
  Description of Artificial Sequence: Synthetic oligonucleotide
  Sense strand starting at position 3488 of SEQ ID NO: 1879719
ugagaauucuggcucuuua

SEQ ID NO: 1927655 - RNA, 19 nt, Artificial Sequence
  Description of Artificial Sequence: Synthetic oligonucleotide
  Antisense strand to SEQ ID NO: 1927654
uaaagagccagaauucuca

SEQ ID NO: 1927656 - RNA, 19 nt, Artificial Sequence
  Description of Artificial Sequence: Synthetic oligonucleotide
  Sense strand starting at position 3517 of SEQ ID NO: 1879719
gggcuuuauaaauagguuu

SEQ ID NO: 1927657 - RNA, 19 nt, Artificial Sequence
  Description of Artificial Sequence: Synthetic oligonucleotide
  Antisense strand to SEQ ID NO: 1927656
aaaccuauuuauaaagccc

SEQ ID NO: 1927658 - RNA, 19 nt, Artificial Sequence
  Description of Artificial Sequence: Synthetic oligonucleotide
  Sense strand starting at position 3704 of SEQ ID NO: 1879719
ucaauauauuguccauguu

SEQ ID NO: 1927659 - RNA, 19 nt, Artificial Sequence
  Description of Artificial Sequence: Synthetic oligonucleotide
  Antisense strand to SEQ ID NO: 1927658
aacauggacaauauauuga

SEQ ID NO: 1927660 - RNA, 19 nt, Artificial Sequence
  Description of Artificial Sequence: Synthetic oligonucleotide
  Sense strand starting at position 3707 of SEQ ID NO: 1879719
auauauuguccauguugga

SEQ ID NO: 1927661 - RNA, 19 nt, Artificial Sequence
  Description of Artificial Sequence: Synthetic oligonucleotide
  Antisense strand to SEQ ID NO: 1927660
uccaacauggacaauauau

SEQ ID NO: 1927662 - RNA, 19 nt, Artificial Sequence
  Description of Artificial Sequence: Synthetic oligonucleotide
  Sense strand starting at position 28 of SEQ ID NO: 1879720
ucuguaauaugcuagagaa

SEQ ID NO: 1927663 - RNA, 19 nt, Artificial Sequence
  Description of Artificial Sequence: Synthetic oligonucleotide
  Antisense strand to SEQ ID NO: 1927662
uucucuagcauauuacaga

SEQ ID NO: 1927664 - RNA, 19 nt, Artificial Sequence
  Description of Artificial Sequence: Synthetic oligonucleotide
  Sense strand starting at position 288 of SEQ ID NO: 1879720
gcugcagcgagcucugauu

SEQ ID NO: 1927665 - RNA, 19 nt, Artificial Sequence
  Description of Artificial Sequence: Synthetic oligonucleotide
  Antisense strand to SEQ ID NO: 1927664
aaucagagcucgcugcagc

SEQ ID NO: 1927666 - RNA, 19 nt, Artificial Sequence
  Description of Artificial Sequence: Synthetic oligonucleotide
  Sense strand starting at position 396 of SEQ ID NO: 1879720
aggauauuaugcuuggaga

SEQ ID NO: 1927667 - RNA, 19 nt, Artificial Sequence
  Description of Artificial Sequence: Synthetic oligonucleotide
  Antisense strand to SEQ ID NO: 1927666
ucuccaagcauaauauccu

SEQ ID NO: 1927668 - RNA, 19 nt, Artificial Sequence
  Description of Artificial Sequence: Synthetic oligonucleotide
  Sense strand starting at position 397 of SEQ ID NO: 1879720
ggauauuaugcuuggagac

SEQ ID NO: 1927669 - RNA, 19 nt, Artificial Sequence
  Description of Artificial Sequence: Synthetic oligonucleotide
  Antisense strand to SEQ ID NO: 1927668
gucuccaagcauaauaucc

SEQ ID NO: 1927670 - RNA, 19 nt, Artificial Sequence
  Description of Artificial Sequence: Synthetic oligonucleotide
  Sense strand starting at position 398 of SEQ ID NO: 1879720
gauauuaugcuuggagaca

SEQ ID NO: 1927671 - RNA, 19 nt, Artificial Sequence
  Description of Artificial Sequence: Synthetic oligonucleotide
  Antisense strand to SEQ ID NO: 1927670
ugucuccaagcauaauauc

SEQ ID NO: 1927672 - RNA, 19 nt, Artificial Sequence
  Description of Artificial Sequence: Synthetic oligonucleotide
  Sense strand starting at position 399 of SEQ ID NO: 1879720
auauuaugcuuggagacag

SEQ ID NO: 1927673 - RNA, 19 nt, Artificial Sequence
  Description of Artificial Sequence: Synthetic oligonucleotide
  Antisense strand to SEQ ID NO: 1927672
cugucuccaagcauaauau

SEQ ID NO: 1927674 - RNA, 19 nt, Artificial Sequence
  Description of Artificial Sequence: Synthetic oligonucleotide
  Sense strand starting at position 441 of SEQ ID NO: 1879720
aaggaaaucucaguugcac

SEQ ID NO: 1927675 - RNA, 19 nt, Artificial Sequence
  Description of Artificial Sequence: Synthetic oligonucleotide
  Antisense strand to SEQ ID NO: 1927674
gugcaacugagauuuccuu

SEQ ID NO: 1927676 - RNA, 19 nt, Artificial Sequence
  Description of Artificial Sequence: Synthetic oligonucleotide
  Sense strand starting at position 492 of SEQ ID NO: 1879720
auaucugggccugguaaca

SEQ ID NO: 1927677 - RNA, 19 nt, Artificial Sequence
  Description of Artificial Sequence: Synthetic oligonucleotide
  Antisense strand to SEQ ID NO: 1927676
uguuaccaggcccagauau

SEQ ID NO: 1927678 - RNA, 19 nt, Artificial Sequence
  Description of Artificial Sequence: Synthetic oligonucleotide
  Sense strand starting at position 528 of SEQ ID NO: 1879720
gccagacaucuuuagggca

SEQ ID NO: 1927679 - RNA, 19 nt, Artificial Sequence
  Description of Artificial Sequence: Synthetic oligonucleotide
  Antisense strand to SEQ ID NO: 1927678
ugcccuaaagaugucuggc

SEQ ID NO: 1927680 - RNA, 19 nt, Artificial Sequence
  Description of Artificial Sequence: Synthetic oligonucleotide
  Sense strand starting at position 557 of SEQ ID NO: 1879720
gcacauuucccaugccuga

SEQ ID NO: 1927681 - RNA, 19 nt, Artificial Sequence
  Description of Artificial Sequence: Synthetic oligonucleotide
  Antisense strand to SEQ ID NO: 1927680
ucaggcaugggaaaugugc

SEQ ID NO: 1927682 - RNA, 19 nt, Artificial Sequence
  Description of Artificial Sequence: Synthetic oligonucleotide
  Sense strand starting at position 590 of SEQ ID NO: 1879720
cccaauguccagugcagaa

SEQ ID NO: 1927683 - RNA, 19 nt, Artificial Sequence
  Description of Artificial Sequence: Synthetic oligonucleotide
  Antisense strand to SEQ ID NO: 1927682
uucugcacuggacauuggg

SEQ ID NO: 1927684 - RNA, 19 nt, Artificial Sequence
  Description of Artificial Sequence: Synthetic oligonucleotide
  Sense strand starting at position 646 of SEQ ID NO: 1879720
gaguguaaaugacccacau

SEQ ID NO: 1927685 - RNA, 19 nt, Artificial Sequence
  Description of Artificial Sequence: Synthetic oligonucleotide
  Antisense strand to SEQ ID NO: 1927684
augugggucauuuacacuc

SEQ ID NO: 1927686 - RNA, 19 nt, Artificial Sequence
  Description of Artificial Sequence: Synthetic oligonucleotide
  Sense strand starting at position 714 of SEQ ID NO: 1879720
ugugcuggcacucgagauu

SEQ ID NO: 1927687 - RNA, 19 nt, Artificial Sequence
  Description of Artificial Sequence: Synthetic oligonucleotide
  Antisense strand to SEQ ID NO: 1927686
aaucucgagugccagcaca

SEQ ID NO: 1927688 - RNA, 19 nt, Artificial Sequence
  Description of Artificial Sequence: Synthetic oligonucleotide
  Sense strand starting at position 717 of SEQ ID NO: 1879720
gcuggcacucgagauuacu

SEQ ID NO: 1927689 - RNA, 19 nt, Artificial Sequence
  Description of Artificial Sequence: Synthetic oligonucleotide
  Antisense strand to SEQ ID NO: 1927688
aguaaucucgagugccagc

SEQ ID NO: 1927690 - RNA, 19 nt, Artificial Sequence
  Description of Artificial Sequence: Synthetic oligonucleotide
  Sense strand starting at position 723 of SEQ ID NO: 1879720
acucgagauuacuuggaca

SEQ ID NO: 1927691 - RNA, 19 nt, Artificial Sequence
  Description of Artificial Sequence: Synthetic oligonucleotide
  Antisense strand to SEQ ID NO: 1927690
uguccaaguaaucucgagu

SEQ ID NO: 1927692 - RNA, 19 nt, Artificial Sequence
  Description of Artificial Sequence: Synthetic oligonucleotide
  Sense strand starting at position 725 of SEQ ID NO: 1879720
ucgagauuacuuggacaca

SEQ ID NO: 1927693 - RNA, 19 nt, Artificial Sequence
  Description of Artificial Sequence: Synthetic oligonucleotide
  Antisense strand to SEQ ID NO: 1927692
uguguccaaguaaucucga

SEQ ID NO: 1927694 - RNA, 19 nt, Artificial Sequence
  Description of Artificial Sequence: Synthetic oligonucleotide
  Sense strand starting at position 726 of SEQ ID NO: 1879720
cgagauuacuuggacacaa

SEQ ID NO: 1927695 - RNA, 19 nt, Artificial Sequence
  Description of Artificial Sequence: Synthetic oligonucleotide
  Antisense strand to SEQ ID NO: 1927694
uuguguccaaguaaucucg

SEQ ID NO: 1927696 - RNA, 19 nt, Artificial Sequence
  Description of Artificial Sequence: Synthetic oligonucleotide
  Sense strand starting at position 785 of SEQ ID NO: 1879720
uuguuccugccguuugaua

SEQ ID NO: 1927697 - RNA, 19 nt, Artificial Sequence
  Description of Artificial Sequence: Synthetic oligonucleotide
  Antisense strand to SEQ ID NO: 1927696
uaucaaacggcaggaacaa

SEQ ID NO: 1927698 - RNA, 19 nt, Artificial Sequence
  Description of Artificial Sequence: Synthetic oligonucleotide
  Sense strand starting at position 786 of SEQ ID NO: 1879720
uguuccugccguuugauau

SEQ ID NO: 1927699 - RNA, 19 nt, Artificial Sequence
  Description of Artificial Sequence: Synthetic oligonucleotide
  Antisense strand to SEQ ID NO: 1927698
auaucaaacggcaggaaca

SEQ ID NO: 1927700 - RNA, 19 nt, Artificial Sequence
  Description of Artificial Sequence: Synthetic oligonucleotide
  Sense strand starting at position 787 of SEQ ID NO: 1879720
guuccugccguuugauaug

SEQ ID NO: 1927701 - RNA, 19 nt, Artificial Sequence
  Description of Artificial Sequence: Synthetic oligonucleotide
  Antisense strand to SEQ ID NO: 1927700
cauaucaaacggcaggaac

SEQ ID NO: 1927702 - RNA, 19 nt, Artificial Sequence
  Description of Artificial Sequence: Synthetic oligonucleotide
  Sense strand starting at position 790 of SEQ ID NO: 1879720
ccugccguuugauaugaga

SEQ ID NO: 1927703 - RNA, 19 nt, Artificial Sequence
  Description of Artificial Sequence: Synthetic oligonucleotide
  Antisense strand to SEQ ID NO: 1927702
ucucauaucaaacggcagg

SEQ ID NO: 1927704 - RNA, 19 nt, Artificial Sequence
  Description of Artificial Sequence: Synthetic oligonucleotide
  Sense strand starting at position 793 of SEQ ID NO: 1879720
gccguuugauaugagagca

SEQ ID NO: 1927705 - RNA, 19 nt, Artificial Sequence
  Description of Artificial Sequence: Synthetic oligonucleotide
  Antisense strand to SEQ ID NO: 1927704
ugcucucauaucaaacggc

SEQ ID NO: 1927706 - RNA, 19 nt, Artificial Sequence
  Description of Artificial Sequence: Synthetic oligonucleotide
  Sense strand starting at position 927 of SEQ ID NO: 1879720
gaguuuaaaugagaaaggu

SEQ ID NO: 1927707 - RNA, 19 nt, Artificial Sequence
  Description of Artificial Sequence: Synthetic oligonucleotide
  Antisense strand to SEQ ID NO: 1927706
accuuucucauuuaaacuc

SEQ ID NO: 1927708 - RNA, 19 nt, Artificial Sequence
  Description of Artificial Sequence: Synthetic oligonucleotide
  Sense strand starting at position 936 of SEQ ID NO: 1879720
ugagaaaggucuuaugacu

SEQ ID NO: 1927709 - RNA, 19 nt, Artificial Sequence
  Description of Artificial Sequence: Synthetic oligonucleotide
  Antisense strand to SEQ ID NO: 1927708
agucauaagaccuuucuca

SEQ ID NO: 1927710 - RNA, 19 nt, Artificial Sequence
  Description of Artificial Sequence: Synthetic oligonucleotide
  Sense strand starting at position 981 of SEQ ID NO: 1879720
cucuaauggguuggucaca

SEQ ID NO: 1927711 - RNA, 19 nt, Artificial Sequence
  Description of Artificial Sequence: Synthetic oligonucleotide
  Antisense strand to SEQ ID NO: 1927710
ugugaccaacccauuagag

SEQ ID NO: 1927712 - RNA, 19 nt, Artificial Sequence
  Description of Artificial Sequence: Synthetic oligonucleotide
  Sense strand starting at position 986 of SEQ ID NO: 1879720
auggguuggucacacuaau

SEQ ID NO: 1927713 - RNA, 19 nt, Artificial Sequence
  Description of Artificial Sequence: Synthetic oligonucleotide
  Antisense strand to SEQ ID NO: 1927712
auuagugugaccaacccau

SEQ ID NO: 1927714 - RNA, 19 nt, Artificial Sequence
  Description of Artificial Sequence: Synthetic oligonucleotide
  Sense strand starting at position 1050 of SEQ ID NO: 1879720
ggaguaugcuuccaggaga

SEQ ID NO: 1927715 - RNA, 19 nt, Artificial Sequence
  Description of Artificial Sequence: Synthetic oligonucleotide
  Antisense strand to SEQ ID NO: 1927714
ucuccuggaagcauacucc

SEQ ID NO: 1927716 - RNA, 19 nt, Artificial Sequence
  Description of Artificial Sequence: Synthetic oligonucleotide
  Sense strand starting at position 1053 of SEQ ID NO: 1879720
guaugcuuccaggagagga

SEQ ID NO: 1927717 - RNA, 19 nt, Artificial Sequence
  Description of Artificial Sequence: Synthetic oligonucleotide
  Antisense strand to SEQ ID NO: 1927716
uccucuccuggaagcauac

SEQ ID NO: 1927718 - RNA, 19 nt, Artificial Sequence
  Description of Artificial Sequence: Synthetic oligonucleotide
  Sense strand starting at position 1075 of SEQ ID NO: 1879720
agggagugcuggucaguga

SEQ ID NO: 1927719 - RNA, 19 nt, Artificial Sequence
  Description of Artificial Sequence: Synthetic oligonucleotide
  Antisense strand to SEQ ID NO: 1927718
ucacugaccagcacucccu

SEQ ID NO: 1927720 - RNA, 19 nt, Artificial Sequence
  Description of Artificial Sequence: Synthetic oligonucleotide
  Sense strand starting at position 1076 of SEQ ID NO: 1879720
gggagugcuggucagugaa

SEQ ID NO: 1927721 - RNA, 19 nt, Artificial Sequence
  Description of Artificial Sequence: Synthetic oligonucleotide
  Antisense strand to SEQ ID NO: 1927720
uucacugaccagcacuccc

SEQ ID NO: 1927722 - RNA, 19 nt, Artificial Sequence
  Description of Artificial Sequence: Synthetic oligonucleotide
  Sense strand starting at position 1097 of SEQ ID NO: 1879720
gggcuucagugggcuacaa

SEQ ID NO: 1927723 - RNA, 19 nt, Artificial Sequence
  Description of Artificial Sequence: Synthetic oligonucleotide
  Antisense strand to SEQ ID NO: 1927722
uuguagcccacugaagccc

SEQ ID NO: 1927724 - RNA, 19 nt, Artificial Sequence
  Description of Artificial Sequence: Synthetic oligonucleotide
  Sense strand starting at position 1506 of SEQ ID NO: 1879720
cacguauaugcgcccagau

SEQ ID NO: 1927725 - RNA, 19 nt, Artificial Sequence
  Description of Artificial Sequence: Synthetic oligonucleotide
  Antisense strand to SEQ ID NO: 1927724
aucugggcgcauauacgug

SEQ ID NO: 1927726 - RNA, 19 nt, Artificial Sequence
  Description of Artificial Sequence: Synthetic oligonucleotide
  Sense strand starting at position 2583 of SEQ ID NO: 1879720
cccuuauuuccaugccgca

SEQ ID NO: 1927727 - RNA, 19 nt, Artificial Sequence
  Description of Artificial Sequence: Synthetic oligonucleotide
  Antisense strand to SEQ ID NO: 1927726
ugcggcauggaaauaaggg

SEQ ID NO: 1927728 - RNA, 19 nt, Artificial Sequence
  Description of Artificial Sequence: Synthetic oligonucleotide
  Sense strand starting at position 3111 of SEQ ID NO: 1879720
aggcaaauguucugaggug

SEQ ID NO: 1927729 - RNA, 19 nt, Artificial Sequence
  Description of Artificial Sequence: Synthetic oligonucleotide
  Antisense strand to SEQ ID NO: 1927728
caccucagaacauuugccu

SEQ ID NO: 1927730 - RNA, 19 nt, Artificial Sequence
  Description of Artificial Sequence: Synthetic oligonucleotide
  Sense strand starting at position 3780 of SEQ ID NO: 1879720
ccuccucugugagacaaau

SEQ ID NO: 1927731 - RNA, 19 nt, Artificial Sequence
  Description of Artificial Sequence: Synthetic oligonucleotide
  Antisense strand to SEQ ID NO: 1927730
auuugucucacagaggagg

SEQ ID NO: 1927732 - RNA, 19 nt, Artificial Sequence
  Description of Artificial Sequence: Synthetic oligonucleotide
  Sense strand starting at position 19 of SEQ ID NO: 1879721
gcugucuucuuagccuaau

SEQ ID NO: 1927733 - RNA, 19 nt, Artificial Sequence
  Description of Artificial Sequence: Synthetic oligonucleotide
  Antisense strand to SEQ ID NO: 1927732
auuaggcuaagaagacagc

SEQ ID NO: 1927734 - RNA, 19 nt, Artificial Sequence
  Description of Artificial Sequence: Synthetic oligonucleotide
  Sense strand starting at position 31 of SEQ ID NO: 1879721
gccuaaugggcucaucaga

SEQ ID NO: 1927735 - RNA, 19 nt, Artificial Sequence
  Description of Artificial Sequence: Synthetic oligonucleotide
  Antisense strand to SEQ ID NO: 1927734
ucugaugagcccauuaggc

SEQ ID NO: 1927736 - RNA, 19 nt, Artificial Sequence
  Description of Artificial Sequence: Synthetic oligonucleotide
  Sense strand starting at position 60 of SEQ ID NO: 1879721
aggagaccaucugcauauu

SEQ ID NO: 1927737 - RNA, 19 nt, Artificial Sequence
  Description of Artificial Sequence: Synthetic oligonucleotide
  Antisense strand to SEQ ID NO: 1927736
aauaugcagauggucuccu

SEQ ID NO: 1927738 - RNA, 19 nt, Artificial Sequence
  Description of Artificial Sequence: Synthetic oligonucleotide
  Sense strand starting at position 442 of SEQ ID NO: 1879721
gaaugauagcaccaggugu

SEQ ID NO: 1927739 - RNA, 19 nt, Artificial Sequence
  Description of Artificial Sequence: Synthetic oligonucleotide
  Antisense strand to SEQ ID NO: 1927738
acaccuggugcuaucauuc

SEQ ID NO: 1927740 - RNA, 19 nt, Artificial Sequence
  Description of Artificial Sequence: Synthetic oligonucleotide
  Sense strand starting at position 593 of SEQ ID NO: 1879721
gaaugagacuucuugcgac

SEQ ID NO: 1927741 - RNA, 19 nt, Artificial Sequence
  Description of Artificial Sequence: Synthetic oligonucleotide
  Antisense strand to SEQ ID NO: 1927740
gucgcaagaagucucauuc

SEQ ID NO: 1927742 - RNA, 19 nt, Artificial Sequence
  Description of Artificial Sequence: Synthetic oligonucleotide
  Sense strand starting at position 597 of SEQ ID NO: 1879721
gagacuucuugcgacuuac

SEQ ID NO: 1927743 - RNA, 19 nt, Artificial Sequence
  Description of Artificial Sequence: Synthetic oligonucleotide
  Antisense strand to SEQ ID NO: 1927742
guaagucgcaagaagucuc

SEQ ID NO: 1927744 - RNA, 19 nt, Artificial Sequence
  Description of Artificial Sequence: Synthetic oligonucleotide
  Sense strand starting at position 1077 of SEQ ID NO: 1879721
gauaaagcagucuggacaa

SEQ ID NO: 1927745 - RNA, 19 nt, Artificial Sequence
  Description of Artificial Sequence: Synthetic oligonucleotide
  Antisense strand to SEQ ID NO: 1927744
uuguccagacugcuuuauc

SEQ ID NO: 1927746 - RNA, 19 nt, Artificial Sequence
  Description of Artificial Sequence: Synthetic oligonucleotide
  Sense strand starting at position 1090 of SEQ ID NO: 1879721
ggacaauggugguugguga

SEQ ID NO: 1927747 - RNA, 19 nt, Artificial Sequence
  Description of Artificial Sequence: Synthetic oligonucleotide
  Antisense strand to SEQ ID NO: 1927746
ucaccaaccaccauugucc

SEQ ID NO: 1927748 - RNA, 19 nt, Artificial Sequence
  Description of Artificial Sequence: Synthetic oligonucleotide
  Sense strand starting at position 1345 of SEQ ID NO: 1879721
gcacuagagcccuaggaga

SEQ ID NO: 1927749 - RNA, 19 nt, Artificial Sequence
  Description of Artificial Sequence: Synthetic oligonucleotide
  Antisense strand to SEQ ID NO: 1927748
ucuccuagggcucuagugc

SEQ ID NO: 1927750 - RNA, 19 nt, Artificial Sequence
  Description of Artificial Sequence: Synthetic oligonucleotide
  Sense strand starting at position 1487 of SEQ ID NO: 1879721
gggauugggcuguagaguu

SEQ ID NO: 1927751 - RNA, 19 nt, Artificial Sequence
  Description of Artificial Sequence: Synthetic oligonucleotide
  Antisense strand to SEQ ID NO: 1927750
aacucuacagcccaauccc

SEQ ID NO: 1927752 - RNA, 19 nt, Artificial Sequence
  Description of Artificial Sequence: Synthetic oligonucleotide
  Sense strand starting at position 1547 of SEQ ID NO: 1879721
agggcuuggucugauccau

SEQ ID NO: 1927753 - RNA, 19 nt, Artificial Sequence
  Description of Artificial Sequence: Synthetic oligonucleotide
  Antisense strand to SEQ ID NO: 1927752
auggaucagaccaagcccu

SEQ ID NO: 1927754 - RNA, 19 nt, Artificial Sequence
  Description of Artificial Sequence: Synthetic oligonucleotide
  Sense strand starting at position 1586 of SEQ ID NO: 1879721
guacauaagaggugccuaa

SEQ ID NO: 1927755 - RNA, 19 nt, Artificial Sequence
  Description of Artificial Sequence: Synthetic oligonucleotide
  Antisense strand to SEQ ID NO: 1927754
uuaggcaccucuuauguac

SEQ ID NO: 1927756 - RNA, 19 nt, Artificial Sequence
  Description of Artificial Sequence: Synthetic oligonucleotide
  Sense strand starting at position 1609 of SEQ ID NO: 1879721
gagugcuggcaggaagaau

SEQ ID NO: 1927757 - RNA, 19 nt, Artificial Sequence
  Description of Artificial Sequence: Synthetic oligonucleotide
  Antisense strand to SEQ ID NO: 1927756
auucuuccugccagcacuc

SEQ ID NO: 1927758 - RNA, 19 nt, Artificial Sequence
  Description of Artificial Sequence: Synthetic oligonucleotide
  Sense strand starting at position 1707 of SEQ ID NO: 1879721
uggguugaugcccgugaca

SEQ ID NO: 1927759 - RNA, 19 nt, Artificial Sequence
  Description of Artificial Sequence: Synthetic oligonucleotide
  Antisense strand to SEQ ID NO: 1927758
ugucacgggcaucaaccca

SEQ ID NO: 1927760 - RNA, 19 nt, Artificial Sequence
  Description of Artificial Sequence: Synthetic oligonucleotide
  Sense strand starting at position 1709 of SEQ ID NO: 1879721
gguugaugcccgugacacu

SEQ ID NO: 1927761 - RNA, 19 nt, Artificial Sequence
  Description of Artificial Sequence: Synthetic oligonucleotide
  Antisense strand to SEQ ID NO: 1927760
agugucacgggcaucaacc

SEQ ID NO: 1927762 - RNA, 19 nt, Artificial Sequence
  Description of Artificial Sequence: Synthetic oligonucleotide
  Sense strand starting at position 1726 of SEQ ID NO: 1879721
cugcaaggaugucuacaaa

SEQ ID NO: 1927763 - RNA, 19 nt, Artificial Sequence
  Description of Artificial Sequence: Synthetic oligonucleotide
  Antisense strand to SEQ ID NO: 1927762
uuuguagacauccuugcag

SEQ ID NO: 1927764 - RNA, 19 nt, Artificial Sequence
  Description of Artificial Sequence: Synthetic oligonucleotide
  Sense strand starting at position 2445 of SEQ ID NO: 1879721
ugaagaggcuuuggugaga

SEQ ID NO: 1927765 - RNA, 19 nt, Artificial Sequence
  Description of Artificial Sequence: Synthetic oligonucleotide
  Antisense strand to SEQ ID NO: 1927764
ucucaccaaagccucuuca

SEQ ID NO: 1927766 - RNA, 19 nt, Artificial Sequence
  Description of Artificial Sequence: Synthetic oligonucleotide
  Sense strand starting at position 2748 of SEQ ID NO: 1879721
gcauguuggccugaggaaa

SEQ ID NO: 1927767 - RNA, 19 nt, Artificial Sequence
  Description of Artificial Sequence: Synthetic oligonucleotide
  Antisense strand to SEQ ID NO: 1927766
uuuccucaggccaacaugc

SEQ ID NO: 1927768 - RNA, 19 nt, Artificial Sequence
  Description of Artificial Sequence: Synthetic oligonucleotide
  Sense strand starting at position 2861 of SEQ ID NO: 1879721
gaaggcuauucuguggagu

SEQ ID NO: 1927769 - RNA, 19 nt, Artificial Sequence
  Description of Artificial Sequence: Synthetic oligonucleotide
  Antisense strand to SEQ ID NO: 1927768
acuccacagaauagccuuc

SEQ ID NO: 1927770 - RNA, 19 nt, Artificial Sequence
  Description of Artificial Sequence: Synthetic oligonucleotide
  Sense strand starting at position 2862 of SEQ ID NO: 1879721
aaggcuauucuguggaguu

SEQ ID NO: 1927771 - RNA, 19 nt, Artificial Sequence
  Description of Artificial Sequence: Synthetic oligonucleotide
  Antisense strand to SEQ ID NO: 1927770
aacuccacagaauagccuu

SEQ ID NO: 1927772 - RNA, 19 nt, Artificial Sequence
  Description of Artificial Sequence: Synthetic oligonucleotide
  Sense strand starting at position 2898 of SEQ ID NO: 1879721
ucucccaucuaguauugua

SEQ ID NO: 1927773 - RNA, 19 nt, Artificial Sequence
  Description of Artificial Sequence: Synthetic oligonucleotide
  Antisense strand to SEQ ID NO: 1927772
uacaauacuagaugggaga

SEQ ID NO: 1927774 - RNA, 19 nt, Artificial Sequence
  Description of Artificial Sequence: Synthetic oligonucleotide
  Sense strand starting at position 2906 of SEQ ID NO: 1879721
cuaguauuguaccagcuau

SEQ ID NO: 1927775 - RNA, 19 nt, Artificial Sequence
  Description of Artificial Sequence: Synthetic oligonucleotide
  Antisense strand to SEQ ID NO: 1927774
auagcugguacaauacuag

SEQ ID NO: 1927776 - RNA, 19 nt, Artificial Sequence
  Description of Artificial Sequence: Synthetic oligonucleotide
  Sense strand starting at position 2920 of SEQ ID NO: 1879721
gcuaucacgucauuucuga

SEQ ID NO: 1927777 - RNA, 19 nt, Artificial Sequence
  Description of Artificial Sequence: Synthetic oligonucleotide
  Antisense strand to SEQ ID NO: 1927776
ucagaaaugacgugauagc

SEQ ID NO: 1927778 - RNA, 19 nt, Artificial Sequence
  Description of Artificial Sequence: Synthetic oligonucleotide
  Sense strand starting at position 2968 of SEQ ID NO: 1879721
cugcucuuuccagaugcuu

SEQ ID NO: 1927779 - RNA, 19 nt, Artificial Sequence
  Description of Artificial Sequence: Synthetic oligonucleotide
  Antisense strand to SEQ ID NO: 1927778
aagcaucuggaaagagcag

SEQ ID NO: 1927780 - RNA, 19 nt, Artificial Sequence
  Description of Artificial Sequence: Synthetic oligonucleotide
  Sense strand starting at position 3046 of SEQ ID NO: 1879721
ccaguuucuuccuucuuga

SEQ ID NO: 1927781 - RNA, 19 nt, Artificial Sequence
  Description of Artificial Sequence: Synthetic oligonucleotide
  Antisense strand to SEQ ID NO: 1927780
ucaagaaggaagaaacugg

SEQ ID NO: 1927782 - RNA, 19 nt, Artificial Sequence
  Description of Artificial Sequence: Synthetic oligonucleotide
  Sense strand starting at position 3049 of SEQ ID NO: 1879721
guuucuuccuucuugauag

SEQ ID NO: 1927783 - RNA, 19 nt, Artificial Sequence
  Description of Artificial Sequence: Synthetic oligonucleotide
  Antisense strand to SEQ ID NO: 1927782
cuaucaagaaggaagaaac

SEQ ID NO: 1927784 - RNA, 19 nt, Artificial Sequence
  Description of Artificial Sequence: Synthetic oligonucleotide
  Sense strand starting at position 3060 of SEQ ID NO: 1879721
cuugauagauggcuaauau

SEQ ID NO: 1927785 - RNA, 19 nt, Artificial Sequence
  Description of Artificial Sequence: Synthetic oligonucleotide
  Antisense strand to SEQ ID NO: 1927784
auauuagccaucuaucaag

SEQ ID NO: 1927786 - RNA, 19 nt, Artificial Sequence
  Description of Artificial Sequence: Synthetic oligonucleotide
  Sense strand starting at position 3070 of SEQ ID NO: 1879721
ggcuaauauucuccagcua

SEQ ID NO: 1927787 - RNA, 19 nt, Artificial Sequence
  Description of Artificial Sequence: Synthetic oligonucleotide
  Antisense strand to SEQ ID NO: 1927786
uagcuggagaauauuagcc

SEQ ID NO: 1927788 - RNA, 19 nt, Artificial Sequence
  Description of Artificial Sequence: Synthetic oligonucleotide
  Sense strand starting at position 3071 of SEQ ID NO: 1879721
gcuaauauucuccagcuag

SEQ ID NO: 1927789 - RNA, 19 nt, Artificial Sequence
  Description of Artificial Sequence: Synthetic oligonucleotide
  Antisense strand to SEQ ID NO: 1927788
cuagcuggagaauauuagc

SEQ ID NO: 1927790 - RNA, 19 nt, Artificial Sequence
  Description of Artificial Sequence: Synthetic oligonucleotide
  Sense strand starting at position 3106 of SEQ ID NO: 1879721
gggaacagguaguaagaau

SEQ ID NO: 1927791 - RNA, 19 nt, Artificial Sequence
  Description of Artificial Sequence: Synthetic oligonucleotide
  Antisense strand to SEQ ID NO: 1927790
auucuuacuaccuguuccc

SEQ ID NO: 1927792 - RNA, 19 nt, Artificial Sequence
  Description of Artificial Sequence: Synthetic oligonucleotide
  Sense strand starting at position 3121 of SEQ ID NO: 1879721
gaauguagucccugguauc

SEQ ID NO: 1927793 - RNA, 19 nt, Artificial Sequence
  Description of Artificial Sequence: Synthetic oligonucleotide
  Antisense strand to SEQ ID NO: 1927792
gauaccagggacuacauuc

SEQ ID NO: 1927794 - RNA, 19 nt, Artificial Sequence
  Description of Artificial Sequence: Synthetic oligonucleotide
  Sense strand starting at position 3171 of SEQ ID NO: 1879721
caggcauuccagggacaga

SEQ ID NO: 1927795 - RNA, 19 nt, Artificial Sequence
  Description of Artificial Sequence: Synthetic oligonucleotide
  Antisense strand to SEQ ID NO: 1927794
ucugucccuggaaugccug

SEQ ID NO: 1927796 - RNA, 19 nt, Artificial Sequence
  Description of Artificial Sequence: Synthetic oligonucleotide
  Sense strand starting at position 3386 of SEQ ID NO: 1879721
ugccauuaugcccagcuau

SEQ ID NO: 1927797 - RNA, 19 nt, Artificial Sequence
  Description of Artificial Sequence: Synthetic oligonucleotide
  Antisense strand to SEQ ID NO: 1927796
auagcugggcauaauggca

SEQ ID NO: 1927798 - RNA, 19 nt, Artificial Sequence
  Description of Artificial Sequence: Synthetic oligonucleotide
  Sense strand starting at position 3497 of SEQ ID NO: 1879721
cuaguaacuucuuaaagag

SEQ ID NO: 1927799 - RNA, 19 nt, Artificial Sequence
  Description of Artificial Sequence: Synthetic oligonucleotide
  Antisense strand to SEQ ID NO: 1927798
cucuuuaagaaguuacuag

SEQ ID NO: 1927800 - RNA, 19 nt, Artificial Sequence
  Description of Artificial Sequence: Synthetic oligonucleotide
  Sense strand starting at position 3544 of SEQ ID NO: 1879721
gagucacuuucccuaggau

SEQ ID NO: 1927801 - RNA, 19 nt, Artificial Sequence
  Description of Artificial Sequence: Synthetic oligonucleotide
  Antisense strand to SEQ ID NO: 1927800
auccuagggaaagugacuc

SEQ ID NO: 1927802 - RNA, 19 nt, Artificial Sequence
  Description of Artificial Sequence: Synthetic oligonucleotide
  Sense strand starting at position 3580 of SEQ ID NO: 1879721
gacggugacagguacucau

SEQ ID NO: 1927803 - RNA, 19 nt, Artificial Sequence
  Description of Artificial Sequence: Synthetic oligonucleotide
  Antisense strand to SEQ ID NO: 1927802
augaguaccugucaccguc

SEQ ID NO: 1927804 - RNA, 19 nt, Artificial Sequence
  Description of Artificial Sequence: Synthetic oligonucleotide
  Sense strand starting at position 3822 of SEQ ID NO: 1879721
ggcacacuguucccuguau

SEQ ID NO: 1927805 - RNA, 19 nt, Artificial Sequence
  Description of Artificial Sequence: Synthetic oligonucleotide
  Antisense strand to SEQ ID NO: 1927804
auacagggaacagugugcc

SEQ ID NO: 1927806 - RNA, 19 nt, Artificial Sequence
  Description of Artificial Sequence: Synthetic oligonucleotide
  Sense strand starting at position 3823 of SEQ ID NO: 1879721
gcacacuguucccuguaua

SEQ ID NO: 1927807 - RNA, 19 nt, Artificial Sequence
  Description of Artificial Sequence: Synthetic oligonucleotide
  Antisense strand to SEQ ID NO: 1927806
uauacagggaacagugugc

SEQ ID NO: 1927808 - RNA, 19 nt, Artificial Sequence
  Description of Artificial Sequence: Synthetic oligonucleotide
  Sense strand starting at position 3899 of SEQ ID NO: 1879721
gagagaccuucccagacca

SEQ ID NO: 1927809 - RNA, 19 nt, Artificial Sequence
  Description of Artificial Sequence: Synthetic oligonucleotide
  Antisense strand to SEQ ID NO: 1927808
uggucugggaaggucucuc

SEQ ID NO: 1927810 - RNA, 19 nt, Artificial Sequence
  Description of Artificial Sequence: Synthetic oligonucleotide
  Sense strand starting at position 3962 of SEQ ID NO: 1879721
cugaccuugucuuucuaca

SEQ ID NO: 1927811 - RNA, 19 nt, Artificial Sequence
  Description of Artificial Sequence: Synthetic oligonucleotide
  Antisense strand to SEQ ID NO: 1927810
uguagaaagacaaggucag

SEQ ID NO: 1927812 - RNA, 19 nt, Artificial Sequence
  Description of Artificial Sequence: Synthetic oligonucleotide
  Sense strand starting at position 135 of SEQ ID NO: 1879722
cuuugugaauuguucuaag

SEQ ID NO: 1927813 - RNA, 19 nt, Artificial Sequence
  Description of Artificial Sequence: Synthetic oligonucleotide
  Antisense strand to SEQ ID NO: 1927812
cuuagaacaauucacaaag

SEQ ID NO: 1927814 - RNA, 19 nt, Artificial Sequence
  Description of Artificial Sequence: Synthetic oligonucleotide
  Sense strand starting at position 256 of SEQ ID NO: 1879722
accuuuggauccuugguaa

SEQ ID NO: 1927815 - RNA, 19 nt, Artificial Sequence
  Description of Artificial Sequence: Synthetic oligonucleotide
  Antisense strand to SEQ ID NO: 1927814
uuaccaaggauccaaaggu

SEQ ID NO: 1927816 - RNA, 19 nt, Artificial Sequence
  Description of Artificial Sequence: Synthetic oligonucleotide
  Sense strand starting at position 259 of SEQ ID NO: 1879722
uuuggauccuugguaaaca

SEQ ID NO: 1927817 - RNA, 19 nt, Artificial Sequence
  Description of Artificial Sequence: Synthetic oligonucleotide
  Antisense strand to SEQ ID NO: 1927816
uguuuaccaaggauccaaa

SEQ ID NO: 1927818 - RNA, 19 nt, Artificial Sequence
  Description of Artificial Sequence: Synthetic oligonucleotide
  Sense strand starting at position 311 of SEQ ID NO: 1879722
gggagugucccuuaagcuu

SEQ ID NO: 1927819 - RNA, 19 nt, Artificial Sequence
  Description of Artificial Sequence: Synthetic oligonucleotide
  Antisense strand to SEQ ID NO: 1927818
aagcuuaagggacacuccc

SEQ ID NO: 1927820 - RNA, 19 nt, Artificial Sequence
  Description of Artificial Sequence: Synthetic oligonucleotide
  Sense strand starting at position 340 of SEQ ID NO: 1879722
ugggucauuguagagauca

SEQ ID NO: 1927821 - RNA, 19 nt, Artificial Sequence
  Description of Artificial Sequence: Synthetic oligonucleotide
  Antisense strand to SEQ ID NO: 1927820
ugaucucuacaaugaccca

SEQ ID NO: 1927822 - RNA, 19 nt, Artificial Sequence
  Description of Artificial Sequence: Synthetic oligonucleotide
  Sense strand starting at position 465 of SEQ ID NO: 1879722
agcuucuaaucucugguaa

SEQ ID NO: 1927823 - RNA, 19 nt, Artificial Sequence
  Description of Artificial Sequence: Synthetic oligonucleotide
  Antisense strand to SEQ ID NO: 1927822
uuaccagagauuagaagcu

SEQ ID NO: 1927824 - RNA, 19 nt, Artificial Sequence
  Description of Artificial Sequence: Synthetic oligonucleotide
  Sense strand starting at position 586 of SEQ ID NO: 1879722
gcgaucacauuucugggua

SEQ ID NO: 1927825 - RNA, 19 nt, Artificial Sequence
  Description of Artificial Sequence: Synthetic oligonucleotide
  Antisense strand to SEQ ID NO: 1927824
uacccagaaaugugaucgc

SEQ ID NO: 1927826 - RNA, 19 nt, Artificial Sequence
  Description of Artificial Sequence: Synthetic oligonucleotide
  Sense strand starting at position 713 of SEQ ID NO: 1879722
aguuaaaugaauggauugu

SEQ ID NO: 1927827 - RNA, 19 nt, Artificial Sequence
  Description of Artificial Sequence: Synthetic oligonucleotide
  Antisense strand to SEQ ID NO: 1927826
acaauccauucauuuaacu

SEQ ID NO: 1927828 - RNA, 19 nt, Artificial Sequence
  Description of Artificial Sequence: Synthetic oligonucleotide
  Sense strand starting at position 835 of SEQ ID NO: 1879722
agcgaaauaagccagucaa

SEQ ID NO: 1927829 - RNA, 19 nt, Artificial Sequence
  Description of Artificial Sequence: Synthetic oligonucleotide
  Antisense strand to SEQ ID NO: 1927828
uugacuggcuuauuucgcu

SEQ ID NO: 1927830 - RNA, 19 nt, Artificial Sequence
  Description of Artificial Sequence: Synthetic oligonucleotide
  Sense strand starting at position 916 of SEQ ID NO: 1879722
guagaaagguaguucccaa

SEQ ID NO: 1927831 - RNA, 19 nt, Artificial Sequence
  Description of Artificial Sequence: Synthetic oligonucleotide
  Antisense strand to SEQ ID NO: 1927830
uugggaacuaccuuucuac

SEQ ID NO: 1927832 - RNA, 19 nt, Artificial Sequence
  Description of Artificial Sequence: Synthetic oligonucleotide
  Sense strand starting at position 961 of SEQ ID NO: 1879722
uguguuuaauggguauaga

SEQ ID NO: 1927833 - RNA, 19 nt, Artificial Sequence
  Description of Artificial Sequence: Synthetic oligonucleotide
  Antisense strand to SEQ ID NO: 1927832
ucuauacccauuaaacaca

SEQ ID NO: 1927834 - RNA, 19 nt, Artificial Sequence
  Description of Artificial Sequence: Synthetic oligonucleotide
  Sense strand starting at position 1004 of SEQ ID NO: 1879722
guucuagagaucugugaca

SEQ ID NO: 1927835 - RNA, 19 nt, Artificial Sequence
  Description of Artificial Sequence: Synthetic oligonucleotide
  Antisense strand to SEQ ID NO: 1927834
ugucacagaucucuagaac

SEQ ID NO: 1927836 - RNA, 19 nt, Artificial Sequence
  Description of Artificial Sequence: Synthetic oligonucleotide
  Sense strand starting at position 1006 of SEQ ID NO: 1879722
ucuagagaucugugacaca

SEQ ID NO: 1927837 - RNA, 19 nt, Artificial Sequence
  Description of Artificial Sequence: Synthetic oligonucleotide
  Antisense strand to SEQ ID NO: 1927836
ugugucacagaucucuaga

SEQ ID NO: 1927838 - RNA, 19 nt, Artificial Sequence
  Description of Artificial Sequence: Synthetic oligonucleotide
  Sense strand starting at position 1414 of SEQ ID NO: 1879722
ccuuuagugcucuagacag

SEQ ID NO: 1927839 - RNA, 19 nt, Artificial Sequence
  Description of Artificial Sequence: Synthetic oligonucleotide
  Antisense strand to SEQ ID NO: 1927838
cugucuagagcacuaaagg

SEQ ID NO: 1927840 - RNA, 19 nt, Artificial Sequence
  Description of Artificial Sequence: Synthetic oligonucleotide
  Sense strand starting at position 1416 of SEQ ID NO: 1879722
uuuagugcucuagacagga

SEQ ID NO: 1927841 - RNA, 19 nt, Artificial Sequence
  Description of Artificial Sequence: Synthetic oligonucleotide
  Antisense strand to SEQ ID NO: 1927840
uccugucuagagcacuaaa

SEQ ID NO: 1927842 - RNA, 19 nt, Artificial Sequence
  Description of Artificial Sequence: Synthetic oligonucleotide
  Sense strand starting at position 1454 of SEQ ID NO: 1879722
acacacaugugauccuuau

SEQ ID NO: 1927843 - RNA, 19 nt, Artificial Sequence
  Description of Artificial Sequence: Synthetic oligonucleotide
  Antisense strand to SEQ ID NO: 1927842
auaaggaucacaugugugu

SEQ ID NO: 1927844 - RNA, 19 nt, Artificial Sequence
  Description of Artificial Sequence: Synthetic oligonucleotide
  Sense strand starting at position 1515 of SEQ ID NO: 1879722
gcuguaaggccugugucuu

SEQ ID NO: 1927845 - RNA, 19 nt, Artificial Sequence
  Description of Artificial Sequence: Synthetic oligonucleotide
  Antisense strand to SEQ ID NO: 1927844
aagacacaggccuuacagc

SEQ ID NO: 1927846 - RNA, 19 nt, Artificial Sequence
  Description of Artificial Sequence: Synthetic oligonucleotide
  Sense strand starting at position 1609 of SEQ ID NO: 1879722
agucaagaauaguccuuua

SEQ ID NO: 1927847 - RNA, 19 nt, Artificial Sequence
  Description of Artificial Sequence: Synthetic oligonucleotide
  Antisense strand to SEQ ID NO: 1927846
uaaaggacuauucuugacu

SEQ ID NO: 1927848 - RNA, 19 nt, Artificial Sequence
  Description of Artificial Sequence: Synthetic oligonucleotide
  Sense strand starting at position 1650 of SEQ ID NO: 1879722
ucuugacagcuguaauuac

SEQ ID NO: 1927849 - RNA, 19 nt, Artificial Sequence
  Description of Artificial Sequence: Synthetic oligonucleotide
  Antisense strand to SEQ ID NO: 1927848
guaauuacagcugucaaga

SEQ ID NO: 1927850 - RNA, 19 nt, Artificial Sequence
  Description of Artificial Sequence: Synthetic oligonucleotide
  Sense strand starting at position 2198 of SEQ ID NO: 1879722
cacgguccugaauaugaau

SEQ ID NO: 1927851 - RNA, 19 nt, Artificial Sequence
  Description of Artificial Sequence: Synthetic oligonucleotide
  Antisense strand to SEQ ID NO: 1927850
auucauauucaggaccgug

SEQ ID NO: 1927852 - RNA, 19 nt, Artificial Sequence
  Description of Artificial Sequence: Synthetic oligonucleotide
  Sense strand starting at position 2544 of SEQ ID NO: 1879722
agguccaguccuuaucaca

SEQ ID NO: 1927853 - RNA, 19 nt, Artificial Sequence
  Description of Artificial Sequence: Synthetic oligonucleotide
  Antisense strand to SEQ ID NO: 1927852
ugugauaaggacuggaccu

SEQ ID NO: 1927854 - RNA, 19 nt, Artificial Sequence
  Description of Artificial Sequence: Synthetic oligonucleotide
  Sense strand starting at position 2571 of SEQ ID NO: 1879722
cacaacuguggugaaagua

SEQ ID NO: 1927855 - RNA, 19 nt, Artificial Sequence
  Description of Artificial Sequence: Synthetic oligonucleotide
  Antisense strand to SEQ ID NO: 1927854
uacuuucaccacaguugug

SEQ ID NO: 1927856 - RNA, 19 nt, Artificial Sequence
  Description of Artificial Sequence: Synthetic oligonucleotide
  Sense strand starting at position 2647 of SEQ ID NO: 1879722
cuuucuaucugagcuagaa

SEQ ID NO: 1927857 - RNA, 19 nt, Artificial Sequence
  Description of Artificial Sequence: Synthetic oligonucleotide
  Antisense strand to SEQ ID NO: 1927856
uucuagcucagauagaaag

SEQ ID NO: 1927858 - RNA, 19 nt, Artificial Sequence
  Description of Artificial Sequence: Synthetic oligonucleotide
  Sense strand starting at position 2685 of SEQ ID NO: 1879722
ccuggaaacacucgaaagu

SEQ ID NO: 1927859 - RNA, 19 nt, Artificial Sequence
  Description of Artificial Sequence: Synthetic oligonucleotide
  Antisense strand to SEQ ID NO: 1927858
acuuucgaguguuuccagg

SEQ ID NO: 1927860 - RNA, 19 nt, Artificial Sequence
  Description of Artificial Sequence: Synthetic oligonucleotide
  Sense strand starting at position 2705 of SEQ ID NO: 1879722
gcauguucucaugagacug

SEQ ID NO: 1927861 - RNA, 19 nt, Artificial Sequence
  Description of Artificial Sequence: Synthetic oligonucleotide
  Antisense strand to SEQ ID NO: 1927860
cagucucaugagaacaugc

SEQ ID NO: 1927862 - RNA, 19 nt, Artificial Sequence
  Description of Artificial Sequence: Synthetic oligonucleotide
  Sense strand starting at position 2794 of SEQ ID NO: 1879722
ugagccucaguuuaaucua

SEQ ID NO: 1927863 - RNA, 19 nt, Artificial Sequence
  Description of Artificial Sequence: Synthetic oligonucleotide
  Antisense strand to SEQ ID NO: 1927862
uagauuaaacugaggcuca

SEQ ID NO: 1927864 - RNA, 19 nt, Artificial Sequence
  Description of Artificial Sequence: Synthetic oligonucleotide
  Sense strand starting at position 2797 of SEQ ID NO: 1879722
gccucaguuuaaucuagaa

SEQ ID NO: 1927865 - RNA, 19 nt, Artificial Sequence
  Description of Artificial Sequence: Synthetic oligonucleotide
  Antisense strand to SEQ ID NO: 1927864
uucuagauuaaacugaggc

SEQ ID NO: 1927866 - RNA, 19 nt, Artificial Sequence
  Description of Artificial Sequence: Synthetic oligonucleotide
  Sense strand starting at position 2852 of SEQ ID NO: 1879722
gugaauguugaaugaaaca

SEQ ID NO: 1927867 - RNA, 19 nt, Artificial Sequence
  Description of Artificial Sequence: Synthetic oligonucleotide
  Antisense strand to SEQ ID NO: 1927866
uguuucauucaacauucac

SEQ ID NO: 1927868 - RNA, 19 nt, Artificial Sequence
  Description of Artificial Sequence: Synthetic oligonucleotide
  Sense strand starting at position 2899 of SEQ ID NO: 1879722
ucuuacuguguccaugaaa

SEQ ID NO: 1927869 - RNA, 19 nt, Artificial Sequence
  Description of Artificial Sequence: Synthetic oligonucleotide
  Antisense strand to SEQ ID NO: 1927868
uuucauggacacaguaaga

SEQ ID NO: 1927870 - RNA, 19 nt, Artificial Sequence
  Description of Artificial Sequence: Synthetic oligonucleotide
  Sense strand starting at position 2976 of SEQ ID NO: 1879722
gcugaaauacugcgaagau

SEQ ID NO: 1927871 - RNA, 19 nt, Artificial Sequence
  Description of Artificial Sequence: Synthetic oligonucleotide
  Antisense strand to SEQ ID NO: 1927870
aucuucgcaguauuucagc

SEQ ID NO: 1927872 - RNA, 19 nt, Artificial Sequence
  Description of Artificial Sequence: Synthetic oligonucleotide
  Sense strand starting at position 3090 of SEQ ID NO: 1879722
caaguuucuguugaccaga

SEQ ID NO: 1927873 - RNA, 19 nt, Artificial Sequence
  Description of Artificial Sequence: Synthetic oligonucleotide
  Antisense strand to SEQ ID NO: 1927872
ucuggucaacagaaacuug

SEQ ID NO: 1927874 - RNA, 19 nt, Artificial Sequence
  Description of Artificial Sequence: Synthetic oligonucleotide
  Sense strand starting at position 3093 of SEQ ID NO: 1879722
guuucuguugaccagagga

SEQ ID NO: 1927875 - RNA, 19 nt, Artificial Sequence
  Description of Artificial Sequence: Synthetic oligonucleotide
  Antisense strand to SEQ ID NO: 1927874
uccucuggucaacagaaac

SEQ ID NO: 1927876 - RNA, 19 nt, Artificial Sequence
  Description of Artificial Sequence: Synthetic oligonucleotide
  Sense strand starting at position 3183 of SEQ ID NO: 1879722
gugaguagauuauucuaca

SEQ ID NO: 1927877 - RNA, 19 nt, Artificial Sequence
  Description of Artificial Sequence: Synthetic oligonucleotide
  Antisense strand to SEQ ID NO: 1927876
uguagaauaaucuacucac

SEQ ID NO: 1927878 - RNA, 19 nt, Artificial Sequence
  Description of Artificial Sequence: Synthetic oligonucleotide
  Sense strand starting at position 3184 of SEQ ID NO: 1879722
ugaguagauuauucuacag

SEQ ID NO: 1927879 - RNA, 19 nt, Artificial Sequence
  Description of Artificial Sequence: Synthetic oligonucleotide
  Antisense strand to SEQ ID NO: 1927878
cuguagaauaaucuacuca

SEQ ID NO: 1927880 - RNA, 19 nt, Artificial Sequence
  Description of Artificial Sequence: Synthetic oligonucleotide
  Sense strand starting at position 3331 of SEQ ID NO: 1879722
gcacaaguacaagguaauu

SEQ ID NO: 1927881 - RNA, 19 nt, Artificial Sequence
  Description of Artificial Sequence: Synthetic oligonucleotide
  Antisense strand to SEQ ID NO: 1927880
aauuaccuuguacuugugc

SEQ ID NO: 1927882 - RNA, 19 nt, Artificial Sequence
  Description of Artificial Sequence: Synthetic oligonucleotide
  Sense strand starting at position 3398 of SEQ ID NO: 1879722
agaagagaauuugauucuu

SEQ ID NO: 1927883 - RNA, 19 nt, Artificial Sequence
  Description of Artificial Sequence: Synthetic oligonucleotide
  Antisense strand to SEQ ID NO: 1927882
aagaaucaaauucucuucu

SEQ ID NO: 1927884 - RNA, 19 nt, Artificial Sequence
  Description of Artificial Sequence: Synthetic oligonucleotide
  Sense strand starting at position 3475 of SEQ ID NO: 1879722
cauguauaccagcgagaau

SEQ ID NO: 1927885 - RNA, 19 nt, Artificial Sequence
  Description of Artificial Sequence: Synthetic oligonucleotide
  Antisense strand to SEQ ID NO: 1927884
auucucgcugguauacaug

SEQ ID NO: 1927886 - RNA, 19 nt, Artificial Sequence
  Description of Artificial Sequence: Synthetic oligonucleotide
  Sense strand starting at position 3476 of SEQ ID NO: 1879722
auguauaccagcgagaaug

SEQ ID NO: 1927887 - RNA, 19 nt, Artificial Sequence
  Description of Artificial Sequence: Synthetic oligonucleotide
  Antisense strand to SEQ ID NO: 1927886
cauucucgcugguauacau

SEQ ID NO: 1927888 - RNA, 19 nt, Artificial Sequence
  Description of Artificial Sequence: Synthetic oligonucleotide
  Sense strand starting at position 3478 of SEQ ID NO: 1879722
guauaccagcgagaaugua

SEQ ID NO: 1927889 - RNA, 19 nt, Artificial Sequence
  Description of Artificial Sequence: Synthetic oligonucleotide
  Antisense strand to SEQ ID NO: 1927888
uacauucucgcugguauac

SEQ ID NO: 1927890 - RNA, 19 nt, Artificial Sequence
  Description of Artificial Sequence: Synthetic oligonucleotide
  Sense strand starting at position 3680 of SEQ ID NO: 1879722
guauauaggcucuauauau

SEQ ID NO: 1927891 - RNA, 19 nt, Artificial Sequence
  Description of Artificial Sequence: Synthetic oligonucleotide
  Antisense strand to SEQ ID NO: 1927890
auauauagagccuauauac

SEQ ID NO: 1927892 - RNA, 19 nt, Artificial Sequence
  Description of Artificial Sequence: Synthetic oligonucleotide
  Sense strand starting at position 177 of SEQ ID NO: 1879723
gggucaccuccgggaagau

SEQ ID NO: 1927893 - RNA, 19 nt, Artificial Sequence
  Description of Artificial Sequence: Synthetic oligonucleotide
  Antisense strand to SEQ ID NO: 1927892
aucuucccggaggugaccc

SEQ ID NO: 1927894 - RNA, 19 nt, Artificial Sequence
  Description of Artificial Sequence: Synthetic oligonucleotide
  Sense strand starting at position 626 of SEQ ID NO: 1879723
uaaguaugaucucuggaug

SEQ ID NO: 1927895 - RNA, 19 nt, Artificial Sequence
  Description of Artificial Sequence: Synthetic oligonucleotide
  Antisense strand to SEQ ID NO: 1927894
cauccagagaucauacuua

SEQ ID NO: 1927896 - RNA, 19 nt, Artificial Sequence
  Description of Artificial Sequence: Synthetic oligonucleotide
  Sense strand starting at position 627 of SEQ ID NO: 1879723
aaguaugaucucuggauga

SEQ ID NO: 1927897 - RNA, 19 nt, Artificial Sequence
  Description of Artificial Sequence: Synthetic oligonucleotide
  Antisense strand to SEQ ID NO: 1927896
ucauccagagaucauacuu

SEQ ID NO: 1927898 - RNA, 19 nt, Artificial Sequence
  Description of Artificial Sequence: Synthetic oligonucleotide
  Sense strand starting at position 730 of SEQ ID NO: 1879723
ccacgaauaccugagagcu

SEQ ID NO: 1927899 - RNA, 19 nt, Artificial Sequence
  Description of Artificial Sequence: Synthetic oligonucleotide
  Antisense strand to SEQ ID NO: 1927898
agcucucagguauucgugg

SEQ ID NO: 1927900 - RNA, 19 nt, Artificial Sequence
  Description of Artificial Sequence: Synthetic oligonucleotide
  Sense strand starting at position 770 of SEQ ID NO: 1879723
guugccuggaauuagaauu

SEQ ID NO: 1927901 - RNA, 19 nt, Artificial Sequence
  Description of Artificial Sequence: Synthetic oligonucleotide
  Antisense strand to SEQ ID NO: 1927900
aauucuaauuccaggcaac

SEQ ID NO: 1927902 - RNA, 19 nt, Artificial Sequence
  Description of Artificial Sequence: Synthetic oligonucleotide
  Sense strand starting at position 1113 of SEQ ID NO: 1879723
ugggacauccgucaucaua

SEQ ID NO: 1927903 - RNA, 19 nt, Artificial Sequence
  Description of Artificial Sequence: Synthetic oligonucleotide
  Antisense strand to SEQ ID NO: 1927902
uaugaugacggauguccca

SEQ ID NO: 1927904 - RNA, 19 nt, Artificial Sequence
  Description of Artificial Sequence: Synthetic oligonucleotide
  Sense strand starting at position 1139 of SEQ ID NO: 1879723
ccucuuuaggucgagauca

SEQ ID NO: 1927905 - RNA, 19 nt, Artificial Sequence
  Description of Artificial Sequence: Synthetic oligonucleotide
  Antisense strand to SEQ ID NO: 1927904
ugaucucgaccuaaagagg

SEQ ID NO: 1927906 - RNA, 19 nt, Artificial Sequence
  Description of Artificial Sequence: Synthetic oligonucleotide
  Sense strand starting at position 1141 of SEQ ID NO: 1879723
ucuuuaggucgagaucauu

SEQ ID NO: 1927907 - RNA, 19 nt, Artificial Sequence
  Description of Artificial Sequence: Synthetic oligonucleotide
  Antisense strand to SEQ ID NO: 1927906
aaugaucucgaccuaaaga

SEQ ID NO: 1927908 - RNA, 19 nt, Artificial Sequence
  Description of Artificial Sequence: Synthetic oligonucleotide
  Sense strand starting at position 1313 of SEQ ID NO: 1879723
ucugguaaccagcaaucaa

SEQ ID NO: 1927909 - RNA, 19 nt, Artificial Sequence
  Description of Artificial Sequence: Synthetic oligonucleotide
  Antisense strand to SEQ ID NO: 1927908
uugauugcugguuaccaga

SEQ ID NO: 1927910 - RNA, 19 nt, Artificial Sequence
  Description of Artificial Sequence: Synthetic oligonucleotide
  Sense strand starting at position 1333 of SEQ ID NO: 1879723
uuucuaccuccaugagaug

SEQ ID NO: 1927911 - RNA, 19 nt, Artificial Sequence
  Description of Artificial Sequence: Synthetic oligonucleotide
  Antisense strand to SEQ ID NO: 1927910
caucucauggagguagaaa

SEQ ID NO: 1927912 - RNA, 19 nt, Artificial Sequence
  Description of Artificial Sequence: Synthetic oligonucleotide
  Sense strand starting at position 1503 of SEQ ID NO: 1879723
guaaauguaccacauauuc

SEQ ID NO: 1927913 - RNA, 19 nt, Artificial Sequence
  Description of Artificial Sequence: Synthetic oligonucleotide
  Antisense strand to SEQ ID NO: 1927912
gaauaugugguacauuuac

SEQ ID NO: 1927914 - RNA, 19 nt, Artificial Sequence
  Description of Artificial Sequence: Synthetic oligonucleotide
  Sense strand starting at position 1707 of SEQ ID NO: 1879723
ugcccauauuugucucuau

SEQ ID NO: 1927915 - RNA, 19 nt, Artificial Sequence
  Description of Artificial Sequence: Synthetic oligonucleotide
  Antisense strand to SEQ ID NO: 1927914
auagagacaaauaugggca

SEQ ID NO: 1927916 - RNA, 19 nt, Artificial Sequence
  Description of Artificial Sequence: Synthetic oligonucleotide
  Sense strand starting at position 1708 of SEQ ID NO: 1879723
gcccauauuugucucuaua

SEQ ID NO: 1927917 - RNA, 19 nt, Artificial Sequence
  Description of Artificial Sequence: Synthetic oligonucleotide
  Antisense strand to SEQ ID NO: 1927916
uauagagacaaauaugggc

SEQ ID NO: 1927918 - RNA, 19 nt, Artificial Sequence
  Description of Artificial Sequence: Synthetic oligonucleotide
  Sense strand starting at position 1823 of SEQ ID NO: 1879723
guugguuuaauuggagaug

SEQ ID NO: 1927919 - RNA, 19 nt, Artificial Sequence
  Description of Artificial Sequence: Synthetic oligonucleotide
  Antisense strand to SEQ ID NO: 1927918
caucuccaauuaaaccaac

SEQ ID NO: 1927920 - RNA, 19 nt, Artificial Sequence
  Description of Artificial Sequence: Synthetic oligonucleotide
  Sense strand starting at position 1834 of SEQ ID NO: 1879723
uggagaugauuccuuccaa

SEQ ID NO: 1927921 - RNA, 19 nt, Artificial Sequence
  Description of Artificial Sequence: Synthetic oligonucleotide
  Antisense strand to SEQ ID NO: 1927920
uuggaaggaaucaucucca

SEQ ID NO: 1927922 - RNA, 19 nt, Artificial Sequence
  Description of Artificial Sequence: Synthetic oligonucleotide
  Sense strand starting at position 2012 of SEQ ID NO: 1879723
ccaucucagauaggugaga

SEQ ID NO: 1927923 - RNA, 19 nt, Artificial Sequence
  Description of Artificial Sequence: Synthetic oligonucleotide
  Antisense strand to SEQ ID NO: 1927922
ucucaccuaucugagaugg

SEQ ID NO: 1927924 - RNA, 19 nt, Artificial Sequence
  Description of Artificial Sequence: Synthetic oligonucleotide
  Sense strand starting at position 2026 of SEQ ID NO: 1879723
ugagaugaagcuuaguuua

SEQ ID NO: 1927925 - RNA, 19 nt, Artificial Sequence
  Description of Artificial Sequence: Synthetic oligonucleotide
  Antisense strand to SEQ ID NO: 1927924
uaaacuaagcuucaucuca

SEQ ID NO: 1927926 - RNA, 19 nt, Artificial Sequence
  Description of Artificial Sequence: Synthetic oligonucleotide
  Sense strand starting at position 2049 of SEQ ID NO: 1879723
uuuggcuuaguuuaagaau

SEQ ID NO: 1927927 - RNA, 19 nt, Artificial Sequence
  Description of Artificial Sequence: Synthetic oligonucleotide
  Antisense strand to SEQ ID NO: 1927926
auucuuaaacuaagccaaa

SEQ ID NO: 1927928 - RNA, 19 nt, Artificial Sequence
  Description of Artificial Sequence: Synthetic oligonucleotide
  Sense strand starting at position 2133 of SEQ ID NO: 1879723
cucuguggauucucacaua

SEQ ID NO: 1927929 - RNA, 19 nt, Artificial Sequence
  Description of Artificial Sequence: Synthetic oligonucleotide
  Antisense strand to SEQ ID NO: 1927928
uaugugagaauccacagag

SEQ ID NO: 1927930 - RNA, 19 nt, Artificial Sequence
  Description of Artificial Sequence: Synthetic oligonucleotide
  Sense strand starting at position 2198 of SEQ ID NO: 1879723
guuguaacacuauaauuag

SEQ ID NO: 1927931 - RNA, 19 nt, Artificial Sequence
  Description of Artificial Sequence: Synthetic oligonucleotide
  Antisense strand to SEQ ID NO: 1927930
cuaauuauaguguuacaac

SEQ ID NO: 1927932 - RNA, 19 nt, Artificial Sequence
  Description of Artificial Sequence: Synthetic oligonucleotide
  Sense strand starting at position 2221 of SEQ ID NO: 1879723
auggguucuggacacgauu

SEQ ID NO: 1927933 - RNA, 19 nt, Artificial Sequence
  Description of Artificial Sequence: Synthetic oligonucleotide
  Antisense strand to SEQ ID NO: 1927932
aaucguguccagaacccau

SEQ ID NO: 1927934 - RNA, 19 nt, Artificial Sequence
  Description of Artificial Sequence: Synthetic oligonucleotide
  Sense strand starting at position 2314 of SEQ ID NO: 1879723
aucccuguccuaggagaga

SEQ ID NO: 1927935 - RNA, 19 nt, Artificial Sequence
  Description of Artificial Sequence: Synthetic oligonucleotide
  Antisense strand to SEQ ID NO: 1927934
ucucuccuaggacagggau

SEQ ID NO: 1927936 - RNA, 19 nt, Artificial Sequence
  Description of Artificial Sequence: Synthetic oligonucleotide
  Sense strand starting at position 2435 of SEQ ID NO: 1879723
acaugaauugacugacguu

SEQ ID NO: 1927937 - RNA, 19 nt, Artificial Sequence
  Description of Artificial Sequence: Synthetic oligonucleotide
  Antisense strand to SEQ ID NO: 1927936
aacgucagucaauucaugu

SEQ ID NO: 1927938 - RNA, 19 nt, Artificial Sequence
  Description of Artificial Sequence: Synthetic oligonucleotide
  Sense strand starting at position 2448 of SEQ ID NO: 1879723
gacguuugacauuauccau

SEQ ID NO: 1927939 - RNA, 19 nt, Artificial Sequence
  Description of Artificial Sequence: Synthetic oligonucleotide
  Antisense strand to SEQ ID NO: 1927938
auggauaaugucaaacguc

SEQ ID NO: 1927940 - RNA, 19 nt, Artificial Sequence
  Description of Artificial Sequence: Synthetic oligonucleotide
  Sense strand starting at position 2554 of SEQ ID NO: 1879723
uguuguugccuugugcuaa

SEQ ID NO: 1927941 - RNA, 19 nt, Artificial Sequence
  Description of Artificial Sequence: Synthetic oligonucleotide
  Antisense strand to SEQ ID NO: 1927940
uuagcacaaggcaacaaca

SEQ ID NO: 1927942 - RNA, 19 nt, Artificial Sequence
  Description of Artificial Sequence: Synthetic oligonucleotide
  Sense strand starting at position 2632 of SEQ ID NO: 1879723
guucauuaagguggagaac

SEQ ID NO: 1927943 - RNA, 19 nt, Artificial Sequence
  Description of Artificial Sequence: Synthetic oligonucleotide
  Antisense strand to SEQ ID NO: 1927942
guucuccaccuuaaugaac

SEQ ID NO: 1927944 - RNA, 19 nt, Artificial Sequence
  Description of Artificial Sequence: Synthetic oligonucleotide
  Sense strand starting at position 2643 of SEQ ID NO: 1879723
uggagaacuauaugggucu

SEQ ID NO: 1927945 - RNA, 19 nt, Artificial Sequence
  Description of Artificial Sequence: Synthetic oligonucleotide
  Antisense strand to SEQ ID NO: 1927944
agacccauauaguucucca

SEQ ID NO: 1927946 - RNA, 19 nt, Artificial Sequence
  Description of Artificial Sequence: Synthetic oligonucleotide
  Sense strand starting at position 2649 of SEQ ID NO: 1879723
acuauaugggucugugaga

SEQ ID NO: 1927947 - RNA, 19 nt, Artificial Sequence
  Description of Artificial Sequence: Synthetic oligonucleotide
  Antisense strand to SEQ ID NO: 1927946
ucucacagacccauauagu

SEQ ID NO: 1927948 - RNA, 19 nt, Artificial Sequence
  Description of Artificial Sequence: Synthetic oligonucleotide
  Sense strand starting at position 2855 of SEQ ID NO: 1879723
gaugauggaucacuguuua

SEQ ID NO: 1927949 - RNA, 19 nt, Artificial Sequence
  Description of Artificial Sequence: Synthetic oligonucleotide
  Antisense strand to SEQ ID NO: 1927948
uaaacagugauccaucauc

SEQ ID NO: 1927950 - RNA, 19 nt, Artificial Sequence
  Description of Artificial Sequence: Synthetic oligonucleotide
  Sense strand starting at position 2859 of SEQ ID NO: 1879723
auggaucacuguuuaauau

SEQ ID NO: 1927951 - RNA, 19 nt, Artificial Sequence
  Description of Artificial Sequence: Synthetic oligonucleotide
  Antisense strand to SEQ ID NO: 1927950
auauuaaacagugauccau

SEQ ID NO: 1927952 - RNA, 19 nt, Artificial Sequence
  Description of Artificial Sequence: Synthetic oligonucleotide
  Sense strand starting at position 2860 of SEQ ID NO: 1879723
uggaucacuguuuaauauu

SEQ ID NO: 1927953 - RNA, 19 nt, Artificial Sequence
  Description of Artificial Sequence: Synthetic oligonucleotide
  Antisense strand to SEQ ID NO: 1927952
aauauuaaacagugaucca

SEQ ID NO: 1927954 - RNA, 19 nt, Artificial Sequence
  Description of Artificial Sequence: Synthetic oligonucleotide
  Sense strand starting at position 2929 of SEQ ID NO: 1879723
uugucauuccuguguauuu

SEQ ID NO: 1927955 - RNA, 19 nt, Artificial Sequence
  Description of Artificial Sequence: Synthetic oligonucleotide
  Antisense strand to SEQ ID NO: 1927954
aaauacacaggaaugacaa

SEQ ID NO: 1927956 - RNA, 19 nt, Artificial Sequence
  Description of Artificial Sequence: Synthetic oligonucleotide
  Sense strand starting at position 3046 of SEQ ID NO: 1879723
gugcuaacacuguaacaau

SEQ ID NO: 1927957 - RNA, 19 nt, Artificial Sequence
  Description of Artificial Sequence: Synthetic oligonucleotide
  Antisense strand to SEQ ID NO: 1927956
auuguuacaguguuagcac

SEQ ID NO: 1927958 - RNA, 19 nt, Artificial Sequence
  Description of Artificial Sequence: Synthetic oligonucleotide
  Sense strand starting at position 3083 of SEQ ID NO: 1879723
cagucauugagguggaaag

SEQ ID NO: 1927959 - RNA, 19 nt, Artificial Sequence
  Description of Artificial Sequence: Synthetic oligonucleotide
  Antisense strand to SEQ ID NO: 1927958
cuuuccaccucaaugacug

SEQ ID NO: 1927960 - RNA, 19 nt, Artificial Sequence
  Description of Artificial Sequence: Synthetic oligonucleotide
  Sense strand starting at position 3244 of SEQ ID NO: 1879723
uacccagagguaugcuuaa

SEQ ID NO: 1927961 - RNA, 19 nt, Artificial Sequence
  Description of Artificial Sequence: Synthetic oligonucleotide
  Antisense strand to SEQ ID NO: 1927960
uuaagcauaccucugggua

SEQ ID NO: 1927962 - RNA, 19 nt, Artificial Sequence
  Description of Artificial Sequence: Synthetic oligonucleotide
  Sense strand starting at position 3324 of SEQ ID NO: 1879723
uauauuaugguagggugaa

SEQ ID NO: 1927963 - RNA, 19 nt, Artificial Sequence
  Description of Artificial Sequence: Synthetic oligonucleotide
  Antisense strand to SEQ ID NO: 1927962
uucacccuaccauaauaua

SEQ ID NO: 1927964 - RNA, 19 nt, Artificial Sequence
  Description of Artificial Sequence: Synthetic oligonucleotide
  Sense strand starting at position 3523 of SEQ ID NO: 1879723
ugguauuuguaucuuugca

SEQ ID NO: 1927965 - RNA, 19 nt, Artificial Sequence
  Description of Artificial Sequence: Synthetic oligonucleotide
  Antisense strand to SEQ ID NO: 1927964
ugcaaagauacaaauacca

SEQ ID NO: 1927966 - RNA, 19 nt, Artificial Sequence
  Description of Artificial Sequence: Synthetic oligonucleotide
  Sense strand starting at position 3525 of SEQ ID NO: 1879723
guauuuguaucuuugcaac

SEQ ID NO: 1927967 - RNA, 19 nt, Artificial Sequence
  Description of Artificial Sequence: Synthetic oligonucleotide
  Antisense strand to SEQ ID NO: 1927966
guugcaaagauacaaauac

SEQ ID NO: 1927968 - RNA, 19 nt, Artificial Sequence
  Description of Artificial Sequence: Synthetic oligonucleotide
  Sense strand starting at position 3595 of SEQ ID NO: 1879723
ucucaaagauucuuguaga

SEQ ID NO: 1927969 - RNA, 19 nt, Artificial Sequence
  Description of Artificial Sequence: Synthetic oligonucleotide
  Antisense strand to SEQ ID NO: 1927968
ucuacaagaaucuuugaga

SEQ ID NO: 1927970 - RNA, 19 nt, Artificial Sequence
  Description of Artificial Sequence: Synthetic oligonucleotide
  Sense strand starting at position 3711 of SEQ ID NO: 1879723
acggguucccuuuggagaa

SEQ ID NO: 1927971 - RNA, 19 nt, Artificial Sequence
  Description of Artificial Sequence: Synthetic oligonucleotide
  Antisense strand to SEQ ID NO: 1927970
uucuccaaagggaacccgu

SEQ ID NO: 1927972 - RNA, 19 nt, Artificial Sequence
  Description of Artificial Sequence: Synthetic oligonucleotide
  Sense strand starting at position 168 of SEQ ID NO: 1879724
uuggaauuaucuuugugau

SEQ ID NO: 1927973 - RNA, 19 nt, Artificial Sequence
  Description of Artificial Sequence: Synthetic oligonucleotide
  Antisense strand to SEQ ID NO: 1927972
aucacaaagauaauuccaa

SEQ ID NO: 1927974 - RNA, 19 nt, Artificial Sequence
  Description of Artificial Sequence: Synthetic oligonucleotide
  Sense strand starting at position 169 of SEQ ID NO: 1879724
uggaauuaucuuugugauc

SEQ ID NO: 1927975 - RNA, 19 nt, Artificial Sequence
  Description of Artificial Sequence: Synthetic oligonucleotide
  Antisense strand to SEQ ID NO: 1927974
gaucacaaagauaauucca

SEQ ID NO: 1927976 - RNA, 19 nt, Artificial Sequence
  Description of Artificial Sequence: Synthetic oligonucleotide
  Sense strand starting at position 170 of SEQ ID NO: 1879724
ggaauuaucuuugugauca

SEQ ID NO: 1927977 - RNA, 19 nt, Artificial Sequence
  Description of Artificial Sequence: Synthetic oligonucleotide
  Antisense strand to SEQ ID NO: 1927976
ugaucacaaagauaauucc

SEQ ID NO: 1927978 - RNA, 19 nt, Artificial Sequence
  Description of Artificial Sequence: Synthetic oligonucleotide
  Sense strand starting at position 197 of SEQ ID NO: 1879724
cagucacuucuuggguaua

SEQ ID NO: 1927979 - RNA, 19 nt, Artificial Sequence
  Description of Artificial Sequence: Synthetic oligonucleotide
  Antisense strand to SEQ ID NO: 1927978
uauacccaagaagugacug

SEQ ID NO: 1927980 - RNA, 19 nt, Artificial Sequence
  Description of Artificial Sequence: Synthetic oligonucleotide
  Sense strand starting at position 200 of SEQ ID NO: 1879724
ucacuucuuggguauaucu

SEQ ID NO: 1927981 - RNA, 19 nt, Artificial Sequence
  Description of Artificial Sequence: Synthetic oligonucleotide
  Antisense strand to SEQ ID NO: 1927980
agauauacccaagaaguga

SEQ ID NO: 1927982 - RNA, 19 nt, Artificial Sequence
  Description of Artificial Sequence: Synthetic oligonucleotide
  Sense strand starting at position 202 of SEQ ID NO: 1879724
acuucuuggguauaucuaa

SEQ ID NO: 1927983 - RNA, 19 nt, Artificial Sequence
  Description of Artificial Sequence: Synthetic oligonucleotide
  Antisense strand to SEQ ID NO: 1927982
uuagauauacccaagaagu

SEQ ID NO: 1927984 - RNA, 19 nt, Artificial Sequence
  Description of Artificial Sequence: Synthetic oligonucleotide
  Sense strand starting at position 209 of SEQ ID NO: 1879724
ggguauaucuaauacauuu

SEQ ID NO: 1927985 - RNA, 19 nt, Artificial Sequence
  Description of Artificial Sequence: Synthetic oligonucleotide
  Antisense strand to SEQ ID NO: 1927984
aaauguauuagauauaccc

SEQ ID NO: 1927986 - RNA, 19 nt, Artificial Sequence
  Description of Artificial Sequence: Synthetic oligonucleotide
  Sense strand starting at position 247 of SEQ ID NO: 1879724
guuaacucgugaccuauuu

SEQ ID NO: 1927987 - RNA, 19 nt, Artificial Sequence
  Description of Artificial Sequence: Synthetic oligonucleotide
  Antisense strand to SEQ ID NO: 1927986
aaauaggucacgaguuaac

SEQ ID NO: 1927988 - RNA, 19 nt, Artificial Sequence
  Description of Artificial Sequence: Synthetic oligonucleotide
  Sense strand starting at position 291 of SEQ ID NO: 1879724
ccuauuccaccauguggaa

SEQ ID NO: 1927989 - RNA, 19 nt, Artificial Sequence
  Description of Artificial Sequence: Synthetic oligonucleotide
  Antisense strand to SEQ ID NO: 1927988
uuccacaugguggaauagg

SEQ ID NO: 1927990 - RNA, 19 nt, Artificial Sequence
  Description of Artificial Sequence: Synthetic oligonucleotide
  Sense strand starting at position 554 of SEQ ID NO: 1879724
ugagaaggcuugguugaca

SEQ ID NO: 1927991 - RNA, 19 nt, Artificial Sequence
  Description of Artificial Sequence: Synthetic oligonucleotide
  Antisense strand to SEQ ID NO: 1927990
ugucaaccaagccuucuca

SEQ ID NO: 1927992 - RNA, 19 nt, Artificial Sequence
  Description of Artificial Sequence: Synthetic oligonucleotide
  Sense strand starting at position 601 of SEQ ID NO: 1879724
ugaagaucauugcuggguu

SEQ ID NO: 1927993 - RNA, 19 nt, Artificial Sequence
  Description of Artificial Sequence: Synthetic oligonucleotide
  Antisense strand to SEQ ID NO: 1927992
aacccagcaaugaucuuca

SEQ ID NO: 1927994 - RNA, 19 nt, Artificial Sequence
  Description of Artificial Sequence: Synthetic oligonucleotide
  Sense strand starting at position 980 of SEQ ID NO: 1879724
aaggaaaucugucuuuguu

SEQ ID NO: 1927995 - RNA, 19 nt, Artificial Sequence
  Description of Artificial Sequence: Synthetic oligonucleotide
  Antisense strand to SEQ ID NO: 1927994
aacaaagacagauuuccuu

SEQ ID NO: 1927996 - RNA, 19 nt, Artificial Sequence
  Description of Artificial Sequence: Synthetic oligonucleotide
  Sense strand starting at position 1005 of SEQ ID NO: 1879724
ucaacuaugggauguccau

SEQ ID NO: 1927997 - RNA, 19 nt, Artificial Sequence
  Description of Artificial Sequence: Synthetic oligonucleotide
  Antisense strand to SEQ ID NO: 1927996
auggacaucccauaguuga

SEQ ID NO: 1927998 - RNA, 19 nt, Artificial Sequence
  Description of Artificial Sequence: Synthetic oligonucleotide
  Sense strand starting at position 1054 of SEQ ID NO: 1879724
gcaugagagccugggauau

SEQ ID NO: 1927999 - RNA, 19 nt, Artificial Sequence
  Description of Artificial Sequence: Synthetic oligonucleotide
  Antisense strand to SEQ ID NO: 1927998
auaucccaggcucucaugc

SEQ ID NO: 1928000 - RNA, 19 nt, Artificial Sequence
  Description of Artificial Sequence: Synthetic oligonucleotide
  Sense strand starting at position 1064 of SEQ ID NO: 1879724
cugggauauugagagagga

SEQ ID NO: 1928001 - RNA, 19 nt, Artificial Sequence
  Description of Artificial Sequence: Synthetic oligonucleotide
  Antisense strand to SEQ ID NO: 1928000
uccucucucaauaucccag

SEQ ID NO: 1928002 - RNA, 19 nt, Artificial Sequence
  Description of Artificial Sequence: Synthetic oligonucleotide
  Sense strand starting at position 1276 of SEQ ID NO: 1879724
ugauauuucuguuugccau

SEQ ID NO: 1928003 - RNA, 19 nt, Artificial Sequence
  Description of Artificial Sequence: Synthetic oligonucleotide
  Antisense strand to SEQ ID NO: 1928002
auggcaaacagaaauauca

SEQ ID NO: 1928004 - RNA, 19 nt, Artificial Sequence
  Description of Artificial Sequence: Synthetic oligonucleotide
  Sense strand starting at position 1277 of SEQ ID NO: 1879724
gauauuucuguuugccaug

SEQ ID NO: 1928005 - RNA, 19 nt, Artificial Sequence
  Description of Artificial Sequence: Synthetic oligonucleotide
  Antisense strand to SEQ ID NO: 1928004
cauggcaaacagaaauauc

SEQ ID NO: 1928006 - RNA, 19 nt, Artificial Sequence
  Description of Artificial Sequence: Synthetic oligonucleotide
  Sense strand starting at position 1377 of SEQ ID NO: 1879724
ggcagugaccgugaaugau

SEQ ID NO: 1928007 - RNA, 19 nt, Artificial Sequence
  Description of Artificial Sequence: Synthetic oligonucleotide
  Antisense strand to SEQ ID NO: 1928006
aucauucacggucacugcc

SEQ ID NO: 1928008 - RNA, 19 nt, Artificial Sequence
  Description of Artificial Sequence: Synthetic oligonucleotide
  Sense strand starting at position 1393 of SEQ ID NO: 1879724
gauggcuuccuuuauguuu

SEQ ID NO: 1928009 - RNA, 19 nt, Artificial Sequence
  Description of Artificial Sequence: Synthetic oligonucleotide
  Antisense strand to SEQ ID NO: 1928008
aaacauaaaggaagccauc

SEQ ID NO: 1928010 - RNA, 19 nt, Artificial Sequence
  Description of Artificial Sequence: Synthetic oligonucleotide
  Sense strand starting at position 1413 of SEQ ID NO: 1879724
ugauuaugguggcuacaaa

SEQ ID NO: 1928011 - RNA, 19 nt, Artificial Sequence
  Description of Artificial Sequence: Synthetic oligonucleotide
  Antisense strand to SEQ ID NO: 1928010
uuuguagccaccauaauca

SEQ ID NO: 1928012 - RNA, 19 nt, Artificial Sequence
  Description of Artificial Sequence: Synthetic oligonucleotide
  Sense strand starting at position 1441 of SEQ ID NO: 1879724
guccauugaguaugaccaa

SEQ ID NO: 1928013 - RNA, 19 nt, Artificial Sequence
  Description of Artificial Sequence: Synthetic oligonucleotide
  Antisense strand to SEQ ID NO: 1928012
uuggucauacucaauggac

SEQ ID NO: 1928014 - RNA, 19 nt, Artificial Sequence
  Description of Artificial Sequence: Synthetic oligonucleotide
  Sense strand starting at position 1673 of SEQ ID NO: 1879724
aaagccugaucauuguaga

SEQ ID NO: 1928015 - RNA, 19 nt, Artificial Sequence
  Description of Artificial Sequence: Synthetic oligonucleotide
  Antisense strand to SEQ ID NO: 1928014
ucuacaaugaucaggcuuu

SEQ ID NO: 1928016 - RNA, 19 nt, Artificial Sequence
  Description of Artificial Sequence: Synthetic oligonucleotide
  Sense strand starting at position 1674 of SEQ ID NO: 1879724
aagccugaucauuguagau

SEQ ID NO: 1928017 - RNA, 19 nt, Artificial Sequence
  Description of Artificial Sequence: Synthetic oligonucleotide
  Antisense strand to SEQ ID NO: 1928016
aucuacaaugaucaggcuu

SEQ ID NO: 1928018 - RNA, 19 nt, Artificial Sequence
  Description of Artificial Sequence: Synthetic oligonucleotide
  Sense strand starting at position 1680 of SEQ ID NO: 1879724
gaucauuguagaugggaug

SEQ ID NO: 1928019 - RNA, 19 nt, Artificial Sequence
  Description of Artificial Sequence: Synthetic oligonucleotide
  Antisense strand to SEQ ID NO: 1928018
caucccaucuacaaugauc

SEQ ID NO: 1928020 - RNA, 19 nt, Artificial Sequence
  Description of Artificial Sequence: Synthetic oligonucleotide
  Sense strand starting at position 1716 of SEQ ID NO: 1879724
acagauauggcuugguauu

SEQ ID NO: 1928021 - RNA, 19 nt, Artificial Sequence
  Description of Artificial Sequence: Synthetic oligonucleotide
  Antisense strand to SEQ ID NO: 1928020
aauaccaagccauaucugu

SEQ ID NO: 1928022 - RNA, 19 nt, Artificial Sequence
  Description of Artificial Sequence: Synthetic oligonucleotide
  Sense strand starting at position 1717 of SEQ ID NO: 1879724
cagauauggcuugguauug

SEQ ID NO: 1928023 - RNA, 19 nt, Artificial Sequence
  Description of Artificial Sequence: Synthetic oligonucleotide
  Antisense strand to SEQ ID NO: 1928022
caauaccaagccauaucug

SEQ ID NO: 1928024 - RNA, 19 nt, Artificial Sequence
  Description of Artificial Sequence: Synthetic oligonucleotide
  Sense strand starting at position 1718 of SEQ ID NO: 1879724
agauauggcuugguauuga

SEQ ID NO: 1928025 - RNA, 19 nt, Artificial Sequence
  Description of Artificial Sequence: Synthetic oligonucleotide
  Antisense strand to SEQ ID NO: 1928024
ucaauaccaagccauaucu

SEQ ID NO: 1928026 - RNA, 19 nt, Artificial Sequence
  Description of Artificial Sequence: Synthetic oligonucleotide
  Sense strand starting at position 2413 of SEQ ID NO: 1879724
ucccucuucuugguauaca

SEQ ID NO: 1928027 - RNA, 19 nt, Artificial Sequence
  Description of Artificial Sequence: Synthetic oligonucleotide
  Antisense strand to SEQ ID NO: 1928026
uguauaccaagaagaggga

SEQ ID NO: 1928028 - RNA, 19 nt, Artificial Sequence
  Description of Artificial Sequence: Synthetic oligonucleotide
  Sense strand starting at position 2468 of SEQ ID NO: 1879724
acauuacugacgggacagu

SEQ ID NO: 1928029 - RNA, 19 nt, Artificial Sequence
  Description of Artificial Sequence: Synthetic oligonucleotide
  Antisense strand to SEQ ID NO: 1928028
acugucccgucaguaaugu

SEQ ID NO: 1928030 - RNA, 19 nt, Artificial Sequence
  Description of Artificial Sequence: Synthetic oligonucleotide
  Sense strand starting at position 2579 of SEQ ID NO: 1879724
guuccuauggauugaguca

SEQ ID NO: 1928031 - RNA, 19 nt, Artificial Sequence
  Description of Artificial Sequence: Synthetic oligonucleotide
  Antisense strand to SEQ ID NO: 1928030
ugacucaauccauaggaac

SEQ ID NO: 1928032 - RNA, 19 nt, Artificial Sequence
  Description of Artificial Sequence: Synthetic oligonucleotide
  Sense strand starting at position 2643 of SEQ ID NO: 1879724
uuagcuguucuugguauuu

SEQ ID NO: 1928033 - RNA, 19 nt, Artificial Sequence
  Description of Artificial Sequence: Synthetic oligonucleotide
  Antisense strand to SEQ ID NO: 1928032
aaauaccaagaacagcuaa

SEQ ID NO: 1928034 - RNA, 19 nt, Artificial Sequence
  Description of Artificial Sequence: Synthetic oligonucleotide
  Sense strand starting at position 3199 of SEQ ID NO: 1879724
acauacuuauguucuuagu

SEQ ID NO: 1928035 - RNA, 19 nt, Artificial Sequence
  Description of Artificial Sequence: Synthetic oligonucleotide
  Antisense strand to SEQ ID NO: 1928034
acuaagaacauaaguaugu

SEQ ID NO: 1928036 - RNA, 19 nt, Artificial Sequence
  Description of Artificial Sequence: Synthetic oligonucleotide
  Sense strand starting at position 3201 of SEQ ID NO: 1879724
auacuuauguucuuaguac

SEQ ID NO: 1928037 - RNA, 19 nt, Artificial Sequence
  Description of Artificial Sequence: Synthetic oligonucleotide
  Antisense strand to SEQ ID NO: 1928036
guacuaagaacauaaguau

SEQ ID NO: 1928038 - RNA, 19 nt, Artificial Sequence
  Description of Artificial Sequence: Synthetic oligonucleotide
  Sense strand starting at position 3225 of SEQ ID NO: 1879724
aaagaauccuagcugggau

SEQ ID NO: 1928039 - RNA, 19 nt, Artificial Sequence
  Description of Artificial Sequence: Synthetic oligonucleotide
  Antisense strand to SEQ ID NO: 1928038
aucccagcuaggauucuuu

SEQ ID NO: 1928040 - RNA, 19 nt, Artificial Sequence
  Description of Artificial Sequence: Synthetic oligonucleotide
  Sense strand starting at position 3309 of SEQ ID NO: 1879724
uagggaugaggauggcuua

SEQ ID NO: 1928041 - RNA, 19 nt, Artificial Sequence
  Description of Artificial Sequence: Synthetic oligonucleotide
  Antisense strand to SEQ ID NO: 1928040
uaagccauccucaucccua

SEQ ID NO: 1928042 - RNA, 19 nt, Artificial Sequence
  Description of Artificial Sequence: Synthetic oligonucleotide
  Sense strand starting at position 3312 of SEQ ID NO: 1879724
ggaugaggauggcuuauca

SEQ ID NO: 1928043 - RNA, 19 nt, Artificial Sequence
  Description of Artificial Sequence: Synthetic oligonucleotide
  Antisense strand to SEQ ID NO: 1928042
ugauaagccauccucaucc

SEQ ID NO: 1928044 - RNA, 19 nt, Artificial Sequence
  Description of Artificial Sequence: Synthetic oligonucleotide
  Sense strand starting at position 3554 of SEQ ID NO: 1879724
uugguuugaucuucuaauu

SEQ ID NO: 1928045 - RNA, 19 nt, Artificial Sequence
  Description of Artificial Sequence: Synthetic oligonucleotide
  Antisense strand to SEQ ID NO: 1928044
aauuagaagaucaaaccaa

SEQ ID NO: 1928046 - RNA, 19 nt, Artificial Sequence
  Description of Artificial Sequence: Synthetic oligonucleotide
  Sense strand starting at position 3696 of SEQ ID NO: 1879724
ugcucaugagaagguguaa

SEQ ID NO: 1928047 - RNA, 19 nt, Artificial Sequence
  Description of Artificial Sequence: Synthetic oligonucleotide
  Antisense strand to SEQ ID NO: 1928046
uuacaccuucucaugagca

SEQ ID NO: 1928048 - RNA, 19 nt, Artificial Sequence
  Description of Artificial Sequence: Synthetic oligonucleotide
  Sense strand starting at position 3825 of SEQ ID NO: 1879724
cuggauaaguccucauaaa

SEQ ID NO: 1928049 - RNA, 19 nt, Artificial Sequence
  Description of Artificial Sequence: Synthetic oligonucleotide
  Antisense strand to SEQ ID NO: 1928048
uuuaugaggacuuauccag

SEQ ID NO: 1928050 - RNA, 19 nt, Artificial Sequence
  Description of Artificial Sequence: Synthetic oligonucleotide
  Sense strand starting at position 3920 of SEQ ID NO: 1879724
agauaauauccuugcagag

SEQ ID NO: 1928051 - RNA, 19 nt, Artificial Sequence
  Description of Artificial Sequence: Synthetic oligonucleotide
  Antisense strand to SEQ ID NO: 1928050
cucugcaaggauauuaucu

SEQ ID NO: 1928052 - RNA, 19 nt, Artificial Sequence
  Description of Artificial Sequence: Synthetic oligonucleotide
  Sense strand starting at position 296 of SEQ ID NO: 1879725
ugcacugggcccuaaucaa

SEQ ID NO: 1928053 - RNA, 19 nt, Artificial Sequence
  Description of Artificial Sequence: Synthetic oligonucleotide
  Antisense strand to SEQ ID NO: 1928052
uugauuagggcccagugca

SEQ ID NO: 1928054 - RNA, 19 nt, Artificial Sequence
  Description of Artificial Sequence: Synthetic oligonucleotide
  Sense strand starting at position 314 of SEQ ID NO: 1879725
aagguuagcggcuauaaag

SEQ ID NO: 1928055 - RNA, 19 nt, Artificial Sequence
  Description of Artificial Sequence: Synthetic oligonucleotide
  Antisense strand to SEQ ID NO: 1928054
cuuuauagccgcuaaccuu

SEQ ID NO: 1928056 - RNA, 19 nt, Artificial Sequence
  Description of Artificial Sequence: Synthetic oligonucleotide
  Sense strand starting at position 329 of SEQ ID NO: 1879725
aaagaaucgucuucucaga

SEQ ID NO: 1928057 - RNA, 19 nt, Artificial Sequence
  Description of Artificial Sequence: Synthetic oligonucleotide
  Antisense strand to SEQ ID NO: 1928056
ucugagaagacgauucuuu

SEQ ID NO: 1928058 - RNA, 19 nt, Artificial Sequence
  Description of Artificial Sequence: Synthetic oligonucleotide
  Sense strand starting at position 331 of SEQ ID NO: 1879725
agaaucgucuucucagauu

SEQ ID NO: 1928059 - RNA, 19 nt, Artificial Sequence
  Description of Artificial Sequence: Synthetic oligonucleotide
  Antisense strand to SEQ ID NO: 1928058
aaucugagaagacgauucu

SEQ ID NO: 1928060 - RNA, 19 nt, Artificial Sequence
  Description of Artificial Sequence: Synthetic oligonucleotide
  Sense strand starting at position 489 of SEQ ID NO: 1879725
ggguuucggaugcgaggaa

SEQ ID NO: 1928061 - RNA, 19 nt, Artificial Sequence
  Description of Artificial Sequence: Synthetic oligonucleotide
  Antisense strand to SEQ ID NO: 1928060
uuccucgcauccgaaaccc

SEQ ID NO: 1928062 - RNA, 19 nt, Artificial Sequence
  Description of Artificial Sequence: Synthetic oligonucleotide
  Sense strand starting at position 518 of SEQ ID NO: 1879725
ggauaugauuaucaggaau

SEQ ID NO: 1928063 - RNA, 19 nt, Artificial Sequence
  Description of Artificial Sequence: Synthetic oligonucleotide
  Antisense strand to SEQ ID NO: 1928062
auuccugauaaucauaucc

SEQ ID NO: 1928064 - RNA, 19 nt, Artificial Sequence
  Description of Artificial Sequence: Synthetic oligonucleotide
  Sense strand starting at position 561 of SEQ ID NO: 1879725
cauacuuugcuguaggauu

SEQ ID NO: 1928065 - RNA, 19 nt, Artificial Sequence
  Description of Artificial Sequence: Synthetic oligonucleotide
  Antisense strand to SEQ ID NO: 1928064
aauccuacagcaaaguaug

SEQ ID NO: 1928066 - RNA, 19 nt, Artificial Sequence
  Description of Artificial Sequence: Synthetic oligonucleotide
  Sense strand starting at position 563 of SEQ ID NO: 1879725
uacuuugcuguaggauuaa

SEQ ID NO: 1928067 - RNA, 19 nt, Artificial Sequence
  Description of Artificial Sequence: Synthetic oligonucleotide
  Antisense strand to SEQ ID NO: 1928066
uuaauccuacagcaaagua

SEQ ID NO: 1928068 - RNA, 19 nt, Artificial Sequence
  Description of Artificial Sequence: Synthetic oligonucleotide
  Sense strand starting at position 596 of SEQ ID NO: 1879725
gaaugacaaugaggcauuu

SEQ ID NO: 1928069 - RNA, 19 nt, Artificial Sequence
  Description of Artificial Sequence: Synthetic oligonucleotide
  Antisense strand to SEQ ID NO: 1928068
aaaugccucauugucauuc

SEQ ID NO: 1928070 - RNA, 19 nt, Artificial Sequence
  Description of Artificial Sequence: Synthetic oligonucleotide
  Sense strand starting at position 814 of SEQ ID NO: 1879725
gaauauaggcuggguguua

SEQ ID NO: 1928071 - RNA, 19 nt, Artificial Sequence
  Description of Artificial Sequence: Synthetic oligonucleotide
  Antisense strand to SEQ ID NO: 1928070
uaacacccagccuauauuc

SEQ ID NO: 1928072 - RNA, 19 nt, Artificial Sequence
  Description of Artificial Sequence: Synthetic oligonucleotide
  Sense strand starting at position 815 of SEQ ID NO: 1879725
aauauaggcuggguguuau

SEQ ID NO: 1928073 - RNA, 19 nt, Artificial Sequence
  Description of Artificial Sequence: Synthetic oligonucleotide
  Antisense strand to SEQ ID NO: 1928072
auaacacccagccuauauu

SEQ ID NO: 1928074 - RNA, 19 nt, Artificial Sequence
  Description of Artificial Sequence: Synthetic oligonucleotide
  Sense strand starting at position 851 of SEQ ID NO: 1879725
uuguuaacauuguuaggua

SEQ ID NO: 1928075 - RNA, 19 nt, Artificial Sequence
  Description of Artificial Sequence: Synthetic oligonucleotide
  Antisense strand to SEQ ID NO: 1928074
uaccuaacaauguuaacaa

SEQ ID NO: 1928076 - RNA, 19 nt, Artificial Sequence
  Description of Artificial Sequence: Synthetic oligonucleotide
  Sense strand starting at position 855 of SEQ ID NO: 1879725
uaacauuguuagguaugau

SEQ ID NO: 1928077 - RNA, 19 nt, Artificial Sequence
  Description of Artificial Sequence: Synthetic oligonucleotide
  Antisense strand to SEQ ID NO: 1928076
aucauaccuaacaauguua

SEQ ID NO: 1928078 - RNA, 19 nt, Artificial Sequence
  Description of Artificial Sequence: Synthetic oligonucleotide
  Sense strand starting at position 902 of SEQ ID NO: 1879725
auagauccacauggguauu

SEQ ID NO: 1928079 - RNA, 19 nt, Artificial Sequence
  Description of Artificial Sequence: Synthetic oligonucleotide
  Antisense strand to SEQ ID NO: 1928078
aauacccauguggaucuau

SEQ ID NO: 1928080 - RNA, 19 nt, Artificial Sequence
  Description of Artificial Sequence: Synthetic oligonucleotide
  Sense strand starting at position 912 of SEQ ID NO: 1879725
auggguauuuaugaguaaa

SEQ ID NO: 1928081 - RNA, 19 nt, Artificial Sequence
  Description of Artificial Sequence: Synthetic oligonucleotide
  Antisense strand to SEQ ID NO: 1928080
uuuacucauaaauacccau

SEQ ID NO: 1928082 - RNA, 19 nt, Artificial Sequence
  Description of Artificial Sequence: Synthetic oligonucleotide
  Sense strand starting at position 932 of SEQ ID NO: 1879725
uaacauaaggucugagauc

SEQ ID NO: 1928083 - RNA, 19 nt, Artificial Sequence
  Description of Artificial Sequence: Synthetic oligonucleotide
  Antisense strand to SEQ ID NO: 1928082
gaucucagaccuuauguua

SEQ ID NO: 1928084 - RNA, 19 nt, Artificial Sequence
  Description of Artificial Sequence: Synthetic oligonucleotide
  Sense strand starting at position 1423 of SEQ ID NO: 1879725
ggaauucucuaagcugaag

SEQ ID NO: 1928085 - RNA, 19 nt, Artificial Sequence
  Description of Artificial Sequence: Synthetic oligonucleotide
  Antisense strand to SEQ ID NO: 1928084
cuucagcuuagagaauucc

SEQ ID NO: 1928086 - RNA, 19 nt, Artificial Sequence
  Description of Artificial Sequence: Synthetic oligonucleotide
  Sense strand starting at position 1450 of SEQ ID NO: 1879725
aggaguugaugggaaggau

SEQ ID NO: 1928087 - RNA, 19 nt, Artificial Sequence
  Description of Artificial Sequence: Synthetic oligonucleotide
  Antisense strand to SEQ ID NO: 1928086
auccuucccaucaacuccu

SEQ ID NO: 1928088 - RNA, 19 nt, Artificial Sequence
  Description of Artificial Sequence: Synthetic oligonucleotide
  Sense strand starting at position 1465 of SEQ ID NO: 1879725
ggauaauccgcccaucggu

SEQ ID NO: 1928089 - RNA, 19 nt, Artificial Sequence
  Description of Artificial Sequence: Synthetic oligonucleotide
  Antisense strand to SEQ ID NO: 1928088
accgaugggcggauuaucc

SEQ ID NO: 1928090 - RNA, 19 nt, Artificial Sequence
  Description of Artificial Sequence: Synthetic oligonucleotide
  Sense strand starting at position 1560 of SEQ ID NO: 1879725
cuaauuaugccagagccaa

SEQ ID NO: 1928091 - RNA, 19 nt, Artificial Sequence
  Description of Artificial Sequence: Synthetic oligonucleotide
  Antisense strand to SEQ ID NO: 1928090
uuggcucuggcauaauuag

SEQ ID NO: 1928092 - RNA, 19 nt, Artificial Sequence
  Description of Artificial Sequence: Synthetic oligonucleotide
  Sense strand starting at position 1697 of SEQ ID NO: 1879725
uguaucaaguggucagaug

SEQ ID NO: 1928093 - RNA, 19 nt, Artificial Sequence
  Description of Artificial Sequence: Synthetic oligonucleotide
  Antisense strand to SEQ ID NO: 1928092
caucugaccacuugauaca

SEQ ID NO: 1928094 - RNA, 19 nt, Artificial Sequence
  Description of Artificial Sequence: Synthetic oligonucleotide
  Sense strand starting at position 1698 of SEQ ID NO: 1879725
guaucaaguggucagauga

SEQ ID NO: 1928095 - RNA, 19 nt, Artificial Sequence
  Description of Artificial Sequence: Synthetic oligonucleotide
  Antisense strand to SEQ ID NO: 1928094
ucaucugaccacuugauac

SEQ ID NO: 1928096 - RNA, 19 nt, Artificial Sequence
  Description of Artificial Sequence: Synthetic oligonucleotide
  Sense strand starting at position 1749 of SEQ ID NO: 1879725
agaacaccuuguuugcaaa

SEQ ID NO: 1928097 - RNA, 19 nt, Artificial Sequence
  Description of Artificial Sequence: Synthetic oligonucleotide
  Antisense strand to SEQ ID NO: 1928096
uuugcaaacaagguguucu

SEQ ID NO: 1928098 - RNA, 19 nt, Artificial Sequence
  Description of Artificial Sequence: Synthetic oligonucleotide
  Sense strand starting at position 2098 of SEQ ID NO: 1879725
ucacauuccgucugggaaa

SEQ ID NO: 1928099 - RNA, 19 nt, Artificial Sequence
  Description of Artificial Sequence: Synthetic oligonucleotide
  Antisense strand to SEQ ID NO: 1928098
uuucccagacggaauguga

SEQ ID NO: 1928100 - RNA, 19 nt, Artificial Sequence
  Description of Artificial Sequence: Synthetic oligonucleotide
  Sense strand starting at position 2332 of SEQ ID NO: 1879725
ccauaccaucacggauuaa

SEQ ID NO: 1928101 - RNA, 19 nt, Artificial Sequence
  Description of Artificial Sequence: Synthetic oligonucleotide
  Antisense strand to SEQ ID NO: 1928100
uuaauccgugaugguaugg

SEQ ID NO: 1928102 - RNA, 19 nt, Artificial Sequence
  Description of Artificial Sequence: Synthetic oligonucleotide
  Sense strand starting at position 2422 of SEQ ID NO: 1879725
gugauauuauacuccuauu

SEQ ID NO: 1928103 - RNA, 19 nt, Artificial Sequence
  Description of Artificial Sequence: Synthetic oligonucleotide
  Antisense strand to SEQ ID NO: 1928102
aauaggaguauaauaucac

SEQ ID NO: 1928104 - RNA, 19 nt, Artificial Sequence
  Description of Artificial Sequence: Synthetic oligonucleotide
  Sense strand starting at position 2433 of SEQ ID NO: 1879725
cuccuauugucccugaucu

SEQ ID NO: 1928105 - RNA, 19 nt, Artificial Sequence
  Description of Artificial Sequence: Synthetic oligonucleotide
  Antisense strand to SEQ ID NO: 1928104
agaucagggacaauaggag

SEQ ID NO: 1928106 - RNA, 19 nt, Artificial Sequence
  Description of Artificial Sequence: Synthetic oligonucleotide
  Sense strand starting at position 2489 of SEQ ID NO: 1879725
cugagacucuuuccugaug

SEQ ID NO: 1928107 - RNA, 19 nt, Artificial Sequence
  Description of Artificial Sequence: Synthetic oligonucleotide
  Antisense strand to SEQ ID NO: 1928106
caucaggaaagagucucag

SEQ ID NO: 1928108 - RNA, 19 nt, Artificial Sequence
  Description of Artificial Sequence: Synthetic oligonucleotide
  Sense strand starting at position 2490 of SEQ ID NO: 1879725
ugagacucuuuccugaugu

SEQ ID NO: 1928109 - RNA, 19 nt, Artificial Sequence
  Description of Artificial Sequence: Synthetic oligonucleotide
  Antisense strand to SEQ ID NO: 1928108
acaucaggaaagagucuca

SEQ ID NO: 1928110 - RNA, 19 nt, Artificial Sequence
  Description of Artificial Sequence: Synthetic oligonucleotide
  Sense strand starting at position 2492 of SEQ ID NO: 1879725
agacucuuuccugauguau

SEQ ID NO: 1928111 - RNA, 19 nt, Artificial Sequence
  Description of Artificial Sequence: Synthetic oligonucleotide
  Antisense strand to SEQ ID NO: 1928110
auacaucaggaaagagucu

SEQ ID NO: 1928112 - RNA, 19 nt, Artificial Sequence
  Description of Artificial Sequence: Synthetic oligonucleotide
  Sense strand starting at position 2539 of SEQ ID NO: 1879725
gucagaaugcuguagaaua

SEQ ID NO: 1928113 - RNA, 19 nt, Artificial Sequence
  Description of Artificial Sequence: Synthetic oligonucleotide
  Antisense strand to SEQ ID NO: 1928112
uauucuacagcauucugac

SEQ ID NO: 1928114 - RNA, 19 nt, Artificial Sequence
  Description of Artificial Sequence: Synthetic oligonucleotide
  Sense strand starting at position 2820 of SEQ ID NO: 1879725
uuacuuugguugccaggau

SEQ ID NO: 1928115 - RNA, 19 nt, Artificial Sequence
  Description of Artificial Sequence: Synthetic oligonucleotide
  Antisense strand to SEQ ID NO: 1928114
auccuggcaaccaaaguaa

SEQ ID NO: 1928116 - RNA, 19 nt, Artificial Sequence
  Description of Artificial Sequence: Synthetic oligonucleotide
  Sense strand starting at position 2934 of SEQ ID NO: 1879725
uuugcaucauuuguuguaa

SEQ ID NO: 1928117 - RNA, 19 nt, Artificial Sequence
  Description of Artificial Sequence: Synthetic oligonucleotide
  Antisense strand to SEQ ID NO: 1928116
uuacaacaaaugaugcaaa

SEQ ID NO: 1928118 - RNA, 19 nt, Artificial Sequence
  Description of Artificial Sequence: Synthetic oligonucleotide
  Sense strand starting at position 2935 of SEQ ID NO: 1879725
uugcaucauuuguuguaaa

SEQ ID NO: 1928119 - RNA, 19 nt, Artificial Sequence
  Description of Artificial Sequence: Synthetic oligonucleotide
  Antisense strand to SEQ ID NO: 1928118
uuuacaacaaaugaugcaa

SEQ ID NO: 1928120 - RNA, 19 nt, Artificial Sequence
  Description of Artificial Sequence: Synthetic oligonucleotide
  Sense strand starting at position 3164 of SEQ ID NO: 1879725
gguccuguacuguaacaua

SEQ ID NO: 1928121 - RNA, 19 nt, Artificial Sequence
  Description of Artificial Sequence: Synthetic oligonucleotide
  Antisense strand to SEQ ID NO: 1928120
uauguuacaguacaggacc

SEQ ID NO: 1928122 - RNA, 19 nt, Artificial Sequence
  Description of Artificial Sequence: Synthetic oligonucleotide
  Sense strand starting at position 3232 of SEQ ID NO: 1879725
uuauccauguugucaacua

SEQ ID NO: 1928123 - RNA, 19 nt, Artificial Sequence
  Description of Artificial Sequence: Synthetic oligonucleotide
  Antisense strand to SEQ ID NO: 1928122
uaguugacaacauggauaa

SEQ ID NO: 1928124 - RNA, 19 nt, Artificial Sequence
  Description of Artificial Sequence: Synthetic oligonucleotide
  Sense strand starting at position 3343 of SEQ ID NO: 1879725
uuucuaaugucacuguauu

SEQ ID NO: 1928125 - RNA, 19 nt, Artificial Sequence
  Description of Artificial Sequence: Synthetic oligonucleotide
  Antisense strand to SEQ ID NO: 1928124
aauacagugacauuagaaa

SEQ ID NO: 1928126 - RNA, 19 nt, Artificial Sequence
  Description of Artificial Sequence: Synthetic oligonucleotide
  Sense strand starting at position 3344 of SEQ ID NO: 1879725
uucuaaugucacuguauuu

SEQ ID NO: 1928127 - RNA, 19 nt, Artificial Sequence
  Description of Artificial Sequence: Synthetic oligonucleotide
  Antisense strand to SEQ ID NO: 1928126
aaauacagugacauuagaa

SEQ ID NO: 1928128 - RNA, 19 nt, Artificial Sequence
  Description of Artificial Sequence: Synthetic oligonucleotide
  Sense strand starting at position 3666 of SEQ ID NO: 1879725
ucaugugaaaggugauaau

SEQ ID NO: 1928129 - RNA, 19 nt, Artificial Sequence
  Description of Artificial Sequence: Synthetic oligonucleotide
  Antisense strand to SEQ ID NO: 1928128
auuaucaccuuucacauga

SEQ ID NO: 1928130 - RNA, 19 nt, Artificial Sequence
  Description of Artificial Sequence: Synthetic oligonucleotide
  Sense strand starting at position 3779 of SEQ ID NO: 1879725
acaucaacuugagaaagaa

SEQ ID NO: 1928131 - RNA, 19 nt, Artificial Sequence
  Description of Artificial Sequence: Synthetic oligonucleotide
  Antisense strand to SEQ ID NO: 1928130
uucuuucucaaguugaugu

SEQ ID NO: 1928132 - RNA, 19 nt, Artificial Sequence
  Description of Artificial Sequence: Synthetic oligonucleotide
  Sense strand starting at position 87 of SEQ ID NO: 1879726
uggagucucugaucaagac

SEQ ID NO: 1928133 - RNA, 19 nt, Artificial Sequence
  Description of Artificial Sequence: Synthetic oligonucleotide
  Antisense strand to SEQ ID NO: 1928132
gucuugaucagagacucca

SEQ ID NO: 1928134 - RNA, 19 nt, Artificial Sequence
  Description of Artificial Sequence: Synthetic oligonucleotide
  Sense strand starting at position 91 of SEQ ID NO: 1879726
gucucugaucaagacucuu

SEQ ID NO: 1928135 - RNA, 19 nt, Artificial Sequence
  Description of Artificial Sequence: Synthetic oligonucleotide
  Antisense strand to SEQ ID NO: 1928134
aagagucuugaucagagac

SEQ ID NO: 1928136 - RNA, 19 nt, Artificial Sequence
  Description of Artificial Sequence: Synthetic oligonucleotide
  Sense strand starting at position 109 of SEQ ID NO: 1879726
ugugauuuauucccgguau

SEQ ID NO: 1928137 - RNA, 19 nt, Artificial Sequence
  Description of Artificial Sequence: Synthetic oligonucleotide
  Antisense strand to SEQ ID NO: 1928136
auaccgggaauaaaucaca

SEQ ID NO: 1928138 - RNA, 19 nt, Artificial Sequence
  Description of Artificial Sequence: Synthetic oligonucleotide
  Sense strand starting at position 138 of SEQ ID NO: 1879726
cagauuuccuggucugcca

SEQ ID NO: 1928139 - RNA, 19 nt, Artificial Sequence
  Description of Artificial Sequence: Synthetic oligonucleotide
  Antisense strand to SEQ ID NO: 1928138
uggcagaccaggaaaucug

SEQ ID NO: 1928140 - RNA, 19 nt, Artificial Sequence
  Description of Artificial Sequence: Synthetic oligonucleotide
  Sense strand starting at position 168 of SEQ ID NO: 1879726
gccaauuucuugcucaaug

SEQ ID NO: 1928141 - RNA, 19 nt, Artificial Sequence
  Description of Artificial Sequence: Synthetic oligonucleotide
  Antisense strand to SEQ ID NO: 1928140
cauugagcaagaaauuggc

SEQ ID NO: 1928142 - RNA, 19 nt, Artificial Sequence
  Description of Artificial Sequence: Synthetic oligonucleotide
  Sense strand starting at position 227 of SEQ ID NO: 1879726
ccucaacugucuuuggaag

SEQ ID NO: 1928143 - RNA, 19 nt, Artificial Sequence
  Description of Artificial Sequence: Synthetic oligonucleotide
  Antisense strand to SEQ ID NO: 1928142
cuuccaaagacaguugagg

SEQ ID NO: 1928144 - RNA, 19 nt, Artificial Sequence
  Description of Artificial Sequence: Synthetic oligonucleotide
  Sense strand starting at position 350 of SEQ ID NO: 1879726
ggcccaugccuuuagaauu

SEQ ID NO: 1928145 - RNA, 19 nt, Artificial Sequence
  Description of Artificial Sequence: Synthetic oligonucleotide
  Antisense strand to SEQ ID NO: 1928144
aauucuaaaggcaugggcc

SEQ ID NO: 1928146 - RNA, 19 nt, Artificial Sequence
  Description of Artificial Sequence: Synthetic oligonucleotide
  Sense strand starting at position 498 of SEQ ID NO: 1879726
ucuguagugccugaaauua

SEQ ID NO: 1928147 - RNA, 19 nt, Artificial Sequence
  Description of Artificial Sequence: Synthetic oligonucleotide
  Antisense strand to SEQ ID NO: 1928146
uaauuucaggcacuacaga

SEQ ID NO: 1928148 - RNA, 19 nt, Artificial Sequence
  Description of Artificial Sequence: Synthetic oligonucleotide
  Sense strand starting at position 660 of SEQ ID NO: 1879726
ggucuugaauaucuacaac

SEQ ID NO: 1928149 - RNA, 19 nt, Artificial Sequence
  Description of Artificial Sequence: Synthetic oligonucleotide
  Antisense strand to SEQ ID NO: 1928148
guuguagauauucaagacc

SEQ ID NO: 1928150 - RNA, 19 nt, Artificial Sequence
  Description of Artificial Sequence: Synthetic oligonucleotide
  Sense strand starting at position 710 of SEQ ID NO: 1879726
ucguuuauugcacaaacau

SEQ ID NO: 1928151 - RNA, 19 nt, Artificial Sequence
  Description of Artificial Sequence: Synthetic oligonucleotide
  Antisense strand to SEQ ID NO: 1928150
auguuugugcaauaaacga

SEQ ID NO: 1928152 - RNA, 19 nt, Artificial Sequence
  Description of Artificial Sequence: Synthetic oligonucleotide
  Sense strand starting at position 909 of SEQ ID NO: 1879726
cgauaaacuaccugugaga

SEQ ID NO: 1928153 - RNA, 19 nt, Artificial Sequence
  Description of Artificial Sequence: Synthetic oligonucleotide
  Antisense strand to SEQ ID NO: 1928152
ucucacagguaguuuaucg

SEQ ID NO: 1928154 - RNA, 19 nt, Artificial Sequence
  Description of Artificial Sequence: Synthetic oligonucleotide
  Sense strand starting at position 925 of SEQ ID NO: 1879726
agaggcugucuccaaauau

SEQ ID NO: 1928155 - RNA, 19 nt, Artificial Sequence
  Description of Artificial Sequence: Synthetic oligonucleotide
  Antisense strand to SEQ ID NO: 1928154
auauuuggagacagccucu

SEQ ID NO: 1928156 - RNA, 19 nt, Artificial Sequence
  Description of Artificial Sequence: Synthetic oligonucleotide
  Sense strand starting at position 1254 of SEQ ID NO: 1879726
ggaugaaucugagcuggug

SEQ ID NO: 1928157 - RNA, 19 nt, Artificial Sequence
  Description of Artificial Sequence: Synthetic oligonucleotide
  Antisense strand to SEQ ID NO: 1928156
caccagcucagauucaucc

SEQ ID NO: 1928158 - RNA, 19 nt, Artificial Sequence
  Description of Artificial Sequence: Synthetic oligonucleotide
  Sense strand starting at position 1308 of SEQ ID NO: 1879726
gggugacacuuugugacau

SEQ ID NO: 1928159 - RNA, 19 nt, Artificial Sequence
  Description of Artificial Sequence: Synthetic oligonucleotide
  Antisense strand to SEQ ID NO: 1928158
augucacaaagugucaccc

SEQ ID NO: 1928160 - RNA, 19 nt, Artificial Sequence
  Description of Artificial Sequence: Synthetic oligonucleotide
  Sense strand starting at position 1377 of SEQ ID NO: 1879726
agcuaauugccauggauag

SEQ ID NO: 1928161 - RNA, 19 nt, Artificial Sequence
  Description of Artificial Sequence: Synthetic oligonucleotide
  Antisense strand to SEQ ID NO: 1928160
cuauccauggcaauuagcu

SEQ ID NO: 1928162 - RNA, 19 nt, Artificial Sequence
  Description of Artificial Sequence: Synthetic oligonucleotide
  Sense strand starting at position 1378 of SEQ ID NO: 1879726
gcuaauugccauggauaga

SEQ ID NO: 1928163 - RNA, 19 nt, Artificial Sequence
  Description of Artificial Sequence: Synthetic oligonucleotide
  Antisense strand to SEQ ID NO: 1928162
ucuauccauggcaauuagc

SEQ ID NO: 1928164 - RNA, 19 nt, Artificial Sequence
  Description of Artificial Sequence: Synthetic oligonucleotide
  Sense strand starting at position 1474 of SEQ ID NO: 1879726
gccucaaagauguauguga

SEQ ID NO: 1928165 - RNA, 19 nt, Artificial Sequence
  Description of Artificial Sequence: Synthetic oligonucleotide
  Antisense strand to SEQ ID NO: 1928164
ucacauacaucuuugaggc

SEQ ID NO: 1928166 - RNA, 19 nt, Artificial Sequence
  Description of Artificial Sequence: Synthetic oligonucleotide
  Sense strand starting at position 1476 of SEQ ID NO: 1879726
cucaaagauguaugugaag

SEQ ID NO: 1928167 - RNA, 19 nt, Artificial Sequence
  Description of Artificial Sequence: Synthetic oligonucleotide
  Antisense strand to SEQ ID NO: 1928166
cuucacauacaucuuugag

SEQ ID NO: 1928168 - RNA, 19 nt, Artificial Sequence
  Description of Artificial Sequence: Synthetic oligonucleotide
  Sense strand starting at position 1487 of SEQ ID NO: 1879726
augugaagccacgauggaa

SEQ ID NO: 1928169 - RNA, 19 nt, Artificial Sequence
  Description of Artificial Sequence: Synthetic oligonucleotide
  Antisense strand to SEQ ID NO: 1928168
uuccaucguggcuucacau

SEQ ID NO: 1928170 - RNA, 19 nt, Artificial Sequence
  Description of Artificial Sequence: Synthetic oligonucleotide
  Sense strand starting at position 1655 of SEQ ID NO: 1879726
uggcuugcuaaagauaagu

SEQ ID NO: 1928171 - RNA, 19 nt, Artificial Sequence
  Description of Artificial Sequence: Synthetic oligonucleotide
  Antisense strand to SEQ ID NO: 1928170
acuuaucuuuagcaagcca

SEQ ID NO: 1928172 - RNA, 19 nt, Artificial Sequence
  Description of Artificial Sequence: Synthetic oligonucleotide
  Sense strand starting at position 1657 of SEQ ID NO: 1879726
gcuugcuaaagauaaguga

SEQ ID NO: 1928173 - RNA, 19 nt, Artificial Sequence
  Description of Artificial Sequence: Synthetic oligonucleotide
  Antisense strand to SEQ ID NO: 1928172
ucacuuaucuuuagcaagc

SEQ ID NO: 1928174 - RNA, 19 nt, Artificial Sequence
  Description of Artificial Sequence: Synthetic oligonucleotide
  Sense strand starting at position 1660 of SEQ ID NO: 1879726
ugcuaaagauaagugauau

SEQ ID NO: 1928175 - RNA, 19 nt, Artificial Sequence
  Description of Artificial Sequence: Synthetic oligonucleotide
  Antisense strand to SEQ ID NO: 1928174
auaucacuuaucuuuagca

SEQ ID NO: 1928176 - RNA, 19 nt, Artificial Sequence
  Description of Artificial Sequence: Synthetic oligonucleotide
  Sense strand starting at position 1661 of SEQ ID NO: 1879726
gcuaaagauaagugauaug

SEQ ID NO: 1928177 - RNA, 19 nt, Artificial Sequence
  Description of Artificial Sequence: Synthetic oligonucleotide
  Antisense strand to SEQ ID NO: 1928176
cauaucacuuaucuuuagc

SEQ ID NO: 1928178 - RNA, 19 nt, Artificial Sequence
  Description of Artificial Sequence: Synthetic oligonucleotide
  Sense strand starting at position 2054 of SEQ ID NO: 1879726
gaaugugggcccugugaaa

SEQ ID NO: 1928179 - RNA, 19 nt, Artificial Sequence
  Description of Artificial Sequence: Synthetic oligonucleotide
  Antisense strand to SEQ ID NO: 1928178
uuucacagggcccacauuc

SEQ ID NO: 1928180 - RNA, 19 nt, Artificial Sequence
  Description of Artificial Sequence: Synthetic oligonucleotide
  Sense strand starting at position 2067 of SEQ ID NO: 1879726
gugaaaccagauugucuga

SEQ ID NO: 1928181 - RNA, 19 nt, Artificial Sequence
  Description of Artificial Sequence: Synthetic oligonucleotide
  Antisense strand to SEQ ID NO: 1928180
ucagacaaucugguuucac

SEQ ID NO: 1928182 - RNA, 19 nt, Artificial Sequence
  Description of Artificial Sequence: Synthetic oligonucleotide
  Sense strand starting at position 2069 of SEQ ID NO: 1879726
gaaaccagauugucugacu

SEQ ID NO: 1928183 - RNA, 19 nt, Artificial Sequence
  Description of Artificial Sequence: Synthetic oligonucleotide
  Antisense strand to SEQ ID NO: 1928182
agucagacaaucugguuuc

SEQ ID NO: 1928184 - RNA, 19 nt, Artificial Sequence
  Description of Artificial Sequence: Synthetic oligonucleotide
  Sense strand starting at position 2135 of SEQ ID NO: 1879726
ucaaauguuggcuaagaau

SEQ ID NO: 1928185 - RNA, 19 nt, Artificial Sequence
  Description of Artificial Sequence: Synthetic oligonucleotide
  Antisense strand to SEQ ID NO: 1928184
auucuuagccaacauuuga

SEQ ID NO: 1928186 - RNA, 19 nt, Artificial Sequence
  Description of Artificial Sequence: Synthetic oligonucleotide
  Sense strand starting at position 2159 of SEQ ID NO: 1879726
cuggauagaugagcuauua

SEQ ID NO: 1928187 - RNA, 19 nt, Artificial Sequence
  Description of Artificial Sequence: Synthetic oligonucleotide
  Antisense strand to SEQ ID NO: 1928186
uaauagcucaucuauccag

SEQ ID NO: 1928188 - RNA, 19 nt, Artificial Sequence
  Description of Artificial Sequence: Synthetic oligonucleotide
  Sense strand starting at position 2213 of SEQ ID NO: 1879726
uggcuuugggcgagucaua

SEQ ID NO: 1928189 - RNA, 19 nt, Artificial Sequence
  Description of Artificial Sequence: Synthetic oligonucleotide
  Antisense strand to SEQ ID NO: 1928188
uaugacucgcccaaagcca

SEQ ID NO: 1928190 - RNA, 19 nt, Artificial Sequence
  Description of Artificial Sequence: Synthetic oligonucleotide
  Sense strand starting at position 2226 of SEQ ID NO: 1879726
gucauauuaucucccagac

SEQ ID NO: 1928191 - RNA, 19 nt, Artificial Sequence
  Description of Artificial Sequence: Synthetic oligonucleotide
  Antisense strand to SEQ ID NO: 1928190
gucugggagauaauaugac

SEQ ID NO: 1928192 - RNA, 19 nt, Artificial Sequence
  Description of Artificial Sequence: Synthetic oligonucleotide
  Sense strand starting at position 2412 of SEQ ID NO: 1879726
acacccgauuugucuaagu

SEQ ID NO: 1928193 - RNA, 19 nt, Artificial Sequence
  Description of Artificial Sequence: Synthetic oligonucleotide
  Antisense strand to SEQ ID NO: 1928192
acuuagacaaaucgggugu

SEQ ID NO: 1928194 - RNA, 19 nt, Artificial Sequence
  Description of Artificial Sequence: Synthetic oligonucleotide
  Sense strand starting at position 2509 of SEQ ID NO: 1879726
gcauuaucucaggauguug

SEQ ID NO: 1928195 - RNA, 19 nt, Artificial Sequence
  Description of Artificial Sequence: Synthetic oligonucleotide
  Antisense strand to SEQ ID NO: 1928194
caacauccugagauaaugc

SEQ ID NO: 1928196 - RNA, 19 nt, Artificial Sequence
  Description of Artificial Sequence: Synthetic oligonucleotide
  Sense strand starting at position 3356 of SEQ ID NO: 1879726
cccuguaaggcucagaaca

SEQ ID NO: 1928197 - RNA, 19 nt, Artificial Sequence
  Description of Artificial Sequence: Synthetic oligonucleotide
  Antisense strand to SEQ ID NO: 1928196
uguucugagccuuacaggg

SEQ ID NO: 1928198 - RNA, 19 nt, Artificial Sequence
  Description of Artificial Sequence: Synthetic oligonucleotide
  Sense strand starting at position 3444 of SEQ ID NO: 1879726
agcuucccauugguagaaa

SEQ ID NO: 1928199 - RNA, 19 nt, Artificial Sequence
  Description of Artificial Sequence: Synthetic oligonucleotide
  Antisense strand to SEQ ID NO: 1928198
uuucuaccaaugggaagcu

SEQ ID NO: 1928200 - RNA, 19 nt, Artificial Sequence
  Description of Artificial Sequence: Synthetic oligonucleotide
  Sense strand starting at position 3523 of SEQ ID NO: 1879726
cuuagucuuccucagauua

SEQ ID NO: 1928201 - RNA, 19 nt, Artificial Sequence
  Description of Artificial Sequence: Synthetic oligonucleotide
  Antisense strand to SEQ ID NO: 1928200
uaaucugaggaagacuaag

SEQ ID NO: 1928202 - RNA, 19 nt, Artificial Sequence
  Description of Artificial Sequence: Synthetic oligonucleotide
  Sense strand starting at position 3658 of SEQ ID NO: 1879726
ggagcagucugacuccaca

SEQ ID NO: 1928203 - RNA, 19 nt, Artificial Sequence
  Description of Artificial Sequence: Synthetic oligonucleotide
  Antisense strand to SEQ ID NO: 1928202
uguggagucagacugcucc

SEQ ID NO: 1928204 - RNA, 19 nt, Artificial Sequence
  Description of Artificial Sequence: Synthetic oligonucleotide
  Sense strand starting at position 3723 of SEQ ID NO: 1879726
gaaagugaucagggcuaag

SEQ ID NO: 1928205 - RNA, 19 nt, Artificial Sequence
  Description of Artificial Sequence: Synthetic oligonucleotide
  Antisense strand to SEQ ID NO: 1928204
cuuagcccugaucacuuuc

SEQ ID NO: 1928206 - RNA, 19 nt, Artificial Sequence
  Description of Artificial Sequence: Synthetic oligonucleotide
  Sense strand starting at position 3726 of SEQ ID NO: 1879726
agugaucagggcuaagcaa

SEQ ID NO: 1928207 - RNA, 19 nt, Artificial Sequence
  Description of Artificial Sequence: Synthetic oligonucleotide
  Antisense strand to SEQ ID NO: 1928206
uugcuuagcccugaucacu

SEQ ID NO: 1928208 - RNA, 19 nt, Artificial Sequence
  Description of Artificial Sequence: Synthetic oligonucleotide
  Sense strand starting at position 3892 of SEQ ID NO: 1879726
acugaauccucgccaugag

SEQ ID NO: 1928209 - RNA, 19 nt, Artificial Sequence
  Description of Artificial Sequence: Synthetic oligonucleotide
  Antisense strand to SEQ ID NO: 1928208
cucauggcgaggauucagu

SEQ ID NO: 1928210 - RNA, 19 nt, Artificial Sequence
  Description of Artificial Sequence: Synthetic oligonucleotide
  Sense strand starting at position 3916 of SEQ ID NO: 1879726
gacacaugcgcgguauucu

SEQ ID NO: 1928211 - RNA, 19 nt, Artificial Sequence
  Description of Artificial Sequence: Synthetic oligonucleotide
  Antisense strand to SEQ ID NO: 1928210
agaauaccgcgcauguguc

SEQ ID NO: 1928212 - RNA, 19 nt, Artificial Sequence
  Description of Artificial Sequence: Synthetic oligonucleotide
  Sense strand starting at position 72 of SEQ ID NO: 1879727
gagauaucauuacuccgca

SEQ ID NO: 1928213 - RNA, 19 nt, Artificial Sequence
  Description of Artificial Sequence: Synthetic oligonucleotide
  Antisense strand to SEQ ID NO: 1928212
ugcggaguaaugauaucuc

SEQ ID NO: 1928214 - RNA, 19 nt, Artificial Sequence
  Description of Artificial Sequence: Synthetic oligonucleotide
  Sense strand starting at position 350 of SEQ ID NO: 1879727
gcagccaucucaggauaca

SEQ ID NO: 1928215 - RNA, 19 nt, Artificial Sequence
  Description of Artificial Sequence: Synthetic oligonucleotide
  Antisense strand to SEQ ID NO: 1928214
uguauccugagauggcugc

SEQ ID NO: 1928216 - RNA, 19 nt, Artificial Sequence
  Description of Artificial Sequence: Synthetic oligonucleotide
  Sense strand starting at position 394 of SEQ ID NO: 1879727
gcacaaugguaagacagaa

SEQ ID NO: 1928217 - RNA, 19 nt, Artificial Sequence
  Description of Artificial Sequence: Synthetic oligonucleotide
  Antisense strand to SEQ ID NO: 1928216
uucugucuuaccauugugc

SEQ ID NO: 1928218 - RNA, 19 nt, Artificial Sequence
  Description of Artificial Sequence: Synthetic oligonucleotide
  Sense strand starting at position 482 of SEQ ID NO: 1879727
gagagaaauuaauggccau

SEQ ID NO: 1928219 - RNA, 19 nt, Artificial Sequence
  Description of Artificial Sequence: Synthetic oligonucleotide
  Antisense strand to SEQ ID NO: 1928218
auggccauuaauuucucuc

SEQ ID NO: 1928220 - RNA, 19 nt, Artificial Sequence
  Description of Artificial Sequence: Synthetic oligonucleotide
  Sense strand starting at position 485 of SEQ ID NO: 1879727
agaaauuaauggccaucuu

SEQ ID NO: 1928221 - RNA, 19 nt, Artificial Sequence
  Description of Artificial Sequence: Synthetic oligonucleotide
  Antisense strand to SEQ ID NO: 1928220
aagauggccauuaauuucu

SEQ ID NO: 1928222 - RNA, 19 nt, Artificial Sequence
  Description of Artificial Sequence: Synthetic oligonucleotide
  Sense strand starting at position 493 of SEQ ID NO: 1879727
auggccaucuuguuuaaga

SEQ ID NO: 1928223 - RNA, 19 nt, Artificial Sequence
  Description of Artificial Sequence: Synthetic oligonucleotide
  Antisense strand to SEQ ID NO: 1928222
ucuuaaacaagauggccau

SEQ ID NO: 1928224 - RNA, 19 nt, Artificial Sequence
  Description of Artificial Sequence: Synthetic oligonucleotide
  Sense strand starting at position 494 of SEQ ID NO: 1879727
uggccaucuuguuuaagac

SEQ ID NO: 1928225 - RNA, 19 nt, Artificial Sequence
  Description of Artificial Sequence: Synthetic oligonucleotide
  Antisense strand to SEQ ID NO: 1928224
gucuuaaacaagauggcca

SEQ ID NO: 1928226 - RNA, 19 nt, Artificial Sequence
  Description of Artificial Sequence: Synthetic oligonucleotide
  Sense strand starting at position 495 of SEQ ID NO: 1879727
ggccaucuuguuuaagaca

SEQ ID NO: 1928227 - RNA, 19 nt, Artificial Sequence
  Description of Artificial Sequence: Synthetic oligonucleotide
  Antisense strand to SEQ ID NO: 1928226
ugucuuaaacaagauggcc

SEQ ID NO: 1928228 - RNA, 19 nt, Artificial Sequence
  Description of Artificial Sequence: Synthetic oligonucleotide
  Sense strand starting at position 500 of SEQ ID NO: 1879727
ucuuguuuaagacaguguu

SEQ ID NO: 1928229 - RNA, 19 nt, Artificial Sequence
  Description of Artificial Sequence: Synthetic oligonucleotide
  Antisense strand to SEQ ID NO: 1928228
aacacugucuuaaacaaga

SEQ ID NO: 1928230 - RNA, 19 nt, Artificial Sequence
  Description of Artificial Sequence: Synthetic oligonucleotide
  Sense strand starting at position 503 of SEQ ID NO: 1879727
uguuuaagacaguguuauu

SEQ ID NO: 1928231 - RNA, 19 nt, Artificial Sequence
  Description of Artificial Sequence: Synthetic oligonucleotide
  Antisense strand to SEQ ID NO: 1928230
aauaacacugucuuaaaca

SEQ ID NO: 1928232 - RNA, 19 nt, Artificial Sequence
  Description of Artificial Sequence: Synthetic oligonucleotide
  Sense strand starting at position 1229 of SEQ ID NO: 1879727
gugguuuccgcuucugcau

SEQ ID NO: 1928233 - RNA, 19 nt, Artificial Sequence
  Description of Artificial Sequence: Synthetic oligonucleotide
  Antisense strand to SEQ ID NO: 1928232
augcagaagcggaaaccac

SEQ ID NO: 1928234 - RNA, 19 nt, Artificial Sequence
  Description of Artificial Sequence: Synthetic oligonucleotide
  Sense strand starting at position 1534 of SEQ ID NO: 1879727
cagacugucucgugagaag

SEQ ID NO: 1928235 - RNA, 19 nt, Artificial Sequence
  Description of Artificial Sequence: Synthetic oligonucleotide
  Antisense strand to SEQ ID NO: 1928234
cuucucacgagacagucug

SEQ ID NO: 1928236 - RNA, 19 nt, Artificial Sequence
  Description of Artificial Sequence: Synthetic oligonucleotide
  Sense strand starting at position 1739 of SEQ ID NO: 1879727
cgagacugaucucugcaaa

SEQ ID NO: 1928237 - RNA, 19 nt, Artificial Sequence
  Description of Artificial Sequence: Synthetic oligonucleotide
  Antisense strand to SEQ ID NO: 1928236
uuugcagagaucagucucg

SEQ ID NO: 1928238 - RNA, 19 nt, Artificial Sequence
  Description of Artificial Sequence: Synthetic oligonucleotide
  Sense strand starting at position 1742 of SEQ ID NO: 1879727
gacugaucucugcaaacga

SEQ ID NO: 1928239 - RNA, 19 nt, Artificial Sequence
  Description of Artificial Sequence: Synthetic oligonucleotide
  Antisense strand to SEQ ID NO: 1928238
ucguuugcagagaucaguc

SEQ ID NO: 1928240 - RNA, 19 nt, Artificial Sequence
  Description of Artificial Sequence: Synthetic oligonucleotide
  Sense strand starting at position 1980 of SEQ ID NO: 1879727
augucuccucaaggagaaa

SEQ ID NO: 1928241 - RNA, 19 nt, Artificial Sequence
  Description of Artificial Sequence: Synthetic oligonucleotide
  Antisense strand to SEQ ID NO: 1928240
uuucuccuugaggagacau

SEQ ID NO: 1928242 - RNA, 19 nt, Artificial Sequence
  Description of Artificial Sequence: Synthetic oligonucleotide
  Sense strand starting at position 2016 of SEQ ID NO: 1879727
acaggaagccucugacacu

SEQ ID NO: 1928243 - RNA, 19 nt, Artificial Sequence
  Description of Artificial Sequence: Synthetic oligonucleotide
  Antisense strand to SEQ ID NO: 1928242
agugucagaggcuuccugu

SEQ ID NO: 1928244 - RNA, 19 nt, Artificial Sequence
  Description of Artificial Sequence: Synthetic oligonucleotide
  Sense strand starting at position 2190 of SEQ ID NO: 1879727
uuucucauuuaggaugauu

SEQ ID NO: 1928245 - RNA, 19 nt, Artificial Sequence
  Description of Artificial Sequence: Synthetic oligonucleotide
  Antisense strand to SEQ ID NO: 1928244
aaucauccuaaaugagaaa

SEQ ID NO: 1928246 - RNA, 19 nt, Artificial Sequence
  Description of Artificial Sequence: Synthetic oligonucleotide
  Sense strand starting at position 2290 of SEQ ID NO: 1879727
ggaguucgcgcucacggaa

SEQ ID NO: 1928247 - RNA, 19 nt, Artificial Sequence
  Description of Artificial Sequence: Synthetic oligonucleotide
  Antisense strand to SEQ ID NO: 1928246
uuccgugagcgcgaacucc

SEQ ID NO: 1928248 - RNA, 19 nt, Artificial Sequence
  Description of Artificial Sequence: Synthetic oligonucleotide
  Sense strand starting at position 2519 of SEQ ID NO: 1879727
agcccucacugguagauga

SEQ ID NO: 1928249 - RNA, 19 nt, Artificial Sequence
  Description of Artificial Sequence: Synthetic oligonucleotide
  Antisense strand to SEQ ID NO: 1928248
ucaucuaccagugagggcu

SEQ ID NO: 1928250 - RNA, 19 nt, Artificial Sequence
  Description of Artificial Sequence: Synthetic oligonucleotide
  Sense strand starting at position 2567 of SEQ ID NO: 1879727
uccucauggucauugaugu

SEQ ID NO: 1928251 - RNA, 19 nt, Artificial Sequence
  Description of Artificial Sequence: Synthetic oligonucleotide
  Antisense strand to SEQ ID NO: 1928250
acaucaaugaccaugagga

SEQ ID NO: 1928252 - RNA, 19 nt, Artificial Sequence
  Description of Artificial Sequence: Synthetic oligonucleotide
  Sense strand starting at position 2568 of SEQ ID NO: 1879727
ccucauggucauugaugua

SEQ ID NO: 1928253 - RNA, 19 nt, Artificial Sequence
  Description of Artificial Sequence: Synthetic oligonucleotide
  Antisense strand to SEQ ID NO: 1928252
uacaucaaugaccaugagg

SEQ ID NO: 1928254 - RNA, 19 nt, Artificial Sequence
  Description of Artificial Sequence: Synthetic oligonucleotide
  Sense strand starting at position 2571 of SEQ ID NO: 1879727
cauggucauugauguagau

SEQ ID NO: 1928255 - RNA, 19 nt, Artificial Sequence
  Description of Artificial Sequence: Synthetic oligonucleotide
  Antisense strand to SEQ ID NO: 1928254
aucuacaucaaugaccaug

SEQ ID NO: 1928256 - RNA, 19 nt, Artificial Sequence
  Description of Artificial Sequence: Synthetic oligonucleotide
  Sense strand starting at position 2573 of SEQ ID NO: 1879727
uggucauugauguagauca

SEQ ID NO: 1928257 - RNA, 19 nt, Artificial Sequence
  Description of Artificial Sequence: Synthetic oligonucleotide
  Antisense strand to SEQ ID NO: 1928256
ugaucuacaucaaugacca

SEQ ID NO: 1928258 - RNA, 19 nt, Artificial Sequence
  Description of Artificial Sequence: Synthetic oligonucleotide
  Sense strand starting at position 2730 of SEQ ID NO: 1879727
cucugcauggucguguuua

SEQ ID NO: 1928259 - RNA, 19 nt, Artificial Sequence
  Description of Artificial Sequence: Synthetic oligonucleotide
  Antisense strand to SEQ ID NO: 1928258
uaaacacgaccaugcagag

SEQ ID NO: 1928260 - RNA, 19 nt, Artificial Sequence
  Description of Artificial Sequence: Synthetic oligonucleotide
  Sense strand starting at position 2732 of SEQ ID NO: 1879727
cugcauggucguguuuauu

SEQ ID NO: 1928261 - RNA, 19 nt, Artificial Sequence
  Description of Artificial Sequence: Synthetic oligonucleotide
  Antisense strand to SEQ ID NO: 1928260
aauaaacacgaccaugcag

SEQ ID NO: 1928262 - RNA, 19 nt, Artificial Sequence
  Description of Artificial Sequence: Synthetic oligonucleotide
  Sense strand starting at position 2738 of SEQ ID NO: 1879727
ggucguguuuauuuccaag

SEQ ID NO: 1928263 - RNA, 19 nt, Artificial Sequence
  Description of Artificial Sequence: Synthetic oligonucleotide
  Antisense strand to SEQ ID NO: 1928262
cuuggaaauaaacacgacc

SEQ ID NO: 1928264 - RNA, 19 nt, Artificial Sequence
  Description of Artificial Sequence: Synthetic oligonucleotide
  Sense strand starting at position 2847 of SEQ ID NO: 1879727
gccagugugacgcguuacu

SEQ ID NO: 1928265 - RNA, 19 nt, Artificial Sequence
  Description of Artificial Sequence: Synthetic oligonucleotide
  Antisense strand to SEQ ID NO: 1928264
aguaacgcgucacacuggc

SEQ ID NO: 1928266 - RNA, 19 nt, Artificial Sequence
  Description of Artificial Sequence: Synthetic oligonucleotide
  Sense strand starting at position 2857 of SEQ ID NO: 1879727
cgcguuacuuggacucgaa

SEQ ID NO: 1928267 - RNA, 19 nt, Artificial Sequence
  Description of Artificial Sequence: Synthetic oligonucleotide
  Antisense strand to SEQ ID NO: 1928266
uucgaguccaaguaacgcg

SEQ ID NO: 1928268 - RNA, 19 nt, Artificial Sequence
  Description of Artificial Sequence: Synthetic oligonucleotide
  Sense strand starting at position 2879 of SEQ ID NO: 1879727
acacuuauuuccgagacug

SEQ ID NO: 1928269 - RNA, 19 nt, Artificial Sequence
  Description of Artificial Sequence: Synthetic oligonucleotide
  Antisense strand to SEQ ID NO: 1928268
cagucucggaaauaagugu

SEQ ID NO: 1928270 - RNA, 19 nt, Artificial Sequence
  Description of Artificial Sequence: Synthetic oligonucleotide
  Sense strand starting at position 2889 of SEQ ID NO: 1879727
ccgagacugagcugucuaa

SEQ ID NO: 1928271 - RNA, 19 nt, Artificial Sequence
  Description of Artificial Sequence: Synthetic oligonucleotide
  Antisense strand to SEQ ID NO: 1928270
uuagacagcucagucucgg

SEQ ID NO: 1928272 - RNA, 19 nt, Artificial Sequence
  Description of Artificial Sequence: Synthetic oligonucleotide
  Sense strand starting at position 2893 of SEQ ID NO: 1879727
gacugagcugucuaacauu

SEQ ID NO: 1928273 - RNA, 19 nt, Artificial Sequence
  Description of Artificial Sequence: Synthetic oligonucleotide
  Antisense strand to SEQ ID NO: 1928272
aauguuagacagcucaguc

SEQ ID NO: 1928274 - RNA, 19 nt, Artificial Sequence
  Description of Artificial Sequence: Synthetic oligonucleotide
  Sense strand starting at position 2953 of SEQ ID NO: 1879727
ggagaaacuuugcuaaauc

SEQ ID NO: 1928275 - RNA, 19 nt, Artificial Sequence
  Description of Artificial Sequence: Synthetic oligonucleotide
  Antisense strand to SEQ ID NO: 1928274
gauuuagcaaaguuucucc

SEQ ID NO: 1928276 - RNA, 19 nt, Artificial Sequence
  Description of Artificial Sequence: Synthetic oligonucleotide
  Sense strand starting at position 3039 of SEQ ID NO: 1879727
uuggaagacugcuggugau

SEQ ID NO: 1928277 - RNA, 19 nt, Artificial Sequence
  Description of Artificial Sequence: Synthetic oligonucleotide
  Antisense strand to SEQ ID NO: 1928276
aucaccagcagucuuccaa

SEQ ID NO: 1928278 - RNA, 19 nt, Artificial Sequence
  Description of Artificial Sequence: Synthetic oligonucleotide
  Sense strand starting at position 3199 of SEQ ID NO: 1879727
gguggaauguccuccggga

SEQ ID NO: 1928279 - RNA, 19 nt, Artificial Sequence
  Description of Artificial Sequence: Synthetic oligonucleotide
  Antisense strand to SEQ ID NO: 1928278
ucccggaggacauuccacc

SEQ ID NO: 1928280 - RNA, 19 nt, Artificial Sequence
  Description of Artificial Sequence: Synthetic oligonucleotide
  Sense strand starting at position 3345 of SEQ ID NO: 1879727
uggcccuuccuccaaguau

SEQ ID NO: 1928281 - RNA, 19 nt, Artificial Sequence
  Description of Artificial Sequence: Synthetic oligonucleotide
  Antisense strand to SEQ ID NO: 1928280
auacuuggaggaagggcca

SEQ ID NO: 1928282 - RNA, 19 nt, Artificial Sequence
  Description of Artificial Sequence: Synthetic oligonucleotide
  Sense strand starting at position 3354 of SEQ ID NO: 1879727
cuccaaguauucccugagu

SEQ ID NO: 1928283 - RNA, 19 nt, Artificial Sequence
  Description of Artificial Sequence: Synthetic oligonucleotide
  Antisense strand to SEQ ID NO: 1928282
acucagggaauacuuggag

SEQ ID NO: 1928284 - RNA, 19 nt, Artificial Sequence
  Description of Artificial Sequence: Synthetic oligonucleotide
  Sense strand starting at position 3356 of SEQ ID NO: 1879727
ccaaguauucccugagucu

SEQ ID NO: 1928285 - RNA, 19 nt, Artificial Sequence
  Description of Artificial Sequence: Synthetic oligonucleotide
  Antisense strand to SEQ ID NO: 1928284
agacucagggaauacuugg

SEQ ID NO: 1928286 - RNA, 19 nt, Artificial Sequence
  Description of Artificial Sequence: Synthetic oligonucleotide
  Sense strand starting at position 3425 of SEQ ID NO: 1879727
ggagcuuccauccgggaga

SEQ ID NO: 1928287 - RNA, 19 nt, Artificial Sequence
  Description of Artificial Sequence: Synthetic oligonucleotide
  Antisense strand to SEQ ID NO: 1928286
ucucccggauggaagcucc

SEQ ID NO: 1928288 - RNA, 19 nt, Artificial Sequence
  Description of Artificial Sequence: Synthetic oligonucleotide
  Sense strand starting at position 3536 of SEQ ID NO: 1879727
ccugcagugcccugguauu

SEQ ID NO: 1928289 - RNA, 19 nt, Artificial Sequence
  Description of Artificial Sequence: Synthetic oligonucleotide
  Antisense strand to SEQ ID NO: 1928288
aauaccagggcacugcagg

SEQ ID NO: 1928290 - RNA, 19 nt, Artificial Sequence
  Description of Artificial Sequence: Synthetic oligonucleotide
  Sense strand starting at position 3774 of SEQ ID NO: 1879727
ugucuucaagagcgagaga

SEQ ID NO: 1928291 - RNA, 19 nt, Artificial Sequence
  Description of Artificial Sequence: Synthetic oligonucleotide
  Antisense strand to SEQ ID NO: 1928290
ucucucgcucuugaagaca

SEQ ID NO: 1928292 - RNA, 19 nt, Artificial Sequence
  Description of Artificial Sequence: Synthetic oligonucleotide
  Sense strand starting at position 102 of SEQ ID NO: 1879728
ugcccuuuccaguagcaga

SEQ ID NO: 1928293 - RNA, 19 nt, Artificial Sequence
  Description of Artificial Sequence: Synthetic oligonucleotide
  Antisense strand to SEQ ID NO: 1928292
ucugcuacuggaaagggca

SEQ ID NO: 1928294 - RNA, 19 nt, Artificial Sequence
  Description of Artificial Sequence: Synthetic oligonucleotide
  Sense strand starting at position 197 of SEQ ID NO: 1879728
auguuuaauccuugcaaug

SEQ ID NO: 1928295 - RNA, 19 nt, Artificial Sequence
  Description of Artificial Sequence: Synthetic oligonucleotide
  Antisense strand to SEQ ID NO: 1928294
cauugcaaggauuaaacau

SEQ ID NO: 1928296 - RNA, 19 nt, Artificial Sequence
  Description of Artificial Sequence: Synthetic oligonucleotide
  Sense strand starting at position 208 of SEQ ID NO: 1879728
uugcaaugacucugcaaau

SEQ ID NO: 1928297 - RNA, 19 nt, Artificial Sequence
  Description of Artificial Sequence: Synthetic oligonucleotide
  Antisense strand to SEQ ID NO: 1928296
auuugcagagucauugcaa

SEQ ID NO: 1928298 - RNA, 19 nt, Artificial Sequence
  Description of Artificial Sequence: Synthetic oligonucleotide
  Sense strand starting at position 209 of SEQ ID NO: 1879728
ugcaaugacucugcaaauu

SEQ ID NO: 1928299 - RNA, 19 nt, Artificial Sequence
  Description of Artificial Sequence: Synthetic oligonucleotide
  Antisense strand to SEQ ID NO: 1928298
aauuugcagagucauugca

SEQ ID NO: 1928300 - RNA, 19 nt, Artificial Sequence
  Description of Artificial Sequence: Synthetic oligonucleotide
  Sense strand starting at position 274 of SEQ ID NO: 1879728
ggugaaguggcucacucau

SEQ ID NO: 1928301 - RNA, 19 nt, Artificial Sequence
  Description of Artificial Sequence: Synthetic oligonucleotide
  Antisense strand to SEQ ID NO: 1928300
augagugagccacuucacc

SEQ ID NO: 1928302 - RNA, 19 nt, Artificial Sequence
  Description of Artificial Sequence: Synthetic oligonucleotide
  Sense strand starting at position 504 of SEQ ID NO: 1879728
gcacaaacuggaugauguu

SEQ ID NO: 1928303 - RNA, 19 nt, Artificial Sequence
  Description of Artificial Sequence: Synthetic oligonucleotide
  Antisense strand to SEQ ID NO: 1928302
aacaucauccaguuugugc

SEQ ID NO: 1928304 - RNA, 19 nt, Artificial Sequence
  Description of Artificial Sequence: Synthetic oligonucleotide
  Sense strand starting at position 628 of SEQ ID NO: 1879728
uucagugaugcaugaggau

SEQ ID NO: 1928305 - RNA, 19 nt, Artificial Sequence
  Description of Artificial Sequence: Synthetic oligonucleotide
  Antisense strand to SEQ ID NO: 1928304
auccucaugcaucacugaa

SEQ ID NO: 1928306 - RNA, 19 nt, Artificial Sequence
  Description of Artificial Sequence: Synthetic oligonucleotide
  Sense strand starting at position 1223 of SEQ ID NO: 1879728
ccgauaauggcagaggagu

SEQ ID NO: 1928307 - RNA, 19 nt, Artificial Sequence
  Description of Artificial Sequence: Synthetic oligonucleotide
  Antisense strand to SEQ ID NO: 1928306
acuccucugccauuaucgg

SEQ ID NO: 1928308 - RNA, 19 nt, Artificial Sequence
  Description of Artificial Sequence: Synthetic oligonucleotide
  Sense strand starting at position 1463 of SEQ ID NO: 1879728
acugaaggucagcgguaau

SEQ ID NO: 1928309 - RNA, 19 nt, Artificial Sequence
  Description of Artificial Sequence: Synthetic oligonucleotide
  Antisense strand to SEQ ID NO: 1928308
auuaccgcugaccuucagu

SEQ ID NO: 1928310 - RNA, 19 nt, Artificial Sequence
  Description of Artificial Sequence: Synthetic oligonucleotide
  Sense strand starting at position 1466 of SEQ ID NO: 1879728
gaaggucagcgguaaugau

SEQ ID NO: 1928311 - RNA, 19 nt, Artificial Sequence
  Description of Artificial Sequence: Synthetic oligonucleotide
  Antisense strand to SEQ ID NO: 1928310
aucauuaccgcugaccuuc

SEQ ID NO: 1928312 - RNA, 19 nt, Artificial Sequence
  Description of Artificial Sequence: Synthetic oligonucleotide
  Sense strand starting at position 1475 of SEQ ID NO: 1879728
cgguaaugaucaucaacag

SEQ ID NO: 1928313 - RNA, 19 nt, Artificial Sequence
  Description of Artificial Sequence: Synthetic oligonucleotide
  Antisense strand to SEQ ID NO: 1928312
cuguugaugaucauuaccg

SEQ ID NO: 1928314 - RNA, 19 nt, Artificial Sequence
  Description of Artificial Sequence: Synthetic oligonucleotide
  Sense strand starting at position 1539 of SEQ ID NO: 1879728
ggaugugucucauuugagc

SEQ ID NO: 1928315 - RNA, 19 nt, Artificial Sequence
  Description of Artificial Sequence: Synthetic oligonucleotide
  Antisense strand to SEQ ID NO: 1928314
gcucaaaugagacacaucc

SEQ ID NO: 1928316 - RNA, 19 nt, Artificial Sequence
  Description of Artificial Sequence: Synthetic oligonucleotide
  Sense strand starting at position 1571 of SEQ ID NO: 1879728
cauggaggcuuuccuauua

SEQ ID NO: 1928317 - RNA, 19 nt, Artificial Sequence
  Description of Artificial Sequence: Synthetic oligonucleotide
  Antisense strand to SEQ ID NO: 1928316
uaauaggaaagccuccaug

SEQ ID NO: 1928318 - RNA, 19 nt, Artificial Sequence
  Description of Artificial Sequence: Synthetic oligonucleotide
  Sense strand starting at position 1682 of SEQ ID NO: 1879728
cugggucucuggucccaaa

SEQ ID NO: 1928319 - RNA, 19 nt, Artificial Sequence
  Description of Artificial Sequence: Synthetic oligonucleotide
  Antisense strand to SEQ ID NO: 1928318
uuugggaccagagacccag

SEQ ID NO: 1928320 - RNA, 19 nt, Artificial Sequence
  Description of Artificial Sequence: Synthetic oligonucleotide
  Sense strand starting at position 2083 of SEQ ID NO: 1879728
uuggcauugaaccggaaga

SEQ ID NO: 1928321 - RNA, 19 nt, Artificial Sequence
  Description of Artificial Sequence: Synthetic oligonucleotide
  Antisense strand to SEQ ID NO: 1928320
ucuuccgguucaaugccaa

SEQ ID NO: 1928322 - RNA, 19 nt, Artificial Sequence
  Description of Artificial Sequence: Synthetic oligonucleotide
  Sense strand starting at position 2084 of SEQ ID NO: 1879728
uggcauugaaccggaagaa

SEQ ID NO: 1928323 - RNA, 19 nt, Artificial Sequence
  Description of Artificial Sequence: Synthetic oligonucleotide
  Antisense strand to SEQ ID NO: 1928322
uucuuccgguucaaugcca

SEQ ID NO: 1928324 - RNA, 19 nt, Artificial Sequence
  Description of Artificial Sequence: Synthetic oligonucleotide
  Sense strand starting at position 2094 of SEQ ID NO: 1879728
ccggaagaagucgaugagu

SEQ ID NO: 1928325 - RNA, 19 nt, Artificial Sequence
  Description of Artificial Sequence: Synthetic oligonucleotide
  Antisense strand to SEQ ID NO: 1928324
acucaucgacuucuuccgg

SEQ ID NO: 1928326 - RNA, 19 nt, Artificial Sequence
  Description of Artificial Sequence: Synthetic oligonucleotide
  Sense strand starting at position 2096 of SEQ ID NO: 1879728
ggaagaagucgaugaguuc

SEQ ID NO: 1928327 - RNA, 19 nt, Artificial Sequence
  Description of Artificial Sequence: Synthetic oligonucleotide
  Antisense strand to SEQ ID NO: 1928326
gaacucaucgacuucuucc

SEQ ID NO: 1928328 - RNA, 19 nt, Artificial Sequence
  Description of Artificial Sequence: Synthetic oligonucleotide
  Sense strand starting at position 2532 of SEQ ID NO: 1879728
uuagcaugagcuggagauu

SEQ ID NO: 1928329 - RNA, 19 nt, Artificial Sequence
  Description of Artificial Sequence: Synthetic oligonucleotide
  Antisense strand to SEQ ID NO: 1928328
aaucuccagcucaugcuaa

SEQ ID NO: 1928330 - RNA, 19 nt, Artificial Sequence
  Description of Artificial Sequence: Synthetic oligonucleotide
  Sense strand starting at position 2659 of SEQ ID NO: 1879728
gagugacugugauucccuu

SEQ ID NO: 1928331 - RNA, 19 nt, Artificial Sequence
  Description of Artificial Sequence: Synthetic oligonucleotide
  Antisense strand to SEQ ID NO: 1928330
aagggaaucacagucacuc

SEQ ID NO: 1928332 - RNA, 19 nt, Artificial Sequence
  Description of Artificial Sequence: Synthetic oligonucleotide
  Sense strand starting at position 2795 of SEQ ID NO: 1879728
aggugcacgaccuauuaga

SEQ ID NO: 1928333 - RNA, 19 nt, Artificial Sequence
  Description of Artificial Sequence: Synthetic oligonucleotide
  Antisense strand to SEQ ID NO: 1928332
ucuaauaggucgugcaccu

SEQ ID NO: 1928334 - RNA, 19 nt, Artificial Sequence
  Description of Artificial Sequence: Synthetic oligonucleotide
  Sense strand starting at position 2834 of SEQ ID NO: 1879728
gagcuaagauguguaccuu

SEQ ID NO: 1928335 - RNA, 19 nt, Artificial Sequence
  Description of Artificial Sequence: Synthetic oligonucleotide
  Antisense strand to SEQ ID NO: 1928334
aagguacacaucuuagcuc

SEQ ID NO: 1928336 - RNA, 19 nt, Artificial Sequence
  Description of Artificial Sequence: Synthetic oligonucleotide
  Sense strand starting at position 2846 of SEQ ID NO: 1879728
guaccuugcuuccuagaag

SEQ ID NO: 1928337 - RNA, 19 nt, Artificial Sequence
  Description of Artificial Sequence: Synthetic oligonucleotide
  Antisense strand to SEQ ID NO: 1928336
cuucuaggaagcaagguac

SEQ ID NO: 1928338 - RNA, 19 nt, Artificial Sequence
  Description of Artificial Sequence: Synthetic oligonucleotide
  Sense strand starting at position 2858 of SEQ ID NO: 1879728
cuagaaguuccugagucuu

SEQ ID NO: 1928339 - RNA, 19 nt, Artificial Sequence
  Description of Artificial Sequence: Synthetic oligonucleotide
  Antisense strand to SEQ ID NO: 1928338
aagacucaggaacuucuag

SEQ ID NO: 1928340 - RNA, 19 nt, Artificial Sequence
  Description of Artificial Sequence: Synthetic oligonucleotide
  Sense strand starting at position 2860 of SEQ ID NO: 1879728
agaaguuccugagucuuag

SEQ ID NO: 1928341 - RNA, 19 nt, Artificial Sequence
  Description of Artificial Sequence: Synthetic oligonucleotide
  Antisense strand to SEQ ID NO: 1928340
cuaagacucaggaacuucu

SEQ ID NO: 1928342 - RNA, 19 nt, Artificial Sequence
  Description of Artificial Sequence: Synthetic oligonucleotide
  Sense strand starting at position 2869 of SEQ ID NO: 1879728
ugagucuuaggccaaauac

SEQ ID NO: 1928343 - RNA, 19 nt, Artificial Sequence
  Description of Artificial Sequence: Synthetic oligonucleotide
  Antisense strand to SEQ ID NO: 1928342
guauuuggccuaagacuca

SEQ ID NO: 1928344 - RNA, 19 nt, Artificial Sequence
  Description of Artificial Sequence: Synthetic oligonucleotide
  Sense strand starting at position 2894 of SEQ ID NO: 1879728
agccuaaacugauccuaga

SEQ ID NO: 1928345 - RNA, 19 nt, Artificial Sequence
  Description of Artificial Sequence: Synthetic oligonucleotide
  Antisense strand to SEQ ID NO: 1928344
ucuaggaucaguuuaggcu

SEQ ID NO: 1928346 - RNA, 19 nt, Artificial Sequence
  Description of Artificial Sequence: Synthetic oligonucleotide
  Sense strand starting at position 3079 of SEQ ID NO: 1879728
gcaaaugccugauccagaa

SEQ ID NO: 1928347 - RNA, 19 nt, Artificial Sequence
  Description of Artificial Sequence: Synthetic oligonucleotide
  Antisense strand to SEQ ID NO: 1928346
uucuggaucaggcauuugc

SEQ ID NO: 1928348 - RNA, 19 nt, Artificial Sequence
  Description of Artificial Sequence: Synthetic oligonucleotide
  Sense strand starting at position 3083 of SEQ ID NO: 1879728
augccugauccagaaagca

SEQ ID NO: 1928349 - RNA, 19 nt, Artificial Sequence
  Description of Artificial Sequence: Synthetic oligonucleotide
  Antisense strand to SEQ ID NO: 1928348
ugcuuucuggaucaggcau

SEQ ID NO: 1928350 - RNA, 19 nt, Artificial Sequence
  Description of Artificial Sequence: Synthetic oligonucleotide
  Sense strand starting at position 3281 of SEQ ID NO: 1879728
gccagcucugugcagagaa

SEQ ID NO: 1928351 - RNA, 19 nt, Artificial Sequence
  Description of Artificial Sequence: Synthetic oligonucleotide
  Antisense strand to SEQ ID NO: 1928350
uucucugcacagagcuggc

SEQ ID NO: 1928352 - RNA, 19 nt, Artificial Sequence
  Description of Artificial Sequence: Synthetic oligonucleotide
  Sense strand starting at position 3362 of SEQ ID NO: 1879728
cgagaaugucaagacaugu

SEQ ID NO: 1928353 - RNA, 19 nt, Artificial Sequence
  Description of Artificial Sequence: Synthetic oligonucleotide
  Antisense strand to SEQ ID NO: 1928352
acaugucuugacauucucg

SEQ ID NO: 1928354 - RNA, 19 nt, Artificial Sequence
  Description of Artificial Sequence: Synthetic oligonucleotide
  Sense strand starting at position 3375 of SEQ ID NO: 1879728
acauguuuacuauguccaa

SEQ ID NO: 1928355 - RNA, 19 nt, Artificial Sequence
  Description of Artificial Sequence: Synthetic oligonucleotide
  Antisense strand to SEQ ID NO: 1928354
uuggacauaguaaacaugu

SEQ ID NO: 1928356 - RNA, 19 nt, Artificial Sequence
  Description of Artificial Sequence: Synthetic oligonucleotide
  Sense strand starting at position 3440 of SEQ ID NO: 1879728
caaucugagcuguaacuga

SEQ ID NO: 1928357 - RNA, 19 nt, Artificial Sequence
  Description of Artificial Sequence: Synthetic oligonucleotide
  Antisense strand to SEQ ID NO: 1928356
ucaguuacagcucagauug

SEQ ID NO: 1928358 - RNA, 19 nt, Artificial Sequence
  Description of Artificial Sequence: Synthetic oligonucleotide
  Sense strand starting at position 3451 of SEQ ID NO: 1879728
guaacugaugcaggaacaa

SEQ ID NO: 1928359 - RNA, 19 nt, Artificial Sequence
  Description of Artificial Sequence: Synthetic oligonucleotide
  Antisense strand to SEQ ID NO: 1928358
uuguuccugcaucaguuac

SEQ ID NO: 1928360 - RNA, 19 nt, Artificial Sequence
  Description of Artificial Sequence: Synthetic oligonucleotide
  Sense strand starting at position 3498 of SEQ ID NO: 1879728
aguccuuucggcuggagaa

SEQ ID NO: 1928361 - RNA, 19 nt, Artificial Sequence
  Description of Artificial Sequence: Synthetic oligonucleotide
  Antisense strand to SEQ ID NO: 1928360
uucuccagccgaaaggacu

SEQ ID NO: 1928362 - RNA, 19 nt, Artificial Sequence
  Description of Artificial Sequence: Synthetic oligonucleotide
  Sense strand starting at position 3668 of SEQ ID NO: 1879728
gugccaaauggcuacacua

SEQ ID NO: 1928363 - RNA, 19 nt, Artificial Sequence
  Description of Artificial Sequence: Synthetic oligonucleotide
  Antisense strand to SEQ ID NO: 1928362
uaguguagccauuuggcac

SEQ ID NO: 1928364 - RNA, 19 nt, Artificial Sequence
  Description of Artificial Sequence: Synthetic oligonucleotide
  Sense strand starting at position 3694 of SEQ ID NO: 1879728
gacagcuuggcagggaaau

SEQ ID NO: 1928365 - RNA, 19 nt, Artificial Sequence
  Description of Artificial Sequence: Synthetic oligonucleotide
  Antisense strand to SEQ ID NO: 1928364
auuucccugccaagcuguc

SEQ ID NO: 1928366 - RNA, 19 nt, Artificial Sequence
  Description of Artificial Sequence: Synthetic oligonucleotide
  Sense strand starting at position 3800 of SEQ ID NO: 1879728
gaggucugggugggucaua

SEQ ID NO: 1928367 - RNA, 19 nt, Artificial Sequence
  Description of Artificial Sequence: Synthetic oligonucleotide
  Antisense strand to SEQ ID NO: 1928366
uaugacccacccagaccuc

SEQ ID NO: 1928368 - RNA, 19 nt, Artificial Sequence
  Description of Artificial Sequence: Synthetic oligonucleotide
  Sense strand starting at position 3812 of SEQ ID NO: 1879728
ggucauaagccaggaguaa

SEQ ID NO: 1928369 - RNA, 19 nt, Artificial Sequence
  Description of Artificial Sequence: Synthetic oligonucleotide
  Antisense strand to SEQ ID NO: 1928368
uuacuccuggcuuaugacc

SEQ ID NO: 1928370 - RNA, 19 nt, Artificial Sequence
  Description of Artificial Sequence: Synthetic oligonucleotide
  Sense strand starting at position 3834 of SEQ ID NO: 1879728
ccuggagguguuggaaaga

SEQ ID NO: 1928371 - RNA, 19 nt, Artificial Sequence
  Description of Artificial Sequence: Synthetic oligonucleotide
  Antisense strand to SEQ ID NO: 1928370
ucuuuccaacaccuccagg

SEQ ID NO: 1928372 - RNA, 19 nt, Artificial Sequence
  Description of Artificial Sequence: Synthetic oligonucleotide
  Sense strand starting at position 66 of SEQ ID NO: 1879729
uguggaaaguguccagaug

SEQ ID NO: 1928373 - RNA, 19 nt, Artificial Sequence
  Description of Artificial Sequence: Synthetic oligonucleotide
  Antisense strand to SEQ ID NO: 1928372
caucuggacacuuuccaca

SEQ ID NO: 1928374 - RNA, 19 nt, Artificial Sequence
  Description of Artificial Sequence: Synthetic oligonucleotide
  Sense strand starting at position 67 of SEQ ID NO: 1879729
guggaaaguguccagaugu

SEQ ID NO: 1928375 - RNA, 19 nt, Artificial Sequence
  Description of Artificial Sequence: Synthetic oligonucleotide
  Antisense strand to SEQ ID NO: 1928374
acaucuggacacuuuccac

SEQ ID NO: 1928376 - RNA, 19 nt, Artificial Sequence
  Description of Artificial Sequence: Synthetic oligonucleotide
  Sense strand starting at position 238 of SEQ ID NO: 1879729
gggugauuagccaguucgu

SEQ ID NO: 1928377 - RNA, 19 nt, Artificial Sequence
  Description of Artificial Sequence: Synthetic oligonucleotide
  Antisense strand to SEQ ID NO: 1928376
acgaacuggcuaaucaccc

SEQ ID NO: 1928378 - RNA, 19 nt, Artificial Sequence
  Description of Artificial Sequence: Synthetic oligonucleotide
  Sense strand starting at position 349 of SEQ ID NO: 1879729
gggcauucuccauaugauu

SEQ ID NO: 1928379 - RNA, 19 nt, Artificial Sequence
  Description of Artificial Sequence: Synthetic oligonucleotide
  Antisense strand to SEQ ID NO: 1928378
aaucauauggagaaugccc

SEQ ID NO: 1928380 - RNA, 19 nt, Artificial Sequence
  Description of Artificial Sequence: Synthetic oligonucleotide
  Sense strand starting at position 397 of SEQ ID NO: 1879729
uggucauuccuccagcaua

SEQ ID NO: 1928381 - RNA, 19 nt, Artificial Sequence
  Description of Artificial Sequence: Synthetic oligonucleotide
  Antisense strand to SEQ ID NO: 1928380
uaugcuggaggaaugacca

SEQ ID NO: 1928382 - RNA, 19 nt, Artificial Sequence
  Description of Artificial Sequence: Synthetic oligonucleotide
  Sense strand starting at position 523 of SEQ ID NO: 1879729
ccuggaaucuggcucugau

SEQ ID NO: 1928383 - RNA, 19 nt, Artificial Sequence
  Description of Artificial Sequence: Synthetic oligonucleotide
  Antisense strand to SEQ ID NO: 1928382
aucagagccagauuccagg

SEQ ID NO: 1928384 - RNA, 19 nt, Artificial Sequence
  Description of Artificial Sequence: Synthetic oligonucleotide
  Sense strand starting at position 676 of SEQ ID NO: 1879729
ugucaucuugcacagagua

SEQ ID NO: 1928385 - RNA, 19 nt, Artificial Sequence
  Description of Artificial Sequence: Synthetic oligonucleotide
  Antisense strand to SEQ ID NO: 1928384
uacucugugcaagaugaca

SEQ ID NO: 1928386 - RNA, 19 nt, Artificial Sequence
  Description of Artificial Sequence: Synthetic oligonucleotide
  Sense strand starting at position 778 of SEQ ID NO: 1879729
uuaaaugaauugcugaguu

SEQ ID NO: 1928387 - RNA, 19 nt, Artificial Sequence
  Description of Artificial Sequence: Synthetic oligonucleotide
  Antisense strand to SEQ ID NO: 1928386
aacucagcaauucauuuaa

SEQ ID NO: 1928388 - RNA, 19 nt, Artificial Sequence
  Description of Artificial Sequence: Synthetic oligonucleotide
  Sense strand starting at position 1038 of SEQ ID NO: 1879729
ucuugugcuccucuguuua

SEQ ID NO: 1928389 - RNA, 19 nt, Artificial Sequence
  Description of Artificial Sequence: Synthetic oligonucleotide
  Antisense strand to SEQ ID NO: 1928388
uaaacagaggagcacaaga

SEQ ID NO: 1928390 - RNA, 19 nt, Artificial Sequence
  Description of Artificial Sequence: Synthetic oligonucleotide
  Sense strand starting at position 1218 of SEQ ID NO: 1879729
gcaccucagagaugaagau

SEQ ID NO: 1928391 - RNA, 19 nt, Artificial Sequence
  Description of Artificial Sequence: Synthetic oligonucleotide
  Antisense strand to SEQ ID NO: 1928390
aucuucaucucugaggugc

SEQ ID NO: 1928392 - RNA, 19 nt, Artificial Sequence
  Description of Artificial Sequence: Synthetic oligonucleotide
  Sense strand starting at position 1304 of SEQ ID NO: 1879729
cuaccuucugcugagagaa

SEQ ID NO: 1928393 - RNA, 19 nt, Artificial Sequence
  Description of Artificial Sequence: Synthetic oligonucleotide
  Antisense strand to SEQ ID NO: 1928392
uucucucagcagaagguag

SEQ ID NO: 1928394 - RNA, 19 nt, Artificial Sequence
  Description of Artificial Sequence: Synthetic oligonucleotide
  Sense strand starting at position 1409 of SEQ ID NO: 1879729
ugguuaguugauuacuuua

SEQ ID NO: 1928395 - RNA, 19 nt, Artificial Sequence
  Description of Artificial Sequence: Synthetic oligonucleotide
  Antisense strand to SEQ ID NO: 1928394
uaaaguaaucaacuaacca

SEQ ID NO: 1928396 - RNA, 19 nt, Artificial Sequence
  Description of Artificial Sequence: Synthetic oligonucleotide
  Sense strand starting at position 1414 of SEQ ID NO: 1879729
aguugauuacuuuaugcag

SEQ ID NO: 1928397 - RNA, 19 nt, Artificial Sequence
  Description of Artificial Sequence: Synthetic oligonucleotide
  Antisense strand to SEQ ID NO: 1928396
cugcauaaaguaaucaacu

SEQ ID NO: 1928398 - RNA, 19 nt, Artificial Sequence
  Description of Artificial Sequence: Synthetic oligonucleotide
  Sense strand starting at position 1511 of SEQ ID NO: 1879729
agagacgucacaggaacau

SEQ ID NO: 1928399 - RNA, 19 nt, Artificial Sequence
  Description of Artificial Sequence: Synthetic oligonucleotide
  Antisense strand to SEQ ID NO: 1928398
auguuccugugacgucucu

SEQ ID NO: 1928400 - RNA, 19 nt, Artificial Sequence
  Description of Artificial Sequence: Synthetic oligonucleotide
  Sense strand starting at position 1558 of SEQ ID NO: 1879729
acgagcuuccaccauggaa

SEQ ID NO: 1928401 - RNA, 19 nt, Artificial Sequence
  Description of Artificial Sequence: Synthetic oligonucleotide
  Antisense strand to SEQ ID NO: 1928400
uuccaugguggaagcucgu

SEQ ID NO: 1928402 - RNA, 19 nt, Artificial Sequence
  Description of Artificial Sequence: Synthetic oligonucleotide
  Sense strand starting at position 1717 of SEQ ID NO: 1879729
cagauugccugaguuuaau

SEQ ID NO: 1928403 - RNA, 19 nt, Artificial Sequence
  Description of Artificial Sequence: Synthetic oligonucleotide
  Antisense strand to SEQ ID NO: 1928402
auuaaacucaggcaaucug

SEQ ID NO: 1928404 - RNA, 19 nt, Artificial Sequence
  Description of Artificial Sequence: Synthetic oligonucleotide
  Sense strand starting at position 2024 of SEQ ID NO: 1879729
ccucacuacccucgggaaa

SEQ ID NO: 1928405 - RNA, 19 nt, Artificial Sequence
  Description of Artificial Sequence: Synthetic oligonucleotide
  Antisense strand to SEQ ID NO: 1928404
uuucccgaggguagugagg

SEQ ID NO: 1928406 - RNA, 19 nt, Artificial Sequence
  Description of Artificial Sequence: Synthetic oligonucleotide
  Sense strand starting at position 2092 of SEQ ID NO: 1879729
uguccagugcugcauuuaa

SEQ ID NO: 1928407 - RNA, 19 nt, Artificial Sequence
  Description of Artificial Sequence: Synthetic oligonucleotide
  Antisense strand to SEQ ID NO: 1928406
uuaaaugcagcacuggaca

SEQ ID NO: 1928408 - RNA, 19 nt, Artificial Sequence
  Description of Artificial Sequence: Synthetic oligonucleotide
  Sense strand starting at position 2214 of SEQ ID NO: 1879729
guguaaaugccagaucuuc

SEQ ID NO: 1928409 - RNA, 19 nt, Artificial Sequence
  Description of Artificial Sequence: Synthetic oligonucleotide
  Antisense strand to SEQ ID NO: 1928408
gaagaucuggcauuuacac

SEQ ID NO: 1928410 - RNA, 19 nt, Artificial Sequence
  Description of Artificial Sequence: Synthetic oligonucleotide
  Sense strand starting at position 2286 of SEQ ID NO: 1879729
acaugacuggcugauguaa

SEQ ID NO: 1928411 - RNA, 19 nt, Artificial Sequence
  Description of Artificial Sequence: Synthetic oligonucleotide
  Antisense strand to SEQ ID NO: 1928410
uuacaucagccagucaugu

SEQ ID NO: 1928412 - RNA, 19 nt, Artificial Sequence
  Description of Artificial Sequence: Synthetic oligonucleotide
  Sense strand starting at position 2425 of SEQ ID NO: 1879729
ugaauuaagcccugugaga

SEQ ID NO: 1928413 - RNA, 19 nt, Artificial Sequence
  Description of Artificial Sequence: Synthetic oligonucleotide
  Antisense strand to SEQ ID NO: 1928412
ucucacagggcuuaauuca

SEQ ID NO: 1928414 - RNA, 19 nt, Artificial Sequence
  Description of Artificial Sequence: Synthetic oligonucleotide
  Sense strand starting at position 2427 of SEQ ID NO: 1879729
aauuaagcccugugagauc

SEQ ID NO: 1928415 - RNA, 19 nt, Artificial Sequence
  Description of Artificial Sequence: Synthetic oligonucleotide
  Antisense strand to SEQ ID NO: 1928414
gaucucacagggcuuaauu

SEQ ID NO: 1928416 - RNA, 19 nt, Artificial Sequence
  Description of Artificial Sequence: Synthetic oligonucleotide
  Sense strand starting at position 2517 of SEQ ID NO: 1879729
ugccuaagcccagaaaucu

SEQ ID NO: 1928417 - RNA, 19 nt, Artificial Sequence
  Description of Artificial Sequence: Synthetic oligonucleotide
  Antisense strand to SEQ ID NO: 1928416
agauuucugggcuuaggca

SEQ ID NO: 1928418 - RNA, 19 nt, Artificial Sequence
  Description of Artificial Sequence: Synthetic oligonucleotide
  Sense strand starting at position 2578 of SEQ ID NO: 1879729
uggucugucacugaagcau

SEQ ID NO: 1928419 - RNA, 19 nt, Artificial Sequence
  Description of Artificial Sequence: Synthetic oligonucleotide
  Antisense strand to SEQ ID NO: 1928418
augcuucagugacagacca

SEQ ID NO: 1928420 - RNA, 19 nt, Artificial Sequence
  Description of Artificial Sequence: Synthetic oligonucleotide
  Sense strand starting at position 2617 of SEQ ID NO: 1879729
cucucauaucugggugaua

SEQ ID NO: 1928421 - RNA, 19 nt, Artificial Sequence
  Description of Artificial Sequence: Synthetic oligonucleotide
  Antisense strand to SEQ ID NO: 1928420
uaucacccagauaugagag

SEQ ID NO: 1928422 - RNA, 19 nt, Artificial Sequence
  Description of Artificial Sequence: Synthetic oligonucleotide
  Sense strand starting at position 2618 of SEQ ID NO: 1879729
ucucauaucugggugauaa

SEQ ID NO: 1928423 - RNA, 19 nt, Artificial Sequence
  Description of Artificial Sequence: Synthetic oligonucleotide
  Antisense strand to SEQ ID NO: 1928422
uuaucacccagauaugaga

SEQ ID NO: 1928424 - RNA, 19 nt, Artificial Sequence
  Description of Artificial Sequence: Synthetic oligonucleotide
  Sense strand starting at position 2619 of SEQ ID NO: 1879729
cucauaucugggugauaag

SEQ ID NO: 1928425 - RNA, 19 nt, Artificial Sequence
  Description of Artificial Sequence: Synthetic oligonucleotide
  Antisense strand to SEQ ID NO: 1928424
cuuaucacccagauaugag

SEQ ID NO: 1928426 - RNA, 19 nt, Artificial Sequence
  Description of Artificial Sequence: Synthetic oligonucleotide
  Sense strand starting at position 2679 of SEQ ID NO: 1879729
gagccuuugggugacagua

SEQ ID NO: 1928427 - RNA, 19 nt, Artificial Sequence
  Description of Artificial Sequence: Synthetic oligonucleotide
  Antisense strand to SEQ ID NO: 1928426
uacugucacccaaaggcuc

SEQ ID NO: 1928428 - RNA, 19 nt, Artificial Sequence
  Description of Artificial Sequence: Synthetic oligonucleotide
  Sense strand starting at position 3290 of SEQ ID NO: 1879729
ucagcuaagcuaugacaua

SEQ ID NO: 1928429 - RNA, 19 nt, Artificial Sequence
  Description of Artificial Sequence: Synthetic oligonucleotide
  Antisense strand to SEQ ID NO: 1928428
uaugucauagcuuagcuga

SEQ ID NO: 1928430 - RNA, 19 nt, Artificial Sequence
  Description of Artificial Sequence: Synthetic oligonucleotide
  Sense strand starting at position 3354 of SEQ ID NO: 1879729
ccuaacaugaggugauuga

SEQ ID NO: 1928431 - RNA, 19 nt, Artificial Sequence
  Description of Artificial Sequence: Synthetic oligonucleotide
  Antisense strand to SEQ ID NO: 1928430
ucaaucaccucauguuagg

SEQ ID NO: 1928432 - RNA, 19 nt, Artificial Sequence
  Description of Artificial Sequence: Synthetic oligonucleotide
  Sense strand starting at position 3534 of SEQ ID NO: 1879729
ccugcuucugagcagagaa

SEQ ID NO: 1928433 - RNA, 19 nt, Artificial Sequence
  Description of Artificial Sequence: Synthetic oligonucleotide
  Antisense strand to SEQ ID NO: 1928432
uucucugcucagaagcagg

SEQ ID NO: 1928434 - RNA, 19 nt, Artificial Sequence
  Description of Artificial Sequence: Synthetic oligonucleotide
  Sense strand starting at position 3633 of SEQ ID NO: 1879729
uuguaauuaccuggcagag

SEQ ID NO: 1928435 - RNA, 19 nt, Artificial Sequence
  Description of Artificial Sequence: Synthetic oligonucleotide
  Antisense strand to SEQ ID NO: 1928434
cucugccagguaauuacaa

SEQ ID NO: 1928436 - RNA, 19 nt, Artificial Sequence
  Description of Artificial Sequence: Synthetic oligonucleotide
  Sense strand starting at position 3639 of SEQ ID NO: 1879729
uuaccuggcagagauaagu

SEQ ID NO: 1928437 - RNA, 19 nt, Artificial Sequence
  Description of Artificial Sequence: Synthetic oligonucleotide
  Antisense strand to SEQ ID NO: 1928436
acuuaucucugccagguaa

SEQ ID NO: 1928438 - RNA, 19 nt, Artificial Sequence
  Description of Artificial Sequence: Synthetic oligonucleotide
  Sense strand starting at position 3647 of SEQ ID NO: 1879729
cagagauaaguuugguuuc

SEQ ID NO: 1928439 - RNA, 19 nt, Artificial Sequence
  Description of Artificial Sequence: Synthetic oligonucleotide
  Antisense strand to SEQ ID NO: 1928438
gaaaccaaacuuaucucug

SEQ ID NO: 1928440 - RNA, 19 nt, Artificial Sequence
  Description of Artificial Sequence: Synthetic oligonucleotide
  Sense strand starting at position 3649 of SEQ ID NO: 1879729
gagauaaguuugguuucug

SEQ ID NO: 1928441 - RNA, 19 nt, Artificial Sequence
  Description of Artificial Sequence: Synthetic oligonucleotide
  Antisense strand to SEQ ID NO: 1928440
cagaaaccaaacuuaucuc

SEQ ID NO: 1928442 - RNA, 19 nt, Artificial Sequence
  Description of Artificial Sequence: Synthetic oligonucleotide
  Sense strand starting at position 3714 of SEQ ID NO: 1879729
ucaucuaucuggucauauc

SEQ ID NO: 1928443 - RNA, 19 nt, Artificial Sequence
  Description of Artificial Sequence: Synthetic oligonucleotide
  Antisense strand to SEQ ID NO: 1928442
gauaugaccagauagauga

SEQ ID NO: 1928444 - RNA, 19 nt, Artificial Sequence
  Description of Artificial Sequence: Synthetic oligonucleotide
  Sense strand starting at position 3823 of SEQ ID NO: 1879729
ugggaagacuucucacagu

SEQ ID NO: 1928445 - RNA, 19 nt, Artificial Sequence
  Description of Artificial Sequence: Synthetic oligonucleotide
  Antisense strand to SEQ ID NO: 1928444
acugugagaagucuuccca

SEQ ID NO: 1928446 - RNA, 19 nt, Artificial Sequence
  Description of Artificial Sequence: Synthetic oligonucleotide
  Sense strand starting at position 3832 of SEQ ID NO: 1879729
uucucacagugauucgaga

SEQ ID NO: 1928447 - RNA, 19 nt, Artificial Sequence
  Description of Artificial Sequence: Synthetic oligonucleotide
  Antisense strand to SEQ ID NO: 1928446
ucucgaaucacugugagaa

SEQ ID NO: 1928448 - RNA, 19 nt, Artificial Sequence
  Description of Artificial Sequence: Synthetic oligonucleotide
  Sense strand starting at position 3834 of SEQ ID NO: 1879729
cucacagugauucgagaac

SEQ ID NO: 1928449 - RNA, 19 nt, Artificial Sequence
  Description of Artificial Sequence: Synthetic oligonucleotide
  Antisense strand to SEQ ID NO: 1928448
guucucgaaucacugugag

SEQ ID NO: 1928450 - RNA, 19 nt, Artificial Sequence
  Description of Artificial Sequence: Synthetic oligonucleotide
  Sense strand starting at position 3957 of SEQ ID NO: 1879729
agacaagcccucugaggua

SEQ ID NO: 1928451 - RNA, 19 nt, Artificial Sequence
  Description of Artificial Sequence: Synthetic oligonucleotide
  Antisense strand to SEQ ID NO: 1928450
uaccucagagggcuugucu

SEQ ID NO: 1928452 - RNA, 19 nt, Artificial Sequence
  Description of Artificial Sequence: Synthetic oligonucleotide
  Sense strand starting at position 117 of SEQ ID NO: 1879730
acucauuacucaguucuga

SEQ ID NO: 1928453 - RNA, 19 nt, Artificial Sequence
  Description of Artificial Sequence: Synthetic oligonucleotide
  Antisense strand to SEQ ID NO: 1928452
ucagaacugaguaaugagu

SEQ ID NO: 1928454 - RNA, 19 nt, Artificial Sequence
  Description of Artificial Sequence: Synthetic oligonucleotide
  Sense strand starting at position 168 of SEQ ID NO: 1879730
augguauugcucuaaacaa

SEQ ID NO: 1928455 - RNA, 19 nt, Artificial Sequence
  Description of Artificial Sequence: Synthetic oligonucleotide
  Antisense strand to SEQ ID NO: 1928454
uuguuuagagcaauaccau

SEQ ID NO: 1928456 - RNA, 19 nt, Artificial Sequence
  Description of Artificial Sequence: Synthetic oligonucleotide
  Sense strand starting at position 270 of SEQ ID NO: 1879730
guaggaagucaaugaauac

SEQ ID NO: 1928457 - RNA, 19 nt, Artificial Sequence
  Description of Artificial Sequence: Synthetic oligonucleotide
  Antisense strand to SEQ ID NO: 1928456
guauucauugacuuccuac

SEQ ID NO: 1928458 - RNA, 19 nt, Artificial Sequence
  Description of Artificial Sequence: Synthetic oligonucleotide
  Sense strand starting at position 306 of SEQ ID NO: 1879730
cugugaaacugacuauaga

SEQ ID NO: 1928459 - RNA, 19 nt, Artificial Sequence
  Description of Artificial Sequence: Synthetic oligonucleotide
  Antisense strand to SEQ ID NO: 1928458
ucuauagucaguuucacag

SEQ ID NO: 1928460 - RNA, 19 nt, Artificial Sequence
  Description of Artificial Sequence: Synthetic oligonucleotide
  Sense strand starting at position 487 of SEQ ID NO: 1879730
uugagcuauguacaaucau

SEQ ID NO: 1928461 - RNA, 19 nt, Artificial Sequence
  Description of Artificial Sequence: Synthetic oligonucleotide
  Antisense strand to SEQ ID NO: 1928460
augauuguacauagcucaa

SEQ ID NO: 1928462 - RNA, 19 nt, Artificial Sequence
  Description of Artificial Sequence: Synthetic oligonucleotide
  Sense strand starting at position 740 of SEQ ID NO: 1879730
gauuguaguguuucgcuuu

SEQ ID NO: 1928463 - RNA, 19 nt, Artificial Sequence
  Description of Artificial Sequence: Synthetic oligonucleotide
  Antisense strand to SEQ ID NO: 1928462
aaagcgaaacacuacaauc

SEQ ID NO: 1928464 - RNA, 19 nt, Artificial Sequence
  Description of Artificial Sequence: Synthetic oligonucleotide
  Sense strand starting at position 871 of SEQ ID NO: 1879730
ucuggaccaguuuaguaaa

SEQ ID NO: 1928465 - RNA, 19 nt, Artificial Sequence
  Description of Artificial Sequence: Synthetic oligonucleotide
  Antisense strand to SEQ ID NO: 1928464
uuuacuaaacugguccaga

SEQ ID NO: 1928466 - RNA, 19 nt, Artificial Sequence
  Description of Artificial Sequence: Synthetic oligonucleotide
  Sense strand starting at position 1033 of SEQ ID NO: 1879730
cccuuauucccugaggcua

SEQ ID NO: 1928467 - RNA, 19 nt, Artificial Sequence
  Description of Artificial Sequence: Synthetic oligonucleotide
  Antisense strand to SEQ ID NO: 1928466
uagccucagggaauaaggg

SEQ ID NO: 1928468 - RNA, 19 nt, Artificial Sequence
  Description of Artificial Sequence: Synthetic oligonucleotide
  Sense strand starting at position 1161 of SEQ ID NO: 1879730
gggaaacuguuauuaguaa

SEQ ID NO: 1928469 - RNA, 19 nt, Artificial Sequence
  Description of Artificial Sequence: Synthetic oligonucleotide
  Antisense strand to SEQ ID NO: 1928468
uuacuaauaacaguuuccc

SEQ ID NO: 1928470 - RNA, 19 nt, Artificial Sequence
  Description of Artificial Sequence: Synthetic oligonucleotide
  Sense strand starting at position 1374 of SEQ ID NO: 1879730
auaguagauguguacaaca

SEQ ID NO: 1928471 - RNA, 19 nt, Artificial Sequence
  Description of Artificial Sequence: Synthetic oligonucleotide
  Antisense strand to SEQ ID NO: 1928470
uguuguacacaucuacuau

SEQ ID NO: 1928472 - RNA, 19 nt, Artificial Sequence
  Description of Artificial Sequence: Synthetic oligonucleotide
  Sense strand starting at position 1376 of SEQ ID NO: 1879730
aguagauguguacaacaug

SEQ ID NO: 1928473 - RNA, 19 nt, Artificial Sequence
  Description of Artificial Sequence: Synthetic oligonucleotide
  Antisense strand to SEQ ID NO: 1928472
cauguuguacacaucuacu

SEQ ID NO: 1928474 - RNA, 19 nt, Artificial Sequence
  Description of Artificial Sequence: Synthetic oligonucleotide
  Sense strand starting at position 1739 of SEQ ID NO: 1879730
cuuuguaaucaccaacgga

SEQ ID NO: 1928475 - RNA, 19 nt, Artificial Sequence
  Description of Artificial Sequence: Synthetic oligonucleotide
  Antisense strand to SEQ ID NO: 1928474
uccguuggugauuacaaag

SEQ ID NO: 1928476 - RNA, 19 nt, Artificial Sequence
  Description of Artificial Sequence: Synthetic oligonucleotide
  Sense strand starting at position 1742 of SEQ ID NO: 1879730
uguaaucaccaacggauua

SEQ ID NO: 1928477 - RNA, 19 nt, Artificial Sequence
  Description of Artificial Sequence: Synthetic oligonucleotide
  Antisense strand to SEQ ID NO: 1928476
uaauccguuggugauuaca

SEQ ID NO: 1928478 - RNA, 19 nt, Artificial Sequence
  Description of Artificial Sequence: Synthetic oligonucleotide
  Sense strand starting at position 1800 of SEQ ID NO: 1879730
ggauaauauuaugcuuucu

SEQ ID NO: 1928479 - RNA, 19 nt, Artificial Sequence
  Description of Artificial Sequence: Synthetic oligonucleotide
  Antisense strand to SEQ ID NO: 1928478
agaaagcauaauauuaucc

SEQ ID NO: 1928480 - RNA, 19 nt, Artificial Sequence
  Description of Artificial Sequence: Synthetic oligonucleotide
  Sense strand starting at position 1828 of SEQ ID NO: 1879730
uguaaaguacuuggaagaa

SEQ ID NO: 1928481 - RNA, 19 nt, Artificial Sequence
  Description of Artificial Sequence: Synthetic oligonucleotide
  Antisense strand to SEQ ID NO: 1928480
uucuuccaaguacuuuaca

SEQ ID NO: 1928482 - RNA, 19 nt, Artificial Sequence
  Description of Artificial Sequence: Synthetic oligonucleotide
  Sense strand starting at position 1888 of SEQ ID NO: 1879730
gcuaaagauccaugaauag

SEQ ID NO: 1928483 - RNA, 19 nt, Artificial Sequence
  Description of Artificial Sequence: Synthetic oligonucleotide
  Antisense strand to SEQ ID NO: 1928482
cuauucauggaucuuuagc

SEQ ID NO: 1928484 - RNA, 19 nt, Artificial Sequence
  Description of Artificial Sequence: Synthetic oligonucleotide
  Sense strand starting at position 1937 of SEQ ID NO: 1879730
ugucuaauuugagcaccuu

SEQ ID NO: 1928485 - RNA, 19 nt, Artificial Sequence
  Description of Artificial Sequence: Synthetic oligonucleotide
  Antisense strand to SEQ ID NO: 1928484
aaggugcucaaauuagaca

SEQ ID NO: 1928486 - RNA, 19 nt, Artificial Sequence
  Description of Artificial Sequence: Synthetic oligonucleotide
  Sense strand starting at position 2057 of SEQ ID NO: 1879730
uuuggaaggguugguuaga

SEQ ID NO: 1928487 - RNA, 19 nt, Artificial Sequence
  Description of Artificial Sequence: Synthetic oligonucleotide
  Antisense strand to SEQ ID NO: 1928486
ucuaaccaacccuuccaaa

SEQ ID NO: 1928488 - RNA, 19 nt, Artificial Sequence
  Description of Artificial Sequence: Synthetic oligonucleotide
  Sense strand starting at position 2058 of SEQ ID NO: 1879730
uuggaaggguugguuagaa

SEQ ID NO: 1928489 - RNA, 19 nt, Artificial Sequence
  Description of Artificial Sequence: Synthetic oligonucleotide
  Antisense strand to SEQ ID NO: 1928488
uucuaaccaacccuuccaa

SEQ ID NO: 1928490 - RNA, 19 nt, Artificial Sequence
  Description of Artificial Sequence: Synthetic oligonucleotide
  Sense strand starting at position 2261 of SEQ ID NO: 1879730
ugaugcaucaggcaaggau

SEQ ID NO: 1928491 - RNA, 19 nt, Artificial Sequence
  Description of Artificial Sequence: Synthetic oligonucleotide
  Antisense strand to SEQ ID NO: 1928490
auccuugccugaugcauca

SEQ ID NO: 1928492 - RNA, 19 nt, Artificial Sequence
  Description of Artificial Sequence: Synthetic oligonucleotide
  Sense strand starting at position 2492 of SEQ ID NO: 1879730
gauaaagauuauguaagug

SEQ ID NO: 1928493 - RNA, 19 nt, Artificial Sequence
  Description of Artificial Sequence: Synthetic oligonucleotide
  Antisense strand to SEQ ID NO: 1928492
cacuuacauaaucuuuauc

SEQ ID NO: 1928494 - RNA, 19 nt, Artificial Sequence
  Description of Artificial Sequence: Synthetic oligonucleotide
  Sense strand starting at position 2504 of SEQ ID NO: 1879730
guaagugauaacuggucaa

SEQ ID NO: 1928495 - RNA, 19 nt, Artificial Sequence
  Description of Artificial Sequence: Synthetic oligonucleotide
  Antisense strand to SEQ ID NO: 1928494
uugaccaguuaucacuuac

SEQ ID NO: 1928496 - RNA, 19 nt, Artificial Sequence
  Description of Artificial Sequence: Synthetic oligonucleotide
  Sense strand starting at position 2530 of SEQ ID NO: 1879730
gugaauaucaugugacaug

SEQ ID NO: 1928497 - RNA, 19 nt, Artificial Sequence
  Description of Artificial Sequence: Synthetic oligonucleotide
  Antisense strand to SEQ ID NO: 1928496
caugucacaugauauucac

SEQ ID NO: 1928498 - RNA, 19 nt, Artificial Sequence
  Description of Artificial Sequence: Synthetic oligonucleotide
  Sense strand starting at position 2537 of SEQ ID NO: 1879730
ucaugugacauguagaggu

SEQ ID NO: 1928499 - RNA, 19 nt, Artificial Sequence
  Description of Artificial Sequence: Synthetic oligonucleotide
  Antisense strand to SEQ ID NO: 1928498
accucuacaugucacauga

SEQ ID NO: 1928500 - RNA, 19 nt, Artificial Sequence
  Description of Artificial Sequence: Synthetic oligonucleotide
  Sense strand starting at position 2559 of SEQ ID NO: 1879730
gugggaugucuucagaggu

SEQ ID NO: 1928501 - RNA, 19 nt, Artificial Sequence
  Description of Artificial Sequence: Synthetic oligonucleotide
  Antisense strand to SEQ ID NO: 1928500
accucugaagacaucccac

SEQ ID NO: 1928502 - RNA, 19 nt, Artificial Sequence
  Description of Artificial Sequence: Synthetic oligonucleotide
  Sense strand starting at position 2751 of SEQ ID NO: 1879730
aucaaugagaucuguagug

SEQ ID NO: 1928503 - RNA, 19 nt, Artificial Sequence
  Description of Artificial Sequence: Synthetic oligonucleotide
  Antisense strand to SEQ ID NO: 1928502
cacuacagaucucauugau

SEQ ID NO: 1928504 - RNA, 19 nt, Artificial Sequence
  Description of Artificial Sequence: Synthetic oligonucleotide
  Sense strand starting at position 2903 of SEQ ID NO: 1879730
gauugaaaugucugcugaa

SEQ ID NO: 1928505 - RNA, 19 nt, Artificial Sequence
  Description of Artificial Sequence: Synthetic oligonucleotide
  Antisense strand to SEQ ID NO: 1928504
uucagcagacauuucaauc

SEQ ID NO: 1928506 - RNA, 19 nt, Artificial Sequence
  Description of Artificial Sequence: Synthetic oligonucleotide
  Sense strand starting at position 2910 of SEQ ID NO: 1879730
augucugcugaacaugaaa

SEQ ID NO: 1928507 - RNA, 19 nt, Artificial Sequence
  Description of Artificial Sequence: Synthetic oligonucleotide
  Antisense strand to SEQ ID NO: 1928506
uuucauguucagcagacau

SEQ ID NO: 1928508 - RNA, 19 nt, Artificial Sequence
  Description of Artificial Sequence: Synthetic oligonucleotide
  Sense strand starting at position 2941 of SEQ ID NO: 1879730
gaaagcagucuauauaguu

SEQ ID NO: 1928509 - RNA, 19 nt, Artificial Sequence
  Description of Artificial Sequence: Synthetic oligonucleotide
  Antisense strand to SEQ ID NO: 1928508
aacuauauagacugcuuuc

SEQ ID NO: 1928510 - RNA, 19 nt, Artificial Sequence
  Description of Artificial Sequence: Synthetic oligonucleotide
  Sense strand starting at position 2961 of SEQ ID NO: 1879730
uagagcucugcacagagaa

SEQ ID NO: 1928511 - RNA, 19 nt, Artificial Sequence
  Description of Artificial Sequence: Synthetic oligonucleotide
  Antisense strand to SEQ ID NO: 1928510
uucucugugcagagcucua

SEQ ID NO: 1928512 - RNA, 19 nt, Artificial Sequence
  Description of Artificial Sequence: Synthetic oligonucleotide
  Sense strand starting at position 2983 of SEQ ID NO: 1879730
agacaaauaucaugauuug

SEQ ID NO: 1928513 - RNA, 19 nt, Artificial Sequence
  Description of Artificial Sequence: Synthetic oligonucleotide
  Antisense strand to SEQ ID NO: 1928512
caaaucaugauauuugucu

SEQ ID NO: 1928514 - RNA, 19 nt, Artificial Sequence
  Description of Artificial Sequence: Synthetic oligonucleotide
  Sense strand starting at position 3410 of SEQ ID NO: 1879730
gaaggucuugaugauaugu

SEQ ID NO: 1928515 - RNA, 19 nt, Artificial Sequence
  Description of Artificial Sequence: Synthetic oligonucleotide
  Antisense strand to SEQ ID NO: 1928514
acauaucaucaagaccuuc

SEQ ID NO: 1928516 - RNA, 19 nt, Artificial Sequence
  Description of Artificial Sequence: Synthetic oligonucleotide
  Sense strand starting at position 3449 of SEQ ID NO: 1879730
uuaguaaggaagugugaac

SEQ ID NO: 1928517 - RNA, 19 nt, Artificial Sequence
  Description of Artificial Sequence: Synthetic oligonucleotide
  Antisense strand to SEQ ID NO: 1928516
guucacacuuccuuacuaa

SEQ ID NO: 1928518 - RNA, 19 nt, Artificial Sequence
  Description of Artificial Sequence: Synthetic oligonucleotide
  Sense strand starting at position 3518 of SEQ ID NO: 1879730
ccagaaguagagcaaucuu

SEQ ID NO: 1928519 - RNA, 19 nt, Artificial Sequence
  Description of Artificial Sequence: Synthetic oligonucleotide
  Antisense strand to SEQ ID NO: 1928518
aagauugcucuacuucugg

SEQ ID NO: 1928520 - RNA, 19 nt, Artificial Sequence
  Description of Artificial Sequence: Synthetic oligonucleotide
  Sense strand starting at position 3563 of SEQ ID NO: 1879730
gagggugccaggcagaauu

SEQ ID NO: 1928521 - RNA, 19 nt, Artificial Sequence
  Description of Artificial Sequence: Synthetic oligonucleotide
  Antisense strand to SEQ ID NO: 1928520
aauucugccuggcacccuc

SEQ ID NO: 1928522 - RNA, 19 nt, Artificial Sequence
  Description of Artificial Sequence: Synthetic oligonucleotide
  Sense strand starting at position 3570 of SEQ ID NO: 1879730
ccaggcagaauuggauaua

SEQ ID NO: 1928523 - RNA, 19 nt, Artificial Sequence
  Description of Artificial Sequence: Synthetic oligonucleotide
  Antisense strand to SEQ ID NO: 1928522
uauauccaauucugccugg

SEQ ID NO: 1928524 - RNA, 19 nt, Artificial Sequence
  Description of Artificial Sequence: Synthetic oligonucleotide
  Sense strand starting at position 3632 of SEQ ID NO: 1879730
aggguauuaccugggcaaa

SEQ ID NO: 1928525 - RNA, 19 nt, Artificial Sequence
  Description of Artificial Sequence: Synthetic oligonucleotide
  Antisense strand to SEQ ID NO: 1928524
uuugcccagguaauacccu

SEQ ID NO: 1928526 - RNA, 19 nt, Artificial Sequence
  Description of Artificial Sequence: Synthetic oligonucleotide
  Sense strand starting at position 3633 of SEQ ID NO: 1879730
ggguauuaccugggcaaag

SEQ ID NO: 1928527 - RNA, 19 nt, Artificial Sequence
  Description of Artificial Sequence: Synthetic oligonucleotide
  Antisense strand to SEQ ID NO: 1928526
cuuugcccagguaauaccc

SEQ ID NO: 1928528 - RNA, 19 nt, Artificial Sequence
  Description of Artificial Sequence: Synthetic oligonucleotide
  Sense strand starting at position 3634 of SEQ ID NO: 1879730
gguauuaccugggcaaaga

SEQ ID NO: 1928529 - RNA, 19 nt, Artificial Sequence
  Description of Artificial Sequence: Synthetic oligonucleotide
  Antisense strand to SEQ ID NO: 1928528
ucuuugcccagguaauacc

SEQ ID NO: 1928530 - RNA, 19 nt, Artificial Sequence
  Description of Artificial Sequence: Synthetic oligonucleotide
  Sense strand starting at position 3831 of SEQ ID NO: 1879730
gggaaauguaaugguguau

SEQ ID NO: 1928531 - RNA, 19 nt, Artificial Sequence
  Description of Artificial Sequence: Synthetic oligonucleotide
  Antisense strand to SEQ ID NO: 1928530
auacaccauuacauuuccc

SEQ ID NO: 1928532 - RNA, 19 nt, Artificial Sequence
  Description of Artificial Sequence: Synthetic oligonucleotide
  Sense strand starting at position 1018 of SEQ ID NO: 1879731
agaaauguacaguggguau

SEQ ID NO: 1928533 - RNA, 19 nt, Artificial Sequence
  Description of Artificial Sequence: Synthetic oligonucleotide
  Antisense strand to SEQ ID NO: 1928532
auacccacuguacauuucu

SEQ ID NO: 1928534 - RNA, 19 nt, Artificial Sequence
  Description of Artificial Sequence: Synthetic oligonucleotide
  Sense strand starting at position 1129 of SEQ ID NO: 1879731
ucacuuauuugugcuugca

SEQ ID NO: 1928535 - RNA, 19 nt, Artificial Sequence
  Description of Artificial Sequence: Synthetic oligonucleotide
  Antisense strand to SEQ ID NO: 1928534
ugcaagcacaaauaaguga

SEQ ID NO: 1928536 - RNA, 19 nt, Artificial Sequence
  Description of Artificial Sequence: Synthetic oligonucleotide
  Sense strand starting at position 1131 of SEQ ID NO: 1879731
acuuauuugugcuugcauc

SEQ ID NO: 1928537 - RNA, 19 nt, Artificial Sequence
  Description of Artificial Sequence: Synthetic oligonucleotide
  Antisense strand to SEQ ID NO: 1928536
gaugcaagcacaaauaagu

SEQ ID NO: 1928538 - RNA, 19 nt, Artificial Sequence
  Description of Artificial Sequence: Synthetic oligonucleotide
  Sense strand starting at position 1132 of SEQ ID NO: 1879731
cuuauuugugcuugcaucu

SEQ ID NO: 1928539 - RNA, 19 nt, Artificial Sequence
  Description of Artificial Sequence: Synthetic oligonucleotide
  Antisense strand to SEQ ID NO: 1928538
agaugcaagcacaaauaag

SEQ ID NO: 1928540 - RNA, 19 nt, Artificial Sequence
  Description of Artificial Sequence: Synthetic oligonucleotide
  Sense strand starting at position 1171 of SEQ ID NO: 1879731
gagugacuuuaggcauauu

SEQ ID NO: 1928541 - RNA, 19 nt, Artificial Sequence
  Description of Artificial Sequence: Synthetic oligonucleotide
  Antisense strand to SEQ ID NO: 1928540
aauaugccuaaagucacuc

SEQ ID NO: 1928542 - RNA, 19 nt, Artificial Sequence
  Description of Artificial Sequence: Synthetic oligonucleotide
  Sense strand starting at position 1346 of SEQ ID NO: 1879731
gucaaaucuguccaaguuc

SEQ ID NO: 1928543 - RNA, 19 nt, Artificial Sequence
  Description of Artificial Sequence: Synthetic oligonucleotide
  Antisense strand to SEQ ID NO: 1928542
gaacuuggacagauuugac

SEQ ID NO: 1928544 - RNA, 19 nt, Artificial Sequence
  Description of Artificial Sequence: Synthetic oligonucleotide
  Sense strand starting at position 1364 of SEQ ID NO: 1879731
cagguagagcaucauaauu

SEQ ID NO: 1928545 - RNA, 19 nt, Artificial Sequence
  Description of Artificial Sequence: Synthetic oligonucleotide
  Antisense strand to SEQ ID NO: 1928544
aauuaugaugcucuaccug

SEQ ID NO: 1928546 - RNA, 19 nt, Artificial Sequence
  Description of Artificial Sequence: Synthetic oligonucleotide
  Sense strand starting at position 1526 of SEQ ID NO: 1879731
cugcuaauccgugacaaua

SEQ ID NO: 1928547 - RNA, 19 nt, Artificial Sequence
  Description of Artificial Sequence: Synthetic oligonucleotide
  Antisense strand to SEQ ID NO: 1928546
uauugucacggauuagcag

SEQ ID NO: 1928548 - RNA, 19 nt, Artificial Sequence
  Description of Artificial Sequence: Synthetic oligonucleotide
  Sense strand starting at position 1547 of SEQ ID NO: 1879731
ugacaauauggagggcuua

SEQ ID NO: 1928549 - RNA, 19 nt, Artificial Sequence
  Description of Artificial Sequence: Synthetic oligonucleotide
  Antisense strand to SEQ ID NO: 1928548
uaagcccuccauauuguca

SEQ ID NO: 1928550 - RNA, 19 nt, Artificial Sequence
  Description of Artificial Sequence: Synthetic oligonucleotide
  Sense strand starting at position 1557 of SEQ ID NO: 1879731
gagggcuuaggucauuaca

SEQ ID NO: 1928551 - RNA, 19 nt, Artificial Sequence
  Description of Artificial Sequence: Synthetic oligonucleotide
  Antisense strand to SEQ ID NO: 1928550
uguaaugaccuaagcccuc

SEQ ID NO: 1928552 - RNA, 19 nt, Artificial Sequence
  Description of Artificial Sequence: Synthetic oligonucleotide
  Sense strand starting at position 1560 of SEQ ID NO: 1879731
ggcuuaggucauuacagaa

SEQ ID NO: 1928553 - RNA, 19 nt, Artificial Sequence
  Description of Artificial Sequence: Synthetic oligonucleotide
  Antisense strand to SEQ ID NO: 1928552
uucuguaaugaccuaagcc

SEQ ID NO: 1928554 - RNA, 19 nt, Artificial Sequence
  Description of Artificial Sequence: Synthetic oligonucleotide
  Sense strand starting at position 1605 of SEQ ID NO: 1879731
gugacaauuugugauaaua

SEQ ID NO: 1928555 - RNA, 19 nt, Artificial Sequence
  Description of Artificial Sequence: Synthetic oligonucleotide
  Antisense strand to SEQ ID NO: 1928554
uauuaucacaaauugucac

SEQ ID NO: 1928556 - RNA, 19 nt, Artificial Sequence
  Description of Artificial Sequence: Synthetic oligonucleotide
  Sense strand starting at position 1627 of SEQ ID NO: 1879731
gggcuuaggucauuacaga

SEQ ID NO: 1928557 - RNA, 19 nt, Artificial Sequence
  Description of Artificial Sequence: Synthetic oligonucleotide
  Antisense strand to SEQ ID NO: 1928556
ucuguaaugaccuaagccc

SEQ ID NO: 1928558 - RNA, 19 nt, Artificial Sequence
  Description of Artificial Sequence: Synthetic oligonucleotide
  Sense strand starting at position 1628 of SEQ ID NO: 1879731
ggcuuaggucauuacagag

SEQ ID NO: 1928559 - RNA, 19 nt, Artificial Sequence
  Description of Artificial Sequence: Synthetic oligonucleotide
  Antisense strand to SEQ ID NO: 1928558
cucuguaaugaccuaagcc

SEQ ID NO: 1928560 - RNA, 19 nt, Artificial Sequence
  Description of Artificial Sequence: Synthetic oligonucleotide
  Sense strand starting at position 1644 of SEQ ID NO: 1879731
gagagaaauuaaccgugua

SEQ ID NO: 1928561 - RNA, 19 nt, Artificial Sequence
  Description of Artificial Sequence: Synthetic oligonucleotide
  Antisense strand to SEQ ID NO: 1928560
uacacgguuaauuucucuc

SEQ ID NO: 1928562 - RNA, 19 nt, Artificial Sequence
  Description of Artificial Sequence: Synthetic oligonucleotide
  Sense strand starting at position 1645 of SEQ ID NO: 1879731
agagaaauuaaccguguau

SEQ ID NO: 1928563 - RNA, 19 nt, Artificial Sequence
  Description of Artificial Sequence: Synthetic oligonucleotide
  Antisense strand to SEQ ID NO: 1928562
auacacgguuaauuucucu

SEQ ID NO: 1928564 - RNA, 19 nt, Artificial Sequence
  Description of Artificial Sequence: Synthetic oligonucleotide
  Sense strand starting at position 1647 of SEQ ID NO: 1879731
agaaauuaaccguguauug

SEQ ID NO: 1928565 - RNA, 19 nt, Artificial Sequence
  Description of Artificial Sequence: Synthetic oligonucleotide
  Antisense strand to SEQ ID NO: 1928564
caauacacgguuaauuucu

SEQ ID NO: 1928566 - RNA, 19 nt, Artificial Sequence
  Description of Artificial Sequence: Synthetic oligonucleotide
  Sense strand starting at position 1649 of SEQ ID NO: 1879731
aaauuaaccguguauugga

SEQ ID NO: 1928567 - RNA, 19 nt, Artificial Sequence
  Description of Artificial Sequence: Synthetic oligonucleotide
  Antisense strand to SEQ ID NO: 1928566
uccaauacacgguuaauuu

SEQ ID NO: 1928568 - RNA, 19 nt, Artificial Sequence
  Description of Artificial Sequence: Synthetic oligonucleotide
  Sense strand starting at position 1656 of SEQ ID NO: 1879731
ccguguauuggauaaauga

SEQ ID NO: 1928569 - RNA, 19 nt, Artificial Sequence
  Description of Artificial Sequence: Synthetic oligonucleotide
  Antisense strand to SEQ ID NO: 1928568
ucauuuauccaauacacgg

SEQ ID NO: 1928570 - RNA, 19 nt, Artificial Sequence
  Description of Artificial Sequence: Synthetic oligonucleotide
  Sense strand starting at position 1854 of SEQ ID NO: 1879731
uguguaacaccuugauacu

SEQ ID NO: 1928571 - RNA, 19 nt, Artificial Sequence
  Description of Artificial Sequence: Synthetic oligonucleotide
  Antisense strand to SEQ ID NO: 1928570
aguaucaagguguuacaca

SEQ ID NO: 1928572 - RNA, 19 nt, Artificial Sequence
  Description of Artificial Sequence: Synthetic oligonucleotide
  Sense strand starting at position 1855 of SEQ ID NO: 1879731
guguaacaccuugauacuu

SEQ ID NO: 1928573 - RNA, 19 nt, Artificial Sequence
  Description of Artificial Sequence: Synthetic oligonucleotide
  Antisense strand to SEQ ID NO: 1928572
aaguaucaagguguuacac

SEQ ID NO: 1928574 - RNA, 19 nt, Artificial Sequence
  Description of Artificial Sequence: Synthetic oligonucleotide
  Sense strand starting at position 1892 of SEQ ID NO: 1879731
uugcaagucccauaaauga

SEQ ID NO: 1928575 - RNA, 19 nt, Artificial Sequence
  Description of Artificial Sequence: Synthetic oligonucleotide
  Antisense strand to SEQ ID NO: 1928574
ucauuuaugggacuugcaa

SEQ ID NO: 1928576 - RNA, 19 nt, Artificial Sequence
  Description of Artificial Sequence: Synthetic oligonucleotide
  Sense strand starting at position 1987 of SEQ ID NO: 1879731
aucccuuugccugaugaaa

SEQ ID NO: 1928577 - RNA, 19 nt, Artificial Sequence
  Description of Artificial Sequence: Synthetic oligonucleotide
  Antisense strand to SEQ ID NO: 1928576
uuucaucaggcaaagggau

SEQ ID NO: 1928578 - RNA, 19 nt, Artificial Sequence
  Description of Artificial Sequence: Synthetic oligonucleotide
  Sense strand starting at position 2262 of SEQ ID NO: 1879731
auaggaugaucuucuugua

SEQ ID NO: 1928579 - RNA, 19 nt, Artificial Sequence
  Description of Artificial Sequence: Synthetic oligonucleotide
  Antisense strand to SEQ ID NO: 1928578
uacaagaagaucauccuau

SEQ ID NO: 1928580 - RNA, 19 nt, Artificial Sequence
  Description of Artificial Sequence: Synthetic oligonucleotide
  Sense strand starting at position 2270 of SEQ ID NO: 1879731
aucuucuuguacucuggaa

SEQ ID NO: 1928581 - RNA, 19 nt, Artificial Sequence
  Description of Artificial Sequence: Synthetic oligonucleotide
  Antisense strand to SEQ ID NO: 1928580
uuccagaguacaagaagau

SEQ ID NO: 1928582 - RNA, 19 nt, Artificial Sequence
  Description of Artificial Sequence: Synthetic oligonucleotide
  Sense strand starting at position 2359 of SEQ ID NO: 1879731
cuagcuuaaguaugacaau

SEQ ID NO: 1928583 - RNA, 19 nt, Artificial Sequence
  Description of Artificial Sequence: Synthetic oligonucleotide
  Antisense strand to SEQ ID NO: 1928582
auugucauacuuaagcuag

SEQ ID NO: 1928584 - RNA, 19 nt, Artificial Sequence
  Description of Artificial Sequence: Synthetic oligonucleotide
  Sense strand starting at position 2420 of SEQ ID NO: 1879731
gaaucugaguuacugauua

SEQ ID NO: 1928585 - RNA, 19 nt, Artificial Sequence
  Description of Artificial Sequence: Synthetic oligonucleotide
  Antisense strand to SEQ ID NO: 1928584
uaaucaguaacucagauuc

SEQ ID NO: 1928586 - RNA, 19 nt, Artificial Sequence
  Description of Artificial Sequence: Synthetic oligonucleotide
  Sense strand starting at position 2424 of SEQ ID NO: 1879731
cugaguuacugauuacuaa

SEQ ID NO: 1928587 - RNA, 19 nt, Artificial Sequence
  Description of Artificial Sequence: Synthetic oligonucleotide
  Antisense strand to SEQ ID NO: 1928586
uuaguaaucaguaacucag

SEQ ID NO: 1928588 - RNA, 19 nt, Artificial Sequence
  Description of Artificial Sequence: Synthetic oligonucleotide
  Sense strand starting at position 2427 of SEQ ID NO: 1879731
aguuacugauuacuaagua

SEQ ID NO: 1928589 - RNA, 19 nt, Artificial Sequence
  Description of Artificial Sequence: Synthetic oligonucleotide
  Antisense strand to SEQ ID NO: 1928588
uacuuaguaaucaguaacu

SEQ ID NO: 1928590 - RNA, 19 nt, Artificial Sequence
  Description of Artificial Sequence: Synthetic oligonucleotide
  Sense strand starting at position 2543 of SEQ ID NO: 1879731
guaauuguuguuuaaugga

SEQ ID NO: 1928591 - RNA, 19 nt, Artificial Sequence
  Description of Artificial Sequence: Synthetic oligonucleotide
  Antisense strand to SEQ ID NO: 1928590
uccauuaaacaacaauuac

SEQ ID NO: 1928592 - RNA, 19 nt, Artificial Sequence
  Description of Artificial Sequence: Synthetic oligonucleotide
  Sense strand starting at position 2576 of SEQ ID NO: 1879731
acauguuccuaucuguaag

SEQ ID NO: 1928593 - RNA, 19 nt, Artificial Sequence
  Description of Artificial Sequence: Synthetic oligonucleotide
  Antisense strand to SEQ ID NO: 1928592
cuuacagauaggaacaugu

SEQ ID NO: 1928594 - RNA, 19 nt, Artificial Sequence
  Description of Artificial Sequence: Synthetic oligonucleotide
  Sense strand starting at position 2613 of SEQ ID NO: 1879731
ccgaauucgcuggugugua

SEQ ID NO: 1928595 - RNA, 19 nt, Artificial Sequence
  Description of Artificial Sequence: Synthetic oligonucleotide
  Antisense strand to SEQ ID NO: 1928594
uacacaccagcgaauucgg

SEQ ID NO: 1928596 - RNA, 19 nt, Artificial Sequence
  Description of Artificial Sequence: Synthetic oligonucleotide
  Sense strand starting at position 2714 of SEQ ID NO: 1879731
caucuaaguccugaguaag

SEQ ID NO: 1928597 - RNA, 19 nt, Artificial Sequence
  Description of Artificial Sequence: Synthetic oligonucleotide
  Antisense strand to SEQ ID NO: 1928596
cuuacucaggacuuagaug

SEQ ID NO: 1928598 - RNA, 19 nt, Artificial Sequence
  Description of Artificial Sequence: Synthetic oligonucleotide
  Sense strand starting at position 2835 of SEQ ID NO: 1879731
uccugagacugaucucaac

SEQ ID NO: 1928599 - RNA, 19 nt, Artificial Sequence
  Description of Artificial Sequence: Synthetic oligonucleotide
  Antisense strand to SEQ ID NO: 1928598
guugagaucagucucagga

SEQ ID NO: 1928600 - RNA, 19 nt, Artificial Sequence
  Description of Artificial Sequence: Synthetic oligonucleotide
  Sense strand starting at position 3077 of SEQ ID NO: 1879731
uggaauuuguccuaauauu

SEQ ID NO: 1928601 - RNA, 19 nt, Artificial Sequence
  Description of Artificial Sequence: Synthetic oligonucleotide
  Antisense strand to SEQ ID NO: 1928600
aauauuaggacaaauucca

SEQ ID NO: 1928602 - RNA, 19 nt, Artificial Sequence
  Description of Artificial Sequence: Synthetic oligonucleotide
  Sense strand starting at position 3148 of SEQ ID NO: 1879731
acuggaggaaucuguuaau

SEQ ID NO: 1928603 - RNA, 19 nt, Artificial Sequence
  Description of Artificial Sequence: Synthetic oligonucleotide
  Antisense strand to SEQ ID NO: 1928602
auuaacagauuccuccagu

SEQ ID NO: 1928604 - RNA, 19 nt, Artificial Sequence
  Description of Artificial Sequence: Synthetic oligonucleotide
  Sense strand starting at position 3193 of SEQ ID NO: 1879731
uguaaugugcucuacagau

SEQ ID NO: 1928605 - RNA, 19 nt, Artificial Sequence
  Description of Artificial Sequence: Synthetic oligonucleotide
  Antisense strand to SEQ ID NO: 1928604
aucuguagagcacauuaca

SEQ ID NO: 1928606 - RNA, 19 nt, Artificial Sequence
  Description of Artificial Sequence: Synthetic oligonucleotide
  Sense strand starting at position 3296 of SEQ ID NO: 1879731
guaucuugauggcuuaaca

SEQ ID NO: 1928607 - RNA, 19 nt, Artificial Sequence
  Description of Artificial Sequence: Synthetic oligonucleotide
  Antisense strand to SEQ ID NO: 1928606
uguuaagccaucaagauac

SEQ ID NO: 1928608 - RNA, 19 nt, Artificial Sequence
  Description of Artificial Sequence: Synthetic oligonucleotide
  Sense strand starting at position 3869 of SEQ ID NO: 1879731
agggcagcuacuuauuaga

SEQ ID NO: 1928609 - RNA, 19 nt, Artificial Sequence
  Description of Artificial Sequence: Synthetic oligonucleotide
  Antisense strand to SEQ ID NO: 1928608
ucuaauaaguagcugcccu

SEQ ID NO: 1928610 - RNA, 19 nt, Artificial Sequence
  Description of Artificial Sequence: Synthetic oligonucleotide
  Sense strand starting at position 3871 of SEQ ID NO: 1879731
ggcagcuacuuauuagaag

SEQ ID NO: 1928611 - RNA, 19 nt, Artificial Sequence
  Description of Artificial Sequence: Synthetic oligonucleotide
  Antisense strand to SEQ ID NO: 1928610
cuucuaauaaguagcugcc

SEQ ID NO: 1928612 - RNA, 19 nt, Artificial Sequence
  Description of Artificial Sequence: Synthetic oligonucleotide
  Sense strand starting at position 3 of SEQ ID NO: 1879732
ggucauuguauauguguua

SEQ ID NO: 1928613 - RNA, 19 nt, Artificial Sequence
  Description of Artificial Sequence: Synthetic oligonucleotide
  Antisense strand to SEQ ID NO: 1928612
uaacacauauacaaugacc

SEQ ID NO: 1928614 - RNA, 19 nt, Artificial Sequence
  Description of Artificial Sequence: Synthetic oligonucleotide
  Sense strand starting at position 4 of SEQ ID NO: 1879732
gucauuguauauguguuau

SEQ ID NO: 1928615 - RNA, 19 nt, Artificial Sequence
  Description of Artificial Sequence: Synthetic oligonucleotide
  Antisense strand to SEQ ID NO: 1928614
auaacacauauacaaugac

SEQ ID NO: 1928616 - RNA, 19 nt, Artificial Sequence
  Description of Artificial Sequence: Synthetic oligonucleotide
  Sense strand starting at position 259 of SEQ ID NO: 1879732
ugcccuagugccuaugaaa

SEQ ID NO: 1928617 - RNA, 19 nt, Artificial Sequence
  Description of Artificial Sequence: Synthetic oligonucleotide
  Antisense strand to SEQ ID NO: 1928616
uuucauaggcacuagggca

SEQ ID NO: 1928618 - RNA, 19 nt, Artificial Sequence
  Description of Artificial Sequence: Synthetic oligonucleotide
  Sense strand starting at position 371 of SEQ ID NO: 1879732
gaaggugacugcccuucua

SEQ ID NO: 1928619 - RNA, 19 nt, Artificial Sequence
  Description of Artificial Sequence: Synthetic oligonucleotide
  Antisense strand to SEQ ID NO: 1928618
uagaagggcagucaccuuc

SEQ ID NO: 1928620 - RNA, 19 nt, Artificial Sequence
  Description of Artificial Sequence: Synthetic oligonucleotide
  Sense strand starting at position 389 of SEQ ID NO: 1879732
agagcuuuauucucugaag

SEQ ID NO: 1928621 - RNA, 19 nt, Artificial Sequence
  Description of Artificial Sequence: Synthetic oligonucleotide
  Antisense strand to SEQ ID NO: 1928620
cuucagagaauaaagcucu

SEQ ID NO: 1928622 - RNA, 19 nt, Artificial Sequence
  Description of Artificial Sequence: Synthetic oligonucleotide
  Sense strand starting at position 391 of SEQ ID NO: 1879732
agcuuuauucucugaagac

SEQ ID NO: 1928623 - RNA, 19 nt, Artificial Sequence
  Description of Artificial Sequence: Synthetic oligonucleotide
  Antisense strand to SEQ ID NO: 1928622
gucuucagagaauaaagcu

SEQ ID NO: 1928624 - RNA, 19 nt, Artificial Sequence
  Description of Artificial Sequence: Synthetic oligonucleotide
  Sense strand starting at position 466 of SEQ ID NO: 1879732
agaugcgaugcugaaauua

SEQ ID NO: 1928625 - RNA, 19 nt, Artificial Sequence
  Description of Artificial Sequence: Synthetic oligonucleotide
  Antisense strand to SEQ ID NO: 1928624
uaauuucagcaucgcaucu

SEQ ID NO: 1928626 - RNA, 19 nt, Artificial Sequence
  Description of Artificial Sequence: Synthetic oligonucleotide
  Sense strand starting at position 741 of SEQ ID NO: 1879732
uccaaaucaguuuagucuu

SEQ ID NO: 1928627 - RNA, 19 nt, Artificial Sequence
  Description of Artificial Sequence: Synthetic oligonucleotide
  Antisense strand to SEQ ID NO: 1928626
aagacuaaacugauuugga

SEQ ID NO: 1928628 - RNA, 19 nt, Artificial Sequence
  Description of Artificial Sequence: Synthetic oligonucleotide
  Sense strand starting at position 1465 of SEQ ID NO: 1879732
aauaauggcuggccaaaga

SEQ ID NO: 1928629 - RNA, 19 nt, Artificial Sequence
  Description of Artificial Sequence: Synthetic oligonucleotide
  Antisense strand to SEQ ID NO: 1928628
ucuuuggccagccauuauu

SEQ ID NO: 1928630 - RNA, 19 nt, Artificial Sequence
  Description of Artificial Sequence: Synthetic oligonucleotide
  Sense strand starting at position 1949 of SEQ ID NO: 1879732
ccaaguguacuguggauau

SEQ ID NO: 1928631 - RNA, 19 nt, Artificial Sequence
  Description of Artificial Sequence: Synthetic oligonucleotide
  Antisense strand to SEQ ID NO: 1928630
auauccacaguacacuugg

SEQ ID NO: 1928632 - RNA, 19 nt, Artificial Sequence
  Description of Artificial Sequence: Synthetic oligonucleotide
  Sense strand starting at position 1951 of SEQ ID NO: 1879732
aaguguacuguggauauau

SEQ ID NO: 1928633 - RNA, 19 nt, Artificial Sequence
  Description of Artificial Sequence: Synthetic oligonucleotide
  Antisense strand to SEQ ID NO: 1928632
auauauccacaguacacuu

SEQ ID NO: 1928634 - RNA, 19 nt, Artificial Sequence
  Description of Artificial Sequence: Synthetic oligonucleotide
  Sense strand starting at position 1953 of SEQ ID NO: 1879732
guguacuguggauauaucu

SEQ ID NO: 1928635 - RNA, 19 nt, Artificial Sequence
  Description of Artificial Sequence: Synthetic oligonucleotide
  Antisense strand to SEQ ID NO: 1928634
agauauauccacaguacac

SEQ ID NO: 1928636 - RNA, 19 nt, Artificial Sequence
  Description of Artificial Sequence: Synthetic oligonucleotide
  Sense strand starting at position 1960 of SEQ ID NO: 1879732
guggauauaucuguucucu

SEQ ID NO: 1928637 - RNA, 19 nt, Artificial Sequence
  Description of Artificial Sequence: Synthetic oligonucleotide
  Antisense strand to SEQ ID NO: 1928636
agagaacagauauauccac

SEQ ID NO: 1928638 - RNA, 19 nt, Artificial Sequence
  Description of Artificial Sequence: Synthetic oligonucleotide
  Sense strand starting at position 1962 of SEQ ID NO: 1879732
ggauauaucuguucucuuc

SEQ ID NO: 1928639 - RNA, 19 nt, Artificial Sequence
  Description of Artificial Sequence: Synthetic oligonucleotide
  Antisense strand to SEQ ID NO: 1928638
gaagagaacagauauaucc

SEQ ID NO: 1928640 - RNA, 19 nt, Artificial Sequence
  Description of Artificial Sequence: Synthetic oligonucleotide
  Sense strand starting at position 1984 of SEQ ID NO: 1879732
uggccuuguguagauauau

SEQ ID NO: 1928641 - RNA, 19 nt, Artificial Sequence
  Description of Artificial Sequence: Synthetic oligonucleotide
  Antisense strand to SEQ ID NO: 1928640
auauaucuacacaaggcca

SEQ ID NO: 1928642 - RNA, 19 nt, Artificial Sequence
  Description of Artificial Sequence: Synthetic oligonucleotide
  Sense strand starting at position 2007 of SEQ ID NO: 1879732
gaguuaaauuucuggauac

SEQ ID NO: 1928643 - RNA, 19 nt, Artificial Sequence
  Description of Artificial Sequence: Synthetic oligonucleotide
  Antisense strand to SEQ ID NO: 1928642
guauccagaaauuuaacuc

SEQ ID NO: 1928644 - RNA, 19 nt, Artificial Sequence
  Description of Artificial Sequence: Synthetic oligonucleotide
  Sense strand starting at position 2008 of SEQ ID NO: 1879732
aguuaaauuucuggauacg

SEQ ID NO: 1928645 - RNA, 19 nt, Artificial Sequence
  Description of Artificial Sequence: Synthetic oligonucleotide
  Antisense strand to SEQ ID NO: 1928644
cguauccagaaauuuaacu

SEQ ID NO: 1928646 - RNA, 19 nt, Artificial Sequence
  Description of Artificial Sequence: Synthetic oligonucleotide
  Sense strand starting at position 2418 of SEQ ID NO: 1879732
uuggaagagcucuggacuu

SEQ ID NO: 1928647 - RNA, 19 nt, Artificial Sequence
  Description of Artificial Sequence: Synthetic oligonucleotide
  Antisense strand to SEQ ID NO: 1928646
aaguccagagcucuuccaa

SEQ ID NO: 1928648 - RNA, 19 nt, Artificial Sequence
  Description of Artificial Sequence: Synthetic oligonucleotide
  Sense strand starting at position 2596 of SEQ ID NO: 1879732
gcacuuguucuuuagaagc

SEQ ID NO: 1928649 - RNA, 19 nt, Artificial Sequence
  Description of Artificial Sequence: Synthetic oligonucleotide
  Antisense strand to SEQ ID NO: 1928648
gcuucuaaagaacaagugc

SEQ ID NO: 1928650 - RNA, 19 nt, Artificial Sequence
  Description of Artificial Sequence: Synthetic oligonucleotide
  Sense strand starting at position 2606 of SEQ ID NO: 1879732
uuuagaagcuacuagagaa

SEQ ID NO: 1928651 - RNA, 19 nt, Artificial Sequence
  Description of Artificial Sequence: Synthetic oligonucleotide
  Antisense strand to SEQ ID NO: 1928650
uucucuaguagcuucuaaa

SEQ ID NO: 1928652 - RNA, 19 nt, Artificial Sequence
  Description of Artificial Sequence: Synthetic oligonucleotide
  Sense strand starting at position 2618 of SEQ ID NO: 1879732
uagagaaugugcuccacca

SEQ ID NO: 1928653 - RNA, 19 nt, Artificial Sequence
  Description of Artificial Sequence: Synthetic oligonucleotide
  Antisense strand to SEQ ID NO: 1928652
ugguggagcacauucucua

SEQ ID NO: 1928654 - RNA, 19 nt, Artificial Sequence
  Description of Artificial Sequence: Synthetic oligonucleotide
  Sense strand starting at position 2620 of SEQ ID NO: 1879732
gagaaugugcuccaccaaa

SEQ ID NO: 1928655 - RNA, 19 nt, Artificial Sequence
  Description of Artificial Sequence: Synthetic oligonucleotide
  Antisense strand to SEQ ID NO: 1928654
uuugguggagcacauucuc

SEQ ID NO: 1928656 - RNA, 19 nt, Artificial Sequence
  Description of Artificial Sequence: Synthetic oligonucleotide
  Sense strand starting at position 2738 of SEQ ID NO: 1879732
auagcugugcaacagauau

SEQ ID NO: 1928657 - RNA, 19 nt, Artificial Sequence
  Description of Artificial Sequence: Synthetic oligonucleotide
  Antisense strand to SEQ ID NO: 1928656
auaucuguugcacagcuau

SEQ ID NO: 1928658 - RNA, 19 nt, Artificial Sequence
  Description of Artificial Sequence: Synthetic oligonucleotide
  Sense strand starting at position 2773 of SEQ ID NO: 1879732
agacuacagcaguguuauu

SEQ ID NO: 1928659 - RNA, 19 nt, Artificial Sequence
  Description of Artificial Sequence: Synthetic oligonucleotide
  Antisense strand to SEQ ID NO: 1928658
aauaacacugcuguagucu

SEQ ID NO: 1928660 - RNA, 19 nt, Artificial Sequence
  Description of Artificial Sequence: Synthetic oligonucleotide
  Sense strand starting at position 2801 of SEQ ID NO: 1879732
agucauacugcaggcuauu

SEQ ID NO: 1928661 - RNA, 19 nt, Artificial Sequence
  Description of Artificial Sequence: Synthetic oligonucleotide
  Antisense strand to SEQ ID NO: 1928660
aauagccugcaguaugacu

SEQ ID NO: 1928662 - RNA, 19 nt, Artificial Sequence
  Description of Artificial Sequence: Synthetic oligonucleotide
  Sense strand starting at position 2812 of SEQ ID NO: 1879732
aggcuauuaucauuaagcu

SEQ ID NO: 1928663 - RNA, 19 nt, Artificial Sequence
  Description of Artificial Sequence: Synthetic oligonucleotide
  Antisense strand to SEQ ID NO: 1928662
agcuuaaugauaauagccu

SEQ ID NO: 1928664 - RNA, 19 nt, Artificial Sequence
  Description of Artificial Sequence: Synthetic oligonucleotide
  Sense strand starting at position 2813 of SEQ ID NO: 1879732
ggcuauuaucauuaagcua

SEQ ID NO: 1928665 - RNA, 19 nt, Artificial Sequence
  Description of Artificial Sequence: Synthetic oligonucleotide
  Antisense strand to SEQ ID NO: 1928664
uagcuuaaugauaauagcc

SEQ ID NO: 1928666 - RNA, 19 nt, Artificial Sequence
  Description of Artificial Sequence: Synthetic oligonucleotide
  Sense strand starting at position 2849 of SEQ ID NO: 1879732
guagucuuugaaugccuga

SEQ ID NO: 1928667 - RNA, 19 nt, Artificial Sequence
  Description of Artificial Sequence: Synthetic oligonucleotide
  Antisense strand to SEQ ID NO: 1928666
ucaggcauucaaagacuac

SEQ ID NO: 1928668 - RNA, 19 nt, Artificial Sequence
  Description of Artificial Sequence: Synthetic oligonucleotide
  Sense strand starting at position 2854 of SEQ ID NO: 1879732
cuuugaaugccugagugac

SEQ ID NO: 1928669 - RNA, 19 nt, Artificial Sequence
  Description of Artificial Sequence: Synthetic oligonucleotide
  Antisense strand to SEQ ID NO: 1928668
gucacucaggcauucaaag

SEQ ID NO: 1928670 - RNA, 19 nt, Artificial Sequence
  Description of Artificial Sequence: Synthetic oligonucleotide
  Sense strand starting at position 3028 of SEQ ID NO: 1879732
gguaaaucaccauaagccu

SEQ ID NO: 1928671 - RNA, 19 nt, Artificial Sequence
  Description of Artificial Sequence: Synthetic oligonucleotide
  Antisense strand to SEQ ID NO: 1928670
aggcuuauggugauuuacc

SEQ ID NO: 1928672 - RNA, 19 nt, Artificial Sequence
  Description of Artificial Sequence: Synthetic oligonucleotide
  Sense strand starting at position 3042 of SEQ ID NO: 1879732
agccuagaaugagaauaua

SEQ ID NO: 1928673 - RNA, 19 nt, Artificial Sequence
  Description of Artificial Sequence: Synthetic oligonucleotide
  Antisense strand to SEQ ID NO: 1928672
uauauucucauucuaggcu

SEQ ID NO: 1928674 - RNA, 19 nt, Artificial Sequence
  Description of Artificial Sequence: Synthetic oligonucleotide
  Sense strand starting at position 3059 of SEQ ID NO: 1879732
uauauagaguagucugcua

SEQ ID NO: 1928675 - RNA, 19 nt, Artificial Sequence
  Description of Artificial Sequence: Synthetic oligonucleotide
  Antisense strand to SEQ ID NO: 1928674
uagcagacuacucuauaua

SEQ ID NO: 1928676 - RNA, 19 nt, Artificial Sequence
  Description of Artificial Sequence: Synthetic oligonucleotide
  Sense strand starting at position 3061 of SEQ ID NO: 1879732
uauagaguagucugcuacu

SEQ ID NO: 1928677 - RNA, 19 nt, Artificial Sequence
  Description of Artificial Sequence: Synthetic oligonucleotide
  Antisense strand to SEQ ID NO: 1928676
aguagcagacuacucuaua

SEQ ID NO: 1928678 - RNA, 19 nt, Artificial Sequence
  Description of Artificial Sequence: Synthetic oligonucleotide
  Sense strand starting at position 3154 of SEQ ID NO: 1879732
uggaguuucgcuguugcua

SEQ ID NO: 1928679 - RNA, 19 nt, Artificial Sequence
  Description of Artificial Sequence: Synthetic oligonucleotide
  Antisense strand to SEQ ID NO: 1928678
uagcaacagcgaaacucca

SEQ ID NO: 1928680 - RNA, 19 nt, Artificial Sequence
  Description of Artificial Sequence: Synthetic oligonucleotide
  Sense strand starting at position 3443 of SEQ ID NO: 1879732
ugugucagauauucuaacu

SEQ ID NO: 1928681 - RNA, 19 nt, Artificial Sequence
  Description of Artificial Sequence: Synthetic oligonucleotide
  Antisense strand to SEQ ID NO: 1928680
aguuagaauaucugacaca

SEQ ID NO: 1928682 - RNA, 19 nt, Artificial Sequence
  Description of Artificial Sequence: Synthetic oligonucleotide
  Sense strand starting at position 3528 of SEQ ID NO: 1879732
uuuguaaacucucagagaa

SEQ ID NO: 1928683 - RNA, 19 nt, Artificial Sequence
  Description of Artificial Sequence: Synthetic oligonucleotide
  Antisense strand to SEQ ID NO: 1928682
uucucugagaguuuacaaa

SEQ ID NO: 1928684 - RNA, 19 nt, Artificial Sequence
  Description of Artificial Sequence: Synthetic oligonucleotide
  Sense strand starting at position 3587 of SEQ ID NO: 1879732
agguaacauucucagaaag

SEQ ID NO: 1928685 - RNA, 19 nt, Artificial Sequence
  Description of Artificial Sequence: Synthetic oligonucleotide
  Antisense strand to SEQ ID NO: 1928684
cuuucugagaauguuaccu

SEQ ID NO: 1928686 - RNA, 19 nt, Artificial Sequence
  Description of Artificial Sequence: Synthetic oligonucleotide
  Sense strand starting at position 3634 of SEQ ID NO: 1879732
ggcuuaugcuuguuacuca

SEQ ID NO: 1928687 - RNA, 19 nt, Artificial Sequence
  Description of Artificial Sequence: Synthetic oligonucleotide
  Antisense strand to SEQ ID NO: 1928686
ugaguaacaagcauaagcc

SEQ ID NO: 1928688 - RNA, 19 nt, Artificial Sequence
  Description of Artificial Sequence: Synthetic oligonucleotide
  Sense strand starting at position 3729 of SEQ ID NO: 1879732
gauggauuggauugcuuga

SEQ ID NO: 1928689 - RNA, 19 nt, Artificial Sequence
  Description of Artificial Sequence: Synthetic oligonucleotide
  Antisense strand to SEQ ID NO: 1928688
ucaagcaauccaauccauc

SEQ ID NO: 1928690 - RNA, 19 nt, Artificial Sequence
  Description of Artificial Sequence: Synthetic oligonucleotide
  Sense strand starting at position 3891 of SEQ ID NO: 1879732
ggucacuugagucgugaua

SEQ ID NO: 1928691 - RNA, 19 nt, Artificial Sequence
  Description of Artificial Sequence: Synthetic oligonucleotide
  Antisense strand to SEQ ID NO: 1928690
uaucacgacucaagugacc

SEQ ID NO: 1928692 - RNA, 19 nt, Artificial Sequence
  Description of Artificial Sequence: Synthetic oligonucleotide
  Sense strand starting at position 5 of SEQ ID NO: 1879733
uuugguagggcucaaucaa

SEQ ID NO: 1928693 - RNA, 19 nt, Artificial Sequence
  Description of Artificial Sequence: Synthetic oligonucleotide
  Antisense strand to SEQ ID NO: 1928692
uugauugagcccuaccaaa

SEQ ID NO: 1928694 - RNA, 19 nt, Artificial Sequence
  Description of Artificial Sequence: Synthetic oligonucleotide
  Sense strand starting at position 104 of SEQ ID NO: 1879733
gaugcuaaguauccuguaa

SEQ ID NO: 1928695 - RNA, 19 nt, Artificial Sequence
  Description of Artificial Sequence: Synthetic oligonucleotide
  Antisense strand to SEQ ID NO: 1928694
uuacaggauacuuagcauc

SEQ ID NO: 1928696 - RNA, 19 nt, Artificial Sequence
  Description of Artificial Sequence: Synthetic oligonucleotide
  Sense strand starting at position 108 of SEQ ID NO: 1879733
cuaaguauccuguaaacca

SEQ ID NO: 1928697 - RNA, 19 nt, Artificial Sequence
  Description of Artificial Sequence: Synthetic oligonucleotide
  Antisense strand to SEQ ID NO: 1928696
ugguuuacaggauacuuag

SEQ ID NO: 1928698 - RNA, 19 nt, Artificial Sequence
  Description of Artificial Sequence: Synthetic oligonucleotide
  Sense strand starting at position 247 of SEQ ID NO: 1879733
gggacugacuugcuacuaa

SEQ ID NO: 1928699 - RNA, 19 nt, Artificial Sequence
  Description of Artificial Sequence: Synthetic oligonucleotide
  Antisense strand to SEQ ID NO: 1928698
uuaguagcaagucaguccc

SEQ ID NO: 1928700 - RNA, 19 nt, Artificial Sequence
  Description of Artificial Sequence: Synthetic oligonucleotide
  Sense strand starting at position 308 of SEQ ID NO: 1879733
acugcuuuccaauaugggu

SEQ ID NO: 1928701 - RNA, 19 nt, Artificial Sequence
  Description of Artificial Sequence: Synthetic oligonucleotide
  Antisense strand to SEQ ID NO: 1928700
acccauauuggaaagcagu

SEQ ID NO: 1928702 - RNA, 19 nt, Artificial Sequence
  Description of Artificial Sequence: Synthetic oligonucleotide
  Sense strand starting at position 357 of SEQ ID NO: 1879733
aguccaauugaguauaugu

SEQ ID NO: 1928703 - RNA, 19 nt, Artificial Sequence
  Description of Artificial Sequence: Synthetic oligonucleotide
  Antisense strand to SEQ ID NO: 1928702
acauauacucaauuggacu

SEQ ID NO: 1928704 - RNA, 19 nt, Artificial Sequence
  Description of Artificial Sequence: Synthetic oligonucleotide
  Sense strand starting at position 359 of SEQ ID NO: 1879733
uccaauugaguauauguca

SEQ ID NO: 1928705 - RNA, 19 nt, Artificial Sequence
  Description of Artificial Sequence: Synthetic oligonucleotide
  Antisense strand to SEQ ID NO: 1928704
ugacauauacucaauugga

SEQ ID NO: 1928706 - RNA, 19 nt, Artificial Sequence
  Description of Artificial Sequence: Synthetic oligonucleotide
  Sense strand starting at position 362 of SEQ ID NO: 1879733
aauugaguauaugucaagu

SEQ ID NO: 1928707 - RNA, 19 nt, Artificial Sequence
  Description of Artificial Sequence: Synthetic oligonucleotide
  Antisense strand to SEQ ID NO: 1928706
acuugacauauacucaauu

SEQ ID NO: 1928708 - RNA, 19 nt, Artificial Sequence
  Description of Artificial Sequence: Synthetic oligonucleotide
  Sense strand starting at position 368 of SEQ ID NO: 1879733
guauaugucaaguacucag

SEQ ID NO: 1928709 - RNA, 19 nt, Artificial Sequence
  Description of Artificial Sequence: Synthetic oligonucleotide
  Antisense strand to SEQ ID NO: 1928708
cugaguacuugacauauac

SEQ ID NO: 1928710 - RNA, 19 nt, Artificial Sequence
  Description of Artificial Sequence: Synthetic oligonucleotide
  Sense strand starting at position 514 of SEQ ID NO: 1879733
augucauccuggccaaaua

SEQ ID NO: 1928711 - RNA, 19 nt, Artificial Sequence
  Description of Artificial Sequence: Synthetic oligonucleotide
  Antisense strand to SEQ ID NO: 1928710
uauuuggccaggaugacau

SEQ ID NO: 1928712 - RNA, 19 nt, Artificial Sequence
  Description of Artificial Sequence: Synthetic oligonucleotide
  Sense strand starting at position 709 of SEQ ID NO: 1879733
uuggguaacuauguugauu

SEQ ID NO: 1928713 - RNA, 19 nt, Artificial Sequence
  Description of Artificial Sequence: Synthetic oligonucleotide
  Antisense strand to SEQ ID NO: 1928712
aaucaacauaguuacccaa

SEQ ID NO: 1928714 - RNA, 19 nt, Artificial Sequence
  Description of Artificial Sequence: Synthetic oligonucleotide
  Sense strand starting at position 712 of SEQ ID NO: 1879733
gguaacuauguugauugau

SEQ ID NO: 1928715 - RNA, 19 nt, Artificial Sequence
  Description of Artificial Sequence: Synthetic oligonucleotide
  Antisense strand to SEQ ID NO: 1928714
aucaaucaacauaguuacc

SEQ ID NO: 1928716 - RNA, 19 nt, Artificial Sequence
  Description of Artificial Sequence: Synthetic oligonucleotide
  Sense strand starting at position 783 of SEQ ID NO: 1879733
guagcaagagcucauuaaa

SEQ ID NO: 1928717 - RNA, 19 nt, Artificial Sequence
  Description of Artificial Sequence: Synthetic oligonucleotide
  Antisense strand to SEQ ID NO: 1928716
uuuaaugagcucuugcuac

SEQ ID NO: 1928718 - RNA, 19 nt, Artificial Sequence
  Description of Artificial Sequence: Synthetic oligonucleotide
  Sense strand starting at position 1147 of SEQ ID NO: 1879733
uguaaagcuguuugauaca

SEQ ID NO: 1928719 - RNA, 19 nt, Artificial Sequence
  Description of Artificial Sequence: Synthetic oligonucleotide
  Antisense strand to SEQ ID NO: 1928718
uguaucaaacagcuuuaca

SEQ ID NO: 1928720 - RNA, 19 nt, Artificial Sequence
  Description of Artificial Sequence: Synthetic oligonucleotide
  Sense strand starting at position 1172 of SEQ ID NO: 1879733
ggcagugugacagauguga

SEQ ID NO: 1928721 - RNA, 19 nt, Artificial Sequence
  Description of Artificial Sequence: Synthetic oligonucleotide
  Antisense strand to SEQ ID NO: 1928720
ucacaucugucacacugcc

SEQ ID NO: 1928722 - RNA, 19 nt, Artificial Sequence
  Description of Artificial Sequence: Synthetic oligonucleotide
  Sense strand starting at position 1174 of SEQ ID NO: 1879733
cagugugacagaugugaga

SEQ ID NO: 1928723 - RNA, 19 nt, Artificial Sequence
  Description of Artificial Sequence: Synthetic oligonucleotide
  Antisense strand to SEQ ID NO: 1928722
ucucacaucugucacacug

SEQ ID NO: 1928724 - RNA, 19 nt, Artificial Sequence
  Description of Artificial Sequence: Synthetic oligonucleotide
  Sense strand starting at position 1176 of SEQ ID NO: 1879733
gugugacagaugugagaga

SEQ ID NO: 1928725 - RNA, 19 nt, Artificial Sequence
  Description of Artificial Sequence: Synthetic oligonucleotide
  Antisense strand to SEQ ID NO: 1928724
ucucucacaucugucacac

SEQ ID NO: 1928726 - RNA, 19 nt, Artificial Sequence
  Description of Artificial Sequence: Synthetic oligonucleotide
  Sense strand starting at position 1334 of SEQ ID NO: 1879733
ugguguaaaccggaguaau

SEQ ID NO: 1928727 - RNA, 19 nt, Artificial Sequence
  Description of Artificial Sequence: Synthetic oligonucleotide
  Antisense strand to SEQ ID NO: 1928726
auuacuccgguuuacacca

SEQ ID NO: 1928728 - RNA, 19 nt, Artificial Sequence
  Description of Artificial Sequence: Synthetic oligonucleotide
  Sense strand starting at position 1346 of SEQ ID NO: 1879733
gaguaauuacaagggugua

SEQ ID NO: 1928729 - RNA, 19 nt, Artificial Sequence
  Description of Artificial Sequence: Synthetic oligonucleotide
  Antisense strand to SEQ ID NO: 1928728
uacacccuuguaauuacuc

SEQ ID NO: 1928730 - RNA, 19 nt, Artificial Sequence
  Description of Artificial Sequence: Synthetic oligonucleotide
  Sense strand starting at position 1401 of SEQ ID NO: 1879733
acagcuaugggcgaaacaa

SEQ ID NO: 1928731 - RNA, 19 nt, Artificial Sequence
  Description of Artificial Sequence: Synthetic oligonucleotide
  Antisense strand to SEQ ID NO: 1928730
uuguuucgcccauagcugu

SEQ ID NO: 1928732 - RNA, 19 nt, Artificial Sequence
  Description of Artificial Sequence: Synthetic oligonucleotide
  Sense strand starting at position 1770 of SEQ ID NO: 1879733
acaauugaguucucuggaa

SEQ ID NO: 1928733 - RNA, 19 nt, Artificial Sequence
  Description of Artificial Sequence: Synthetic oligonucleotide
  Antisense strand to SEQ ID NO: 1928732
uuccagagaacucaauugu

SEQ ID NO: 1928734 - RNA, 19 nt, Artificial Sequence
  Description of Artificial Sequence: Synthetic oligonucleotide
  Sense strand starting at position 1772 of SEQ ID NO: 1879733
aauugaguucucuggaaga

SEQ ID NO: 1928735 - RNA, 19 nt, Artificial Sequence
  Description of Artificial Sequence: Synthetic oligonucleotide
  Antisense strand to SEQ ID NO: 1928734
ucuuccagagaacucaauu

SEQ ID NO: 1928736 - RNA, 19 nt, Artificial Sequence
  Description of Artificial Sequence: Synthetic oligonucleotide
  Sense strand starting at position 1814 of SEQ ID NO: 1879733
guggaauugacaggaagua

SEQ ID NO: 1928737 - RNA, 19 nt, Artificial Sequence
  Description of Artificial Sequence: Synthetic oligonucleotide
  Antisense strand to SEQ ID NO: 1928736
uacuuccugucaauuccac

SEQ ID NO: 1928738 - RNA, 19 nt, Artificial Sequence
  Description of Artificial Sequence: Synthetic oligonucleotide
  Sense strand starting at position 1876 of SEQ ID NO: 1879733
guaaucaaucaucagucua

SEQ ID NO: 1928739 - RNA, 19 nt, Artificial Sequence
  Description of Artificial Sequence: Synthetic oligonucleotide
  Antisense strand to SEQ ID NO: 1928738
uagacugaugauugauuac

SEQ ID NO: 1928740 - RNA, 19 nt, Artificial Sequence
  Description of Artificial Sequence: Synthetic oligonucleotide
  Sense strand starting at position 1889 of SEQ ID NO: 1879733
agucuacguccugaguuag

SEQ ID NO: 1928741 - RNA, 19 nt, Artificial Sequence
  Description of Artificial Sequence: Synthetic oligonucleotide
  Antisense strand to SEQ ID NO: 1928740
cuaacucaggacguagacu

SEQ ID NO: 1928742 - RNA, 19 nt, Artificial Sequence
  Description of Artificial Sequence: Synthetic oligonucleotide
  Sense strand starting at position 2014 of SEQ ID NO: 1879733
aaauaagauugggcuguga

SEQ ID NO: 1928743 - RNA, 19 nt, Artificial Sequence
  Description of Artificial Sequence: Synthetic oligonucleotide
  Antisense strand to SEQ ID NO: 1928742
ucacagcccaaucuuauuu

SEQ ID NO: 1928744 - RNA, 19 nt, Artificial Sequence
  Description of Artificial Sequence: Synthetic oligonucleotide
  Sense strand starting at position 2016 of SEQ ID NO: 1879733
auaagauugggcugugaaa

SEQ ID NO: 1928745 - RNA, 19 nt, Artificial Sequence
  Description of Artificial Sequence: Synthetic oligonucleotide
  Antisense strand to SEQ ID NO: 1928744
uuucacagcccaaucuuau

SEQ ID NO: 1928746 - RNA, 19 nt, Artificial Sequence
  Description of Artificial Sequence: Synthetic oligonucleotide
  Sense strand starting at position 2496 of SEQ ID NO: 1879733
cagaaugcacugcgaagaa

SEQ ID NO: 1928747 - RNA, 19 nt, Artificial Sequence
  Description of Artificial Sequence: Synthetic oligonucleotide
  Antisense strand to SEQ ID NO: 1928746
uucuucgcagugcauucug

SEQ ID NO: 1928748 - RNA, 19 nt, Artificial Sequence
  Description of Artificial Sequence: Synthetic oligonucleotide
  Sense strand starting at position 2705 of SEQ ID NO: 1879733
agaaguucguagucccaga

SEQ ID NO: 1928749 - RNA, 19 nt, Artificial Sequence
  Description of Artificial Sequence: Synthetic oligonucleotide
  Antisense strand to SEQ ID NO: 1928748
ucugggacuacgaacuucu

SEQ ID NO: 1928750 - RNA, 19 nt, Artificial Sequence
  Description of Artificial Sequence: Synthetic oligonucleotide
  Sense strand starting at position 2710 of SEQ ID NO: 1879733
uucguagucccagagguga

SEQ ID NO: 1928751 - RNA, 19 nt, Artificial Sequence
  Description of Artificial Sequence: Synthetic oligonucleotide
  Antisense strand to SEQ ID NO: 1928750
ucaccucugggacuacgaa

SEQ ID NO: 1928752 - RNA, 19 nt, Artificial Sequence
  Description of Artificial Sequence: Synthetic oligonucleotide
  Sense strand starting at position 3461 of SEQ ID NO: 1879733
cgaguccacaaaugauuga

SEQ ID NO: 1928753 - RNA, 19 nt, Artificial Sequence
  Description of Artificial Sequence: Synthetic oligonucleotide
  Antisense strand to SEQ ID NO: 1928752
ucaaucauuuguggacucg

SEQ ID NO: 1928754 - RNA, 19 nt, Artificial Sequence
  Description of Artificial Sequence: Synthetic oligonucleotide
  Sense strand starting at position 3547 of SEQ ID NO: 1879733
agacgauuccacuguggua

SEQ ID NO: 1928755 - RNA, 19 nt, Artificial Sequence
  Description of Artificial Sequence: Synthetic oligonucleotide
  Antisense strand to SEQ ID NO: 1928754
uaccacaguggaaucgucu

SEQ ID NO: 1928756 - RNA, 19 nt, Artificial Sequence
  Description of Artificial Sequence: Synthetic oligonucleotide
  Sense strand starting at position 3596 of SEQ ID NO: 1879733
uagcgagacgcucaggaau

SEQ ID NO: 1928757 - RNA, 19 nt, Artificial Sequence
  Description of Artificial Sequence: Synthetic oligonucleotide
  Antisense strand to SEQ ID NO: 1928756
auuccugagcgucucgcua

SEQ ID NO: 1928758 - RNA, 19 nt, Artificial Sequence
  Description of Artificial Sequence: Synthetic oligonucleotide
  Sense strand starting at position 3631 of SEQ ID NO: 1879733
gaguuacuguguccaagac

SEQ ID NO: 1928759 - RNA, 19 nt, Artificial Sequence
  Description of Artificial Sequence: Synthetic oligonucleotide
  Antisense strand to SEQ ID NO: 1928758
gucuuggacacaguaacuc

SEQ ID NO: 1928760 - RNA, 19 nt, Artificial Sequence
  Description of Artificial Sequence: Synthetic oligonucleotide
  Sense strand starting at position 3868 of SEQ ID NO: 1879733
gccuaagaacucuguuuac

SEQ ID NO: 1928761 - RNA, 19 nt, Artificial Sequence
  Description of Artificial Sequence: Synthetic oligonucleotide
  Antisense strand to SEQ ID NO: 1928760
guaaacagaguucuuaggc

SEQ ID NO: 1928762 - RNA, 19 nt, Artificial Sequence
  Description of Artificial Sequence: Synthetic oligonucleotide
  Sense strand starting at position 3892 of SEQ ID NO: 1879733
auucuaaauugcuugauga

SEQ ID NO: 1928763 - RNA, 19 nt, Artificial Sequence
  Description of Artificial Sequence: Synthetic oligonucleotide
  Antisense strand to SEQ ID NO: 1928762
ucaucaagcaauuuagaau

SEQ ID NO: 1928764 - RNA, 19 nt, Artificial Sequence
  Description of Artificial Sequence: Synthetic oligonucleotide
  Sense strand starting at position 3893 of SEQ ID NO: 1879733
uucuaaauugcuugaugau

SEQ ID NO: 1928765 - RNA, 19 nt, Artificial Sequence
  Description of Artificial Sequence: Synthetic oligonucleotide
  Antisense strand to SEQ ID NO: 1928764
aucaucaagcaauuuagaa

SEQ ID NO: 1928766 - RNA, 19 nt, Artificial Sequence
  Description of Artificial Sequence: Synthetic oligonucleotide
  Sense strand starting at position 3894 of SEQ ID NO: 1879733
ucuaaauugcuugaugauu

SEQ ID NO: 1928767 - RNA, 19 nt, Artificial Sequence
  Description of Artificial Sequence: Synthetic oligonucleotide
  Antisense strand to SEQ ID NO: 1928766
aaucaucaagcaauuuaga

SEQ ID NO: 1928768 - RNA, 19 nt, Artificial Sequence
  Description of Artificial Sequence: Synthetic oligonucleotide
  Sense strand starting at position 3919 of SEQ ID NO: 1879733
acaccuuucccauguauga

SEQ ID NO: 1928769 - RNA, 19 nt, Artificial Sequence
  Description of Artificial Sequence: Synthetic oligonucleotide
  Antisense strand to SEQ ID NO: 1928768
ucauacaugggaaaggugu

SEQ ID NO: 1928770 - RNA, 19 nt, Artificial Sequence
  Description of Artificial Sequence: Synthetic oligonucleotide
  Sense strand starting at position 3929 of SEQ ID NO: 1879733
cauguaugauuugaguaua

SEQ ID NO: 1928771 - RNA, 19 nt, Artificial Sequence
  Description of Artificial Sequence: Synthetic oligonucleotide
  Antisense strand to SEQ ID NO: 1928770
uauacucaaaucauacaug

SEQ ID NO: 1928772 - RNA, 19 nt, Artificial Sequence
  Description of Artificial Sequence: Synthetic oligonucleotide
  Sense strand starting at position 46 of SEQ ID NO: 1879734
gacaaugacugggagaaua

SEQ ID NO: 1928773 - RNA, 19 nt, Artificial Sequence
  Description of Artificial Sequence: Synthetic oligonucleotide
  Antisense strand to SEQ ID NO: 1928772
uauucucccagucauuguc

SEQ ID NO: 1928774 - RNA, 19 nt, Artificial Sequence
  Description of Artificial Sequence: Synthetic oligonucleotide
  Sense strand starting at position 70 of SEQ ID NO: 1879734
gagagacauuaucuguuac

SEQ ID NO: 1928775 - RNA, 19 nt, Artificial Sequence
  Description of Artificial Sequence: Synthetic oligonucleotide
  Antisense strand to SEQ ID NO: 1928774
guaacagauaaugucucuc

SEQ ID NO: 1928776 - RNA, 19 nt, Artificial Sequence
  Description of Artificial Sequence: Synthetic oligonucleotide
  Sense strand starting at position 194 of SEQ ID NO: 1879734
cuuccaugugaauggcaau

SEQ ID NO: 1928777 - RNA, 19 nt, Artificial Sequence
  Description of Artificial Sequence: Synthetic oligonucleotide
  Antisense strand to SEQ ID NO: 1928776
auugccauucacauggaag

SEQ ID NO: 1928778 - RNA, 19 nt, Artificial Sequence
  Description of Artificial Sequence: Synthetic oligonucleotide
  Sense strand starting at position 206 of SEQ ID NO: 1879734
uggcaauuccuuggaguug

SEQ ID NO: 1928779 - RNA, 19 nt, Artificial Sequence
  Description of Artificial Sequence: Synthetic oligonucleotide
  Antisense strand to SEQ ID NO: 1928778
caacuccaaggaauugcca

SEQ ID NO: 1928780 - RNA, 19 nt, Artificial Sequence
  Description of Artificial Sequence: Synthetic oligonucleotide
  Sense strand starting at position 215 of SEQ ID NO: 1879734
cuuggaguuguacaaucca

SEQ ID NO: 1928781 - RNA, 19 nt, Artificial Sequence
  Description of Artificial Sequence: Synthetic oligonucleotide
  Antisense strand to SEQ ID NO: 1928780
uggauuguacaacuccaag

SEQ ID NO: 1928782 - RNA, 19 nt, Artificial Sequence
  Description of Artificial Sequence: Synthetic oligonucleotide
  Sense strand starting at position 275 of SEQ ID NO: 1879734
cugcuacaccuuuaagaug

SEQ ID NO: 1928783 - RNA, 19 nt, Artificial Sequence
  Description of Artificial Sequence: Synthetic oligonucleotide
  Antisense strand to SEQ ID NO: 1928782
caucuuaaagguguagcag

SEQ ID NO: 1928784 - RNA, 19 nt, Artificial Sequence
  Description of Artificial Sequence: Synthetic oligonucleotide
  Sense strand starting at position 366 of SEQ ID NO: 1879734
gcaaauugguaagcauacu

SEQ ID NO: 1928785 - RNA, 19 nt, Artificial Sequence
  Description of Artificial Sequence: Synthetic oligonucleotide
  Antisense strand to SEQ ID NO: 1928784
aguaugcuuaccaauuugc

SEQ ID NO: 1928786 - RNA, 19 nt, Artificial Sequence
  Description of Artificial Sequence: Synthetic oligonucleotide
  Sense strand starting at position 487 of SEQ ID NO: 1879734
ggaaaugacugauagaauu

SEQ ID NO: 1928787 - RNA, 19 nt, Artificial Sequence
  Description of Artificial Sequence: Synthetic oligonucleotide
  Antisense strand to SEQ ID NO: 1928786
aauucuaucagucauuucc

SEQ ID NO: 1928788 - RNA, 19 nt, Artificial Sequence
  Description of Artificial Sequence: Synthetic oligonucleotide
  Sense strand starting at position 675 of SEQ ID NO: 1879734
uuguuccagggauauucua

SEQ ID NO: 1928789 - RNA, 19 nt, Artificial Sequence
  Description of Artificial Sequence: Synthetic oligonucleotide
  Antisense strand to SEQ ID NO: 1928788
uagaauaucccuggaacaa

SEQ ID NO: 1928790 - RNA, 19 nt, Artificial Sequence
  Description of Artificial Sequence: Synthetic oligonucleotide
  Sense strand starting at position 682 of SEQ ID NO: 1879734
agggauauucuauagcuuu

SEQ ID NO: 1928791 - RNA, 19 nt, Artificial Sequence
  Description of Artificial Sequence: Synthetic oligonucleotide
  Antisense strand to SEQ ID NO: 1928790
aaagcuauagaauaucccu

SEQ ID NO: 1928792 - RNA, 19 nt, Artificial Sequence
  Description of Artificial Sequence: Synthetic oligonucleotide
  Sense strand starting at position 812 of SEQ ID NO: 1879734
uggauaauggguuguccaa

SEQ ID NO: 1928793 - RNA, 19 nt, Artificial Sequence
  Description of Artificial Sequence: Synthetic oligonucleotide
  Antisense strand to SEQ ID NO: 1928792
uuggacaacccauuaucca

SEQ ID NO: 1928794 - RNA, 19 nt, Artificial Sequence
  Description of Artificial Sequence: Synthetic oligonucleotide
  Sense strand starting at position 814 of SEQ ID NO: 1879734
gauaauggguuguccaaau

SEQ ID NO: 1928795 - RNA, 19 nt, Artificial Sequence
  Description of Artificial Sequence: Synthetic oligonucleotide
  Antisense strand to SEQ ID NO: 1928794
auuuggacaacccauuauc

SEQ ID NO: 1928796 - RNA, 19 nt, Artificial Sequence
  Description of Artificial Sequence: Synthetic oligonucleotide
  Sense strand starting at position 852 of SEQ ID NO: 1879734
ggaggaguugugggucuug

SEQ ID NO: 1928797 - RNA, 19 nt, Artificial Sequence
  Description of Artificial Sequence: Synthetic oligonucleotide
  Antisense strand to SEQ ID NO: 1928796
caagacccacaacuccucc

SEQ ID NO: 1928798 - RNA, 19 nt, Artificial Sequence
  Description of Artificial Sequence: Synthetic oligonucleotide
  Sense strand starting at position 863 of SEQ ID NO: 1879734
gggucuuggaaauguacaa

SEQ ID NO: 1928799 - RNA, 19 nt, Artificial Sequence
  Description of Artificial Sequence: Synthetic oligonucleotide
  Antisense strand to SEQ ID NO: 1928798
uuguacauuuccaagaccc

SEQ ID NO: 1928800 - RNA, 19 nt, Artificial Sequence
  Description of Artificial Sequence: Synthetic oligonucleotide
  Sense strand starting at position 942 of SEQ ID NO: 1879734
cauugaggucauugaauua

SEQ ID NO: 1928801 - RNA, 19 nt, Artificial Sequence
  Description of Artificial Sequence: Synthetic oligonucleotide
  Antisense strand to SEQ ID NO: 1928800
uaauucaaugaccucaaug

SEQ ID NO: 1928802 - RNA, 19 nt, Artificial Sequence
  Description of Artificial Sequence: Synthetic oligonucleotide
  Sense strand starting at position 1039 of SEQ ID NO: 1879734
ucacaacuugguggagaau

SEQ ID NO: 1928803 - RNA, 19 nt, Artificial Sequence
  Description of Artificial Sequence: Synthetic oligonucleotide
  Antisense strand to SEQ ID NO: 1928802
auucuccaccaaguuguga

SEQ ID NO: 1928804 - RNA, 19 nt, Artificial Sequence
  Description of Artificial Sequence: Synthetic oligonucleotide
  Sense strand starting at position 1050 of SEQ ID NO: 1879734
uggagaaugcugcaaagua

SEQ ID NO: 1928805 - RNA, 19 nt, Artificial Sequence
  Description of Artificial Sequence: Synthetic oligonucleotide
  Antisense strand to SEQ ID NO: 1928804
uacuuugcagcauucucca

SEQ ID NO: 1928806 - RNA, 19 nt, Artificial Sequence
  Description of Artificial Sequence: Synthetic oligonucleotide
  Sense strand starting at position 1176 of SEQ ID NO: 1879734
ccuugaaaccucgauugau

SEQ ID NO: 1928807 - RNA, 19 nt, Artificial Sequence
  Description of Artificial Sequence: Synthetic oligonucleotide
  Antisense strand to SEQ ID NO: 1928806
aucaaucgagguuucaagg

SEQ ID NO: 1928808 - RNA, 19 nt, Artificial Sequence
  Description of Artificial Sequence: Synthetic oligonucleotide
  Sense strand starting at position 1350 of SEQ ID NO: 1879734
ggcuauucuuggguaugau

SEQ ID NO: 1928809 - RNA, 19 nt, Artificial Sequence
  Description of Artificial Sequence: Synthetic oligonucleotide
  Antisense strand to SEQ ID NO: 1928808
aucauacccaagaauagcc

SEQ ID NO: 1928810 - RNA, 19 nt, Artificial Sequence
  Description of Artificial Sequence: Synthetic oligonucleotide
  Sense strand starting at position 1351 of SEQ ID NO: 1879734
gcuauucuuggguaugauu

SEQ ID NO: 1928811 - RNA, 19 nt, Artificial Sequence
  Description of Artificial Sequence: Synthetic oligonucleotide
  Antisense strand to SEQ ID NO: 1928810
aaucauacccaagaauagc

SEQ ID NO: 1928812 - RNA, 19 nt, Artificial Sequence
  Description of Artificial Sequence: Synthetic oligonucleotide
  Sense strand starting at position 1692 of SEQ ID NO: 1879734
ucacacguggccuagauau

SEQ ID NO: 1928813 - RNA, 19 nt, Artificial Sequence
  Description of Artificial Sequence: Synthetic oligonucleotide
  Antisense strand to SEQ ID NO: 1928812
auaucuaggccacguguga

SEQ ID NO: 1928814 - RNA, 19 nt, Artificial Sequence
  Description of Artificial Sequence: Synthetic oligonucleotide
  Sense strand starting at position 2292 of SEQ ID NO: 1879734
aggaguauuaagugcauag

SEQ ID NO: 1928815 - RNA, 19 nt, Artificial Sequence
  Description of Artificial Sequence: Synthetic oligonucleotide
  Antisense strand to SEQ ID NO: 1928814
cuaugcacuuaauacuccu

SEQ ID NO: 1928816 - RNA, 19 nt, Artificial Sequence
  Description of Artificial Sequence: Synthetic oligonucleotide
  Sense strand starting at position 2313 of SEQ ID NO: 1879734
cuuuauugcccuugggaau

SEQ ID NO: 1928817 - RNA, 19 nt, Artificial Sequence
  Description of Artificial Sequence: Synthetic oligonucleotide
  Antisense strand to SEQ ID NO: 1928816
auucccaagggcaauaaag

SEQ ID NO: 1928818 - RNA, 19 nt, Artificial Sequence
  Description of Artificial Sequence: Synthetic oligonucleotide
  Sense strand starting at position 2314 of SEQ ID NO: 1879734
uuuauugcccuugggaaua

SEQ ID NO: 1928819 - RNA, 19 nt, Artificial Sequence
  Description of Artificial Sequence: Synthetic oligonucleotide
  Antisense strand to SEQ ID NO: 1928818
uauucccaagggcaauaaa

SEQ ID NO: 1928820 - RNA, 19 nt, Artificial Sequence
  Description of Artificial Sequence: Synthetic oligonucleotide
  Sense strand starting at position 2494 of SEQ ID NO: 1879734
ucuacacauuuggaggauu

SEQ ID NO: 1928821 - RNA, 19 nt, Artificial Sequence
  Description of Artificial Sequence: Synthetic oligonucleotide
  Antisense strand to SEQ ID NO: 1928820
aauccuccaaauguguaga

SEQ ID NO: 1928822 - RNA, 19 nt, Artificial Sequence
  Description of Artificial Sequence: Synthetic oligonucleotide
  Sense strand starting at position 2576 of SEQ ID NO: 1879734
cuacauaggccaugagcua

SEQ ID NO: 1928823 - RNA, 19 nt, Artificial Sequence
  Description of Artificial Sequence: Synthetic oligonucleotide
  Antisense strand to SEQ ID NO: 1928822
uagcucauggccuauguag

SEQ ID NO: 1928824 - RNA, 19 nt, Artificial Sequence
  Description of Artificial Sequence: Synthetic oligonucleotide
  Sense strand starting at position 2745 of SEQ ID NO: 1879734
agauuaaguagcugcaaga

SEQ ID NO: 1928825 - RNA, 19 nt, Artificial Sequence
  Description of Artificial Sequence: Synthetic oligonucleotide
  Antisense strand to SEQ ID NO: 1928824
ucuugcagcuacuuaaucu

SEQ ID NO: 1928826 - RNA, 19 nt, Artificial Sequence
  Description of Artificial Sequence: Synthetic oligonucleotide
  Sense strand starting at position 2826 of SEQ ID NO: 1879734
acauaaucccaguguggug

SEQ ID NO: 1928827 - RNA, 19 nt, Artificial Sequence
  Description of Artificial Sequence: Synthetic oligonucleotide
  Antisense strand to SEQ ID NO: 1928826
caccacacugggauuaugu

SEQ ID NO: 1928828 - RNA, 19 nt, Artificial Sequence
  Description of Artificial Sequence: Synthetic oligonucleotide
  Sense strand starting at position 2945 of SEQ ID NO: 1879734
cuuaaaucuggguaggcuu

SEQ ID NO: 1928829 - RNA, 19 nt, Artificial Sequence
  Description of Artificial Sequence: Synthetic oligonucleotide
  Antisense strand to SEQ ID NO: 1928828
aagccuacccagauuuaag

SEQ ID NO: 1928830 - RNA, 19 nt, Artificial Sequence
  Description of Artificial Sequence: Synthetic oligonucleotide
  Sense strand starting at position 2998 of SEQ ID NO: 1879734
gauacuacgugacuccuaa

SEQ ID NO: 1928831 - RNA, 19 nt, Artificial Sequence
  Description of Artificial Sequence: Synthetic oligonucleotide
  Antisense strand to SEQ ID NO: 1928830
uuaggagucacguaguauc

SEQ ID NO: 1928832 - RNA, 19 nt, Artificial Sequence
  Description of Artificial Sequence: Synthetic oligonucleotide
  Sense strand starting at position 3010 of SEQ ID NO: 1879734
cuccuaaagcuaggucaua

SEQ ID NO: 1928833 - RNA, 19 nt, Artificial Sequence
  Description of Artificial Sequence: Synthetic oligonucleotide
  Antisense strand to SEQ ID NO: 1928832
uaugaccuagcuuuaggag

SEQ ID NO: 1928834 - RNA, 19 nt, Artificial Sequence
  Description of Artificial Sequence: Synthetic oligonucleotide
  Sense strand starting at position 3011 of SEQ ID NO: 1879734
uccuaaagcuaggucauaa

SEQ ID NO: 1928835 - RNA, 19 nt, Artificial Sequence
  Description of Artificial Sequence: Synthetic oligonucleotide
  Antisense strand to SEQ ID NO: 1928834
uuaugaccuagcuuuagga

SEQ ID NO: 1928836 - RNA, 19 nt, Artificial Sequence
  Description of Artificial Sequence: Synthetic oligonucleotide
  Sense strand starting at position 3112 of SEQ ID NO: 1879734
gccacagucagugcuuagu

SEQ ID NO: 1928837 - RNA, 19 nt, Artificial Sequence
  Description of Artificial Sequence: Synthetic oligonucleotide
  Antisense strand to SEQ ID NO: 1928836
acuaagcacugacuguggc

SEQ ID NO: 1928838 - RNA, 19 nt, Artificial Sequence
  Description of Artificial Sequence: Synthetic oligonucleotide
  Sense strand starting at position 3174 of SEQ ID NO: 1879734
caaguuguggcaugaacca

SEQ ID NO: 1928839 - RNA, 19 nt, Artificial Sequence
  Description of Artificial Sequence: Synthetic oligonucleotide
  Antisense strand to SEQ ID NO: 1928838
ugguucaugccacaacuug

SEQ ID NO: 1928840 - RNA, 19 nt, Artificial Sequence
  Description of Artificial Sequence: Synthetic oligonucleotide
  Sense strand starting at position 3410 of SEQ ID NO: 1879734
cauauugaagcaggugaaa

SEQ ID NO: 1928841 - RNA, 19 nt, Artificial Sequence
  Description of Artificial Sequence: Synthetic oligonucleotide
  Antisense strand to SEQ ID NO: 1928840
uuucaccugcuucaauaug

SEQ ID NO: 1928842 - RNA, 19 nt, Artificial Sequence
  Description of Artificial Sequence: Synthetic oligonucleotide
  Sense strand starting at position 3473 of SEQ ID NO: 1879734
ucaagauuguacccuguga

SEQ ID NO: 1928843 - RNA, 19 nt, Artificial Sequence
  Description of Artificial Sequence: Synthetic oligonucleotide
  Antisense strand to SEQ ID NO: 1928842
ucacaggguacaaucuuga

SEQ ID NO: 1928844 - RNA, 19 nt, Artificial Sequence
  Description of Artificial Sequence: Synthetic oligonucleotide
  Sense strand starting at position 3475 of SEQ ID NO: 1879734
aagauuguacccugugagu

SEQ ID NO: 1928845 - RNA, 19 nt, Artificial Sequence
  Description of Artificial Sequence: Synthetic oligonucleotide
  Antisense strand to SEQ ID NO: 1928844
acucacaggguacaaucuu

SEQ ID NO: 1928846 - RNA, 19 nt, Artificial Sequence
  Description of Artificial Sequence: Synthetic oligonucleotide
  Sense strand starting at position 3832 of SEQ ID NO: 1879734
acugaaucuuccuugggau

SEQ ID NO: 1928847 - RNA, 19 nt, Artificial Sequence
  Description of Artificial Sequence: Synthetic oligonucleotide
  Antisense strand to SEQ ID NO: 1928846
aucccaaggaagauucagu

SEQ ID NO: 1928848 - RNA, 19 nt, Artificial Sequence
  Description of Artificial Sequence: Synthetic oligonucleotide
  Sense strand starting at position 3833 of SEQ ID NO: 1879734
cugaaucuuccuugggauu

SEQ ID NO: 1928849 - RNA, 19 nt, Artificial Sequence
  Description of Artificial Sequence: Synthetic oligonucleotide
  Antisense strand to SEQ ID NO: 1928848
aaucccaaggaagauucag

SEQ ID NO: 1928850 - RNA, 19 nt, Artificial Sequence
  Description of Artificial Sequence: Synthetic oligonucleotide
  Sense strand starting at position 3834 of SEQ ID NO: 1879734
ugaaucuuccuugggauug

SEQ ID NO: 1928851 - RNA, 19 nt, Artificial Sequence
  Description of Artificial Sequence: Synthetic oligonucleotide
  Antisense strand to SEQ ID NO: 1928850
caaucccaaggaagauuca

SEQ ID NO: 1928852 - RNA, 19 nt, Artificial Sequence
  Description of Artificial Sequence: Synthetic oligonucleotide
  Sense strand starting at position 30 of SEQ ID NO: 1879735
agcagaaacucagucacau

SEQ ID NO: 1928853 - RNA, 19 nt, Artificial Sequence
  Description of Artificial Sequence: Synthetic oligonucleotide
  Antisense strand to SEQ ID NO: 1928852
augugacugaguuucugcu

SEQ ID NO: 1928854 - RNA, 19 nt, Artificial Sequence
  Description of Artificial Sequence: Synthetic oligonucleotide
  Sense strand starting at position 60 of SEQ ID NO: 1879735
gguccuuuguuagccauuu

SEQ ID NO: 1928855 - RNA, 19 nt, Artificial Sequence
  Description of Artificial Sequence: Synthetic oligonucleotide
  Antisense strand to SEQ ID NO: 1928854
aaauggcuaacaaaggacc

SEQ ID NO: 1928856 - RNA, 19 nt, Artificial Sequence
  Description of Artificial Sequence: Synthetic oligonucleotide
  Sense strand starting at position 104 of SEQ ID NO: 1879735
gugcguauauauuuauaac

SEQ ID NO: 1928857 - RNA, 19 nt, Artificial Sequence
  Description of Artificial Sequence: Synthetic oligonucleotide
  Antisense strand to SEQ ID NO: 1928856
guuauaaauauauacgcac

SEQ ID NO: 1928858 - RNA, 19 nt, Artificial Sequence
  Description of Artificial Sequence: Synthetic oligonucleotide
  Sense strand starting at position 534 of SEQ ID NO: 1879735
gcugcacugauggauauau

SEQ ID NO: 1928859 - RNA, 19 nt, Artificial Sequence
  Description of Artificial Sequence: Synthetic oligonucleotide
  Antisense strand to SEQ ID NO: 1928858
auauauccaucagugcagc

SEQ ID NO: 1928860 - RNA, 19 nt, Artificial Sequence
  Description of Artificial Sequence: Synthetic oligonucleotide
  Sense strand starting at position 691 of SEQ ID NO: 1879735
aggagaccuugguauuuaa

SEQ ID NO: 1928861 - RNA, 19 nt, Artificial Sequence
  Description of Artificial Sequence: Synthetic oligonucleotide
  Antisense strand to SEQ ID NO: 1928860
uuaaauaccaaggucuccu

SEQ ID NO: 1928862 - RNA, 19 nt, Artificial Sequence
  Description of Artificial Sequence: Synthetic oligonucleotide
  Sense strand starting at position 721 of SEQ ID NO: 1879735
ucaugcugucgagaaacua

SEQ ID NO: 1928863 - RNA, 19 nt, Artificial Sequence
  Description of Artificial Sequence: Synthetic oligonucleotide
  Antisense strand to SEQ ID NO: 1928862
uaguuucucgacagcauga

SEQ ID NO: 1928864 - RNA, 19 nt, Artificial Sequence
  Description of Artificial Sequence: Synthetic oligonucleotide
  Sense strand starting at position 797 of SEQ ID NO: 1879735
uuugauuaggccuggauua

SEQ ID NO: 1928865 - RNA, 19 nt, Artificial Sequence
  Description of Artificial Sequence: Synthetic oligonucleotide
  Antisense strand to SEQ ID NO: 1928864
uaauccaggccuaaucaaa

SEQ ID NO: 1928866 - RNA, 19 nt, Artificial Sequence
  Description of Artificial Sequence: Synthetic oligonucleotide
  Sense strand starting at position 798 of SEQ ID NO: 1879735
uugauuaggccuggauuag

SEQ ID NO: 1928867 - RNA, 19 nt, Artificial Sequence
  Description of Artificial Sequence: Synthetic oligonucleotide
  Antisense strand to SEQ ID NO: 1928866
cuaauccaggccuaaucaa

SEQ ID NO: 1928868 - RNA, 19 nt, Artificial Sequence
  Description of Artificial Sequence: Synthetic oligonucleotide
  Sense strand starting at position 889 of SEQ ID NO: 1879735
acauucucgccucacagaa

SEQ ID NO: 1928869 - RNA, 19 nt, Artificial Sequence
  Description of Artificial Sequence: Synthetic oligonucleotide
  Antisense strand to SEQ ID NO: 1928868
uucugugaggcgagaaugu

SEQ ID NO: 1928870 - RNA, 19 nt, Artificial Sequence
  Description of Artificial Sequence: Synthetic oligonucleotide
  Sense strand starting at position 988 of SEQ ID NO: 1879735
aguaguuaagccuauagaa

SEQ ID NO: 1928871 - RNA, 19 nt, Artificial Sequence
  Description of Artificial Sequence: Synthetic oligonucleotide
  Antisense strand to SEQ ID NO: 1928870
uucuauaggcuuaacuacu

SEQ ID NO: 1928872 - RNA, 19 nt, Artificial Sequence
  Description of Artificial Sequence: Synthetic oligonucleotide
  Sense strand starting at position 1054 of SEQ ID NO: 1879735
accuguuaugaagggaauu

SEQ ID NO: 1928873 - RNA, 19 nt, Artificial Sequence
  Description of Artificial Sequence: Synthetic oligonucleotide
  Antisense strand to SEQ ID NO: 1928872
aauucccuucauaacaggu

SEQ ID NO: 1928874 - RNA, 19 nt, Artificial Sequence
  Description of Artificial Sequence: Synthetic oligonucleotide
  Sense strand starting at position 1114 of SEQ ID NO: 1879735
ggagacacugguugacuau

SEQ ID NO: 1928875 - RNA, 19 nt, Artificial Sequence
  Description of Artificial Sequence: Synthetic oligonucleotide
  Antisense strand to SEQ ID NO: 1928874
auagucaaccagugucucc

SEQ ID NO: 1928876 - RNA, 19 nt, Artificial Sequence
  Description of Artificial Sequence: Synthetic oligonucleotide
  Sense strand starting at position 1124 of SEQ ID NO: 1879735
guugacuauugguugagga

SEQ ID NO: 1928877 - RNA, 19 nt, Artificial Sequence
  Description of Artificial Sequence: Synthetic oligonucleotide
  Antisense strand to SEQ ID NO: 1928876
uccucaaccaauagucaac

SEQ ID NO: 1928878 - RNA, 19 nt, Artificial Sequence
  Description of Artificial Sequence: Synthetic oligonucleotide
  Sense strand starting at position 1125 of SEQ ID NO: 1879735
uugacuauugguugaggaa

SEQ ID NO: 1928879 - RNA, 19 nt, Artificial Sequence
  Description of Artificial Sequence: Synthetic oligonucleotide
  Antisense strand to SEQ ID NO: 1928878
uuccucaaccaauagucaa

SEQ ID NO: 1928880 - RNA, 19 nt, Artificial Sequence
  Description of Artificial Sequence: Synthetic oligonucleotide
  Sense strand starting at position 1134 of SEQ ID NO: 1879735
gguugaggaaauuguuaug

SEQ ID NO: 1928881 - RNA, 19 nt, Artificial Sequence
  Description of Artificial Sequence: Synthetic oligonucleotide
  Antisense strand to SEQ ID NO: 1928880
cauaacaauuuccucaacc

SEQ ID NO: 1928882 - RNA, 19 nt, Artificial Sequence
  Description of Artificial Sequence: Synthetic oligonucleotide
  Sense strand starting at position 1341 of SEQ ID NO: 1879735
cugauaaagcucuauguuc

SEQ ID NO: 1928883 - RNA, 19 nt, Artificial Sequence
  Description of Artificial Sequence: Synthetic oligonucleotide
  Antisense strand to SEQ ID NO: 1928882
gaacauagagcuuuaucag

SEQ ID NO: 1928884 - RNA, 19 nt, Artificial Sequence
  Description of Artificial Sequence: Synthetic oligonucleotide
  Sense strand starting at position 1384 of SEQ ID NO: 1879735
uuugacaugugaguaaacu

SEQ ID NO: 1928885 - RNA, 19 nt, Artificial Sequence
  Description of Artificial Sequence: Synthetic oligonucleotide
  Antisense strand to SEQ ID NO: 1928884
aguuuacucacaugucaaa

SEQ ID NO: 1928886 - RNA, 19 nt, Artificial Sequence
  Description of Artificial Sequence: Synthetic oligonucleotide
  Sense strand starting at position 1422 of SEQ ID NO: 1879735
guucuuauccaguaccaca

SEQ ID NO: 1928887 - RNA, 19 nt, Artificial Sequence
  Description of Artificial Sequence: Synthetic oligonucleotide
  Antisense strand to SEQ ID NO: 1928886
ugugguacuggauaagaac

SEQ ID NO: 1928888 - RNA, 19 nt, Artificial Sequence
  Description of Artificial Sequence: Synthetic oligonucleotide
  Sense strand starting at position 1561 of SEQ ID NO: 1879735
ugaucaugacagugaagug

SEQ ID NO: 1928889 - RNA, 19 nt, Artificial Sequence
  Description of Artificial Sequence: Synthetic oligonucleotide
  Antisense strand to SEQ ID NO: 1928888
cacuucacugucaugauca

SEQ ID NO: 1928890 - RNA, 19 nt, Artificial Sequence
  Description of Artificial Sequence: Synthetic oligonucleotide
  Sense strand starting at position 1616 of SEQ ID NO: 1879735
cguggaggagaauggauua

SEQ ID NO: 1928891 - RNA, 19 nt, Artificial Sequence
  Description of Artificial Sequence: Synthetic oligonucleotide
  Antisense strand to SEQ ID NO: 1928890
uaauccauucuccuccacg

SEQ ID NO: 1928892 - RNA, 19 nt, Artificial Sequence
  Description of Artificial Sequence: Synthetic oligonucleotide
  Sense strand starting at position 1740 of SEQ ID NO: 1879735
ggccauagaucauuccuca

SEQ ID NO: 1928893 - RNA, 19 nt, Artificial Sequence
  Description of Artificial Sequence: Synthetic oligonucleotide
  Antisense strand to SEQ ID NO: 1928892
ugaggaaugaucuauggcc

SEQ ID NO: 1928894 - RNA, 19 nt, Artificial Sequence
  Description of Artificial Sequence: Synthetic oligonucleotide
  Sense strand starting at position 1893 of SEQ ID NO: 1879735
acuccugagucuuccagaa

SEQ ID NO: 1928895 - RNA, 19 nt, Artificial Sequence
  Description of Artificial Sequence: Synthetic oligonucleotide
  Antisense strand to SEQ ID NO: 1928894
uucuggaagacucaggagu

SEQ ID NO: 1928896 - RNA, 19 nt, Artificial Sequence
  Description of Artificial Sequence: Synthetic oligonucleotide
  Sense strand starting at position 1955 of SEQ ID NO: 1879735
uuggaaacuuguuugagag

SEQ ID NO: 1928897 - RNA, 19 nt, Artificial Sequence
  Description of Artificial Sequence: Synthetic oligonucleotide
  Antisense strand to SEQ ID NO: 1928896
cucucaaacaaguuuccaa

SEQ ID NO: 1928898 - RNA, 19 nt, Artificial Sequence
  Description of Artificial Sequence: Synthetic oligonucleotide
  Sense strand starting at position 1956 of SEQ ID NO: 1879735
uggaaacuuguuugagagu

SEQ ID NO: 1928899 - RNA, 19 nt, Artificial Sequence
  Description of Artificial Sequence: Synthetic oligonucleotide
  Antisense strand to SEQ ID NO: 1928898
acucucaaacaaguuucca

SEQ ID NO: 1928900 - RNA, 19 nt, Artificial Sequence
  Description of Artificial Sequence: Synthetic oligonucleotide
  Sense strand starting at position 1974 of SEQ ID NO: 1879735
ugccauuaucugggagaga

SEQ ID NO: 1928901 - RNA, 19 nt, Artificial Sequence
  Description of Artificial Sequence: Synthetic oligonucleotide
  Antisense strand to SEQ ID NO: 1928900
ucucucccagauaauggca

SEQ ID NO: 1928902 - RNA, 19 nt, Artificial Sequence
  Description of Artificial Sequence: Synthetic oligonucleotide
  Sense strand starting at position 1990 of SEQ ID NO: 1879735
agaugauucucugaaauuu

SEQ ID NO: 1928903 - RNA, 19 nt, Artificial Sequence
  Description of Artificial Sequence: Synthetic oligonucleotide
  Antisense strand to SEQ ID NO: 1928902
aaauuucagagaaucaucu

SEQ ID NO: 1928904 - RNA, 19 nt, Artificial Sequence
  Description of Artificial Sequence: Synthetic oligonucleotide
  Sense strand starting at position 2361 of SEQ ID NO: 1879735
gggcaaguucaaugggaaa

SEQ ID NO: 1928905 - RNA, 19 nt, Artificial Sequence
  Description of Artificial Sequence: Synthetic oligonucleotide
  Antisense strand to SEQ ID NO: 1928904
uuucccauugaacuugccc

SEQ ID NO: 1928906 - RNA, 19 nt, Artificial Sequence
  Description of Artificial Sequence: Synthetic oligonucleotide
  Sense strand starting at position 2451 of SEQ ID NO: 1879735
cacggauauguuggagaag

SEQ ID NO: 1928907 - RNA, 19 nt, Artificial Sequence
  Description of Artificial Sequence: Synthetic oligonucleotide
  Antisense strand to SEQ ID NO: 1928906
cuucuccaacauauccgug

SEQ ID NO: 1928908 - RNA, 19 nt, Artificial Sequence
  Description of Artificial Sequence: Synthetic oligonucleotide
  Sense strand starting at position 2607 of SEQ ID NO: 1879735
cucauuacagguuaugauu

SEQ ID NO: 1928909 - RNA, 19 nt, Artificial Sequence
  Description of Artificial Sequence: Synthetic oligonucleotide
  Antisense strand to SEQ ID NO: 1928908
aaucauaaccuguaaugag

SEQ ID NO: 1928910 - RNA, 19 nt, Artificial Sequence
  Description of Artificial Sequence: Synthetic oligonucleotide
  Sense strand starting at position 3152 of SEQ ID NO: 1879735
aauagacucuuguugguga

SEQ ID NO: 1928911 - RNA, 19 nt, Artificial Sequence
  Description of Artificial Sequence: Synthetic oligonucleotide
  Antisense strand to SEQ ID NO: 1928910
ucaccaacaagagucuauu

SEQ ID NO: 1928912 - RNA, 19 nt, Artificial Sequence
  Description of Artificial Sequence: Synthetic oligonucleotide
  Sense strand starting at position 3155 of SEQ ID NO: 1879735
agacucuuguuggugaaau

SEQ ID NO: 1928913 - RNA, 19 nt, Artificial Sequence
  Description of Artificial Sequence: Synthetic oligonucleotide
  Antisense strand to SEQ ID NO: 1928912
auuucaccaacaagagucu

SEQ ID NO: 1928914 - RNA, 19 nt, Artificial Sequence
  Description of Artificial Sequence: Synthetic oligonucleotide
  Sense strand starting at position 3157 of SEQ ID NO: 1879735
acucuuguuggugaaauua

SEQ ID NO: 1928915 - RNA, 19 nt, Artificial Sequence
  Description of Artificial Sequence: Synthetic oligonucleotide
  Antisense strand to SEQ ID NO: 1928914
uaauuucaccaacaagagu

SEQ ID NO: 1928916 - RNA, 19 nt, Artificial Sequence
  Description of Artificial Sequence: Synthetic oligonucleotide
  Sense strand starting at position 3165 of SEQ ID NO: 1879735
uggugaaauuacuugguca

SEQ ID NO: 1928917 - RNA, 19 nt, Artificial Sequence
  Description of Artificial Sequence: Synthetic oligonucleotide
  Antisense strand to SEQ ID NO: 1928916
ugaccaaguaauuucacca

SEQ ID NO: 1928918 - RNA, 19 nt, Artificial Sequence
  Description of Artificial Sequence: Synthetic oligonucleotide
  Sense strand starting at position 3166 of SEQ ID NO: 1879735
ggugaaauuacuuggucaa

SEQ ID NO: 1928919 - RNA, 19 nt, Artificial Sequence
  Description of Artificial Sequence: Synthetic oligonucleotide
  Antisense strand to SEQ ID NO: 1928918
uugaccaaguaauuucacc

SEQ ID NO: 1928920 - RNA, 19 nt, Artificial Sequence
  Description of Artificial Sequence: Synthetic oligonucleotide
  Sense strand starting at position 3167 of SEQ ID NO: 1879735
gugaaauuacuuggucaaa

SEQ ID NO: 1928921 - RNA, 19 nt, Artificial Sequence
  Description of Artificial Sequence: Synthetic oligonucleotide
  Antisense strand to SEQ ID NO: 1928920
uuugaccaaguaauuucac

SEQ ID NO: 1928922 - RNA, 19 nt, Artificial Sequence
  Description of Artificial Sequence: Synthetic oligonucleotide
  Sense strand starting at position 3443 of SEQ ID NO: 1879735
agggcuaguggcuauaaua

SEQ ID NO: 1928923 - RNA, 19 nt, Artificial Sequence
  Description of Artificial Sequence: Synthetic oligonucleotide
  Antisense strand to SEQ ID NO: 1928922
uauuauagccacuagcccu

SEQ ID NO: 1928924 - RNA, 19 nt, Artificial Sequence
  Description of Artificial Sequence: Synthetic oligonucleotide
  Sense strand starting at position 3683 of SEQ ID NO: 1879735
ugcaaaguuaugggagaag

SEQ ID NO: 1928925 - RNA, 19 nt, Artificial Sequence
  Description of Artificial Sequence: Synthetic oligonucleotide
  Antisense strand to SEQ ID NO: 1928924
cuucucccauaacuuugca

SEQ ID NO: 1928926 - RNA, 19 nt, Artificial Sequence
  Description of Artificial Sequence: Synthetic oligonucleotide
  Sense strand starting at position 3702 of SEQ ID NO: 1879735
cagugaagucagggaacua

SEQ ID NO: 1928927 - RNA, 19 nt, Artificial Sequence
  Description of Artificial Sequence: Synthetic oligonucleotide
  Antisense strand to SEQ ID NO: 1928926
uaguucccugacuucacug

SEQ ID NO: 1928928 - RNA, 19 nt, Artificial Sequence
  Description of Artificial Sequence: Synthetic oligonucleotide
  Sense strand starting at position 3772 of SEQ ID NO: 1879735
uauugauaaggucagcacu

SEQ ID NO: 1928929 - RNA, 19 nt, Artificial Sequence
  Description of Artificial Sequence: Synthetic oligonucleotide
  Antisense strand to SEQ ID NO: 1928928
agugcugaccuuaucaaua

SEQ ID NO: 1928930 - RNA, 19 nt, Artificial Sequence
  Description of Artificial Sequence: Synthetic oligonucleotide
  Sense strand starting at position 3955 of SEQ ID NO: 1879735
cuguguuaucuguuggccu

SEQ ID NO: 1928931 - RNA, 19 nt, Artificial Sequence
  Description of Artificial Sequence: Synthetic oligonucleotide
  Antisense strand to SEQ ID NO: 1928930
aggccaacagauaacacag

SEQ ID NO: 1928932 - RNA, 19 nt, Artificial Sequence
  Description of Artificial Sequence: Synthetic oligonucleotide
  Sense strand starting at position 106 of SEQ ID NO: 1879736
gcguuuaauuucuguguga

SEQ ID NO: 1928933 - RNA, 19 nt, Artificial Sequence
  Description of Artificial Sequence: Synthetic oligonucleotide
  Antisense strand to SEQ ID NO: 1928932
ucacacagaaauuaaacgc

SEQ ID NO: 1928934 - RNA, 19 nt, Artificial Sequence
  Description of Artificial Sequence: Synthetic oligonucleotide
  Sense strand starting at position 107 of SEQ ID NO: 1879736
cguuuaauuucugugugaa

SEQ ID NO: 1928935 - RNA, 19 nt, Artificial Sequence
  Description of Artificial Sequence: Synthetic oligonucleotide
  Antisense strand to SEQ ID NO: 1928934
uucacacagaaauuaaacg

SEQ ID NO: 1928936 - RNA, 19 nt, Artificial Sequence
  Description of Artificial Sequence: Synthetic oligonucleotide
  Sense strand starting at position 996 of SEQ ID NO: 1879736
gaccucagguaucgcuaaa

SEQ ID NO: 1928937 - RNA, 19 nt, Artificial Sequence
  Description of Artificial Sequence: Synthetic oligonucleotide
  Antisense strand to SEQ ID NO: 1928936
uuuagcgauaccugagguc

SEQ ID NO: 1928938 - RNA, 19 nt, Artificial Sequence
  Description of Artificial Sequence: Synthetic oligonucleotide
  Sense strand starting at position 1277 of SEQ ID NO: 1879736
cacggaugugcuugaauau

SEQ ID NO: 1928939 - RNA, 19 nt, Artificial Sequence
  Description of Artificial Sequence: Synthetic oligonucleotide
  Antisense strand to SEQ ID NO: 1928938
auauucaagcacauccgug

SEQ ID NO: 1928940 - RNA, 19 nt, Artificial Sequence
  Description of Artificial Sequence: Synthetic oligonucleotide
  Sense strand starting at position 1278 of SEQ ID NO: 1879736
acggaugugcuugaauaug

SEQ ID NO: 1928941 - RNA, 19 nt, Artificial Sequence
  Description of Artificial Sequence: Synthetic oligonucleotide
  Antisense strand to SEQ ID NO: 1928940
cauauucaagcacauccgu

SEQ ID NO: 1928942 - RNA, 19 nt, Artificial Sequence
  Description of Artificial Sequence: Synthetic oligonucleotide
  Sense strand starting at position 1469 of SEQ ID NO: 1879736
gagucagaguccuguagga

SEQ ID NO: 1928943 - RNA, 19 nt, Artificial Sequence
  Description of Artificial Sequence: Synthetic oligonucleotide
  Antisense strand to SEQ ID NO: 1928942
uccuacaggacucugacuc

SEQ ID NO: 1928944 - RNA, 19 nt, Artificial Sequence
  Description of Artificial Sequence: Synthetic oligonucleotide
  Sense strand starting at position 1580 of SEQ ID NO: 1879736
cagaaugcagcuuggagaa

SEQ ID NO: 1928945 - RNA, 19 nt, Artificial Sequence
  Description of Artificial Sequence: Synthetic oligonucleotide
  Antisense strand to SEQ ID NO: 1928944
uucuccaagcugcauucug

SEQ ID NO: 1928946 - RNA, 19 nt, Artificial Sequence
  Description of Artificial Sequence: Synthetic oligonucleotide
  Sense strand starting at position 1653 of SEQ ID NO: 1879736
ggaugcaucugaggagaac

SEQ ID NO: 1928947 - RNA, 19 nt, Artificial Sequence
  Description of Artificial Sequence: Synthetic oligonucleotide
  Antisense strand to SEQ ID NO: 1928946
guucuccucagaugcaucc

SEQ ID NO: 1928948 - RNA, 19 nt, Artificial Sequence
  Description of Artificial Sequence: Synthetic oligonucleotide
  Sense strand starting at position 1720 of SEQ ID NO: 1879736
uagaaugcaucugaagaga

SEQ ID NO: 1928949 - RNA, 19 nt, Artificial Sequence
  Description of Artificial Sequence: Synthetic oligonucleotide
  Antisense strand to SEQ ID NO: 1928948
ucucuucagaugcauucua

SEQ ID NO: 1928950 - RNA, 19 nt, Artificial Sequence
  Description of Artificial Sequence: Synthetic oligonucleotide
  Sense strand starting at position 1789 of SEQ ID NO: 1879736
aaggaugcaucugaggaga

SEQ ID NO: 1928951 - RNA, 19 nt, Artificial Sequence
  Description of Artificial Sequence: Synthetic oligonucleotide
  Antisense strand to SEQ ID NO: 1928950
ucuccucagaugcauccuu

SEQ ID NO: 1928952 - RNA, 19 nt, Artificial Sequence
  Description of Artificial Sequence: Synthetic oligonucleotide
  Sense strand starting at position 1791 of SEQ ID NO: 1879736
ggaugcaucugaggagacu

SEQ ID NO: 1928953 - RNA, 19 nt, Artificial Sequence
  Description of Artificial Sequence: Synthetic oligonucleotide
  Antisense strand to SEQ ID NO: 1928952
agucuccucagaugcaucc

SEQ ID NO: 1928954 - RNA, 19 nt, Artificial Sequence
  Description of Artificial Sequence: Synthetic oligonucleotide
  Sense strand starting at position 2306 of SEQ ID NO: 1879736
gagguauccgugccugugu

SEQ ID NO: 1928955 - RNA, 19 nt, Artificial Sequence
  Description of Artificial Sequence: Synthetic oligonucleotide
  Antisense strand to SEQ ID NO: 1928954
acacaggcacggauaccuc

SEQ ID NO: 1928956 - RNA, 19 nt, Artificial Sequence
  Description of Artificial Sequence: Synthetic oligonucleotide
  Sense strand starting at position 2317 of SEQ ID NO: 1879736
gccugugugcucuuuccua

SEQ ID NO: 1928957 - RNA, 19 nt, Artificial Sequence
  Description of Artificial Sequence: Synthetic oligonucleotide
  Antisense strand to SEQ ID NO: 1928956
uaggaaagagcacacaggc

SEQ ID NO: 1928958 - RNA, 19 nt, Artificial Sequence
  Description of Artificial Sequence: Synthetic oligonucleotide
  Sense strand starting at position 2353 of SEQ ID NO: 1879736
acgcuucuuugauggccaa

SEQ ID NO: 1928959 - RNA, 19 nt, Artificial Sequence
  Description of Artificial Sequence: Synthetic oligonucleotide
  Antisense strand to SEQ ID NO: 1928958
uuggccaucaaagaagcgu

SEQ ID NO: 1928960 - RNA, 19 nt, Artificial Sequence
  Description of Artificial Sequence: Synthetic oligonucleotide
  Sense strand starting at position 2354 of SEQ ID NO: 1879736
cgcuucuuugauggccaaa

SEQ ID NO: 1928961 - RNA, 19 nt, Artificial Sequence
  Description of Artificial Sequence: Synthetic oligonucleotide
  Antisense strand to SEQ ID NO: 1928960
uuuggccaucaaagaagcg

SEQ ID NO: 1928962 - RNA, 19 nt, Artificial Sequence
  Description of Artificial Sequence: Synthetic oligonucleotide
  Sense strand starting at position 2934 of SEQ ID NO: 1879736
cuuccacgaucucucgaaa

SEQ ID NO: 1928963 - RNA, 19 nt, Artificial Sequence
  Description of Artificial Sequence: Synthetic oligonucleotide
  Antisense strand to SEQ ID NO: 1928962
uuucgagagaucguggaag

SEQ ID NO: 1928964 - RNA, 19 nt, Artificial Sequence
  Description of Artificial Sequence: Synthetic oligonucleotide
  Sense strand starting at position 2937 of SEQ ID NO: 1879736
ccacgaucucucgaaacaa

SEQ ID NO: 1928965 - RNA, 19 nt, Artificial Sequence
  Description of Artificial Sequence: Synthetic oligonucleotide
  Antisense strand to SEQ ID NO: 1928964
uuguuucgagagaucgugg

SEQ ID NO: 1928966 - RNA, 19 nt, Artificial Sequence
  Description of Artificial Sequence: Synthetic oligonucleotide
  Sense strand starting at position 3014 of SEQ ID NO: 1879736
gccuuucuuccugaugcca

SEQ ID NO: 1928967 - RNA, 19 nt, Artificial Sequence
  Description of Artificial Sequence: Synthetic oligonucleotide
  Antisense strand to SEQ ID NO: 1928966
uggcaucaggaagaaaggc

SEQ ID NO: 1928968 - RNA, 19 nt, Artificial Sequence
  Description of Artificial Sequence: Synthetic oligonucleotide
  Sense strand starting at position 3423 of SEQ ID NO: 1879736
gggucugauguuggcacua

SEQ ID NO: 1928969 - RNA, 19 nt, Artificial Sequence
  Description of Artificial Sequence: Synthetic oligonucleotide
  Antisense strand to SEQ ID NO: 1928968
uagugccaacaucagaccc

SEQ ID NO: 1928970 - RNA, 19 nt, Artificial Sequence
  Description of Artificial Sequence: Synthetic oligonucleotide
  Sense strand starting at position 3425 of SEQ ID NO: 1879736
gucugauguuggcacuaau

SEQ ID NO: 1928971 - RNA, 19 nt, Artificial Sequence
  Description of Artificial Sequence: Synthetic oligonucleotide
  Antisense strand to SEQ ID NO: 1928970
auuagugccaacaucagac

SEQ ID NO: 1928972 - RNA, 19 nt, Artificial Sequence
  Description of Artificial Sequence: Synthetic oligonucleotide
  Sense strand starting at position 3433 of SEQ ID NO: 1879736
uuggcacuaaugugagaaa

SEQ ID NO: 1928973 - RNA, 19 nt, Artificial Sequence
  Description of Artificial Sequence: Synthetic oligonucleotide
  Antisense strand to SEQ ID NO: 1928972
uuucucacauuagugccaa

SEQ ID NO: 1928974 - RNA, 19 nt, Artificial Sequence
  Description of Artificial Sequence: Synthetic oligonucleotide
  Sense strand starting at position 3436 of SEQ ID NO: 1879736
gcacuaaugugagaaacac

SEQ ID NO: 1928975 - RNA, 19 nt, Artificial Sequence
  Description of Artificial Sequence: Synthetic oligonucleotide
  Antisense strand to SEQ ID NO: 1928974
guguuucucacauuagugc

SEQ ID NO: 1928976 - RNA, 19 nt, Artificial Sequence
  Description of Artificial Sequence: Synthetic oligonucleotide
  Sense strand starting at position 3489 of SEQ ID NO: 1879736
gcagccuccucuugagagu

SEQ ID NO: 1928977 - RNA, 19 nt, Artificial Sequence
  Description of Artificial Sequence: Synthetic oligonucleotide
  Antisense strand to SEQ ID NO: 1928976
acucucaagaggaggcugc

SEQ ID NO: 1928978 - RNA, 19 nt, Artificial Sequence
  Description of Artificial Sequence: Synthetic oligonucleotide
  Sense strand starting at position 3661 of SEQ ID NO: 1879736
uucucaguccaaggagaaa

SEQ ID NO: 1928979 - RNA, 19 nt, Artificial Sequence
  Description of Artificial Sequence: Synthetic oligonucleotide
  Antisense strand to SEQ ID NO: 1928978
uuucuccuuggacugagaa

SEQ ID NO: 1928980 - RNA, 19 nt, Artificial Sequence
  Description of Artificial Sequence: Synthetic oligonucleotide
  Sense strand starting at position 3940 of SEQ ID NO: 1879736
cugcacugccggcagaaau

SEQ ID NO: 1928981 - RNA, 19 nt, Artificial Sequence
  Description of Artificial Sequence: Synthetic oligonucleotide
  Antisense strand to SEQ ID NO: 1928980
auuucugccggcagugcag

SEQ ID NO: 1928982 - RNA, 19 nt, Artificial Sequence
  Description of Artificial Sequence: Synthetic oligonucleotide
  Sense strand starting at position 39 of SEQ ID NO: 1879737
gcaucugcauuuguuaaau

SEQ ID NO: 1928983 - RNA, 19 nt, Artificial Sequence
  Description of Artificial Sequence: Synthetic oligonucleotide
  Antisense strand to SEQ ID NO: 1928982
auuuaacaaaugcagaugc

SEQ ID NO: 1928984 - RNA, 19 nt, Artificial Sequence
  Description of Artificial Sequence: Synthetic oligonucleotide
  Sense strand starting at position 188 of SEQ ID NO: 1879737
uguuaagucuuuguauuuc

SEQ ID NO: 1928985 - RNA, 19 nt, Artificial Sequence
  Description of Artificial Sequence: Synthetic oligonucleotide
  Antisense strand to SEQ ID NO: 1928984
gaaauacaaagacuuaaca

SEQ ID NO: 1928986 - RNA, 19 nt, Artificial Sequence
  Description of Artificial Sequence: Synthetic oligonucleotide
  Sense strand starting at position 359 of SEQ ID NO: 1879737
guuuguccuucccuuaaca

SEQ ID NO: 1928987 - RNA, 19 nt, Artificial Sequence
  Description of Artificial Sequence: Synthetic oligonucleotide
  Antisense strand to SEQ ID NO: 1928986
uguuaagggaaggacaaac

SEQ ID NO: 1928988 - RNA, 19 nt, Artificial Sequence
  Description of Artificial Sequence: Synthetic oligonucleotide
  Sense strand starting at position 428 of SEQ ID NO: 1879737
cuuccaggucauugaggau

SEQ ID NO: 1928989 - RNA, 19 nt, Artificial Sequence
  Description of Artificial Sequence: Synthetic oligonucleotide
  Antisense strand to SEQ ID NO: 1928988
auccucaaugaccuggaag

SEQ ID NO: 1928990 - RNA, 19 nt, Artificial Sequence
  Description of Artificial Sequence: Synthetic oligonucleotide
  Sense strand starting at position 481 of SEQ ID NO: 1879737
gaagauaacuggucaucca

SEQ ID NO: 1928991 - RNA, 19 nt, Artificial Sequence
  Description of Artificial Sequence: Synthetic oligonucleotide
  Antisense strand to SEQ ID NO: 1928990
uggaugaccaguuaucuuc

SEQ ID NO: 1928992 - RNA, 19 nt, Artificial Sequence
  Description of Artificial Sequence: Synthetic oligonucleotide
  Sense strand starting at position 611 of SEQ ID NO: 1879737
ccguacuaacaguagagaa

SEQ ID NO: 1928993 - RNA, 19 nt, Artificial Sequence
  Description of Artificial Sequence: Synthetic oligonucleotide
  Antisense strand to SEQ ID NO: 1928992
uucucuacuguuaguacgg

SEQ ID NO: 1928994 - RNA, 19 nt, Artificial Sequence
  Description of Artificial Sequence: Synthetic oligonucleotide
  Sense strand starting at position 683 of SEQ ID NO: 1879737
auaacauucgggcaacacu

SEQ ID NO: 1928995 - RNA, 19 nt, Artificial Sequence
  Description of Artificial Sequence: Synthetic oligonucleotide
  Antisense strand to SEQ ID NO: 1928994
aguguugcccgaauguuau

SEQ ID NO: 1928996 - RNA, 19 nt, Artificial Sequence
  Description of Artificial Sequence: Synthetic oligonucleotide
  Sense strand starting at position 985 of SEQ ID NO: 1879737
cuuaauagugcaugaacuu

SEQ ID NO: 1928997 - RNA, 19 nt, Artificial Sequence
  Description of Artificial Sequence: Synthetic oligonucleotide
  Antisense strand to SEQ ID NO: 1928996
aaguucaugcacuauuaag

SEQ ID NO: 1928998 - RNA, 19 nt, Artificial Sequence
  Description of Artificial Sequence: Synthetic oligonucleotide
  Sense strand starting at position 1105 of SEQ ID NO: 1879737
acauuaaauuaaggagaag

SEQ ID NO: 1928999 - RNA, 19 nt, Artificial Sequence
  Description of Artificial Sequence: Synthetic oligonucleotide
  Antisense strand to SEQ ID NO: 1928998
cuucuccuuaauuuaaugu

SEQ ID NO: 1929000 - RNA, 19 nt, Artificial Sequence
  Description of Artificial Sequence: Synthetic oligonucleotide
  Sense strand starting at position 1170 of SEQ ID NO: 1879737
uaaggugugaguugccuau

SEQ ID NO: 1929001 - RNA, 19 nt, Artificial Sequence
  Description of Artificial Sequence: Synthetic oligonucleotide
  Antisense strand to SEQ ID NO: 1929000
auaggcaacucacaccuua

SEQ ID NO: 1929002 - RNA, 19 nt, Artificial Sequence
  Description of Artificial Sequence: Synthetic oligonucleotide
  Sense strand starting at position 1174 of SEQ ID NO: 1879737
gugugaguugccuauggua

SEQ ID NO: 1929003 - RNA, 19 nt, Artificial Sequence
  Description of Artificial Sequence: Synthetic oligonucleotide
  Antisense strand to SEQ ID NO: 1929002
uaccauaggcaacucacac

SEQ ID NO: 1929004 - RNA, 19 nt, Artificial Sequence
  Description of Artificial Sequence: Synthetic oligonucleotide
  Sense strand starting at position 1176 of SEQ ID NO: 1879737
gugaguugccuaugguaca

SEQ ID NO: 1929005 - RNA, 19 nt, Artificial Sequence
  Description of Artificial Sequence: Synthetic oligonucleotide
  Antisense strand to SEQ ID NO: 1929004
uguaccauaggcaacucac

SEQ ID NO: 1929006 - RNA, 19 nt, Artificial Sequence
  Description of Artificial Sequence: Synthetic oligonucleotide
  Sense strand starting at position 1394 of SEQ ID NO: 1879737
ugagguaauccaugcuauc

SEQ ID NO: 1929007 - RNA, 19 nt, Artificial Sequence
  Description of Artificial Sequence: Synthetic oligonucleotide
  Antisense strand to SEQ ID NO: 1929006
gauagcauggauuaccuca

SEQ ID NO: 1929008 - RNA, 19 nt, Artificial Sequence
  Description of Artificial Sequence: Synthetic oligonucleotide
  Sense strand starting at position 1411 of SEQ ID NO: 1879737
ucucauguuucuguaaugu

SEQ ID NO: 1929009 - RNA, 19 nt, Artificial Sequence
  Description of Artificial Sequence: Synthetic oligonucleotide
  Antisense strand to SEQ ID NO: 1929008
acauuacagaaacaugaga

SEQ ID NO: 1929010 - RNA, 19 nt, Artificial Sequence
  Description of Artificial Sequence: Synthetic oligonucleotide
  Sense strand starting at position 1420 of SEQ ID NO: 1879737
ucuguaaugugucccauuu

SEQ ID NO: 1929011 - RNA, 19 nt, Artificial Sequence
  Description of Artificial Sequence: Synthetic oligonucleotide
  Antisense strand to SEQ ID NO: 1929010
aaaugggacacauuacaga

SEQ ID NO: 1929012 - RNA, 19 nt, Artificial Sequence
  Description of Artificial Sequence: Synthetic oligonucleotide
  Sense strand starting at position 1468 of SEQ ID NO: 1879737
acacauucugccgacaagu

SEQ ID NO: 1929013 - RNA, 19 nt, Artificial Sequence
  Description of Artificial Sequence: Synthetic oligonucleotide
  Antisense strand to SEQ ID NO: 1929012
acuugucggcagaaugugu

SEQ ID NO: 1929014 - RNA, 19 nt, Artificial Sequence
  Description of Artificial Sequence: Synthetic oligonucleotide
  Sense strand starting at position 1470 of SEQ ID NO: 1879737
acauucugccgacaaguca

SEQ ID NO: 1929015 - RNA, 19 nt, Artificial Sequence
  Description of Artificial Sequence: Synthetic oligonucleotide
  Antisense strand to SEQ ID NO: 1929014
ugacuugucggcagaaugu

SEQ ID NO: 1929016 - RNA, 19 nt, Artificial Sequence
  Description of Artificial Sequence: Synthetic oligonucleotide
  Sense strand starting at position 1571 of SEQ ID NO: 1879737
aagcguguugugucuacaa

SEQ ID NO: 1929017 - RNA, 19 nt, Artificial Sequence
  Description of Artificial Sequence: Synthetic oligonucleotide
  Antisense strand to SEQ ID NO: 1929016
uuguagacacaacacgcuu

SEQ ID NO: 1929018 - RNA, 19 nt, Artificial Sequence
  Description of Artificial Sequence: Synthetic oligonucleotide
  Sense strand starting at position 1991 of SEQ ID NO: 1879737
guagaaagcuaaguagaaa

SEQ ID NO: 1929019 - RNA, 19 nt, Artificial Sequence
  Description of Artificial Sequence: Synthetic oligonucleotide
  Antisense strand to SEQ ID NO: 1929018
uuucuacuuagcuuucuac

SEQ ID NO: 1929020 - RNA, 19 nt, Artificial Sequence
  Description of Artificial Sequence: Synthetic oligonucleotide
  Sense strand starting at position 2085 of SEQ ID NO: 1879737
acuguuauugugcagccaa

SEQ ID NO: 1929021 - RNA, 19 nt, Artificial Sequence
  Description of Artificial Sequence: Synthetic oligonucleotide
  Antisense strand to SEQ ID NO: 1929020
uuggcugcacaauaacagu

SEQ ID NO: 1929022 - RNA, 19 nt, Artificial Sequence
  Description of Artificial Sequence: Synthetic oligonucleotide
  Sense strand starting at position 2117 of SEQ ID NO: 1879737
ggguuaaucgcaggaucag

SEQ ID NO: 1929023 - RNA, 19 nt, Artificial Sequence
  Description of Artificial Sequence: Synthetic oligonucleotide
  Antisense strand to SEQ ID NO: 1929022
cugauccugcgauuaaccc

SEQ ID NO: 1929024 - RNA, 19 nt, Artificial Sequence
  Description of Artificial Sequence: Synthetic oligonucleotide
  Sense strand starting at position 2220 of SEQ ID NO: 1879737
acacguuuccgucuugcua

SEQ ID NO: 1929025 - RNA, 19 nt, Artificial Sequence
  Description of Artificial Sequence: Synthetic oligonucleotide
  Antisense strand to SEQ ID NO: 1929024
uagcaagacggaaacgugu

SEQ ID NO: 1929026 - RNA, 19 nt, Artificial Sequence
  Description of Artificial Sequence: Synthetic oligonucleotide
  Sense strand starting at position 2940 of SEQ ID NO: 1879737
cgaugaccucuuuggcaga

SEQ ID NO: 1929027 - RNA, 19 nt, Artificial Sequence
  Description of Artificial Sequence: Synthetic oligonucleotide
  Antisense strand to SEQ ID NO: 1929026
ucugccaaagaggucaucg

SEQ ID NO: 1929028 - RNA, 19 nt, Artificial Sequence
  Description of Artificial Sequence: Synthetic oligonucleotide
  Sense strand starting at position 2984 of SEQ ID NO: 1879737
caaauaaugguuuguaaug

SEQ ID NO: 1929029 - RNA, 19 nt, Artificial Sequence
  Description of Artificial Sequence: Synthetic oligonucleotide
  Antisense strand to SEQ ID NO: 1929028
cauuacaaaccauuauuug

SEQ ID NO: 1929030 - RNA, 19 nt, Artificial Sequence
  Description of Artificial Sequence: Synthetic oligonucleotide
  Sense strand starting at position 2993 of SEQ ID NO: 1879737
guuuguaaugcgcagacua

SEQ ID NO: 1929031 - RNA, 19 nt, Artificial Sequence
  Description of Artificial Sequence: Synthetic oligonucleotide
  Antisense strand to SEQ ID NO: 1929030
uagucugcgcauuacaaac

SEQ ID NO: 1929032 - RNA, 19 nt, Artificial Sequence
  Description of Artificial Sequence: Synthetic oligonucleotide
  Sense strand starting at position 3040 of SEQ ID NO: 1879737
uucucuucccaucguuauu

SEQ ID NO: 1929033 - RNA, 19 nt, Artificial Sequence
  Description of Artificial Sequence: Synthetic oligonucleotide
  Antisense strand to SEQ ID NO: 1929032
aauaacgaugggaagagaa

SEQ ID NO: 1929034 - RNA, 19 nt, Artificial Sequence
  Description of Artificial Sequence: Synthetic oligonucleotide
  Sense strand starting at position 3049 of SEQ ID NO: 1879737
caucguuauucuucugaug

SEQ ID NO: 1929035 - RNA, 19 nt, Artificial Sequence
  Description of Artificial Sequence: Synthetic oligonucleotide
  Antisense strand to SEQ ID NO: 1929034
caucagaagaauaacgaug

SEQ ID NO: 1929036 - RNA, 19 nt, Artificial Sequence
  Description of Artificial Sequence: Synthetic oligonucleotide
  Sense strand starting at position 3128 of SEQ ID NO: 1879737
uagagaugcugcucagaug

SEQ ID NO: 1929037 - RNA, 19 nt, Artificial Sequence
  Description of Artificial Sequence: Synthetic oligonucleotide
  Antisense strand to SEQ ID NO: 1929036
caucugagcagcaucucua

SEQ ID NO: 1929038 - RNA, 19 nt, Artificial Sequence
  Description of Artificial Sequence: Synthetic oligonucleotide
  Sense strand starting at position 3129 of SEQ ID NO: 1879737
agagaugcugcucagauga

SEQ ID NO: 1929039 - RNA, 19 nt, Artificial Sequence
  Description of Artificial Sequence: Synthetic oligonucleotide
  Antisense strand to SEQ ID NO: 1929038
ucaucugagcagcaucucu

SEQ ID NO: 1929040 - RNA, 19 nt, Artificial Sequence
  Description of Artificial Sequence: Synthetic oligonucleotide
  Sense strand starting at position 3180 of SEQ ID NO: 1879737
uuaguagugcuauaaagac

SEQ ID NO: 1929041 - RNA, 19 nt, Artificial Sequence
  Description of Artificial Sequence: Synthetic oligonucleotide
  Antisense strand to SEQ ID NO: 1929040
gucuuuauagcacuacuaa

SEQ ID NO: 1929042 - RNA, 19 nt, Artificial Sequence
  Description of Artificial Sequence: Synthetic oligonucleotide
  Sense strand starting at position 3192 of SEQ ID NO: 1879737
uaaagacggugguccaauu

SEQ ID NO: 1929043 - RNA, 19 nt, Artificial Sequence
  Description of Artificial Sequence: Synthetic oligonucleotide
  Antisense strand to SEQ ID NO: 1929042
aauuggaccaccgucuuua

SEQ ID NO: 1929044 - RNA, 19 nt, Artificial Sequence
  Description of Artificial Sequence: Synthetic oligonucleotide
  Sense strand starting at position 3357 of SEQ ID NO: 1879737
cuuuauauucugcaaagag

SEQ ID NO: 1929045 - RNA, 19 nt, Artificial Sequence
  Description of Artificial Sequence: Synthetic oligonucleotide
  Antisense strand to SEQ ID NO: 1929044
cucuuugcagaauauaaag

SEQ ID NO: 1929046 - RNA, 19 nt, Artificial Sequence
  Description of Artificial Sequence: Synthetic oligonucleotide
  Sense strand starting at position 3385 of SEQ ID NO: 1879737
ugguccaaauuuggagaaa

SEQ ID NO: 1929047 - RNA, 19 nt, Artificial Sequence
  Description of Artificial Sequence: Synthetic oligonucleotide
  Antisense strand to SEQ ID NO: 1929046
uuucuccaaauuuggacca

SEQ ID NO: 1929048 - RNA, 19 nt, Artificial Sequence
  Description of Artificial Sequence: Synthetic oligonucleotide
  Sense strand starting at position 3426 of SEQ ID NO: 1879737
ugaggugcuuaacugauua

SEQ ID NO: 1929049 - RNA, 19 nt, Artificial Sequence
  Description of Artificial Sequence: Synthetic oligonucleotide
  Antisense strand to SEQ ID NO: 1929048
uaaucaguuaagcaccuca

SEQ ID NO: 1929050 - RNA, 19 nt, Artificial Sequence
  Description of Artificial Sequence: Synthetic oligonucleotide
  Sense strand starting at position 3430 of SEQ ID NO: 1879737
gugcuuaacugauuacuuu

SEQ ID NO: 1929051 - RNA, 19 nt, Artificial Sequence
  Description of Artificial Sequence: Synthetic oligonucleotide
  Antisense strand to SEQ ID NO: 1929050
aaaguaaucaguuaagcac

SEQ ID NO: 1929052 - RNA, 19 nt, Artificial Sequence
  Description of Artificial Sequence: Synthetic oligonucleotide
  Sense strand starting at position 3652 of SEQ ID NO: 1879737
gaaaguuguuuacccagag

SEQ ID NO: 1929053 - RNA, 19 nt, Artificial Sequence
  Description of Artificial Sequence: Synthetic oligonucleotide
  Antisense strand to SEQ ID NO: 1929052
cucuggguaaacaacuuuc

SEQ ID NO: 1929054 - RNA, 19 nt, Artificial Sequence
  Description of Artificial Sequence: Synthetic oligonucleotide
  Sense strand starting at position 3712 of SEQ ID NO: 1879737
agucuuccugagcauucua

SEQ ID NO: 1929055 - RNA, 19 nt, Artificial Sequence
  Description of Artificial Sequence: Synthetic oligonucleotide
  Antisense strand to SEQ ID NO: 1929054
uagaaugcucaggaagacu

SEQ ID NO: 1929056 - RNA, 19 nt, Artificial Sequence
  Description of Artificial Sequence: Synthetic oligonucleotide
  Sense strand starting at position 3723 of SEQ ID NO: 1879737
gcauucuaggaccagaguu

SEQ ID NO: 1929057 - RNA, 19 nt, Artificial Sequence
  Description of Artificial Sequence: Synthetic oligonucleotide
  Antisense strand to SEQ ID NO: 1929056
aacucugguccuagaaugc

SEQ ID NO: 1929058 - RNA, 19 nt, Artificial Sequence
  Description of Artificial Sequence: Synthetic oligonucleotide
  Sense strand starting at position 3778 of SEQ ID NO: 1879737
gggaguucugauuggacag

SEQ ID NO: 1929059 - RNA, 19 nt, Artificial Sequence
  Description of Artificial Sequence: Synthetic oligonucleotide
  Antisense strand to SEQ ID NO: 1929058
cuguccaaucagaacuccc

SEQ ID NO: 1929060 - RNA, 19 nt, Artificial Sequence
  Description of Artificial Sequence: Synthetic oligonucleotide
  Sense strand starting at position 3784 of SEQ ID NO: 1879737
ucugauuggacaggucaga

SEQ ID NO: 1929061 - RNA, 19 nt, Artificial Sequence
  Description of Artificial Sequence: Synthetic oligonucleotide
  Antisense strand to SEQ ID NO: 1929060
ucugaccuguccaaucaga

SEQ ID NO: 1929062 - RNA, 19 nt, Artificial Sequence
  Description of Artificial Sequence: Synthetic oligonucleotide
  Sense strand starting at position 91 of SEQ ID NO: 1879738
ccauguacucuguagcaau

SEQ ID NO: 1929063 - RNA, 19 nt, Artificial Sequence
  Description of Artificial Sequence: Synthetic oligonucleotide
  Antisense strand to SEQ ID NO: 1929062
auugcuacagaguacaugg

SEQ ID NO: 1929064 - RNA, 19 nt, Artificial Sequence
  Description of Artificial Sequence: Synthetic oligonucleotide
  Sense strand starting at position 133 of SEQ ID NO: 1879738
aguaauuacuaucccgauu

SEQ ID NO: 1929065 - RNA, 19 nt, Artificial Sequence
  Description of Artificial Sequence: Synthetic oligonucleotide
  Antisense strand to SEQ ID NO: 1929064
aaucgggauaguaauuacu

SEQ ID NO: 1929066 - RNA, 19 nt, Artificial Sequence
  Description of Artificial Sequence: Synthetic oligonucleotide
  Sense strand starting at position 147 of SEQ ID NO: 1879738
cgauucuuacaguaauuac

SEQ ID NO: 1929067 - RNA, 19 nt, Artificial Sequence
  Description of Artificial Sequence: Synthetic oligonucleotide
  Antisense strand to SEQ ID NO: 1929066
guaauuacuguaagaaucg

SEQ ID NO: 1929068 - RNA, 19 nt, Artificial Sequence
  Description of Artificial Sequence: Synthetic oligonucleotide
  Sense strand starting at position 157 of SEQ ID NO: 1879738
aguaauuacucucuuggaa

SEQ ID NO: 1929069 - RNA, 19 nt, Artificial Sequence
  Description of Artificial Sequence: Synthetic oligonucleotide
  Antisense strand to SEQ ID NO: 1929068
uuccaagagaguaauuacu

SEQ ID NO: 1929070 - RNA, 19 nt, Artificial Sequence
  Description of Artificial Sequence: Synthetic oligonucleotide
  Sense strand starting at position 316 of SEQ ID NO: 1879738
uaagaugugucuguugaag

SEQ ID NO: 1929071 - RNA, 19 nt, Artificial Sequence
  Description of Artificial Sequence: Synthetic oligonucleotide
  Antisense strand to SEQ ID NO: 1929070
cuucaacagacacaucuua

SEQ ID NO: 1929072 - RNA, 19 nt, Artificial Sequence
  Description of Artificial Sequence: Synthetic oligonucleotide
  Sense strand starting at position 322 of SEQ ID NO: 1879738
gugucuguugaagaaccaa

SEQ ID NO: 1929073 - RNA, 19 nt, Artificial Sequence
  Description of Artificial Sequence: Synthetic oligonucleotide
  Antisense strand to SEQ ID NO: 1929072
uugguucuucaacagacac

SEQ ID NO: 1929074 - RNA, 19 nt, Artificial Sequence
  Description of Artificial Sequence: Synthetic oligonucleotide
  Sense strand starting at position 408 of SEQ ID NO: 1879738
acuucuguucucuguauuu

SEQ ID NO: 1929075 - RNA, 19 nt, Artificial Sequence
  Description of Artificial Sequence: Synthetic oligonucleotide
  Antisense strand to SEQ ID NO: 1929074
aaauacagagaacagaagu

SEQ ID NO: 1929076 - RNA, 19 nt, Artificial Sequence
  Description of Artificial Sequence: Synthetic oligonucleotide
  Sense strand starting at position 556 of SEQ ID NO: 1879738
gacuacauccagcgauucu

SEQ ID NO: 1929077 - RNA, 19 nt, Artificial Sequence
  Description of Artificial Sequence: Synthetic oligonucleotide
  Antisense strand to SEQ ID NO: 1929076
agaaucgcuggauguaguc

SEQ ID NO: 1929078 - RNA, 19 nt, Artificial Sequence
  Description of Artificial Sequence: Synthetic oligonucleotide
  Sense strand starting at position 598 of SEQ ID NO: 1879738
cuuuacgcucuugaggauu

SEQ ID NO: 1929079 - RNA, 19 nt, Artificial Sequence
  Description of Artificial Sequence: Synthetic oligonucleotide
  Antisense strand to SEQ ID NO: 1929078
aauccucaagagcguaaag

SEQ ID NO: 1929080 - RNA, 19 nt, Artificial Sequence
  Description of Artificial Sequence: Synthetic oligonucleotide
  Sense strand starting at position 601 of SEQ ID NO: 1879738
uacgcucuugaggauuauu

SEQ ID NO: 1929081 - RNA, 19 nt, Artificial Sequence
  Description of Artificial Sequence: Synthetic oligonucleotide
  Antisense strand to SEQ ID NO: 1929080
aauaauccucaagagcgua

SEQ ID NO: 1929082 - RNA, 19 nt, Artificial Sequence
  Description of Artificial Sequence: Synthetic oligonucleotide
  Sense strand starting at position 604 of SEQ ID NO: 1879738
gcucuugaggauuauugga

SEQ ID NO: 1929083 - RNA, 19 nt, Artificial Sequence
  Description of Artificial Sequence: Synthetic oligonucleotide
  Antisense strand to SEQ ID NO: 1929082
uccaauaauccucaagagc

SEQ ID NO: 1929084 - RNA, 19 nt, Artificial Sequence
  Description of Artificial Sequence: Synthetic oligonucleotide
  Sense strand starting at position 631 of SEQ ID NO: 1879738
agagcuuucgauuaugaag

SEQ ID NO: 1929085 - RNA, 19 nt, Artificial Sequence
  Description of Artificial Sequence: Synthetic oligonucleotide
  Antisense strand to SEQ ID NO: 1929084
cuucauaaucgaaagcucu

SEQ ID NO: 1929086 - RNA, 19 nt, Artificial Sequence
  Description of Artificial Sequence: Synthetic oligonucleotide
  Sense strand starting at position 637 of SEQ ID NO: 1879738
uucgauuaugaagguuaua

SEQ ID NO: 1929087 - RNA, 19 nt, Artificial Sequence
  Description of Artificial Sequence: Synthetic oligonucleotide
  Antisense strand to SEQ ID NO: 1929086
uauaaccuucauaaucgaa

SEQ ID NO: 1929088 - RNA, 19 nt, Artificial Sequence
  Description of Artificial Sequence: Synthetic oligonucleotide
  Sense strand starting at position 796 of SEQ ID NO: 1879738
gaagaaugccauuguuuag

SEQ ID NO: 1929089 - RNA, 19 nt, Artificial Sequence
  Description of Artificial Sequence: Synthetic oligonucleotide
  Antisense strand to SEQ ID NO: 1929088
cuaaacaauggcauucuuc

SEQ ID NO: 1929090 - RNA, 19 nt, Artificial Sequence
  Description of Artificial Sequence: Synthetic oligonucleotide
  Sense strand starting at position 808 of SEQ ID NO: 1879738
uguuuagcauuucugcaau

SEQ ID NO: 1929091 - RNA, 19 nt, Artificial Sequence
  Description of Artificial Sequence: Synthetic oligonucleotide
  Antisense strand to SEQ ID NO: 1929090
auugcagaaaugcuaaaca

SEQ ID NO: 1929092 - RNA, 19 nt, Artificial Sequence
  Description of Artificial Sequence: Synthetic oligonucleotide
  Sense strand starting at position 899 of SEQ ID NO: 1879738
aguugaagucuaugaagua

SEQ ID NO: 1929093 - RNA, 19 nt, Artificial Sequence
  Description of Artificial Sequence: Synthetic oligonucleotide
  Antisense strand to SEQ ID NO: 1929092
uacuucauagacuucaacu

SEQ ID NO: 1929094 - RNA, 19 nt, Artificial Sequence
  Description of Artificial Sequence: Synthetic oligonucleotide
  Sense strand starting at position 959 of SEQ ID NO: 1879738
gaguauuggaauuguggau

SEQ ID NO: 1929095 - RNA, 19 nt, Artificial Sequence
  Description of Artificial Sequence: Synthetic oligonucleotide
  Antisense strand to SEQ ID NO: 1929094
auccacaauuccaauacuc

SEQ ID NO: 1929096 - RNA, 19 nt, Artificial Sequence
  Description of Artificial Sequence: Synthetic oligonucleotide
  Sense strand starting at position 2120 of SEQ ID NO: 1879738
gcgccuguagucucuacua

SEQ ID NO: 1929097 - RNA, 19 nt, Artificial Sequence
  Description of Artificial Sequence: Synthetic oligonucleotide
  Antisense strand to SEQ ID NO: 1929096
uaguagagacuacaggcgc

SEQ ID NO: 1929098 - RNA, 19 nt, Artificial Sequence
  Description of Artificial Sequence: Synthetic oligonucleotide
  Sense strand starting at position 2340 of SEQ ID NO: 1879738
uuagcuggaauguagaauu

SEQ ID NO: 1929099 - RNA, 19 nt, Artificial Sequence
  Description of Artificial Sequence: Synthetic oligonucleotide
  Antisense strand to SEQ ID NO: 1929098
aauucuacauuccagcuaa

SEQ ID NO: 1929100 - RNA, 19 nt, Artificial Sequence
  Description of Artificial Sequence: Synthetic oligonucleotide
  Sense strand starting at position 2357 of SEQ ID NO: 1879738
uuugaaaccgucuaucaau

SEQ ID NO: 1929101 - RNA, 19 nt, Artificial Sequence
  Description of Artificial Sequence: Synthetic oligonucleotide
  Antisense strand to SEQ ID NO: 1929100
auugauagacgguuucaaa

SEQ ID NO: 1929102 - RNA, 19 nt, Artificial Sequence
  Description of Artificial Sequence: Synthetic oligonucleotide
  Sense strand starting at position 2444 of SEQ ID NO: 1879738
auccauaaaugaguggauu

SEQ ID NO: 1929103 - RNA, 19 nt, Artificial Sequence
  Description of Artificial Sequence: Synthetic oligonucleotide
  Antisense strand to SEQ ID NO: 1929102
aauccacucauuuauggau

SEQ ID NO: 1929104 - RNA, 19 nt, Artificial Sequence
  Description of Artificial Sequence: Synthetic oligonucleotide
  Sense strand starting at position 2445 of SEQ ID NO: 1879738
uccauaaaugaguggauua

SEQ ID NO: 1929105 - RNA, 19 nt, Artificial Sequence
  Description of Artificial Sequence: Synthetic oligonucleotide
  Antisense strand to SEQ ID NO: 1929104
uaauccacucauuuaugga

SEQ ID NO: 1929106 - RNA, 19 nt, Artificial Sequence
  Description of Artificial Sequence: Synthetic oligonucleotide
  Sense strand starting at position 2507 of SEQ ID NO: 1879738
aaauaucggcuccaugagu

SEQ ID NO: 1929107 - RNA, 19 nt, Artificial Sequence
  Description of Artificial Sequence: Synthetic oligonucleotide
  Antisense strand to SEQ ID NO: 1929106
acucauggagccgauauuu

SEQ ID NO: 1929108 - RNA, 19 nt, Artificial Sequence
  Description of Artificial Sequence: Synthetic oligonucleotide
  Sense strand starting at position 2801 of SEQ ID NO: 1879738
gccauuuguucucucaagu

SEQ ID NO: 1929109 - RNA, 19 nt, Artificial Sequence
  Description of Artificial Sequence: Synthetic oligonucleotide
  Antisense strand to SEQ ID NO: 1929108
acuugagagaacaaauggc

SEQ ID NO: 1929110 - RNA, 19 nt, Artificial Sequence
  Description of Artificial Sequence: Synthetic oligonucleotide
  Sense strand starting at position 2845 of SEQ ID NO: 1879738
guugguuuagcucauaaug

SEQ ID NO: 1929111 - RNA, 19 nt, Artificial Sequence
  Description of Artificial Sequence: Synthetic oligonucleotide
  Antisense strand to SEQ ID NO: 1929110
cauuaugagcuaaaccaac

SEQ ID NO: 1929112 - RNA, 19 nt, Artificial Sequence
  Description of Artificial Sequence: Synthetic oligonucleotide
  Sense strand starting at position 2871 of SEQ ID NO: 1879738
ucucuuaaggguugagauu

SEQ ID NO: 1929113 - RNA, 19 nt, Artificial Sequence
  Description of Artificial Sequence: Synthetic oligonucleotide
  Antisense strand to SEQ ID NO: 1929112
aaucucaacccuuaagaga

SEQ ID NO: 1929114 - RNA, 19 nt, Artificial Sequence
  Description of Artificial Sequence: Synthetic oligonucleotide
  Sense strand starting at position 2964 of SEQ ID NO: 1879738
ugcauaagugcaugacaaa

SEQ ID NO: 1929115 - RNA, 19 nt, Artificial Sequence
  Description of Artificial Sequence: Synthetic oligonucleotide
  Antisense strand to SEQ ID NO: 1929114
uuugucaugcacuuaugca

SEQ ID NO: 1929116 - RNA, 19 nt, Artificial Sequence
  Description of Artificial Sequence: Synthetic oligonucleotide
  Sense strand starting at position 2965 of SEQ ID NO: 1879738
gcauaagugcaugacaaau

SEQ ID NO: 1929117 - RNA, 19 nt, Artificial Sequence
  Description of Artificial Sequence: Synthetic oligonucleotide
  Antisense strand to SEQ ID NO: 1929116
auuugucaugcacuuaugc

SEQ ID NO: 1929118 - RNA, 19 nt, Artificial Sequence
  Description of Artificial Sequence: Synthetic oligonucleotide
  Sense strand starting at position 3023 of SEQ ID NO: 1879738
cuaagaugccaacaguguu

SEQ ID NO: 1929119 - RNA, 19 nt, Artificial Sequence
  Description of Artificial Sequence: Synthetic oligonucleotide
  Antisense strand to SEQ ID NO: 1929118
aacacuguuggcaucuuag

SEQ ID NO: 1929120 - RNA, 19 nt, Artificial Sequence
  Description of Artificial Sequence: Synthetic oligonucleotide
  Sense strand starting at position 3036 of SEQ ID NO: 1879738
aguguuacccaccauuacu

SEQ ID NO: 1929121 - RNA, 19 nt, Artificial Sequence
  Description of Artificial Sequence: Synthetic oligonucleotide
  Antisense strand to SEQ ID NO: 1929120
aguaaugguggguaacacu

SEQ ID NO: 1929122 - RNA, 19 nt, Artificial Sequence
  Description of Artificial Sequence: Synthetic oligonucleotide
  Sense strand starting at position 3058 of SEQ ID NO: 1879738
gcaccaucaguguaaaugu

SEQ ID NO: 1929123 - RNA, 19 nt, Artificial Sequence
  Description of Artificial Sequence: Synthetic oligonucleotide
  Antisense strand to SEQ ID NO: 1929122
acauuuacacugauggugc

SEQ ID NO: 1929124 - RNA, 19 nt, Artificial Sequence
  Description of Artificial Sequence: Synthetic oligonucleotide
  Sense strand starting at position 3118 of SEQ ID NO: 1879738
augaauagucuugaucuuu

SEQ ID NO: 1929125 - RNA, 19 nt, Artificial Sequence
  Description of Artificial Sequence: Synthetic oligonucleotide
  Antisense strand to SEQ ID NO: 1929124
aaagaucaagacuauucau

SEQ ID NO: 1929126 - RNA, 19 nt, Artificial Sequence
  Description of Artificial Sequence: Synthetic oligonucleotide
  Sense strand starting at position 3271 of SEQ ID NO: 1879738
cuuaaauacguuugauaga

SEQ ID NO: 1929127 - RNA, 19 nt, Artificial Sequence
  Description of Artificial Sequence: Synthetic oligonucleotide
  Antisense strand to SEQ ID NO: 1929126
ucuaucaaacguauuuaag

SEQ ID NO: 1929128 - RNA, 19 nt, Artificial Sequence
  Description of Artificial Sequence: Synthetic oligonucleotide
  Sense strand starting at position 3363 of SEQ ID NO: 1879738
uguuucccuuugucaauuu

SEQ ID NO: 1929129 - RNA, 19 nt, Artificial Sequence
  Description of Artificial Sequence: Synthetic oligonucleotide
  Antisense strand to SEQ ID NO: 1929128
aaauugacaaagggaaaca

SEQ ID NO: 1929130 - RNA, 19 nt, Artificial Sequence
  Description of Artificial Sequence: Synthetic oligonucleotide
  Sense strand starting at position 3680 of SEQ ID NO: 1879738
caacuuugguaagugagaa

SEQ ID NO: 1929131 - RNA, 19 nt, Artificial Sequence
  Description of Artificial Sequence: Synthetic oligonucleotide
  Antisense strand to SEQ ID NO: 1929130
uucucacuuaccaaaguug

SEQ ID NO: 1929132 - RNA, 19 nt, Artificial Sequence
  Description of Artificial Sequence: Synthetic oligonucleotide
  Sense strand starting at position 3733 of SEQ ID NO: 1879738
ucaaguaggcuuugauaac

SEQ ID NO: 1929133 - RNA, 19 nt, Artificial Sequence
  Description of Artificial Sequence: Synthetic oligonucleotide
  Antisense strand to SEQ ID NO: 1929132
guuaucaaagccuacuuga

SEQ ID NO: 1929134 - RNA, 19 nt, Artificial Sequence
  Description of Artificial Sequence: Synthetic oligonucleotide
  Sense strand starting at position 3757 of SEQ ID NO: 1879738
ugcaauuagcagugacaaa

SEQ ID NO: 1929135 - RNA, 19 nt, Artificial Sequence
  Description of Artificial Sequence: Synthetic oligonucleotide
  Antisense strand to SEQ ID NO: 1929134
uuugucacugcuaauugca

SEQ ID NO: 1929136 - RNA, 19 nt, Artificial Sequence
  Description of Artificial Sequence: Synthetic oligonucleotide
  Sense strand starting at position 3834 of SEQ ID NO: 1879738
ccagccauuucuucuagua

SEQ ID NO: 1929137 - RNA, 19 nt, Artificial Sequence
  Description of Artificial Sequence: Synthetic oligonucleotide
  Antisense strand to SEQ ID NO: 1929136
uacuagaagaaauggcugg

SEQ ID NO: 1929138 - RNA, 19 nt, Artificial Sequence
  Description of Artificial Sequence: Synthetic oligonucleotide
  Sense strand starting at position 3865 of SEQ ID NO: 1879738
uuaagaucacaaugguaug

SEQ ID NO: 1929139 - RNA, 19 nt, Artificial Sequence
  Description of Artificial Sequence: Synthetic oligonucleotide
  Antisense strand to SEQ ID NO: 1929138
cauaccauugugaucuuaa

SEQ ID NO: 1929140 - RNA, 19 nt, Artificial Sequence
  Description of Artificial Sequence: Synthetic oligonucleotide
  Sense strand starting at position 3897 of SEQ ID NO: 1879738
uggucauuauuucuaagcu

SEQ ID NO: 1929141 - RNA, 19 nt, Artificial Sequence
  Description of Artificial Sequence: Synthetic oligonucleotide
  Antisense strand to SEQ ID NO: 1929140
agcuuagaaauaaugacca

SEQ ID NO: 1929142 - RNA, 19 nt, Artificial Sequence
  Description of Artificial Sequence: Synthetic oligonucleotide
  Sense strand starting at position 353 of SEQ ID NO: 1879739
acguuauugcugcauauca

SEQ ID NO: 1929143 - RNA, 19 nt, Artificial Sequence
  Description of Artificial Sequence: Synthetic oligonucleotide
  Antisense strand to SEQ ID NO: 1929142
ugauaugcagcaauaacgu

SEQ ID NO: 1929144 - RNA, 19 nt, Artificial Sequence
  Description of Artificial Sequence: Synthetic oligonucleotide
  Sense strand starting at position 355 of SEQ ID NO: 1879739
guuauugcugcauaucaau

SEQ ID NO: 1929145 - RNA, 19 nt, Artificial Sequence
  Description of Artificial Sequence: Synthetic oligonucleotide
  Antisense strand to SEQ ID NO: 1929144
auugauaugcagcaauaac

SEQ ID NO: 1929146 - RNA, 19 nt, Artificial Sequence
  Description of Artificial Sequence: Synthetic oligonucleotide
  Sense strand starting at position 405 of SEQ ID NO: 1879739
uggacaauuugcguuaugu

SEQ ID NO: 1929147 - RNA, 19 nt, Artificial Sequence
  Description of Artificial Sequence: Synthetic oligonucleotide
  Antisense strand to SEQ ID NO: 1929146
acauaacgcaaauugucca

SEQ ID NO: 1929148 - RNA, 19 nt, Artificial Sequence
  Description of Artificial Sequence: Synthetic oligonucleotide
  Sense strand starting at position 409 of SEQ ID NO: 1879739
caauuugcguuauguaugu

SEQ ID NO: 1929149 - RNA, 19 nt, Artificial Sequence
  Description of Artificial Sequence: Synthetic oligonucleotide
  Antisense strand to SEQ ID NO: 1929148
acauacauaacgcaaauug

SEQ ID NO: 1929150 - RNA, 19 nt, Artificial Sequence
  Description of Artificial Sequence: Synthetic oligonucleotide
  Sense strand starting at position 413 of SEQ ID NO: 1879739
uugcguuauguauguagga

SEQ ID NO: 1929151 - RNA, 19 nt, Artificial Sequence
  Description of Artificial Sequence: Synthetic oligonucleotide
  Antisense strand to SEQ ID NO: 1929150
uccuacauacauaacgcaa

SEQ ID NO: 1929152 - RNA, 19 nt, Artificial Sequence
  Description of Artificial Sequence: Synthetic oligonucleotide
  Sense strand starting at position 500 of SEQ ID NO: 1879739
auaucuguaucgcauuauu

SEQ ID NO: 1929153 - RNA, 19 nt, Artificial Sequence
  Description of Artificial Sequence: Synthetic oligonucleotide
  Antisense strand to SEQ ID NO: 1929152
aauaaugcgauacagauau

SEQ ID NO: 1929154 - RNA, 19 nt, Artificial Sequence
  Description of Artificial Sequence: Synthetic oligonucleotide
  Sense strand starting at position 503 of SEQ ID NO: 1879739
ucuguaucgcauuauuaca

SEQ ID NO: 1929155 - RNA, 19 nt, Artificial Sequence
  Description of Artificial Sequence: Synthetic oligonucleotide
  Antisense strand to SEQ ID NO: 1929154
uguaauaaugcgauacaga

SEQ ID NO: 1929156 - RNA, 19 nt, Artificial Sequence
  Description of Artificial Sequence: Synthetic oligonucleotide
  Sense strand starting at position 505 of SEQ ID NO: 1879739
uguaucgcauuauuacauu

SEQ ID NO: 1929157 - RNA, 19 nt, Artificial Sequence
  Description of Artificial Sequence: Synthetic oligonucleotide
  Antisense strand to SEQ ID NO: 1929156
aauguaauaaugcgauaca

SEQ ID NO: 1929158 - RNA, 19 nt, Artificial Sequence
  Description of Artificial Sequence: Synthetic oligonucleotide
  Sense strand starting at position 834 of SEQ ID NO: 1879739
ccggcccauuccuuaaaua

SEQ ID NO: 1929159 - RNA, 19 nt, Artificial Sequence
  Description of Artificial Sequence: Synthetic oligonucleotide
  Antisense strand to SEQ ID NO: 1929158
uauuuaaggaaugggccgg

SEQ ID NO: 1929160 - RNA, 19 nt, Artificial Sequence
  Description of Artificial Sequence: Synthetic oligonucleotide
  Sense strand starting at position 835 of SEQ ID NO: 1879739
cggcccauuccuuaaauau

SEQ ID NO: 1929161 - RNA, 19 nt, Artificial Sequence
  Description of Artificial Sequence: Synthetic oligonucleotide
  Antisense strand to SEQ ID NO: 1929160
auauuuaaggaaugggccg

SEQ ID NO: 1929162 - RNA, 19 nt, Artificial Sequence
  Description of Artificial Sequence: Synthetic oligonucleotide
  Sense strand starting at position 882 of SEQ ID NO: 1879739
cuagaacccuuagcugaaa

SEQ ID NO: 1929163 - RNA, 19 nt, Artificial Sequence
  Description of Artificial Sequence: Synthetic oligonucleotide
  Antisense strand to SEQ ID NO: 1929162
uuucagcuaaggguucuag

SEQ ID NO: 1929164 - RNA, 19 nt, Artificial Sequence
  Description of Artificial Sequence: Synthetic oligonucleotide
  Sense strand starting at position 1187 of SEQ ID NO: 1879739
agcacccggccuugaaaua

SEQ ID NO: 1929165 - RNA, 19 nt, Artificial Sequence
  Description of Artificial Sequence: Synthetic oligonucleotide
  Antisense strand to SEQ ID NO: 1929164
uauuucaaggccgggugcu

SEQ ID NO: 1929166 - RNA, 19 nt, Artificial Sequence
  Description of Artificial Sequence: Synthetic oligonucleotide
  Sense strand starting at position 1357 of SEQ ID NO: 1879739
aagugacaaucguacugga

SEQ ID NO: 1929167 - RNA, 19 nt, Artificial Sequence
  Description of Artificial Sequence: Synthetic oligonucleotide
  Antisense strand to SEQ ID NO: 1929166
uccaguacgauugucacuu

SEQ ID NO: 1929168 - RNA, 19 nt, Artificial Sequence
  Description of Artificial Sequence: Synthetic oligonucleotide
  Sense strand starting at position 1491 of SEQ ID NO: 1879739
uucuuucuccagggaguua

SEQ ID NO: 1929169 - RNA, 19 nt, Artificial Sequence
  Description of Artificial Sequence: Synthetic oligonucleotide
  Antisense strand to SEQ ID NO: 1929168
uaacucccuggagaaagaa

SEQ ID NO: 1929170 - RNA, 19 nt, Artificial Sequence
  Description of Artificial Sequence: Synthetic oligonucleotide
  Sense strand starting at position 1829 of SEQ ID NO: 1879739
ggguucuaaucccgauuag

SEQ ID NO: 1929171 - RNA, 19 nt, Artificial Sequence
  Description of Artificial Sequence: Synthetic oligonucleotide
  Antisense strand to SEQ ID NO: 1929170
cuaaucgggauuagaaccc

SEQ ID NO: 1929172 - RNA, 19 nt, Artificial Sequence
  Description of Artificial Sequence: Synthetic oligonucleotide
  Sense strand starting at position 1833 of SEQ ID NO: 1879739
ucuaaucccgauuagguua

SEQ ID NO: 1929173 - RNA, 19 nt, Artificial Sequence
  Description of Artificial Sequence: Synthetic oligonucleotide
  Antisense strand to SEQ ID NO: 1929172
uaaccuaaucgggauuaga

SEQ ID NO: 1929174 - RNA, 19 nt, Artificial Sequence
  Description of Artificial Sequence: Synthetic oligonucleotide
  Sense strand starting at position 1838 of SEQ ID NO: 1879739
ucccgauuagguuauuaac

SEQ ID NO: 1929175 - RNA, 19 nt, Artificial Sequence
  Description of Artificial Sequence: Synthetic oligonucleotide
  Antisense strand to SEQ ID NO: 1929174
guuaauaaccuaaucggga

SEQ ID NO: 1929176 - RNA, 19 nt, Artificial Sequence
  Description of Artificial Sequence: Synthetic oligonucleotide
  Sense strand starting at position 1840 of SEQ ID NO: 1879739
ccgauuagguuauuaacua

SEQ ID NO: 1929177 - RNA, 19 nt, Artificial Sequence
  Description of Artificial Sequence: Synthetic oligonucleotide
  Antisense strand to SEQ ID NO: 1929176
uaguuaauaaccuaaucgg

SEQ ID NO: 1929178 - RNA, 19 nt, Artificial Sequence
  Description of Artificial Sequence: Synthetic oligonucleotide
  Sense strand starting at position 1841 of SEQ ID NO: 1879739
cgauuagguuauuaacuau

SEQ ID NO: 1929179 - RNA, 19 nt, Artificial Sequence
  Description of Artificial Sequence: Synthetic oligonucleotide
  Antisense strand to SEQ ID NO: 1929178
auaguuaauaaccuaaucg

SEQ ID NO: 1929180 - RNA, 19 nt, Artificial Sequence
  Description of Artificial Sequence: Synthetic oligonucleotide
  Sense strand starting at position 1847 of SEQ ID NO: 1879739
gguuauuaacuauaugguu

SEQ ID NO: 1929181 - RNA, 19 nt, Artificial Sequence
  Description of Artificial Sequence: Synthetic oligonucleotide
  Antisense strand to SEQ ID NO: 1929180
aaccauauaguuaauaacc

SEQ ID NO: 1929182 - RNA, 19 nt, Artificial Sequence
  Description of Artificial Sequence: Synthetic oligonucleotide
  Sense strand starting at position 2172 of SEQ ID NO: 1879739
guucuaggagcuuaacaca

SEQ ID NO: 1929183 - RNA, 19 nt, Artificial Sequence
  Description of Artificial Sequence: Synthetic oligonucleotide
  Antisense strand to SEQ ID NO: 1929182
uguguuaagcuccuagaac

SEQ ID NO: 1929184 - RNA, 19 nt, Artificial Sequence
  Description of Artificial Sequence: Synthetic oligonucleotide
  Sense strand starting at position 2242 of SEQ ID NO: 1879739
ucaguucguugguauguga

SEQ ID NO: 1929185 - RNA, 19 nt, Artificial Sequence
  Description of Artificial Sequence: Synthetic oligonucleotide
  Antisense strand to SEQ ID NO: 1929184
ucacauaccaacgaacuga

SEQ ID NO: 1929186 - RNA, 19 nt, Artificial Sequence
  Description of Artificial Sequence: Synthetic oligonucleotide
  Sense strand starting at position 2419 of SEQ ID NO: 1879739
accuuuauuggcuaggcua

SEQ ID NO: 1929187 - RNA, 19 nt, Artificial Sequence
  Description of Artificial Sequence: Synthetic oligonucleotide
  Antisense strand to SEQ ID NO: 1929186
uagccuagccaauaaaggu

SEQ ID NO: 1929188 - RNA, 19 nt, Artificial Sequence
  Description of Artificial Sequence: Synthetic oligonucleotide
  Sense strand starting at position 2557 of SEQ ID NO: 1879739
cucucugagucauucuuga

SEQ ID NO: 1929189 - RNA, 19 nt, Artificial Sequence
  Description of Artificial Sequence: Synthetic oligonucleotide
  Antisense strand to SEQ ID NO: 1929188
ucaagaaugacucagagag

SEQ ID NO: 1929190 - RNA, 19 nt, Artificial Sequence
  Description of Artificial Sequence: Synthetic oligonucleotide
  Sense strand starting at position 2561 of SEQ ID NO: 1879739
cugagucauucuugaagca

SEQ ID NO: 1929191 - RNA, 19 nt, Artificial Sequence
  Description of Artificial Sequence: Synthetic oligonucleotide
  Antisense strand to SEQ ID NO: 1929190
ugcuucaagaaugacucag

SEQ ID NO: 1929192 - RNA, 19 nt, Artificial Sequence
  Description of Artificial Sequence: Synthetic oligonucleotide
  Sense strand starting at position 2562 of SEQ ID NO: 1879739
ugagucauucuugaagcaa

SEQ ID NO: 1929193 - RNA, 19 nt, Artificial Sequence
  Description of Artificial Sequence: Synthetic oligonucleotide
  Antisense strand to SEQ ID NO: 1929192
uugcuucaagaaugacuca

SEQ ID NO: 1929194 - RNA, 19 nt, Artificial Sequence
  Description of Artificial Sequence: Synthetic oligonucleotide
  Sense strand starting at position 2639 of SEQ ID NO: 1879739
ccaguuaauuucuagagcu

SEQ ID NO: 1929195 - RNA, 19 nt, Artificial Sequence
  Description of Artificial Sequence: Synthetic oligonucleotide
  Antisense strand to SEQ ID NO: 1929194
agcucuagaaauuaacugg

SEQ ID NO: 1929196 - RNA, 19 nt, Artificial Sequence
  Description of Artificial Sequence: Synthetic oligonucleotide
  Sense strand starting at position 2662 of SEQ ID NO: 1879739
aaucacaucugagucguuu

SEQ ID NO: 1929197 - RNA, 19 nt, Artificial Sequence
  Description of Artificial Sequence: Synthetic oligonucleotide
  Antisense strand to SEQ ID NO: 1929196
aaacgacucagaugugauu

SEQ ID NO: 1929198 - RNA, 19 nt, Artificial Sequence
  Description of Artificial Sequence: Synthetic oligonucleotide
  Sense strand starting at position 2748 of SEQ ID NO: 1879739
uugaaauccugcuauggga

SEQ ID NO: 1929199 - RNA, 19 nt, Artificial Sequence
  Description of Artificial Sequence: Synthetic oligonucleotide
  Antisense strand to SEQ ID NO: 1929198
ucccauagcaggauuucaa

SEQ ID NO: 1929200 - RNA, 19 nt, Artificial Sequence
  Description of Artificial Sequence: Synthetic oligonucleotide
  Sense strand starting at position 2750 of SEQ ID NO: 1879739
gaaauccugcuaugggaga

SEQ ID NO: 1929201 - RNA, 19 nt, Artificial Sequence
  Description of Artificial Sequence: Synthetic oligonucleotide
  Antisense strand to SEQ ID NO: 1929200
ucucccauagcaggauuuc

SEQ ID NO: 1929202 - RNA, 19 nt, Artificial Sequence
  Description of Artificial Sequence: Synthetic oligonucleotide
  Sense strand starting at position 2751 of SEQ ID NO: 1879739
aaauccugcuaugggagaa

SEQ ID NO: 1929203 - RNA, 19 nt, Artificial Sequence
  Description of Artificial Sequence: Synthetic oligonucleotide
  Antisense strand to SEQ ID NO: 1929202
uucucccauagcaggauuu

SEQ ID NO: 1929204 - RNA, 19 nt, Artificial Sequence
  Description of Artificial Sequence: Synthetic oligonucleotide
  Sense strand starting at position 3371 of SEQ ID NO: 1879739
cuaggcuaccuguaacagu

SEQ ID NO: 1929205 - RNA, 19 nt, Artificial Sequence
  Description of Artificial Sequence: Synthetic oligonucleotide
  Antisense strand to SEQ ID NO: 1929204
acuguuacagguagccuag

SEQ ID NO: 1929206 - RNA, 19 nt, Artificial Sequence
  Description of Artificial Sequence: Synthetic oligonucleotide
  Sense strand starting at position 3427 of SEQ ID NO: 1879739
cccaguaauuugggagguu

SEQ ID NO: 1929207 - RNA, 19 nt, Artificial Sequence
  Description of Artificial Sequence: Synthetic oligonucleotide
  Antisense strand to SEQ ID NO: 1929206
aaccucccaaauuacuggg

SEQ ID NO: 1929208 - RNA, 19 nt, Artificial Sequence
  Description of Artificial Sequence: Synthetic oligonucleotide
  Sense strand starting at position 3428 of SEQ ID NO: 1879739
ccaguaauuugggagguug

SEQ ID NO: 1929209 - RNA, 19 nt, Artificial Sequence
  Description of Artificial Sequence: Synthetic oligonucleotide
  Antisense strand to SEQ ID NO: 1929208
caaccucccaaauuacugg

SEQ ID NO: 1929210 - RNA, 19 nt, Artificial Sequence
  Description of Artificial Sequence: Synthetic oligonucleotide
  Sense strand starting at position 3473 of SEQ ID NO: 1879739
augagugagucauggccau

SEQ ID NO: 1929211 - RNA, 19 nt, Artificial Sequence
  Description of Artificial Sequence: Synthetic oligonucleotide
  Antisense strand to SEQ ID NO: 1929210
auggccaugacucacucau

SEQ ID NO: 1929212 - RNA, 19 nt, Artificial Sequence
  Description of Artificial Sequence: Synthetic oligonucleotide
  Sense strand starting at position 3477 of SEQ ID NO: 1879739
gugagucauggccaugcca

SEQ ID NO: 1929213 - RNA, 19 nt, Artificial Sequence
  Description of Artificial Sequence: Synthetic oligonucleotide
  Antisense strand to SEQ ID NO: 1929212
uggcauggccaugacucac

SEQ ID NO: 1929214 - RNA, 19 nt, Artificial Sequence
  Description of Artificial Sequence: Synthetic oligonucleotide
  Sense strand starting at position 3673 of SEQ ID NO: 1879739
accaaauuaugggcacuaa

SEQ ID NO: 1929215 - RNA, 19 nt, Artificial Sequence
  Description of Artificial Sequence: Synthetic oligonucleotide
  Antisense strand to SEQ ID NO: 1929214
uuagugcccauaauuuggu

SEQ ID NO: 1929216 - RNA, 19 nt, Artificial Sequence
  Description of Artificial Sequence: Synthetic oligonucleotide
  Sense strand starting at position 3677 of SEQ ID NO: 1879739
aauuaugggcacuaaugua

SEQ ID NO: 1929217 - RNA, 19 nt, Artificial Sequence
  Description of Artificial Sequence: Synthetic oligonucleotide
  Antisense strand to SEQ ID NO: 1929216
uacauuagugcccauaauu

SEQ ID NO: 1929218 - RNA, 19 nt, Artificial Sequence
  Description of Artificial Sequence: Synthetic oligonucleotide
  Sense strand starting at position 3685 of SEQ ID NO: 1879739
gcacuaauguaguaacauu

SEQ ID NO: 1929219 - RNA, 19 nt, Artificial Sequence
  Description of Artificial Sequence: Synthetic oligonucleotide
  Antisense strand to SEQ ID NO: 1929218
aauguuacuacauuagugc

SEQ ID NO: 1929220 - RNA, 19 nt, Artificial Sequence
  Description of Artificial Sequence: Synthetic oligonucleotide
  Sense strand starting at position 3763 of SEQ ID NO: 1879739
caacccacgugaguuuaua

SEQ ID NO: 1929221 - RNA, 19 nt, Artificial Sequence
  Description of Artificial Sequence: Synthetic oligonucleotide
  Antisense strand to SEQ ID NO: 1929220
uauaaacucacguggguug

SEQ ID NO: 1929222 - RNA, 19 nt, Artificial Sequence
  Description of Artificial Sequence: Synthetic oligonucleotide
  Sense strand starting at position 157 of SEQ ID NO: 1879740
ugaagcuagacuugacuga

SEQ ID NO: 1929223 - RNA, 19 nt, Artificial Sequence
  Description of Artificial Sequence: Synthetic oligonucleotide
  Antisense strand to SEQ ID NO: 1929222
ucagucaagucuagcuuca

SEQ ID NO: 1929224 - RNA, 19 nt, Artificial Sequence
  Description of Artificial Sequence: Synthetic oligonucleotide
  Sense strand starting at position 192 of SEQ ID NO: 1879740
auaagaaaugugugcauau

SEQ ID NO: 1929225 - RNA, 19 nt, Artificial Sequence
  Description of Artificial Sequence: Synthetic oligonucleotide
  Antisense strand to SEQ ID NO: 1929224
auaugcacacauuucuuau

SEQ ID NO: 1929226 - RNA, 19 nt, Artificial Sequence
  Description of Artificial Sequence: Synthetic oligonucleotide
  Sense strand starting at position 193 of SEQ ID NO: 1879740
uaagaaaugugugcauaua

SEQ ID NO: 1929227 - RNA, 19 nt, Artificial Sequence
  Description of Artificial Sequence: Synthetic oligonucleotide
  Antisense strand to SEQ ID NO: 1929226
uauaugcacacauuucuua

SEQ ID NO: 1929228 - RNA, 19 nt, Artificial Sequence
  Description of Artificial Sequence: Synthetic oligonucleotide
  Sense strand starting at position 209 of SEQ ID NO: 1879740
auagcaaugcgugugcuaa

SEQ ID NO: 1929229 - RNA, 19 nt, Artificial Sequence
  Description of Artificial Sequence: Synthetic oligonucleotide
  Antisense strand to SEQ ID NO: 1929228
uuagcacacgcauugcuau

SEQ ID NO: 1929230 - RNA, 19 nt, Artificial Sequence
  Description of Artificial Sequence: Synthetic oligonucleotide
  Sense strand starting at position 754 of SEQ ID NO: 1879740
ggagcuaaccuuuaccaau

SEQ ID NO: 1929231 - RNA, 19 nt, Artificial Sequence
  Description of Artificial Sequence: Synthetic oligonucleotide
  Antisense strand to SEQ ID NO: 1929230
auugguaaagguuagcucc

SEQ ID NO: 1929232 - RNA, 19 nt, Artificial Sequence
  Description of Artificial Sequence: Synthetic oligonucleotide
  Sense strand starting at position 888 of SEQ ID NO: 1879740
gcccacuaaguguaaggau

SEQ ID NO: 1929233 - RNA, 19 nt, Artificial Sequence
  Description of Artificial Sequence: Synthetic oligonucleotide
  Antisense strand to SEQ ID NO: 1929232
auccuuacacuuagugggc

SEQ ID NO: 1929234 - RNA, 19 nt, Artificial Sequence
  Description of Artificial Sequence: Synthetic oligonucleotide
  Sense strand starting at position 1358 of SEQ ID NO: 1879740
auauguugucaacaggcau

SEQ ID NO: 1929235 - RNA, 19 nt, Artificial Sequence
  Description of Artificial Sequence: Synthetic oligonucleotide
  Antisense strand to SEQ ID NO: 1929234
augccuguugacaacauau

SEQ ID NO: 1929236 - RNA, 19 nt, Artificial Sequence
  Description of Artificial Sequence: Synthetic oligonucleotide
  Sense strand starting at position 1484 of SEQ ID NO: 1879740
ucuugucuugggugacaca

SEQ ID NO: 1929237 - RNA, 19 nt, Artificial Sequence
  Description of Artificial Sequence: Synthetic oligonucleotide
  Antisense strand to SEQ ID NO: 1929236
ugugucacccaagacaaga

SEQ ID NO: 1929238 - RNA, 19 nt, Artificial Sequence
  Description of Artificial Sequence: Synthetic oligonucleotide
  Sense strand starting at position 1517 of SEQ ID NO: 1879740
uccuauagucuggauucuu

SEQ ID NO: 1929239 - RNA, 19 nt, Artificial Sequence
  Description of Artificial Sequence: Synthetic oligonucleotide
  Antisense strand to SEQ ID NO: 1929238
aagaauccagacuauagga

SEQ ID NO: 1929240 - RNA, 19 nt, Artificial Sequence
  Description of Artificial Sequence: Synthetic oligonucleotide
  Sense strand starting at position 1522 of SEQ ID NO: 1879740
uagucuggauucuugucaa

SEQ ID NO: 1929241 - RNA, 19 nt, Artificial Sequence
  Description of Artificial Sequence: Synthetic oligonucleotide
  Antisense strand to SEQ ID NO: 1929240
uugacaagaauccagacua

SEQ ID NO: 1929242 - RNA, 19 nt, Artificial Sequence
  Description of Artificial Sequence: Synthetic oligonucleotide
  Sense strand starting at position 1534 of SEQ ID NO: 1879740
uugucaauguccuuuauaa

SEQ ID NO: 1929243 - RNA, 19 nt, Artificial Sequence
  Description of Artificial Sequence: Synthetic oligonucleotide
  Antisense strand to SEQ ID NO: 1929242
uuauaaaggacauugacaa

SEQ ID NO: 1929244 - RNA, 19 nt, Artificial Sequence
  Description of Artificial Sequence: Synthetic oligonucleotide
  Sense strand starting at position 1536 of SEQ ID NO: 1879740
gucaauguccuuuauaauu

SEQ ID NO: 1929245 - RNA, 19 nt, Artificial Sequence
  Description of Artificial Sequence: Synthetic oligonucleotide
  Antisense strand to SEQ ID NO: 1929244
aauuauaaaggacauugac

SEQ ID NO: 1929246 - RNA, 19 nt, Artificial Sequence
  Description of Artificial Sequence: Synthetic oligonucleotide
  Sense strand starting at position 1608 of SEQ ID NO: 1879740
acagacuaugccuggguaa

SEQ ID NO: 1929247 - RNA, 19 nt, Artificial Sequence
  Description of Artificial Sequence: Synthetic oligonucleotide
  Antisense strand to SEQ ID NO: 1929246
uuacccaggcauagucugu

SEQ ID NO: 1929248 - RNA, 19 nt, Artificial Sequence
  Description of Artificial Sequence: Synthetic oligonucleotide
  Sense strand starting at position 1609 of SEQ ID NO: 1879740
cagacuaugccuggguaau

SEQ ID NO: 1929249 - RNA, 19 nt, Artificial Sequence
  Description of Artificial Sequence: Synthetic oligonucleotide
  Antisense strand to SEQ ID NO: 1929248
auuacccaggcauagucug

SEQ ID NO: 1929250 - RNA, 19 nt, Artificial Sequence
  Description of Artificial Sequence: Synthetic oligonucleotide
  Sense strand starting at position 1610 of SEQ ID NO: 1879740
agacuaugccuggguaauc

SEQ ID NO: 1929251 - RNA, 19 nt, Artificial Sequence
  Description of Artificial Sequence: Synthetic oligonucleotide
  Antisense strand to SEQ ID NO: 1929250
gauuacccaggcauagucu

SEQ ID NO: 1929252 - RNA, 19 nt, Artificial Sequence
  Description of Artificial Sequence: Synthetic oligonucleotide
  Sense strand starting at position 1611 of SEQ ID NO: 1879740
gacuaugccuggguaaucu

SEQ ID NO: 1929253 - RNA, 19 nt, Artificial Sequence
  Description of Artificial Sequence: Synthetic oligonucleotide
  Antisense strand to SEQ ID NO: 1929252
agauuacccaggcauaguc

SEQ ID NO: 1929254 - RNA, 19 nt, Artificial Sequence
  Description of Artificial Sequence: Synthetic oligonucleotide
  Sense strand starting at position 1620 of SEQ ID NO: 1879740
uggguaaucucaccuugug

SEQ ID NO: 1929255 - RNA, 19 nt, Artificial Sequence
  Description of Artificial Sequence: Synthetic oligonucleotide
  Antisense strand to SEQ ID NO: 1929254
cacaaggugagauuaccca

SEQ ID NO: 1929256 - RNA, 19 nt, Artificial Sequence
  Description of Artificial Sequence: Synthetic oligonucleotide
  Sense strand starting at position 1637 of SEQ ID NO: 1879740
ugaguucuacugcaaucaa

SEQ ID NO: 1929257 - RNA, 19 nt, Artificial Sequence
  Description of Artificial Sequence: Synthetic oligonucleotide
  Antisense strand to SEQ ID NO: 1929256
uugauugcaguagaacuca

SEQ ID NO: 1929258 - RNA, 19 nt, Artificial Sequence
  Description of Artificial Sequence: Synthetic oligonucleotide
  Sense strand starting at position 1648 of SEQ ID NO: 1879740
gcaaucaacuugcuaaaga

SEQ ID NO: 1929259 - RNA, 19 nt, Artificial Sequence
  Description of Artificial Sequence: Synthetic oligonucleotide
  Antisense strand to SEQ ID NO: 1929258
ucuuuagcaaguugauugc

SEQ ID NO: 1929260 - RNA, 19 nt, Artificial Sequence
  Description of Artificial Sequence: Synthetic oligonucleotide
  Sense strand starting at position 1790 of SEQ ID NO: 1879740
aaauuucugcccuguguag

SEQ ID NO: 1929261 - RNA, 19 nt, Artificial Sequence
  Description of Artificial Sequence: Synthetic oligonucleotide
  Antisense strand to SEQ ID NO: 1929260
cuacacagggcagaaauuu

SEQ ID NO: 1929262 - RNA, 19 nt, Artificial Sequence
  Description of Artificial Sequence: Synthetic oligonucleotide
  Sense strand starting at position 1801 of SEQ ID NO: 1879740
cuguguagacaguaagaca

SEQ ID NO: 1929263 - RNA, 19 nt, Artificial Sequence
  Description of Artificial Sequence: Synthetic oligonucleotide
  Antisense strand to SEQ ID NO: 1929262
ugucuuacugucuacacag

SEQ ID NO: 1929264 - RNA, 19 nt, Artificial Sequence
  Description of Artificial Sequence: Synthetic oligonucleotide
  Sense strand starting at position 1850 of SEQ ID NO: 1879740
ugaacaguauguuuaagag

SEQ ID NO: 1929265 - RNA, 19 nt, Artificial Sequence
  Description of Artificial Sequence: Synthetic oligonucleotide
  Antisense strand to SEQ ID NO: 1929264
cucuuaaacauacuguuca

SEQ ID NO: 1929266 - RNA, 19 nt, Artificial Sequence
  Description of Artificial Sequence: Synthetic oligonucleotide
  Sense strand starting at position 1857 of SEQ ID NO: 1879740
uauguuuaagagugauaag

SEQ ID NO: 1929267 - RNA, 19 nt, Artificial Sequence
  Description of Artificial Sequence: Synthetic oligonucleotide
  Antisense strand to SEQ ID NO: 1929266
cuuaucacucuuaaacaua

SEQ ID NO: 1929268 - RNA, 19 nt, Artificial Sequence
  Description of Artificial Sequence: Synthetic oligonucleotide
  Sense strand starting at position 1858 of SEQ ID NO: 1879740
auguuuaagagugauaagu

SEQ ID NO: 1929269 - RNA, 19 nt, Artificial Sequence
  Description of Artificial Sequence: Synthetic oligonucleotide
  Antisense strand to SEQ ID NO: 1929268
acuuaucacucuuaaacau

SEQ ID NO: 1929270 - RNA, 19 nt, Artificial Sequence
  Description of Artificial Sequence: Synthetic oligonucleotide
  Sense strand starting at position 2200 of SEQ ID NO: 1879740
agaauagaguaauagagau

SEQ ID NO: 1929271 - RNA, 19 nt, Artificial Sequence
  Description of Artificial Sequence: Synthetic oligonucleotide
  Antisense strand to SEQ ID NO: 1929270
aucucuauuacucuauucu

SEQ ID NO: 1929272 - RNA, 19 nt, Artificial Sequence
  Description of Artificial Sequence: Synthetic oligonucleotide
  Sense strand starting at position 2369 of SEQ ID NO: 1879740
gaaagaauguaccuguccu

SEQ ID NO: 1929273 - RNA, 19 nt, Artificial Sequence
  Description of Artificial Sequence: Synthetic oligonucleotide
  Antisense strand to SEQ ID NO: 1929272
aggacagguacauucuuuc

SEQ ID NO: 1929274 - RNA, 19 nt, Artificial Sequence
  Description of Artificial Sequence: Synthetic oligonucleotide
  Sense strand starting at position 2386 of SEQ ID NO: 1879740
cuauucucgggauggaaag

SEQ ID NO: 1929275 - RNA, 19 nt, Artificial Sequence
  Description of Artificial Sequence: Synthetic oligonucleotide
  Antisense strand to SEQ ID NO: 1929274
cuuuccaucccgagaauag

SEQ ID NO: 1929276 - RNA, 19 nt, Artificial Sequence
  Description of Artificial Sequence: Synthetic oligonucleotide
  Sense strand starting at position 2585 of SEQ ID NO: 1879740
cugguuucccugugagaga

SEQ ID NO: 1929277 - RNA, 19 nt, Artificial Sequence
  Description of Artificial Sequence: Synthetic oligonucleotide
  Antisense strand to SEQ ID NO: 1929276
ucucucacagggaaaccag

SEQ ID NO: 1929278 - RNA, 19 nt, Artificial Sequence
  Description of Artificial Sequence: Synthetic oligonucleotide
  Sense strand starting at position 2676 of SEQ ID NO: 1879740
cgcugucuuaggucagguu

SEQ ID NO: 1929279 - RNA, 19 nt, Artificial Sequence
  Description of Artificial Sequence: Synthetic oligonucleotide
  Antisense strand to SEQ ID NO: 1929278
aaccugaccuaagacagcg

SEQ ID NO: 1929280 - RNA, 19 nt, Artificial Sequence
  Description of Artificial Sequence: Synthetic oligonucleotide
  Sense strand starting at position 2709 of SEQ ID NO: 1879740
cucugaaacacggguugua

SEQ ID NO: 1929281 - RNA, 19 nt, Artificial Sequence
  Description of Artificial Sequence: Synthetic oligonucleotide
  Antisense strand to SEQ ID NO: 1929280
uacaacccguguuucagag

SEQ ID NO: 1929282 - RNA, 19 nt, Artificial Sequence
  Description of Artificial Sequence: Synthetic oligonucleotide
  Sense strand starting at position 2741 of SEQ ID NO: 1879740
gggacugcucuugggaaug

SEQ ID NO: 1929283 - RNA, 19 nt, Artificial Sequence
  Description of Artificial Sequence: Synthetic oligonucleotide
  Antisense strand to SEQ ID NO: 1929282
cauucccaagagcaguccc

SEQ ID NO: 1929284 - RNA, 19 nt, Artificial Sequence
  Description of Artificial Sequence: Synthetic oligonucleotide
  Sense strand starting at position 2877 of SEQ ID NO: 1879740
ugaguagucacuggaugca

SEQ ID NO: 1929285 - RNA, 19 nt, Artificial Sequence
  Description of Artificial Sequence: Synthetic oligonucleotide
  Antisense strand to SEQ ID NO: 1929284
ugcauccagugacuacuca

SEQ ID NO: 1929286 - RNA, 19 nt, Artificial Sequence
  Description of Artificial Sequence: Synthetic oligonucleotide
  Sense strand starting at position 3676 of SEQ ID NO: 1879740
aucauauucuugcuaggga

SEQ ID NO: 1929287 - RNA, 19 nt, Artificial Sequence
  Description of Artificial Sequence: Synthetic oligonucleotide
  Antisense strand to SEQ ID NO: 1929286
ucccuagcaagaauaugau

SEQ ID NO: 1929288 - RNA, 19 nt, Artificial Sequence
  Description of Artificial Sequence: Synthetic oligonucleotide
  Sense strand starting at position 3679 of SEQ ID NO: 1879740
auauucuugcuagggacua

SEQ ID NO: 1929289 - RNA, 19 nt, Artificial Sequence
  Description of Artificial Sequence: Synthetic oligonucleotide
  Antisense strand to SEQ ID NO: 1929288
uagucccuagcaagaauau

SEQ ID NO: 1929290 - RNA, 19 nt, Artificial Sequence
  Description of Artificial Sequence: Synthetic oligonucleotide
  Sense strand starting at position 3797 of SEQ ID NO: 1879740
uuccuacucuucuuggaga

SEQ ID NO: 1929291 - RNA, 19 nt, Artificial Sequence
  Description of Artificial Sequence: Synthetic oligonucleotide
  Antisense strand to SEQ ID NO: 1929290
ucuccaagaagaguaggaa

SEQ ID NO: 1929292 - RNA, 19 nt, Artificial Sequence
  Description of Artificial Sequence: Synthetic oligonucleotide
  Sense strand starting at position 3799 of SEQ ID NO: 1879740
ccuacucuucuuggagaag

SEQ ID NO: 1929293 - RNA, 19 nt, Artificial Sequence
  Description of Artificial Sequence: Synthetic oligonucleotide
  Antisense strand to SEQ ID NO: 1929292
cuucuccaagaagaguagg

SEQ ID NO: 1929294 - RNA, 19 nt, Artificial Sequence
  Description of Artificial Sequence: Synthetic oligonucleotide
  Sense strand starting at position 3849 of SEQ ID NO: 1879740
uaaugauucugucugcuag

SEQ ID NO: 1929295 - RNA, 19 nt, Artificial Sequence
  Description of Artificial Sequence: Synthetic oligonucleotide
  Antisense strand to SEQ ID NO: 1929294
cuagcagacagaaucauua

SEQ ID NO: 1929296 - RNA, 19 nt, Artificial Sequence
  Description of Artificial Sequence: Synthetic oligonucleotide
  Sense strand starting at position 3874 of SEQ ID NO: 1879740
gguugucuucugcaaagau

SEQ ID NO: 1929297 - RNA, 19 nt, Artificial Sequence
  Description of Artificial Sequence: Synthetic oligonucleotide
  Antisense strand to SEQ ID NO: 1929296
aucuuugcagaagacaacc

SEQ ID NO: 1929298 - RNA, 19 nt, Artificial Sequence
  Description of Artificial Sequence: Synthetic oligonucleotide
  Sense strand starting at position 3888 of SEQ ID NO: 1879740
aagauuaucuggucgucau

SEQ ID NO: 1929299 - RNA, 19 nt, Artificial Sequence
  Description of Artificial Sequence: Synthetic oligonucleotide
  Antisense strand to SEQ ID NO: 1929298
augacgaccagauaaucuu

SEQ ID NO: 1929300 - RNA, 19 nt, Artificial Sequence
  Description of Artificial Sequence: Synthetic oligonucleotide
  Sense strand starting at position 3892 of SEQ ID NO: 1879740
uuaucuggucgucauauca

SEQ ID NO: 1929301 - RNA, 19 nt, Artificial Sequence
  Description of Artificial Sequence: Synthetic oligonucleotide
  Antisense strand to SEQ ID NO: 1929300
ugauaugacgaccagauaa

SEQ ID NO: 1929302 - RNA, 19 nt, Artificial Sequence
  Description of Artificial Sequence: Synthetic oligonucleotide
  Sense strand starting at position 465 of SEQ ID NO: 1879741
accugaaccugagaaccau

SEQ ID NO: 1929303 - RNA, 19 nt, Artificial Sequence
  Description of Artificial Sequence: Synthetic oligonucleotide
  Antisense strand to SEQ ID NO: 1929302
augguucucagguucaggu

SEQ ID NO: 1929304 - RNA, 19 nt, Artificial Sequence
  Description of Artificial Sequence: Synthetic oligonucleotide
  Sense strand starting at position 471 of SEQ ID NO: 1879741
accugagaaccaugggcaa

SEQ ID NO: 1929305 - RNA, 19 nt, Artificial Sequence
  Description of Artificial Sequence: Synthetic oligonucleotide
  Antisense strand to SEQ ID NO: 1929304
uugcccaugguucucaggu

SEQ ID NO: 1929306 - RNA, 19 nt, Artificial Sequence
  Description of Artificial Sequence: Synthetic oligonucleotide
  Sense strand starting at position 499 of SEQ ID NO: 1879741
agagaucaguaucagugaa

SEQ ID NO: 1929307 - RNA, 19 nt, Artificial Sequence
  Description of Artificial Sequence: Synthetic oligonucleotide
  Antisense strand to SEQ ID NO: 1929306
uucacugauacugaucucu

SEQ ID NO: 1929308 - RNA, 19 nt, Artificial Sequence
  Description of Artificial Sequence: Synthetic oligonucleotide
  Sense strand starting at position 501 of SEQ ID NO: 1879741
agaucaguaucagugaaga

SEQ ID NO: 1929309 - RNA, 19 nt, Artificial Sequence
  Description of Artificial Sequence: Synthetic oligonucleotide
  Antisense strand to SEQ ID NO: 1929308
ucuucacugauacugaucu

SEQ ID NO: 1929310 - RNA, 19 nt, Artificial Sequence
  Description of Artificial Sequence: Synthetic oligonucleotide
  Sense strand starting at position 609 of SEQ ID NO: 1879741
gcgauagagguccagauga

SEQ ID NO: 1929311 - RNA, 19 nt, Artificial Sequence
  Description of Artificial Sequence: Synthetic oligonucleotide
  Antisense strand to SEQ ID NO: 1929310
ucaucuggaccucuaucgc

SEQ ID NO: 1929312 - RNA, 19 nt, Artificial Sequence
  Description of Artificial Sequence: Synthetic oligonucleotide
  Sense strand starting at position 638 of SEQ ID NO: 1879741
augacugacuugcugacaa

SEQ ID NO: 1929313 - RNA, 19 nt, Artificial Sequence
  Description of Artificial Sequence: Synthetic oligonucleotide
  Antisense strand to SEQ ID NO: 1929312
uugucagcaagucagucau

SEQ ID NO: 1929314 - RNA, 19 nt, Artificial Sequence
  Description of Artificial Sequence: Synthetic oligonucleotide
  Sense strand starting at position 786 of SEQ ID NO: 1879741
aggaguguuaacuguagua

SEQ ID NO: 1929315 - RNA, 19 nt, Artificial Sequence
  Description of Artificial Sequence: Synthetic oligonucleotide
  Antisense strand to SEQ ID NO: 1929314
uacuacaguuaacacuccu

SEQ ID NO: 1929316 - RNA, 19 nt, Artificial Sequence
  Description of Artificial Sequence: Synthetic oligonucleotide
  Sense strand starting at position 788 of SEQ ID NO: 1879741
gaguguuaacuguaguaug

SEQ ID NO: 1929317 - RNA, 19 nt, Artificial Sequence
  Description of Artificial Sequence: Synthetic oligonucleotide
  Antisense strand to SEQ ID NO: 1929316
cauacuacaguuaacacuc

SEQ ID NO: 1929318 - RNA, 19 nt, Artificial Sequence
  Description of Artificial Sequence: Synthetic oligonucleotide
  Sense strand starting at position 791 of SEQ ID NO: 1879741
uguuaacuguaguaugaca

SEQ ID NO: 1929319 - RNA, 19 nt, Artificial Sequence
  Description of Artificial Sequence: Synthetic oligonucleotide
  Antisense strand to SEQ ID NO: 1929318
ugucauacuacaguuaaca

SEQ ID NO: 1929320 - RNA, 19 nt, Artificial Sequence
  Description of Artificial Sequence: Synthetic oligonucleotide
  Sense strand starting at position 1023 of SEQ ID NO: 1879741
uggagucagucauagagac

SEQ ID NO: 1929321 - RNA, 19 nt, Artificial Sequence
  Description of Artificial Sequence: Synthetic oligonucleotide
  Antisense strand to SEQ ID NO: 1929320
gucucuaugacugacucca

SEQ ID NO: 1929322 - RNA, 19 nt, Artificial Sequence
  Description of Artificial Sequence: Synthetic oligonucleotide
  Sense strand starting at position 1441 of SEQ ID NO: 1879741
uguggucaccuggaagaca

SEQ ID NO: 1929323 - RNA, 19 nt, Artificial Sequence
  Description of Artificial Sequence: Synthetic oligonucleotide
  Antisense strand to SEQ ID NO: 1929322
ugucuuccaggugaccaca

SEQ ID NO: 1929324 - RNA, 19 nt, Artificial Sequence
  Description of Artificial Sequence: Synthetic oligonucleotide
  Sense strand starting at position 2052 of SEQ ID NO: 1879741
cagagaaggucaucggauu

SEQ ID NO: 1929325 - RNA, 19 nt, Artificial Sequence
  Description of Artificial Sequence: Synthetic oligonucleotide
  Antisense strand to SEQ ID NO: 1929324
aauccgaugaccuucucug

SEQ ID NO: 1929326 - RNA, 19 nt, Artificial Sequence
  Description of Artificial Sequence: Synthetic oligonucleotide
  Sense strand starting at position 2053 of SEQ ID NO: 1879741
agagaaggucaucggauua

SEQ ID NO: 1929327 - RNA, 19 nt, Artificial Sequence
  Description of Artificial Sequence: Synthetic oligonucleotide
  Antisense strand to SEQ ID NO: 1929326
uaauccgaugaccuucucu

SEQ ID NO: 1929328 - RNA, 19 nt, Artificial Sequence
  Description of Artificial Sequence: Synthetic oligonucleotide
  Sense strand starting at position 2383 of SEQ ID NO: 1879741
gggaacacuuuggaggaau

SEQ ID NO: 1929329 - RNA, 19 nt, Artificial Sequence
  Description of Artificial Sequence: Synthetic oligonucleotide
  Antisense strand to SEQ ID NO: 1929328
auuccuccaaaguguuccc

SEQ ID NO: 1929330 - RNA, 19 nt, Artificial Sequence
  Description of Artificial Sequence: Synthetic oligonucleotide
  Sense strand starting at position 2568 of SEQ ID NO: 1879741
gugccaaguucucaccuuu

SEQ ID NO: 1929331 - RNA, 19 nt, Artificial Sequence
  Description of Artificial Sequence: Synthetic oligonucleotide
  Antisense strand to SEQ ID NO: 1929330
aaaggugagaacuuggcac

SEQ ID NO: 1929332 - RNA, 19 nt, Artificial Sequence
  Description of Artificial Sequence: Synthetic oligonucleotide
  Sense strand starting at position 2575 of SEQ ID NO: 1879741
guucucaccuuugcauaga

SEQ ID NO: 1929333 - RNA, 19 nt, Artificial Sequence
  Description of Artificial Sequence: Synthetic oligonucleotide
  Antisense strand to SEQ ID NO: 1929332
ucuaugcaaaggugagaac

SEQ ID NO: 1929334 - RNA, 19 nt, Artificial Sequence
  Description of Artificial Sequence: Synthetic oligonucleotide
  Sense strand starting at position 3646 of SEQ ID NO: 1879741
gggaaauccuccucacagc

SEQ ID NO: 1929335 - RNA, 19 nt, Artificial Sequence
  Description of Artificial Sequence: Synthetic oligonucleotide
  Antisense strand to SEQ ID NO: 1929334
gcugugaggaggauuuccc

SEQ ID NO: 1929336 - RNA, 19 nt, Artificial Sequence
  Description of Artificial Sequence: Synthetic oligonucleotide
  Sense strand starting at position 3803 of SEQ ID NO: 1879741
gagaguuuggcgcagagga

SEQ ID NO: 1929337 - RNA, 19 nt, Artificial Sequence
  Description of Artificial Sequence: Synthetic oligonucleotide
  Antisense strand to SEQ ID NO: 1929336
uccucugcgccaaacucuc

SEQ ID NO: 1929338 - RNA, 19 nt, Artificial Sequence
  Description of Artificial Sequence: Synthetic oligonucleotide
  Sense strand starting at position 3818 of SEQ ID NO: 1879741
aggaguaaguucuagcaga

SEQ ID NO: 1929339 - RNA, 19 nt, Artificial Sequence
  Description of Artificial Sequence: Synthetic oligonucleotide
  Antisense strand to SEQ ID NO: 1929338
ucugcuagaacuuacuccu

SEQ ID NO: 1929340 - RNA, 19 nt, Artificial Sequence
  Description of Artificial Sequence: Synthetic oligonucleotide
  Sense strand starting at position 3832 of SEQ ID NO: 1879741
gcagaacuauucgcugaaa

SEQ ID NO: 1929341 - RNA, 19 nt, Artificial Sequence
  Description of Artificial Sequence: Synthetic oligonucleotide
  Antisense strand to SEQ ID NO: 1929340
uuucagcgaauaguucugc

SEQ ID NO: 1929342 - RNA, 19 nt, Artificial Sequence
  Description of Artificial Sequence: Synthetic oligonucleotide
  Sense strand starting at position 3834 of SEQ ID NO: 1879741
agaacuauucgcugaaaca

SEQ ID NO: 1929343 - RNA, 19 nt, Artificial Sequence
  Description of Artificial Sequence: Synthetic oligonucleotide
  Antisense strand to SEQ ID NO: 1929342
uguuucagcgaauaguucu

SEQ ID NO: 1929344 - RNA, 19 nt, Artificial Sequence
  Description of Artificial Sequence: Synthetic oligonucleotide
  Sense strand starting at position 3835 of SEQ ID NO: 1879741
gaacuauucgcugaaacag

SEQ ID NO: 1929345 - RNA, 19 nt, Artificial Sequence
  Description of Artificial Sequence: Synthetic oligonucleotide
  Antisense strand to SEQ ID NO: 1929344
cuguuucagcgaauaguuc

SEQ ID NO: 1929346 - RNA, 19 nt, Artificial Sequence
  Description of Artificial Sequence: Synthetic oligonucleotide
  Sense strand starting at position 3852 of SEQ ID NO: 1879741
agcugcuuucuguauuuaa

SEQ ID NO: 1929347 - RNA, 19 nt, Artificial Sequence
  Description of Artificial Sequence: Synthetic oligonucleotide
  Antisense strand to SEQ ID NO: 1929346
uuaaauacagaaagcagcu

SEQ ID NO: 1929348 - RNA, 19 nt, Artificial Sequence
  Description of Artificial Sequence: Synthetic oligonucleotide
  Sense strand starting at position 3891 of SEQ ID NO: 1879741
aaggcagaguuggcaaaua

SEQ ID NO: 1929349 - RNA, 19 nt, Artificial Sequence
  Description of Artificial Sequence: Synthetic oligonucleotide
  Antisense strand to SEQ ID NO: 1929348
uauuugccaacucugccuu

SEQ ID NO: 1929350 - RNA, 19 nt, Artificial Sequence
  Description of Artificial Sequence: Synthetic oligonucleotide
  Sense strand starting at position 21 of SEQ ID NO: 1879742
cuuaaagagucgcuggaau

SEQ ID NO: 1929351 - RNA, 19 nt, Artificial Sequence
  Description of Artificial Sequence: Synthetic oligonucleotide
  Antisense strand to SEQ ID NO: 1929350
auuccagcgacucuuuaag

SEQ ID NO: 1929352 - RNA, 19 nt, Artificial Sequence
  Description of Artificial Sequence: Synthetic oligonucleotide
  Sense strand starting at position 90 of SEQ ID NO: 1879742
acccauaaucgaggaguga

SEQ ID NO: 1929353 - RNA, 19 nt, Artificial Sequence
  Description of Artificial Sequence: Synthetic oligonucleotide
  Antisense strand to SEQ ID NO: 1929352
ucacuccucgauuaugggu

SEQ ID NO: 1929354 - RNA, 19 nt, Artificial Sequence
  Description of Artificial Sequence: Synthetic oligonucleotide
  Sense strand starting at position 101 of SEQ ID NO: 1879742
aggagugacuguuuacauu

SEQ ID NO: 1929355 - RNA, 19 nt, Artificial Sequence
  Description of Artificial Sequence: Synthetic oligonucleotide
  Antisense strand to SEQ ID NO: 1929354
aauguaaacagucacuccu

SEQ ID NO: 1929356 - RNA, 19 nt, Artificial Sequence
  Description of Artificial Sequence: Synthetic oligonucleotide
  Sense strand starting at position 210 of SEQ ID NO: 1879742
uguuaaggguuacugcuaa

SEQ ID NO: 1929357 - RNA, 19 nt, Artificial Sequence
  Description of Artificial Sequence: Synthetic oligonucleotide
  Antisense strand to SEQ ID NO: 1929356
uuagcaguaacccuuaaca

SEQ ID NO: 1929358 - RNA, 19 nt, Artificial Sequence
  Description of Artificial Sequence: Synthetic oligonucleotide
  Sense strand starting at position 268 of SEQ ID NO: 1879742
guaaacuagcaucacaguu

SEQ ID NO: 1929359 - RNA, 19 nt, Artificial Sequence
  Description of Artificial Sequence: Synthetic oligonucleotide
  Antisense strand to SEQ ID NO: 1929358
aacugugaugcuaguuuac

SEQ ID NO: 1929360 - RNA, 19 nt, Artificial Sequence
  Description of Artificial Sequence: Synthetic oligonucleotide
  Sense strand starting at position 306 of SEQ ID NO: 1879742
uggauauugccaugccaac

SEQ ID NO: 1929361 - RNA, 19 nt, Artificial Sequence
  Description of Artificial Sequence: Synthetic oligonucleotide
  Antisense strand to SEQ ID NO: 1929360
guuggcauggcaauaucca

SEQ ID NO: 1929362 - RNA, 19 nt, Artificial Sequence
  Description of Artificial Sequence: Synthetic oligonucleotide
  Sense strand starting at position 479 of SEQ ID NO: 1879742
ggauaaagcaaggguguua

SEQ ID NO: 1929363 - RNA, 19 nt, Artificial Sequence
  Description of Artificial Sequence: Synthetic oligonucleotide
  Antisense strand to SEQ ID NO: 1929362
uaacacccuugcuuuaucc

SEQ ID NO: 1929364 - RNA, 19 nt, Artificial Sequence
  Description of Artificial Sequence: Synthetic oligonucleotide
  Sense strand starting at position 624 of SEQ ID NO: 1879742
gugggacucuggucagacu

SEQ ID NO: 1929365 - RNA, 19 nt, Artificial Sequence
  Description of Artificial Sequence: Synthetic oligonucleotide
  Antisense strand to SEQ ID NO: 1929364
agucugaccagagucccac

SEQ ID NO: 1929366 - RNA, 19 nt, Artificial Sequence
  Description of Artificial Sequence: Synthetic oligonucleotide
  Sense strand starting at position 727 of SEQ ID NO: 1879742
agcuaucauuuagugagca

SEQ ID NO: 1929367 - RNA, 19 nt, Artificial Sequence
  Description of Artificial Sequence: Synthetic oligonucleotide
  Antisense strand to SEQ ID NO: 1929366
ugcucacuaaaugauagcu

SEQ ID NO: 1929368 - RNA, 19 nt, Artificial Sequence
  Description of Artificial Sequence: Synthetic oligonucleotide
  Sense strand starting at position 1164 of SEQ ID NO: 1879742
ggcuaugguucuucuaaca

SEQ ID NO: 1929369 - RNA, 19 nt, Artificial Sequence
  Description of Artificial Sequence: Synthetic oligonucleotide
  Antisense strand to SEQ ID NO: 1929368
uguuagaagaaccauagcc

SEQ ID NO: 1929370 - RNA, 19 nt, Artificial Sequence
  Description of Artificial Sequence: Synthetic oligonucleotide
  Sense strand starting at position 1659 of SEQ ID NO: 1879742
ucccuugaagucugggauu

SEQ ID NO: 1929371 - RNA, 19 nt, Artificial Sequence
  Description of Artificial Sequence: Synthetic oligonucleotide
  Antisense strand to SEQ ID NO: 1929370
aaucccagacuucaaggga

SEQ ID NO: 1929372 - RNA, 19 nt, Artificial Sequence
  Description of Artificial Sequence: Synthetic oligonucleotide
  Sense strand starting at position 1694 of SEQ ID NO: 1879742
aggcccuggcaguaagaua

SEQ ID NO: 1929373 - RNA, 19 nt, Artificial Sequence
  Description of Artificial Sequence: Synthetic oligonucleotide
  Antisense strand to SEQ ID NO: 1929372
uaucuuacugccagggccu

SEQ ID NO: 1929374 - RNA, 19 nt, Artificial Sequence
  Description of Artificial Sequence: Synthetic oligonucleotide
  Sense strand starting at position 1709 of SEQ ID NO: 1879742
gauauuaagucccugagaa

SEQ ID NO: 1929375 - RNA, 19 nt, Artificial Sequence
  Description of Artificial Sequence: Synthetic oligonucleotide
  Antisense strand to SEQ ID NO: 1929374
uucucagggacuuaauauc

SEQ ID NO: 1929376 - RNA, 19 nt, Artificial Sequence
  Description of Artificial Sequence: Synthetic oligonucleotide
  Sense strand starting at position 1710 of SEQ ID NO: 1879742
auauuaagucccugagaag

SEQ ID NO: 1929377 - RNA, 19 nt, Artificial Sequence
  Description of Artificial Sequence: Synthetic oligonucleotide
  Antisense strand to SEQ ID NO: 1929376
cuucucagggacuuaauau

SEQ ID NO: 1929378 - RNA, 19 nt, Artificial Sequence
  Description of Artificial Sequence: Synthetic oligonucleotide
  Sense strand starting at position 1864 of SEQ ID NO: 1879742
ugucucugggcuuggaaga

SEQ ID NO: 1929379 - RNA, 19 nt, Artificial Sequence
  Description of Artificial Sequence: Synthetic oligonucleotide
  Antisense strand to SEQ ID NO: 1929378
ucuuccaagcccagagaca

SEQ ID NO: 1929380 - RNA, 19 nt, Artificial Sequence
  Description of Artificial Sequence: Synthetic oligonucleotide
  Sense strand starting at position 2022 of SEQ ID NO: 1879742
aggcacaacucugucaauu

SEQ ID NO: 1929381 - RNA, 19 nt, Artificial Sequence
  Description of Artificial Sequence: Synthetic oligonucleotide
  Antisense strand to SEQ ID NO: 1929380
aauugacagaguugugccu

SEQ ID NO: 1929382 - RNA, 19 nt, Artificial Sequence
  Description of Artificial Sequence: Synthetic oligonucleotide
  Sense strand starting at position 2126 of SEQ ID NO: 1879742
aguugcaugauugguagaa

SEQ ID NO: 1929383 - RNA, 19 nt, Artificial Sequence
  Description of Artificial Sequence: Synthetic oligonucleotide
  Antisense strand to SEQ ID NO: 1929382
uucuaccaaucaugcaacu

SEQ ID NO: 1929384 - RNA, 19 nt, Artificial Sequence
  Description of Artificial Sequence: Synthetic oligonucleotide
  Sense strand starting at position 2127 of SEQ ID NO: 1879742
guugcaugauugguagaag

SEQ ID NO: 1929385 - RNA, 19 nt, Artificial Sequence
  Description of Artificial Sequence: Synthetic oligonucleotide
  Antisense strand to SEQ ID NO: 1929384
cuucuaccaaucaugcaac

SEQ ID NO: 1929386 - RNA, 19 nt, Artificial Sequence
  Description of Artificial Sequence: Synthetic oligonucleotide
  Sense strand starting at position 2130 of SEQ ID NO: 1879742
gcaugauugguagaagguu

SEQ ID NO: 1929387 - RNA, 19 nt, Artificial Sequence
  Description of Artificial Sequence: Synthetic oligonucleotide
  Antisense strand to SEQ ID NO: 1929386
aaccuucuaccaaucaugc

SEQ ID NO: 1929388 - RNA, 19 nt, Artificial Sequence
  Description of Artificial Sequence: Synthetic oligonucleotide
  Sense strand starting at position 2294 of SEQ ID NO: 1879742
uucucuucuuagguagaca

SEQ ID NO: 1929389 - RNA, 19 nt, Artificial Sequence
  Description of Artificial Sequence: Synthetic oligonucleotide
  Antisense strand to SEQ ID NO: 1929388
ugucuaccuaagaagagaa

SEQ ID NO: 1929390 - RNA, 19 nt, Artificial Sequence
  Description of Artificial Sequence: Synthetic oligonucleotide
  Sense strand starting at position 2305 of SEQ ID NO: 1879742
gguagacagauacgauguu

SEQ ID NO: 1929391 - RNA, 19 nt, Artificial Sequence
  Description of Artificial Sequence: Synthetic oligonucleotide
  Antisense strand to SEQ ID NO: 1929390
aacaucguaucugucuacc

SEQ ID NO: 1929392 - RNA, 19 nt, Artificial Sequence
  Description of Artificial Sequence: Synthetic oligonucleotide
  Sense strand starting at position 2396 of SEQ ID NO: 1879742
ucgcauaagagcugggaau

SEQ ID NO: 1929393 - RNA, 19 nt, Artificial Sequence
  Description of Artificial Sequence: Synthetic oligonucleotide
  Antisense strand to SEQ ID NO: 1929392
auucccagcucuuaugcga

SEQ ID NO: 1929394 - RNA, 19 nt, Artificial Sequence
  Description of Artificial Sequence: Synthetic oligonucleotide
  Sense strand starting at position 2397 of SEQ ID NO: 1879742
cgcauaagagcugggaaua

SEQ ID NO: 1929395 - RNA, 19 nt, Artificial Sequence
  Description of Artificial Sequence: Synthetic oligonucleotide
  Antisense strand to SEQ ID NO: 1929394
uauucccagcucuuaugcg

SEQ ID NO: 1929396 - RNA, 19 nt, Artificial Sequence
  Description of Artificial Sequence: Synthetic oligonucleotide
  Sense strand starting at position 2398 of SEQ ID NO: 1879742
gcauaagagcugggaauaa

SEQ ID NO: 1929397 - RNA, 19 nt, Artificial Sequence
  Description of Artificial Sequence: Synthetic oligonucleotide
  Antisense strand to SEQ ID NO: 1929396
uuauucccagcucuuaugc

SEQ ID NO: 1929398 - RNA, 19 nt, Artificial Sequence
  Description of Artificial Sequence: Synthetic oligonucleotide
  Sense strand starting at position 2442 of SEQ ID NO: 1879742
caguuuauugagggcaaag

SEQ ID NO: 1929399 - RNA, 19 nt, Artificial Sequence
  Description of Artificial Sequence: Synthetic oligonucleotide
  Antisense strand to SEQ ID NO: 1929398
cuuugcccucaauaaacug

SEQ ID NO: 1929400 - RNA, 19 nt, Artificial Sequence
  Description of Artificial Sequence: Synthetic oligonucleotide
  Sense strand starting at position 2745 of SEQ ID NO: 1879742
ugcgcuuacccgguaguga

SEQ ID NO: 1929401 - RNA, 19 nt, Artificial Sequence
  Description of Artificial Sequence: Synthetic oligonucleotide
  Antisense strand to SEQ ID NO: 1929400
ucacuaccggguaagcgca

SEQ ID NO: 1929402 - RNA, 19 nt, Artificial Sequence
  Description of Artificial Sequence: Synthetic oligonucleotide
  Sense strand starting at position 2747 of SEQ ID NO: 1879742
cgcuuacccgguagugaug

SEQ ID NO: 1929403 - RNA, 19 nt, Artificial Sequence
  Description of Artificial Sequence: Synthetic oligonucleotide
  Antisense strand to SEQ ID NO: 1929402
caucacuaccggguaagcg

SEQ ID NO: 1929404 - RNA, 19 nt, Artificial Sequence
  Description of Artificial Sequence: Synthetic oligonucleotide
  Sense strand starting at position 3295 of SEQ ID NO: 1879742
acguuaucuguuugacaaa

SEQ ID NO: 1929405 - RNA, 19 nt, Artificial Sequence
  Description of Artificial Sequence: Synthetic oligonucleotide
  Antisense strand to SEQ ID NO: 1929404
uuugucaaacagauaacgu

SEQ ID NO: 1929406 - RNA, 19 nt, Artificial Sequence
  Description of Artificial Sequence: Synthetic oligonucleotide
  Sense strand starting at position 3320 of SEQ ID NO: 1879742
gaucuuaauuaaguggcua

SEQ ID NO: 1929407 - RNA, 19 nt, Artificial Sequence
  Description of Artificial Sequence: Synthetic oligonucleotide
  Antisense strand to SEQ ID NO: 1929406
uagccacuuaauuaagauc

SEQ ID NO: 1929408 - RNA, 19 nt, Artificial Sequence
  Description of Artificial Sequence: Synthetic oligonucleotide
  Sense strand starting at position 3343 of SEQ ID NO: 1879742
agaaauccuguauacuguu

SEQ ID NO: 1929409 - RNA, 19 nt, Artificial Sequence
  Description of Artificial Sequence: Synthetic oligonucleotide
  Antisense strand to SEQ ID NO: 1929408
aacaguauacaggauuucu

SEQ ID NO: 1929410 - RNA, 19 nt, Artificial Sequence
  Description of Artificial Sequence: Synthetic oligonucleotide
  Sense strand starting at position 3365 of SEQ ID NO: 1879742
acccuagauuguguaauau

SEQ ID NO: 1929411 - RNA, 19 nt, Artificial Sequence
  Description of Artificial Sequence: Synthetic oligonucleotide
  Antisense strand to SEQ ID NO: 1929410
auauuacacaaucuagggu

SEQ ID NO: 1929412 - RNA, 19 nt, Artificial Sequence
  Description of Artificial Sequence: Synthetic oligonucleotide
  Sense strand starting at position 3374 of SEQ ID NO: 1879742
uguguaauaugaccuaggu

SEQ ID NO: 1929413 - RNA, 19 nt, Artificial Sequence
  Description of Artificial Sequence: Synthetic oligonucleotide
  Antisense strand to SEQ ID NO: 1929412
accuaggucauauuacaca

SEQ ID NO: 1929414 - RNA, 19 nt, Artificial Sequence
  Description of Artificial Sequence: Synthetic oligonucleotide
  Sense strand starting at position 3378 of SEQ ID NO: 1879742
uaauaugaccuagguuuga

SEQ ID NO: 1929415 - RNA, 19 nt, Artificial Sequence
  Description of Artificial Sequence: Synthetic oligonucleotide
  Antisense strand to SEQ ID NO: 1929414
ucaaaccuaggucauauua

SEQ ID NO: 1929416 - RNA, 19 nt, Artificial Sequence
  Description of Artificial Sequence: Synthetic oligonucleotide
  Sense strand starting at position 3404 of SEQ ID NO: 1879742
uuugguauugguuaguaaa

SEQ ID NO: 1929417 - RNA, 19 nt, Artificial Sequence
  Description of Artificial Sequence: Synthetic oligonucleotide
  Antisense strand to SEQ ID NO: 1929416
uuuacuaaccaauaccaaa

SEQ ID NO: 1929418 - RNA, 19 nt, Artificial Sequence
  Description of Artificial Sequence: Synthetic oligonucleotide
  Sense strand starting at position 3496 of SEQ ID NO: 1879742
accuuauagaguuguaagg

SEQ ID NO: 1929419 - RNA, 19 nt, Artificial Sequence
  Description of Artificial Sequence: Synthetic oligonucleotide
  Antisense strand to SEQ ID NO: 1929418
ccuuacaacucuauaaggu

SEQ ID NO: 1929420 - RNA, 19 nt, Artificial Sequence
  Description of Artificial Sequence: Synthetic oligonucleotide
  Sense strand starting at position 3582 of SEQ ID NO: 1879742
gggagagacuggucacuug

SEQ ID NO: 1929421 - RNA, 19 nt, Artificial Sequence
  Description of Artificial Sequence: Synthetic oligonucleotide
  Antisense strand to SEQ ID NO: 1929420
caagugaccagucucuccc

SEQ ID NO: 1929422 - RNA, 19 nt, Artificial Sequence
  Description of Artificial Sequence: Synthetic oligonucleotide
  Sense strand starting at position 3603 of SEQ ID NO: 1879742
cuuagaaggccuuggucau

SEQ ID NO: 1929423 - RNA, 19 nt, Artificial Sequence
  Description of Artificial Sequence: Synthetic oligonucleotide
  Antisense strand to SEQ ID NO: 1929422
augaccaaggccuucuaag

SEQ ID NO: 1929424 - RNA, 19 nt, Artificial Sequence
  Description of Artificial Sequence: Synthetic oligonucleotide
  Sense strand starting at position 3604 of SEQ ID NO: 1879742
uuagaaggccuuggucauu

SEQ ID NO: 1929425 - RNA, 19 nt, Artificial Sequence
  Description of Artificial Sequence: Synthetic oligonucleotide
  Antisense strand to SEQ ID NO: 1929424
aaugaccaaggccuucuaa

SEQ ID NO: 1929426 - RNA, 19 nt, Artificial Sequence
  Description of Artificial Sequence: Synthetic oligonucleotide
  Sense strand starting at position 3669 of SEQ ID NO: 1879742
gcuagcugauucccaaaca

SEQ ID NO: 1929427 - RNA, 19 nt, Artificial Sequence
  Description of Artificial Sequence: Synthetic oligonucleotide
  Antisense strand to SEQ ID NO: 1929426
uguuugggaaucagcuagc

SEQ ID NO: 1929428 - RNA, 19 nt, Artificial Sequence
  Description of Artificial Sequence: Synthetic oligonucleotide
  Sense strand starting at position 3953 of SEQ ID NO: 1879742
gcuggauggccugagacua

SEQ ID NO: 1929429 - RNA, 19 nt, Artificial Sequence
  Description of Artificial Sequence: Synthetic oligonucleotide
  Antisense strand to SEQ ID NO: 1929428
uagucucaggccauccagc

SEQ ID NO: 1929430 - RNA, 19 nt, Artificial Sequence
  Description of Artificial Sequence: Synthetic oligonucleotide
  Sense strand starting at position 153 of SEQ ID NO: 1879743
cauuuaaagccucgugcaa

SEQ ID NO: 1929431 - RNA, 19 nt, Artificial Sequence
  Description of Artificial Sequence: Synthetic oligonucleotide
  Antisense strand to SEQ ID NO: 1929430
uugcacgaggcuuuaaaug

SEQ ID NO: 1929432 - RNA, 19 nt, Artificial Sequence
  Description of Artificial Sequence: Synthetic oligonucleotide
  Sense strand starting at position 235 of SEQ ID NO: 1879743
ggauaugggucacugagca

SEQ ID NO: 1929433 - RNA, 19 nt, Artificial Sequence
  Description of Artificial Sequence: Synthetic oligonucleotide
  Antisense strand to SEQ ID NO: 1929432
ugcucagugacccauaucc

SEQ ID NO: 1929434 - RNA, 19 nt, Artificial Sequence
  Description of Artificial Sequence: Synthetic oligonucleotide
  Sense strand starting at position 417 of SEQ ID NO: 1879743
aaaugucuaggcuaguaau

SEQ ID NO: 1929435 - RNA, 19 nt, Artificial Sequence
  Description of Artificial Sequence: Synthetic oligonucleotide
  Antisense strand to SEQ ID NO: 1929434
auuacuagccuagacauuu

SEQ ID NO: 1929436 - RNA, 19 nt, Artificial Sequence
  Description of Artificial Sequence: Synthetic oligonucleotide
  Sense strand starting at position 686 of SEQ ID NO: 1879743
caggcuuacuaugugacaa

SEQ ID NO: 1929437 - RNA, 19 nt, Artificial Sequence
  Description of Artificial Sequence: Synthetic oligonucleotide
  Antisense strand to SEQ ID NO: 1929436
uugucacauaguaagccug

SEQ ID NO: 1929438 - RNA, 19 nt, Artificial Sequence
  Description of Artificial Sequence: Synthetic oligonucleotide
  Sense strand starting at position 687 of SEQ ID NO: 1879743
aggcuuacuaugugacaag

SEQ ID NO: 1929439 - RNA, 19 nt, Artificial Sequence
  Description of Artificial Sequence: Synthetic oligonucleotide
  Antisense strand to SEQ ID NO: 1929438
cuugucacauaguaagccu

SEQ ID NO: 1929440 - RNA, 19 nt, Artificial Sequence
  Description of Artificial Sequence: Synthetic oligonucleotide
  Sense strand starting at position 701 of SEQ ID NO: 1879743
acaagcacuuguuccaaga

SEQ ID NO: 1929441 - RNA, 19 nt, Artificial Sequence
  Description of Artificial Sequence: Synthetic oligonucleotide
  Antisense strand to SEQ ID NO: 1929440
ucuuggaacaagugcuugu

SEQ ID NO: 1929442 - RNA, 19 nt, Artificial Sequence
  Description of Artificial Sequence: Synthetic oligonucleotide
  Sense strand starting at position 748 of SEQ ID NO: 1879743
ucaacucaacucugaggua

SEQ ID NO: 1929443 - RNA, 19 nt, Artificial Sequence
  Description of Artificial Sequence: Synthetic oligonucleotide
  Antisense strand to SEQ ID NO: 1929442
uaccucagaguugaguuga

SEQ ID NO: 1929444 - RNA, 19 nt, Artificial Sequence
  Description of Artificial Sequence: Synthetic oligonucleotide
  Sense strand starting at position 818 of SEQ ID NO: 1879743
ugugccagacacugaaaua

SEQ ID NO: 1929445 - RNA, 19 nt, Artificial Sequence
  Description of Artificial Sequence: Synthetic oligonucleotide
  Antisense strand to SEQ ID NO: 1929444
uauuucagugucuggcaca

SEQ ID NO: 1929446 - RNA, 19 nt, Artificial Sequence
  Description of Artificial Sequence: Synthetic oligonucleotide
  Sense strand starting at position 949 of SEQ ID NO: 1879743
gaugauguuggaugauguu

SEQ ID NO: 1929447 - RNA, 19 nt, Artificial Sequence
  Description of Artificial Sequence: Synthetic oligonucleotide
  Antisense strand to SEQ ID NO: 1929446
aacaucauccaacaucauc

SEQ ID NO: 1929448 - RNA, 19 nt, Artificial Sequence
  Description of Artificial Sequence: Synthetic oligonucleotide
  Sense strand starting at position 964 of SEQ ID NO: 1879743
uguuaagugcuauagagaa

SEQ ID NO: 1929449 - RNA, 19 nt, Artificial Sequence
  Description of Artificial Sequence: Synthetic oligonucleotide
  Antisense strand to SEQ ID NO: 1929448
uucucuauagcacuuaaca

SEQ ID NO: 1929450 - RNA, 19 nt, Artificial Sequence
  Description of Artificial Sequence: Synthetic oligonucleotide
  Sense strand starting at position 1138 of SEQ ID NO: 1879743
ugagaacacgccuaucaaa

SEQ ID NO: 1929451 - RNA, 19 nt, Artificial Sequence
  Description of Artificial Sequence: Synthetic oligonucleotide
  Antisense strand to SEQ ID NO: 1929450
uuugauaggcguguucuca

SEQ ID NO: 1929452 - RNA, 19 nt, Artificial Sequence
  Description of Artificial Sequence: Synthetic oligonucleotide
  Sense strand starting at position 1176 of SEQ ID NO: 1879743
uggacacuugguugauaga

SEQ ID NO: 1929453 - RNA, 19 nt, Artificial Sequence
  Description of Artificial Sequence: Synthetic oligonucleotide
  Antisense strand to SEQ ID NO: 1929452
ucuaucaaccaagugucca

SEQ ID NO: 1929454 - RNA, 19 nt, Artificial Sequence
  Description of Artificial Sequence: Synthetic oligonucleotide
  Sense strand starting at position 1325 of SEQ ID NO: 1879743
cacuguuggccagaacauc

SEQ ID NO: 1929455 - RNA, 19 nt, Artificial Sequence
  Description of Artificial Sequence: Synthetic oligonucleotide
  Antisense strand to SEQ ID NO: 1929454
gauguucuggccaacagug

SEQ ID NO: 1929456 - RNA, 19 nt, Artificial Sequence
  Description of Artificial Sequence: Synthetic oligonucleotide
  Sense strand starting at position 1616 of SEQ ID NO: 1879743
agauguugguucucuaaau

SEQ ID NO: 1929457 - RNA, 19 nt, Artificial Sequence
  Description of Artificial Sequence: Synthetic oligonucleotide
  Antisense strand to SEQ ID NO: 1929456
auuuagagaaccaacaucu

SEQ ID NO: 1929458 - RNA, 19 nt, Artificial Sequence
  Description of Artificial Sequence: Synthetic oligonucleotide
  Sense strand starting at position 1793 of SEQ ID NO: 1879743
ccugaaauaugguuaguuc

SEQ ID NO: 1929459 - RNA, 19 nt, Artificial Sequence
  Description of Artificial Sequence: Synthetic oligonucleotide
  Antisense strand to SEQ ID NO: 1929458
gaacuaaccauauuucagg

SEQ ID NO: 1929460 - RNA, 19 nt, Artificial Sequence
  Description of Artificial Sequence: Synthetic oligonucleotide
  Sense strand starting at position 1820 of SEQ ID NO: 1879743
auguguucugaguaucaaa

SEQ ID NO: 1929461 - RNA, 19 nt, Artificial Sequence
  Description of Artificial Sequence: Synthetic oligonucleotide
  Antisense strand to SEQ ID NO: 1929460
uuugauacucagaacacau

SEQ ID NO: 1929462 - RNA, 19 nt, Artificial Sequence
  Description of Artificial Sequence: Synthetic oligonucleotide
  Sense strand starting at position 1850 of SEQ ID NO: 1879743
aucugaagaccugguauua

SEQ ID NO: 1929463 - RNA, 19 nt, Artificial Sequence
  Description of Artificial Sequence: Synthetic oligonucleotide
  Antisense strand to SEQ ID NO: 1929462
uaauaccaggucuucagau

SEQ ID NO: 1929464 - RNA, 19 nt, Artificial Sequence
  Description of Artificial Sequence: Synthetic oligonucleotide
  Sense strand starting at position 2021 of SEQ ID NO: 1879743
uggauauauuagguuaacu

SEQ ID NO: 1929465 - RNA, 19 nt, Artificial Sequence
  Description of Artificial Sequence: Synthetic oligonucleotide
  Antisense strand to SEQ ID NO: 1929464
aguuaaccuaauauaucca

SEQ ID NO: 1929466 - RNA, 19 nt, Artificial Sequence
  Description of Artificial Sequence: Synthetic oligonucleotide
  Sense strand starting at position 2179 of SEQ ID NO: 1879743
auaggauacagcugagauc

SEQ ID NO: 1929467 - RNA, 19 nt, Artificial Sequence
  Description of Artificial Sequence: Synthetic oligonucleotide
  Antisense strand to SEQ ID NO: 1929466
gaucucagcuguauccuau

SEQ ID NO: 1929468 - RNA, 19 nt, Artificial Sequence
  Description of Artificial Sequence: Synthetic oligonucleotide
  Sense strand starting at position 2188 of SEQ ID NO: 1879743
agcugagauccacaguaug

SEQ ID NO: 1929469 - RNA, 19 nt, Artificial Sequence
  Description of Artificial Sequence: Synthetic oligonucleotide
  Antisense strand to SEQ ID NO: 1929468
cauacuguggaucucagcu

SEQ ID NO: 1929470 - RNA, 19 nt, Artificial Sequence
  Description of Artificial Sequence: Synthetic oligonucleotide
  Sense strand starting at position 2191 of SEQ ID NO: 1879743
ugagauccacaguaugcuu

SEQ ID NO: 1929471 - RNA, 19 nt, Artificial Sequence
  Description of Artificial Sequence: Synthetic oligonucleotide
  Antisense strand to SEQ ID NO: 1929470
aagcauacuguggaucuca

SEQ ID NO: 1929472 - RNA, 19 nt, Artificial Sequence
  Description of Artificial Sequence: Synthetic oligonucleotide
  Sense strand starting at position 2198 of SEQ ID NO: 1879743
cacaguaugcuuuagggaa

SEQ ID NO: 1929473 - RNA, 19 nt, Artificial Sequence
  Description of Artificial Sequence: Synthetic oligonucleotide
  Antisense strand to SEQ ID NO: 1929472
uucccuaaagcauacugug

SEQ ID NO: 1929474 - RNA, 19 nt, Artificial Sequence
  Description of Artificial Sequence: Synthetic oligonucleotide
  Sense strand starting at position 2205 of SEQ ID NO: 1879743
ugcuuuagggaauaagguu

SEQ ID NO: 1929475 - RNA, 19 nt, Artificial Sequence
  Description of Artificial Sequence: Synthetic oligonucleotide
  Antisense strand to SEQ ID NO: 1929474
aaccuuauucccuaaagca

SEQ ID NO: 1929476 - RNA, 19 nt, Artificial Sequence
  Description of Artificial Sequence: Synthetic oligonucleotide
  Sense strand starting at position 2213 of SEQ ID NO: 1879743
ggaauaagguucuuacuag

SEQ ID NO: 1929477 - RNA, 19 nt, Artificial Sequence
  Description of Artificial Sequence: Synthetic oligonucleotide
  Antisense strand to SEQ ID NO: 1929476
cuaguaagaaccuuauucc

SEQ ID NO: 1929478 - RNA, 19 nt, Artificial Sequence
  Description of Artificial Sequence: Synthetic oligonucleotide
  Sense strand starting at position 3153 of SEQ ID NO: 1879743
caacgaauacaaugaguga

SEQ ID NO: 1929479 - RNA, 19 nt, Artificial Sequence
  Description of Artificial Sequence: Synthetic oligonucleotide
  Antisense strand to SEQ ID NO: 1929478
ucacucauuguauucguug

SEQ ID NO: 1929480 - RNA, 19 nt, Artificial Sequence
  Description of Artificial Sequence: Synthetic oligonucleotide
  Sense strand starting at position 3167 of SEQ ID NO: 1879743
agugaaacuugauuagauc

SEQ ID NO: 1929481 - RNA, 19 nt, Artificial Sequence
  Description of Artificial Sequence: Synthetic oligonucleotide
  Antisense strand to SEQ ID NO: 1929480
gaucuaaucaaguuucacu

SEQ ID NO: 1929482 - RNA, 19 nt, Artificial Sequence
  Description of Artificial Sequence: Synthetic oligonucleotide
  Sense strand starting at position 3249 of SEQ ID NO: 1879743
ggugauguuacaggauuag

SEQ ID NO: 1929483 - RNA, 19 nt, Artificial Sequence
  Description of Artificial Sequence: Synthetic oligonucleotide
  Antisense strand to SEQ ID NO: 1929482
cuaauccuguaacaucacc

SEQ ID NO: 1929484 - RNA, 19 nt, Artificial Sequence
  Description of Artificial Sequence: Synthetic oligonucleotide
  Sense strand starting at position 3255 of SEQ ID NO: 1879743
guuacaggauuaguguuaa

SEQ ID NO: 1929485 - RNA, 19 nt, Artificial Sequence
  Description of Artificial Sequence: Synthetic oligonucleotide
  Antisense strand to SEQ ID NO: 1929484
uuaacacuaauccuguaac

SEQ ID NO: 1929486 - RNA, 19 nt, Artificial Sequence
  Description of Artificial Sequence: Synthetic oligonucleotide
  Sense strand starting at position 3292 of SEQ ID NO: 1879743
uguuauugagauuaugcaa

SEQ ID NO: 1929487 - RNA, 19 nt, Artificial Sequence
  Description of Artificial Sequence: Synthetic oligonucleotide
  Antisense strand to SEQ ID NO: 1929486
uugcauaaucucaauaaca

SEQ ID NO: 1929488 - RNA, 19 nt, Artificial Sequence
  Description of Artificial Sequence: Synthetic oligonucleotide
  Sense strand starting at position 3312 of SEQ ID NO: 1879743
agugucuaggagugaaaug

SEQ ID NO: 1929489 - RNA, 19 nt, Artificial Sequence
  Description of Artificial Sequence: Synthetic oligonucleotide
  Antisense strand to SEQ ID NO: 1929488
cauuucacuccuagacacu

SEQ ID NO: 1929490 - RNA, 19 nt, Artificial Sequence
  Description of Artificial Sequence: Synthetic oligonucleotide
  Sense strand starting at position 3313 of SEQ ID NO: 1879743
gugucuaggagugaaaugu

SEQ ID NO: 1929491 - RNA, 19 nt, Artificial Sequence
  Description of Artificial Sequence: Synthetic oligonucleotide
  Antisense strand to SEQ ID NO: 1929490
acauuucacuccuagacac

SEQ ID NO: 1929492 - RNA, 19 nt, Artificial Sequence
  Description of Artificial Sequence: Synthetic oligonucleotide
  Sense strand starting at position 3321 of SEQ ID NO: 1879743
gagugaaauguggguaccu

SEQ ID NO: 1929493 - RNA, 19 nt, Artificial Sequence
  Description of Artificial Sequence: Synthetic oligonucleotide
  Antisense strand to SEQ ID NO: 1929492
agguacccacauuucacuc

SEQ ID NO: 1929494 - RNA, 19 nt, Artificial Sequence
  Description of Artificial Sequence: Synthetic oligonucleotide
  Sense strand starting at position 3322 of SEQ ID NO: 1879743
agugaaauguggguaccua

SEQ ID NO: 1929495 - RNA, 19 nt, Artificial Sequence
  Description of Artificial Sequence: Synthetic oligonucleotide
  Antisense strand to SEQ ID NO: 1929494
uagguacccacauuucacu

SEQ ID NO: 1929496 - RNA, 19 nt, Artificial Sequence
  Description of Artificial Sequence: Synthetic oligonucleotide
  Sense strand starting at position 3326 of SEQ ID NO: 1879743
aaauguggguaccuagaga

SEQ ID NO: 1929497 - RNA, 19 nt, Artificial Sequence
  Description of Artificial Sequence: Synthetic oligonucleotide
  Antisense strand to SEQ ID NO: 1929496
ucucuagguacccacauuu

SEQ ID NO: 1929498 - RNA, 19 nt, Artificial Sequence
  Description of Artificial Sequence: Synthetic oligonucleotide
  Sense strand starting at position 3334 of SEQ ID NO: 1879743
guaccuagagaauguaaau

SEQ ID NO: 1929499 - RNA, 19 nt, Artificial Sequence
  Description of Artificial Sequence: Synthetic oligonucleotide
  Antisense strand to SEQ ID NO: 1929498
auuuacauucucuagguac

SEQ ID NO: 1929500 - RNA, 19 nt, Artificial Sequence
  Description of Artificial Sequence: Synthetic oligonucleotide
  Sense strand starting at position 3518 of SEQ ID NO: 1879743
uguauacauguuggauaua

SEQ ID NO: 1929501 - RNA, 19 nt, Artificial Sequence
  Description of Artificial Sequence: Synthetic oligonucleotide
  Antisense strand to SEQ ID NO: 1929500
uauauccaacauguauaca

SEQ ID NO: 1929502 - RNA, 19 nt, Artificial Sequence
  Description of Artificial Sequence: Synthetic oligonucleotide
  Sense strand starting at position 3717 of SEQ ID NO: 1879743
uuaaauguucccuauguaa

SEQ ID NO: 1929503 - RNA, 19 nt, Artificial Sequence
  Description of Artificial Sequence: Synthetic oligonucleotide
  Antisense strand to SEQ ID NO: 1929502
uuacauagggaacauuuaa

SEQ ID NO: 1929504 - RNA, 19 nt, Artificial Sequence
  Description of Artificial Sequence: Synthetic oligonucleotide
  Sense strand starting at position 3891 of SEQ ID NO: 1879743
uuggauuaucuuugcuaaa

SEQ ID NO: 1929505 - RNA, 19 nt, Artificial Sequence
  Description of Artificial Sequence: Synthetic oligonucleotide
  Antisense strand to SEQ ID NO: 1929504
uuuagcaaagauaauccaa

SEQ ID NO: 1929506 - RNA, 19 nt, Artificial Sequence
  Description of Artificial Sequence: Synthetic oligonucleotide
  Sense strand starting at position 3892 of SEQ ID NO: 1879743
uggauuaucuuugcuaaau

SEQ ID NO: 1929507 - RNA, 19 nt, Artificial Sequence
  Description of Artificial Sequence: Synthetic oligonucleotide
  Antisense strand to SEQ ID NO: 1929506
auuuagcaaagauaaucca

SEQ ID NO: 1929508 - RNA, 19 nt, Artificial Sequence
  Description of Artificial Sequence: Synthetic oligonucleotide
  Sense strand starting at position 3893 of SEQ ID NO: 1879743
ggauuaucuuugcuaaaua

SEQ ID NO: 1929509 - RNA, 19 nt, Artificial Sequence
  Description of Artificial Sequence: Synthetic oligonucleotide
  Antisense strand to SEQ ID NO: 1929508
uauuuagcaaagauaaucc

SEQ ID NO: 1929510 - RNA, 19 nt, Artificial Sequence
  Description of Artificial Sequence: Synthetic oligonucleotide
  Sense strand starting at position 63 of SEQ ID NO: 1879744
aggagccguauuugucaau

SEQ ID NO: 1929511 - RNA, 19 nt, Artificial Sequence
  Description of Artificial Sequence: Synthetic oligonucleotide
  Antisense strand to SEQ ID NO: 1929510
auugacaaauacggcuccu

SEQ ID NO: 1929512 - RNA, 19 nt, Artificial Sequence
  Description of Artificial Sequence: Synthetic oligonucleotide
  Sense strand starting at position 64 of SEQ ID NO: 1879744
ggagccguauuugucaauu

SEQ ID NO: 1929513 - RNA, 19 nt, Artificial Sequence
  Description of Artificial Sequence: Synthetic oligonucleotide
  Antisense strand to SEQ ID NO: 1929512
aauugacaaauacggcucc

SEQ ID NO: 1929514 - RNA, 19 nt, Artificial Sequence
  Description of Artificial Sequence: Synthetic oligonucleotide
  Sense strand starting at position 297 of SEQ ID NO: 1879744
gcuucuuuaauagggagau

SEQ ID NO: 1929515 - RNA, 19 nt, Artificial Sequence
  Description of Artificial Sequence: Synthetic oligonucleotide
  Antisense strand to SEQ ID NO: 1929514
aucucccuauuaaagaagc

SEQ ID NO: 1929516 - RNA, 19 nt, Artificial Sequence
  Description of Artificial Sequence: Synthetic oligonucleotide
  Sense strand starting at position 437 of SEQ ID NO: 1879744
cuugguuugucacuaauuu

SEQ ID NO: 1929517 - RNA, 19 nt, Artificial Sequence
  Description of Artificial Sequence: Synthetic oligonucleotide
  Antisense strand to SEQ ID NO: 1929516
aaauuagugacaaaccaag

SEQ ID NO: 1929518 - RNA, 19 nt, Artificial Sequence
  Description of Artificial Sequence: Synthetic oligonucleotide
  Sense strand starting at position 824 of SEQ ID NO: 1879744
aaaugaaagcguuggauaa

SEQ ID NO: 1929519 - RNA, 19 nt, Artificial Sequence
  Description of Artificial Sequence: Synthetic oligonucleotide
  Antisense strand to SEQ ID NO: 1929518
uuauccaacgcuuucauuu

SEQ ID NO: 1929520 - RNA, 19 nt, Artificial Sequence
  Description of Artificial Sequence: Synthetic oligonucleotide
  Sense strand starting at position 825 of SEQ ID NO: 1879744
aaugaaagcguuggauaag

SEQ ID NO: 1929521 - RNA, 19 nt, Artificial Sequence
  Description of Artificial Sequence: Synthetic oligonucleotide
  Antisense strand to SEQ ID NO: 1929520
cuuauccaacgcuuucauu

SEQ ID NO: 1929522 - RNA, 19 nt, Artificial Sequence
  Description of Artificial Sequence: Synthetic oligonucleotide
  Sense strand starting at position 836 of SEQ ID NO: 1879744
uggauaagauguccuuucu

SEQ ID NO: 1929523 - RNA, 19 nt, Artificial Sequence
  Description of Artificial Sequence: Synthetic oligonucleotide
  Antisense strand to SEQ ID NO: 1929522
agaaaggacaucuuaucca

SEQ ID NO: 1929524 - RNA, 19 nt, Artificial Sequence
  Description of Artificial Sequence: Synthetic oligonucleotide
  Sense strand starting at position 929 of SEQ ID NO: 1879744
cuaaucuugccggaaacuc

SEQ ID NO: 1929525 - RNA, 19 nt, Artificial Sequence
  Description of Artificial Sequence: Synthetic oligonucleotide
  Antisense strand to SEQ ID NO: 1929524
gaguuuccggcaagauuag

SEQ ID NO: 1929526 - RNA, 19 nt, Artificial Sequence
  Description of Artificial Sequence: Synthetic oligonucleotide
  Sense strand starting at position 951 of SEQ ID NO: 1879744
ccauccaaucugggaauua

SEQ ID NO: 1929527 - RNA, 19 nt, Artificial Sequence
  Description of Artificial Sequence: Synthetic oligonucleotide
  Antisense strand to SEQ ID NO: 1929526
uaauucccagauuggaugg

SEQ ID NO: 1929528 - RNA, 19 nt, Artificial Sequence
  Description of Artificial Sequence: Synthetic oligonucleotide
  Sense strand starting at position 1022 of SEQ ID NO: 1879744
ucucauuuacuuuguguua

SEQ ID NO: 1929529 - RNA, 19 nt, Artificial Sequence
  Description of Artificial Sequence: Synthetic oligonucleotide
  Antisense strand to SEQ ID NO: 1929528
uaacacaaaguaaaugaga

SEQ ID NO: 1929530 - RNA, 19 nt, Artificial Sequence
  Description of Artificial Sequence: Synthetic oligonucleotide
  Sense strand starting at position 1209 of SEQ ID NO: 1879744
ucugucauacauuaguaaa

SEQ ID NO: 1929531 - RNA, 19 nt, Artificial Sequence
  Description of Artificial Sequence: Synthetic oligonucleotide
  Antisense strand to SEQ ID NO: 1929530
uuuacuaauguaugacaga

SEQ ID NO: 1929532 - RNA, 19 nt, Artificial Sequence
  Description of Artificial Sequence: Synthetic oligonucleotide
  Sense strand starting at position 1296 of SEQ ID NO: 1879744
uauaacagucucugaugga

SEQ ID NO: 1929533 - RNA, 19 nt, Artificial Sequence
  Description of Artificial Sequence: Synthetic oligonucleotide
  Antisense strand to SEQ ID NO: 1929532
uccaucagagacuguuaua

SEQ ID NO: 1929534 - RNA, 19 nt, Artificial Sequence
  Description of Artificial Sequence: Synthetic oligonucleotide
  Sense strand starting at position 1311 of SEQ ID NO: 1879744
uggagaugauagcagauuu

SEQ ID NO: 1929535 - RNA, 19 nt, Artificial Sequence
  Description of Artificial Sequence: Synthetic oligonucleotide
  Antisense strand to SEQ ID NO: 1929534
aaaucugcuaucaucucca

SEQ ID NO: 1929536 - RNA, 19 nt, Artificial Sequence
  Description of Artificial Sequence: Synthetic oligonucleotide
  Sense strand starting at position 1372 of SEQ ID NO: 1879744
auaugauacuaugugacau

SEQ ID NO: 1929537 - RNA, 19 nt, Artificial Sequence
  Description of Artificial Sequence: Synthetic oligonucleotide
  Antisense strand to SEQ ID NO: 1929536
augucacauaguaucauau

SEQ ID NO: 1929538 - RNA, 19 nt, Artificial Sequence
  Description of Artificial Sequence: Synthetic oligonucleotide
  Sense strand starting at position 1384 of SEQ ID NO: 1879744
gugacauauugauucuaaa

SEQ ID NO: 1929539 - RNA, 19 nt, Artificial Sequence
  Description of Artificial Sequence: Synthetic oligonucleotide
  Antisense strand to SEQ ID NO: 1929538
uuuagaaucaauaugucac

SEQ ID NO: 1929540 - RNA, 19 nt, Artificial Sequence
  Description of Artificial Sequence: Synthetic oligonucleotide
  Sense strand starting at position 1415 of SEQ ID NO: 1879744
uuggcuauuuaugcuuaua

SEQ ID NO: 1929541 - RNA, 19 nt, Artificial Sequence
  Description of Artificial Sequence: Synthetic oligonucleotide
  Antisense strand to SEQ ID NO: 1929540
uauaagcauaaauagccaa

SEQ ID NO: 1929542 - RNA, 19 nt, Artificial Sequence
  Description of Artificial Sequence: Synthetic oligonucleotide
  Sense strand starting at position 1418 of SEQ ID NO: 1879744
gcuauuuaugcuuauagcu

SEQ ID NO: 1929543 - RNA, 19 nt, Artificial Sequence
  Description of Artificial Sequence: Synthetic oligonucleotide
  Antisense strand to SEQ ID NO: 1929542
agcuauaagcauaaauagc

SEQ ID NO: 1929544 - RNA, 19 nt, Artificial Sequence
  Description of Artificial Sequence: Synthetic oligonucleotide
  Sense strand starting at position 1516 of SEQ ID NO: 1879744
aguugauuaauagguauga

SEQ ID NO: 1929545 - RNA, 19 nt, Artificial Sequence
  Description of Artificial Sequence: Synthetic oligonucleotide
  Antisense strand to SEQ ID NO: 1929544
ucauaccuauuaaucaacu

SEQ ID NO: 1929546 - RNA, 19 nt, Artificial Sequence
  Description of Artificial Sequence: Synthetic oligonucleotide
  Sense strand starting at position 1517 of SEQ ID NO: 1879744
guugauuaauagguaugaa

SEQ ID NO: 1929547 - RNA, 19 nt, Artificial Sequence
  Description of Artificial Sequence: Synthetic oligonucleotide
  Antisense strand to SEQ ID NO: 1929546
uucauaccuauuaaucaac

SEQ ID NO: 1929548 - RNA, 19 nt, Artificial Sequence
  Description of Artificial Sequence: Synthetic oligonucleotide
  Sense strand starting at position 1681 of SEQ ID NO: 1879744
ggcaauggauauccuaauu

SEQ ID NO: 1929549 - RNA, 19 nt, Artificial Sequence
  Description of Artificial Sequence: Synthetic oligonucleotide
  Antisense strand to SEQ ID NO: 1929548
aauuaggauauccauugcc

SEQ ID NO: 1929550 - RNA, 19 nt, Artificial Sequence
  Description of Artificial Sequence: Synthetic oligonucleotide
  Sense strand starting at position 1857 of SEQ ID NO: 1879744
gcaggugagacuuaugguu

SEQ ID NO: 1929551 - RNA, 19 nt, Artificial Sequence
  Description of Artificial Sequence: Synthetic oligonucleotide
  Antisense strand to SEQ ID NO: 1929550
aaccauaagucucaccugc

SEQ ID NO: 1929552 - RNA, 19 nt, Artificial Sequence
  Description of Artificial Sequence: Synthetic oligonucleotide
  Sense strand starting at position 1862 of SEQ ID NO: 1879744
ugagacuuaugguuuguaa

SEQ ID NO: 1929553 - RNA, 19 nt, Artificial Sequence
  Description of Artificial Sequence: Synthetic oligonucleotide
  Antisense strand to SEQ ID NO: 1929552
uuacaaaccauaagucuca

SEQ ID NO: 1929554 - RNA, 19 nt, Artificial Sequence
  Description of Artificial Sequence: Synthetic oligonucleotide
  Sense strand starting at position 2040 of SEQ ID NO: 1879744
aagacagcacgagguuaau

SEQ ID NO: 1929555 - RNA, 19 nt, Artificial Sequence
  Description of Artificial Sequence: Synthetic oligonucleotide
  Antisense strand to SEQ ID NO: 1929554
auuaaccucgugcugucuu

SEQ ID NO: 1929556 - RNA, 19 nt, Artificial Sequence
  Description of Artificial Sequence: Synthetic oligonucleotide
  Sense strand starting at position 2504 of SEQ ID NO: 1879744
acuacuugcccuuaugagu

SEQ ID NO: 1929557 - RNA, 19 nt, Artificial Sequence
  Description of Artificial Sequence: Synthetic oligonucleotide
  Antisense strand to SEQ ID NO: 1929556
acucauaagggcaaguagu

SEQ ID NO: 1929558 - RNA, 19 nt, Artificial Sequence
  Description of Artificial Sequence: Synthetic oligonucleotide
  Sense strand starting at position 2515 of SEQ ID NO: 1879744
uuaugaguucuauacccug

SEQ ID NO: 1929559 - RNA, 19 nt, Artificial Sequence
  Description of Artificial Sequence: Synthetic oligonucleotide
  Antisense strand to SEQ ID NO: 1929558
caggguauagaacucauaa

SEQ ID NO: 1929560 - RNA, 19 nt, Artificial Sequence
  Description of Artificial Sequence: Synthetic oligonucleotide
  Sense strand starting at position 2518 of SEQ ID NO: 1879744
ugaguucuauacccugacu

SEQ ID NO: 1929561 - RNA, 19 nt, Artificial Sequence
  Description of Artificial Sequence: Synthetic oligonucleotide
  Antisense strand to SEQ ID NO: 1929560
agucaggguauagaacuca

SEQ ID NO: 1929562 - RNA, 19 nt, Artificial Sequence
  Description of Artificial Sequence: Synthetic oligonucleotide
  Sense strand starting at position 2756 of SEQ ID NO: 1879744
cauguucucugaucuagga

SEQ ID NO: 1929563 - RNA, 19 nt, Artificial Sequence
  Description of Artificial Sequence: Synthetic oligonucleotide
  Antisense strand to SEQ ID NO: 1929562
uccuagaucagagaacaug

SEQ ID NO: 1929564 - RNA, 19 nt, Artificial Sequence
  Description of Artificial Sequence: Synthetic oligonucleotide
  Sense strand starting at position 2760 of SEQ ID NO: 1879744
uucucugaucuaggaauga

SEQ ID NO: 1929565 - RNA, 19 nt, Artificial Sequence
  Description of Artificial Sequence: Synthetic oligonucleotide
  Antisense strand to SEQ ID NO: 1929564
ucauuccuagaucagagaa

SEQ ID NO: 1929566 - RNA, 19 nt, Artificial Sequence
  Description of Artificial Sequence: Synthetic oligonucleotide
  Sense strand starting at position 3073 of SEQ ID NO: 1879744
guuacuaugaaagaagugu

SEQ ID NO: 1929567 - RNA, 19 nt, Artificial Sequence
  Description of Artificial Sequence: Synthetic oligonucleotide
  Antisense strand to SEQ ID NO: 1929566
acacuucuuucauaguaac

SEQ ID NO: 1929568 - RNA, 19 nt, Artificial Sequence
  Description of Artificial Sequence: Synthetic oligonucleotide
  Sense strand starting at position 3077 of SEQ ID NO: 1879744
cuaugaaagaagugugacu

SEQ ID NO: 1929569 - RNA, 19 nt, Artificial Sequence
  Description of Artificial Sequence: Synthetic oligonucleotide
  Antisense strand to SEQ ID NO: 1929568
agucacacuucuuucauag

SEQ ID NO: 1929570 - RNA, 19 nt, Artificial Sequence
  Description of Artificial Sequence: Synthetic oligonucleotide
  Sense strand starting at position 3135 of SEQ ID NO: 1879744
gauggugggucuuucuuaa

SEQ ID NO: 1929571 - RNA, 19 nt, Artificial Sequence
  Description of Artificial Sequence: Synthetic oligonucleotide
  Antisense strand to SEQ ID NO: 1929570
uuaagaaagacccaccauc

SEQ ID NO: 1929572 - RNA, 19 nt, Artificial Sequence
  Description of Artificial Sequence: Synthetic oligonucleotide
  Sense strand starting at position 3142 of SEQ ID NO: 1879744
ggucuuucuuaauuaagga

SEQ ID NO: 1929573 - RNA, 19 nt, Artificial Sequence
  Description of Artificial Sequence: Synthetic oligonucleotide
  Antisense strand to SEQ ID NO: 1929572
uccuuaauuaagaaagacc

SEQ ID NO: 1929574 - RNA, 19 nt, Artificial Sequence
  Description of Artificial Sequence: Synthetic oligonucleotide
  Sense strand starting at position 3319 of SEQ ID NO: 1879744
aauauaagccucugggaag

SEQ ID NO: 1929575 - RNA, 19 nt, Artificial Sequence
  Description of Artificial Sequence: Synthetic oligonucleotide
  Antisense strand to SEQ ID NO: 1929574
cuucccagaggcuuauauu

SEQ ID NO: 1929576 - RNA, 19 nt, Artificial Sequence
  Description of Artificial Sequence: Synthetic oligonucleotide
  Sense strand starting at position 3392 of SEQ ID NO: 1879744
aguuccacuugggucaaua

SEQ ID NO: 1929577 - RNA, 19 nt, Artificial Sequence
  Description of Artificial Sequence: Synthetic oligonucleotide
  Antisense strand to SEQ ID NO: 1929576
uauugacccaaguggaacu

SEQ ID NO: 1929578 - RNA, 19 nt, Artificial Sequence
  Description of Artificial Sequence: Synthetic oligonucleotide
  Sense strand starting at position 3904 of SEQ ID NO: 1879744
agggcuguugguuaugaaa

SEQ ID NO: 1929579 - RNA, 19 nt, Artificial Sequence
  Description of Artificial Sequence: Synthetic oligonucleotide
  Antisense strand to SEQ ID NO: 1929578
uuucauaaccaacagcccu

SEQ ID NO: 1929580 - RNA, 19 nt, Artificial Sequence
  Description of Artificial Sequence: Synthetic oligonucleotide
  Sense strand starting at position 3931 of SEQ ID NO: 1879744
agaagcagucuuugaccua

SEQ ID NO: 1929581 - RNA, 19 nt, Artificial Sequence
  Description of Artificial Sequence: Synthetic oligonucleotide
  Antisense strand to SEQ ID NO: 1929580
uaggucaaagacugcuucu

SEQ ID NO: 1929582 - RNA, 19 nt, Artificial Sequence
  Description of Artificial Sequence: Synthetic oligonucleotide
  Sense strand starting at position 3938 of SEQ ID NO: 1879744
gucuuugaccuauagucca

SEQ ID NO: 1929583 - RNA, 19 nt, Artificial Sequence
  Description of Artificial Sequence: Synthetic oligonucleotide
  Antisense strand to SEQ ID NO: 1929582
uggacuauaggucaaagac

SEQ ID NO: 1929584 - RNA, 19 nt, Artificial Sequence
  Description of Artificial Sequence: Synthetic oligonucleotide
  Sense strand starting at position 3946 of SEQ ID NO: 1879744
ccuauaguccaagggcaau

SEQ ID NO: 1929585 - RNA, 19 nt, Artificial Sequence
  Description of Artificial Sequence: Synthetic oligonucleotide
  Antisense strand to SEQ ID NO: 1929584
auugcccuuggacuauagg

SEQ ID NO: 1929586 - RNA, 19 nt, Artificial Sequence
  Description of Artificial Sequence: Synthetic oligonucleotide
  Sense strand starting at position 3958 of SEQ ID NO: 1879744
gggcaaucuaggcaguuua

SEQ ID NO: 1929587 - RNA, 19 nt, Artificial Sequence
  Description of Artificial Sequence: Synthetic oligonucleotide
  Antisense strand to SEQ ID NO: 1929586
uaaacugccuagauugccc

SEQ ID NO: 1929588 - RNA, 19 nt, Artificial Sequence
  Description of Artificial Sequence: Synthetic oligonucleotide
  Sense strand starting at position 3979 of SEQ ID NO: 1879744
uuagucaauccucaguuua

SEQ ID NO: 1929589 - RNA, 19 nt, Artificial Sequence
  Description of Artificial Sequence: Synthetic oligonucleotide
  Antisense strand to SEQ ID NO: 1929588
uaaacugaggauugacuaa

SEQ ID NO: 1929590 - RNA, 19 nt, Artificial Sequence
  Description of Artificial Sequence: Synthetic oligonucleotide
  Sense strand starting at position 231 of SEQ ID NO: 1879745
guaauaaugcuggaguuug

SEQ ID NO: 1929591 - RNA, 19 nt, Artificial Sequence
  Description of Artificial Sequence: Synthetic oligonucleotide
  Antisense strand to SEQ ID NO: 1929590
caaacuccagcauuauuac

SEQ ID NO: 1929592 - RNA, 19 nt, Artificial Sequence
  Description of Artificial Sequence: Synthetic oligonucleotide
  Sense strand starting at position 574 of SEQ ID NO: 1879745
uuaagucugcaauauauga

SEQ ID NO: 1929593 - RNA, 19 nt, Artificial Sequence
  Description of Artificial Sequence: Synthetic oligonucleotide
  Antisense strand to SEQ ID NO: 1929592
ucauauauugcagacuuaa

SEQ ID NO: 1929594 - RNA, 19 nt, Artificial Sequence
  Description of Artificial Sequence: Synthetic oligonucleotide
  Sense strand starting at position 624 of SEQ ID NO: 1879745
ggacucccacucugacaaa

SEQ ID NO: 1929595 - RNA, 19 nt, Artificial Sequence
  Description of Artificial Sequence: Synthetic oligonucleotide
  Antisense strand to SEQ ID NO: 1929594
uuugucagagugggagucc

SEQ ID NO: 1929596 - RNA, 19 nt, Artificial Sequence
  Description of Artificial Sequence: Synthetic oligonucleotide
  Sense strand starting at position 652 of SEQ ID NO: 1879745
agacuauagcaguguuaag

SEQ ID NO: 1929597 - RNA, 19 nt, Artificial Sequence
  Description of Artificial Sequence: Synthetic oligonucleotide
  Antisense strand to SEQ ID NO: 1929596
cuuaacacugcuauagucu

SEQ ID NO: 1929598 - RNA, 19 nt, Artificial Sequence
  Description of Artificial Sequence: Synthetic oligonucleotide
  Sense strand starting at position 690 of SEQ ID NO: 1879745
guguuuauuauacaaggua

SEQ ID NO: 1929599 - RNA, 19 nt, Artificial Sequence
  Description of Artificial Sequence: Synthetic oligonucleotide
  Antisense strand to SEQ ID NO: 1929598
uaccuuguauaauaaacac

SEQ ID NO: 1929600 - RNA, 19 nt, Artificial Sequence
  Description of Artificial Sequence: Synthetic oligonucleotide
  Sense strand starting at position 1181 of SEQ ID NO: 1879745
cuccaaugaguccaguuaa

SEQ ID NO: 1929601 - RNA, 19 nt, Artificial Sequence
  Description of Artificial Sequence: Synthetic oligonucleotide
  Antisense strand to SEQ ID NO: 1929600
uuaacuggacucauuggag

SEQ ID NO: 1929602 - RNA, 19 nt, Artificial Sequence
  Description of Artificial Sequence: Synthetic oligonucleotide
  Sense strand starting at position 1222 of SEQ ID NO: 1879745
agaaccagucaguauucuu

SEQ ID NO: 1929603 - RNA, 19 nt, Artificial Sequence
  Description of Artificial Sequence: Synthetic oligonucleotide
  Antisense strand to SEQ ID NO: 1929602
aagaauacugacugguucu

SEQ ID NO: 1929604 - RNA, 19 nt, Artificial Sequence
  Description of Artificial Sequence: Synthetic oligonucleotide
  Sense strand starting at position 1225 of SEQ ID NO: 1879745
accagucaguauucuuaaa

SEQ ID NO: 1929605 - RNA, 19 nt, Artificial Sequence
  Description of Artificial Sequence: Synthetic oligonucleotide
  Antisense strand to SEQ ID NO: 1929604
uuuaagaauacugacuggu

SEQ ID NO: 1929606 - RNA, 19 nt, Artificial Sequence
  Description of Artificial Sequence: Synthetic oligonucleotide
  Sense strand starting at position 1290 of SEQ ID NO: 1879745
uuuccuuauugucugggaa

SEQ ID NO: 1929607 - RNA, 19 nt, Artificial Sequence
  Description of Artificial Sequence: Synthetic oligonucleotide
  Antisense strand to SEQ ID NO: 1929606
uucccagacaauaaggaaa

SEQ ID NO: 1929608 - RNA, 19 nt, Artificial Sequence
  Description of Artificial Sequence: Synthetic oligonucleotide
  Sense strand starting at position 1291 of SEQ ID NO: 1879745
uuccuuauugucugggaau

SEQ ID NO: 1929609 - RNA, 19 nt, Artificial Sequence
  Description of Artificial Sequence: Synthetic oligonucleotide
  Antisense strand to SEQ ID NO: 1929608
auucccagacaauaaggaa

SEQ ID NO: 1929610 - RNA, 19 nt, Artificial Sequence
  Description of Artificial Sequence: Synthetic oligonucleotide
  Sense strand starting at position 1293 of SEQ ID NO: 1879745
ccuuauugucugggaauua

SEQ ID NO: 1929611 - RNA, 19 nt, Artificial Sequence
  Description of Artificial Sequence: Synthetic oligonucleotide
  Antisense strand to SEQ ID NO: 1929610
uaauucccagacaauaagg

SEQ ID NO: 1929612 - RNA, 19 nt, Artificial Sequence
  Description of Artificial Sequence: Synthetic oligonucleotide
  Sense strand starting at position 1398 of SEQ ID NO: 1879745
acagauuaguuugccaacu

SEQ ID NO: 1929613 - RNA, 19 nt, Artificial Sequence
  Description of Artificial Sequence: Synthetic oligonucleotide
  Antisense strand to SEQ ID NO: 1929612
aguuggcaaacuaaucugu

SEQ ID NO: 1929614 - RNA, 19 nt, Artificial Sequence
  Description of Artificial Sequence: Synthetic oligonucleotide
  Sense strand starting at position 1460 of SEQ ID NO: 1879745
aguaccuugggucauguaa

SEQ ID NO: 1929615 - RNA, 19 nt, Artificial Sequence
  Description of Artificial Sequence: Synthetic oligonucleotide
  Antisense strand to SEQ ID NO: 1929614
uuacaugacccaagguacu

SEQ ID NO: 1929616 - RNA, 19 nt, Artificial Sequence
  Description of Artificial Sequence: Synthetic oligonucleotide
  Sense strand starting at position 1638 of SEQ ID NO: 1879745
acagauguauucuuaguau

SEQ ID NO: 1929617 - RNA, 19 nt, Artificial Sequence
  Description of Artificial Sequence: Synthetic oligonucleotide
  Antisense strand to SEQ ID NO: 1929616
auacuaagaauacaucugu

SEQ ID NO: 1929618 - RNA, 19 nt, Artificial Sequence
  Description of Artificial Sequence: Synthetic oligonucleotide
  Sense strand starting at position 1658 of SEQ ID NO: 1879745
uuuccauggcuuuaaagau

SEQ ID NO: 1929619 - RNA, 19 nt, Artificial Sequence
  Description of Artificial Sequence: Synthetic oligonucleotide
  Antisense strand to SEQ ID NO: 1929618
aucuuuaaagccauggaaa

SEQ ID NO: 1929620 - RNA, 19 nt, Artificial Sequence
  Description of Artificial Sequence: Synthetic oligonucleotide
  Sense strand starting at position 1760 of SEQ ID NO: 1879745
ugacaacuacaauguuuga

SEQ ID NO: 1929621 - RNA, 19 nt, Artificial Sequence
  Description of Artificial Sequence: Synthetic oligonucleotide
  Antisense strand to SEQ ID NO: 1929620
ucaaacauuguaguuguca

SEQ ID NO: 1929622 - RNA, 19 nt, Artificial Sequence
  Description of Artificial Sequence: Synthetic oligonucleotide
  Sense strand starting at position 1774 of SEQ ID NO: 1879745
uuugacaacugguuaucaa

SEQ ID NO: 1929623 - RNA, 19 nt, Artificial Sequence
  Description of Artificial Sequence: Synthetic oligonucleotide
  Antisense strand to SEQ ID NO: 1929622
uugauaaccaguugucaaa

SEQ ID NO: 1929624 - RNA, 19 nt, Artificial Sequence
  Description of Artificial Sequence: Synthetic oligonucleotide
  Sense strand starting at position 1915 of SEQ ID NO: 1879745
gauguuguagguuaguaca

SEQ ID NO: 1929625 - RNA, 19 nt, Artificial Sequence
  Description of Artificial Sequence: Synthetic oligonucleotide
  Antisense strand to SEQ ID NO: 1929624
uguacuaaccuacaacauc

SEQ ID NO: 1929626 - RNA, 19 nt, Artificial Sequence
  Description of Artificial Sequence: Synthetic oligonucleotide
  Sense strand starting at position 2039 of SEQ ID NO: 1879745
ccagcugggacucaguuau

SEQ ID NO: 1929627 - RNA, 19 nt, Artificial Sequence
  Description of Artificial Sequence: Synthetic oligonucleotide
  Antisense strand to SEQ ID NO: 1929626
auaacugagucccagcugg

SEQ ID NO: 1929628 - RNA, 19 nt, Artificial Sequence
  Description of Artificial Sequence: Synthetic oligonucleotide
  Sense strand starting at position 2043 of SEQ ID NO: 1879745
cugggacucaguuaugcau

SEQ ID NO: 1929629 - RNA, 19 nt, Artificial Sequence
  Description of Artificial Sequence: Synthetic oligonucleotide
  Antisense strand to SEQ ID NO: 1929628
augcauaacugagucccag

SEQ ID NO: 1929630 - RNA, 19 nt, Artificial Sequence
  Description of Artificial Sequence: Synthetic oligonucleotide
  Sense strand starting at position 2130 of SEQ ID NO: 1879745
gcaacaagauucuugcaug

SEQ ID NO: 1929631 - RNA, 19 nt, Artificial Sequence
  Description of Artificial Sequence: Synthetic oligonucleotide
  Antisense strand to SEQ ID NO: 1929630
caugcaagaaucuuguugc

SEQ ID NO: 1929632 - RNA, 19 nt, Artificial Sequence
  Description of Artificial Sequence: Synthetic oligonucleotide
  Sense strand starting at position 2141 of SEQ ID NO: 1879745
cuugcauguguuuagaaug

SEQ ID NO: 1929633 - RNA, 19 nt, Artificial Sequence
  Description of Artificial Sequence: Synthetic oligonucleotide
  Antisense strand to SEQ ID NO: 1929632
cauucuaaacacaugcaag

SEQ ID NO: 1929634 - RNA, 19 nt, Artificial Sequence
  Description of Artificial Sequence: Synthetic oligonucleotide
  Sense strand starting at position 2255 of SEQ ID NO: 1879745
gaguaaacugagggucaua

SEQ ID NO: 1929635 - RNA, 19 nt, Artificial Sequence
  Description of Artificial Sequence: Synthetic oligonucleotide
  Antisense strand to SEQ ID NO: 1929634
uaugacccucaguuuacuc

SEQ ID NO: 1929636 - RNA, 19 nt, Artificial Sequence
  Description of Artificial Sequence: Synthetic oligonucleotide
  Sense strand starting at position 2388 of SEQ ID NO: 1879745
uugcaaaggcuauaaacua

SEQ ID NO: 1929637 - RNA, 19 nt, Artificial Sequence
  Description of Artificial Sequence: Synthetic oligonucleotide
  Antisense strand to SEQ ID NO: 1929636
uaguuuauagccuuugcaa

SEQ ID NO: 1929638 - RNA, 19 nt, Artificial Sequence
  Description of Artificial Sequence: Synthetic oligonucleotide
  Sense strand starting at position 2511 of SEQ ID NO: 1879745
uagguugacugacccauaa

SEQ ID NO: 1929639 - RNA, 19 nt, Artificial Sequence
  Description of Artificial Sequence: Synthetic oligonucleotide
  Antisense strand to SEQ ID NO: 1929638
uuaugggucagucaaccua

SEQ ID NO: 1929640 - RNA, 19 nt, Artificial Sequence
  Description of Artificial Sequence: Synthetic oligonucleotide
  Sense strand starting at position 2546 of SEQ ID NO: 1879745
gagggagcuuuccuaguaa

SEQ ID NO: 1929641 - RNA, 19 nt, Artificial Sequence
  Description of Artificial Sequence: Synthetic oligonucleotide
  Antisense strand to SEQ ID NO: 1929640
uuacuaggaaagcucccuc

SEQ ID NO: 1929642 - RNA, 19 nt, Artificial Sequence
  Description of Artificial Sequence: Synthetic oligonucleotide
  Sense strand starting at position 2781 of SEQ ID NO: 1879745
cugaacauaucaguggaua

SEQ ID NO: 1929643 - RNA, 19 nt, Artificial Sequence
  Description of Artificial Sequence: Synthetic oligonucleotide
  Antisense strand to SEQ ID NO: 1929642
uauccacugauauguucag

SEQ ID NO: 1929644 - RNA, 19 nt, Artificial Sequence
  Description of Artificial Sequence: Synthetic oligonucleotide
  Sense strand starting at position 2782 of SEQ ID NO: 1879745
ugaacauaucaguggauau

SEQ ID NO: 1929645 - RNA, 19 nt, Artificial Sequence
  Description of Artificial Sequence: Synthetic oligonucleotide
  Antisense strand to SEQ ID NO: 1929644
auauccacugauauguuca

SEQ ID NO: 1929646 - RNA, 19 nt, Artificial Sequence
  Description of Artificial Sequence: Synthetic oligonucleotide
  Sense strand starting at position 2825 of SEQ ID NO: 1879745
guaguguuggaagggagau

SEQ ID NO: 1929647 - RNA, 19 nt, Artificial Sequence
  Description of Artificial Sequence: Synthetic oligonucleotide
  Antisense strand to SEQ ID NO: 1929646
aucucccuuccaacacuac

SEQ ID NO: 1929648 - RNA, 19 nt, Artificial Sequence
  Description of Artificial Sequence: Synthetic oligonucleotide
  Sense strand starting at position 2886 of SEQ ID NO: 1879745
uaaagagugcuaugggaaa

SEQ ID NO: 1929649 - RNA, 19 nt, Artificial Sequence
  Description of Artificial Sequence: Synthetic oligonucleotide
  Antisense strand to SEQ ID NO: 1929648
uuucccauagcacucuuua

SEQ ID NO: 1929650 - RNA, 19 nt, Artificial Sequence
  Description of Artificial Sequence: Synthetic oligonucleotide
  Sense strand starting at position 3144 of SEQ ID NO: 1879745
cuggaagaacuuugacuuu

SEQ ID NO: 1929651 - RNA, 19 nt, Artificial Sequence
  Description of Artificial Sequence: Synthetic oligonucleotide
  Antisense strand to SEQ ID NO: 1929650
aaagucaaaguucuuccag

SEQ ID NO: 1929652 - RNA, 19 nt, Artificial Sequence
  Description of Artificial Sequence: Synthetic oligonucleotide
  Sense strand starting at position 3190 of SEQ ID NO: 1879745
gagaaacuaguuugaggua

SEQ ID NO: 1929653 - RNA, 19 nt, Artificial Sequence
  Description of Artificial Sequence: Synthetic oligonucleotide
  Antisense strand to SEQ ID NO: 1929652
uaccucaaacuaguuucuc

SEQ ID NO: 1929654 - RNA, 19 nt, Artificial Sequence
  Description of Artificial Sequence: Synthetic oligonucleotide
  Sense strand starting at position 3552 of SEQ ID NO: 1879745
acugucuucuuuguagaaa

SEQ ID NO: 1929655 - RNA, 19 nt, Artificial Sequence
  Description of Artificial Sequence: Synthetic oligonucleotide
  Antisense strand to SEQ ID NO: 1929654
uuucuacaaagaagacagu

SEQ ID NO: 1929656 - RNA, 19 nt, Artificial Sequence
  Description of Artificial Sequence: Synthetic oligonucleotide
  Sense strand starting at position 3678 of SEQ ID NO: 1879745
gacagugacaaguguugga

SEQ ID NO: 1929657 - RNA, 19 nt, Artificial Sequence
  Description of Artificial Sequence: Synthetic oligonucleotide
  Antisense strand to SEQ ID NO: 1929656
uccaacacuugucacuguc

SEQ ID NO: 1929658 - RNA, 19 nt, Artificial Sequence
  Description of Artificial Sequence: Synthetic oligonucleotide
  Sense strand starting at position 3699 of SEQ ID NO: 1879745
guggauauacuuuacaggu

SEQ ID NO: 1929659 - RNA, 19 nt, Artificial Sequence
  Description of Artificial Sequence: Synthetic oligonucleotide
  Antisense strand to SEQ ID NO: 1929658
accuguaaaguauauccac

SEQ ID NO: 1929660 - RNA, 19 nt, Artificial Sequence
  Description of Artificial Sequence: Synthetic oligonucleotide
  Sense strand starting at position 3776 of SEQ ID NO: 1879745
ugauaauuccaaggcuuug

SEQ ID NO: 1929661 - RNA, 19 nt, Artificial Sequence
  Description of Artificial Sequence: Synthetic oligonucleotide
  Antisense strand to SEQ ID NO: 1929660
caaagccuuggaauuauca

SEQ ID NO: 1929662 - RNA, 19 nt, Artificial Sequence
  Description of Artificial Sequence: Synthetic oligonucleotide
  Sense strand starting at position 3781 of SEQ ID NO: 1879745
auuccaaggcuuugaucua

SEQ ID NO: 1929663 - RNA, 19 nt, Artificial Sequence
  Description of Artificial Sequence: Synthetic oligonucleotide
  Antisense strand to SEQ ID NO: 1929662
uagaucaaagccuuggaau

SEQ ID NO: 1929664 - RNA, 19 nt, Artificial Sequence
  Description of Artificial Sequence: Synthetic oligonucleotide
  Sense strand starting at position 3881 of SEQ ID NO: 1879745
uggacauguuaagucuaau

SEQ ID NO: 1929665 - RNA, 19 nt, Artificial Sequence
  Description of Artificial Sequence: Synthetic oligonucleotide
  Antisense strand to SEQ ID NO: 1929664
auuagacuuaacaugucca

SEQ ID NO: 1929666 - RNA, 19 nt, Artificial Sequence
  Description of Artificial Sequence: Synthetic oligonucleotide
  Sense strand starting at position 3982 of SEQ ID NO: 1879745
agauaaagauuugggaaua

SEQ ID NO: 1929667 - RNA, 19 nt, Artificial Sequence
  Description of Artificial Sequence: Synthetic oligonucleotide
  Antisense strand to SEQ ID NO: 1929666
uauucccaaaucuuuaucu

SEQ ID NO: 1929668 - RNA, 19 nt, Artificial Sequence
  Description of Artificial Sequence: Synthetic oligonucleotide
  Sense strand starting at position 3983 of SEQ ID NO: 1879745
gauaaagauuugggaauaa

SEQ ID NO: 1929669 - RNA, 19 nt, Artificial Sequence
  Description of Artificial Sequence: Synthetic oligonucleotide
  Antisense strand to SEQ ID NO: 1929668
uuauucccaaaucuuuauc

SEQ ID NO: 1929670 - RNA, 19 nt, Artificial Sequence
  Description of Artificial Sequence: Synthetic oligonucleotide
  Sense strand starting at position 15 of SEQ ID NO: 1879746
cgcugagcaccuguuucua

SEQ ID NO: 1929671 - RNA, 19 nt, Artificial Sequence
  Description of Artificial Sequence: Synthetic oligonucleotide
  Antisense strand to SEQ ID NO: 1929670
uagaaacaggugcucagcg

SEQ ID NO: 1929672 - RNA, 19 nt, Artificial Sequence
  Description of Artificial Sequence: Synthetic oligonucleotide
  Sense strand starting at position 84 of SEQ ID NO: 1879746
uuuaaauugguugggcaua

SEQ ID NO: 1929673 - RNA, 19 nt, Artificial Sequence
  Description of Artificial Sequence: Synthetic oligonucleotide
  Antisense strand to SEQ ID NO: 1929672
uaugcccaaccaauuuaaa

SEQ ID NO: 1929674 - RNA, 19 nt, Artificial Sequence
  Description of Artificial Sequence: Synthetic oligonucleotide
  Sense strand starting at position 85 of SEQ ID NO: 1879746
uuaaauugguugggcauaa

SEQ ID NO: 1929675 - RNA, 19 nt, Artificial Sequence
  Description of Artificial Sequence: Synthetic oligonucleotide
  Antisense strand to SEQ ID NO: 1929674
uuaugcccaaccaauuuaa

SEQ ID NO: 1929676 - RNA, 19 nt, Artificial Sequence
  Description of Artificial Sequence: Synthetic oligonucleotide
  Sense strand starting at position 86 of SEQ ID NO: 1879746
uaaauugguugggcauaau

SEQ ID NO: 1929677 - RNA, 19 nt, Artificial Sequence
  Description of Artificial Sequence: Synthetic oligonucleotide
  Antisense strand to SEQ ID NO: 1929676
auuaugcccaaccaauuua

SEQ ID NO: 1929678 - RNA, 19 nt, Artificial Sequence
  Description of Artificial Sequence: Synthetic oligonucleotide
  Sense strand starting at position 273 of SEQ ID NO: 1879746
ccgaauaucuuagaagauu

SEQ ID NO: 1929679 - RNA, 19 nt, Artificial Sequence
  Description of Artificial Sequence: Synthetic oligonucleotide
  Antisense strand to SEQ ID NO: 1929678
aaucuucuaagauauucgg

SEQ ID NO: 1929680 - RNA, 19 nt, Artificial Sequence
  Description of Artificial Sequence: Synthetic oligonucleotide
  Sense strand starting at position 488 of SEQ ID NO: 1879746
ggugguuccuccuaauuua

SEQ ID NO: 1929681 - RNA, 19 nt, Artificial Sequence
  Description of Artificial Sequence: Synthetic oligonucleotide
  Antisense strand to SEQ ID NO: 1929680
uaaauuaggaggaaccacc

SEQ ID NO: 1929682 - RNA, 19 nt, Artificial Sequence
  Description of Artificial Sequence: Synthetic oligonucleotide
  Sense strand starting at position 504 of SEQ ID NO: 1879746
uuagguuacuggucuugca

SEQ ID NO: 1929683 - RNA, 19 nt, Artificial Sequence
  Description of Artificial Sequence: Synthetic oligonucleotide
  Antisense strand to SEQ ID NO: 1929682
ugcaagaccaguaaccuaa

SEQ ID NO: 1929684 - RNA, 19 nt, Artificial Sequence
  Description of Artificial Sequence: Synthetic oligonucleotide
  Sense strand starting at position 507 of SEQ ID NO: 1879746
gguuacuggucuugcaaca

SEQ ID NO: 1929685 - RNA, 19 nt, Artificial Sequence
  Description of Artificial Sequence: Synthetic oligonucleotide
  Antisense strand to SEQ ID NO: 1929684
uguugcaagaccaguaacc

SEQ ID NO: 1929686 - RNA, 19 nt, Artificial Sequence
  Description of Artificial Sequence: Synthetic oligonucleotide
  Sense strand starting at position 512 of SEQ ID NO: 1879746
cuggucuugcaacagaaga

SEQ ID NO: 1929687 - RNA, 19 nt, Artificial Sequence
  Description of Artificial Sequence: Synthetic oligonucleotide
  Antisense strand to SEQ ID NO: 1929686
ucuucuguugcaagaccag

SEQ ID NO: 1929688 - RNA, 19 nt, Artificial Sequence
  Description of Artificial Sequence: Synthetic oligonucleotide
  Sense strand starting at position 771 of SEQ ID NO: 1879746
ugcaaacacuugugauaau

SEQ ID NO: 1929689 - RNA, 19 nt, Artificial Sequence
  Description of Artificial Sequence: Synthetic oligonucleotide
  Antisense strand to SEQ ID NO: 1929688
auuaucacaaguguuugca

SEQ ID NO: 1929690 - RNA, 19 nt, Artificial Sequence
  Description of Artificial Sequence: Synthetic oligonucleotide
  Sense strand starting at position 772 of SEQ ID NO: 1879746
gcaaacacuugugauaauc

SEQ ID NO: 1929691 - RNA, 19 nt, Artificial Sequence
  Description of Artificial Sequence: Synthetic oligonucleotide
  Antisense strand to SEQ ID NO: 1929690
gauuaucacaaguguuugc

SEQ ID NO: 1929692 - RNA, 19 nt, Artificial Sequence
  Description of Artificial Sequence: Synthetic oligonucleotide
  Sense strand starting at position 857 of SEQ ID NO: 1879746
agagccauccucugcggaa

SEQ ID NO: 1929693 - RNA, 19 nt, Artificial Sequence
  Description of Artificial Sequence: Synthetic oligonucleotide
  Antisense strand to SEQ ID NO: 1929692
uuccgcagaggauggcucu

SEQ ID NO: 1929694 - RNA, 19 nt, Artificial Sequence
  Description of Artificial Sequence: Synthetic oligonucleotide
  Sense strand starting at position 859 of SEQ ID NO: 1879746
agccauccucugcggaaga

SEQ ID NO: 1929695 - RNA, 19 nt, Artificial Sequence
  Description of Artificial Sequence: Synthetic oligonucleotide
  Antisense strand to SEQ ID NO: 1929694
ucuuccgcagaggauggcu

SEQ ID NO: 1929696 - RNA, 19 nt, Artificial Sequence
  Description of Artificial Sequence: Synthetic oligonucleotide
  Sense strand starting at position 884 of SEQ ID NO: 1879746
aaaggaggcgucuggacau

SEQ ID NO: 1929697 - RNA, 19 nt, Artificial Sequence
  Description of Artificial Sequence: Synthetic oligonucleotide
  Antisense strand to SEQ ID NO: 1929696
auguccagacgccuccuuu

SEQ ID NO: 1929698 - RNA, 19 nt, Artificial Sequence
  Description of Artificial Sequence: Synthetic oligonucleotide
  Sense strand starting at position 1203 of SEQ ID NO: 1879746
guaugagaguccgucucaa

SEQ ID NO: 1929699 - RNA, 19 nt, Artificial Sequence
  Description of Artificial Sequence: Synthetic oligonucleotide
  Antisense strand to SEQ ID NO: 1929698
uugagacggacucucauac

SEQ ID NO: 1929700 - RNA, 19 nt, Artificial Sequence
  Description of Artificial Sequence: Synthetic oligonucleotide
  Sense strand starting at position 1509 of SEQ ID NO: 1879746
uugacacauuguuguuaac

SEQ ID NO: 1929701 - RNA, 19 nt, Artificial Sequence
  Description of Artificial Sequence: Synthetic oligonucleotide
  Antisense strand to SEQ ID NO: 1929700
guuaacaacaaugugucaa

SEQ ID NO: 1929702 - RNA, 19 nt, Artificial Sequence
  Description of Artificial Sequence: Synthetic oligonucleotide
  Sense strand starting at position 1511 of SEQ ID NO: 1879746
gacacauuguuguuaacug

SEQ ID NO: 1929703 - RNA, 19 nt, Artificial Sequence
  Description of Artificial Sequence: Synthetic oligonucleotide
  Antisense strand to SEQ ID NO: 1929702
caguuaacaacaauguguc

SEQ ID NO: 1929704 - RNA, 19 nt, Artificial Sequence
  Description of Artificial Sequence: Synthetic oligonucleotide
  Sense strand starting at position 1512 of SEQ ID NO: 1879746
acacauuguuguuaacuga

SEQ ID NO: 1929705 - RNA, 19 nt, Artificial Sequence
  Description of Artificial Sequence: Synthetic oligonucleotide
  Antisense strand to SEQ ID NO: 1929704
ucaguuaacaacaaugugu

SEQ ID NO: 1929706 - RNA, 19 nt, Artificial Sequence
  Description of Artificial Sequence: Synthetic oligonucleotide
  Sense strand starting at position 1562 of SEQ ID NO: 1879746
cugugcauuccauggacuu

SEQ ID NO: 1929707 - RNA, 19 nt, Artificial Sequence
  Description of Artificial Sequence: Synthetic oligonucleotide
  Antisense strand to SEQ ID NO: 1929706
aaguccauggaaugcacag

SEQ ID NO: 1929708 - RNA, 19 nt, Artificial Sequence
  Description of Artificial Sequence: Synthetic oligonucleotide
  Sense strand starting at position 1600 of SEQ ID NO: 1879746
uggauccaccauuguaaga

SEQ ID NO: 1929709 - RNA, 19 nt, Artificial Sequence
  Description of Artificial Sequence: Synthetic oligonucleotide
  Antisense strand to SEQ ID NO: 1929708
ucuuacaaugguggaucca

SEQ ID NO: 1929710 - RNA, 19 nt, Artificial Sequence
  Description of Artificial Sequence: Synthetic oligonucleotide
  Sense strand starting at position 1928 of SEQ ID NO: 1879746
aagagugggucgccuagaa

SEQ ID NO: 1929711 - RNA, 19 nt, Artificial Sequence
  Description of Artificial Sequence: Synthetic oligonucleotide
  Antisense strand to SEQ ID NO: 1929710
uucuaggcgacccacucuu

SEQ ID NO: 1929712 - RNA, 19 nt, Artificial Sequence
  Description of Artificial Sequence: Synthetic oligonucleotide
  Sense strand starting at position 2216 of SEQ ID NO: 1879746
aggagucucugggucacau

SEQ ID NO: 1929713 - RNA, 19 nt, Artificial Sequence
  Description of Artificial Sequence: Synthetic oligonucleotide
  Antisense strand to SEQ ID NO: 1929712
augugacccagagacuccu

SEQ ID NO: 1929714 - RNA, 19 nt, Artificial Sequence
  Description of Artificial Sequence: Synthetic oligonucleotide
  Sense strand starting at position 2569 of SEQ ID NO: 1879746
cccugaagguucccacaca

SEQ ID NO: 1929715 - RNA, 19 nt, Artificial Sequence
  Description of Artificial Sequence: Synthetic oligonucleotide
  Antisense strand to SEQ ID NO: 1929714
ugugugggaaccuucaggg

SEQ ID NO: 1929716 - RNA, 19 nt, Artificial Sequence
  Description of Artificial Sequence: Synthetic oligonucleotide
  Sense strand starting at position 2872 of SEQ ID NO: 1879746
cugggugugcccuaggaaa

SEQ ID NO: 1929717 - RNA, 19 nt, Artificial Sequence
  Description of Artificial Sequence: Synthetic oligonucleotide
  Antisense strand to SEQ ID NO: 1929716
uuuccuagggcacacccag

SEQ ID NO: 1929718 - RNA, 19 nt, Artificial Sequence
  Description of Artificial Sequence: Synthetic oligonucleotide
  Sense strand starting at position 2992 of SEQ ID NO: 1879746
ucuccugacuucugacagu

SEQ ID NO: 1929719 - RNA, 19 nt, Artificial Sequence
  Description of Artificial Sequence: Synthetic oligonucleotide
  Antisense strand to SEQ ID NO: 1929718
acugucagaagucaggaga

SEQ ID NO: 1929720 - RNA, 19 nt, Artificial Sequence
  Description of Artificial Sequence: Synthetic oligonucleotide
  Sense strand starting at position 3003 of SEQ ID NO: 1879746
cugacaguuucucugcuua

SEQ ID NO: 1929721 - RNA, 19 nt, Artificial Sequence
  Description of Artificial Sequence: Synthetic oligonucleotide
  Antisense strand to SEQ ID NO: 1929720
uaagcagagaaacugucag

SEQ ID NO: 1929722 - RNA, 19 nt, Artificial Sequence
  Description of Artificial Sequence: Synthetic oligonucleotide
  Sense strand starting at position 3013 of SEQ ID NO: 1879746
cucugcuuacucugaaguu

SEQ ID NO: 1929723 - RNA, 19 nt, Artificial Sequence
  Description of Artificial Sequence: Synthetic oligonucleotide
  Antisense strand to SEQ ID NO: 1929722
aacuucagaguaagcagag

SEQ ID NO: 1929724 - RNA, 19 nt, Artificial Sequence
  Description of Artificial Sequence: Synthetic oligonucleotide
  Sense strand starting at position 3038 of SEQ ID NO: 1879746
uuuguccuguuucuacaaa

SEQ ID NO: 1929725 - RNA, 19 nt, Artificial Sequence
  Description of Artificial Sequence: Synthetic oligonucleotide
  Antisense strand to SEQ ID NO: 1929724
uuuguagaaacaggacaaa

SEQ ID NO: 1929726 - RNA, 19 nt, Artificial Sequence
  Description of Artificial Sequence: Synthetic oligonucleotide
  Sense strand starting at position 3137 of SEQ ID NO: 1879746
ccaagaacauuccuugguu

SEQ ID NO: 1929727 - RNA, 19 nt, Artificial Sequence
  Description of Artificial Sequence: Synthetic oligonucleotide
  Antisense strand to SEQ ID NO: 1929726
aaccaaggaauguucuugg

SEQ ID NO: 1929728 - RNA, 19 nt, Artificial Sequence
  Description of Artificial Sequence: Synthetic oligonucleotide
  Sense strand starting at position 3190 of SEQ ID NO: 1879746
gccgaguuccugggacguu

SEQ ID NO: 1929729 - RNA, 19 nt, Artificial Sequence
  Description of Artificial Sequence: Synthetic oligonucleotide
  Antisense strand to SEQ ID NO: 1929728
aacgucccaggaacucggc

SEQ ID NO: 1929730 - RNA, 19 nt, Artificial Sequence
  Description of Artificial Sequence: Synthetic oligonucleotide
  Sense strand starting at position 3191 of SEQ ID NO: 1879746
ccgaguuccugggacguuu

SEQ ID NO: 1929731 - RNA, 19 nt, Artificial Sequence
  Description of Artificial Sequence: Synthetic oligonucleotide
  Antisense strand to SEQ ID NO: 1929730
aaacgucccaggaacucgg

SEQ ID NO: 1929732 - RNA, 19 nt, Artificial Sequence
  Description of Artificial Sequence: Synthetic oligonucleotide
  Sense strand starting at position 3333 of SEQ ID NO: 1879746
gugugucucucagccuauu

SEQ ID NO: 1929733 - RNA, 19 nt, Artificial Sequence
  Description of Artificial Sequence: Synthetic oligonucleotide
  Antisense strand to SEQ ID NO: 1929732
aauaggcugagagacacac

SEQ ID NO: 1929734 - RNA, 19 nt, Artificial Sequence
  Description of Artificial Sequence: Synthetic oligonucleotide
  Sense strand starting at position 3399 of SEQ ID NO: 1879746
ucucuauuucucugcgugu

SEQ ID NO: 1929735 - RNA, 19 nt, Artificial Sequence
  Description of Artificial Sequence: Synthetic oligonucleotide
  Antisense strand to SEQ ID NO: 1929734
acacgcagagaaauagaga

SEQ ID NO: 1929736 - RNA, 19 nt, Artificial Sequence
  Description of Artificial Sequence: Synthetic oligonucleotide
  Sense strand starting at position 3400 of SEQ ID NO: 1879746
cucuauuucucugcguguu

SEQ ID NO: 1929737 - RNA, 19 nt, Artificial Sequence
  Description of Artificial Sequence: Synthetic oligonucleotide
  Antisense strand to SEQ ID NO: 1929736
aacacgcagagaaauagag

SEQ ID NO: 1929738 - RNA, 19 nt, Artificial Sequence
  Description of Artificial Sequence: Synthetic oligonucleotide
  Sense strand starting at position 3401 of SEQ ID NO: 1879746
ucuauuucucugcguguuu

SEQ ID NO: 1929739 - RNA, 19 nt, Artificial Sequence
  Description of Artificial Sequence: Synthetic oligonucleotide
  Antisense strand to SEQ ID NO: 1929738
aaacacgcagagaaauaga

SEQ ID NO: 1929740 - RNA, 19 nt, Artificial Sequence
  Description of Artificial Sequence: Synthetic oligonucleotide
  Sense strand starting at position 3520 of SEQ ID NO: 1879746
gucucuugcugucucucaa

SEQ ID NO: 1929741 - RNA, 19 nt, Artificial Sequence
  Description of Artificial Sequence: Synthetic oligonucleotide
  Antisense strand to SEQ ID NO: 1929740
uugagagacagcaagagac

SEQ ID NO: 1929742 - RNA, 19 nt, Artificial Sequence
  Description of Artificial Sequence: Synthetic oligonucleotide
  Sense strand starting at position 3616 of SEQ ID NO: 1879746
ggcacugauuucugacuca

SEQ ID NO: 1929743 - RNA, 19 nt, Artificial Sequence
  Description of Artificial Sequence: Synthetic oligonucleotide
  Antisense strand to SEQ ID NO: 1929742
ugagucagaaaucagugcc

SEQ ID NO: 1929744 - RNA, 19 nt, Artificial Sequence
  Description of Artificial Sequence: Synthetic oligonucleotide
  Sense strand starting at position 20 of SEQ ID NO: 1879747
uugcaauaaucuccaggga

SEQ ID NO: 1929745 - RNA, 19 nt, Artificial Sequence
  Description of Artificial Sequence: Synthetic oligonucleotide
  Antisense strand to SEQ ID NO: 1929744
ucccuggagauuauugcaa

SEQ ID NO: 1929746 - RNA, 19 nt, Artificial Sequence
  Description of Artificial Sequence: Synthetic oligonucleotide
  Sense strand starting at position 72 of SEQ ID NO: 1879747
cuagaauguguuuaacucu

SEQ ID NO: 1929747 - RNA, 19 nt, Artificial Sequence
  Description of Artificial Sequence: Synthetic oligonucleotide
  Antisense strand to SEQ ID NO: 1929746
agaguuaaacacauucuag

SEQ ID NO: 1929748 - RNA, 19 nt, Artificial Sequence
  Description of Artificial Sequence: Synthetic oligonucleotide
  Sense strand starting at position 199 of SEQ ID NO: 1879747
cccaguuuaccaugauacu

SEQ ID NO: 1929749 - RNA, 19 nt, Artificial Sequence
  Description of Artificial Sequence: Synthetic oligonucleotide
  Antisense strand to SEQ ID NO: 1929748
aguaucaugguaaacuggg

SEQ ID NO: 1929750 - RNA, 19 nt, Artificial Sequence
  Description of Artificial Sequence: Synthetic oligonucleotide
  Sense strand starting at position 232 of SEQ ID NO: 1879747
uagucaguagcccaaagaa

SEQ ID NO: 1929751 - RNA, 19 nt, Artificial Sequence
  Description of Artificial Sequence: Synthetic oligonucleotide
  Antisense strand to SEQ ID NO: 1929750
uucuuugggcuacugacua

SEQ ID NO: 1929752 - RNA, 19 nt, Artificial Sequence
  Description of Artificial Sequence: Synthetic oligonucleotide
  Sense strand starting at position 319 of SEQ ID NO: 1879747
gcauucguucagucuguca

SEQ ID NO: 1929753 - RNA, 19 nt, Artificial Sequence
  Description of Artificial Sequence: Synthetic oligonucleotide
  Antisense strand to SEQ ID NO: 1929752
ugacagacugaacgaaugc

SEQ ID NO: 1929754 - RNA, 19 nt, Artificial Sequence
  Description of Artificial Sequence: Synthetic oligonucleotide
  Sense strand starting at position 346 of SEQ ID NO: 1879747
cuagguaaugguugaauaa

SEQ ID NO: 1929755 - RNA, 19 nt, Artificial Sequence
  Description of Artificial Sequence: Synthetic oligonucleotide
  Antisense strand to SEQ ID NO: 1929754
uuauucaaccauuaccuag

SEQ ID NO: 1929756 - RNA, 19 nt, Artificial Sequence
  Description of Artificial Sequence: Synthetic oligonucleotide
  Sense strand starting at position 536 of SEQ ID NO: 1879747
guucucagaagagguuaua

SEQ ID NO: 1929757 - RNA, 19 nt, Artificial Sequence
  Description of Artificial Sequence: Synthetic oligonucleotide
  Antisense strand to SEQ ID NO: 1929756
uauaaccucuucugagaac

SEQ ID NO: 1929758 - RNA, 19 nt, Artificial Sequence
  Description of Artificial Sequence: Synthetic oligonucleotide
  Sense strand starting at position 682 of SEQ ID NO: 1879747
auuaaauacugagugggua

SEQ ID NO: 1929759 - RNA, 19 nt, Artificial Sequence
  Description of Artificial Sequence: Synthetic oligonucleotide
  Antisense strand to SEQ ID NO: 1929758
uacccacucaguauuuaau

SEQ ID NO: 1929760 - RNA, 19 nt, Artificial Sequence
  Description of Artificial Sequence: Synthetic oligonucleotide
  Sense strand starting at position 718 of SEQ ID NO: 1879747
acaugucugcuguacaaag

SEQ ID NO: 1929761 - RNA, 19 nt, Artificial Sequence
  Description of Artificial Sequence: Synthetic oligonucleotide
  Antisense strand to SEQ ID NO: 1929760
cuuuguacagcagacaugu

SEQ ID NO: 1929762 - RNA, 19 nt, Artificial Sequence
  Description of Artificial Sequence: Synthetic oligonucleotide
  Sense strand starting at position 720 of SEQ ID NO: 1879747
augucugcuguacaaagaa

SEQ ID NO: 1929763 - RNA, 19 nt, Artificial Sequence
  Description of Artificial Sequence: Synthetic oligonucleotide
  Antisense strand to SEQ ID NO: 1929762
uucuuuguacagcagacau

SEQ ID NO: 1929764 - RNA, 19 nt, Artificial Sequence
  Description of Artificial Sequence: Synthetic oligonucleotide
  Sense strand starting at position 747 of SEQ ID NO: 1879747
aagggaacauucguguauc

SEQ ID NO: 1929765 - RNA, 19 nt, Artificial Sequence
  Description of Artificial Sequence: Synthetic oligonucleotide
  Antisense strand to SEQ ID NO: 1929764
gauacacgaauguucccuu

SEQ ID NO: 1929766 - RNA, 19 nt, Artificial Sequence
  Description of Artificial Sequence: Synthetic oligonucleotide
  Sense strand starting at position 750 of SEQ ID NO: 1879747
ggaacauucguguauccca

SEQ ID NO: 1929767 - RNA, 19 nt, Artificial Sequence
  Description of Artificial Sequence: Synthetic oligonucleotide
  Antisense strand to SEQ ID NO: 1929766
ugggauacacgaauguucc

SEQ ID NO: 1929768 - RNA, 19 nt, Artificial Sequence
  Description of Artificial Sequence: Synthetic oligonucleotide
  Sense strand starting at position 788 of SEQ ID NO: 1879747
aagcgugaccaucaagcau

SEQ ID NO: 1929769 - RNA, 19 nt, Artificial Sequence
  Description of Artificial Sequence: Synthetic oligonucleotide
  Antisense strand to SEQ ID NO: 1929768
augcuugauggucacgcuu

SEQ ID NO: 1929770 - RNA, 19 nt, Artificial Sequence
  Description of Artificial Sequence: Synthetic oligonucleotide
  Sense strand starting at position 803 of SEQ ID NO: 1879747
gcaugaccucuuugaucug

SEQ ID NO: 1929771 - RNA, 19 nt, Artificial Sequence
  Description of Artificial Sequence: Synthetic oligonucleotide
  Antisense strand to SEQ ID NO: 1929770
cagaucaaagaggucaugc

SEQ ID NO: 1929772 - RNA, 19 nt, Artificial Sequence
  Description of Artificial Sequence: Synthetic oligonucleotide
  Sense strand starting at position 806 of SEQ ID NO: 1879747
ugaccucuuugaucugauu

SEQ ID NO: 1929773 - RNA, 19 nt, Artificial Sequence
  Description of Artificial Sequence: Synthetic oligonucleotide
  Antisense strand to SEQ ID NO: 1929772
aaucagaucaaagagguca

SEQ ID NO: 1929774 - RNA, 19 nt, Artificial Sequence
  Description of Artificial Sequence: Synthetic oligonucleotide
  Sense strand starting at position 831 of SEQ ID NO: 1879747
cuucguaacccagagaaau

SEQ ID NO: 1929775 - RNA, 19 nt, Artificial Sequence
  Description of Artificial Sequence: Synthetic oligonucleotide
  Antisense strand to SEQ ID NO: 1929774
auuucucuggguuacgaag

SEQ ID NO: 1929776 - RNA, 19 nt, Artificial Sequence
  Description of Artificial Sequence: Synthetic oligonucleotide
  Sense strand starting at position 1096 of SEQ ID NO: 1879747
guguaccauuuauccaguu

SEQ ID NO: 1929777 - RNA, 19 nt, Artificial Sequence
  Description of Artificial Sequence: Synthetic oligonucleotide
  Antisense strand to SEQ ID NO: 1929776
aacuggauaaaugguacac

SEQ ID NO: 1929778 - RNA, 19 nt, Artificial Sequence
  Description of Artificial Sequence: Synthetic oligonucleotide
  Sense strand starting at position 1550 of SEQ ID NO: 1879747
ucaccagucuuacccagau

SEQ ID NO: 1929779 - RNA, 19 nt, Artificial Sequence
  Description of Artificial Sequence: Synthetic oligonucleotide
  Antisense strand to SEQ ID NO: 1929778
aucuggguaagacugguga

SEQ ID NO: 1929780 - RNA, 19 nt, Artificial Sequence
  Description of Artificial Sequence: Synthetic oligonucleotide
  Sense strand starting at position 1585 of SEQ ID NO: 1879747
uaucauuuguggucugugu

SEQ ID NO: 1929781 - RNA, 19 nt, Artificial Sequence
  Description of Artificial Sequence: Synthetic oligonucleotide
  Antisense strand to SEQ ID NO: 1929780
acacagaccacaaaugaua

SEQ ID NO: 1929782 - RNA, 19 nt, Artificial Sequence
  Description of Artificial Sequence: Synthetic oligonucleotide
  Sense strand starting at position 1644 of SEQ ID NO: 1879747
aguccaucaccaugaggau

SEQ ID NO: 1929783 - RNA, 19 nt, Artificial Sequence
  Description of Artificial Sequence: Synthetic oligonucleotide
  Antisense strand to SEQ ID NO: 1929782
auccucauggugauggacu

SEQ ID NO: 1929784 - RNA, 19 nt, Artificial Sequence
  Description of Artificial Sequence: Synthetic oligonucleotide
  Sense strand starting at position 1848 of SEQ ID NO: 1879747
aguuguuuguaaucaauag

SEQ ID NO: 1929785 - RNA, 19 nt, Artificial Sequence
  Description of Artificial Sequence: Synthetic oligonucleotide
  Antisense strand to SEQ ID NO: 1929784
cuauugauuacaaacaacu

SEQ ID NO: 1929786 - RNA, 19 nt, Artificial Sequence
  Description of Artificial Sequence: Synthetic oligonucleotide
  Sense strand starting at position 1852 of SEQ ID NO: 1879747
guuuguaaucaauagcuug

SEQ ID NO: 1929787 - RNA, 19 nt, Artificial Sequence
  Description of Artificial Sequence: Synthetic oligonucleotide
  Antisense strand to SEQ ID NO: 1929786
caagcuauugauuacaaac

SEQ ID NO: 1929788 - RNA, 19 nt, Artificial Sequence
  Description of Artificial Sequence: Synthetic oligonucleotide
  Sense strand starting at position 2012 of SEQ ID NO: 1879747
aguauauucgacuauuaca

SEQ ID NO: 1929789 - RNA, 19 nt, Artificial Sequence
  Description of Artificial Sequence: Synthetic oligonucleotide
  Antisense strand to SEQ ID NO: 1929788
uguaauagucgaauauacu

SEQ ID NO: 1929790 - RNA, 19 nt, Artificial Sequence
  Description of Artificial Sequence: Synthetic oligonucleotide
  Sense strand starting at position 2100 of SEQ ID NO: 1879747
uuauuucccugggauaaac

SEQ ID NO: 1929791 - RNA, 19 nt, Artificial Sequence
  Description of Artificial Sequence: Synthetic oligonucleotide
  Antisense strand to SEQ ID NO: 1929790
guuuaucccagggaaauaa

SEQ ID NO: 1929792 - RNA, 19 nt, Artificial Sequence
  Description of Artificial Sequence: Synthetic oligonucleotide
  Sense strand starting at position 2292 of SEQ ID NO: 1879747
cugauagaugcauagugau

SEQ ID NO: 1929793 - RNA, 19 nt, Artificial Sequence
  Description of Artificial Sequence: Synthetic oligonucleotide
  Antisense strand to SEQ ID NO: 1929792
aucacuaugcaucuaucag

SEQ ID NO: 1929794 - RNA, 19 nt, Artificial Sequence
  Description of Artificial Sequence: Synthetic oligonucleotide
  Sense strand starting at position 2305 of SEQ ID NO: 1879747
agugauauguuaucauggu

SEQ ID NO: 1929795 - RNA, 19 nt, Artificial Sequence
  Description of Artificial Sequence: Synthetic oligonucleotide
  Antisense strand to SEQ ID NO: 1929794
accaugauaacauaucacu

SEQ ID NO: 1929796 - RNA, 19 nt, Artificial Sequence
  Description of Artificial Sequence: Synthetic oligonucleotide
  Sense strand starting at position 2562 of SEQ ID NO: 1879747
ccaagauuauuguccucag

SEQ ID NO: 1929797 - RNA, 19 nt, Artificial Sequence
  Description of Artificial Sequence: Synthetic oligonucleotide
  Antisense strand to SEQ ID NO: 1929796
cugaggacaauaaucuugg

SEQ ID NO: 1929798 - RNA, 19 nt, Artificial Sequence
  Description of Artificial Sequence: Synthetic oligonucleotide
  Sense strand starting at position 2582 of SEQ ID NO: 1879747
uuuaucuaugcagauggau

SEQ ID NO: 1929799 - RNA, 19 nt, Artificial Sequence
  Description of Artificial Sequence: Synthetic oligonucleotide
  Antisense strand to SEQ ID NO: 1929798
auccaucugcauagauaaa

SEQ ID NO: 1929800 - RNA, 19 nt, Artificial Sequence
  Description of Artificial Sequence: Synthetic oligonucleotide
  Sense strand starting at position 2666 of SEQ ID NO: 1879747
gauggacauugcuuauugu

SEQ ID NO: 1929801 - RNA, 19 nt, Artificial Sequence
  Description of Artificial Sequence: Synthetic oligonucleotide
  Antisense strand to SEQ ID NO: 1929800
acaauaagcaauguccauc

SEQ ID NO: 1929802 - RNA, 19 nt, Artificial Sequence
  Description of Artificial Sequence: Synthetic oligonucleotide
  Sense strand starting at position 2740 of SEQ ID NO: 1879747
cuauauaaguucucuaagg

SEQ ID NO: 1929803 - RNA, 19 nt, Artificial Sequence
  Description of Artificial Sequence: Synthetic oligonucleotide
  Antisense strand to SEQ ID NO: 1929802
ccuuagagaacuuauauag

SEQ ID NO: 1929804 - RNA, 19 nt, Artificial Sequence
  Description of Artificial Sequence: Synthetic oligonucleotide
  Sense strand starting at position 2742 of SEQ ID NO: 1879747
auauaaguucucuaaggua

SEQ ID NO: 1929805 - RNA, 19 nt, Artificial Sequence
  Description of Artificial Sequence: Synthetic oligonucleotide
  Antisense strand to SEQ ID NO: 1929804
uaccuuagagaacuuauau

SEQ ID NO: 1929806 - RNA, 19 nt, Artificial Sequence
  Description of Artificial Sequence: Synthetic oligonucleotide
  Sense strand starting at position 2788 of SEQ ID NO: 1879747
ggguaugugcauuauuaau

SEQ ID NO: 1929807 - RNA, 19 nt, Artificial Sequence
  Description of Artificial Sequence: Synthetic oligonucleotide
  Antisense strand to SEQ ID NO: 1929806
auuaauaaugcacauaccc

SEQ ID NO: 1929808 - RNA, 19 nt, Artificial Sequence
  Description of Artificial Sequence: Synthetic oligonucleotide
  Sense strand starting at position 2821 of SEQ ID NO: 1879747
cugaauuuaugccaaagaa

SEQ ID NO: 1929809 - RNA, 19 nt, Artificial Sequence
  Description of Artificial Sequence: Synthetic oligonucleotide
  Antisense strand to SEQ ID NO: 1929808
uucuuuggcauaaauucag

SEQ ID NO: 1929810 - RNA, 19 nt, Artificial Sequence
  Description of Artificial Sequence: Synthetic oligonucleotide
  Sense strand starting at position 2896 of SEQ ID NO: 1879747
uugcuagcacuugaucuua

SEQ ID NO: 1929811 - RNA, 19 nt, Artificial Sequence
  Description of Artificial Sequence: Synthetic oligonucleotide
  Antisense strand to SEQ ID NO: 1929810
uaagaucaagugcuagcaa

SEQ ID NO: 1929812 - RNA, 19 nt, Artificial Sequence
  Description of Artificial Sequence: Synthetic oligonucleotide
  Sense strand starting at position 2969 of SEQ ID NO: 1879747
auuuguauuucccaaguua

SEQ ID NO: 1929813 - RNA, 19 nt, Artificial Sequence
  Description of Artificial Sequence: Synthetic oligonucleotide
  Antisense strand to SEQ ID NO: 1929812
uaacuugggaaauacaaau

SEQ ID NO: 1929814 - RNA, 19 nt, Artificial Sequence
  Description of Artificial Sequence: Synthetic oligonucleotide
  Sense strand starting at position 3019 of SEQ ID NO: 1879747
ccuuuacuucccuggugaa

SEQ ID NO: 1929815 - RNA, 19 nt, Artificial Sequence
  Description of Artificial Sequence: Synthetic oligonucleotide
  Antisense strand to SEQ ID NO: 1929814
uucaccagggaaguaaagg

SEQ ID NO: 1929816 - RNA, 19 nt, Artificial Sequence
  Description of Artificial Sequence: Synthetic oligonucleotide
  Sense strand starting at position 3020 of SEQ ID NO: 1879747
cuuuacuucccuggugaaa

SEQ ID NO: 1929817 - RNA, 19 nt, Artificial Sequence
  Description of Artificial Sequence: Synthetic oligonucleotide
  Antisense strand to SEQ ID NO: 1929816
uuucaccagggaaguaaag

SEQ ID NO: 1929818 - RNA, 19 nt, Artificial Sequence
  Description of Artificial Sequence: Synthetic oligonucleotide
  Sense strand starting at position 3081 of SEQ ID NO: 1879747
gugucuauuuaaguuacuu

SEQ ID NO: 1929819 - RNA, 19 nt, Artificial Sequence
  Description of Artificial Sequence: Synthetic oligonucleotide
  Antisense strand to SEQ ID NO: 1929818
aaguaacuuaaauagacac

SEQ ID NO: 1929820 - RNA, 19 nt, Artificial Sequence
  Description of Artificial Sequence: Synthetic oligonucleotide
  Sense strand starting at position 3809 of SEQ ID NO: 1879747
cucggccuccuccagaauu

SEQ ID NO: 1929821 - RNA, 19 nt, Artificial Sequence
  Description of Artificial Sequence: Synthetic oligonucleotide
  Antisense strand to SEQ ID NO: 1929820
aauucuggaggaggccgag

SEQ ID NO: 1929822 - RNA, 19 nt, Artificial Sequence
  Description of Artificial Sequence: Synthetic oligonucleotide
  Sense strand starting at position 3974 of SEQ ID NO: 1879747
gggaguggaucccuaguaa

SEQ ID NO: 1929823 - RNA, 19 nt, Artificial Sequence
  Description of Artificial Sequence: Synthetic oligonucleotide
  Antisense strand to SEQ ID NO: 1929822
uuacuagggauccacuccc

SEQ ID NO: 1929824 - RNA, 19 nt, Artificial Sequence
  Description of Artificial Sequence: Synthetic oligonucleotide
  Sense strand starting at position 27 of SEQ ID NO: 1879748
cugggugacacaugagauu

SEQ ID NO: 1929825 - RNA, 19 nt, Artificial Sequence
  Description of Artificial Sequence: Synthetic oligonucleotide
  Antisense strand to SEQ ID NO: 1929824
aaucucaugugucacccag

SEQ ID NO: 1929826 - RNA, 19 nt, Artificial Sequence
  Description of Artificial Sequence: Synthetic oligonucleotide
  Sense strand starting at position 200 of SEQ ID NO: 1879748
ggcagauagcuugaguaca

SEQ ID NO: 1929827 - RNA, 19 nt, Artificial Sequence
  Description of Artificial Sequence: Synthetic oligonucleotide
  Antisense strand to SEQ ID NO: 1929826
uguacucaagcuaucugcc

SEQ ID NO: 1929828 - RNA, 19 nt, Artificial Sequence
  Description of Artificial Sequence: Synthetic oligonucleotide
  Sense strand starting at position 604 of SEQ ID NO: 1879748
gcucaaccuguaggaguau

SEQ ID NO: 1929829 - RNA, 19 nt, Artificial Sequence
  Description of Artificial Sequence: Synthetic oligonucleotide
  Antisense strand to SEQ ID NO: 1929828
auacuccuacagguugagc

SEQ ID NO: 1929830 - RNA, 19 nt, Artificial Sequence
  Description of Artificial Sequence: Synthetic oligonucleotide
  Sense strand starting at position 663 of SEQ ID NO: 1879748
ccagauccuuugcuaagga

SEQ ID NO: 1929831 - RNA, 19 nt, Artificial Sequence
  Description of Artificial Sequence: Synthetic oligonucleotide
  Antisense strand to SEQ ID NO: 1929830
uccuuagcaaaggaucugg

SEQ ID NO: 1929832 - RNA, 19 nt, Artificial Sequence
  Description of Artificial Sequence: Synthetic oligonucleotide
  Sense strand starting at position 724 of SEQ ID NO: 1879748
aagugcuaacucugugaua

SEQ ID NO: 1929833 - RNA, 19 nt, Artificial Sequence
  Description of Artificial Sequence: Synthetic oligonucleotide
  Antisense strand to SEQ ID NO: 1929832
uaucacagaguuagcacuu

SEQ ID NO: 1929834 - RNA, 19 nt, Artificial Sequence
  Description of Artificial Sequence: Synthetic oligonucleotide
  Sense strand starting at position 725 of SEQ ID NO: 1879748
agugcuaacucugugauau

SEQ ID NO: 1929835 - RNA, 19 nt, Artificial Sequence
  Description of Artificial Sequence: Synthetic oligonucleotide
  Antisense strand to SEQ ID NO: 1929834
auaucacagaguuagcacu

SEQ ID NO: 1929836 - RNA, 19 nt, Artificial Sequence
  Description of Artificial Sequence: Synthetic oligonucleotide
  Sense strand starting at position 747 of SEQ ID NO: 1879748
cuauauacccgacaggagu

SEQ ID NO: 1929837 - RNA, 19 nt, Artificial Sequence
  Description of Artificial Sequence: Synthetic oligonucleotide
  Antisense strand to SEQ ID NO: 1929836
acuccugucggguauauag

SEQ ID NO: 1929838 - RNA, 19 nt, Artificial Sequence
  Description of Artificial Sequence: Synthetic oligonucleotide
  Sense strand starting at position 793 of SEQ ID NO: 1879748
cuagaauaauuugagguuu

SEQ ID NO: 1929839 - RNA, 19 nt, Artificial Sequence
  Description of Artificial Sequence: Synthetic oligonucleotide
  Antisense strand to SEQ ID NO: 1929838
aaaccucaaauuauucuag

SEQ ID NO: 1929840 - RNA, 19 nt, Artificial Sequence
  Description of Artificial Sequence: Synthetic oligonucleotide
  Sense strand starting at position 998 of SEQ ID NO: 1879748
uaguaauggcaugaauggu

SEQ ID NO: 1929841 - RNA, 19 nt, Artificial Sequence
  Description of Artificial Sequence: Synthetic oligonucleotide
  Antisense strand to SEQ ID NO: 1929840
accauucaugccauuacua

SEQ ID NO: 1929842 - RNA, 19 nt, Artificial Sequence
  Description of Artificial Sequence: Synthetic oligonucleotide
  Sense strand starting at position 1004 of SEQ ID NO: 1879748
uggcaugaaugguucuaca

SEQ ID NO: 1929843 - RNA, 19 nt, Artificial Sequence
  Description of Artificial Sequence: Synthetic oligonucleotide
  Antisense strand to SEQ ID NO: 1929842
uguagaaccauucaugcca

SEQ ID NO: 1929844 - RNA, 19 nt, Artificial Sequence
  Description of Artificial Sequence: Synthetic oligonucleotide
  Sense strand starting at position 1076 of SEQ ID NO: 1879748
augagaaucuugcuuauua

SEQ ID NO: 1929845 - RNA, 19 nt, Artificial Sequence
  Description of Artificial Sequence: Synthetic oligonucleotide
  Antisense strand to SEQ ID NO: 1929844
uaauaagcaagauucucau

SEQ ID NO: 1929846 - RNA, 19 nt, Artificial Sequence
  Description of Artificial Sequence: Synthetic oligonucleotide
  Sense strand starting at position 1077 of SEQ ID NO: 1879748
ugagaaucuugcuuauuag

SEQ ID NO: 1929847 - RNA, 19 nt, Artificial Sequence
  Description of Artificial Sequence: Synthetic oligonucleotide
  Antisense strand to SEQ ID NO: 1929846
cuaauaagcaagauucuca

SEQ ID NO: 1929848 - RNA, 19 nt, Artificial Sequence
  Description of Artificial Sequence: Synthetic oligonucleotide
  Sense strand starting at position 1078 of SEQ ID NO: 1879748
gagaaucuugcuuauuagu

SEQ ID NO: 1929849 - RNA, 19 nt, Artificial Sequence
  Description of Artificial Sequence: Synthetic oligonucleotide
  Antisense strand to SEQ ID NO: 1929848
acuaauaagcaagauucuc
